United States Patent Application Publication US 2007/0054278 A1 - sequence listing, part 118

SEQ ID NO: 177041 - DNA, 201 bp, Homo sapiens
agcttgagatgattatgtccattttaatagagataaggtagcagagataagagactgggtaattggctcatactacaattgtgattagtaacagaggcaaygctctgcggaatccagaacccacacatgtgggtctagagtttcttctgctgccccctgccacttgtacaagtcaggcttagttaggatagaacatctttt

SEQ ID NO: 177042 - DNA, 201 bp, Homo sapiens
tatcctctgtggacaactggagctgggaaactcaaggaaacactgagaatacagcactcaggggcatcccatctgagcaccaagggagctggggtatttayccaccagctcccacttgtcattgtttgaaggctcttgcaaggagttgtttattccctgtgactttgacctgctgcacacaagggcagagtagtctcttgt

SEQ ID NO: 177043 - DNA, 201 bp, Homo sapiens
ccctgtccctgtttatttatttgagaaacactctgggcattgattctgtccgagatcctgcacggggctctgggggcatgtgcgcttgccctgactccccractgtggagcctgcctgctctccctctgtgcccttctttctggctgcactttgcttccaatctgcatgagcaccctatctgcccctgagcttaaggactc

SEQ ID NO: 177044 - DNA, 201 bp, Homo sapiens
atcacctgagcccaggaggtctatgctgcagtgagctgtgtttgcaccactgcactccagcttgggaacaaagcaagaccttgtcccaaaatcttctcttkaaaaggagaatttatttttcaaggaaatagagatctgggaggatgggctttgtgcaaaaacaggaagcagaaattacaaaatgatgggaatcctagactc

SEQ ID NO: 177045 - DNA, 201 bp, Homo sapiens
ctggtgacatcacctctgacgaatcttacaatcctgtcctctctgctgccttcctggaggtcacagcactctcctaaatggtcatgggcggagtacacgarattcatccagcaaagacttaataaacacttcctatatgccaggacttgtttaggagctggtgatataggagtaaaacaagaaagactccctgccctcttg

SEQ ID NO: 177046 - DNA, 201 bp, Homo sapiens
ctcttccccagaaccctctattccacactggcttggcagacaccttccctcaccatgtcactggccactgtaggtatcccagcctgacacacacacaaaamacacacacacacacacacacactgcaaaacactgccacagcttctccacatttttttttttttttgtaatctttgcaatgcttgagtttctggatataag

SEQ ID NO: 177047 - DNA, 201 bp, Homo sapiens
accatgtcactggccactgtaggtatcccagcctgacacacacacaaaacacacacacacacacacacacactgcaaaacactgccacagcttctccacatttttttttttttttgtaatctttgcaatgcttgagtttctggatataagcccatttgattcattgattttgcccatttcagtaaaaacccatgcctttaa

SEQ ID NO: 177048 - DNA, 201 bp, Homo sapiens
gctctaatacacatgacgggggatgtgtatccatgtaccctctgcacagaaactcagaatcctggcctgtgacatcaacaagacaggcgggagggtgtctyctgcaggattcagtatgacagagttgaatgtcatcgggttgtccccccacctcctcccgctctaacatacctgagggaggatgtgtattcatgtgccctc

SEQ ID NO: 177049 - DNA, 201 bp, Homo sapiens
agaatcctgttctgtgacatcaacaagacaagtgtttggggggtctcctgcaggattcactatgacagggttgaatgtcattgggttgtcccccagcttcytcctgctctaatacacattagggaggatgtgcatccatgtaccctctgccacagacactcagaatcctgggctatgtcatcaacaagacaggtggtggga

SEQ ID NO: 177050 - DNA, 201 bp, Homo sapiens
tgctcataactctcacttcttcacaaagtcctgataaaaccctataaccaggaccactggagttgaatcatttctgtcttaaacttggctttgccccatgytctgcatctgatctatatatagtgttcccatctccatcttccaatggtttgagcaatactgaacctctgtttttcatctgatttcccataactttgagtt

SEQ ID NO: 177051 - DNA, 201 bp, Homo sapiens
agcttcctcctgctctaatacacattagggaggatgtgcatccatgtaccctctgccacagacactcagaatcctgggctatgtcatcaacaagacaggtsgtgggacacatgcaggggtgctctaggttgagaagccaccaatcaatttccctctcccaggagcgctgagaatgtgagtgagggtgagattagagttggt

SEQ ID NO: 177052 - DNA, 201 bp, Homo sapiens
gttctgtcagaatgatcacctttattttattgctgatactcgtccggtggtgtctaaaccacaaaaaagggggagtatgatgaggcgtgtctgacctcctrtctgtttccaggcaggaactcagtttagggtttttctggggtccccttagcccagagagggtctgttcagtgagttaggggtgttaggattttattttta

SEQ ID NO: 177053 - DNA, 201 bp, Homo sapiens
ccatgtaccctctgccacagacactcagaatcctgggctatgtcatcaacaagacaggtggtgggacacatgcaggggtgctctaggttgagaagccaccmatcaatttccctctcccaggagcgctgagaatgtgagtgagggtgagattagagttggtgttaaccctgagtcaggtctaatgtgtgtcggtttgtcttt

SEQ ID NO: 177054 - DNA, 201 bp, Homo sapiens
gggtgagattagagttggtgttaaccctgagtcaggtctaatgtgtgtcggtttgtctttctgtctgtctctaacaaaaactcataaacctttacatttawtacatttaataattgttagtttagaaatcacaggattatgaattacggtttatagtcagcaggattcactgtgacaggattgaatgtcattggcttgtcc

SEQ ID NO: 177055 - DNA, 201 bp, Homo sapiens
cagaagaggagatcagacttagcaagatggtgatgaaattctgggccaactttgctcgcaatgggtgaggctcttggcaaagacacagcacagctggtgarggtggggggcggggcatgcctattgggaaggggcagcttctaaggttctagcgatcaaacttctgaccctgtgaccatagcactctgacaatgagagctc

SEQ ID NO: 177056 - DNA, 201 bp, Homo sapiens
gtcggtttgtctttctgtctgtctctaacaaaaactcataaacctttacatttattacatttaataattgttagtttagaaatcacaggattatgaattayggtttatagtcagcaggattcactgtgacaggattgaatgtcattggcttgtcccccagtttcctcctgctctaacacacatgagggaggatgtatatca

SEQ ID NO: 177057 - DNA, 201 bp, Homo sapiens
tgggaaggggcagcttctaaggttctagcgatcaaacttctgaccctgtgaccatagcactctgacaatgagagctctctacaaatggagaggccgccccyggagatagtgaactccccgtctctggagatatacaagcctcttgacggagataacttgggcgtcctcacacatctctgaagattgttggggacacacagc

SEQ ID NO: 177058 - DNA, 201 bp, Homo sapiens
gctcatgcctgtaatttctgagagtgatgtggccctcactcctgctctggtggagaagggtgacgtcaagcccctggctgaggtaggtctcccgctggatscccccaaccccttggctctgtgcttctgaattctcagaggttattcttgccatgggttctagctgatgttctcctagaatcactgaagcgattgggaggt

SEQ ID NO: 177059 - DNA, 201 bp, Homo sapiens
atctttattgtgtggaagacatggcactctcccacatgtattaactcatgaggtaggtgcagtcattattaccatccatgagtggagaaaccaaggcccaracaaatcaggtggactgcctgtggcctaatggctggtaagtggagcagccaggatttggaagcagacaagtaaattcaagattccatcatctcaacccca

SEQ ID NO: 177060 - DNA, 201 bp, Homo sapiens
ggttccgtacctcctcaaagccacccatggatcaataacagctctcatttaaatagagatagatagcacaatctctcctcattaatcatggattctgcgtytataaattcacctgcttcctaaaatgtccttataacccccaaatcgatactggtggcactttcatggtcacacacaggcaggtacagagtaggggaatct

SEQ ID NO: 177061 - DNA, 201 bp, Homo sapiens
caacatttctgaacataaagttaatatgttaaagttaatatgaagaaagtttcaaaaatatggaaacacgtaaagaagaaactacatatcactcctaattyccccacctggaggcaagtggtataaatttttttgtactttcttctaaagatttttcatgtcctatatactttaaaaatcaattttatatttcgcttttgt

SEQ ID NO: 177062 - DNA, 201 bp, Homo sapiens
tggcatgggatgaggtgctgtcttattttggtttatgccagtagcagcctgtgaaaaaaaaaaccagaggcaagcggtttttttaaggtggtgatcccagwtatcagcagtagggcggtggggaagtgagagaggaaagagatggaatccaatccaaggtgccttgacaagggagtatcctctgtggacaactggagctgg

SEQ ID NO: 177063 - DNA, 201 bp, Homo sapiens
gcgcattcctaaggaattgattccagaagccattgagaagtacttaggaggaacagatgaccctgtcaagaagaaagacctgttcctggacttaatggggracgtactgttcggtgtcccatctgtgactgtggcccggaaccacagaggtgagtcctagaggtcgaacaggggagggatatggaccccaccagcttctgt

SEQ ID NO: 177064 - DNA, 201 bp, Homo sapiens
tgtcttctcagatgctggagcacccacctacatgtatgagtttcagtaccgtccaagcttctcatcagacatgaaacccaagacggtgataggagaccacrgggatgagctcttctccgtccttggggccccatctttaaaaggtaatggctccttgctctccgtgagcttggagttaggagatctgggttcctgtcttgg

SEQ ID NO: 177065 - DNA, 201 bp, Homo sapiens
cacccacggtgattgatggagtggtgctgccaaaaacacccgaggagcttcaagctgaaaggaagttccacactgtcccctacattgtcggatttaacagraaggaatttggctggtttcttccaacagtgagaaggcgcaggcctcttggagggactcacccacccccatcagccctcccacctctgatcccaggagtgc

SEQ ID NO: 177066 - DNA, 201 bp, Homo sapiens
cggtttgtctttctgtctgtctctaacaaaaactcataaacctttacatttattacatttaataattgttagtttagaaatcacaggattatgaattacgrtttatagtcagcaggattcactgtgacaggattgaatgtcattggcttgtcccccagtttcctcctgctctaacacacatgagggaggatgtatatcatg

SEQ ID NO: 177067 - DNA, 201 bp, Homo sapiens
ctttgagagcttgtttggggaaagcattcaaacttaaagggctggtacattggaggagagaaaatggggatgccaagaatttttagaatttttgagaatgyttttagaattcattggttataagcaacagtttcccagtgaccagatttaagtcaagacggacgattggctaggtgtggtggctcatgcctgtaatttctg

SEQ ID NO: 177068 - DNA, 201 bp, Homo sapiens
ttattcatcaaaggtaaaacctaaaattaggacatggatcaatatactgtgagttcatcactgattcttttattcatgattttctctctaatagggaatcwcgtcctagtctaggctccttgagtgatgagggttccgtacctcctcaaagccacccatggatcaataacagctctcatttaaatagagatagatagcaca

SEQ ID NO: 177069 - DNA, 201 bp, Homo sapiens
catggaaaggagggaaggggcagagtcatacagggagttcagggcatattgtgggtgaaggaatgggcgctgcagaaggtggggtgtgggagcatctgacyccttcctggaggagtgttgggacccactcaccccattttctgcttgaaatctggcaagtgtgggaagcaaagatggagtcctcctcatcaggtctccatg

SEQ ID NO: 177070 - DNA, 201 bp, Homo sapiens
acacagttccagttaggacccagaacccacacctgtgggtctagaatatcttctgccattcctgctgtcctcacatattaggacttggggacctttatgaytgacggacagctgtggcagtctctcaacacagggaagcccagcaggacaaacacccagatgacacagcacccagggccattgggaactattccctttgag

SEQ ID NO: 177071 - DNA, 201 bp, Homo sapiens
atttccctccctaattgtgttggcaaagggtgatgacccaatgtgtcagcatttgccaaataaacaaacggcaggagatggggctggctgccagctgcagrgttgggagtgtctgctggcaaagaaggccaccccaaggtgaaagaggaaggggtgtcaggtccagtcagtctcccaggggcaccgtagcatggtgcctag

SEQ ID NO: 177072 - DNA, 201 bp, Homo sapiens
ccatgaacggggtggagctcaagtctgaaattaaaggatgggtaggaagggggatggccagccacaacgtggtggaagtgtgaccctgagcagtgggggcaagggggccagcccacgggcagcagggctggtgttggcaaggttgctggagcacaccgtgggtgcctggaggacagcttttctaccttgacatgtaggaaa

SEQ ID NO: 177073 - DNA, 201 bp, Homo sapiens
tcacctcttagatgagaaaactgaggcccaaacaggtgaaactcccagccagtaagtagcagagccaggcttcagatccagttaatctggtttcaaagtcyatactctgttttaactgtacccagaaccagctgccctgatggcaatgcgtgaatcaggctctcgctaatctgtgaccatacaaaaattattcatcaaagg

SEQ ID NO: 177074 - DNA, 201 bp, Homo sapiens
tccttggacctgaggctactcctgggtcccaggtccggctgctaccactggactctgcttgtgtttacatgggttgagtccaatgtggtcttggagcttargtcttggttcaagctctaaatgaccaaagtgttcaaggaattaaaacacaactgctttctaatgcctggaaggaggcaaacattccagcaattctgcatg

SEQ ID NO: 177075 - DNA, 201 bp, Homo sapiens
caaattgaagtatatagacatgtaattttatatagataatacatgtatttcagtctgagtgaagatttcttcctctcctcgtcacctgaccagtgtcagcytctgcctgaagttctgcccctgagtcacacatctatcctccttagttaggaccctgtgtgtgcatacccatggcccaaagtcacgccggtctagggtgct

SEQ ID NO: 177076 - DNA, 201 bp, Homo sapiens
gaaggcgcaggcctcttggagggactcacccacccccatcagccctcccacctctgatcccaggagtgcttccctctccaagcactgctctgagtcctggrcagctgttcccttcagcaggagttaacatttccatggaaaccttctccaggagggcacagttgtcaccgggatatcagggccctgggatcccctctcccc

SEQ ID NO: 177077 - DNA, 201 bp, Homo sapiens
caatatttttaaaaatcctttcatgatgtcttctaagccttaactctcagctgttacagatcacatgggactcaccccatggctgctcaggatgcaccatygccactgggcatgtcccaattatgcacccttaggaggcttgagttctgttatatttcagaatgtgaattgtgggtgtgtgcaagagagagcaaccctggg

SEQ ID NO: 177078 - DNA, 201 bp, Homo sapiens
tggaaactcctggctgtgccacagatgcctcactcagctgagaaaccccatctatgtcttgcaagggacgagaccctgtttttctttagaactcaccattraagcacatttgctactttctgaagtggtcctgtgtgaatcatcttatctaggcctcctgcaattctgcacatctttattgtgtggaagacatggcactct

SEQ ID NO: 177079 - DNA, 201 bp, Homo sapiens; identical to SEQ ID NO: 31600

SEQ ID NO: 177080 - DNA, 201 bp, Homo sapiens
tcaagctttctgaagactgtctttacctcaatatttacactcctgctgacttgaccaagaaaaacaggctgctggtaagttgtgggatcccctggtcaagrcgtgtcagtgccagtaccccagatattctagtgtagatcggaaggggatgaaggcagcttggggagggagctgcacaggccaggattgtttcaggacccc

SEQ ID NO: 177081 - DNA, 201 bp, Homo sapiens
caggttgagtatggtggcagcacagaggggaagcattcattgtagtcatcaggggtgcttcacagagaaggtggacgagccgaatttgagaccagacagcrgaattcgggaattcatgcccttaaccctgactccaccttatctttcttgagaaattcagcattgagatcattgtgcccattttaatagaggtaacagaga

SEQ ID NO: 177082 - DNA, 201 bp, Homo sapiens
tggaggagcaaagactggggtcttttgccaaagggattgcaggttcagaaggcatcttaccatggctggggaattgtctggtggtggggggtagggggcaraggtcatgaaggagcaagttttttatttgtgacctcagctttggcaataaaagatcttttgaaagccaaatcactgcttgtgtcttgtattagagattaa

SEQ ID NO: 177083 - DNA, 201 bp, Homo sapiens
tttatattttttacatttttttaaagatgaaaagaggttcttggtgtattaattattgttactttgtggcttgactcaggacaaaggtgcagagaccatckcccatggccaaatctggatctatgcctgcatggcccttgagctaaggatgactttttttaatcatatgaaattcaaatttcattgtccataaaggaagtt

SEQ ID NO: 177084 - DNA, 201 bp, Homo sapiens
ctagaagttccagaccaggacacagtgaggaggcagcagtctgcaaccaaggaagagagcccccaccaggaaatgagtcagtttaatcaactaaaatttgyatttgcatagttctctaggctataagttccagaacaggacacagtgagaaggcagcagcctacaaacaaggaagagaaccctcaccaggaaatgagtcag

SEQ ID NO: 177085 - DNA, 201 bp, Homo sapiens
gttgaaggttgacacatctgacttctcatggaaaggagggaaggggcagagtcatacagggagttcagggcatattgtgggtgaaggaatgggcgctgcaraaggtggggtgtgggagcatctgaccccttcctggaggagtgttgggacccactcaccccattttctgcttgaaatctggcaagtgtgggaagcaaagat

SEQ ID NO: 177086 - DNA, 201 bp, Homo sapiens
ctgggacaatcccagaagctcttccttttgcctttggccaaatatctgggatttttttgtacctaatttccctccctaattgtgttggcaaagggtgatgwcccaatgtgtcagcatttgccaaataaacaaacggcaggagatggggctggctgccagctgcagggttgggagtgtctgctggcaaagaaggccacccca

SEQ ID NO: 177087 - DNA, 201 bp, Homo sapiens
gacatgaaacccaagacggtgataggagaccacggggatgagctcttctccgtccttggggccccatctttaaaaggtaatggctccttgctctccgtgarcttggagttaggagatctgggttcctgtcttggtgtggtggctttcagcaagtttcttctctcctggtcttagtttactgattctctataacagggttga

SEQ ID NO: 177088 - DNA, 201 bp, Homo sapiens
attgcaggttcagaaggcatcttaccatggctggggaattgtctggtggtggggggtagggggcagaggtcatgaaggagcaagttttttatttgtgaccycagctttggcaataaaagatcttttgaaagccaaatcactgcttgtgtcttgtattagagattaatccatcctcctcagagacagaacgatgatgaaaga

SEQ ID NO: 177089 - DNA, 201 bp, Homo sapiens
gctcttccttttgcctttggccaaatatctgggatttttttgtacctaatttccctccctaattgtgttggcaaagggtgatgacccaatgtgtcagcatwtgccaaataaacaaacggcaggagatggggctggctgccagctgcagggttgggagtgtctgctggcaaagaaggccaccccaaggtgaaagaggaaggg

SEQ ID NO: 177090 - DNA, 201 bp, Homo sapiens
tgcctataataatttctatcattcacaaaagctctttcctctatagttggctctgagttcctttggaaaatgtttgaatggcaaaggcaaggtcaaacccyccttttagcaagttttgcttgaccttgaagcagccatttaacaggtggattacagagccacagaaggatggcatcttcccaagtgcgcttcctgctgagc

SEQ ID NO: 177091 - DNA, 201 bp, Homo sapiens
tttgccccatgttctgcatctgatctatatatagtgttcccatctccatcttccaatggtttgagcaatactgaacctctgtttttcatctgatttcccayaactttgagttcagagttttttgttgttgttgttgttgttgtttgccaggactacacagatcttatcaactttcacttattgttgtgtctcactcttttt

SEQ ID NO: 177092 - DNA, 201 bp, Homo sapiens
cagctctcattcgcctagtctgcaagccaggaaatgtcctctctctaaccatgctggaagggtttttaaatttggaacttcataagctaaagctaaagctrtagctaaagctgatgtcgcaggtgcccagacacacctttgcacaggaaggggcaggtgctcataactctcacttcttcacaaagtcctgataaaacccta

SEQ ID NO: 177093 - DNA, 201 bp, Homo sapiens
gcaagatggtgatgaaattctgggccaactttgctcgcaatgggtgaggctcttggcaaagacacagcacagctggtgagggtggggggcggggcatgccwattgggaaggggcagcttctaaggttctagcgatcaaacttctgaccctgtgaccatagcactctgacaatgagagctctctacaaatggagaggccgcc

SEQ ID NO: 177094 - DNA, 201 bp, Homo sapiens
caccctcaacctgttctcttcctcacagcacaggggatgaacacagccgggggaactggggtcacctggaccaggtggctgccctgcgctgggtccaggamaacattgccagctttggagggaacccaggctctgtgaccatctttggagagtcagcgggaggagaaagtgtctctgttcttgtgagttttcctgtcacca

SEQ ID NO: 177095 - DNA, 201 bp, Homo sapiens
ggttttgagtcttagcacctttaagctccaattaactgtgagtgaaagaatcatctcttgggtaattatagtaactcctgcgtgtttgtttctgaggcccmgagaggggtagtgactcacctgggtaacacagccaggaagactagtggctggcctggaacccattttcctgactcccagtccagtgctcccaggcatcac

SEQ ID NO: 177096 - DNA, 201 bp, Homo sapiens
caatgggttagggaggacattgatcgtcatccctattgtacatcaagagaaactgaggcctagagggtttaggtgacttatttaaggtcactcacttagawagcggcaaactccacctggaatctgggtccagccttttgcctctgatgcatcctgatttattctccatgtccagcagggcatccgtcctcgccacctgtg

SEQ ID NO: 177097 - DNA, 201 bp, Homo sapiens
tccagcagggcatccgtcctcgccacctgtggtggacaccgtgcatggcaaagtgctggggaagttcgtcagcttagaaggatttgcacagcctgtggccrttttcctgggaatcccttttgccaagccgcctcttggacccctgaggtttactccaccgcagcctgcagaaccatggagctttgtgaagaatgccacctc

SEQ ID NO: 177098 - DNA, 201 bp, Homo sapiens
ccatccatgccagtcaggtttcttcctgaacacgccactcagttggtctcattgcggtcatcaatgacctccccctgctctccacccaacctctcaggacytcccagcagcagcagatggccactcagcctctgtgacatgcttccttcccagcccctttcctggtcctccctcctccctgtccacaggcctctcttgtct

SEQ ID NO: 177099 - DNA, 201 bp, Homo sapiens
gactccctaccctcttgggaccttccattacagtgccaggacagtgcaataaaaaagcaaatcaagtatgtattccgtttgatggtgtgcagcattagggkatagagtttgtgggtggcttcaatttaagtagcaggatcagggaatggttcaatgagaaggtggcatttgagccaagctctggaggaggcaggaagccag

SEQ ID NO: 177100 - DNA, 201 bp, Homo sapiens
tcttgtccagctaggtctggtccacttttcagaacatctcccccaggcagtccgaactagctcgtcattcattggcttttgtagagcagaccaaaggtccyagaagccatagggtctcaaaggctaggaattgtccagttccatctgatatccagaagggaaatacagcccatggggcgtggaactgggaagattccacag

SEQ ID NO: 177101 - DNA, 201 bp, Homo sapiens
gagagtggcgtggccctcacttctgttctggtgaagaaaggtgatgtcaagcccttggctgaggtaggtctccggctggtacgtctccggctggacacccmcacctccttggctctatgctcctgaatcctcagggatctctcttgtggtcggttgtagctaatgttctcctagaatcactgaggcaccaatggctgagca

SEQ ID NO: 177102 - DNA, 201 bp, Homo sapiens
catgtgaataagttctcaccaatgtcctctgagtgggagtggagagtgccacagccaggcctggcccatacaaatgctccatggtcacacttctgctcctrcctcttccaggtgacaggcaattgacacctatggcaactttagaaaccatgagtgaaggaaggcaaagccaccatagcttagatcaggactgagtaaact

SEQ ID NO: 177103 - DNA, 201 bp, Homo sapiens
cacctttcccacttcattttccaccctagcggggagttgcacagggcttatggggttcaccattgaggcaggactttctggtgggctggagaagctgcatygctcacccggggctggtggtcactttttgatctatttcagtgcattgctaaggaactgattccagaagccactgagaaatacttaggaggaacagacgac

SEQ ID NO: 177104 - DNA, 201 bp, Homo sapiens
ccgggccatttctgagagtggcgtggccctcacttctgttctggtgaagaaaggtgatgtcaagcccttggctgaggtaggtctccggctggtacgtctcyggctggacacccccacctccttggctctatgctcctgaatcctcagggatctctcttgtggtcggttgtagctaatgttctcctagaatcactgaggcac

SEQ ID NO: 177105 - DNA, 201 bp, Homo sapiens
ttactccgtggattatgtgatatgatagaacaggaaaagtgccttggaaacaaagaagcagttaagcaggtgagggagatcagaaggaaggatcccatgawttctgctgtcttgaattttgacatagtcggggagaggagtgggccaggaggtgtgtgggtggcaagtgtactgaggtgtccactcggcaagtgctcaact

SEQ ID NO: 177106 - DNA, 201 bp, Homo sapiens
cagtgtcagcctctgcctgaagttctgcccctgagtcatggagacctacccccctaagttaggatcctgagcatgtgcagccatggcgcatggccatgccrgtctatggtactggtctcaccctcagacaggcagagttggggacatgggtgtgactagggagggaatcacaggtgctgcactgctctctccccagagtca

SEQ ID NO: 177107 - DNA, 201 bp, Homo sapiens
catctctgctccccaccctcaacctgttctcttcctcacagcacaggggatgaacacagccgggggaactggggtcacctggaccaggtggctgccctgcrctgggtccaggacaacattgccagctttggagggaacccaggctctgtgaccatctttggagagtcagcgggaggagaaagtgtctctgttcttgtgagt

SEQ ID NO: 177108 - DNA, 201 bp, Homo sapiens
tctcagagatgctgaagcccagccttattcttaagggttcactgagaacccctagccccatctgtggtcctgaaggtcctgcatgacatctctgctccccwccctcaacctgttctcttcctcacagcacaggggatgaacacagccgggggaactggggtcacctggaccaggtggctgccctgcgctgggtccaggaca

SEQ ID NO: 177109 - DNA, 201 bp, Homo sapiens
tatgtatctgtttatctgcttgtgatctgtagtgggaattcagtgtcatcacaggttttgcctgttttgctctcagatgtgctctagctcataagacagcrtcaggcatacagtagatgctcagtaaatagttgccagttgtgtgaatgtagaaccatacatcaccacaatgctgtactaatgaaagcagggtctcagaga

SEQ ID NO: 177110 - DNA, 201 bp, Homo sapiens
gggtccagccttttgcctctgatgcatcctgatttattctccatgtccagcagggcatccgtcctcgccacctgtggtggacaccgtgcatggcaaagtgytggggaagttcgtcagcttagaaggatttgcacagcctgtggccattttcctgggaatcccttttgccaagccgcctcttggacccctgaggtttactcc

SEQ ID NO: 177111 - DNA, 201 bp, Homo sapiens
attcaatatcgcctgggcatctggggattcttcaggtaagaaatcggactctcctcactgcactttggcccccagaacgaggatgctaggacccagctctkgtcatgccagccctcaggggagcttagctaggttccacagtaaggcatccaagccccttcgtaattggacactacctaccctctcactacccagccactc

SEQ ID NO: 177112 - DNA, 201 bp, Homo sapiens
gcgctgccgtagaaaacacctcgcttagatctggctgaacttcaggggttcttctttccccctccccaggtgcacccaagatcccaaggcggggcagttamtctcagagctatttacaaaccgaaaggagaacattcctctcaagctttctgaagactgtctttacctcaatatttacactcctgctgacttgaccaagaa

SEQ ID NO: 177113 - DNA, 201 bp, Homo sapiens
catcaacctatgatgggctggcccttgctgcccatgaaaacgtggtggtggtgaccattcaatatcgcctgggcatctggggattcttcaggtaagaaatyggactctcctcactgcactttggcccccagaacgaggatgctaggacccagctcttgtcatgccagccctcaggggagcttagctaggttccacagtaag

SEQ ID NO: 177114 - DNA, 201 bp, Homo sapiens
agactgcctgggttaaagtcctgctgctaccacttttgagttgtaggaccttgggcaggttaagtgcctccattttcccacctggataatgggacattatyagtacctacccaatgtatagtttattttactgtgcttagaacagcacttgggacatagtttatgttacgagttcttttatatttcatgaataatattatt

SEQ ID NO: 177115 - DNA, 201 bp, Homo sapiens
tcagtactcacgggggctttatcagaagcaactgccaggactaccgaaaatcaattgtggacacacagaggaaaatgcatgcacttcaaattgaaatatayagacatgtaattttacatagataatacatgtatttcaatatgagtgaagatttcttcctctcctcatcacctgagcagtgtcagcctctgcctgaagttc

SEQ ID NO: 177116 - DNA, 201 bp, Homo sapiens
gtggaactagaagttggtcctacatgtgctttgtgagacacaggaagtgagagaaaggtttactcattcattcattcattcattcattcattcattcattcttctattgtgtactcagtgccccatatacacagttagacctggggcttcagggaaaggaggaacatgaatccactccacacagcccctgccttcaaggat

SEQ ID NO: 177117 - DNA, 201 bp, Homo sapiens
cgtggaactagaagttggtcctacatgtgctttgtgagacacaggaagtgagagaaaggtttactcattcattcattcattcattcattcattcattcattcttctattgtgtactcagtgccccatatacacagttagacctggggcttcagggaaaggaggaacatgaatccactccacacagcccctgccttcaagga

SEQ ID NO: 177118 - DNA, 201 bp, Homo sapiens
acgtggaactagaagttggtcctacatgtgctttgtgagacacaggaagtgagagaaaggtttactcattcattcattcattcattcattcattcattcattcttctattgtgtactcagtgccccatatacacagttagacctggggcttcagggaaaggaggaacatgaatccactccacacagcccctgccttcaagg

SEQ ID NO: 177119 - DNA, 201 bp, Homo sapiens
gtgctcccaggcatcacctctgtgtgccctgggctctgcccactccccttcttttttacattttctgctccccaaaatggcactgtaggaggaggctgaamcagaaccttccacaatcaggaggcagagataacagcgatgattagccaaggagaggggaagcctaaatctcagtccaaggacactcgtctcctcccagca

SEQ ID NO: 177120 - DNA, 201 bp, Homo sapiens
aacgtggaactagaagttggtcctacatgtgctttgtgagacacaggaagtgagagaaaggtttactcattcattcattcattcattcattcattcattcattcttctattgtgtactcagtgccccatatacacagttagacctggggcttcagggaaaggaggaacatgaatccactccacacagcccctgccttcaag

SEQ ID NO: 177121 - DNA, 201 bp, Homo sapiens
cctgtaaacttggtcccagacttcttcatttcagctgtcctcttgcccagggacagtttcctgggacaatttctcaactctcagtatctgaatggggaatmtgatttgtccttttttattgtaaaatgccacaaatgtaaaaaaagaaagtcaaaaaataacatgataaaaaattgtgtaacaatccccagtcctgaccaa

SEQ ID NO: 177122 - DNA, 201 bp, Homo sapiens
taattagaggactttcagactgcattggtttggttggttggtcagtttgtttcttatcattaattcccaatgattcataaatgctgaactttttttttttktttagcagttgatgagctatccactctccgaagggcaactggaccagaagacagccatgtcactcctgtggaagtcctatccccttgttgtaagagtcta

SEQ ID NO: 177123 - DNA, 201 bp, Homo sapiens
tattcccaggggacaccatcatcctgaatttgggggatggagatattaagctcaaagattttcagaaagatgtcacaatttatcttggttgacttagaaaytgtctgtattagacctagtggtggtccagttttctagattttctgagactgactcagttgtcatcctaggatagtcatccatccacccattcgttaatcc

SEQ ID NO: 177124 - DNA, 201 bp, Homo sapiens
gaagaatgccacctcgtaccctcctatgtaagctgcggcatgtgtccttggggatgtttacctcaaagtgatgcaggaaggagtcaaggcagtcccctgaygggctgatcctttgctctggactccttaagatctttgtagatccttaagaacattccagaactctcacagcattctggagtccattatttaacacatgtt

SEQ ID NO: 177125 - DNA, 201 bp, Homo sapiens
gggtcaacccgaaaatcacgcctaggtctgtctctgggtcctgaatcctgacagcccagccccgtctgcatcctgtcttccttctggcagcctgacactgygggagctctggaactgtggggaagggcagagaagagaggaagcctatttggaactgaatgttcctttacctctggttactcctggcaatgccatccattt

SEQ ID NO: 177126 - DNA, 201 bp, Homo sapiens
agaggcagttggggtgtgggctctggggtggctggaccctgggagggagtttctccaaggtcaacaaggcctcagatgccagagcatcagaatacagaaarcaaaacacatggtacatagaggggtgcagcgaggggcctcgaaatacccccatgccattttatagacagagaaactgagactcacacagggaaatgtact

SEQ ID NO: 177127 - DNA, 201 bp, Homo sapiens
gcacaggggctgttcctaattgttttgtacctagccctggcatgattagggcaggtgggtagtggccagggcatggcaacccgatcaaagaggcagttggrgtgtgggctctggggtggctggaccctgggagggagtttctccaaggtcaacaaggcctcagatgccagagcatcagaatacagaaaacaaaacacatgg

SEQ ID NO: 177128 - DNA, 201 bp, Homo sapiens
aaaccgacacagggcttggaagggatttgccaagggcagcaggtgatcagggcagagctgggactccagctcatggccctagcagccagtacagtgccctrtctgtgaccacactcctcctatgtgccagggcctggtgccatgttgggcagtgatggtgtcttgtgtctctctgggtctgcctaatggctggtaagtgga

SEQ ID NO: 177129 - DNA, 201 bp, Homo sapiens
aaagaaggttgatgaaaatgttgtggccagaggtttgcaaaaacctaacccagtatttcccccttgagtgatgaccctgtattctctaattcagtactcaygggggctttatcagaagcaactgccaggactaccgaaaatcaattgtggacacacagaggaaaatgcatgcacttcaaattgaaatatatagacatgtaa

SEQ ID NO: 177130 - DNA, 201 bp, Homo sapiens
gtcattcattggcttttgtagagcagaccaaaggtcccagaagccatagggtctcaaaggctaggaattgtccagttccatctgatatccagaagggaaayacagcccatggggcgtggaactgggaagattccacagaggactggtgtctatgagagggacccacagcaaccttgctaacaagtaatacctaacagttat

SEQ ID NO: 177131 - DNA, 201 bp, Homo sapiens
actagctcgtcattcattggcttttgtagagcagaccaaaggtcccagaagccatagggtctcaaaggctaggaattgtccagttccatctgatatccagragggaaatacagcccatggggcgtggaactgggaagattccacagaggactggtgtctatgagagggacccacagcaaccttgctaacaagtaataccta

SEQ ID NO: 177132 - DNA, 201 bp, Homo sapiens
aacatctcccccaggcagtccgaactagctcgtcattcattggcttttgtagagcagaccaaaggtcccagaagccatagggtctcaaaggctaggaattktccagttccatctgatatccagaagggaaatacagcccatggggcgtggaactgggaagattccacagaggactggtgtctatgagagggacccacagca

SEQ ID NO: 177133 - DNA, 201 bp, Homo sapiens
cttgtccagctaggtctggtccacttttcagaacatctcccccaggcagtccgaactagctcgtcattcattggcttttgtagagcagaccaaaggtcccrgaagccatagggtctcaaaggctaggaattgtccagttccatctgatatccagaagggaaatacagcccatggggcgtggaactgggaagattccacaga

SEQ ID NO: 177134 - DNA, 201 bp, Homo sapiens
cagtgctgcctacctcactgggctttggtgaggaggaaatgggtggctgtttctaaagcactcttggcagcgcctggtatgtagaaagcacgaaaaagggrtggataaataaaggcgctgtttaaaaacgtagtgtatgaatagaaaatttgagctgtggtcaggccactatatcaggacctcttgccattaaaaagacag

SEQ ID NO: 177135 - DNA, 201 bp, Homo sapiens
tattccgtgcttgggttaccccctctctgaaacagaggtggcagtgctgcctacctcactgggctttggtgaggaggaaatgggtggctgtttctaaagcrctcttggcagcgcctggtatgtagaaagcacgaaaaagggatggataaataaaggcgctgtttaaaaacgtagtgtatgaatagaaaatttgagctgtgg

SEQ ID NO: 177136 - DNA, 201 bp, Homo sapiens
ctgtaactatcaagtccatttccaggcttaaacctcccagtccaaggcgctgccgtagaaaacacctcgcttagatctggctgaacttcaggggttcttcyttccccctccccaggtgcacccaagatcccaaggcggggcagttactctcagagctatttacaaaccgaaaggagaacattcctctcaagctttctgaag

SEQ ID NO: 177137 - DNA, 201 bp, Homo sapiens
cctaatgggactagtctgaggcttaaatgagttaatatacaaaaggtacttaaaacagtgcctggaacactgggagaactaaataactattaccagtgttyatctatgttgcatccttgagatctttcatcagggcaacacaacagcaactgcctgggagaggcaggtggtagaatcttggcatgtcagggctgcaagact

SEQ ID NO: 177138 - DNA, 201 bp, Homo sapiens
tttaggataacttctcagaaatgacatttctgagtcaaagagtatatatttcttgtttgatttccctcccaaaatattccaactacactcctcccattgaygtatgaacatctccatttggcagactcttggcaatgcttgggattattaaaaatatttttggctattgtataggcaaaataataataacaataccagcaa

SEQ ID NO: 177139 - DNA, 201 bp, Homo sapiens
aaatttaggaaatacagagaaaggaaagtaagaaaattaagatcacatacaatattccaccacccagagagaacaactatcagtattttagatggtaaagyattatgatgtaatatattgtttgtattccagtttttttgcctgttgatatactttctttctttaaaagggaatgctatattgagataatttggatgcctg

SEQ ID NO: 177140 - DNA, 201 bp, Homo sapiens
ggactcaaccacccccatcagccctcctgtctctggtcccaggaatgcttccctctccgagctgcactctgagtcctgggcagctgttcccttcagcaggrgttaacatttccacggaaatcttctccaggagggcacagttttcaccggggtatcagggccctgggattccctctccccagactctcttattgtcttcct

SEQ ID NO: 177141 - DNA, 201 bp, Homo sapiens
aattagaggactttcagactgcattggtttggttggttggtcagtttgtttcttatcattaattcccaatgattcataaatgctgaacttttttttttttkttagcagttgatgagctatccactctccgaagggcaactggaccagaagacagccatgtcactcctgtggaagtcctatccccttgttgtaagagtctag

SEQ ID NO: 177142 - DNA, 201 bp, Homo sapiens
agaggtttgggaagagttgttatgtgcgtagagatgtgcagttcgcccctcagaaggatttcagaggttataccaaagaccaaagccacgaagacaggatytaaggatttcagtgtcatctgtgacaggtgggggtactagggaggtctacatcctcttccccagagccctctattccacactggcctggcagacaccttg

SEQ ID NO: 177143 - DNA, 201 bp, Homo sapiens
gggaagatcaggagtgagctccctgaatgtttgcattgcaaagagaaggctctcaggtcctcaaggaaatggggttgggtggtagattcacatcccaaagrgcagagaaagtgtttatcattgcaggcttctaaagtaactgctctagttgggttcggggacctggctgcttgtctccaggttttggctggagcagagtaa

SEQ ID NO: 177144 - DNA, 201 bp, Homo sapiens
tgggaagatcaggagtgagctccctgaatgtttgcattgcaaagagaaggctctcaggtcctcaaggaaatggggttgggtggtagattcacatcccaaasggcagagaaagtgtttatcattgcaggcttctaaagtaactgctctagttgggttcggggacctggctgcttgtctccaggttttggctggagcagagta

SEQ ID NO: 177145 - DNA, 201 bp, Homo sapiens
tccacactgtcccctacatggtcggaattaacaagcaggagtttggctggttgattccaatggtgagaaggcacatgtctgttggagggactcaaccaccmccatcagccctcctgtctctggtcccaggaatgcttccctctccgagctgcactctgagtcctgggcagctgttcccttcagcaggagttaacatttcca

SEQ ID NO: 177146 - DNA, 201 bp, Homo sapiens
acaggatgcaaggggtaagaaacggggaggagtggaggacgccctgagttttctgacacaacaaggttgtgcccacacagggcagccacttgcaaactctwagtggagaacaatcacttgtcattgttgctgatggcagtcttccagcatggctgtcacccaactgaggtgctcccgtctcttgcctcaacttttagcctc

SEQ ID NO: 177147 - DNA, 201 bp, Homo sapiens
aaatataaaattgatttttaaactatataggacatggaaaatctttagatgaaaacacaaaaaatttatagcacttgcctccaggtagtggaattatgagkcatacctagtttcttctttttgtgtttccatatttttgaaactttctataatttaacatattaattttatattcagaaatgttattttcatcaaaaagag

SEQ ID NO: 177148 - DNA, 201 bp, Homo sapiens
ccacttcattttccaccctagcggggagttgcacagggcttatggggttcaccattgaggcaggactttctggtgggctggagaagctgcatcgctcaccmggggctggtggtcactttttgatctatttcagtgcattgctaaggaactgattccagaagccactgagaaatacttaggaggaacagacgacactgtcaa

SEQ ID NO: 177149 - DNA, 201 bp, Homo sapiens
attcatgcacagagaagtttacttcaccaagagatagttaactgagatgaagctgagatacaagggctgccccatgggtacgctgagtgcatgaatagtcyaggcttgagggtgatgggagtgtcctcccgaagaggacatccttagcctttgctatgcccatgatgatgttctcagcatcaagagcctttcggggaggag

SEQ ID NO: 177150 - DNA, 201 bp, Homo sapiens
tcaccaagagatagttaactgagatgaagctgagatacaagggctgccccatgggtacgctgagtgcatgaatagtctaggcttgagggtgatgggagtgwcctcccgaagaggacatccttagcctttgctatgcccatgatgatgttctcagcatcaagagcctttcggggaggaggcactggaggctgggtagaaagg

SEQ ID NO: 177151 - DNA, 201 bp, Homo sapiens
attccctttgagggggaagagtgtgaattccaagctcaggagtagcctggactctctccttggacctgaggctactcctggatcccagggctggcctctaycactggactctgcttgtgtttccatgagttgagtccaatgtggtattggtgcttaggtcttggctcaggctctaagtgaccaaagtgttcaaggaatgaa

SEQ ID NO: 177152 - DNA, 201 bp, Homo sapiens
catttgagccaagctctggaggaggcaggaagccagctgtcaggaaacctggagaagcctattccaggcagagggaacagtcactgcaaagaccctgacakaaggggccagtctggctggagaggaccgagtgtggggacagactggcttgaggctaaagaggtaatgggcagtgggagagagatcaattaaagtacttgg

SEQ ID NO: 177153 - DNA, 201 bp, Homo sapiens
actccctaccctcttgggaccttccattacagtgccaggacagtgcaataaaaaagcaaatcaagtatgtattccgtttgatggtgtgcagcattaggggrtagagtttgtgggtggcttcaatttaagtagcaggatcagggaatggttcaatgagaaggtggcatttgagccaagctctggaggaggcaggaagccagc

SEQ ID NO: 177154 - DNA, 201 bp, Homo sapiens
tgggttagggaggacattgatcgtcatccctattgtacatcaagagaaactgaggcctagagggtttaggtgacttatttaaggtcactcacttagaaagyggcaaactccacctggaatctgggtccagccttttgcctctgatgcatcctgatttattctccatgtccagcagggcatccgtcctcgccacctgtggtg

SEQ ID NO: 177155 - DNA, 201 bp, Homo sapiens
gagaggtgctgggagctgtaggaagacttccacctccttgaggtgggcagagggtcagcccactactggattcctcagtcccgtgttggttttatagtggrgtagatctagcctggaatagcgagtgagtcactgaccccactcctgagcatgaactctcctcccctccactctgctgtcaggttttgtctccattggcca

SEQ ID NO: 177156 - DNA, 201 bp, Homo sapiens
gtgttcaaatagactgtaggaaaggggcaaagtggatgcagttgaccagctgggcagccactgcattgccataatccaggcaagggctcctggctgcttasacagggctgtggcagtggggatgggaggagtagttggagtctggatatctttgaaggaatagctgacaggatttgctgatggacaggatgcaaggggtaa

SEQ ID NO: 177157 - DNA, 201 bp, Homo sapiens
tagagggtttaggtgacttatttaaggtcactcacttagaaagcggcaaactccacctggaatctgggtccagccttttgcctctgatgcatcctgatttmttctccatgtccagcagggcatccgtcctcgccacctgtggtggacaccgtgcatggcaaagtgctggggaagttcgtcagcttagaaggatttgcacag

SEQ ID NO: 177158 - DNA, 201 bp, Homo sapiens
cttggctgcgccttcagaatccactcagagtcccctactttgcacctcttccctggctcctagcccagccaaagctctctgtctgtcaccttgattatgawctttaacactttcagatccctgccacttttatataaagctgagttgcacagtagccagagtgatcacttaacacatgcattgaatcatgcgatgcctctg

SEQ ID NO: 177159 - DNA, 201 bp, Homo sapiens
agatctggctgaacttcaggggttcttctttccccctccccaggtgcacccaagatcccaaggcggggcagttactctcagagctatttacaaaccgaaargagaacattcctctcaagctttctgaagactgtctttacctcaatatttacactcctgctgacttgaccaagaaaaacaggctgccggtaagttgtggga

SEQ ID NO: 177160 - DNA, 201 bp, Homo sapiens
atttccaggcttaaacctcccagtccaaggcgctgccgtagaaaacacctcgcttagatctggctgaacttcaggggttcttctttccccctccccaggtkcacccaagatcccaaggcggggcagttactctcagagctatttacaaaccgaaaggagaacattcctctcaagctttctgaagactgtctttacctcaat

SEQ ID NO: 177161 - DNA, 201 bp, Homo sapiens
ctgttcttcattgtcagccatattggattaggatctgatcttgtccagctaggtctggtccacttttcagaacatctcccccaggcagtccgaactagctygtcattcattggcttttgtagagcagaccaaaggtcccagaagccatagggtctcaaaggctaggaattgtccagttccatctgatatccagaagggaaa

SEQ ID NO: 177162 - DNA, 201 bp, Homo sapiens
ctaacccagtatttcccccttgagtgatgaccctgtattctctaattcagtactcacgggggctttatcagaagcaactgccaggactaccgaaaatcaaytgtggacacacagaggaaaatgcatgcacttcaaattgaaatatatagacatgtaattttacatagataatacatgtatttcaatatgagtgaagatttc

SEQ ID NO: 177163 - DNA, 201 bp, Homo sapiens
tttttagctggatgtttttatgcctccaattctagtttgcccattaaaccagctcaatgggttagggaggacattgatcgtcatccctattgtacatcaasagaaactgaggcctagagggtttaggtgacttatttaaggtcactcacttagaaagcggcaaactccacctggaatctgggtccagccttttgcctctga

SEQ ID NO: 177164 - DNA, 201 bp, Homo sapiens
tggccctagcagccagtacagtgccctatctgtgaccacactcctcctatgtgccagggcctggtgccatgttgggcagtgatggtgtcttgtgtctctcwgggtctgcctaatggctggtaagtggaacaaccaggatttgaaagcagacaaggaaattcaggattccatgctctctatcccagctccacctcacatttc

SEQ ID NO: 177165 - DNA, 201 bp, Homo sapiens
ggctgtggcagtggggatgggaggagtagttggagtctggatatctttgaaggaatagctgacaggatttgctgatggacaggatgcaaggggtaagaaasggggaggagtggaggacgccctgagttttctgacacaacaaggttgtgcccacacagggcagccacttgcaaactctaagtggagaacaatcacttgtca

SEQ ID NO: 177166 - DNA, 201 bp, Homo sapiens
aacattcctctcaagctttctgaagactgtctttacctcaatatttacactcctgctgacttgaccaagaaaaacaggctgccggtaagttgtgggacccyctggtcaaggcgtgtcagtgccagtaccccgcatcttctggggcagaatggaagggagtgaaggcagcttggggagggagctgcacaggccaggattgtt

SEQ ID NO: 177167 - DNA, 201 bp, Homo sapiens
ggaagggatttgccaagggcagcaggtgatcagggcagagctgggactccagctcatggccctagcagccagtacagtgccctatctgtgaccacactccwcctatgtgccagggcctggtgccatgttgggcagtgatggtgtcttgtgtctctctgggtctgcctaatggctggtaagtggaacaaccaggatttgaaa

SEQ ID NO: 177168 - DNA, 201 bp, Homo sapiens
ctagtggctggcctggaacccattttcctgactcccagtccagtgctcccaggcatcacctctgtgtgccctgggctctgcccactccccttcttttttayattttctgctccccaaaatggcactgtaggaggaggctgaaacagaaccttccacaatcaggaggcagagataacagcgatgattagccaaggagagggg

SEQ ID NO: 177169 - DNA, 201 bp, Homo sapiens
atggcttcaggcatggctgggtccagatgatcataggatattattgagaatctaccattctctgtccttcagctttgcacatctctgtgttggcttcactsttaggcagatatatctcctgggaaggttaaagacaacagcactctagacttatgtcctatctgcttaaaaaccctctttctaaacaattcctgcaaaagt

SEQ ID NO: 177170 - DNA, 201 bp, Homo sapiens
cgcttagatctggctgaacttcaggggttcttctttccccctccccaggtgcacccaagatcccaaggcggggcagttactctcagagctatttacaaacygaaaggagaacattcctctcaagctttctgaagactgtctttacctcaatatttacactcctgctgacttgaccaagaaaaacaggctgccggtaagttg

SEQ ID NO: 177171 - DNA, 201 bp, Homo sapiens
ggtcccagaagccatagggtctcaaaggctaggaattgtccagttccatctgatatccagaagggaaatacagcccatggggcgtggaactgggaagattscacagaggactggtgtctatgagagggacccacagcaaccttgctaacaagtaatacctaacagttattcagcctttccagacaccaggtgctgtgctaa

SEQ ID NO: 177172 - DNA, 201 bp, Homo sapiens
atgcacagagaagtttacttcaccaagagatagttaactgagatgaagctgagatacaagggctgccccatgggtacgctgagtgcatgaatagtctaggyttgagggtgatgggagtgtcctcccgaagaggacatccttagcctttgctatgcccatgatgatgttctcagcatcaagagcctttcggggaggaggcac

SEQ ID NO: 177173 - DNA, 201 bp, Homo sapiens
aggtcccagaagccatagggtctcaaaggctaggaattgtccagttccatctgatatccagaagggaaatacagcccatggggcgtggaactgggaagatkccacagaggactggtgtctatgagagggacccacagcaaccttgctaacaagtaatacctaacagttattcagcctttccagacaccaggtgctgtgcta

SEQ ID NO: 177174 - DNA, 201 bp, Homo sapiens
tagagcagaccaaaggtcccagaagccatagggtctcaaaggctaggaattgtccagttccatctgatatccagaagggaaatacagcccatggggcgtgraactgggaagattccacagaggactggtgtctatgagagggacccacagcaaccttgctaacaagtaatacctaacagttattcagcctttccagacacc

SEQ ID NO: 177175 - DNA, 201 bp, Homo sapiens
aagttgtgggaccccctggtcaaggcgtgtcagtgccagtaccccgcatcttctggggcagaatggaagggagtgaaggcagcttggggagggagctgcayaggccaggattgtttcagagaccccagggcctccacaggaaacactggttttccacacatcagtttaccctcgtgacataggcactctgggggagtttgt

SEQ ID NO: 177176 - DNA, 201 bp, Homo sapiens
cagcctctgcctgaagttctgcccctgagtcatggagacctacccccctaagttaggatcctgagcatgtgcagccatggcgcatggccatgccggtctayggtactggtctcaccctcagacaggcagagttggggacatgggtgtgactagggagggaatcacaggtgctgcactgctctctccccagagtcaacccct

SEQ ID NO: 177177 - DNA, 201 bp, Homo sapiens
ggatttgcacagcctgtggccattttcctgggaatcccttttgccaagccgcctcttggacccctgaggtttactccaccgcagcctgcagaaccatggarctttgtgaagaatgccacctcgtaccctcctatgtaagctgcggcatgtgtccttggggatgtttacctcaaagtgatgcaggaaggagtcaaggcagtc

SEQ ID NO: 177178 - DNA, 201 bp, Homo sapiens
acacagcacccagggccattgggaactattccctttgagggggaagagtgtgaattccaagctcaggagtagcctggactctctccttggacctgaggctrctcctggatcccagggctggcctctatcactggactctgcttgtgtttccatgagttgagtccaatgtggtattggtgcttaggtcttggctcaggctct

SEQ ID NO: 177179 - DNA, 201 bp, Homo sapiens
acatattaggacttggggacctttaggattgttggatggccatggcagtctctcatcacagggaagaccaggaggacaaacacccagatgacacagcaccsagggccattgggaactattccctttgagggggaagagtgtgaattccaagctcaggagtagcctggactctctccttggacctgaggctactcctggatc

SEQ ID NO: 177180 - DNA, 201 bp, Homo sapiens
gaagaaaggtgatgtcaagcccttggctgaggtaggtctccggctggtacgtctccggctggacacccccacctccttggctctatgctcctgaatcctcrgggatctctcttgtggtcggttgtagctaatgttctcctagaatcactgaggcaccaatggctgagcaggaagggcgaggagacaccttgatcagcgtcc

SEQ ID NO: 177181 - DNA, 201 bp, Homo sapiens
cttccaccgggccatttctgagagtggcgtggccctcacttctgttctggtgaagaaaggtgatgtcaagcccttggctgaggtaggtctccggctggtasgtctccggctggacacccccacctccttggctctatgctcctgaatcctcagggatctctcttgtggtcggttgtagctaatgttctcctagaatcactg

SEQ ID NO: 177182 - DNA, 201 bp, Homo sapiens
aggtgaaactcccagccagtaagtagcagagccaggcttcagatgcagttaatctggtttcaaagtccatgctctatcttagcaacatccacgctctatcktagcaactacaccattgtgactaaatatgaaatataactgtacccagaaccagctgccctgatggcaacacatgagttgggctctctctaatctgtgacc

SEQ ID NO: 177183 - DNA, 201 bp, Homo sapiens
actactggattcctcagtcccgtgttggttttatagtggagtagatctagcctggaatagcgagtgagtcactgaccccactcctgagcatgaactctccwcccctccactctgctgtcaggttttgtctccattggccaagaacctcttccaccgggccatttctgagagtggcgtggccctcacttctgttctggtgaa

SEQ ID NO: 177184 - DNA, 201 bp, Homo sapiens
gaagacttccacctccttgaggtgggcagagggtcagcccactactggattcctcagtcccgtgttggttttatagtggagtagatctagcctggaatagygagtgagtcactgaccccactcctgagcatgaactctcctcccctccactctgctgtcaggttttgtctccattggccaagaacctcttccaccgggcca

SEQ ID NO: 177185 - DNA, 201 bp, Homo sapiens
taggaagacttccacctccttgaggtgggcagagggtcagcccactactggattcctcagtcccgtgttggttttatagtggagtagatctagcctggaakagcgagtgagtcactgaccccactcctgagcatgaactctcctcccctccactctgctgtcaggttttgtctccattggccaagaacctcttccaccggg

SEQ ID NO: 177186 - DNA, 201 bp, Homo sapiens
ccacctgtggtggacaccgtgcatggcaaagtgctggggaagttcgtcagcttagaaggatttgcacagcctgtggccattttcctgggaatcccttttgscaagccgcctcttggacccctgaggtttactccaccgcagcctgcagaaccatggagctttgtgaagaatgccacctcgtaccctcctatgtaagctgcg

SEQ ID NO: 177187 - DNA, 201 bp, Homo sapiens
ggggccatatgaatctccagttgcagcctgcaatggtggcattctcctcttccagcttggttgagctctctctctctctctctctttctctctctccttcmcactcattttaacataaggactcacatcccttctcttgggaagtaggaataggcataaattatgagtaagggcaggcagagagaagaggtggacagaggt

SEQ ID NO: 177188 - DNA, 201 bp, Homo sapiens
tttggagggaacccaggctctgtgaccatctttggagagtcagcgggaggagaaagtgtctctgttcttgtgagttttcctgtcaccaggcccaaccccasgcttgatgtgatgctgatgagacctcttggacacctgtcaatccagctatggatacctctgattacaatacctgaattcaggactggccctactcacagc

SEQ ID NO: 177189 - DNA, 201 bp, Homo sapiens
tatgaaagagacctatatttatctgtacaatttaatttaaaccaggtatgtaagattatttatatgcaattctgttaaggaatatttgaagttcacagctrggtggggtggctcatgcctgtaatcctagttcattgggaggctgacatgggaggattgcttgaggccaggggttcaagacctgtctgggcaacataatgg

SEQ ID NO: 177190 - DNA, 201 bp, Homo sapiens
aagaggagaaggaatgagatacattattatcctggtcagtacttggagtttatctgagtcttatttcttgtttccattaattcacctaaaatgagcaggtkggggggaagatgtttcaaaatagaaagtatataactttgagtaacactcccaaatctaaaactctcttcctttagcacttcattttatttgcatgggttg

SEQ ID NO: 177191 - DNA, 201 bp, Homo sapiens
tacaattggtgaagcattccaggaccttcctcagtttgttgacaaaataagaggagaaggaatgagatacattattatcctggtcagtacttggagtttayctgagtcttatttcttgtttccattaattcacctaaaatgagcaggtgggggggaagatgtttcaaaatagaaagtatataactttgagtaacactccca

SEQ ID NO: 177192 - DNA, 201 bp, Homo sapiens
atgagttcccatatactggagaactagagtgacattaatataattgaatttcacacaaaaaggaaattacattataatgcatacaacatgtcatttatacwgttaagaaaacatgcaaaacaatgctatatattgtttatagatacatatatacttacacagaaaaaataaagaaatgtttgtaaatggtaaacactaaat

SEQ ID NO: 177193 - DNA, 201 bp, Homo sapiens
aagaaaacatgcaaaacaatgctatatattgtttatagatacatatatacttacacagaaaaaataaagaaatgtttgtaaatggtaaacactaaattcargatagtattttctggagagtccttgaataaggataatgcagtcttacatgggtacacatcgggcaaagctcaattttattcagaataattaatttcaaag

SEQ ID NO: 177194 - DNA, 201 bp, Homo sapiens
gtatcttctgtggttgttgggtagaatgttctgtaaatatctgttaagtccattttttctggggtatggtttaaatccattgttactttgttgactttccrtcttgatgatctgtctagtactatcagtggagtattgaagtcctccactattactgtgttgctgactctctcaattcttaggtctattagtaattgtttt

SEQ ID NO: 177195 - DNA, 201 bp, Homo sapiens
aaaaataaataaatatatagaaatcatctataattctgggtgccaatgtggtacttaccagccatatatggccatggaacaatgtgtctagtgtgactcargaatggaattttaaagttatttaattttaagtagtagtatacaataattaaatatgaaataatagataattagtggctaccatattagacactgcagttg

SEQ ID NO: 177196 - DNA, 201 bp, Homo sapiens
tatagaattatcaccaattattactcttcatatttatatatttatttcttattaaatttcaaaaaaatatatgtaatgtatatttaaaagattaatattcytaaatggccattttatatttgttatgaaaaaataaagcagtgaagatcattttcttttattggttttttaaaagagtgacaatttagaagtagaacattt

SEQ ID NO: 177197 - DNA, 201 bp, Homo sapiens
attatatgtgcaaaatattgatactatagtgacaaaaaggagtgacacttttcctcatttatcataagggtcacagccaacacctctataacaaagcacamgttaacatgagaaaagcataacaaacatatgtaatcatagttttatgtaaaacaggaaccttcagaataaaggcccaaagatacagagaatgctctcagg

SEQ ID NO: 177198 - DNA, 201 bp, Homo sapiens
tcatgccactgcactccagcctgggtgacagagctagactcagtctccaaaaacaaacaaacaaaaaagaatgactctctctctctctctctctctctctmtatatatatatatatacatatatatatgtatatatatatttaactaagactcttttttgtaactcctagatttaaattatccttcaaaattttaccattt

SEQ ID NO: 177199 - DNA, 201 bp, Homo sapiens
atgactggataatacttgacaaagggatgcattgagattcatgcggtgcagttataaataactccatatttcaaaattatgtgaaaagagtaaagtcataraaatcaataaaattggctgagagttttgggtttttcagtatcttttgacagcaacttcacctttctgagatttattttaaccttaggtaaaatggatagg

SEQ ID NO: 177200 - DNA, 201 bp, Homo sapiens
ttcctttaatatggaactatgtttttcttactgcttttgcactgcaactcgctatttttcttaaaactgtatcaagaataggaaatataaaataaaatttyccaactttgatatatttaatgtccttcctcggtaaaataaaagttaatatcttagtgccttacactcatatttttatttttataatttgactgatttata

SEQ ID NO: 177201 - DNA, 201 bp, Homo sapiens
aattaaagacaaaatcaatttttgcatgccagcgcatctattttggggagagtatgctatgctgtggtattcaggcactctattttcctttcaaaggaatrttgaaacacatccatgccaatgggtgttttcattcccacaatctcatttgtcgagataagtaaacatgccactacaaatgaaaacaaaaaagatgtctat

SEQ ID NO: 177202 - DNA, 201 bp, Homo sapiens
caatgggtgttttcattcccacaatctcatttgtcgagataagtaaacatgccactacaaatgaaaacaaaaaagatgtctatggaagtagaaaaaagagwattttttttagtttatcataactcatataatgtagtattttattttgtaatattatgagtgtagtatctaataggtgaattggtgataataaaaaattaa

SEQ ID NO: 177203 - DNA, 201 bp, Homo sapiens
ttttattttgtaatattatgagtgtagtatctaataggtgaattggtgataataaaaaattaaagaaattaatcacatttcagcaggatcagtttattacwtggttttccagccagttactgtgtcttacatttagaaaagttaaattaaaacttttgacattttgtcttttagaaattaatatgtgataacttgatcttt

SEQ ID NO: 177204 - DNA, 201 bp, Homo sapiens
aaattaaaacttttgacattttgtcttttagaaattaatatgtgataacttgatctttcagataatcttcaatttaaacgactaattaaaaatgcagtttyagagaaaaatcttttggtcgccagagaactaatcctttgcaactaaccctttgcaacacaatatccaggggagcttttgccaccacctgtgaaagaaaat

SEQ ID NO: 177205 - DNA, 201 bp, Homo sapiens
aatgtaactttacttaaaaaaataatactctgtctgagagttacactctacttggtgttgactgtagctgatttgcttgtttgggtaagatatgccagtartggacactattttgaaagagttgtctcaagttattaagacatatgatgttgagtaacgggctacttctcttccactaaggatgataatctcttgccagtt

SEQ ID NO: 177206 - DNA, 201 bp, Homo sapiens
gatgatggctgaggatggcaggtgtttttaccaatgtcacaggaaggacattgtaaaacattcctcttgctatgcctgtttttcaaattctgggcttttcrttacatcattgagttttgtcaacaaatatatttatttaatataaccaaataactaaatgcatctgttatatcactgaggcgagtcaagacatatttgtca

SEQ ID NO: 177207 - DNA, 201 bp, Homo sapiens
ttattctcacttttgctatgcatggtcttttttggttccatatgaattttaggattgttttttccagttcggtgaagaataatgatggtgttttgatgagrattgcattgaatctgtatattgttttggcagtatggtcattttcacaatattctttctatccatccatgagcatgggatgtgtttccgtctgtgtcatct

SEQ ID NO: 177208 - DNA, 201 bp, Homo sapiens
tagggatagaaactaaattaccactggcaagaatttggaaaaagtacataatggacacactaaggatgactatattttctttggtttttaggtccacaccrtctctattttccttaagtgctcattattgattcaatcattattctaattattcacttatttattaaatcaatcaatcatttagttagcaaaaatttattt

SEQ ID NO: 177209 - DNA, 201 bp, Homo sapiens
tatttaggattgtgatattttcctgttggacaaggccttttatcattttataatgtccatctttgccttttttaactgctgttgctttaaagtttgttttrtctgatataaaaatagctacttctggctttcagtgttcatttgcatggaatgtttttttctacccctttatcttgagtttgtgtgagtccttatgtgtta

SEQ ID NO: 177210 - DNA, 201 bp, Homo sapiens
gcctggttgtttattgaaacgagacggcacaaaagcatggaagattttgtgtgtgtgtgtgtgtgtgtgtatgtgtgatggcacaaaagcatagaagattktgtgtgtgtgtgtgtgtgtgtgtgtgtgtgtgtgagatggcacaaaagcatagaagatgtgtgtgtgtgaagaaaggttcacaaattaataatgaagagg

SEQ ID NO: 177211 - DNA, 201 bp, Homo sapiens
gaacccgggaggcggagcttgcagtgagccaagatcgagccactgaactccagcctgggggacagagcgagactccgtctcaaaacaacaacaacaacaamaaaaaaaaatctatgatgagagacacaattaaatgaaatgtgagaggctttttgaatcttgggccaaaattaagacattagtgattaaatctgcaaaatg

SEQ ID NO: 177212 - DNA, 201 bp, Homo sapiens
aatagaaataaaaaacaatattaaaatatatgaaataataactttctaagatattttttctaactttttcaggtatgatggaatttagtctgtttggaatrtcatatgtaagtagttttattccttttatcttcataaattataaacattcataaactattcaaatttaactaaatataacaatatattttagactggagc

SEQ ID NO: 177213 - DNA, 201 bp, Homo sapiens
taaacactgtgtacacatggacacaaagaagggaacaacagacaccagggcctatatgaagttgtggcgtgggaggagggtgaggattgagtaacagcctrtcaagtactatgcttattatctgggtgacaaaataatctgtacacaaaacccctgtgacaagcaagttacctaaataatacacctgcaaatgtacttctg

SEQ ID NO: 177214 - DNA, 201 bp, Homo sapiens
cccattagtggttatatacccagaggaatagaaatgatcctaccataaagacatgcacaagaaggttcattacaacactattcacaaaagacactcttcgmcaaagacatggaattcgccagttcgctattcaccaaagacatggaatcagcctaaatgcccatgaatggtagactgaataaagaaaatgtggtacatata

SEQ ID NO: 177215 - DNA, 201 bp, Homo sapiens
aggattagttctaaccagataaagctgtagttattaacacaatgatactggactgtggatatacaaatagattaacacagcaaaataagacacaggcccaygcatgtataatttgttaaatgacagcagtgaagggaagtatcaactatttatatggactattgactcagtatttaggaaacaatataaaatgtgtcaatt

SEQ ID NO: 177216 - DNA, 201 bp, Homo sapiens
attgttattggcctgagtttccttactgaaaagggcagtagctggcaaagataaggtctagagctaatagagagaaatgaatagaaattctagatttcatrgctattattaaaaagtcaaaaaataacagatgctttcaagattgttgagaaaagttgacatatatactgttggtagtagtgtaaattaattaaactattg

SEQ ID NO: 177217 - DNA, 201 bp, Homo sapiens
ccatctaaatgcactagaaagagtagacattgaggagtgtacttatttttcaggtttttattaattcatgtaattcagttacaatttcaggccattttaakttgataattaactcatacaaagtatacaaatggttaaaatatacataggttttataaaacactgattaatttctttgtcaaggaatacataattatgagt

SEQ ID NO: 177218 - DNA, 201 bp, Homo sapiens
ataacaatttgcttgactactgtgagaagccaggctttgactcaataccttaactgtttcaaatgcatacaaagaatatgctgattctgtattccctgtcragtttacctttactccagcttttagaaaataactgcctaaagttttccttgattgtttttacttctcaggtactgatttgatcttttttccctttataac

SEQ ID NO: 177219 - DNA, 201 bp, Homo sapiens
tctaatcaagttgagaaccaaaaccaaaacctcttttaaaaagcatgataagtgttggcaaaaataagtatttggaaacaagtgaagtaaatattttattraaactgttgaaatagtttattggtgcttgaatctgatagaattaataatttatctgccaggtattagtgaaaataagttacaacatgtaagtctagatat

SEQ ID NO: 177220 - DNA, 201 bp, Homo sapiens
attttagctttctcatttgcaaaatgtaatatttcaatcataatgttgctttgggtagtagattgatgtattaaaaaagagactgtaatatttaaaaacaygaaagcaattatttttgtcatttatcttttctccatttatataatactaaattattagtaatattaccataaataatttctaaattatttaagatataga

SEQ ID NO: 177221 - DNA, 201 bp, Homo sapiens
tagattcccagagagaaacatttatgtaaactactttcagggttaaggcttttaacaattgtatgttgagcagaagattattaaacactgataggctggtragggtgcaataaaactttatgagtaggtcaatatatacctaagcagctttccttgatcattattttggcagccttatccaagtctggtacaacatagcaa

SEQ ID NO: 177222 - DNA, 201 bp, Homo sapiens
tgtagttgtggacagtggttaacttctagaaactaaaaaaaaaaatcttcttaattatgtaagttttatcccaaccttgcctgctaatatttgaaaatgtmgaaataaatatataattggagtcatcacactacaaaaaatgtattaggttcaagttcaggtataatattttctatttataagggaattcaattactttaa

SEQ ID NO: 177223 - DNA, 201 bp, Homo sapiens
taactgtgttttaagcttgcatctcacaattagcctgggaaaatattgccccaagaacaggtctttaactatttttcaaaaagaagtattttaattaaaaygtagttttctaattaatatccttctaactaattttctaatacatttttataaaatatgatacaaaacaaaagaagaaaacaatcatatgttcattatcta

SEQ ID NO: 177224 - DNA, 201 bp, Homo sapiens
cagagcctgattgtgttatagaaagagagagtgttgcatttcttgcattcattgagaactgaaattcctgattcacctccaaagtgtgggagagaaggttrtctgagaaaggcagagtatttccaacactgctacagaagcactgtaactaagccttaaacaaacaaacaaaaaacacaagaagcagtataatttcaaaga

SEQ ID NO: 177225 - DNA, 201 bp, Homo sapiens
atggggtccagcatttatggttaccccagtactggaacctgtaagtcctaccacatatttttgtttacacaattttctttggtttatatacaactaatggstatttatttacattccagtatgttcaaactgtaaatgcctacgtccccaatgctcggtggtttgactaccatacagtaagtatttaaggaattctgggga

SEQ ID NO: 177226 - DNA, 201 bp, Homo sapiens
tgtaaaaaaagaaagcccacacaatttcctacccttaattaacatttcacagaacacatgttaacaccagctttgttccttatggacagatcagacagccratttgaaatgtttggatacaaaacaatataatttagctcaacttatctgaaattaaattctccttgcctaatgtgattattgtaagtaataagtcaaata

SEQ ID NO: 177227 - DNA, 201 bp, Homo sapiens
actccatcaaactactaagtgtcctgctgtccaagaggaaccagacctgtttctcttctcttctttctcttctcatttcttctcttctcttctcctctcttctcctctcctctcctctcttctttctttcctttctttctttcctttctttctttctttctttctttctttctttctttctttctttctttctttcttcct

SEQ ID NO: 177228 - DNA, 201 bp, Homo sapiens
ctccatcaaactactaagtgtcctgctgtccaagaggaaccagacctgtttctcttctcttctttctcttctcatttcttctcttctcttctcctctcttctcctctcctctcctctcttctttctttcctttctttctttcctttctttctttctttctttctttctttctttctttctttctttctttctttcttcctt

SEQ ID NO: 177229 - DNA, 201 bp, Homo sapiens
tccatcaaactactaagtgtcctgctgtccaagaggaaccagacctgtttctcttctcttctttctcttctcatttcttctcttctcttctcctctcttctcctctcctctcctctcttctttctttcctttctttctttcctttctttctttctttctttctttctttctttctttctttctttctttctttcttccttt

SEQ ID NO: 177230 - DNA, 201 bp, Homo sapiens
ccatcaaactactaagtgtcctgctgtccaagaggaaccagacctgtttctcttctcttctttctcttctcatttcttctcttctcttctcctctcttctcctctcctctcctctcttctttctttcctttctttctttcctttctttctttctttctttctttctttctttctttctttctttctttctttcttcctttc

SEQ ID NO: 177231 - DNA, 201 bp, Homo sapiens
catcaaactactaagtgtcctgctgtccaagaggaaccagacctgtttctcttctcttctttctcttctcatttcttctcttctcttctcctctcttctcctctcctctcctctcttctttctttcctttctttctttcctttctttctttctttctttctttctttctttctttctttctttctttctttcttcctttct

SEQ ID NO: 177232 - DNA, 201 bp, Homo sapiens
cgttgataatcatggttataacgttcaagacatgacaacaacaagtattggtaagaagtcctctgttataatgattcaatatgatatattctaactggagygaaaatgtggaaaataccttaaatagaatcaaataagaaatatgttcctgagaatgttcaaattccttatttttgcatgattgtaacaaatttaaaaagt

SEQ ID NO: 177233 - DNA, 201 bp, Homo sapiens
gggtgtatatgtacagtccttcatgggtatcctcggggaattggtttcaggacttctgaggataccaaaatctgcagatgttcaaatctctcaaataaaayggcagtatttgcatataacctatgcacattctcctgtatactttaaatcatctgtagagtatttataactctaataccatgtaaatgctatacaaataat

SEQ ID NO: 177234 - DNA, 201 bp, Homo sapiens
tgtcctgctgtccaagaggaaccagacctgtttctcttctcttctttctcttctcatttcttctcttctcttctcctctcttctcctctcctctcctctcttctttctttcctttctttctttcctttctttctttctttctttctttctttctttctttctttctttctttctttcttcctttctttctttctttcttct

SEQ ID NO: 177235 - DNA, 201 bp, Homo sapiens
caaggttcggtttttaaggtttccaaagatttaatactaaaagacatttgatgggctgggcgcggtggctcacgcctgtaataccagcactttgggaagcygacgtgggcggatcacaaggtcaggagatggagaccatcctggctaacagggtgaaaccccgtctctattaaaaatacgaaaaattagccaggcgtggtg

SEQ ID NO: 177236 - DNA, 201 bp, Homo sapiens
gagcatcatctcattagtgggaaaacctgggtttttgctccagccttcacacacttgcaaaggaaataaggattttagcaaatattctttgttctggttarattttattttaaggagagagagaggttgtatgagaaaggcaggtagaggaaagttgaaaaaagacttggatagtttaattatctttttctgaatatttta

SEQ ID NO: 177237 - DNA, 201 bp, Homo sapiens
tagataatagaagttactgaccttgctttcctttatctctgctcaatttaaattaacaagttaatattcatccatatttaacaagttatagttaattttayaaatcttcatgaaattctgtcatctcaaatctacttctttaagaaagtatacctttgataatatagaacatttaggagggagtatatatgttccagtaga

SEQ ID NO: 177238 - DNA, 201 bp, Homo sapiens
gtcctgctgtccaagaggaaccagacctgtttctcttctcttctttctcttctcatttcttctcttctcttctcctctcttctcctctcctctcctctcttctttctttcctttctttctttcctttctttctttctttctttctttctttctttctttctttctttctttctttcttcctttctttctttctttcttctt

SEQ ID NO: 177239 - DNA, 201 bp, Homo sapiens
ggtttccaaagatttaatactaaaagacatttgatgggctgggcgcggtggctcacgcctgtaataccagcactttgggaagctgacgtgggcggatcacraggtcaggagatggagaccatcctggctaacagggtgaaaccccgtctctattaaaaatacgaaaaattagccaggcgtggtggcgggcgcctgtaatcc

SEQ ID NO: 177240 - DNA, 201 bp, Homo sapiens
ggaagaaggaaaaaaaggtgtttaggttgggacaactgggtacatgagttgacatagttacagaacagggaccattgtgagaccaaaaaaaaaaaaaaaaacaaaccgtgattttaaacccaataatttattaaagcacttactgtagtaattctaagttctactttggtatatgtctttgaattaagatttatactaaaa

SEQ ID NO: 177241 - DNA, 201 bp, Homo sapiens
ctgctgtccaagaggaaccagacctgtttctcttctcttctttctcttctcatttcttctcttctcttctcctctcttctcctctcctctcctctcttctttctttcctttctttctttcctttctttctttctttctttctttctttctttctttctttctttctttctttcttcctttctttctttctttcttctttct

SEQ ID NO: 177242 - DNA, 201 bp, Homo sapiens
taatactaaaagacatttgatgggctgggcgcggtggctcacgcctgtaataccagcactttgggaagctgacgtgggcggatcacaaggtcaggagatgkagaccatcctggctaacagggtgaaaccccgtctctattaaaaatacgaaaaattagccaggcgtggtggcgggcgcctgtaatcccagctactcgggag

SEQ ID NO: 177243 - DNA, 201 bp, Homo sapiens
acatatacataaataattgcaatggacatttaatatgctatgctaaatgaagaaaggctagattaactgtgcctcagagtggtaaggaactcaccatggcrtttgaattcagcaaaatttagaattcacctagaagagtggatggggagggattgaaattgaacagcaggtatgaaggcaatatgttatctaaaaattatg

SEQ ID NO: 177244 - DNA, 201 bp, Homo sapiens
tgctgtccaagaggaaccagacctgtttctcttctcttctttctcttctcatttcttctcttctcttctcctctcttctcctctcctctcctctcttctttctttcctttctttctttcctttctttctttctttctttctttctttctttctttctttctttctttctttcttcctttctttctttctttcttctttctc

SEQ ID NO: 177245 - DNA, 201 bp, Homo sapiens
agggtgaaaccccgtctctattaaaaatacgaaaaattagccaggcgtggtggcgggcgcctgtaatcccagctactcgggaggctgaggcaggagaatgrcgagaacccgggagttggggctttcagtgagacatttgatgaacacacctttcatcctacaaatacattttctctcttgagaaatatttattccaaggca

SEQ ID NO: 177246 - DNA, 201 bp, Homo sapiens
tctgactacttttataatttttgctaacaagaatgtaacgatctaattgaggaaattaacatatacataaataattgcaatggacatttaatatgctatgstaaatgaagaaaggctagattaactgtgcctcagagtggtaaggaactcaccatggcgtttgaattcagcaaaatttagaattcacctagaagagtggat

SEQ ID NO: 177247 - DNA, 201 bp, Homo sapiens
aataaaaaatgagtaaaatgtaaatacaaaaggataagaaaatgcataaagggacaatgaaggaaagaacatataaaataatgcaactagagacaaggatrcagcaaaaacggaaaataaattggtttaaggaagcatatataaaaggagtaaaacaaattgtatataaggcacattcatcagttgaggcatacagtgtga

SEQ ID NO: 177248 - DNA, 201 bp, Homo sapiens
ataaaaaatgagtaaaatgtaaatacaaaaggataagaaaatgcataaagggacaatgaaggaaagaacatataaaataatgcaactagagacaaggatgsagcaaaaacggaaaataaattggtttaaggaagcatatataaaaggagtaaaacaaattgtatataaggcacattcatcagttgaggcatacagtgtgat

SEQ ID NO: 177249 - DNA, 201 bp, Homo sapiens
tgtccaagaggaaccagacctgtttctcttctcttctttctcttctcatttcttctcttctcttctcctctcttctcctctcctctcctctcttctttctttcctttctttctttcctttctttctttctttctttctttctttctttctttctttctttctttctttcttcctttctttctttctttcttctttctctct

SEQ ID NO: 177250 - DNA, 201 bp, Homo sapiens
gagtaaaatgtaaatacaaaaggataagaaaatgcataaagggacaatgaaggaaagaacatataaaataatgcaactagagacaaggatgcagcaaaaayggaaaataaattggtttaaggaagcatatataaaaggagtaaaacaaattgtatataaggcacattcatcagttgaggcatacagtgtgatgctctaggc

SEQ ID NO: 177251 - DNA, 201 bp, Homo sapiens
gtccaagaggaaccagacctgtttctcttctcttctttctcttctcatttcttctcttctcttctcctctcttctcctctcctctcctctcttctttctttcctttctttctttcctttctttctttctttctttctttctttctttctttctttctttctttctttcttcctttctttctttctttcttctttctctctt

SEQ ID NO: 177252 - DNA, 201 bp, Homo sapiens
attagtaattagtaatttaactgttttggcattctggaatggactagtatcacaatgtaactgatacaagagtatgttctcaaaaaattgttatacaccasagctgtaatgatcaacagcaacaaacactttggtaaatgcatactggaaggaatacatcctatacagtccaggagatgcctggtaaaatgtaactaaaaa

SEQ ID NO: 177253 - DNA, 201 bp, Homo sapiens
ccaagaggaaccagacctgtttctcttctcttctttctcttctcatttcttctcttctcttctcctctcttctcctctcctctcctctcttctttctttcctttctttctttcctttctttctttctttctttctttctttctttctttctttctttctttctttcttcctttctttctttctttcttctttctctctttt

SEQ ID NO: 177254 - DNA, 201 bp, Homo sapiens
caagaggaaccagacctgtttctcttctcttctttctcttctcatttcttctcttctcttctcctctcttctcctctcctctcctctcttctttctttcctttctttctttcctttctttctttctttctttctttctttctttctttctttctttctttctttcttcctttctttctttctttcttctttctctcttttt

SEQ ID NO: 177255 - DNA, 201 bp, Homo sapiens
gaggcagaggttgcagtgagccgagatcatgccactgcactccagcctgggtgacagagctagactcagtctccaaaaacaaacaaacaaaaaagaatgaytctctctctctctctctctctctctatatatatatatatatacatatatatatgtatatatatatttaactaagactcttttttgtaactcctagattta

SEQ ID NO: 177256 - DNA, 201 bp, Homo sapiens
aaaatgtgagatttttgagaccaaacatcataactttaaaaaaatatgtttgattcatgatggatttgggtcaaacgtttgtcagttacttctttttaaayggcaatgctaactatttctatatcaaagataaacagtgagtagttgttttaaagagtttcatttggtacagaattattaataaattttactaatctctgt

SEQ ID NO: 177257 - DNA, 201 bp, Homo sapiens
gagatcatgccactgcactccagcctgggtgacagagctagactcagtctccaaaaacaaacaaacaaaaaagaatgactctctctctctctctctctctmtctatatatatatatatatacatatatatatgtatatatatatttaactaagactcttttttgtaactcctagatttaaattatccttcaaaattttacc

SEQ ID NO: 177258 - DNA, 201 bp, Homo sapiens
gatcatgccactgcactccagcctgggtgacagagctagactcagtctccaaaaacaaacaaacaaaaaagaatgactctctctctctctctctctctctmtatatatatatatatatacatatatatatgtatatatatatttaactaagactcttttttgtaactcctagatttaaattatccttcaaaattttaccat

SEQ ID NO: 177259 - DNA, 201 bp, Homo sapiens
atcatgccactgcactccagcctgggtgacagagctagactcagtctccaaaaacaaacaaacaaaaaagaatgactctctctctctctctctctctctcwatatatatatatatatacatatatatatgtatatatatatttaactaagactcttttttgtaactcctagatttaaattatccttcaaaattttaccatt

SEQ ID NO: 177260 - DNA, 201 bp, Homo sapiens
gtgtgccgtctctacccaccccggctctgaaacatcctgccctcacctgtagtcaacatactcctgcttccaggtggcaggtgtgctgtctgtgggcttcycatgcttgtccagaaggccctgcttgatcatcagcttcttctgacttgcctggtggaacatcaaggtgtcaacattagaatggtgtcaatgctggaagcg

SEQ ID NO: 177261 - DNA, 201 bp, Homo sapiens
tgagaaacacccaagaattatcaataaaaaaataaatttaaaaaaaaaaaaaaaaaaaaaagaacctggcagggcacgcaacccagtaccacttacctttrgacctaaaccccacttccgagggtaagtgtctctctccatgatcactctcttgatcttggctactataccatggtcgcaggtagagatgaccgctgtggt

SEQ ID NO: 177262 - DNA, 201 bp, Homo sapiens
ttgccacatgccacccattgcattagacttggaaaggacagcagtaccacttggtagcattttggggtttgagctaaacaacaaagaaacatggagcttgytggtgaaagaggagtactgagttctttgccttgctttgttattctttttagtgtatacatctgtgtcatagtctggagtcagtagccactctagttccag

SEQ ID NO: 177263 - DNA, 201 bp, Homo sapiens
cactctagactgggtgacagagtgagactctttctcaaaaaaagaaaaaagaaaagaaaagaaaaggaaaaaaaaaaaagagaaagaaatccttcaacccygatgactttttgtgggtttctatttccctcctcccgtttactcttacttaaacagggtcaaggttgaggcaggacaagatccacacaagtacttgaacct

SEQ ID NO: 177264 - DNA, 201 bp, Homo sapiens
gacctaaaccccacttccgagggtaagtgtctctctccatgatcactctcttgatcttggctactataccatggtcgcaggtagagatgaccgctgtggtyattaatgcaatagctacaggcattgaataaagaaaagaattatttgaagggtgaaagaattgataattgatgagccccaattctactgttgtatgccact

SEQ ID NO: 177265 - DNA, 201 bp, Homo sapiens
acctaaaccccacttccgagggtaagtgtctctctccatgatcactctcttgatcttggctactataccatggtcgcaggtagagatgaccgctgtggtcrttaatgcaatagctacaggcattgaataaagaaaagaattatttgaagggtgaaagaattgataattgatgagccccaattctactgttgtatgccactt

SEQ ID NO: 177266 - DNA, 201 bp, Homo sapiens
ctgcagccttgacctcctgggctcaaatgatcctcctgcctcagcctcacgagtagctaggactacaggcacatgccaccacacctggcttggaactttawgtaatgcattcactccttcatttattgtccaaccaatgcagatcctacttcttgactccccactttgtaacagaacaagattacaggcctcttcctttcg

SEQ ID NO: 177267 - DNA, 201 bp, Homo sapiens
gaggaagaaaagaactgaggtctcttgggttctccatatagagcaggtgtaaggaattttctgaatcctcacgtgcaccccacctgggtccacctcacaartgaaactaaaccttacaagtttctctactatttagcaacgaattatttttggttaggtttcatgctgtctgctggcagtgatacgctttgtaaatctccc

SEQ ID NO: 177268 - DNA, 201 bp, Homo sapiens
taccgattcaaaacaaagtttcacttccaattataatccacatttaatactgaaagaatattgtctaaaggtaattttgcaataggtttgaatgtagcctrtctcccctatttaagtatatctccttccttggataaactaattttttttttcttttcaatgtggtctaggcaggttaatggagaaactaattttattagc

SEQ ID NO: 177269 - DNA, 201 bp, Homo sapiens
atattttcctgagaaattaccgtaagttctttctaaaataacctcagaaagagcttaaaataaagcttattgtgccgtcgcctttatttcagggaatcackctgaagctgaatgaaaaacagtcctgtacggtggccagaattcttcatggtggcatgatccatagacaaggtactctgtgggagctctgggtggggtttg

SEQ ID NO: 177270 - DNA, 201 bp, Homo sapiens
gcagtgagccgagatcacgccactgcactctagactgggtgacagagtgagactctttctcaaaaaaagaaaaaagaaaagaaaagaaaaggaaaaaaaamaaagagaaagaaatccttcaaccccgatgactttttgtgggtttctatttccctcctcccgtttactcttacttaaacagggtcaaggttgaggcaggac

SEQ ID NO: 177271 - DNA, 201 bp, Homo sapiens
cctcctcctccaggtggctatatcatttttgatttaatattttatctggggtgggcagggagcattttcagaggtttccatagtttttccccattgtgatwgctcttacccagatcagtaagatgaggaaagaacagcaaagcaaactgagaaggagcattttaaggagaagagagtgatcacctgtgagactgatccaca

SEQ ID NO: 177272 - DNA, 201 bp, Homo sapiens
atcaggttgttcaaggaaatacaaaggagaagagaacatgccagaaacccttggagcctgaggtgccgcaggattcagaatctttctaattttgttatatrttatgtaataccccaagcaggatccaggagagcaccatgtaaatcaaggcacattaatatttctgcagcaacctagataaacatgtctattttatttatt

SEQ ID NO: 177273 - DNA, 201 bp, Homo sapiens
ctgtgcatatagcacatgtgtgcaaatatatctgtaggaaaaactccaagtaggatcactgggtccaagagcacacacacttagaatttggacagggaccrccaaccacctgtgagactgcttgtttctctttgcctgcagcatgttgtcaaaattttctttttttgccagtctactggagggaaaaatagtatctcatat

SEQ ID NO: 177274 - DNA, 201 bp, Homo sapiens; identical to SEQ ID NO: 31636

SEQ ID NO: 177275 - DNA, 201 bp, Homo sapiens
agaaacacccaagaattatcaataaaaaaataaatttaaaaaaaaaaaaaaaaaaaaaagaacctggcagggcacgcaacccagtaccacttacctttggrcctaaaccccacttccgagggtaagtgtctctctccatgatcactctcttgatcttggctactataccatggtcgcaggtagagatgaccgctgtggtca

SEQ ID NO: 177276 - DNA, 201 bp, Homo sapiens
agtcccttagaaatgatgtaagcctctactccagacttccttctctctcatcttctagtccttttctaggccttgggcaggccagtggacactgctcaggmataccatctattcccatctagggacccttctccttccccacacagtgaatggcacactcctcacagttctgcctattgggaagatcttccctccctactg

SEQ ID NO: 177277 - DNA, 201 bp, Homo sapiens
atcccttgcaaggaggcgggactgaagtttgctactggggacattatccagattatcaacaaggatgacagcaattggtggcagggacgggtggaaggctyctccaaggagtcagcaggattgatcccttcccctgagctgcaggaatggtgagccatttttgtgcaggtggaagggccatgtgcctgccacaaataactt

SEQ ID NO: 177278 - DNA, 201 bp, Homo sapiens; identical to SEQ ID NO: 31638

SEQ ID NO: 177279 - DNA, 201 bp, Homo sapiens; identical to SEQ ID NO: 31631

SEQ ID NO: 177280 - DNA, 201 bp, Homo sapiens; identical to SEQ ID NO: 31635

SEQ ID NO: 177281 - DNA, 201 bp, Homo sapiens
tgtgccgtctctacccaccccggctctgaaacatcctgccctcacctgtagtcaacatactcctgcttccaggtggcaggtgtgctgtctgtgggcttccyatgcttgtccagaaggccctgcttgatcatcagcttcttctgacttgcctggtggaacatcaaggtgtcaacattagaatggtgtcaatgctggaagcgg

SEQ ID NO: 177282 - DNA, 201 bp, Homo sapiens
ttcaccctgtctaggacctatgttccactctctcagcaacaaaaggatctataacatgttttctcaataaggctttagtttctcctccagcttcaagtggycttcactactcagaaaccaattctacctcttttgctttcttcttcttcttcttcttcttggtggtatcactgtcctagaaagaaagagaatgaaagctca

SEQ ID NO: 177283 - DNA, 201 bp, Homo sapiens
tttgtttggggtttttacatctctgttgcagagagaaattataagattcttgtcagatttgggtatcatgcttataatgagttgggaagtgccatcatttyctataatctgttttcgtatgagattagccttctttcttcaaatgatgcttggaaaatttgtcaatgaagtaatgaggtaggtgtgtgtgtgtgtgtgtgt

SEQ ID NO: 177284 - DNA, 201 bp, Homo sapiens
ccaggtcattggccagagtgctggctggaggtcacagctccagctgggcttcttcctccagggccaagaagccaaagggtatgcacattcgttccagctcytaagccactagctaggccagtgcccatgctagctaacagggacaaaacaaaccagacccagtcatcgtcctggaggcacacagttccaggggcagagatg

SEQ ID NO: 177285 - DNA, 201 bp, Homo sapiens
tcatctctctgtcaaagtatttgtaccttcttgagggggctcttttcactgctagtctttaatctgtgtaagaaatgataattttctgcctttatttagtraaattctaaagcagggcaaataacccagagcatcaatctggtgttccatgaagtaatgccaaatgaagtaaagcaagctataacgtatatagtagaatcc

SEQ ID NO: 177286 - DNA, 201 bp, Homo sapiens
ttcattgtatgaacatgctacaatttaatctattctgtcagcttttttggtcttacattgaatggctgccattcaccaaacaggatctaattcagcaataygagaagatttactgcctgaagggcaataaattcaccacgttaacagaaaaatggagaaaaatcatatgatttttgtgcatgtgttttgtggatacatcta

SEQ ID NO: 177287 - DNA, 201 bp, Homo sapiens
cacagctccagctgggcttcttcctccagggccaagaagccaaagggtatgcacattcgttccagctcctaagccactagctaggccagtgcccatgctasctaacagggacaaaacaaaccagacccagtcatcgtcctggaggcacacagttccaggggcagagatggacagttgagcagatcctgatactggtgggat

SEQ ID NO: 177288 - DNA, 201 bp, Homo sapiens
cttcccagctttctggctgtgagtggtatatttgtgttgtttaaattacccagtctaaggtattttgttatagcatgaactaagacaacaaccattagaamactgaatccacttaacattttatacctttctcccagccataaattctttcacttctactgatctagtttaaggtcttaacatctctcaaccaaggtatca

SEQ ID NO: 177289 - DNA, 201 bp, Homo sapiens
tccccagtcctgttgcctaaaagcaactactttcatttatttaaatgtttcttctagcccttaccttttcaaataatatgcttatactgctgtttcttaawgtatcaatatttggcaatatctactgacttcctattatggtagataaatatttagctgtttcatacacagccacctctactctccctccttgacctccca

SEQ ID NO: 177290 - DNA, 201 bp, Homo sapiens
agtaggcctcactgtgtatggtaattgactatgcatggttctgggtaaaattaccctacttgaggccagctgttgatagaagaattaaagtttaggctgakactggtttatttccaacccaaattttacattaaaggagcttttcttgtgccttaaccatgaagagtggataatgcaggaatttcagatggtagttggaga

SEQ ID NO: 177291 - DNA, 201 bp, Homo sapiens
gtaggcctcactgtgtatggtaattgactatgcatggttctgggtaaaattaccctacttgaggccagctgttgatagaagaattaaagtttaggctgagwctggtttatttccaacccaaattttacattaaaggagcttttcttgtgccttaaccatgaagagtggataatgcaggaatttcagatggtagttggagaa

SEQ ID NO: 177292 - DNA, 201 bp, Homo sapiens
gattttctccagtactaggtatctgcagaacacagctttttctagagttggtgttccccacacactgcactttctttagagcttgatttaggcagcagtgktgtacccttgagacacagacaccatggacctgctctgtcacctaagtcactgctccccaaactctctcctcagatccacacatgccaactcggggcccca

SEQ ID NO: 177293 - DNA, 201 bp, Homo sapiens
ttaggatattgggatgtaattttgttttttttctgcttagtgtggttacccctaactctttacagcatgccttaactcagtagtaaggaagttttgtataycaaattagacatcacagcaattaaattcatcaggaaccagactttaaacttctggagttgtaatggtttattgtcacaaacatggaaacaagaagtgaga

SEQ ID NO: 177294 - DNA, 201 bp, Homo sapiens; identical to SEQ ID NO: 31668

SEQ ID NO: 177295 - DNA, 201 bp, Homo sapiens
ttagaactgtccacagtgtgctctattcttcacctgcaatactgctgaaggaaatcattttggtggatgatgctagtgtagatggtaagaaagcacatgcwaattagattgtttcccaaatccgtattgtggtatctacagtctacttggttatgtggtactctctgtatgccatctcagagcttgaatataatagtttgg

SEQ ID NO: 177296 - DNA, 201 bp, Homo sapiens
ccatatctttcactcttgtagtcagtcttctcagacctctaaatgagtcttttgaacggctagggttgactccatttgaagtttctcacttccctccaaayacattatatttattgataggaagtgtacagaataagtatgcattacagtgttttgtgttacagtagtgataatttgcatagctagcctttttccccagta

SEQ ID NO: 177297 - DNA, 201 bp, Homo sapiens
tgctgaaggaaatcattttggtggatgatgctagtgtagatggtaagaaagcacatgcaaattagattgtttcccaaatccgtattgtggtatctacagtstacttggttatgtggtactctctgtatgccatctcagagcttgaatataatagtttggatagtgggtatggtgaatgaaattagaatccaaggatggaca

SEQ ID NO: 177298 - DNA, 201 bp, Homo sapiens
ggatgatgctagtgtagatggtaagaaagcacatgcaaattagattgtttcccaaatccgtattgtggtatctacagtctacttggttatgtggtactctytgtatgccatctcagagcttgaatataatagtttggatagtgggtatggtgaatgaaattagaatccaaggatggacatattcaaatattttcaaatgca

SEQ ID NO: 177299 - DNA, 201 bp, Homo sapiens
atatatttataaaattaattttatacatagtatatagtggatattagagtttaaaaagaatgtattttttaatggagaggaatatcaatatttttgcaacyccaataaattgtagtaaattgtaacaattattttcttccaaaagtgtaattttcttgaggacaagatatctttgtattctcattaaccataagagtacat

SEQ ID NO: 177300 - DNA, 201 bp, Homo sapiens
taatgatgatcaaagtagaagaaggctctgcagcaagcccagcagtacaggctatgctaccacttcagctttatgatctagcaaactcaacgactctcttrgtatctgtgccaaagaggaatgctctatggagcctctggaaagtgccaatagcagaatcacaatacagacatctagggttttgaaataaatattttcttc

SEQ ID NO: 177301 - DNA, 201 bp, Homo sapiens
gaaccccatcgagttaccaatatttccgattcttgaaaacgttaacataacttgctatagaagttacactacataatgaagacatttacagtcaaattctrtagctaaaaaatattaaagtgacagcattttaattagaaaatctctgcttgtgggaaaatctgttgcttcttttattgtatatatttttctttgcgtttg

SEQ ID NO: 177302 - DNA, 201 bp, Homo sapiens
gttgttccctgaattttgaatattagtcttcattacttactaggcagatgttaccagactgtctttcctcttaacctctagtgagaaatgtaacatgtttkcattagctagagtaacagtgtaacttaatctatctgttaaataggaaaaataatactttcctagattaagataacaaaaccttaaaaacaatcaggagta

SEQ ID NO: 177303 - DNA, 201 bp, Homo sapiens
aatttaaaaggtaaggaagtcttttcttttctaaatgcctaattgcattttctttaacagcgttttcaactggcgattatagcaatgacagcccaagcagrtaacagctctgtggagaaaattcctttcacttatgcagaattcttatctccttttgtgtttaagtttcctcaacttcagtgttctccagttactagctgt

SEQ ID NO: 177304 - DNA, 201 bp, Homo sapiens
taacttaatctatctgttaaataggaaaaataatactttcctagattaagataacaaaaccttaaaaacaatcaggagtatcttccagccctagcattctygagatccctttctcactttggagattcaatactcaaaccatccatttatgaaaaattgaagccaagagaggtattctaacttcatttcactcagagatgg

SEQ ID NO: 177305 - DNA, 201 bp, Homo sapiens
agccctcaatgtgaaaatagcactattctgttgaatttttgttcttttaaaggctgatttttctaccagctttctttttctctgtctcatacatgcgtatmcacacacacacacacacacacacaggcacacacccactcacatgaaagaaaataaattatttcttaaaaactttactgtaatcctaattaaacatgtatt

SEQ ID NO: 177306 - DNA, 201 bp, Homo sapiens
tttttttttccatgtttcttttctgttaaaaaaaaaagtgtttgtttgtttgtttgtttgttttcttgattcccacactttaaagtgaatgaaagcttatytactatttaaatgtagccgggcgtggtggctcattcctgtaatcccagcactttgggaggccggcgttggtgaatcatttgaggtcaggagttcaagatc

SEQ ID NO: 177307 - DNA, 201 bp, Homo sapiens
agagtgacactccgtttcaaaatgaatgaatgaatgaatgagtgagtgaatataatccaccctatcattaaacttcgtcctagtactgctgctttttttayattttagtttgtgtgtgtgtttttttttttaaatttgcagactccttggcataaaaaggagtctgcgaattttcaataaaaaccacaaaaccaaaatatg

SEQ ID NO: 177308 - DNA, 201 bp, Homo sapiens
aatatgaaagatagttcatttttgttgctgccctggttcaatattttactcgaagaaaattaagtagaactgtttttactggttttaggagatataacacmtaaataaaggttctaagtgactttttgcactggagatagagacagtgtcttaatgtggcatgagaataaaccaggagtgccaagcctttttttttcaagc

SEQ ID NO: 177309 - DNA, 201 bp, Homo sapiens
taagagcactactgagttagattgctatctttttacccaaggccatgaagacaaattgggcagattgtgtactgtacaatagtacttggctaagcaggcargtgggcactaaatgaagcttatgctctgcttgtcccccacaaaggggcacataaatcagcaaatacctgttggttaccacaggacacatagatctacatg

SEQ ID NO: 177310 - DNA, 201 bp, Homo sapiens
ttgttttttactttgaatgtaaccagtatcagcaaataacacattttctgaagaactgctaatgttttccatgctcattagaaatatagacctagtttctyccaaagccagatggtcatgtgactgataatttaagcatgtttctatgtgccaggtttttcaaatggtttgactggaatgatacagtcactttggcaagtt

SEQ ID NO: 177311 - DNA, 201 bp, Homo sapiens
agtgagtgagctcttatgtcttcctcatcaatcattacttaaaaatcgtaaagcatggttaggagaagacatttaagtttactccaatgggagaggacacraagtactccccccgaccccaaaaatcttgactttgaagatagcatttctagtttttattaatctgaataaaagctttgaaaatgtgatatggctttaatt

SEQ ID NO: 177312 - DNA, 201 bp, Homo sapiens; identical to SEQ ID NO: 31664

SEQ ID NO: 177313 - DNA, 201 bp, Homo sapiens
gccctcaatgtgaaaatagcactattctgttgaatttttgttcttttaaaggctgatttttctaccagctttctttttctctgtctcatacatgcgtatacacacacacacacacacacacacaggcacacacccactcacatgaaagaaaataaattatttcttaaaaactttactgtaatcctaattaaacatgtatta

SEQ ID NO: 177314 - DNA, 201 bp, Homo sapiens
attgccttgtctctttcaactcatgcctgtggcttcttggcgattcccttagtccatttgttagaagaaaaaacaacaacaacaacaacaacaacaacaamaaaaaaacccctcaaacctgatttgcagatgaatctgaacaatacactagtactacccaagattaatgactgtgtagcactatagccctactcatgagta

SEQ ID NO: 177315 - DNA, 201 bp, Homo sapiens
tgctgggattaaaggcatgagctactgtgcctggcctggccaacatggtgaaacctcatttctactaaaaatacataaattaggtgggcatggtgatgtgygcctgtagtcccagctacttgggaggctgaggcaggagaatcacttgaacccgggaagcggaggttgcagtgagccgagattgcaccattgcactccagc

SEQ ID NO: 177316 - DNA, 201 bp, Homo sapiens
tcttatttgatagtagatcaaattattggagcaaaatctttaacacatggcaaatggcagtacttaataagtatttgctgaatgatgaacatcataaaaasataggtttaggctggacatgatggctcacccctataatcccaccactatgggaggcttaggcaggaagattgcttgaggtcaggagttcaagaccagcct

SEQ ID NO: 177317 - DNA, 201 bp, Homo sapiens
aggcgggtggatcacaaggtcaggtgatcgagaccatcctggctaacatggtaaaaccccgtctctactaaaaataccaaaaattagccgggtgtggtggygggcgcctgtagtcccagctactcgggagctgaggcaggagaaatgcgtgaacctgggaggtgaagcttgcagtgagccgagatcgtgccactgcactcc

SEQ ID NO: 177318 - DNA, 201 bp, Homo sapiens
tggctaacatggtaaaaccccgtctctactaaaaataccaaaaattagccgggtgtggtggtgggcgcctgtagtcccagctactcgggagctgaggcagragaaatgcgtgaacctgggaggtgaagcttgcagtgagccgagatcgtgccactgcactccagcctgggcgacagagagagactccataaaaaaaaaaaa

SEQ ID NO: 177319 - DNA, 201 bp, Homo sapiens
gtttcctcaacttcagtgttctccagttactagctgttccagccagttatccttgcctcttttttttttttccatgtttcttttctgttaaaaaaaaaagtgtttgtttgtttgtttgtttgttttcttgattcccacactttaaagtgaatgaaagcttatttactatttaaatgtagccgggcgtggtggctcattcct

SEQ ID NO: 177320 - DNA, 201 bp, Homo sapiens
tttcctcaacttcagtgttctccagttactagctgttccagccagttatccttgcctcttttttttttttccatgtttcttttctgttaaaaaaaaaagtgtttgtttgtttgtttgtttgttttcttgattcccacactttaaagtgaatgaaagcttatttactatttaaatgtagccgggcgtggtggctcattcctg

SEQ ID NO: 177321 - DNA, 201 bp, Homo sapiens
ttcctcaacttcagtgttctccagttactagctgttccagccagttatccttgcctcttttttttttttccatgtttcttttctgttaaaaaaaaaagtgtttgtttgtttgtttgtttgttttcttgattcccacactttaaagtgaatgaaagcttatttactatttaaatgtagccgggcgtggtggctcattcctgt

SEQ ID NO: 177322 - DNA, 201 bp, Homo sapiens
gaaatatattgtgttctaatcggctggtacatatgattacagatgtgtgcactctactttttgtgctttctgaaacttaattgctggaaattttggaatawgaatattttcttttaatatgtaacttaatatatttattcattgtcgccagtgtaacaagaggaatcagttaaactcctgtgtccaggcagtaacaccaat

SEQ ID NO: 177323 - DNA, 201 bp, Homo sapiens
tcctcaacttcagtgttctccagttactagctgttccagccagttatccttgcctcttttttttttttccatgtttcttttctgttaaaaaaaaaagtgtttgtttgtttgtttgtttgttttcttgattcccacactttaaagtgaatgaaagcttatttactatttaaatgtagccgggcgtggtggctcattcctgta

SEQ ID NO: 177324 - DNA, 201 bp, Homo sapiens
gtgctgtttgattacataatactgcccaggccctgctggggtacacttttacattgattatgtaaaccatatcacctttctaacatccaaaaaaatcagatttttttttttttatgagacaaggtctcactatgttgcccaggctgatcttgaactcctggactcaagtgatccttccatgtcagccttccaagtagctga

SEQ ID NO: 177325 - DNA, 201 bp, Homo sapiens
gctcaagcaatcctcttgcctcagcctcccgagtagctgggattacaagcacctagctagctagcacctttcaacaagtccagaacacatccttaacaccygtcacaacttaacaacctctgtagcctccacattgactcatttgctgagttcagctaactctacttccaaaatctgtttctaagcttccatgccccttat

SEQ ID NO: 177326 - DNA, 201 bp, Homo sapiens
aactcctggaaagattagactatttccctcatttgttcattcaacaaattcattgagtgagccctgcatgccagatactctgatgagttcaagctatttagactctaactcctttaggaaatctataaactagcagttccttaggataaagcattcagagtgttctgggggtatagaaaagggcattgaatgagactgggt

SEQ ID NO: 177327 - DNA, 201 bp, Homo sapiens
aggataaagcattcagagtgttctgggggtatagaaaagggcattgaatgagactgggtgtccacacattttcctgagaaagatgatatttgaaaacattaaaaaaaaaaaaagtaggtaggagctagtgaggtggctgtggggaatggcaacagaataagaagagtgtgaaggaaagtgaaatgaagagaagagcctgga

SEQ ID NO: 177328 - DNA, 201 bp, Homo sapiens
tgaagcgtggtccacgttgcttagaactgtccacagtgtgctctattcttcacctgcaatactgctgaaggaaatcattttggtggatgatgctagtgtaratggtaagaaagcacatgcaaattagattgtttcccaaatccgtattgtggtatctacagtctacttggttatgtggtactctctgtatgccatctcaga

SEQ ID NO: 177329 - DNA, 201 bp, Homo sapiens
aaatcatttatttgtaaaatattacccaatgataggaagctatttgtagtttttatggtttttcctcagttttttttcttatcgccttttatttaggatakcagttcttgactcttaaacattttattttagataatttcagttaaaagctcaggattttacattgaacttgagtttgaacagagttagaaaaatgctggt

SEQ ID NO: 177330 - DNA, 201 bp, Homo sapiens
gtttctaataactatttttattgtattattttgttgaaatagaaatgactttattatttaacgagttgctgatttatttatttattttgcaactgagcacrtgggttgcttttgtcagtaacagtgctattccttccatagtactttgaatactctgctcaacatgaaattcggcacaacatccagaaggaattatgtctt

SEQ ID NO: 177331 - DNA, 201 bp, Homo sapiens
atcatcttcctacttctaggctctgcctctgtaaggttctcaacctcttaatcttccattttaagatctacaatcttattttcaatctttattactgaaawggtgctttgaaaagtttttaaaaatcatttatttgtaaaatattacccaatgataggaagctatttgtagtttttatggtttttcctcagttttttttct

SEQ ID NO: 177332 - DNA, 201 bp, Homo sapiens
tctcacttgaagtgattaatttttttctaccctgttttagcactttttcacaaacctagaattgagagaatacataacaggtctcttctgtttttaaacaygtttaaggcttagctgtatcatagcaattcttacctgaacattgttttgtgcagtactagaaaacgttaacactggcttttataatttatgatgttttta

SEQ ID NO: 177333 - DNA, 201 bp, Homo sapiens; identical to SEQ ID NO: 31663

SEQ ID NO: 177334 - DNA, 201 bp, Homo sapiens
agacttgaaaaaaattctgttttatatctggggaggtggcagctaatggggaaggggtaaatatggggagacttacaaatattgagattgaagtcttttaraatttctagagcaggggttagtaaactatagttcttagaccaaatttgatccactacctgtttttgaaaacaaagtttaattggaatgcagctatgatta

SEQ ID NO: 177335 - DNA, 201 bp, Homo sapiens
aagttgactgtaggagagatttgttttgtttcacgagctgtttttacgtagggcttccaatttggcaggtagtactgacaaggaacatggcattattcccrgaaaaaggcattaaaaatcctggtttcattttactcatttatttattgtgtatcttttggcttatgtcttttattgttcaggtatcaattttcccatttt

SEQ ID NO: 177336 - DNA, 201 bp, Homo sapiens
gaaaaataggttcgatggactcacaggtccgcgtggctggggaggcttcacaatcatggcggaaggtgaaaggcatgtcttacgtggagggagacaagacwgaatgagaaccaagtgaaagtggtttccccttataaaaccgttaggtctcgtgagacttactcactaccacaagaacagtgtggggaaaaccacccccat

SEQ ID NO: 177337 - DNA, 201 bp, Homo sapiens
tgcagatgagcacttctgtgaattattaatattagtcgcttgttttttactatttagggtttcttataatgcttttagcaacagtcatattttttttctgkcagagagaagaaaaattattatatcttctcacttgaagtgattaatttttttctaccctgttttagcactttttcacaaacctagaattgagagaataca

SEQ ID NO: 177338 - DNA, 201 bp, Homo sapiens
attccagccaagataaatataattaaatctagtgcttcaggaaatgagttgatcatcaagggagttagaatggaaaaacatttatgaataattttaaaggrcattggacttaactgtttggaatgaatgagcttgattttttctatacatattataagttaatataaaaaaaggctttgggtagactccgtatgtacctta

SEQ ID NO: 177339 - DNA, 201 bp, Homo sapiens
gtgtagcactatagccctactcatgagtaactgtgaataatactggataaggaaaacttttctgtaggcagagatttgaacagtaaatatggttgtccacyatgttgggaatgagacatgcctagaaatacagatctatattggtcatcgatgggtagttgttaatggtttttatggtcagagttggaaggaacaggattg

SEQ ID NO: 177340 - DNA, 201 bp, Homo sapiens
attgaaaaggaaggtgttttcagttagctgttcaattatgcatttagttagtatcaaaataattcatactatgtaatttgggtgaaatttaacacaactcrtgtacactaagggggaaaactgaattcaaatcaattccagcagtggcaagagacaaaagtacattcacttattgcaaagcaaagacaagtaggactctga

SEQ ID NO: 177341 - DNA, 201 bp, Homo sapiens
aatgaatgaatgaatgaatgagtgagtgaatataatccaccctatcattaaacttcgtcctagtactgctgctttttttatattttagtttgtgtgtgtgtttttttttttaaatttgcagactccttggcataaaaaggagtctgcgaattttcaataaaaaccacaaaaccaaaatatgtttatatatatactttttat

SEQ ID NO: 177342 - DNA, 201 bp, Homo sapiens
gctgtgtgtgaaatgttttcagactgagtttggcaattgatattgatgagtatttttttttggtttttactctggctctgaaaacaatttgagtagcttawccattaaaaaaaaaaaaaaaaaaaaaaaggaggccgagctgagtggctcacgcctgtaatcccagcactttgggaggctgaggtgggtggatcacttgag

SEQ ID NO: 177343 - DNA, 201 bp, Homo sapiens
gtgtgtgaaatgttttcagactgagtttggcaattgatattgatgagtatttttttttggtttttactctggctctgaaaacaatttgagtagcttaaccmttaaaaaaaaaaaaaaaaaaaaaaaggaggccgagctgagtggctcacgcctgtaatcccagcactttgggaggctgaggtgggtggatcacttgaggcc

SEQ ID NO: 177344 - DNA, 201 bp, Homo sapiens
gtatcgtctatcacaaaaactcagcttatgtttctaataactatttttattgtattattttgttgaaatagaaatgactttattatttaacgagttgctgatttatttatttattttgcaactgagcacatgggttgcttttgtcagtaacagtgctattccttccatagtactttgaatactctgctcaacatgaaattc

SEQ ID NO: 177345 - DNA, 201 bp, Homo sapiens
tatcgtctatcacaaaaactcagcttatgtttctaataactatttttattgtattattttgttgaaatagaaatgactttattatttaacgagttgctgatttatttatttattttgcaactgagcacatgggttgcttttgtcagtaacagtgctattccttccatagtactttgaatactctgctcaacatgaaattcg

SEQ ID NO: 177346 - DNA, 201 bp, Homo sapiens
cggtccaggtggccggttggagacggtctcgagagcagtgtgtcggttgcccctggagagatcccgaaaggggcgccctgggccaaggggcaggtggcgcytcgggggggagcccggtcacaccctctcgcccacggtgcccccgccagtccctatggggcggcccctgaggagctggacggagaccaaagacctggtggc

SEQ ID NO: 177347 - DNA, 201 bp, Homo sapiens
atcgtctatcacaaaaactcagcttatgtttctaataactatttttattgtattattttgttgaaatagaaatgactttattatttaacgagttgctgatttatttatttattttgcaactgagcacatgggttgcttttgtcagtaacagtgctattccttccatagtactttgaatactctgctcaacatgaaattcgg

SEQ ID NO: 177348 - DNA, 201 bp, Homo sapiens
cacacacacacacacacacacacaggcacacacccactcacatgaaagaaaataaattatttcttaaaaactttactgtaatcctaattaaacatgtattrtagggcttgaggctccaggaccttggtgctagattaaatctttcaaatattaagaactacatgaaaccttgttcattatacatattttgtgttaaatggg

SEQ ID NO: 177349 - DNA, 201 bp, Homo sapiens
tcgtctatcacaaaaactcagcttatgtttctaataactatttttattgtattattttgttgaaatagaaatgactttattatttaacgagttgctgatttatttatttattttgcaactgagcacatgggttgcttttgtcagtaacagtgctattccttccatagtactttgaatactctgctcaacatgaaattcggc

SEQ ID NO: 177350 - DNA, 201 bp, Homo sapiens
actcatttgttagcaaaacttgaactcagttggagcaaagcctgagtgaactgtcaggaggctattgtgattgtgtattcaacttagtggattatgtccakctgcagaaatagtgctgtttgattacataatactgcccaggccctgctggggtacacttttacattgattatgtaaaccatatcacctttctaacatcca

SEQ ID NO: 177351 - DNA, 201 bp, Homo sapiens
atgttgaaatcaaatccaatgtattggtattaggagtagggtctttgggaggtcatcaggtcacgagggccttggcctcgtgtgtttttgtaaaagataaygtccttataaaagaggactgagaaagcttgttagccttttgcccttcctccatgtgaggatacctaggaggccatctatgagggatgtgccctcgccaga

SEQ ID NO: 177352 - DNA, 201 bp, Homo sapiens
tttcagtaaaaattctgagagtctgagtaacagaagtgagtacacggaagtgagaatggatgggatgttaacatctgagaggaatagtgcagctaagggamgaattacttggatatgtggagaaagagaagcatcagtagtaacaatagctaaaatgtatgaaaactcaccgtgtgccagtcattgttctaaatgtattat

SEQ ID NO: 177353 - DNA, 201 bp, Homo sapiens
tattcttcacctgcaatactgctgaaggaaatcattttggtggatgatgctagtgtagatggtaagaaagcacatgcaaattagattgtttcccaaatccrtattgtggtatctacagtctacttggttatgtggtactctctgtatgccatctcagagcttgaatataatagtttggatagtgggtatggtgaatgaaat

SEQ ID NO: 177354 - DNA, 201 bp, Homo sapiens
aggcctcactgtgtatggtaattgactatgcatggttctgggtaaaattaccctacttgaggccagctgttgatagaagaattaaagtttaggctgagacyggtttatttccaacccaaattttacattaaaggagcttttcttgtgccttaaccatgaagagtggataatgcaggaatttcagatggtagttggagaagt

SEQ ID NO: 177355 - DNA, 201 bp, Homo sapiens
aaacaattttcaaagcatacatttaacatgttgtttcaaaatgaatggggtttatgaaattatattgtgaaattttattacttgtattgatatgacatttktacttgatattggtaattatcagttaagcaaataaatcctagtttaaactgacggaaaatcttgcaagattaaagtgataacattttactagtatgaatt

SEQ ID NO: 177356 - DNA, 201 bp, Homo sapiens
  misc_feature (1)...(201): n = A,T,C or G
gagccacatcaatgagatgcagaagatctatgaggattatgggaccgtgtttgaccagctagtagctgagcagagcggaacagagaaggaggtccgtgagncatctgcaccctgggagcctagtgcatgtggtgtggggtctgtaggtgaccttctagataggctgccctgttaggactttcctggaggagaaaatgccta

SEQ ID NO: 177357 - DNA, 201 bp, Homo sapiens
  misc_feature (1)...(201): n = A,T,C or G
gtctaatgaactacacaatttacatatagacatatcataaaattcattacactggtttaaaatataaccttatgtcacgttcacattgtctggaacatccntggagggtgagagctggcagagggtggggtggagaaaggacatgggaactggcatgtggagtctggggcttttcctttttgattttgccttttttttttt

SEQ ID NO: 177358 - DNA, 201 bp, Homo sapiens
atggtgtcatgggtgaagtagacaaggaccgactctcccttctctctgcaagaaacctgcactttgttttcttagggcccccctgggttgcagccctttgycccccgcagctctgcgcggacctgattttgctgcccaggaagtcctcccaggcagcaccagcctgtgaggcatgactgccaggccccaacaccctcggac

SEQ ID NO: 177359 - DNA, 201 bp, Homo sapiens
aaaaatagaaaagacctatgttcctccttccatttagacgatgtaaatccaacacaggcttaccagatgatgaaggtaattgcagcctgaggttctttttttagcctccacgccccctttgaatcattctttttttaaatcgctgtgagtagcgttgagtctcaagctaccagaagccacttcgatgtaaatttgctcttt

SEQ ID NO: 177360 - DNA, 201 bp, Homo sapiens
actgtcactgacccagcgagggagaaacaagaagggaatattttcttcgttaaaagggctggacacactggccagaaaaggcaaggagaagagaccttctrtaactcaggtgagcttttcagcatgggaacagcagactagagtgaaattcctgaaacccctaattttcggcctgctatgaatcatcaatgttcattctct

SEQ ID NO: 177361 - DNA, 201 bp, Homo sapiens
ctggatcccctgcatgctccttgaaatttttgacatctatgtgttccctgagatatgattcagtaacttccatcatctcccttctctgagcggtctggcgyggaatatggtgagggaaggccagggaggtttttatggtgaaagcatccgtgtcacaggccttgccttttgctctctgaactaaggccagaaagttctggg

SEQ ID NO: 177362 - DNA, 201 bp, Homo sapiens
taaattcttggtgcttcctttgaataaccaggttttacttttcttgaactgtatacatttgtgagggttgtgtgtgtgtgtgtgtgtgtgtgtgtgtgtgtctgtctgtctgtctgcctaacacacaccaaaaattacatttaacttttcattgagggactctcttgagagggtcttactctttgatggccttggctttga

SEQ ID NO: 177363 - DNA, 201 bp, Homo sapiens
ccactgtgccagaccagtcttttgcttttaaagcagcattcctggggtgggggtggaataggctcaatagatgtcccagttgtctgcatatgagctgtttytgcctctctaagcagaggtggtctccagaggcaggtggctgcatccctagaacacctggggccaggagagccctgaccacatgggaggcagaggcagcag

SEQ ID NO: 177364 - DNA, 201 bp, Homo sapiens
gttttttaacctggatcccctgcatgctccttgaaatttttgacatctatgtgttccctgagatatgattcagtaacttccatcatctcccttctctgagyggtctggcgtggaatatggtgagggaaggccagggaggtttttatggtgaaagcatccgtgtcacaggccttgccttttgctctctgaactaaggccaga

SEQ ID NO: 177365 - DNA, 201 bp, Homo sapiens
caaatgttttaattctgagagttgggagaacaagtgacagtatattgtcactgagatgaacacagtgtcctcagctttcaataaaacaaagagtttaaaaragccaagatcaacttctaatagtagcttttaaataagcaggtgcttctgcatagttcaaatatgagcgaaagggaagtaccatttattcactcatgttgg

SEQ ID NO: 177366 - DNA, 201 bp, Homo sapiens
ttaaattcttggtgcttcctttgaataaccaggttttacttttcttgaactgtatacatttgtgagggttgtgtgtgtgtgtgtgtgtgtgtgtgtgtgtgtctgtctgtctgtctgcctaacacacaccaaaaattacatttaacttttcattgagggactctcttgagagggtcttactctttgatggccttggctttg

SEQ ID NO: 177367 - DNA, 201 bp, Homo sapiens
ttctgcatatgcacatcctgttaggccactgaatcctcacactcccagccctaagttatgatcatctgtcttttgcttttatttatttacttttagagatrgagcctcactctgtcactcagtggtgtcatcataactcactgtaaccttgaactcctgcctcagcatcgttagtggctgggaccacaggcatgtgccacc

SEQ ID NO: 177368 - DNA, 201 bp, Homo sapiens
cccaggcagcaccagcctgtgaggcatgactgccaggccccaacaccctcggacaaaataacccacacttggcacctgttgtgattcacacacacaccacygtttcttcatttcttttttgttgctgacgtttaacacagaatcttgttgttttttaacctggatcccctgcatgctccttgaaatttttgacatctatgt

SEQ ID NO: 177369 - DNA, 201 bp, Homo sapiens
aaaggagcctagatttattattaccaattaacttttcaacttactccttggcaaaataagaatcttagcccatgtagtagtttctagtgtctagttctatytacataattgagctctggtaatctaaaaatgctgaattgcctaacttacaactgtaaacctaagtcaaaaatgtccatgttttcagtagctacatttttg

SEQ ID NO: 177370 - DNA, 201 bp, Homo sapiens
tttaaattcttggtgcttcctttgaataaccaggttttacttttcttgaactgtatacatttgtgagggttgtgtgtgtgtgtgtgtgtgtgtgtgtgtgygtctgtctgtctgtctgcctaacacacaccaaaaattacatttaacttttcattgagggactctcttgagagggtcttactctttgatggccttggcttt

SEQ ID NO: 177371 - DNA, 201 bp, Homo sapiens
aattttaaattcttggtgcttcctttgaataaccaggttttacttttcttgaactgtatacatttgtgagggttgtgtgtgtgtgtgtgtgtgtgtgtgtstgtgtctgtctgtctgtctgcctaacacacaccaaaaattacatttaacttttcattgagggactctcttgagagggtcttactctttgatggccttggc

SEQ ID NO: 177372 - DNA, 201 bp, Homo sapiens
tgttaccaaggtagctttcactatggaaacagatgttctggtttgtcatttgcaatctgtgggaagggagtctgtactggtttagtataaggggagagagrtcactttaggtgatgaggaacttgggaacaatctgtacatacgtgacggctgatccaggccccacagtcttggcggtggcccgggccagccctgcctggt

SEQ ID NO: 177373 - DNA, 201 bp, Homo sapiens
acaggaaacttttcttatgtggccaccatgtttatatactcatatacaaaaataatatcagattttaaaattgtggttctacttgtaattaatttttttttcttttttgagacagagagtctctctgtcactcaggctggagtgcagtggcacgatcttggctcactgcaacctccacatcctgggttcaagcaattctcg

SEQ ID NO: 177374 - DNA, 201 bp, Homo sapiens
gcagcctccacctccggggttcaagcaattctcctgcctcagcttcctgagtagctgggattacaggcgtgtgccaccacacctggctaatgttttttttyttttgtatttttagtagagatggggtttcaccatgttggtcaggctggtcttgaactcctgacctccaatgatctgcccgcatcggcctcccgaagtgct

SEQ ID NO: 177375 - DNA, 201 bp, Homo sapiens
tacaagggcctggtcccaagtgacacaagttcaacagtttacatggaaaatgtataacagggtacataattttctgtaattctatagaatcttttttttttctttttttttcttttttttttttgagacagagttttgctcttgatgcccaggctggattgcaatggtgtgatcttggctcatcttaacctccacctccca

SEQ ID NO: 177376 - DNA, 201 bp, Homo sapiens
ttcaaaatttcatattctagtcctaatgtttactcattctgttaaaattccgaagacaagtatccttttatttatttatttatttatttatttttgagatkgagtcttgccctgtcacccaggctggcgtgcagtggcacgatctcagctcactgcaacctccgccccctgggctcaagtgattctcctgtctcagcttcc

SEQ ID NO: 177377 - DNA, 201 bp, Homo sapiens
tattgaggccatactgtagatgtaattttatatccaggtttcaaaatttcatattctagtcctaatgtttactcattctgttaaaattccgaagacaagtrtccttttatttatttatttatttatttatttttgagattgagtcttgccctgtcacccaggctggcgtgcagtggcacgatctcagctcactgcaacctc

SEQ ID NO: 177378 - DNA, 201 bp, Homo sapiens
tcccaaacctccaccattgtctttcctcgtgcgctcagaatgcaggcagtcgactcttagctcacctcgtttattgctgggcccgtgcttggaagacaccrtgttccatttggcaaatcgcttacactgggaagcaaagaacttccagcattcaccagcttcactccactatgcctgtgatgctctgtgaggagcggaaga

SEQ ID NO: 177379 - DNA, 201 bp, Homo sapiens
tgataccagtaggccaccacgttgctaataggggtatacaggatcttgagtgaggttaaattctttatggatgttgacattgtttcaatgcaccttggaaygtcactgttttgctgacaaatgatgatgattaagaaattctttgtttagatcttgtgactgtttttctttcatgcagaaaagttgtgcagcgaccaacct

SEQ ID NO: 177380 - DNA, 201 bp, Homo sapiens
ctttgctatagatggccgccatcttgttttacatgaatgacacaaatgctaactttttctgtttttttttgtttgtttttgtttttgtttttgagacggartctggctctgttgcccaggctggagtgcagtggcacgatcttggctcactgcaagcttcgcctcccgggttcatgccattctcctgcctcagcctcccga

SEQ ID NO: 177381 - DNA, 201 bp, Homo sapiens
tactggctgccaaatggtgcttgtttgtgtttctatttttttcctccttcttttgtaaggggcttgaaaatgaattctatttctcactttattcctgcctrtgaaggaagtgagatcattgggaaggaccaagtatgaaaatcttctttttagctctcgtgtttagagataactgtattgtgacactatcttcgctttttc

SEQ ID NO: 177382 - DNA, 201 bp, Homo sapiens
gggaggagtattttgatactcctttcagacaactgtggatattctttcatgtgttcccaaactcagcaagtggccatttcttcaaggttggttgcaatgcrgaacctgaggcattattggtggacttttcttatttggtagcattaaaattcattggcctatcttgtacttggaatagatcttttactcatgcgtgatttc

SEQ ID NO: 177383 - DNA, 201 bp, Homo sapiens
ttcttcttacagttttgtcagaaaaaggttgctcctggaattttaaagaaagtaaacgtaagagtttaattggaaatgcgaccaaacacagcggctcgctygcataaacccagctgctcaggaggctgaggtgggaggatgggaggattgcttgagcccaggagcccaagaccagcctgggagacagagtgagactcctgc

SEQ ID NO: 177384 - DNA, 201 bp, Homo sapiens
atgctttgcaccatcagtgcacatgtcctcagagagcaaaaggcaaatgacatttgacatttgacatttttctgaaaataattttcaacttgtggactccytggaagggtcttggtgaccccaggagtctacagaccacacctggagaagggctgttccgatacatatggagcagcaacacagaggagcagaaaactcatg

SEQ ID NO: 177385 - DNA, 201 bp, Homo sapiens
ataaaaattaaaccagctgtgcttgcattttagcaatgactgtgtgtacatcactatctaacaagagatcatctagcctgggatttccgtatcttccttayctcctgtttttacaatctaggtaacagaactttcgatgggagagcttctgatgcactctacggtttcctggttgaatccatttctgtctctaggaaaagc

SEQ ID NO: 177386 - DNA, 201 bp, Homo sapiens
ggagaagggctgttccgatacatatggagcagcaacacagaggagcagaaaactcatgttccaggttgatcagggccactctccagggagggtctcacctytgttaacccctagggaatgagaaggtagatgagggggcatagagcgttccaggcgcagagaagccgggaggaggccggggctgtctagctgtggggaggt

SEQ ID NO: 177387 - DNA, 201 bp, Homo sapiens
taggctgagggaacaatcacatgtgccccgatgtggcctgtttttcggcaggtgtgcctggaagggcaagggaagagcagagcagtgagaggtgaggcccrgaggaagtgtgaggccagatcaggctgacctcaaagaccattgtgaggtccatttattggagggaagggagaagccgttgcagagaaggaggagcaggga

SEQ ID NO: 177388 - DNA, 201 bp, Homo sapiens
aataagcaggtgcttctgcatagttcaaatatgagcgaaagggaagtaccatttattcactcatgttggcagagtgaggtcttagagactcatacgtttgragagtgttactctgttaagacgttcagctctagtttaaccttggaagagtttgcataaaataaagactttctttctcttttcctttctttagtttttaag

SEQ ID NO: 177389 - DNA, 201 bp, Homo sapiens
ataatttgccttgcagtaaagcaaatttagatgtgatcggattgctgatagtccttgtcttctcatctggattcttatctgagggttgggactgatgatcrgaaaggtcttgtgatcatctggggctttctcagttcagggaaaggtcagttatttacagtcatagcttcgctatctattcttgttccttttttgatggtt

SEQ ID NO: 177390 - DNA, 201 bp, Homo sapiens
ggtgggggttagactgggaggcagggtgactgtgtgtgtatgtgtgtgtgtgtgtgtgagagagagagagagagagagagagagagagagagagagagagaatataccactttgagaggctgggccataggtgatgacaaggagatttagagccgtgctagatggaggagggcataaagatctagggatatttagcatgga

SEQ ID NO: 177391 - DNA, 201 bp, Homo sapiens
taaaaaattgaatagaattaacatactatacaatttaccttttacagtgtaccattcagtggtttttagtatattcacaaaattgtgcaaccatcactacygtctaattccacaatatttttattccctcaaaaaagaaacctgacacccatcagaagtcactcttcaaggccagggtcagtccctcacgcctgtaatccc

SEQ ID NO: 177392 - DNA, 201 bp, Homo sapiens
agcccaggggcccagcattcctcacacgctgcagtcctcttttccatccctagatttggatgcttgtagacattgtggctggctgaggaaggtaaagaacrtccccagtttttccatactggcgaggcagatttctgtattgaatgacagaaacaatttggaaaggtagaataatgggttgaatctggcaggattaacatt

SEQ ID NO: 177393 - DNA, 201 bp, Homo sapiens
ctcccttctctctgcaagaaacctgcactttgttttcttagggcccccctgggttgcagccctttgccccccgcagctctgcgcggacctgattttgctgyccaggaagtcctcccaggcagcaccagcctgtgaggcatgactgccaggccccaacaccctcggacaaaataacccacacttggcacctgttgtgattca

SEQ ID NO: 177394 - DNA, 201 bp, Homo sapiens
agcttttctttgccccttatcgaacagttggagccctgcttccccaaccgtggagggcaggcatcatgccttcgttaccacaagcccctctggcacctctsgtaaaggagcacttgcaaaggcatttcatatccaagtgataccttttcctagcaggccggcgggtgtacaaagcccaggggcccagcattcctcacacgc

SEQ ID NO: 177395 - DNA, 201 bp, Homo sapiens
gggagggttgcttaatttcaggagtttgaggctgcagtgagctatgattgtaccacagcactccagcctgggtggcagagtgagaccctgtctcaaaaaamcaaaacaaaaacaatttgagagaaaattttttttgggggggggttggggttcaatatcattgcttttccagatagcataatttttggaaaaaatgttttt

SEQ ID NO: 177396 - DNA, 201 bp, Homo sapiens
gctgttaatggatgccagtcatttgtgttgggactcagctgcgttgttcagtaagaatttcagtgcagcagaggtgggccgagtacctcctgtgctggccrgtgagctggctgctggcggagatgtgaaagaaagaagccaccctgccctcactgggcttccagatggggaggtggtgaagtggggtggagatgtgagggt

SEQ ID NO: 177397 - DNA, 201 bp, Homo sapiens
acaacacaacacagttgctggctactgacagctggagagagtggcaggagcctcttggattatatagcaccagataagaggcacggcccgccactgaggcrgctctaacctgaggcgcgaggcaagcacacaatgggaaagcattctccaaagctaaatcagtacatgtactttttaaaggtaagtaagtaagtttaaagt

SEQ ID NO: 177398 - DNA, 201 bp, Homo sapiens; identical to SEQ ID NO: 31679

SEQ ID NO: 177399 - DNA, 201 bp, Homo sapiens; identical to SEQ ID NO: 31680

SEQ ID NO: 177400 - DNA, 201 bp, Homo sapiens
cctccccggttcaagcaattcttgaattcctccctcagcttcctaagtagctgggattacaggtgcccgccgctatgcctggctaattttttttttttttttttttttgtatttttagtagaaactgtgtttcactatgttggccaggctggtttcgaactcctgacctcaagtgacctgctcgccttggccttccaaaga

SEQ ID NO: 177401 - DNA, 201 bp, Homo sapiens; identical to SEQ ID NO: 31684

SEQ ID NO: 177402 - DNA, 201 bp, Homo sapiens
tggtgggggttagactgggaggcagggtgactgtgtgtgtatgtgtgtgtgtgtgtgtgagagagagagagagagagagagagagagagagagagagagagaatataccactttgagaggctgggccataggtgatgacaaggagatttagagccgtgctagatggaggagggcataaagatctagggatatttagcatgg

SEQ ID NO: 177403 - DNA, 201 bp, Homo sapiens
gtggtgggggttagactgggaggcagggtgactgtgtgtgtatgtgtgtgtgtgtgtgtgagagagagagagagagagagagagagagagagagagagagrgaatataccactttgagaggctgggccataggtgatgacaaggagatttagagccgtgctagatggaggagggcataaagatctagggatatttagcatg

SEQ ID NO: 177404 - DNA, 201 bp, Homo sapiens
tcatcaagttacattagcccttgtttctgattattcgatttgatggaagtgaagtcatttgtatggaaatggaaatcgtatgatttgtgtgtgtgtgtgtrtatatatatatatagcaggcaccttagtttcatccgcataacagatgattaagaattctagctgaacctatttaaagacattctatattttttaaaggct

SEQ ID NO: 177405 - DNA, 201 bp, Homo sapiens
aatgagttggactatttcagattccacgtataagtggaatcttgcagtgcatgtctttctgtagagtgacatctcttgagtttttactcttttttttttttgagatggagtcttgctctttttgcccaggctgtagtgcagtggcgccatgtcggctcactcaagcgattctcctgcctcagcgtcctgagtagctgatcc

SEQ ID NO: 177406 - DNA, 201 bp, Homo sapiens
tttagtagagatggggtttcaccatgttagccaggatggtctcgatctcctgacctcgtgatctgcccccctcagcctcctaaagtgctgggattacaggygtgaaccactgtgcccagcccacagcatgttgattaaaggagagagatggccgagcctggtctcgtgattgctctggccgtggcaccttgtacttggtgg

SEQ ID NO: 177407 - DNA, 201 bp, Homo sapiens
gctgggattacaggtgtgaaccactgtgcccagcccacagcatgttgattaaaggagagagatggccgagcctggtctcgtgattgctctggccgtggcaycttgtacttggtggatgcacagtgtctggcacccatgggaattaagggtaaataaattaaatgacacatccaaattgaggggaccagactgtaacttggg

SEQ ID NO: 177408 - DNA, 201 bp, Homo sapiens
cgagaaatgtgatgagaaagacaaaagggtatattaaccagatacaaatagataactcttgacttgaatttataattgatttgcagtcatattggccagargctttttctggagtgagtctgaacatctgtactgtgcaatgctgagttcagggtgggcaggaagcaagtgcttattactctctgataaggacaaagaacc

SEQ ID NO: 177409 - DNA, 201 bp, Homo sapiens
tagataactcttgacttgaatttataattgatttgcagtcatattggccagaggctttttctggagtgagtctgaacatctgtactgtgcaatgctgagtkcagggtgggcaggaagcaagtgcttattactctctgataaggacaaagaacccctaaaacatgttgcactgtatatgtcctgatgaggctcttccaggtg

SEQ ID NO: 177410 - DNA, 201 bp, Homo sapiens
cttccttatttatgtatttttttgaagtgaagtactactaatcggaaccatttgctctagccagaactcctccatgacttctggtatgccatcaaagagcrgtgcacactctgctgttcatatattgtgctggctttgcttagcaattttgacaaggaaaaccttgtcaaaaggtgttaattactaatctctttctttctt

SEQ ID NO: 177411 - DNA, 201 bp, Homo sapiens
tagtttgcctttttaggtaattagtggcaattgctagattttcagtttgttgttgttttgttatttgtttttatttttgattatttatataggggagaagyttctttttaaattactctgtataagtcatggagttgaagggaatttgtgtgggcagttagtctctagcagaattgcatcctagatagacataaaattata

SEQ ID NO: 177412 - DNA, 201 bp, Homo sapiens
aaatatgccttttttactattttcaagtgtatgcctctctgtggcattaagtatattcacattggtttgcaaccaccaccaccatctagaactttttcatyattccagacagaaactctgtaccccttaaacaataactctctatttcccctgctttcaactccctcataacttctattccactttctgtctcatttgcca

SEQ ID NO: 177413 - DNA, 201 bp, Homo sapiens
gggctgactgatactgcttactctgagggtaactaaccccatcacatactgagagcgtttctgagtctccccatgaaagatgtctgttttaaaagaagatrtacagctgggcacggtggctcatgcctgtaatctcagcactttgggaggctgaggcttgagcccaggaatttgagaccagcctggccaacatggtgaaac

SEQ ID NO: 177414 - DNA, 201 bp, Homo sapiens
taagtcttctgtatttgtttttgtcttaaatacaaaataagaatggaagaaatagaagcaatgataggcatttaaatgaaagttataaagtggaacgatgsctcggttgggtttagactaacactatcacaagattcttggggtatcacttcaccagccggaaacctctgtggccaagggtgcttttgcccaagttttgct

SEQ ID NO: 177415 - DNA, 201 bp, Homo sapiens
gctttttctttgccaaatgcctttcattgtttccttattttccctatcaatagttttcaacattttcctttctgccttgataccctaaaatgtgttagaaraacaaagatccacaaatttatgtttttacaaatttagaatatagcagaaaattccttaaggttaggtagtactgtaggtgatataaaaagaaaaaaatct

SEQ ID NO: 177416 - DNA, 201 bp, Homo sapiens
cgggcgccggttccctgtgaagctacggctggatcacacatattacaagcagtttccatggcctgcatcagtacctggaagcttggagatgccaggaaccrctgagccccaaagagggtggcatagccctggttctgggaactcctaggtctgggctccctgaagggctgcagctcttctctcctcctcttttctctcctt

SEQ ID NO: 177417 - DNA, 201 bp, Homo sapiens
cttgtcacctgtaatgtggcgagcaaggggcgtgttttggccctgtttgtgttgtagctctttcagccctgccgttaggcaggtcccgaattcttgtcccrtgaccaggaagaaggaggtatgcgggcaaggggagggtgagcaaggtgaagaggagctttattgagctgtagaacagctcagaggaaacccacagtgggt

SEQ ID NO: 177418 - DNA, 201 bp, Homo sapiens
atgttcagtcaatagcattctggttctgtgcatgtccctgcactcttccatgcactccacaggcctaatcttaagacttggccatagccggtgtggcagckcatgcctgtcatcccagcacttggggatgccaaagtgggcagatcacttgaggccaggagtttgagaccagcctggccaacatggtgaaaccctgtctgt

SEQ ID NO: 177419 - DNA, 201 bp, Homo sapiens
agagaaatgaagaatttaattcaccccactgtgctcttctgaggtcttttatccatctgcttgtagctaaaactgacaaagccttcaaggcttttctggaygcccggaaccccaccaagcagcattcctccacgctggagtcctacctcatcaagccggttcagagagtgctcaagtacccgctgctgctcaaggagctgg

SEQ ID NO: 177420 - DNA, 201 bp, Homo sapiens
ctttgtaccctttgagcagcatcttcccattgccctctcctgcccctggcaaccaccattgtactctctgcttcaatgagttggactatttcagattccaygtataagtggaatcttgcagtgcatgtctttctgtagagtgacatctcttgagtttttactcttttttttttttgagatggagtcttgctctttttgccc

SEQ ID NO: 177421 - DNA, 201 bp, Homo sapiens; identical to SEQ ID NO: 31682

SEQ ID NO: 177422 - DNA, 201 bp, Homo sapiens
tgttcatatattgtgctggctttgcttagcaattttgacaaggaaaaccttgtcaaaaggtgttaattactaatctctttctttcttacttttttttttttggctgaagataaattatttttggaatgttgtcattttgtgtgataaaacgtatataacataaaatatgccttttttactattttcaagtgtatgcctctc

SEQ ID NO: 177423 - DNA, 201 bp, Homo sapiens
gaagccatgtgaggaggttttagaaaatgagaaatatgtgcctctcacgccgagcctctttaaacagcggactatggatagattatcgtagatggaaatcktttacaaatacactttcctgccttcttaagcagactatcactgggcttaactaaacagcttcttggctctttctggatctgcaacaaggctgtggtcctt

SEQ ID NO: 177424 - DNA, 201 bp, Homo sapiens
ttcccagtgattcctgagagcctcttggcagcagcagctttctgtgagatggaaacgtgcttacgtgaggacttcgtgatatgattttggctgctcagaaktcatatttgcttcctagttctcaagtgtgtccttaaagaagagatagggcaactcggtagaaagcaagcatttaaaaaacccattattatctgtcttgag

SEQ ID NO: 177425 - DNA, 201 bp, Homo sapiens
gttttgatgttccttagcagacttctgggagaaactaaatgctggtggatagctttttctttgccaaatgcctttcattgtttccttattttccctatcartagttttcaacattttcctttctgccttgataccctaaaatgtgttagaagaacaaagatccacaaatttatgtttttacaaatttagaatatagcagaa

SEQ ID NO: 177426 - DNA, 201 bp, Homo sapiens
ctcctcagctggttgtctcattgtctctttgagtctggctgagtccagggctcagaggggtggaaatgtgcactgattggtccatagtggccatgagcagrcccagaaaaagctccataagttcccactctggtctgtgggactggcagcccagcccccagacttcaggccttccccggcttgaaagtggggcttttctgg

SEQ ID NO: 177427 - DNA, 201 bp, Homo sapiens
ggaggaaccatgtggcataccttttgggggttggtgacatcccctgtgtgtgagggaccaggttagagcctgccagcttcagaacggatgcttctggttcygaagcagctggtttgatgaagcagctatgggctctcagcctcccctctcttctccctttcacttcctcactacctgctctcttctcccgttttccatgca

SEQ ID NO: 177428 - DNA, 201 bp, Homo sapiens
ctctcttctccctttcacttcctcactacctgctctcttctcccgttttccatgcaccttcttccaaatttctcctccctctcctcctcattcctcatgcraagcaaatgctcagctgccttcgctggcctggttatgtcccaggatgcaagttattttacaaaactgaaattcatcagcatttttagtccttctactttg

SEQ ID NO: 177429 - DNA, 201 bp, Homo sapiens
atcttattttaataatacaatagatatggggtctcactatgttgctgaggctggtctcaaactcctgggctcaagagatcctactgccccggcctcctgamgtactggaattacaggtgtgagtcactgtgcctggcctgacttaaaattttttagaaaatcaaatcctcctgaaacactgatagagcaaggccatgtatt

SEQ ID NO: 177430 - DNA, 201 bp, Homo sapiens
gagaaagcaaataataacatcaacgaacacagaagaaaaaattttattgaaagaatatgagcatgttaagcatttgctgtaaaatccctctcaagtctaaygtagttatcaccttacctttttaagatatgaagatttccatgtataatgatagatttcagtgcattttttaaaatctttggtaaatacctagcagttact

SEQ ID NO: 177431 - DNA, 201 bp, Homo sapiens
gggattacaggtgtgagtcaccgtacccagtcctcttctatttttgaagtggtgatgtgggaggtgtctggtgaatgcctagtgtgtgctgggagtggatkttttgggactccccccgccccaccccctgtgccatgtcctcagaaggtggtctcttctcagggagaagatctgcctctgttttctgggcttcctgcccta

SEQ ID NO: 177432 - DNA, 201 bp, Homo sapiens
ttggaggcaagtttgtggacttgtttgaaatgactgtgctgtttttgttggagtctcaaaggccatttgatctctttgtagtgagttggattttttttttwaaaatttcctattttccgtgctccagagtatttgtgccctgctcttcttggtctatccttggtcattagggtggatgtgtcaggcagatgccaacccctt

SEQ ID NO: 177433 - DNA, 201 bp, Homo sapiens
tggaggcaagtttgtggacttgtttgaaatgactgtgctgtttttgttggagtctcaaaggccatttgatctctttgtagtgagttggattttttttttawaaatttcctattttccgtgctccagagtatttgtgccctgctcttcttggtctatccttggtcattagggtggatgtgtcaggcagatgccaaccccttg

SEQ ID NO: 177434 - DNA, 201 bp, Homo sapiens
ccaccacgcccggctaattttttgtgtttttagtagacatggggtttcaccgtgttagccacgatggtctcgatctcctgaccttgtgatccacccacctyggcctcccaaagtgctgggatgacagggtgagccacagcacccggccacaaatgctaacttaagcgaggaatgctggttcagaatctttacatgaactcc

SEQ ID NO: 177435 - DNA, 201 bp, Homo sapiens
tcatccgggtagcgccatactcctcctatgcagggatgattctgtcttcactctcaaaataagtaaattacctcaggtcacgtggctgtgaaacagtgccsctggaactgaaaatcaggcctattttcctaccacttggttaagttttgtggggttcgctgcccgagctgctggtcagatttgttgggtgaggctccacct

SEQ ID NO: 177436 - DNA, 201 bp, Homo sapiens
gtctgatgcagaccgcctccgcaaagtcatccaggagcttgtggacacagagaagtcctacgtgaaggtaagggaagagctggcatttatgcattcgtgcytctttgatgatggcaagtggtatgctggcagaggtccccagatcacctctgcccaggacacctgccactccccagggggggacacctgctccttgaatca

SEQ ID NO: 177437 - DNA, 201 bp, Homo sapiens
agcccaggaggcggaggttgcagtgagcagagatcacaccactgcactccagcctgggtggcagagcaagacactgtctttaaaaaaaaaaggggggggggaggggcattttctacttttaattgagcagcaagggaaatccacaaggtgagaagatgcataggaatatggtgtgatcttcatgatcaaattacaaagcac

SEQ ID NO: 177438 - DNA, 201 bp, Homo sapiens
aataacatgctgttattactttgtagaaacaccaaaactgagaactcccttccttctttcaatccaagagaacagaactacacacacacacacacacacacctataacataaaatttcagaaagttgttttgaaattccagcagagacagttctcatatgagagataaagagcattttctaggctgggcatggtggctcat

SEQ ID NO: 177439 - DNA, 201 bp, Homo sapiens
aaataacatgctgttattactttgtagaaacaccaaaactgagaactcccttccttctttcaatccaagagaacagaactacacacacacacacacacacacctataacataaaatttcagaaagttgttttgaaattccagcagagacagttctcatatgagagataaagagcattttctaggctgggcatggtggctca

SEQ ID NO: 177440 - DNA, 201 bp, Homo sapiens
tgttgccatttcctcccacaaacaccctctttttaattaaatttaattaattaattttaaaaatgtaaaaatgttcgtagaaatgggtctcactgtgttgsccaggctggtctcaagctcctggcctcaagtgatcctcctatctaggcctcccaaagtgctgggattataggcatgagccaccacgcctggcccacaagc

SEQ ID NO: 177441 - DNA, 201 bp, Homo sapiens
atgaatgtgctgtcttcttaaaggatttactttctgtctgcttttccgtgaagaatttccttgtgatttatttgtgggcctaagagttagcgtggtgtccygaacttcatggctaatcccctcatttcaaatcctgatcttcacatagatggagtcactttttggaagtttgccagagatgcttgagtttcagaaggtgtt

SEQ ID NO: 177442 - DNA, 201 bp, Homo sapiens
gatcctggagaaggggcaacagtggtgtgaagattaaaggatggattaaaggttgttttctctgtcctgcagagcgccccatcaggttttttgaagtcgtwcccattttggtggcttctgtgtgttgtgttggctcagcctaggggtctgtagtggttttgctgacgctgctgcccaccatggagagagctgactgtcatg

SEQ ID NO: 177443 - DNA, 201 bp, Homo sapiens
tgttagaatttcctgttaggccacgctgtactgggagggtcatttcagtgacaggctggcagagtactcagatggtgtcatgggtgaagtagacaaggacygactctcccttctctctgcaagaaacctgcactttgttttcttagggcccccctgggttgcagccctttgccccccgcagctctgcgcggacctgatttt

SEQ ID NO: 177444 - DNA, 201 bp, Homo sapiens
tgggatttaggtggggacacagagccaaaccataccattttgccctggcccctcccaaatctcatatcttcacatttgaaaaccaatcatgccttcccaayagtcccccaaagtctcaactcatttcagcattaactgaaaggtctacagtctaaaatctcatcccagagaaggcaagtcccttccacctatgagcctgta

SEQ ID NO: 177445 - DNA, 201 bp, Homo sapiens
tacctgggagtggcaggggctgtgcggacagctagagaggggaacagagctagagacggagcacagctagagatggagcacagctagagacagagcacagctagagaggggaacagagctagagatggagcagagctagagaggggaacgggccctgtgccatttaaggtctcgctgaagcctccttgcccctcagctgga

SEQ ID NO: 177446 - DNA, 201 bp, Homo sapiens
atacctgggagtggcaggggctgtgcggacagctagagaggggaacagagctagagacggagcacagctagagatggagcacagctagagacagagcacagctagagaggggaacagagctagagatggagcagagctagagaggggaacgggccctgtgccatttaaggtctcgctgaagcctccttgcccctcagctgg

SEQ ID NO: 177447 - DNA, 201 bp, Homo sapiens
aatacctgggagtggcaggggctgtgcggacagctagagaggggaacagagctagagacggagcacagctagagatggagcacagctagagacagagcacagctagagaggggaacagagctagagatggagcagagctagagaggggaacgggccctgtgccatttaaggtctcgctgaagcctccttgcccctcagctg

SEQ ID NO: 177448 - DNA, 201 bp, Homo sapiens
atcttgtctgtttcctctttccatgctctggtaagttcctgaggaaggctgtttctgcagcattcggggagggctgcggatgctccccctttcttcagctygttgccatcggcacttgtggggcttgacccaacaactgacacctagaggccaggtcacccagaggccaggggcctggagatgaaggagaccagacgtcgt

SEQ ID NO: 177449 - DNA, 201 bp, Homo sapiens
ttcttggcttagaatccaagttgtaatgtttggacttaactgtttggtttaatcttagttaaaaacacatatatgtgtacacacacacacacacacacacactcttaagcctaatttttaaattatccttaaagtatccatgtaaataaatgggagacagttttctggagagagccgttattaacaaaccatctggttatc

SEQ ID NO: 177450 - DNA, 201 bp, Homo sapiens
agttcatagtaacttctgtggtgtaaacagctgcatatactttaattttatttagatgtacagatggcagttattctccaagatacttacttaggagtatwctcagtaaaattctatttgtccttatccctgaagtccatttgcttcttattgttttgagtcatttactcagaatgaacagaaacataaagtcattgcttt

SEQ ID NO: 177451 - DNA, 201 bp, Homo sapiens
aggagtcatcagtaataaggccatgcaccagaatcccagaaggtgctcatgaaatgtaaactttcctaggcctcagacctaatggataaaatcttcaggcrtaggacctgggcatctgcatttttaaaagccaacaggtcattctgtccattcaaggctgataccagtaggccaccacgttgctaataggggtatacagga

SEQ ID NO: 177452 - DNA, 201 bp, Homo sapiens
ttagtctttttcctcccccatctgtcagatatttgattcaagtggcagccatggattttctggaactcagctacctcaaaactccagtaactccagtgagrtaaactttgctatagatggccgccatcttgttttacatgaatgacacaaatgctaactttttctgtttttttttgtttgtttttgtttttgtttttgaga

SEQ ID NO: 177453 - DNA, 201 bp, Homo sapiens
gtaaagtgttcaatatgaatagggccactgagtgagagtgtggtagtcttacctccttctctgtagaatacctgggggtatatgggcagacataaagtggrcaggtaaaaatgtaaatgaaagttgctaaggtcactatgaggatagtgcacaggtatcttcctatgagtcagaagacctgggaatcaggggccccgttat

SEQ ID NO: 177454 - DNA, 201 bp, Homo sapiens
aagcaagcatttaaaaaacccattattatctgtcttgagtcctcactggggaaccacgagctccctggtacagagcctctgtgagctgtgcagtcaccaaytccaggctgcgcttatgtttaagccaccctgagagaggccacctgaggtctagcaagtctttgctctctcctcattggcagtgaagtcttgtccgtcaca

SEQ ID NO: 177455 - DNA, 201 bp, Homo sapiens
tggtgattattatcattgaactgtactgaatctctaaactaacatacataatagctaaaagattgtctttttttcctttaccctttaaaatatgtatcttygtctttcttttatgtcaccttctgaagaattgttataaaatgtttttctttcaagttaacattactttaaatttgggctggctttgaatgtcaaggctgg

SEQ ID NO: 177456 - DNA, 201 bp, Homo sapiens
tcatgtcacttgtgcagtgactgaacgcatgctgtcatcttggtggtatttcttggctcacatcttggtggtatttcttacaccctgggggaaataatttstgtggtttttcattttaggtacctaatgtttgccattttgtgacatgggtgatatgatatgctttatgacctttggcggctctatgtatatactgaaata

SEQ ID NO: 177457 - DNA, 201 bp, Homo sapiens
agatttgggcattctggcagacatctgcacttacaaactaactgtgataacatatttacactatacccataaattgcactccaaacaatgacctaatcatkgccccttttaaaaaggccccacttcctaataccatcacctaaagcattaagatttcaacgtacatatttcggagggacacattcagcccatagtggtctt

SEQ ID NO: 177458 - DNA, 201 bp, Homo sapiens
tctcaaattggaatatcccaatgcagttggtctaaacagatttgggcattctggcagacatctgcacttacaaactaactgtgataacatatttacactayacccataaattgcactccaaacaatgacctaatcattgccccttttaaaaaggccccacttcctaataccatcacctaaagcattaagatttcaacgtac

SEQ ID NO: 177459 - DNA, 201 bp, Homo sapiens
catgtgccacgctggtttgctgcacccatcaacccatcatctaccttaggtatttctcctgacgctatccgtctcctagctccccacctccactacaggcyccggtgtgtgatgttcccctccctgtgtccatggttctcattgttcagcttccacttacgagacatgtggtgtttggttctttcccctgctgttttctgt

SEQ ID NO: 177460 - DNA, 201 bp, Homo sapiens
gtgtgtaggccaccagccagacagatctagaaaactgggtcactgctgtacactctgcttgtgcatccctttttgcaaagaagcatgggaaagaggacacsctgcggctgctgaagaaccagaccaaaaacctgcttcagaagatagacatggacagcaagatgaagaagatggcagagctgcagctgtccgtggtgagcg

SEQ ID NO: 177461 - DNA, 201 bp, Homo sapiens
cagacaggcggacacggatggaacaaagttaacatgggaacactagaaaaaacaacgaatgagtggttctcaggaggctgaggcacaagaatctcttgaascggggagacagaggttgcagtgagctgagatctttcaaactgtttcttcgaatagtagctgtgagagagctaacatttgttttgctcttagtggcatcta

SEQ ID NO: 177462 - DNA, 201 bp, Homo sapiens
taaatacctgggagtggcaggggctgtgcggacagctagagaggggaacagagctagagacggagcacagctagagatggagcacagctagagacagagcacagctagagaggggaacagagctagagatggagcagagctagagaggggaacgggccctgtgccatttaaggtctcgctgaagcctccttgcccctcagc

SEQ ID NO: 177463 - DNA, 201 bp, Homo sapiens
tgctctgctaaatacctgggagtggcaggggctgtgcggacagctagagaggggaacagagctagagacggagcacagctagagatggagcacagctagagacagagcacagctagagaggggaacagagctagagatggagcagagctagagaggggaacgggccctgtgccatttaaggtctcgctgaagcctccttgc

SEQ ID NO: 177464 - DNA, 201 bp, Homo sapiens
gtgctctgctaaatacctgggagtggcaggggctgtgcggacagctagagaggggaacagagctagagacggagcacagctagagatggagcacagctagagacagagcacagctagagaggggaacagagctagagatggagcagagctagagaggggaacgggccctgtgccatttaaggtctcgctgaagcctccttg

SEQ ID NO: 177465 - DNA, 201 bp, Homo sapiens
cctgtgctctgctaaatacctgggagtggcaggggctgtgcggacagctagagaggggaacagagctagagacggagcacagctagagatggagcacagctagagacagagcacagctagagaggggaacagagctagagatggagcagagctagagaggggaacgggccctgtgccatttaaggtctcgctgaagcctcc

SEQ ID NO: 177466 - DNA, 201 bp, Homo sapiens
gcctgtgctctgctaaatacctgggagtggcaggggctgtgcggacagctagagaggggaacagagctagagacggagcacagctagagatggagcacagctagagacagagcacagctagagaggggaacagagctagagatggagcagagctagagaggggaacgggccctgtgccatttaaggtctcgctgaagcctc

SEQ ID NO: 177467 - DNA, 201 bp, Homo sapiens
ttgcctgtgctctgctaaatacctgggagtggcaggggctgtgcggacagctagagaggggaacagagctagagacggagcacagctagagatggagcacagctagagacagagcacagctagagaggggaacagagctagagatggagcagagctagagaggggaacgggccctgtgccatttaaggtctcgctgaagcc

SEQ ID NO: 177468 - DNA, 201 bp, Homo sapiens
tttgcctgtgctctgctaaatacctgggagtggcaggggctgtgcggacagctagagaggggaacagagctagagacggagcacagctagagatggagcacagctagagacagagcacagctagagaggggaacagagctagagatggagcagagctagagaggggaacgggccctgtgccatttaaggtctcgctgaagc

SEQ ID NO: 177469 - DNA, 201 bp, Homo sapiens
tgctttgcctgtgctctgctaaatacctgggagtggcaggggctgtgcggacagctagagaggggaacagagctagagacggagcacagctagagatggagcacagctagagacagagcacagctagagaggggaacagagctagagatggagcagagctagagaggggaacgggccctgtgccatttaaggtctcgctga

SEQ ID NO: 177470 - DNA, 201 bp, Homo sapiens
ttgctttgcctgtgctctgctaaatacctgggagtggcaggggctgtgcggacagctagagaggggaacagagctagagacggagcacagctagagatggagcacagctagagacagagcacagctagagaggggaacagagctagagatggagcagagctagagaggggaacgggccctgtgccatttaaggtctcgctg

SEQ ID NO: 177471 - DNA, 201 bp, Homo sapiens
attgctttgcctgtgctctgctaaatacctgggagtggcaggggctgtgcggacagctagagaggggaacagagctagagacggagcacagctagagatggagcacagctagagacagagcacagctagagaggggaacagagctagagatggagcagagctagagaggggaacgggccctgtgccatttaaggtctcgct

SEQ ID NO: 177472 - DNA, 201 bp, Homo sapiens
tcaagagacagactgtataaaaagcatgcatcaggctaccaagtttgaccaacatgcttgtgtaagctttctgcaatatccaaggaaagaaaatgaattaygtgaatattaagagatgctcctgagaagttcagcttcttacccaagacagagatggatagaggtcaggcatgaaggcatttaagctgaaaaaaggagagt

SEQ ID NO: 177473 - DNA, 201 bp, Homo sapiens
tgggacttctgtgcctttctgtggcagaattgggcttgttttgaagcatattccgtcatggcccttgcagggtatcagaggtaattccagtgtttttgggygatgagtcagagggacatatttataactgagataatgttaatactagctagatgagaagtgtttcttcaccttttaggagttttttgtttttttgttttg

SEQ ID NO: 177474 - DNA, 201 bp, Homo sapiens
ataaggaccctaatcccatcatggggactctaccctcatgaccccctctaaaccaattacctctcaaagatgtcagttaaatatcatccactggtagttawggcctcaacatggattttggggaggggggaaacaaatgttcagtcaatagcattctggttctgtgcatgtccctgcactcttccatgcactccacaggcc

SEQ ID NO: 177475 - DNA, 201 bp, Homo sapiens
gatgtcgtctcaaattggaatatcccaatgcagttggtctaaacagatttgggcattctggcagacatctgcacttacaaactaactgtgataacatattyacactatacccataaattgcactccaaacaatgacctaatcattgccccttttaaaaaggccccacttcctaataccatcacctaaagcattaagatttc

SEQ ID NO: 177476 - DNA, 201 bp, Homo sapiens
gtgtctgcctccaccaccccctcctgtgctgggcttcggttctccctcctcttccttcacacagaggtgaagaacagatgatcagcatcctgttttcaggrcctcttcatatccctgaatatattgtagtaatttgtatagtgattttactcctggatcatcactttttcagactaaaccacaaaatagtagagatttcct

SEQ ID NO: 177477 - DNA, 201 bp, Homo sapiens
gtagagttaaaaacaaaccggttagggccgggtgtggtggctcacgcctgtcatcccagcactttgggaggctgaggcaggcggatcactggaggtcaggrgtttgagaccaacctggccaacttggtgaaatcccatctctaatgaaaattagctgggcatgctggcatgtgcctgttagtcccactacttgggaggcag

SEQ ID NO: 177478 - DNA, 201 bp, Homo sapiens
agtctggctctgttgcccaggctggagtgcagtggcacgatcttggctcactgcaagcttcgcctcccgggttcatgccattctcctgcctcagcctcccragtagctgggactacaggcgcccgccaccacgcccggctaattttttgtgtttttagtagacatggggtttcaccgtgttagccacgatggtctcgatct

SEQ ID NO: 177479 - DNA, 201 bp, Homo sapiens
ctgatttttgtatttttagtagagatggggtttcaccatgctggccagactggtctcgaactcctgacctcaggtgatccacctgcctcagcctcctggastgctgggattacaggcattagccaccgtgcctggccagaaacctgctatcttaatagtctgctgtatttcaaatgttttaattctgagagttgggagaac

SEQ ID NO: 177480 - DNA, 201 bp, Homo sapiens
gaactcacctccaggtgggtctcctccacccactcctgctctcccctgagctcgtctccttcacagaaagttcaccacctcatgcccctcgtctttgtggygtccacagttcctaactcgcacctgccagaccctgcctctctgtcctgccttgggccacagttacactggccttcaattcctgacacactctgtgcttcc

SEQ ID NO: 177481 - DNA, 201 bp, Homo sapiens
taacattgcttaatggcttttttgatgttgttttttttgagatggagtctcactttgttgcctaggctggagtgcagtggcgcgatcttggctcactgcamcctccacctcaggagttcaggtgattctcctccctcagcctcctgagtagctgggattagaggcgcccaccaccacgcccggcgaatttttgtattttta

SEQ ID NO: 177482 - DNA, 201 bp, Homo sapiens
tacgagtacatggtttgagtttgcagccttctttcatctgaaaatatttctcacagtaatccctctctcttttttctgtttctccttcctttttctcaggkctgagaaagggcaatgagatcatgaccttaaatggggaagctgtgtctgatcttgaccttaagcagatggaggccctgttttctgagaagagcgtcggac

SEQ ID NO: 177483 - DNA, 201 bp, Homo sapiens
ggccctcttctcacaactccactaggcggtgccccagtagggactctgtgtggggctccaaccccacatttcccttctgcactgccctagtggaggttctscatgagagccctgcccctgcagcaaacttctgcctggacatccaggcatttccatacattctctgaaatctaggtggaggttctgaaaccccaattcttg

SEQ ID NO: 177484 - DNA, 201 bp, Homo sapiens
ccccatgttatttttttattttttattttttttgagacatagtcttgctctgtcacccaggctggagtgcagtggcatgatctcggctcactgcaacctcygcctcctgggttcaagcaattctccctgcctcagcctcccaagtagctgggattacaggcaccgtgcttgccaccacacctggctaatttttgtattttt

SEQ ID NO: 177485 - DNA, 201 bp, Homo sapiens
cccaggctggagtgcagtggcacgatcttggctcactgcaagcttcgcctcccgggttcatgccattctcctgcctcagcctcccgagtagctgggactasaggcgcccgccaccacgcccggctaattttttgtgtttttagtagacatggggtttcaccgtgttagccacgatggtctcgatctcctgaccttgtgatc

SEQ ID NO: 177486 - DNA, 201 bp, Homo sapiens
caggaggagttctctcttacttgagggggtgtcagcctttttgtcctcttcaggtggtcaacagattggatgaggcccacccacattagggaaggcaatcsgcattactcagtctacccatttaaatgttaatatctcccagaacatccttggagacacacccagaataatgtttgactaaatacctggtcaccccgtggc

SEQ ID NO: 177487 - DNA, 201 bp, Homo sapiens
gtttcaccatgttggtcaggctggtctcgaactctgaccttaggtgatccgcttgcctcagcctcccaaagtgctgggattacaggtgtaagccaccacgsctaatctcaattttttagaatcttaaagacagtaacttacacccctgagcggaactgttgctcaaccaggatatgccatttaaactccaaagtacaaaat

SEQ ID NO: 177488 - DNA, 201 bp, Homo sapiens
ctctgtcaggtggtaaaggaaggctgtatatatttttttttcctggcgcaggtgcttttggtagtcagaagtccagcagcacctcccgcctggttgttgamcacgtacgtgctcttttctcagctgctgtgaaggatatccaaggtggttgcttctgaaaccagagctcctaccctgtgcccaatccttcttccccgtggt

SEQ ID NO: 177489 - DNA, 201 bp, Homo sapiens
cttgcaccgttttcctctgtcaggtggtaaaggaaggctgtatatatttttttttcctggcgcaggtgcttttggtagtcagaagtccagcagcacctccygcctggttgttgaccacgtacgtgctcttttctcagctgctgtgaaggatatccaaggtggttgcttctgaaaccagagctcctaccctgtgcccaatcc

SEQ ID NO: 177490 - DNA, 201 bp, Homo sapiens
actgcacccagccagttcttactctgcacttaccatctcttactgttagccactctgtcaagtgcgtatgtcatggctcccaggaaagcttgtaatcgatrtagtttatatatgccctatttctattagatgtagtcatttaatggctgaggaggactgatttgtaataaaggcccataattttagggtcctatctcttcc

SEQ ID NO: 177491 - DNA, 201 bp, Homo sapiens
taaaaatacgtggctatggtacgtatttctctcatgagaattctctcatgagaaagaatttcttgtcctgtgactattgactatttattgtcctgtgactmtttccttgcaccgttttcctctgtcaggtggtaaaggaaggctgtatatatttttttttcctggcgcaggtgcttttggtagtcagaagtccagcagcac

SEQ ID NO: 177492 - DNA, 201 bp, Homo sapiens
tatatgctcttgtaacatagctgtgacttttcactttgtaagtcatcgaggtacctttatctccttttaagaaacctaaacatgcctcttgctcccagacrttctactgtaaaatacagccacccccaacccccagtcccttgtcttcctacccgctgacatagtccaaatgtacgattttgtttcttccactaagatgtg

SEQ ID NO: 177493 - DNA, 201 bp, Homo sapiens
tgaacactgtggacacttctgctgttttctctccccccccacccagtgacagtgaaagcaaaaccaacattgttaaggtgattcgttctattctgagggaraacttcaggcgtcacataaagtgtgaattaccactggagaaaacgtgtaaggatcgcctggtacctcttaagaaccgagttcctgtttcggccaaattag

SEQ ID NO: 177494 - DNA, 201 bp, Homo sapiens
cagccgtgttcttgaccatctcagccgcccacccgtgttcttgaccatctcagccgcccacccgtgttcttgaccatctcagctgcccacctatattctcraagttagtgtcagtggtcaacttctcccgaaccgtcccatgagatgaaaatgaactagaaaccgaaagctgtaagaattgggtcctctttgttgtctgca

SEQ ID NO: 177495 - DNA, 201 bp, Homo sapiens
gcagcctggtccagcaggtgcaaggcacaggaacacaggcgggcgtggaatggaagcacgatgaacactgtggacacttctgctgttttctctcccccccsacccagtgacagtgaaagcaaaaccaacattgttaaggtgattcgttctattctgagggagaacttcaggcgtcacataaagtgtgaattaccactggag

SEQ ID NO: 177496 - DNA, 201 bp, Homo sapiens
aggccgctagtaggagactatgttgattaaataaatatcaaaatcttaagagtgatcaattctcacctccttctgtacgggaggccacatggcactgctgytgggtggctggctggcagcctggtccagcaggtgcaaggcacaggaacacaggcgggcgtggaatggaagcacgatgaacactgtggacacttctgctgt

SEQ ID NO: 177497 - DNA, 201 bp, Homo sapiens; identical to SEQ ID NO: 31681

SEQ ID NO: 177498 - DNA, 201 bp, Homo sapiens
aatggcaggaacaggaaaggactggagatcagtccttcactctggccagtttcaatgctggtgctcttttatcagcagcccgaatggagctcagaggtgayggatgtactagatcccaggggaaagcttacaaaaggcactctggaagaaccacggacactggtagagttcatcttatggaaactgagttggtcacaaggc

SEQ ID NO: 177499 - DNA, 201 bp, Homo sapiens
tgagagctggcagagggtggggtggagaaaggacatgggaactggcatgtggagtctggggcttttcctttttgattttgccttttttttttttttttttwaacatcaaatattggtggttacctgcttacttataaaactagtccaagcaggatttgacattttctgtatttttcctttttatctgattgcttaatttag

SEQ ID NO: 177500 - DNA, 201 bp, Homo sapiens
gagtcaggatggcaggcagatgtcagtgaccatggacaaggtgtgtctggaattcagtgggaggtcagagagggattatggctgagatgcaggcttcacartggcccttctcaaccatgatcccagagcagtaagcgtggatactcagcagcccttacatggattgcggtgttctttttttattttttgagacagactctt

SEQ ID NO: 177501 - DNA, 201 bp, Homo sapiens
gccttgggccacagttacactggccttcaattcctgacacactctgtgcttcccccagccccaagctgtgcacagtttagctgactttaaccctggctccrgtgttagctgttcctgtccttgcttcaaccagagtagctctctctgttgtgtttccgtaggaccccccactttcggcactggtcacctttgaatgacttg

SEQ ID NO: 177502 - DNA, 201 bp, Homo sapiens; identical to SEQ ID NO: 31674

SEQ ID NO: 177503 - DNA, 201 bp, Homo sapiens
gatttgaaaacccccagtatacatcaccctagtggtgggggttagactgggaggcagggtgactgtgtgtgtatgtgtgtgtgtgtgtgtgagagagagasagagagagagagagagagagagagagagagagaatataccactttgagaggctgggccataggtgatgacaaggagatttagagccgtgctagatggagg

SEQ ID NO: 177504 - DNA, 201 bp, Homo sapiens; identical to SEQ ID NO: 31675

SEQ ID NO: 177505 - DNA, 201 bp, Homo sapiens
aaattacctcaggtcacgtggctgtgaaacagtgccgctggaactgaaaatcaggcctattttcctaccacttggttaagttttgtggggttcgctgcccragctgctggtcagatttgttgggtgaggctccaccttgtggagatctctgagcagagctcggcttcaaaaccaaactcccaatgatgggttatgctttca

SEQ ID NO: 177506 - DNA, 201 bp, Homo sapiens
  misc_feature (1)...(201): n = A,T,C or G
cggaccaggagagcgaggagcactaccacctgacgggtgaggcggcggcggcacctccgggcgagggcctgcacagggcggcgaggggctgccagccgtgncctgggcctgacagctcacctcttccccgcctagtggcacgtcctaagtcacttttcagttctgcgatggttaatcttaggtttcacgtgaatatgtgaa

SEQ ID NO: 177507 - DNA, 201 bp, Homo sapiens
gaattgtttgaaactcactttttaggccacctataacaatatttctcatgggtatgcatgaaatgtgtctttaaagtcagacattcctgcattttgagtcrgtgttagtctttggggcgcagcctgcattccatcctcggaagctcccagcactccagggctctgtcagggctgtgaggcggaatcccacgctgacagctg

SEQ ID NO: 177508 - DNA, 201 bp, Homo sapiens
tgcttggagctgtggagtgaaggctgtaggctgcaggctgtggtgcctgtcaccttactttacaggagaaaagacactgctttccagataacccttaagtrtacagaatacaaataagcaacaactagagtgaggccagtgggaaaaacactggtttattttcctttatgaaatttttgtgggtatggtgtagggtctgga

SEQ ID NO: 177509 - DNA, 201 bp, Homo sapiens
acgtatttcatgcagtagctacaaaatttcaggcatagtcttgaaatagttctgggtaatgtgatgtacctaccccgtagtagtttaaagattccaaaackcacaggaaagttgaaaggcctcaggctgtgatgtctctgaataagacaaaagagaatatcaaagttgttgtgatcaagggaacagatttcacaaactgtc

SEQ ID NO: 177510 - DNA, 201 bp, Homo sapiens
gctctgctaaatacctgggagtggcaggggctgtgcggacagctagagaggggaacagagctagagacggagcacagctagagatggagcacagctagagacagagcacagctagagaggggaacagagctagagatggagcagagctagagaggggaacgggccctgtgccatttaaggtctcgctgaagcctccttgcc

SEQ ID NO: 177511 - DNA, 201 bp, Homo sapiens
  misc_feature (1)...(201): n = A,T,C or G
tagggtctatgtctgccaactctaacagcctgcccgtgctttccaagcgctgcgcttcagggaataacattctgaggggaagacagacagacagaaaaatnagaattttacttaaattctgcaaatcatgacactttttaaccctcatttgaaaacaacacaacacagttgctggctactgacagctggagagagtggcag

SEQ ID NO: 177512 - DNA, 201 bp, Homo sapiens
acatgatgtgaatacttagaatggatgcacgttaccccatcatttgtcatgtatctactttttaagtgtgaaatttgtttcttaaaattaattctgtgagratttcttccctgcctgtctatggatttgaaaacccccagtatacatcaccctagtggtgggggttagactgggaggcagggtgactgtgtgtgtatgtgt

SEQ ID NO: 177513 - DNA, 201 bp, Homo sapiens
cctagatttattattaccaattaacttttcaacttactccttggcaaaataagaatcttagcccatgtagtagtttctagtgtctagttctatttacatarttgagctctggtaatctaaaaatgctgaattgcctaacttacaactgtaaacctaagtcaaaaatgtccatgttttcagtagctacatttttgcctaatt

SEQ ID NO: 177514 - DNA, 201 bp, Homo sapiens
cggcaaggcagggctggtggcccccagcatcggggtgaacggcaaaggcagggttgggggcccccagcaccggggtgaatggcagaggcttcactgacacrggtgcagcccgtttccactggccccagtgcacccttagagatgcagagtcccgtgaagttgaacttgatgtcatagagttaagattgatttcctgatttt

SEQ ID NO: 177515 - DNA, 201 bp, Homo sapiens
gtgcagcccgtttccactggccccagtgcacccttagagatgcagagtcccgtgaagttgaacttgatgtcatagagttaagattgatttcctgatttttwaaatttgatagccacaaaattctgcctattgttttacttcctggcctggctctaatgtgaaatgtcctgttttgatttcatgcctccaagttagagcggt

SEQ ID NO: 177516 - DNA, 201 bp, Homo sapiens
cactggccccagtgcacccttagagatgcagagtcccgtgaagttgaacttgatgtcatagagttaagattgatttcctgattttttaaatttgatagccrcaaaattctgcctattgttttacttcctggcctggctctaatgtgaaatgtcctgttttgatttcatgcctccaagttagagcggtagtctgttgtccat

SEQ ID NO: 177517 - DNA, 201 bp, Homo sapiens
gatgagtaatagtgagtcttacacggcctttgaagggaggtgtttgtcatggagattgtgacaacaaagtccccactaaggctcagatggcggcaaccccrgaagcttcattgcagaaattgtgacagcccctgggccttggccccttcttctggaaaattggcttggggtattccaactttctgtggcagtgagtgaatg

SEQ ID NO: 177518 - DNA, 201 bp, Homo sapiens
tgacattttctggtatgtaaggtgtttcacataagtgacctcttttgctcacaaaaacttaagtaacaagtaattttttcaatatgaattatattaataayatcctcttttacaaaacaggagctgaatcgtacgtagcaaggtaaatcttgtcctaggccacactttgctggtagagtctgtgacttttgatttcgaagc

SEQ ID NO: 177519 - DNA, 201 bp, Homo sapiens
gctgtttcaccatgttggccaggctggtctcgaactcctgacctcaggtgatccacccgccttggcctcccaaagtgctgggattacaggcgtgagccacygttcccagccggattgtggtgttctaacttggcataagcggtcaattgacacagtggaaagaacacaggacaggcagtcactaactttcactctgcttcc

SEQ ID NO: 177520 - DNA, 201 bp, Homo sapiens
ggccccggtgtgtgatgttcccctccctgtgtccatggttctcattgttcagcttccacttacgagacatgtggtgtttggttctttcccctgctgttttytgtgccacagtactttcctacctgccttcctctgtccctgctttcttcttttccagacttttctctttcatcttgtttttttttttttgaaaaaaaaaaa

SEQ ID NO: 177521 - DNA, 201 bp, Homo sapiens
aagcagttttcttgccactcctaagaaatgggtttatgggctccttgaaaatagacaagaaaatgtccttatccatacattaaaacacaaataactgcttrgacgtctgcctgaattcagagctcttgagtgggatgctcctcatctataaataagataaaatcattttcaagcagggatcaaccttagtataacattaaa

SEQ ID NO: 177522 - DNA, 201 bp, Homo sapiens
gaggattgcttgagtctgggaggttgaggcttcagtgagctgtggattgtgccaccgcactcagcctgggggacagagcgagaccttgtctcaaaaaaaaatgtcacactcagatctcattggaaaagtattgggaagctcacggtggcagatacaaattttccaaaattctgatttttgttggacagtttgaattatatc

SEQ ID NO: 177523 - DNA, 201 bp, Homo sapiens
tgacggaccaggagagcgaggagcactaccacctgacgggtgaggcggcggcggcacctccgggcgagggcctgcacagggcggcgaggggctgccagccrtgccctgggcctgacagctcacctcttccccgcctagtggcacgtcctaagtcacttttcagttctgcgatggttaatcttaggtttcacgtgaatatgt

SEQ ID NO: 177524 - DNA, 201 bp, Homo sapiens
  misc_feature (1)...(201): n = A,T,C or G
ctcttaatttgaaactgtgggatacagtctggctagtgaatgtttcttcttacagttttgtcagaaaaaggttgctcctggaattttaaagaaagtaaacntaagagtttaattggaaatgcgaccaaacacagcggctcgctcgcataaacccagctgctcaggaggctgaggtgggaggatgggaggattgcttgagcc

SEQ ID NO: 177525 - DNA, 201 bp, Homo sapiens
gaaaaatagagaaaggaaaaaccttgatatattcaaagacaatagcattattttgtttccccccaatatacttttatttacattgttcttttttttttttttgtattgaggccatactgtagatgtaattttatatccaggtttcaaaatttcatattctagtcctaatgtttactcattctgttaaaattccgaagacaa

SEQ ID NO: 177526 - DNA, 201 bp, Homo sapiens
tcagagtgctgagcagatcactgcactgtgcaggagttttaacgacagtcaggccaacggcatggaaggaccgcgggagaatcaggatcctcctccgaggyctctggcccgccacctgtctgatgcagaccgcctccgcaaagtcatccaggagcttgtggacacagagaagtcctacgtgaaggtaagggaagagctggc

SEQ ID NO: 177527 - DNA, 201 bp, Homo sapiens
ttgccccttccacaccccgactgtgtttgttcagcctccagcgcatgctgccgcctctgctattcacctgcctttgcgctctctcattctttgctgccacytgagtcctctggtgttttcagaaaacagctggcagaggaggaggctctgagatgtgcagttgcttagaaggttctggcctggcatctgcacagcggggat

SEQ ID NO: 177528 - DNA, 201 bp, Homo sapiens
ggtacacatgatggtattttcaccatctcaaacactagcttctaactgctgaaggttaagatgggatcattcgttttgtaaatccgtctcctgctgtcttrataataacatgaagaaaagggcaagaaaaacatggatgtgtcattagtatggaaggaaggaggagaatggaggtttgttttaaaggcacccccaattctc

SEQ ID NO: 177529 - DNA, 201 bp, Homo sapiens
cgcccaggctggaatgcagtggtgtgatctcggctcactgtagcctctgcctccagggttccagtgattctcctgccttagcctcctgggtagctgggatyacaggcgtacgccaccacacccggcaaatttttgtattttttgtagagacggggttttgccatgttggccaggctggtctcgaactcctgacttcaggca

SEQ ID NO: 177530 - DNA, 201 bp, Homo sapiens
tcaccatgttggtcaggctggtcttgaactcctgacctccaatgatctgcccgcatcggcctcccgaagtgctgggattacagacgtgagccatcactccyggccttttttgtctttttaatccaccatggattgcatgggcatctttaccttctggtatccagtgactcattcattttctttttctttcctttttttctt

SEQ ID NO: 177531 - DNA, 201 bp, Homo sapiens
caccatgttggtcaggctggtcttgaactcctgacctccaatgatctgcccgcatcggcctcccgaagtgctgggattacagacgtgagccatcactcccrgccttttttgtctttttaatccaccatggattgcatgggcatctttaccttctggtatccagtgactcattcattttctttttctttcctttttttcttt

SEQ ID NO: 177532 - DNA, 201 bp, Homo sapiens; identical to SEQ ID NO: 31704

SEQ ID NO: 177533 - DNA, 201 bp, Homo sapiens
aagccaccatagagtgttgtcggggtgcttaagtgatctggcaaaagtgaagagttcagtggaaagcctggctcatctcattttcaagtgtgggtttgttytctcttttgcttcagatattttcacttttagcccacaactttaatcttcccatgtcttagtcagcttgggcagcaaacaaaataccacagacttggttta

SEQ ID NO: 177534 - DNA, 201 bp, Homo sapiens
ccttttcttcttgacccaaacggcaattttagcagttacttgatggaataggcattcctgctgccttttcatcaggaaggacactgaagacttagaatcgmgacttgcccaggagtgcacagaaggctgggggttgagcctggactgcagcccaggccttctgactctcatctgtgcttttcaggcctatcaccatatatg

SEQ ID NO: 177535 - DNA, 201 bp, Homo sapiens
tgcatgtgaagatatcccagcccagataatcactattcctataaagtgctgatcaggttcacccagaatgtccctctaatgtttgtaaacatcacgaacartgggtgaactgaaatgtaatcacccaagtgactccttcagctacaatctgaaaagacacacttataattactcttctccttttgggggccctgcctcctt

SEQ ID NO: 177536 - DNA, 201 bp, Homo sapiens
cccacttggttcagatgtagaccagtggctgctgtgtatgaatcattctatcacgggtaagtatccctccttgcctctcctgtcaagttaccctccctgcrtctcctacccacgggaactgggtctccttcaattctgcattgtccaaaaacttaactctgaattgtgtgcctgtagagttaaaaacaaaccggttagggc

SEQ ID NO: 177537 - DNA, 201 bp, Homo sapiens
gtctttctgtagagtgacatctcttgagtttttactcttttttttttttgagatggagtcttgctctttttgcccaggctgtagtgcagtggcgccatgtyggctcactcaagcgattctcctgcctcagcgtcctgagtagctgatccggattacaggcgtgtgccaccacccccagctgattttgtgtttttagtagag

SEQ ID NO: 177538 - DNA, 201 bp, Homo sapiens
ctcttgagtctttactcatctccactctgctgtactgccctagtcatcaagttacattagcccttgtttctgattattcgatttgatggaagtgaagtcayttgtatggaaatggaaatcgtatgatttgtgtgtgtgtgtgtgtatatatatatatagcaggcaccttagtttcatccgcataacagatgattaagaatt

SEQ ID NO: 177539 - DNA, 201 bp, Homo sapiens
tctcactgtagcttcatccaggtctttaaaagtcctgaagaattcctccagcaacgagtggaccggtgagactggcaagggaaccttgctggactctgacragggcagcttgagcagcggcacccagagcagcggctgccccacggctgagggcaggcaggactccaagagcacttctcccgggaaatacccacaccccgg

SEQ ID NO: 177540 - DNA, 201 bp, Homo sapiens
cttggaggcaagtttgtggacttgtttgaaatgactgtgctgtttttgttggagtctcaaaggccatttgatctctttgtagtgagttggatttttttttwaaaaatttcctattttccgtgctccagagtatttgtgccctgctcttcttggtctatccttggtcattagggtggatgtgtcaggcagatgccaacccct

SEQ ID NO: 177541 - DNA, 201 bp, Homo sapiens
gtagcttcatccaggtctttaaaagtcctgaagaattcctccagcaacgagtggaccggtgagactggcaagggaaccttgctggactctgacgagggcascttgagcagcggcacccagagcagcggctgccccacggctgagggcaggcaggactccaagagcacttctcccgggaaatacccacaccccggcttggca

SEQ ID NO: 177542 - DNA, 201 bp, Homo sapiens
tagtgttcctaaagatgagtggtactttttttttttttaaatcagaaaacaatctgattgggaaatactggttttaccaggacacagaactttggtctcaraattacgagtttgttttgtctgtgctgaagatcggtttcatttccaccagtgtggaagtgagcgtgtggctttcttttagtggtggaaaaaattaagatc

SEQ ID NO: 177543 - DNA, 201 bp, Homo sapiens
tttcccacagggagaaaatggagcagacattcagggtaagatactggcccaaatcgcaaaccaagaaccaggcaggcgagtgttagttcccacctttaccyaaggtggggaaaggagatggagttacctatctctaggtccagcagttgatacaaacatacatatatatgttaaggatacagcttccttatttatgtattt

SEQ ID NO: 177544 - DNA, 201 bp, Homo sapiens
gacattgctgagggagagctgcccccacgagcccagcttgcctcctctcaggccctgcctgcccctcttaaggggcctcaccctgctcacagccagggggygttcagctcccgaggcagtgcagccgtacctccccgctctctgtctgtgtggaatgtaggttgggagtccatgtggaggtgatgggacagatcaaagagc

SEQ ID NO: 177545 - DNA, 201 bp, Homo sapiens
cggcttcaaaaccaaactcccaatgatgggttatgctttcaagtcgctactggtgtgttactgtttgaacctctgaaattactggcctgagacacaatttrtcaaaaacacaaagccttgcagtttgatagtaaatagaggatccttaaagaggggctttatttgggttggagatagtgatttgttcatatgttgaaacta

SEQ ID NO: 177546 - DNA, 201 bp, Homo sapiens
ggtttcaccatgctggccagactggtctcgaactcctgacctcaggtgatccacctgcctcagcctcctggactgctgggattacaggcattagccaccgkgcctggccagaaacctgctatcttaatagtctgctgtatttcaaatgttttaattctgagagttgggagaacaagtgacagtatattgtcactgagatga

SEQ ID NO: 177547 - DNA, 201 bp, Homo sapiens
tcaaatgccttttaccttcactcagaaaaaagcaaagcctagctgtggataccatatgccattggtttaccattcagaggcagcgtcagggcgtggaagcyttggctgctgttcttgctttgagacctgtaactgcttctgaaccacaactctgcctccgcaccttccctagcatgtgaggtctttgagaactgggtgcgt

SEQ ID NO: 177548 - DNA, 201 bp, Homo sapiens
actctactgacttggacccatttaaattccgctggttgatccccatctccgcgcttcaagtcagactggggaatccagcaggtaactgtttcgtgcagtaygatgccagaaaaagcattttagtagacttaactgtggaatgtaaattaagaaaggaccttggggataatttttggtgccttttattttatagacaaggaa

SEQ ID NO: 177549 - DNA, 201 bp, Homo sapiens
agtcttgctttgttgcccaggctggagtgcaatggcaggatctcagctcactgcaacctctgcctcccaggctcaagcaattctcgtgcctcagcctcctragtagctggaattatgggcgtgggccaccacacctggctaagttttgtctaatttttagtagagatggggattcttcatgttgaccaggctgctctcata

SEQ ID NO: 177550 - DNA, 201 bp, Homo sapiens
gtactgcttccgaagtccaagcttggagcaggcatctttctctcttggcttctatgtgctgttatcggttctattgtataaacttgtttgttcatatcaakacttatttttaaaggaagtaatgaaattggaaagactgaaatagttttcaaaacgtctgaacttttatgaatgaggatgcaaacacagtagtaggataaa

SEQ ID NO: 177551 - DNA, 201 bp, Homo sapiens
acttctacctgcaatactttatttgcttatgaggggaagagtaagtacttaaaagcatatgttgcagtatttttagagtaacgtttgaaaattcaggcacwtttagtttcacttttctcccttagtctaagtaatgttttctattagtttcacttttctcccttagcctaagtaatgttttctattactgtgagataaaag

SEQ ID NO: 177552 - DNA, 201 bp, Homo sapiens
cctaaacatgcctcttgctcccagacgttctactgtaaaatacagccacccccaacccccagtcccttgtcttcctacccgctgacatagtccaaatgtaygattttgtttcttccactaagatgtgcatgggtccagggactttgttttcctcactgctgtattcccagtgctcagaacagtgccaggcatcctgaaggt

SEQ ID NO: 177553 - DNA, 201 bp, Homo sapiens
ttaatcaaatttgtctgcattttcttttggcatctacaaacaggtcgatgaacttctgcatatatatggttcaacagtagacggtgttccccgagacaatrcatgggaaatccagacttatgtccactttcaggacaatcacggagttactgtagggatcaagccagagcacagagtagaagatattttgactttggcatg

SEQ ID NO: 177554 - DNA, 201 bp, Homo sapiens
taatttttaaacactgaagccctcaacatcgtctttggagaaaagcacagaccacagactatttctgtgattctgtgttctcttcctccgggcatgtccayaactttggcaaaataaacttctcaatggatcgagaccagtcctagatactttttgggtcacagtagaatgggctaaataaccctgcccaccttagggcct

SEQ ID NO: 177555 - DNA, 201 bp, Homo sapiens
gcaatccagtcattcatccagagggcacttttcaggtgcctctgaagtcccaggctgtggcccatgagatgctcattgggacacaaagagaaaaaaatcaygatccctgtcctggagtagctggcgatctagtgagcgcaatggtcaagattcccagatttggggcttttaaaatgaagcttggagaatattgatgggaga

SEQ ID NO: 177556 - DNA, 201 bp, Homo sapiens
ttgtagaacatggcggtactgagccatcggtattggggtcgggcttaggtttgaatcctggcacctttgttagcgttgagtttgtaagtgatcttggagcrcgtaccagacttctctgagctttgggcccttcaaccagtaggataatagtggcttacatgattgccgtaagagtaaatgacatcgtgtgtgtgttaaatg

SEQ ID NO: 177557 - DNA, 201 bp, Homo sapiens
acaacaacaacaaaaagttacattaaatctgcatggatttcttagggtcaagtgtgaaatgaatgttttattttgtgattcaggtaaaacatccttagttwtgagagttttcccgcctgtgatcccagcactttggaggctgaggcaggaggatggcttgtggcgaggagtttgaaatcagcttggtcagcatagcgaggc

SEQ ID NO: 177558 - DNA, 201 bp, Homo sapiens
tgtagaaatggggatgggagtggtctccctatgttgcccaggctagtctcaaatttctggcctcaatccatcttcccacctcaacctcccaaagtcctggkattacaggtctgagccataacaccgagcacttatgttttgtgaactgaacttctttgatggttaactaatgtccttaaggtattttaatcaagacagtat

SEQ ID NO: 177559 - DNA, 201 bp, Homo sapiens
ctgcagagcgccccatcaggttttttgaagtcgtacccattttggtggcttctgtgtgttgtgttggctcagcctaggggtctgtagtggttttgctgacrctgctgcccaccatggagagagctgactgtcatgacttgtgttatccagatgagagtggtctatatgatggatgctttcctggtatttcagacatgcagg

SEQ ID NO: 177560 - DNA, 201 bp, Homo sapiens; identical to SEQ ID NO: 31695

SEQ ID NO: 177561 - DNA, 201 bp, Homo sapiens
cttattcattcctgaattccgaccaaactcctgttaaataaggaaaccgagcagaaggcaggcagcgaggacacacaagcccgacgctcctcctgttcccrccgctctggcaccagctgctcagttgctccgtcctggggagcaggggtcctccctgtgactctggtctgggaagccccacagcagtgaccatggcgcttc

SEQ ID NO: 177562 - DNA, 201 bp, Homo sapiens
attttttcttcaagtttgtgaaagggatcacattttcgttttaacctgtgaaaacttttaatttttatttaaatcacctctatttttgctttaagatccarcaatgggagcagaatcttgagaaatttcacatggatctgttcaggatgcgctgctatctggccagcctacaaggtggggagttaccgaacccaaagagtc

SEQ ID NO: 177563 - DNA, 201 bp, Homo sapiens
tgcagaccagccgaaactaattttttcttcaagtttgtgaaagggatcacattttcgttttaacctgtgaaaacttttaatttttatttaaatcacctctrtttttgctttaagatccaacaatgggagcagaatcttgagaaatttcacatggatctgttcaggatgcgctgctatctggccagcctacaaggtggggag

SEQ ID NO: 177564 - DNA, 201 bp, Homo sapiens
tcgagctgcctgagggcttctctttttatagtccctgtttggggatccacctgtgtctggttatcttgaaggttggtgcgccctagcatgtgatgtcgtcycaaattggaatatcccaatgcagttggtctaaacagatttgggcattctggcagacatctgcacttacaaactaactgtgataacatatttacactatac

SEQ ID NO: 177565 - DNA, 201 bp, Homo sapiens
aacagaaacataaagtcattgcttttatttatctggcatctgtttgtgtgcagttcagttaatccagtttaggatcagggactgtaaatgtgaagggaaawgaagcaaagtgaaaaagctgacttgcaaattgcatcctgttttaagtcaggatggtttagagtgttggcattctccaaacaaacatcatgcctttttggc

SEQ ID NO: 177566 - DNA, 201 bp, Homo sapiens
tgtcagatatttgattcaagtggcagccatggattttctggaactcagctacctcaaaactccagtaactccagtgaggtaaactttgctatagatggccrccatcttgttttacatgaatgacacaaatgctaactttttctgtttttttttgtttgtttttgtttttgtttttgagacggagtctggctctgttgccca

SEQ ID NO: 177567 - DNA, 201 bp, Homo sapiens
ctaaacatgcctcttgctcccagacgttctactgtaaaatacagccacccccaacccccagtcccttgtcttcctacccgctgacatagtccaaatgtacrattttgtttcttccactaagatgtgcatgggtccagggactttgttttcctcactgctgtattcccagtgctcagaacagtgccaggcatcctgaaggtc

SEQ ID NO: 177568 - DNA, 201 bp, Homo sapiens
atgcattctcgactttccatattatcaacttaacaatgggttgattgggatgtaatgccatctaagttaaggggcctcttatactcgttcttaatcgatarggcaccaagtaagcatttcaaatcacgttgttctttctgcttgtttctaaaatttcagcttaagttttcagaaccttatttctacattaactattttgtt

SEQ ID NO: 177569 - DNA, 201 bp, Homo sapiens
aagatttttcttgataacaatgtgtctaatgaactacacaatttacatatagacatatcataaaattcattacactggtttaaaatataaccttatgtcasgttcacattgtctggaacatccatggagggtgagagctggcagagggtggggtggagaaaggacatgggaactggcatgtggagtctggggcttttcctt

SEQ ID NO: 177570 - DNA, 201 bp, Homo sapiens
gcaacaagagtgaaactgcatctcaggtgggggtggggggcagggaagaaaaaaagattgcagatggtgaaatttaaatgcttaaaaaaatctttaagaaytcataatttgcctgcaacaaattcaggtggtgacatagtccctttcattcccccaagtcagagcccgtgcccctgtgtgtctgtccccatcagtgaaact

SEQ ID NO: 177571 - DNA, 201 bp, Homo sapiens
agttttgagagttttcccgcctgtgatcccagcactttggaggctgaggcaggaggatggcttgtggcgaggagtttgaaatcagcttggtcagcatagcraggccccatctctacgaaagaacaataaaaaaattagccaggcatggtggtgcgcacctgtggtcccagctacttgggaggctgaggcttgaggatcatt

SEQ ID NO: 177572 - DNA, 201 bp, Homo sapiens
catggctgtgaggtgaaataaagactaggcatgcggaatggctttgtaaactgcaggggtgctgagtcagtctgcggagacttagcccatggcgaatacartgtgttttaaatacatcacttcatttaaacccgttttccccacaaccctattgaacagatattaccagccccatttagcatgagaaaactcaaattcaga

SEQ ID NO: 177573 - DNA, 201 bp, Homo sapiens; identical to SEQ ID NO: 31683

SEQ ID NO: 177574 - DNA, 201 bp, Homo sapiens
tgcggaatggctttgtaaactgcaggggtgctgagtcagtctgcggagacttagcccatggcgaatacaatgtgttttaaatacatcacttcatttaaacycgttttccccacaaccctattgaacagatattaccagccccatttagcatgagaaaactcaaattcagagatgtcaactagcaggccagtgtgtcctagg

SEQ ID NO: 177575 - DNA, 201 bp, Homo sapiens
tttctaggttaaggcagccgggaacccacatggattacaactagaaagaaaatcaatttctagggagccagagaaagggaggaagggcttagtgaagggasagtctgggctcaggtagttgggcagagctgtcctaagcaaagctgggtggacacagcctgaactgctaagcctaagtatgtgggatctcccccttcgagt

SEQ ID NO: 177576 - DNA, 201 bp, Homo sapiens
cttgctttttccttttgttttcattcctagggtttgcagttacagcgcaggtggatgagcgtcagcatctcagccggatatttataagcgacgttcttccygatggcctggcgtatggggaaggtccgtgtggcacaccgtgcccctgttgcctcttaatttgaaactgtgggatacagtctggctagtgaatgtttcttc

SEQ ID NO: 177577 - DNA, 201 bp, Homo sapiens; identical to SEQ ID NO: 31687

SEQ ID NO: 177578 - DNA, 201 bp, Homo sapiens; identical to SEQ ID NO: 31689

SEQ ID NO: 177579 - DNA, 201 bp, Homo sapiens
ttcactcatatattgtcattttctgaacaaaatccatacaataaaaccactagaagattagacaggtaagattctaatacaatagctttggaaaacgtggyttggtgtaacagctgtttctgtgtctatggattgcaaaaaaacagtaatttttctggttataacagagaagcacgtaacgaaatgctttcttttctctgc

SEQ ID NO: 177580 - DNA, 201 bp, Homo sapiens
ttagacaggtaagattctaatacaatagctttggaaaacgtggtttggtgtaacagctgtttctgtgtctatggattgcaaaaaaacagtaatttttctgrttataacagagaagcacgtaacgaaatgctttcttttctctgctgcggttccatattcatataataaatggctgcttcctatggcatttgcattttagag

SEQ ID NO: 177581 - DNA, 201 bp, Homo sapiens
caggctgcgcttatgtttaagccaccctgagagaggccacctgaggtctagcaagtctttgctctctcctcattggcagtgaagtcttgtccgtcacaggmctgaactaagtgtaatactcagagctttaagaatagagcaaacaaggttctcactcttaaaaagtgcctgaggattttataaagactgcaactgaagaga

SEQ ID NO: 177582 - DNA, 201 bp, Homo sapiens; identical to SEQ ID NO: 31690

SEQ ID NO: 177583 - DNA, 201 bp, Homo sapiens
aatttcgagcatccctatcttagtcaggtttcctaggagacagactttgatagtgatttagatgtaaaaagttttactgggaatgctctcagggacaacgscagcctggagtgagggagcaggatctgggagggacaagttgcattgtgatgcagcttgtcccacagcgagctgtggagctgggagggccattcagagctc

SEQ ID NO: 177584 - DNA, 201 bp, Homo sapiens
cgccagcctggagtgagggagcaggatctgggagggacaagttgcattgtgatgcagcttgtcccacagcgagctgtggagctgggagggccattcagagytctgcatggaggcagggtggccggccttcgtcccctcaggccagcagggcaaggcagctcccctcaatagaggtgagttaccacgaggggatctgtgtgt

SEQ ID NO: 177585 - DNA, 201 bp, Homo sapiens
agggacaagttgcattgtgatgcagcttgtcccacagcgagctgtggagctgggagggccattcagagctctgcatggaggcagggtggccggccttcgtmccctcaggccagcagggcaaggcagctcccctcaatagaggtgagttaccacgaggggatctgtgtgtgagctgggaaaaggaaagcaatgcctctgtct

SEQ ID NO: 177586 - DNA, 201 bp, Homo sapiens
ggccgaggtgggcagatcacctgaggtcaggagtttgagaccagcctggccaacgtggtgaaaccccatctctactaaaaatacaaaaattatctgggcayggtggtgggcgcctgtaattccagctactctggaagctgaggcaggagaatcgcttgaacctgggaggcagaggttgcagtgaaccaagattgtgcactg

SEQ ID NO: 177587 - DNA, 201 bp, Homo sapiens
taaaaataattgtaaaatatggaccccgtttctaagaaattataatttagttagagagcaagccttatgaacatgaaactaaaggtcattctaaaatgatygaagttaggtgacagctggtatagtcatcaaatattatgggagatcagagggttgaggttgtactgtgatcttgaggaaatgaagacttcctggaagaat

SEQ ID NO: 177588 - DNA, 201 bp, Homo sapiens
gccacagcctgtctatcctgagatgagacttgtggatccgagtgtctcagagtgttcagagcaccccagtcaaaaatctcatcctgaccataatcgtagtsgaagggatgcccagcttggagttttcaggtctttgggtagggtcagatgtttagggctagggagagaaaagggacatttggcaacactgagaggctcctg

SEQ ID NO: 177589 - DNA, 201 bp, Homo sapiens
tactccagcctgagtgacagagcgagaccccgtctcaaaaataaaaatgaaaataaaagttgattcaaaggaatcaactcttagcatgcacttttttttttaacccaacgaaactgcacaagttgccgtatctatcccggcacccctgaagaggtagtcacactgcgtgcagtgcttaagaacagaaaaaataagaataat

SEQ ID NO: 177590 - DNA, 201 bp, Homo sapiens
ttcacttacagaccttctcttgagtgttgagattgcgctcaacagcttttgaatcacagctttctgttcttctcgttcttctgctgagtccctgtgttggyaagtcacaagagcctctcttcacctattattaataacttatctttgcatgaaggtaatacttgtaggtaatgcattttatatctttgggagaaaggagag

SEQ ID NO: 177591 - DNA, 201 bp, Homo sapiens
ctaaaattaaaaagaagaaacaaagacaaaaacacagatagtcttagaagagaaagcttgtgctggattaagtgcagttcagagtcaggatggcaggcagrtgtcagtgaccatggacaaggtgtgtctggaattcagtgggaggtcagagagggattatggctgagatgcaggcttcacagtggcccttctcaaccatga

SEQ ID NO: 177592 - DNA, 201 bp, Homo sapiens
aaagaatttcttgtcctgtgactattgactatttattgtcctgtgactatttccttgcaccgttttcctctgtcaggtggtaaaggaaggctgtatatatwtttttttcctggcgcaggtgcttttggtagtcagaagtccagcagcacctcccgcctggttgttgaccacgtacgtgctcttttctcagctgctgtgaag

SEQ ID NO: 177593 - DNA, 201 bp, Homo sapiens
gaatggtttgtcctcaactttaaatgtctctagtcatcttgaacctgttttttaactcccaccacaccctgccaaggggctgacgtgctgcccttttcctyctccactccacggagcatgccggtccaggagaaactggatgtggtgttgccctctatcagcctgtgggccctgccagcttccccccaagcactaaataga

SEQ ID NO: 177594 - DNA, 201 bp, Homo sapiens
ccgaaagatcatactgcaaagtgacgggaccagctcaccgaacagcgtggcagtctctttcctagtagctttctatgttggttacgtctgttacggatccycccccaacatacttttcctctaaagcaggaattgaaatgtagtacacactgcaaatgctgtccttcatccttgtttctgtatgccacattaccccaaatt

SEQ ID NO: 177595 - DNA, 201 bp, Homo sapiens
aatatggaccccgtttctaagaaattataatttagttagagagcaagccttatgaacatgaaactaaaggtcattctaaaatgatcgaagttaggtgacarctggtatagtcatcaaatattatgggagatcagagggttgaggttgtactgtgatcttgaggaaatgaagacttcctggaagaatatggtgttaaaaagt

SEQ ID NO: 177596 - DNA, 201 bp, Homo sapiens
tgctctgttatgcataagcatcagtgtataaataaatatgactggagatgcagtgtaaacagtggcaaatcatatttctatttgtaatatctgcttggggygcagttgttcatggctcctgggtatttggaagtactctccagttgtgtgattattctcttacaaaacagcaagtaattgcaacttgatttttggatgaaa

SEQ ID NO: 177597 - DNA, 201 bp, Homo sapiens
aagtccaagatcaagatgccggcagattcagtgtctggtgaggccctgctttctggtttctagaagcatcttcttaactgtattctagcatgacatgaggrgcgagggatctttccgggccgcgttttataaggccatccatcctattcacgagggctcaccattatgactgtcgtgcgcagtggattaagcagtgaagga

SEQ ID NO: 177598 - DNA, 201 bp, Homo sapiens
aaattatttttcttcagtgactagacttctaatccagatattagagaaatgtctttatgttttcagctctgtgcatggccagcttgatgttcaatgcaccyggtcctcacagggagcaacattattatataagtatgcattgtatttagagctacctgtgtttgatttttgtgttggagtaaatactgcagttaagaatca

SEQ ID NO: 177599 - DNA, 201 bp, Homo sapiens
gtcaggcagtggagtggcactgtgctgggtgtatagatacaagggcctggtcccaagtgacacaagttcaacagtttacatggaaaatgtataacagggtrcataattttctgtaattctatagaatcttttttttttctttttttttcttttttttttttgagacagagttttgctcttgatgcccaggctggattgcaa

SEQ ID NO: 177600 - DNA, 201 bp, Homo sapiens
aatgtctttatgttttcagctctgtgcatggccagcttgatgttcaatgcacctggtcctcacagggagcaacattattatataagtatgcattgtatttrgagctacctgtgtttgatttttgtgttggagtaaatactgcagttaagaatcatgtctttgatatctccagtacctagaataaaataggtactcaaatga

SEQ ID NO: 177601 - DNA, 201 bp, Homo sapiens
actgtgctgggtgtatagatacaagggcctggtcccaagtgacacaagttcaacagtttacatggaaaatgtataacagggtacataattttctgtaattytatagaatcttttttttttctttttttttcttttttttttttgagacagagttttgctcttgatgcccaggctggattgcaatggtgtgatcttggctca

SEQ ID NO: 177602 - DNA, 201 bp, Homo sapiens
cccaaagtgctgggattacgggcgtgagccaccgcacctggccacgcttcatggcttttaatgaattgtttgaaactcactttttaggccacctataacartatttctcatgggtatgcatgaaatgtgtctttaaagtcagacattcctgcattttgagtcagtgttagtctttggggcgcagcctgcattccatcctcg

SEQ ID NO: 177603 - DNA, 201 bp, Homo sapiens
caaccaggatatgccatttaaactccaaagtacaaaatagttttaacgaggaagccaaaactgccaagaagaatgcaggaggtggaaggctttgggatccracaagaacacagctgctgacattgctgagggagagctgcccccacgagcccagcttgcctcctctcaggccctgcctgcccctcttaaggggcctcaccc

SEQ ID NO: 177604 - DNA, 201 bp, Homo sapiens
ggttacttttcctttgcattttctactaaattaaattttaaatgaactttacagtgtacagtttattgagatactggttgtcttgaaacttaataagatayaatcaagacaacaaacgtcttgatttttataaggtctcctttgggctattggggtgtcccagccctgttgactttccaacaaacctaagcatctgggtcc

SEQ ID NO: 177605 - DNA, 201 bp, Homo sapiens
tggaggtgatgggacagatcaaagagcctgaaggagacacggttatcccagagttttctttgtaccatgtctcatccatggtgctgattttccaggatccrgcagccacagcctgtctatcctgagatgagacttgtggatccgagtgtctcagagtgttcagagcaccccagtcaaaaatctcatcctgaccataatcgt

SEQ ID NO: 177606 - DNA, 201 bp, Homo sapiens
acagttttaaaatcataaagaggacggattgcgtttggacaattggcaactggtgaagagaacaatgagaacaaggctttgaggaaaatacgaggatactrtggtgtatttctggatgtgtacagggggaagcagtttgaggaacaaaccactggagtgtagcatatttgtgaggggatttgagggagataaagtcagatt

SEQ ID NO: 177607 - DNA, 201 bp, Homo sapiens
gcccgccttggcctcccaaagtgttgggattacaggcatgagccaccgctcccagcctggaaatgtttttgttaggagaataagaatgtttggtttagttmaatgagcgtttgttcggtgcatactctgggtcaggcaaatgtgcacagactggagactcaaagaagtcactgtctctgccctcagtgacagtggcactgc

SEQ ID NO: 177608 - DNA, 201 bp, Homo sapiens
tctctgaaccctcgatgccttgcttgagttagtgaatgtgtggaagcacctctgtctcgtctgtccagggatgctgtcctctgtactgcaggaaacagagwtcttctctgagtcagccaccaccccacttcccagtgttccaggccttcctgcttcacccccgtctaacagaacgcctccttttgccctgccttgttctca

SEQ ID NO: 177609 - DNA, 201 bp, Homo sapiens
ttcctccaaggcgctgtccttgatcgcccttttgcccactccatcagggagccccactctcctcccacagttctccatgtctgtgccactgctgtcatccrtggctttgtcatgatttcttcgtgtgtaaggttgctcctgctataaaatacgtgctcctggaggaaccgtgtctgtttttttatctctgaaccctcgatg

SEQ ID NO: 177610 - DNA, 201 bp, Homo sapiens
ctccgcaaagtcatccaggagcttgtggacacagagaagtcctacgtgaaggtaagggaagagctggcatttatgcattcgtgcctctttgatgatggcargtggtatgctggcagaggtccccagatcacctctgcccaggacacctgccactccccagggggggacacctgctccttgaatcagtgaattgctcaagga

SEQ ID NO: 177611 - DNA, 201 bp, Homo sapiens
tagaaagcttggtgtgaaaggctaggatctgtctgggtgctcagcaacatggcagaactagagatgcaactggtgcacctgaaataacctaactcttcacrctgcatccttgattacaagcgttcacttacagaccttctcttgagtgttgagattgcgctcaacagcttttgaatcacagctttctgttcttctcgttct

SEQ ID NO: 177612 - DNA, 201 bp, Homo sapiens
caacggactagtatttggaaagcaccagatactgcctggcacgtagtaaatgccatgtaagtgtgtgttgaatacgcagatacattcctcctaccctgttmttagccatgcagtgtctcttccagaggtcatcattgttcttagtgtctttctcatcctggcctggagaattctaaatattggggaaaattggctgggcgc

SEQ ID NO: 177613 - DNA, 201 bp, Homo sapiens
acaccttgtacctgtgatgtcactgtgactttcttgtcctccatccatccgtccatcgaggacactcttccatctctgccccactctgtgcagccacactyggcaagttccctgatggtgcccggctcctcctagcattggcctttactcaggacacttccagtcctggaatcccctctccccgctgcccaccccgccttg

SEQ ID NO: 177614 - DNA, 201 bp, Homo sapiens
ctgtgggctttcctcatatcatctgtgacccttggttgcactcatctctctgcctccccctccctcaccaactgcctctccccagattagaagcagcccgygagagcatttcactcctttttgcatccccagctcctagcaccgtgcctggaaaacagctgctactcaagaagtatgtgttgagcgcatgaacggggagat

SEQ ID NO: 177615 - DNA, 201 bp, Homo sapiens
acagcgttccaagcaagtggctgcctggaaggccctttggcaatggagagcttgtcctgtagagagggatgaacaacagagcgtggcaggaaggcagtggkaagaaacttgctggtgacctttctcgccatttcttgcaactggcccttcccgtcagctgggctgattcctcctgccaagtgggtccttggacagaggcaa

SEQ ID NO: 177616 - DNA, 201 bp, Homo sapiens
ctctccggaaaaggacactgtcactgacccagcgagggagaaacaagaagggaatattttcttcgttaaaagggctggacacactggccagaaaaggcaargagaagagaccttctataactcaggtgagcttttcagcatgggaacagcagactagagtgaaattcctgaaacccctaattttcggcctgctatgaatca

SEQ ID NO: 177617 - DNA, 201 bp, Homo sapiens
ctgcacacaactctactgacttggacccatttaaattccgctggttgatccccatctccgcgcttcaagtcagactggggaatccagcaggtaactgtttygtgcagtacgatgccagaaaaagcattttagtagacttaactgtggaatgtaaattaagaaaggaccttggggataatttttggtgccttttattttata

SEQ ID NO: 177618 - DNA, 201 bp, Homo sapiens
gtgccactgctgtcatccatggctttgtcatgatttcttcgtgtgtaaggttgctcctgctataaaatacgtgctcctggaggaaccgtgtctgttttttwatctctgaaccctcgatgccttgcttgagttagtgaatgtgtggaagcacctctgtctcgtctgtccagggatgctgtcctctgtactgcaggaaacaga

SEQ ID NO: 177619 - DNA, 201 bp, Homo sapiens
gtgttagcaataaagaggaaaattttgcattgaatttgtgccaatgtttaaaaatgggagtgttcccctgtaattttgttattagtaacttcctttcacartgaaagataatgaaaaccttctcagagtgagtttttttcagtcttgtcttttttatgttttgagcatgggcattaaaagaaacaaaagctcaatctatat

SEQ ID NO: 177620 - DNA, 201 bp, Homo sapiens
tatatagaagttatgttttttacttttttttttttgacagggtctcactctgttgcccaggctggagtgtgcagtggccctgtctcggctcactgcagccwcaacctcctgggctcaagctatcctcccacctctgcctcccacatagatggggctacaggtgtgcaccaaccacacctggctgagttttgtgttttttta

SEQ ID NO: 177621 - DNA, 201 bp, Homo sapiens
tcggctcactgcagcctcaacctcctgggctcaagctatcctcccacctctgcctcccacatagatggggctacaggtgtgcaccaaccacacctggctgmgttttgtgtttttttatagagacggggtttcaccacgttgaccaggctgcaagtgtttttttttttctttttatatcatatcttgatgtttatctttaaa

SEQ ID NO: 177622 - DNA, 201 bp, Homo sapiens
tttaaataataaggaaacatctagaaacttatcagtatttaaagaatttaggaaaagggggtgggatgtcttggattaaaaggaactgattttaggcattstagtttttgatgttagaaaaaaatatctccagaaacaccttgataaatgtggtcaggtaatacattactattttggtgattattatcattgaactgtact

SEQ ID NO: 177623 - DNA, 201 bp, Homo sapiens
tagtgtgtagcctgagttatgtttgctgtgcccgctgtccttgcatcctttgtcagcaggttgtaaaggagctgtttacgcttttttttttttttttttttgacagagtcttgctctgtcacccaggctggagggtagtggcgcaatctcagctcactgcaacctccacctgctggattcaagcaattctcctgcctcaac

SEQ ID NO: 177624 - DNA, 201 bp, Homo sapiens
gcaatttcattgtgaatgttaacagcctttctaaatactataaggtctgttgtgagcctttgggtccagcacttgtacctcttcttccctctaaggaaccygagcttctgaatcaggggcctcaccgtacttttacttgaatactctttcaagttcctctctacaactttgctgagtctgtggaaagaaaagtcaaatatt

SEQ ID NO: 177625 - DNA, 201 bp, Homo sapiens
ttggttctcccctccccatagcccaggccctaaccccttcctgtgtcctccccacactcccttctcccctacacccttctcccaacccctgccgtacatgyactccctttctcatgttagtcttgtgagtttctggtaacagacaattgggattgattttagaaattcttgtccaggcacggtgactcacacctgtaatcc

SEQ ID NO: 177626 - DNA, 201 bp, Homo sapiens
taaccacagatcttcatttaagctctggaactgattctttctataaagaaccatgaccttaaaaataagatgactatgatctttcaatatggaatagataygtgagtaaagatggcttactctgccacaaagatctatagggatgaaggctgtatataagtcaggggtctccagagaaacagaaacagtaggatgtgtgta

SEQ ID NO: 177627 - DNA, 201 bp, Homo sapiens
agtcccaagatctgcagggtaagtcagtaagctggagacctgggagagacaatggtatagttccagtctgagtctaaggcatgagaatgaagacagctgayggtgtagttctaggctgaagactggtaggctcaagattgaggaagagcccatgttttgttcaagtccaaagccaagggggaaaaaaagccagtgtcccag

SEQ ID NO: 177628 - DNA, 201 bp, Homo sapiens
gaagattattaaagtgtttctgataaaactttatgattccctgtgtatccctgtgtgctcattcccgatctgagccggggtatcgggtctcactctgataaccccagctggggatgcagtggcacattgttggctcactgcaacctctgcttcctgtgctcaagtgatcctcccaactcagcctctcaagaccacaagtgc

SEQ ID NO: 177629 - DNA, 201 bp, Homo sapiens
gattgctttgcctgtgctctgctaaatacctgggagtggcaggggctgtgcggacagctagagaggggaacagagctagagacggagcacagctagagatggagcacagctagagacagagcacagctagagaggggaacagagctagagatggagcagagctagagaggggaacgggccctgtgccatttaaggtctcgc

SEQ ID NO: 177630 - DNA, 201 bp, Homo sapiens
agattgctttgcctgtgctctgctaaatacctgggagtggcaggggctgtgcggacagctagagaggggaacagagctagagacggagcacagctagagatggagcacagctagagacagagcacagctagagaggggaacagagctagagatggagcagagctagagaggggaacgggccctgtgccatttaaggtctcg

SEQ ID NO: 177631 - DNA, 201 bp, Homo sapiens
tgggagggttgcttaatttcaggagtttgaggctgcagtgagctatgattgtaccacagcactccagcctgggtggcagagtgagaccctgtctcaaaaaaacaaaacaaaaacaatttgagagaaaattttttttgggggggggttggggttcaatatcattgcttttccagatagcataatttttggaaaaaatgtttt

SEQ ID NO: 177632 - DNA, 201 bp, Homo sapiens
gcatgcgcctggagttccagctgcttaggaggctgaggtgggagggttgcttaatttcaggagtttgaggctgcagtgagctatgattgtaccacagcackccagcctgggtggcagagtgagaccctgtctcaaaaaaacaaaacaaaaacaatttgagagaaaattttttttgggggggggttggggttcaatatcatt

SEQ ID NO: 177633 - DNA, 201 bp, Homo sapiens
gggataatactagatctttctgtaagttagacagtgacttttacgaagttcagagtgagttgagaaaaagtccttcgtgcaatttttagtgttttttttttcccgttttcctaaagggaacttttctgacttaatgaatttgcttgaatatgacagctgacagtgtcattgcgctctgagattatttagtagtgcagcctc

SEQ ID NO: 177634 - DNA, 201 bp, Homo sapiens
aacctctgcctcccgggttcaagcagtcctcccaactcaggtcctgagtagctgggattacaggtgtgtgccaccaagcctggctaattttttttttttttgtatttttagtagagatggggtttcaccatgttggccaggctggtctcagactcctgacatcaagtgatccgcccaccttggcctcccagagtgctggga

SEQ ID NO: 177635 - DNA, 201 bp, Homo sapiens
catcaaagtgtctttatggaagcagaatgtcttatcaggccttttctgcctcaaataattttttttaagtggtaggaaaagattccattaaaaattgtaaraattcaaccgctataaaaaaatgagaaaactcagataagccaaaagattaaaataacttgaaaggcagtgttaaccactgcatttattatacatgtagtt

SEQ ID NO: 177636 - DNA, 201 bp, Homo sapiens
tctgtcctgccttgggccacagttacactggccttcaattcctgacacactctgtgcttcccccagccccaagctgtgcacagtttagctgactttaaccctggctccagtgttagctgttcctgtccttgcttcaaccagagtagctctctctgttgtgtttccgtaggaccccccactttcggcactggtcacctttga

SEQ ID NO: 177637 - DNA, 201 bp, Homo sapiens
atggcaagatactttatttgtaagatctcgttactttaacactgcattgttaggtgtgatttttgacatcccagtgaagcaaagccataatctcaccagaygccatttaacttatgatgtattttatcagatcttattttatacagtatattcaagcttaatatagattctatagccctgggaactgttagttttcaggac

SEQ ID NO: 177638 - DNA, 201 bp, Homo sapiens
gaatcacttgaacccaggaggcggaggttgcagtgagcagagatcgtgccactgcactccagcctgagcaacaagagtgaaactgcatctcaggtgggggyggggggcagggaagaaaaaaagattgcagatggtgaaatttaaatgcttaaaaaaatctttaagaactcataatttgcctgcaacaaattcaggtggtga

SEQ ID NO: 177639 - DNA, 201 bp, Homo sapiens
gaggcaggagaatcacttgaacccaggaggcggaggttgcagtgagcagagatcgtgccactgcactccagcctgagcaacaagagtgaaactgcatctcrggtgggggtggggggcagggaagaaaaaaagattgcagatggtgaaatttaaatgcttaaaaaaatctttaagaactcataatttgcctgcaacaaattc

SEQ ID NO: 177640 - DNA, 201 bp, Homo sapiens
tgcccaggctggtctcaaactgtctttacctctcagtactgctttgatgtgtagtcacataagtacattaaatagtgctgttaaaaatacttttaaaactrcaggattcagtgcaaatacaagagattgtcttcttccccaacctgtggtgattggcatagacctgaattttattttattttgtctttttttttttttttc

SEQ ID NO: 177641 - DNA, 201 bp, Homo sapiens
ttttttttttttctgagatggagtctcactctgttgcccaggctggagtgcagtggtgcgatctcagctcactgcagcctccacctccggggttcaagcarttctcctgcctcagcttcctgagtagctgggattacaggcgtgtgccaccacacctggctaatgtttttttttttttgtatttttagtagagatggggtt

SEQ ID NO: 177642 - DNA, 201 bp, Homo sapiens
gagggggcagagtgtccagtgttggaaatccttcaaagtattatttatccagaatgaaggattcacctagaaagcttggtgtgaaaggctaggatctgtcygggtgctcagcaacatggcagaactagagatgcaactggtgcacctgaaataacctaactcttcacactgcatccttgattacaagcgttcacttacaga

SEQ ID NO: 177643 - DNA, 201 bp, Homo sapiens
cggcacttgtggggcttgacccaacaactgacacctagaggccaggtcacccagaggccaggggcctggagatgaaggagaccagacgtcgtgctgtagascccccggtttctctactgcttattctagagtccagcagctagtggacagttactgcatgctcatctctgcctttctgtgtattccaccatcaggaaagtg

SEQ ID NO: 177644 - DNA, 201 bp, Homo sapiens
cagcagactagagtgaaattcctgaaacccctaattttcggcctgctatgaatcatcaatgttcattctctgttaagaatgaaatgaggcgaggtggggtrgctcacgcctgtaattctagcacactgggagggcaaggcaggagggccacctgagcccaggacttcaagaccagcctgggcaacagagtgagaccccatc

SEQ ID NO: 177645 - DNA, 201 bp, Homo sapiens
ctcatgttaactccattttaaaattagtgacatgactagactgaagtcataataatatctttgatttatacatctctattcctcagcagtacttaccttcrtttgagagttcagtgaatacaaaattgcattttcctctcagggttgtcagggatcttcacatagatagtacattctatgctgtgtctctccaggcgccgt

SEQ ID NO: 177646 - DNA, 201 bp, Homo sapiens
tctgtcaagtgcgtatgtcatggctcccaggaaagcttgtaatcgatatagtttatatatgccctatttctattagatgtagtcatttaatggctgaggakgactgatttgtaataaaggcccataattttagggtcctatctcttccagcattatataacaatgtaaaattcttactttgaaagttaagaggcctggcat

SEQ ID NO: 177647 - DNA, 201 bp, Homo sapiens
gtcatttttggggaaaattctgtttaaatttggcgtctagtttggaaacagtctctatataaacggtatcttaacagctttcttgttttatgaaaaatagygtcaaagtaattttttgaggtatcataacatgagatcctctgattttgttgttttcaccttttgcaggtttatgatgaaatagaagtctttccactaaat

SEQ ID NO: 177648 - DNA, 201 bp, Homo sapiens
gtcacgtggctgtgaaacagtgccgctggaactgaaaatcaggcctattttcctaccacttggttaagttttgtggggttcgctgcccgagctgctggtcrgatttgttgggtgaggctccaccttgtggagatctctgagcagagctcggcttcaaaaccaaactcccaatgatgggttatgctttcaagtcgctactgg

SEQ ID NO: 177649 - DNA, 201 bp, Homo sapiens
caggcgcccaccaccacgcccggctaattttgtatttttaatagagacggggtttcaccatgttggtcaggctggtctcgaactctgaccttaggtgatcygcttgcctcagcctcccaaagtgctgggattacaggtgtaagccaccacggctaatctcaattttttagaatcttaaagacagtaacttacacccctgag

SEQ ID NO: 177650 - DNA, 201 bp, Homo sapiens
cctccacctccggggttcaagcaattctcctgcctcagcttcctgagtagctgggattacaggcgtgtgccaccacacctggctaatgtttttttttttttgtatttttagtagagatggggtttcaccatgttggtcaggctggtcttgaactcctgacctccaatgatctgcccgcatcggcctcccgaagtgctggga

SEQ ID NO: 177651 - DNA, 201 bp, Homo sapiens
gattgcaatggtgtgatcttggctcatcttaacctccacctcccaggttcaagcgattcccatgcctcagcctcctgagtagctgggattacaggcgcccrccaccacgcccggctaattttgtatttttaatagagacggggtttcaccatgttggtcaggctggtctcgaactctgaccttaggtgatccgcttgcctc

SEQ ID NO: 177652 - DNA, 201 bp, Homo sapiens
gcacagagtagaagatattttgactttggcatgcaaggtaacggattttgctgcagaaatatatttctgaatagaaataatcattaatgttgcaatcttaygccttctaaattcatgtgatattcaagggcccagtttccatgccagggaacatattagcatatttattagttaatatatttattagcatattcattaatt

SEQ ID NO: 177653 - DNA, 201 bp, Homo sapiens
cgatagtcagaatgcatttatagcaagcagagctcacttccttcattttttctgccactcaaatactaagcctttagattttttttaaactgtgttttacmttaggtatgttctagagatgactctgctctccggaaaaggacactgtcactgacccagcgagggagaaacaagaagggaatattttcttcgttaaaaggg

SEQ ID NO: 177654 - DNA, 201 bp, Homo sapiens
tttgagacagagttttgctcttgatgcccaggctggattgcaatggtgtgatcttggctcatcttaacctccacctcccaggttcaagcgattcccatgcstcagcctcctgagtagctgggattacaggcgcccaccaccacgcccggctaattttgtatttttaatagagacggggtttcaccatgttggtcaggctgg

SEQ ID NO: 177655 - DNA, 201 bp, Homo sapiens
ctgtctatggatttgaaaacccccagtatacatcaccctagtggtgggggttagactgggaggcagggtgactgtgtgtgtatgtgtgtgtgtgtgtgtgwgagagagagagagagagagagagagagagagagagagagagaatataccactttgagaggctgggccataggtgatgacaaggagatttagagccgtgct

SEQ ID NO: 177656 - DNA, 201 bp, Homo sapiens
tgggaggctgaggtgggcggatcacctgaggttgggagtttgagaccagcctgaccaacatgaagaaaccgtgtctctactaaaaatacaaaattagccakgtgtggtggcgcatgcctgtaatcccagatacttgggaggccgaggcaggagagtcacttgaacccaggaggcagaggttgcagtgagccaagattgcgc

SEQ ID NO: 177657 - DNA, 201 bp, Homo sapiens
tctgtgccacagtactttcctacctgccttcctctgtccctgctttcttcttttccagacttttctctttcatcttgtttttttttttttgaaaaaaaaamaaacaaaaaaaaacacaagttattattcagagtcatcttcagaatcacaaaataaagaagtaaaaaagagaagttttagagagcagcgctgtgagagctg

SEQ ID NO: 177658 - DNA, 201 bp, Homo sapiens
tcccgggttcaagcgattctcctgcctcagcatcccaagtagctgggactacaggcatgtgccgccgcacctggctaatttttcgtattttttgtagagayggggtttcaccgtgttagccaggatggtctcgatctcctgacctcatgatctgcccacctcagcctcccaaagtgctgggattacaggcgtgagccaccg

SEQ ID NO: 177659 - DNA, 201 bp, Homo sapiens
ctgatcctgatctggaaagtaaggatgatggcacctagcacacagtgaggttggaaggatgcagggaggtcaccaattgcccttcttcccctttcctttctgtctttggatcactgaggcactttcgtcagcacaactggcttcccagcctctttttttttggcagagaagagtttaatgaaaaaatagggatttgcatta

SEQ ID NO: 177660 - DNA, 201 bp, Homo sapiens
cttcaccttttaggagttttttgtttttttgttttgtttttcttttgagacagagtctcgctctgtcgccgaggctggagtgcagtggcgtgatctctacycactgcaacctccgcctcccgggttcaagcgattctcctgcctcagcatcccaagtagctgggactacaggcatgtgccgccgcacctggctaatttttc

SEQ ID NO: 177661 - DNA, 201 bp, Homo sapiens
atgttaatactagctagatgagaagtgtttcttcaccttttaggagttttttgtttttttgttttgtttttcttttgagacagagtctcgctctgtcgccraggctggagtgcagtggcgtgatctctactcactgcaacctccgcctcccgggttcaagcgattctcctgcctcagcatcccaagtagctgggactacag

SEQ ID NO: 177662 - DNA, 201 bp, Homo sapiens
cctgatcctgatctggaaagtaaggatgatggcacctagcacacagtgaggttggaaggatgcagggaggtcaccaattgcccttcttcccctttcctttctgtctttggatcactgaggcactttcgtcagcacaactggcttcccagcctctttttttttggcagagaagagtttaatgaaaaaatagggatttgcatt

SEQ ID NO: 177663 - DNA, 201 bp, Homo sapiens
agtcatcaagttacattagcccttgtttctgattattcgatttgatggaagtgaagtcatttgtatggaaatggaaatcgtatgatttgtgtgtgtgtgtrtgtatatatatatatagcaggcaccttagtttcatccgcataacagatgattaagaattctagctgaacctatttaaagacattctatattttttaaagg

SEQ ID NO: 177664 - DNA, 201 bp, Homo sapiens
tttaatgtatagtgttgtaaatggatgagcttttccaaagggttgcttcaagtgaccaaataaaaatagtgtatgttagatctgcctttccctttagcaggagtaggctgtgaacaccgagatgcttagtgaagcctgagcggctctgccagccgaggagggcttgcagactttgcccctcctggaagagaggcggcaagg

SEQ ID NO: 177665 - DNA, 201 bp, Homo sapiens
tcagaaagttgctggctgttaatggatgccagtcatttgtgttgggactcagctgcgttgttcagtaagaatttcagtgcagcagaggtgggccgagtacytcctgtgctggccagtgagctggctgctggcggagatgtgaaagaaagaagccaccctgccctcactgggcttccagatggggaggtggtgaagtggggt

SEQ ID NO: 177666 - DNA, 201 bp, Homo sapiens
aggcgtgtgccaccacccccagctgattttgtgtttttagtagagacggggtttctccatgttggtcaggctggtctcgaactcccgacctcaggtgatcmaccctcctcggcctcccaaagtgctgggataacaggcgtgagccacctggcttgagtttttactcttgagtctttactcatctccactctgctgtactgc

SEQ ID NO: 177667 - DNA, 201 bp, Homo sapiens
attagtgaaaagaaaaagaaaatttcaaatttaaggatcacatttttttttctgttccgtggtttttttaaaaaaaaattttaaattttttttttttttttggaaacatcgtgttatatctaaagcaatcctcttctggattttttttttattgttttaaattttgttttattttatttttttgagacaagttctcaccct

SEQ ID NO: 177668 - DNA, 201 bp, Homo sapiens
tatgtgtcctctgctccctgcctgtgcgctctgcagggctctgcacccctttagggtgagggtgttaccatcttcatctgcttctactccattactagcaygtgcaccagctcaagagtttctcactcataattctacttgccacaagactgtggagctgagcggttagactggagggcagaactcctggcccactgtggc

SEQ ID NO: 177669 - DNA, 201 bp, Homo sapiens
cattagtgaaaagaaaaagaaaatttcaaatttaaggatcacatttttttttctgttccgtggtttttttaaaaaaaaattttaaattttttttttttttttggaaacatcgtgttatatctaaagcaatcctcttctggattttttttttattgttttaaattttgttttattttatttttttgagacaagttctcaccc

SEQ ID NO: 177670 - DNA, 201 bp, Homo sapiens
gagtgtgggcgcacatcttccttactcagatccgaaatgatagccagaggggtttgaggtgaatgaaaccctttgccctacacagaggcccctctgagatycctgctgagcacagacggagacacttggtgcccttgggggcagcggatactatcagggagaggcccgtgcattattttccacctcttgtcctctctcaga

SEQ ID NO: 177671 - DNA, 201 bp, Homo sapiens
ttaaatgtcagagacgtgtaactctaatgccaaagtggattatgtagttgaaaacttaattaaaccatttattattcacttgtaactactttgacattattttttagatttttttcagtcttagaaaattattcttctgtagttttcacatcagaaggggtttctaaggattaatgatttaatcaactaaaaacatttttt

SEQ ID NO: 177672 - DNA, 201 bp, Homo sapiens
gcccctcagctggaaagccctggagagtcatggtaaagctgcaatgctggcatgttctgtgagaaacctcccaactgtgccttgtgcacagcagctgctcrgcaaacacgagtttccttttcttcttgacccaaacggcaattttagcagttacttgatggaataggcattcctgctgccttttcatcaggaaggacactg

SEQ ID NO: 177673 - DNA, 201 bp, Homo sapiens
ttttaacgacagtcaggccaacggcatggaaggaccgcgggagaatcaggatcctcctccgaggcctctggcccgccacctgtctgatgcagaccgcctcygcaaagtcatccaggagcttgtggacacagagaagtcctacgtgaaggtaagggaagagctggcatttatgcattcgtgcctctttgatgatggcaagtg

SEQ ID NO: 177674 - DNA, 201 bp, Homo sapiens
attaaatgtcagagacgtgtaactctaatgccaaagtggattatgtagttgaaaacttaattaaaccatttattattcacttgtaactactttgacattattttttagatttttttcagtcttagaaaattattcttctgtagttttcacatcagaaggggtttctaaggattaatgatttaatcaactaaaaacattttt

SEQ ID NO: 177675 - DNA, 201 bp, Homo sapiens
tattaaatgtcagagacgtgtaactctaatgccaaagtggattatgtagttgaaaacttaattaaaccatttattattcacttgtaactactttgacattattttttagatttttttcagtcttagaaaattattcttctgtagttttcacatcagaaggggtttctaaggattaatgatttaatcaactaaaaacatttt

SEQ ID NO: 177676 - DNA, 201 bp, Homo sapiens
aaaatagaaaagacctatgttcctccttccatttagacgatgtaaatccaacacaggcttaccagatgatgaaggtaattgcagcctgaggttctttttttagcctccacgccccctttgaatcattctttttttaaatcgctgtgagtagcgttgagtctcaagctaccagaagccacttcgatgtaaatttgctctttg

SEQ ID NO: 177677 - DNA, 201 bp, Homo sapiens
aaatacctgggagtggcaggggctgtgcggacagctagagaggggaacagagctagagacggagcacagctagagatggagcacagctagagacagagcasagctagagaggggaacagagctagagatggagcagagctagagaggggaacgggccctgtgccatttaaggtctcgctgaagcctccttgcccctcagct

SEQ ID NO: 177678 - DNA, 201 bp, Homo sapiens
ctgtgttaatggctgagggagaatgaggatgcagaagacaaagcctctgctggtattcatcttctcctggtgcgggacttagaagtgactctcctgtgagmtgggctttgccaaatgctgtaccagggacataggagagtaaactcatctaagtgagaggacttgagggcagagaaaggagagataggagagaattcataa

SEQ ID NO: 177679 - DNA, 201 bp, Homo sapiens
atggcacatcaggagcttgtttcatttggtctcacgagatgcagtctttttttttttttgagatggagcctccctctgtcgcccaggctggagtgcagtgrcacgatcttggctcactgcaacctctgcctcccaggttcaagctgttctcctgcctcagcctcctgagtagctggggctacagacgcgtgccaccatgcc

SEQ ID NO: 177680 - DNA, 201 bp, Homo sapiens
acctcttttgctcacaaaaacttaagtaacaagtaattttttcaatatgaattatattaataatatcctcttttacaaaacaggagctgaatcgtacgtarcaaggtaaatcttgtcctaggccacactttgctggtagagtctgtgacttttgatttcgaagccccaaatcttttctttactgctatgtgaatataagaa

SEQ ID NO: 177681 - DNA, 201 bp, Homo sapiens
atactcagcagcccttacatggattgcggtgttctttttttattttttgagacagactcttactctgttgcccaggctggagtgcagtggcatgatcttgkctcactgcaacctctgcctcccaggttcaagcgattcttctgcctcagcttcccaagtagctgggactacaggcgcacgtcagcacacctggctaatttt

SEQ ID NO: 177682 - DNA, 201 bp, Homo sapiens
actgaatgattagataatgattggtaaatacctccatagaaacactgtttcttaccttgttaaatatatcgatacatgattttttccttaaaatgattcaractaataataaagtttataatatgttaaaatgtcctttttaggatgccttcgttttttaaaaatttgtataatcttttctgacccccatgttattttttt

SEQ ID NO: 177683 - DNA, 201 bp, Homo sapiens
tccactgtatgcatagatcacattttgcttatccatccgtctattgacagacagttgggttatttccacctcttggctattgtgaattacgctgttatgcrtgtgggtgcatggtctcacctttggaataaaagttatgtttttatatttcttaagcctctcgtttgacatttgtctttttctgcccctgcaagatattta

SEQ ID NO: 177684 - DNA, 201 bp, Homo sapiens
tccgtctattgacagacagttgggttatttccacctcttggctattgtgaattacgctgttatgcgtgtgggtgcatggtctcacctttggaataaaagtyatgtttttatatttcttaagcctctcgtttgacatttgtctttttctgcccctgcaagatatttatactttcaaaatagctgtaatttcgactttctcaa

SEQ ID NO: 177685 - DNA, 201 bp, Homo sapiens
tcttcttacagttttgtcagaaaaaggttgctcctggaattttaaagaaagtaaacgtaagagtttaattggaaatgcgaccaaacacagcggctcgctcscataaacccagctgctcaggaggctgaggtgggaggatgggaggattgcttgagcccaggagcccaagaccagcctgggagacagagtgagactcctgcc

SEQ ID NO: 177686 - DNA, 201 bp, Homo sapiens
  misc_feature (1)...(201): n = A,T,C or G
tgtcagaaaaaggttgctcctggaattttaaagaaagtaaacgtaagagtttaattggaaatgcgaccaaacacagcggctcgctcgcataaacccagctnctcaggaggctgaggtgggaggatgggaggattgcttgagcccaggagcccaagaccagcctgggagacagagtgagactcctgcctccgtaaaaaagga

SEQ ID NO: 177687 - DNA, 201 bp, Homo sapiens
tttcttttatacaaatagtatgtggtctttgtgttagaagtcactgaaaaatagagaaaggaaaaaccttgatatattcaaagacaatagcattattttgyttccccccaatatacttttatttacattgttcttttttttttttttgtattgaggccatactgtagatgtaattttatatccaggtttcaaaatttcata

SEQ ID NO: 177688 - DNA, 201 bp, Homo sapiens
acaagaggtggcctgaactgaggcagtaggacttactgtttcctgaggccttctatgccgaggttttgaggatggaatgagataatgtgtgcaaagttccyggcacatgatctctgttgcgcatgtgtgttcttaggaattgtgtgtcccaaacctccaccattgtctttcctcgtgcgctcagaatgcaggcagtcgact

SEQ ID NO: 177689 - DNA, 201 bp, Homo sapiens
cagcttcctaagtagctgggattacaggtgcccgccgctatgcctggctaattttttttttttttttttttttgtatttttagtagaaactgtgtttcacyatgttggccaggctggtttcgaactcctgacctcaagtgacctgctcgccttggccttccaaagagtgctaggattataggcgtgagccaccacgcctgt

SEQ ID NO: 177690 - DNA, 201 bp, Homo sapiens
aaggccatgtatttaaaagttaagtgtgcctgtgggggccctggcacaggatggtagcttgggggactctcacttaacaccgtgagggataacgacttctygtctcttatgatctgcttgagttacacatcagagctcttaagaaggaaattgaattttttcccaaagtttatcttaagattcagcaaaatagatatgcaa

SEQ ID NO: 177691 - DNA, 201 bp, Homo sapiens; identical to SEQ ID NO: 31777

SEQ ID NO: 177692 - DNA, 201 bp, Homo sapiens; identical to SEQ ID NO: 31778

SEQ ID NO: 177693 - DNA, 201 bp, Homo sapiens; identical to SEQ ID NO: 31779

SEQ ID NO: 177694 - DNA, 201 bp, Homo sapiens
aggcagggccatgctgtggaatttgatccatgttatgatcctgagtgtgttttcctcccacctggtcaccccttgaatgaccaacaggacagaagggccayagtgaccctgggaaggagctgtcccatagtgaagctcagtcatggtcggcccccagggaggggaaaacaggaagggggaggagccggagggagcgcggga

SEQ ID NO: 177695 - DNA, 201 bp, Homo sapiens; identical to SEQ ID NO: 31780

SEQ ID NO: 177696 - DNA, 201 bp, Homo sapiens; identical to SEQ ID NO: 31781

SEQ ID NO: 177697 - DNA, 201 bp, Homo sapiens; identical to SEQ ID NO: 31782

SEQ ID NO: 177698 - DNA, 201 bp, Homo sapiens; identical to SEQ ID NO: 31783

SEQ ID NO: 177699 - DNA, 201 bp, Homo sapiens
tagcttgcataaagagaagagaaccataaatttaaattaaaatcacacatatatttggatcaggatataaaatttgtgtaaatgtttaaagtaaaatacaraactttaaagaaatttcaaggttatggaggctgatcataggccaggagatcaagtccctctcataagaaggtacttcaaggagaagcagtatcatcactt

SEQ ID NO: 177700 - DNA, 201 bp, Homo sapiens
cttctctgccagacctcaaagagaaatcagctcttattccatttggtgtttcttaatatataggtttctgttttcctccgcttctttattgcttctaattkgaaaatttccagaagttactagtggaacatagacagtaattcagcctttgaattagtgaacttcattttacacagaaatcaaatgtccatattcttagga

SEQ ID NO: 177701 - DNA, 201 bp, Homo sapiens
gtttcattctgggtttctccccaaattattgtaggttgagacttctggaagtatgaccatgggtaagcaggaaatgattgtattgctctaacacaatattmttcatataagcttttgtttattatctgtggaggtactctaaaatagataacacaagtcatttacttaagctataatgccatatgaatatgtgagtatgtg

SEQ ID NO: 177702 - DNA, 201 bp, Homo sapiens
taagttaattttacatagtgtttaggatatcaacaatttttgtggcccttgtaattcttggttatagtttaaaaaaagagagactgtgttacttgagatayttacttctacattttaaaataagggatgagtatcttgatgttattactggtaattttgagaaaagaaaaatatatgttcaaactttattaaataaacagg

SEQ ID NO: 177703 - DNA, 201 bp, Homo sapiens
taatttttatatttagtaattatttgctgcattaaaatggaaagaacccaaagaactcttcggtacctgttattataaagagagagatatatatatacttyaggtcactgtaataagaaacctcttctaacatttataggaggaggacagggctttctttttttttttttttttttgacacggagtctcactctgtggccc

SEQ ID NO: 177704 - DNA, 201 bp, Homo sapiens
atttgaaagaatctttctaaatataaagaatacgaaagtacaaacatcaaattgtttatgaaagtgaattttttttagaatgagaaaaatccacaaagcastatagtttttaaaaagccggtatatctacaagtgattagagaaataatctagactagtttttggctctgtacattttatactttgattatcttccgttac

SEQ ID NO: 177705 - DNA, 201 bp, Homo sapiens
gcactgctaaaacaacctaacacagaaactggatatataacatcaaggagaagaggtttattgggcccttggttatgcaggctgtacaggcatggtattarcatctgcttggcttccaggcaggcctcagagagcttttgctcatggcagaaggtgaaacagagcctgcatgtcacatgtggtgagagcaggagcaagaga

SEQ ID NO: 177706 - DNA, 201 bp, Homo sapiens
tattattagaatatgtgtttatgtataccctgtctcattcctaaagtattttgagatagcttaccaaacatgtgctttttttttttttttttttttttttwaagactcaaggtaatgaaaactatgagtagaatagtaaggtgtgacaggggacaaataagtagatataaaactatgctgcaatattctagttattaaagc

SEQ ID NO: 177707 - DNA, 201 bp, Homo sapiens
taaaccattcattggaaatatgctcccatgatccgatcacctcccactgggctctacctccaaaattgaggattacagttcaatatgaggtttggggggarcaaatacccaaactctatcatccagtgtttatatatgggtacataagtttctaaaattttagttttgttccatctatttgtttatgcttgtaccaatgcc

SEQ ID NO: 177708 - DNA, 201 bp, Homo sapiens
ttaaagcaattttacataaatgtaataaatagaaagataaagaagtaaatggcattcaatacatttcctagttacttaggtcctgtgtagaaggagagagrtagaaattatagtcacataattgtatatgctactgaagtagatatttagggcacagtgaaagtcttttgccttgagagtagataatgatttctagtagag

SEQ ID NO: 177709 - DNA, 201 bp, Homo sapiens
tctttacaaatgtctttataattcttttttcaaatttagtagttttgaaattcttcctgatccagccaagtcatccattaaattttactctttagggtatyagtacattgacaaggcatataactcctttgactaggaatttgagtggatacagtgttttaattggatgtaatcatatatgatgtggtaaacttgtatccc

SEQ ID NO: 177710 - DNA, 201 bp, Homo sapiens
aatggtttaaaccatgggtcagcaaactgtacagagccagatagtaaatagtttagactttgccagatggtctctggcaattagtcagcgttgcctctgtrctaggaaagcagacatagacagtctgtaaattaattgacatggctgtattttgataaaaatttatttacaaaaatgagccagaccaaatttgaccattgg

SEQ ID NO: 177711 - DNA, 201 bp, Homo sapiens
tacctgagctcacatctgtcaaaatatattacagtgaactgctgacatgcccccatttctcaattgagaggtttccaatagactggaaagtttctttggargcagagactgcatcttacttatttttgtgtttttgagcctgacacgtttcctggaatgtttaggcaataataattttttttttttaggtggagttttgct

SEQ ID NO: 177712 - DNA, 201 bp, Homo sapiens
ttggtttagatccaggtagtctatagacagaactcagacctgccccaggtcataagcttctccacatagaaagctgccatggctttcaaaaagccatgccyctcttcgtcttcccaggcatggccaggcacccagctcctatgctcctgtctgcagcacacttcccacttgccgcaactcctccctccccattctgttcaa

SEQ ID NO: 177713 - DNA, 201 bp, Homo sapiens
agtggtcatatttatactgtagtaggttttcataatagattttccagattaaaaccatttgttgaaatcatcaaagagatgttaatcctgctttagcattratgcaaagttaaaataactgacattaaaaaaatcatttgggaagctttattgaatatattgagataaggtttattgtagtccttctcttcatgcatactg

SEQ ID NO: 177714 - DNA, 201 bp, Homo sapiens
tttgtgtgttgagtatttgaaactttaatttggaaaagaaaaatgtacttcttagacattagttttatggtaattataatgaagctggacataattgcatrtttatacttcattgtaaatcaacagcttcctaatattcttaaaagtgttcctttttttttaaaaaaaaacagcagcattttgttaaccttaatcagagcc

SEQ ID NO: 177715 - DNA, 201 bp, Homo sapiens
atggacccatcatcttatgactgtttttagaaaatgagaattaaatcttgattcattattaaataaccttgtatacacacatgaagaggtcatgacacatragactttgacctaataccttttttcagatatgtttctatagctatcttgatagcctaggactgtttgagagaaaattaatttaaatttttgtcatattct

SEQ ID NO: 177716 - DNA, 201 bp, Homo sapiens
ttgcgcggcattggctcagcggcgcccggccccgcccccgccccgccccgccccgagcctgggtcctgtgtgtgccacaggggtggggtgtccagcgagcsgtctcctcctcctgctagtgctgctgcggcgtcccgcggcctccccgagtcgggcgggaggggagagcgggtgtggatttgtcttgacggtaattgttgc

SEQ ID NO: 177717 - DNA, 201 bp, Homo sapiens
ctaaatggctcttcaaaccttttttagcattagtttctgctttgatatactctattaaaatttgggggataattgataaatcttccaggtggtttatggayggccagggaggaaatttgccattgttttaattatttaattttatttgcctctgtttttacacttggtaaaaatttggaagtgtttcagatagtgaagaaa

SEQ ID NO: 177718 - DNA, 201 bp, Homo sapiens
gatatgaacatgagctaaagcatgagggcagcaaagaggggagaactttgtttcacctaaatggctcttcaaaccttttttagcattagtttctgctttgrtatactctattaaaatttgggggataattgataaatcttccaggtggtttatggacggccagggaggaaatttgccattgttttaattatttaattttat

SEQ ID NO: 177719 - DNA, 201 bp, Homo sapiens
tgcataaattattatgaaagaattcagtatgtttatttttactgtaagatacagtaaatagaaaggcattgataattactaattggcagtatataagtgtrtagtacagaaacatccccctcttttgtttatcttttcttatttgttagtggtgaaggaagtggctcataatatcaacattgtcctgatgattacatcagg

SEQ ID NO: 177720 - DNA, 201 bp, Homo sapiens
tagtaaggtgtgacaggggacaaataagtagatataaaactatgctgcaatattctagttattaaagctgggaaatatgcaaatgtaagtagtgcttggarccagagaaggttctatatttagctgttcttctgtagctaaatctgacaaattgaaaaatatcatattctctgctctaggtacattttatgtatattttga

SEQ ID NO: 177721 - DNA, 201 bp, Homo sapiens
gacaagacataatcccgcctttgacctgtcaaggaactcagagaacagtatcagagccaaacacataaatggataattgccatgtagtatggagagggctrtattacaaaccccaagtacagtgggaacagagtagagaacatcctccttgtttttctggccagtgttgagacagttttctgtctggattctgctggccat

SEQ ID NO: 177722 - DNA, 201 bp, Homo sapiens
attacattgctcttaagttaattatagagaactacgtctcttctgccagactctttgcatctctttgaatcaggaagtatgttctagtcatctataatttsctagctctaagctcagtacctggcatatagtagttcaagcaatttccacctgataaagcaataaattcccacatggaattacagttttaaataaagcaaa

SEQ ID NO: 177723 - DNA, 201 bp, Homo sapiens
gaaaacatagatgttgccttaacattaacattaatgtcatttcagagcctttgaatcatgccttaataaccagtgttgtagaaaaaataaatgacaaaatggggtgtgtgtgtgtgtgtgtgtgtgtgtgtgtgtgtgtggtggagggttacatgttctgtagttaaaaaaagtatttgacatagaaaaattagctctaga

SEQ ID NO: 177724 - DNA, 201 bp, Homo sapiens
gtaaaatataaatattcatgttattttatttaataatgtatattttatattatctgtttataattatacatttatatatttgatattgttatacaaatatrtggttatataatatggtatagatataaatataaatttatttttactgtgtaatatagaaatagatataattttatttctcctaaccactctgaaatatat

SEQ ID NO: 177725 - DNA, 201 bp, Homo sapiens
tggtaacataaattatatagtaaatgaggtaaattgatcagactgggcttacttatgttctgatattattttttatcattttaatctgaagtaacattgaytctctttgaaacatgctttcaacaaatatcagagtataatgttgatttcatgtttttcatgttacatgaacttctctgatttataattctgcttggcact

SEQ ID NO: 177726 - DNA, 201 bp, Homo sapiens
gactgctttaacagctttaacatggcaacgtaaaaatactttttttttcttttatgtagaagatttaataatctggcacatcagatagagtatgctgccasttccttggaataaatgtagcgtcagccttaaaaaaatcgcagagatgattcatccacacccttgagtaaagttgtctatcactgactgccttttttctct

SEQ ID NO: 177727 - DNA, 201 bp, Homo sapiens
caatagcaggctggagaagatgcagaaagtgggagagttatagcagatggagacaaaaaagggaactgctggggatcaaaccttgtaaagtccttctaagygatatatgaggactttgacttttattcaaagttagaaggctttgaacaaaagaattatttcatttgtgttttacaatggtcacaagtgccgtagcgagaa

SEQ ID NO: 177728 - DNA, 201 bp, Homo sapiens
ctggggatcaaaccttgtaaagtccttctaagtgatatatgaggactttgacttttattcaaagttagaaggctttgaacaaaagaattatttcatttgtkttttacaatggtcacaagtgccgtagcgagaataggctgtgtagagaagagattttgtggttttcttttttgttctctgtattctcttcctgaaaaatct

SEQ ID NO: 177729 - DNA, 201 bp, Homo sapiens
gagttttccttattgaaatatatattgttaagcttttaaaccaaatgaaagtatgagtggtcatatttatactgtagtaggttttcataatagattttccrgattaaaaccatttgttgaaatcatcaaagagatgttaatcctgctttagcattgatgcaaagttaaaataactgacattaaaaaaatcatttgggaagc

SEQ ID NO: 177730 - DNA, 201 bp, Homo sapiens
ttattagaaatgtaaaccaagtatccaagaaggtcctgtcaccaccactcagctgtagaataagttaaatccagcttaacttttgcatttgtgaaagtctkagacctttaaaaaatgcttagtcgtcattgtattcagaaagtttaagacttctatagtggttcagggaaattgtactgctgagaactagtaggttattac

SEQ ID NO: 177731 - DNA, 201 bp, Homo sapiens
attgaaccctaaaccacctcgtcaacatgaaagatacttcattttatatgcatatatatatatttttttaatttttttttttttttgagacagagtctcaytgtgttcacccagcaggagtgcagtggtactatctgggctcactgtaagctccacctcctgggttcaaacgattctcatgcctcagcctcctgagtagct

SEQ ID NO: 177732 - DNA, 201 bp, Homo sapiens
tctgattcaaatctgggtatgctgctttccaaataggatagtacaaatttcttctaaaaacgttccctggttggtttttttatcagagaaaatacagaacwtgtaaaatttataatttttaatgtaaaaactactttgtttaacaagaataaaattcttaaataagatgtttgatactttctacccagcttcatcactcat

SEQ ID NO: 177733 - DNA, 201 bp, Homo sapiens
tttcagtttctctagggatatatgtttttagacttttttgaaaagttctttccaaagattctatcaccaatataaagtttttaatatttaaaaatcacttstttttttaaattctagtttgtccaaagatgaaattacactctactactaaatatacaagttaattaaatccagtgactgcagccattatgtatgttaaag

SEQ ID NO: 177734 - DNA, 201 bp, Homo sapiens
gaatacctgaaagaaaagttactatttttttaacagttggccgggtgcggtggctcacgcctgtaatcccagcactttgggatgccgaggcgggtggatcrtgaggtcaggatatcgagaccatcctggctaacgtggtctctattaaaaatacaaaaaattggccaggcgcggtggctcatgcctgtaatcccagcactt

SEQ ID NO: 177735 - DNA, 201 bp, Homo sapiens
attttttgttattttaaagaatagatttgttatagttttaccctttaaaatatacatactacagtactatattcttattgttttatttaagaaatttagtrtagaaagatgttaaacagaactaaccataatttaataaactgatgaaatacagcagtgacattaccacttttttcaattaaaaataagtatttaccaaca

SEQ ID NO: 177736 - DNA, 201 bp, Homo sapiens
ggaattcttgtagcatgtttggtacttgacatttaaaagagagacagatggcaagtaaacaaggtgagagcaggactttatttgctgtactgcaatctcamactgctgtcaagaattttaattagatgttattttaggaagctttcaatttactgcaggtcattgaagcttagaaagaagcagaatgtacaccaagtattt

SEQ ID NO: 177737 - DNA, 201 bp, Homo sapiens
taagtacagagtacaaggatctaaatgtctgtcatataaacaatgggcaatcttattaggcaattttggacacctattacgtggctttatttatttattartagtaggcttttctcatcatggttcatggggatttgtaaggtaacgataccctggacagccttccaagatgttttgatgttggcagcaatgcattactgg

SEQ ID NO: 177738 - DNA, 201 bp, Homo sapiens
atatattgtcaaatattgttatctttttaaaatggtgttaggagcctgggtaacagagagaccccatctctacaaaaaaaaaaaaaaaaaaaaaaaaaaawtagccaggtgtgttggcccatgcctgtggtcccagctactctggaggctgaaatgggtgagattgcttgagccaaggaggttgaggctactgtgagctga

SEQ ID NO: 177739 - DNA, 201 bp, Homo sapiens
ggtaacgataccctggacagccttccaagatgttttgatgttggcagcaatgcattactggggcaggggcaggggaggaggtagaaagtgtgataactctrcatcactccttcttctttgttctcatttataacacctaaggcattggaattccccagagtaagaattctagtgaaaagggaagcaaataaaatacatctg

SEQ ID NO: 177740 - DNA, 201 bp, Homo sapiens
tatgtgaacctacacctcatgaccatataaaagttacacaggtaaggataattgctagaaaagtataattaaataagtatccataatgcccttgaaataartaagactctcttagtgtagttaaaatcatgcacaggtatttaatacaaaatatacttaaggaattctaagagtgtttaaggagaaattatattactttct

SEQ ID NO: 177741 - DNA, 201 bp, Homo sapiens
aggtccccattgaagccctaccttcaagacagggacagcctacagcctcagggccgggctgtcagttcctggtggagttcacagtgggagtgaaaacttayggagctttttctgggcctgcccttggaccagtcagcacacacttccttccttctgagcccatgaaaaactccagacccagccagactcacacagacatca

SEQ ID NO: 177742 - DNA, 201 bp, Homo sapiens
aaaataatgtaactttcatgatttcgattgggtggaataatttttagttacgataattgcactgaaattaggtctttaaaaggttcttggtttttagttaygatactaaaatatttaccagtgaatttatatgatgtgtaggaggtacttcaaaacgatctaagagtgaaaggaacaagagaacatatagatgaaactgga

SEQ ID NO: 177743 - DNA, 201 bp, Homo sapiens
caaaatagtttactggccaggcatggcggctcacacctcttaaatcccagtactttgggaggctgagacaggaagatcccctgagcccaggagttcgagarcagcctggacaacataaggagaccccgtctctataaagtaataataataataataaaatagttgtttgccttgcagcccagggtgagtagaaaagtatgg

SEQ ID NO: 177744 - DNA, 201 bp, Homo sapiens
agcaacaaatatttattttactttctatatacttcttaaaagaaagtttattcttagtaaataaatactacctttacttaagtcctaacttcacattgtcwgtacattcttggaaactgcaactttgagcaaagtgacatactgtatgctgtaggaaccttaactcttgtttctatcaattagcctagggtaaaatggatt

SEQ ID NO: 177745 - DNA, 201 bp, Homo sapiens
tgtggttatctaagtaaatacgttttgggaattaattgcagtaaattccttctgattcaaatctgggtatgctgctttccaaataggatagtacaaatttyttctaaaaacgttccctggttggtttttttatcagagaaaatacagaacatgtaaaatttataatttttaatgtaaaaactactttgtttaacaagaata

SEQ ID NO: 177746 - DNA, 201 bp, Homo sapiens
ttcattatgtgcaaaaggcataggaacatttcccagttgtctttctgtattactaatgctgtgtaatcaccacaacattttacatcaccacaacatgtctrtgtgttactgtgcattctccaaattggtgtagttcctcttgcttgttgcttatcaattccttgaattatttcatgattttttatattggcctaatgacct

SEQ ID NO: 177747 - DNA, 201 bp, Homo sapiens
gaattacgctaaaaaaatcagtatgtatctttagtgttaataagtaggattattaatagtgcttgacttttaaacagagaccccattgaatagaactagasaagccaatatccaggatgatttcttatctagacatatgtcaaatctagttatgttaaattgtcttcagaaaacacataatttaaatggcagcgtaattaa

SEQ ID NO: 177748 - DNA, 201 bp, Homo sapiens
aatgaccttatatgaagatatgttcagtaatgttagtaagttgttaacatttactatttctctttttcattctcagctacttctcagttttacttttatamattgaggaagtacataattgtcaagctctgaaaattgtgtttagctaaaattttaaaagttatgtgagagtaatagtttactaagtaaagtagaaacaaa

SEQ ID NO: 177749 - DNA, 201 bp, Homo sapiens
ccagctggagaggacactggtgtctgcctgtttaggtaactgcaaatcttatgcatgaaagctacagtaagaaaagaggctaggggcaggggccgagtaaygaagaaaagaatctgacatccaggatgctgcaggtatctttggatgtatgagtttctccctggggtatttcagatttatttcatgttagtggcttgcttg

SEQ ID NO: 177750 - DNA, 201 bp, Homo sapiens
tgtattttctttctagaatgtggattactttacctattttagaatctctctgctagcatgttatctgcacattggtcattactcagtaaatacttatagaytgcatgctaggtaatgtaaaagaaaaggaagtctaaaagtacattaaataaaaagacagtattgtaggttgtgaaaagctcttacaatacttttctgaga

SEQ ID NO: 177751 - DNA, 201 bp, Homo sapiens
cctggcccagtgtcagatgtttaagggctgaaaaaagatttgaataaatatgataatgtaggaaatagctgaaggttaaaatgatagcaaaactctgtctygtgcatcttcagatgtgttaataagaaaaatatgattaaagaaattagtgtgccaattttttctaaagcaagttcagtaaatagtaatatcttttttttt

SEQ ID NO: 177752 - DNA, 201 bp, Homo sapiens
tagaatatctaaggcttagttccctttgttccattcactagctattgtgtgatttccttaacattttacattgtgatttttttccacccattcttgaaccwtgttattttacgtttattgtatgcagtactaccagcactaacacagaagcagtaagactgcatttttatcgctgttttacaccaaaaaaaaaatatgcac

SEQ ID NO: 177753 - DNA, 201 bp, Homo sapiens
cattgtgatttttttccacccattcttgaaccatgttattttacgtttattgtatgcagtactaccagcactaacacagaagcagtaagactgcatttttwtcgctgttttacaccaaaaaaaaaatatgcacagtaatccccggttcatgttttctctccccctaaagaaaattattcttaggtcaataattctaaattg

SEQ ID NO: 177754 - DNA, 201 bp, Homo sapiens
ttctgaaataatctactgatttgtggcaaagcaaaagagtgggggaaattactcgagaaattctctatcaatgaaggtaaaatatcaaattagccacaacrtatgtgatttaaaaaatggtccattgttgactcataatgaactgcttctttggaaacttaaatctttggagggaacctgcaacaggcagatcttagaaca

SEQ ID NO: 177755 - DNA, 201 bp, Homo sapiens
ctagttaaagcacagttgtaaaacattagatatgctgaaggtctcgtatctgtaatctcacctagctgtgctcacttgacttaacctaattgatgataaayatgtcagtaagaagaacaaaattatagcacacttcatagttccacaaaatattgccaaaagtggtatctaagcttgtacatatatagagaaatgttctca

SEQ ID NO: 177756 - DNA, 201 bp, Homo sapiens
ttggtgcataggaatgtttgttatttttgcacatagattttatatcctgagactttgctgaagctgcttatcagctttaggagattttgggctgagacgayggggttttctaaatatacattcatgtcatctgcaaacagagaggacataaagaaagaatcaatatcatgaaaatggccaaaatgcccaaagtaatttata

SEQ ID NO: 177757 - DNA, 201 bp, Homo sapiens
tcttaatattttctcctttaagaaaagacaaaaattaaaaatcttattctaacttagtttagtccactcagtgaaacagcatttaatatttaatgaaaatwgttttgtcgtttcctttgacatctgtattaaagattgctaattgcctccaaaatccattttgtccctttcctatcattatatatttccccattgttatcc

SEQ ID NO: 177758 - DNA, 201 bp, Homo sapiens
ggagatgggtacgagggaaaaaaaaagtttcataatgatgaatgagaaattttcagaaagcattgtttggtttgtcattttcagtccagaaggttacttaygtcattactctggggatggaatatagcttcactgaatgacagcatttggttccaagttatttagttatgtttcattgtgttgaaataccctacctttgcc

SEQ ID NO: 177759 - DNA, 201 bp, Homo sapiens
aatgattagtctaatatagtttgtctgacggcaaagactggagagtggagtaagaaatttgttggattttataccaaaaagctaaagtgtttctaggatarcatgtcttgtttaatattttatcttttttcaaaatggagatcatgttttatactgccttgttatatggttttattacttctttatgaatgacttaataga

SEQ ID NO: 177760 - DNA, 201 bp, Homo sapiens
attttatcttttttcaaaatggagatcatgttttatactgccttgttatatggttttattacttctttatgaatgacttaatagagcattttgtgtatgtrgtaaatatttgtatgttcgtttctctgatcaagaagctaatggattattttgaagtatctactattttgtagcactacatgagttgtacaattaacttga

SEQ ID NO: 177761 - DNA, 201 bp, Homo sapiens
tttgttaaatgtttatatattcctgagaatgataccaattattatatatattaagcaaactcacaagactcaagtgaacttggctttgcagtggaataccktttatgtttttcagtcttaggtagcttattaaaattgatgttttcctttcagtaaatatctggtgacattaaaatttgataattaaaatccagaagcact

SEQ ID NO: 177762 - DNA, 201 bp, Homo sapiens
aatatttgtatgttcgtttctctgatcaagaagctaatggattattttgaagtatctactattttgtagcactacatgagttgtacaattaacttgagtcyccataaacaaaattggggacatgctggatccatgtcatgctgtcatgctggagttgtgtcatgctggagccgtgtcatgctggagccatttcaaactcca

SEQ ID NO: 177763 - DNA, 201 bp, Homo sapiens
ttcaggactctaatgccttgatacattagaataataagtgaacagtcaggaaaataaagaggtttcttttcttgggaaaatcaaactttcttaaaactttwtttttccttcggaaactgaagatactgaccatttattatacattttgttggctccctgttctatacccactaccacttcaagagaaatcttcccccacct

SEQ ID NO: 177764 - DNA, 201 bp, Homo sapiens
ttatatttgagctgtgtgtcaggatgacaggctttcaggacagatgatggcttttgaatataaatgtacacattttaatttttcctaattgtgtataaagwttttaaaatacacaggcagttaaaacaaatatttagccacagttagatgcacaagtattgtatttttctcaccgatactactgctttattatgaattttt

SEQ ID NO: 177765 - DNA, 201 bp, Homo sapiens
agagattgatctgtatgtgtaatttgtgctttaagtggtagttttaatagttactggacctcacagtttaatgggcatgtttataatgctacatcaattaycacattttctcatagttctgtatattgtgagaagaaaatgaaaaaagtgctgtttaactaagtacaggaatgtggagccaggaaatctcatgctctgatg

SEQ ID NO: 177766 - DNA, 201 bp, Homo sapiens
gttgttctgtcaaacacgtgtcttgacagtgagtctcagtcatggtgatgcatcagaaatcatctggcgagctcttaaagcaataccagtgctttggtacygctaaggctgtgattgaattgagccaggatgggccctggtaatggtaggctctacaagttcctcagatgattccgatatgcagctcaccttgggattcgt

SEQ ID NO: 177767 - DNA, 201 bp, Homo sapiens
gagccaggatgggccctggtaatggtaggctctacaagttcctcagatgattccgatatgcagctcaccttgggattcgttgtatgttagaaggaactagraagcatcctcctactcagtggttttcagccttggctcacattggaatcatctgggggaactgaactctctaatagccatgtcccttccccagagatttta

SEQ ID NO: 177768 - DNA, 201 bp, Homo sapiens
ttcattttcttagcttatttagggctccaaccagtgctgcactgacagccatcaaatagaaggatgtaccatttttgtaaatacaagtcatactcacaacygttaataatggaatgctgcttctttgcttcttgaggaggctttccctgaacatatctaaatagctcctatcttctgcagttattttctttccttttttgc

SEQ ID NO: 177769 - DNA, 201 bp, Homo sapiens
tatttagggctccaaccagtgctgcactgacagccatcaaatagaaggatgtaccatttttgtaaatacaagtcatactcacaaccgttaataatggaatrctgcttctttgcttcttgaggaggctttccctgaacatatctaaatagctcctatcttctgcagttattttctttccttttttgctttatttttcttcat

SEQ ID NO: 177770 - DNA, 201 bp, Homo sapiens
aatgaccagctcattctagaccaacttcatgcattaaaattttaaattggattcaagcaacaaatgtttaaaacaaaaagcttttactatgtaaaaacgtrtcctcagaaatggtataattattcagatacattttatgtcttcctgttaaagagctgaaacttttcaattagagcgaacagaatattcattgattgtagt

SEQ ID NO: 177771 - DNA, 201 bp, Homo sapiens
tctttcattcgttctttcagccagaagttattgagtttctgtgggagatactgtgctttgaaaattcttggtatggatccaacctattctcagtgcatttrtatacatataatttttccagttataattgctatgtttaaaaaaagatttgtggcaacctcatagctacatgaaatatagcaaggtaatataaattagaag

SEQ ID NO: 177772 - DNA, 201 bp, Homo sapiens
gtgctatgactgatttaaaataacatattcagtaccaccagctctggattaaaagaaacctatactttagttaggggaaaacttgtagccaaaacacagtkttttcacagcttctttacagttttctccataataagtgggtgttgtagagcccagaggaacatcattcacatatatgatttcaagcagtatgaatcccta

SEQ ID NO: 177773 - DNA, 201 bp, Homo sapiens
gttctttcagccagaagttattgagtttctgtgggagatactgtgctttgaaaattcttggtatggatccaacctattctcagtgcatttatatacatatratttttccagttataattgctatgtttaaaaaaagatttgtggcaacctcatagctacatgaaatatagcaaggtaatataaattagaagttattgataa

SEQ ID NO: 177774 - DNA, 201 bp, Homo sapiens
tgactgatttaaaataacatattcagtaccaccagctctggattaaaagaaacctatactttagttaggggaaaacttgtagccaaaacacagtgttttcmcagcttctttacagttttctccataataagtgggtgttgtagagcccagaggaacatcattcacatatatgatttcaagcagtatgaatccctattagca

SEQ ID NO: 177775 - DNA, 201 bp, Homo sapiens
gctgagagcaaataatttatactatatataatgctatcttgaaaaacatttaaaagaaggtatttaagatatagtatgtctgtcttagcaatatttaaacmaagtatggaaggtgattgatacatgatgatgatgagatggtactaacaatattcatttgggtttttacatagagtatttgtggagaatgtagtattatga

SEQ ID NO: 177776 - DNA, 201 bp, Homo sapiens
gtggccagcagtatttctatagaggcagtaattcaaccttatggcataaaaatgaatcccagaattaattgatccaacttctagtagaataacaaagttamtcataatgtgtttgagatttcttttattccttgatcaattaagtgtatttatatttttttctaattctgttattgttatagttgagaaggtcagtagtct

SEQ ID NO: 177777 - DNA, 201 bp, Homo sapiens
ggaactgttccagctggagaggacactggtgtctgcctgtttaggtaactgcaaatcttatgcatgaaagctacagtaagaaaagaggctaggggcagggrccgagtaacgaagaaaagaatctgacatccaggatgctgcaggtatctttggatgtatgagtttctccctggggtatttcagatttatttcatgttagtg

SEQ ID NO: 177778 - DNA, 201 bp, Homo sapiens
gctggtcttgaattcctgacctcaggtgatccacctgcctcagcctctcaaactgctaggattataggcgtgagccactgcgcctggcctgaaatagataytattaatgtcaatttatagaagaaagaaagacataacaaagtttagtaactaactcaagctgctgcagaaagtgtaagcctgatagaatttacatcagtt

SEQ ID NO: 177779 - DNA, 201 bp, Homo sapiens
tgagactaagaagcaaactgggaactgttccagctggagaggacactggtgtctgcctgtttaggtaactgcaaatcttatgcatgaaagctacagtaagraaagaggctaggggcaggggccgagtaacgaagaaaagaatctgacatccaggatgctgcaggtatctttggatgtatgagtttctccctggggtatttc

SEQ ID NO: 177780 - DNA, 201 bp, Homo sapiens
ctttcacctcctcccccttcaaaactcaatattttcagttatctcttgtgaggaaatatatcacataaactggaagtcatccttaaccagagcaatatgtragttgaccctggaggttcaaagagaaacttacgtagcctaatagtgtggcttgcacattctatgcactgtactaaaaaataatgtaactttcatgatttc

SEQ ID NO: 177781 - DNA, 201 bp, Homo sapiens
gcaaactgttctcataaaagcagaatgttgacaaactgacaaactgcatctgctgcccaggaggaatgctgagggcagtcacgacccaggcacaagtgttkcttttgattaggcacatctgaagcctgttaacaataatgtgaacctgtgatcagtcaagcagctgaccaatcgttacctcctcatccctgctctttctac

SEQ ID NO: 177782 - DNA, 201 bp, Homo sapiens
ttaaaggtgatagattggaagcagtggaaccaataggtggccatgggctattgtttggataagtgatggtaagggcctgacctctcaaacagcaactactrtggtggtgggtatggaagttaccatgcagtgaagaagaggaactgataaatataatgttgcttactttttttagatggttggtatggagggtattagaga

SEQ ID NO: 177783 - DNA, 201 bp, Homo sapiens
aaaaccaatccatgcattttctatttgtttaggagtcggatggtcagggctgccctttctgtcgttgtgaaataaaaggaactgagcccataatcgtggayccctttgatccaagagatgaaggctccaggtgttgcagcatcattgacccctttggcatgccgatgctagacttggacgacgatgatgatcgtgaggagt

SEQ ID NO: 177784 - DNA, 201 bp, Homo sapiens
ataaatggaacacctaagtatttttttcatatttagatacaaacaccacttgaaaactattttttcacttctagatataattctctaaaatctgtgtaagytgacaatttatactagtaagttttagcaataagccttattattccatgaagtattagatgagctttgcttttcacttcattctgaaataatctactgatt

SEQ ID NO: 177785 - DNA, 201 bp, Homo sapiens
ggcacaagtgttgcttttgattaggcacatctgaagcctgttaacaataatgtgaacctgtgatcagtcaagcagctgaccaatcgttacctcctcatccstgctctttctacccaataaatacaaagggctatggaagctcagggctgctgcctttgctcacttcttcttcctcagaccctttccttaaaacagtttctt

SEQ ID NO: 177786 - DNA, 201 bp, Homo sapiens
aaataaaaggaactgagcccataatcgtggacccctttgatccaagagatgaaggctccaggtgttgcagcatcattgacccctttggcatgccgatgctmgacttggacgacgatgatgatcgtgaggagtccttgatgatgaatcggttggcaaacgtccgaaaggtaaaactagaaacatgggtttagttaaggtgat

SEQ ID NO: 177787 - DNA, 201 bp, Homo sapiens
taacattatacccaactgtcattatttgttctcttgaggcagtaagaatactgctgtttcttatatgataaaactatctttaactggtcatgtaacttacrgtgacattgtcctaaagatgacctttgcatgataatcttttgaagatgctgcaagataaatatatcaaatgatttccctttttgcagttgtggcttgttg

SEQ ID NO: 177788 - DNA, 201 bp, Homo sapiens
ctagaatacctcctgaagaacctatctgagactatgttacggttaactttttttcataagtaggagtatactctaaaataatgataaaaagtatagtatartaagtacataaaccagtaacattcatttattatcattatcacatattatgtactgtacacaagtatatgtgctatacttttatgcaaccagctgcacagt

SEQ ID NO: 177789 - DNA, 201 bp, Homo sapiens
caaagtgctgggattacaggcatgagccactgtgcccagccagcacggtatttttaacaaactcctttagttccatccaatttttacaagttgtgttactrtacatgtcataaatcagttgttggagttagttattgttgcctgggacagtgcacattaggcagccaggtaaaatgaacctcctatatacttaaaaacact

SEQ ID NO: 177790 - DNA, 201 bp, Homo sapiens
catcacacaaacacgtgagtaatgctttgtgctatgacgttaaggtggctatgatgtcacccaccaggcaataggaatttttcagcttcattataatcttrtaggatcaccatgatgtatgtggtccattaccgaaatgtcattgtgcagggcacaactactataatgttgacaggctgatataatcatagtttgagagag

SEQ ID NO: 177791 - DNA, 201 bp, Homo sapiens
gctggagttgtgtcatgctggagccgtgtcatgctggagccatttcaaactccagtgtgcttgacgttaaatttcaaaagtcaaggaaattgttgttaagragcttagttgaagctatcttttcaagaatttaaatctactaattcattttgtttaatttttaggaatttgtatgtcattaaaatactctcaaaaatgctg

SEQ ID NO: 177792 - DNA, 201 bp, Homo sapiens
aagattttagtgcactggtcacctgagcagtgcacactgtacctaatatgtagtgtagtcttttatcccttacccctctctcacccttccccaccacgacyccaaagtccattatatcattcttatgcctttgcttgctcatagcttagctcccacttataagtgagaacatacgatatttggttttctatttctgagtta

SEQ ID NO: 177793 - DNA, 201 bp, Homo sapiens
tatattagtctgttctcatgctgctgataaagacctacctgagactaatttataaagaaaaagaagtttaatgcactcacagttccacatgactagggagrcctcacaatcgtggtggaaggcgaaaggcacttcttacgtggcagcagatgagagaaaatgagagccaatgtgagatttattcactaccacaagaatagt

SEQ ID NO: 177794 - DNA, 201 bp, Homo sapiens
attacctactaaaaatgtttacaaatcttcatagtgtttgaattttaccagcaatgaaagttaaggcaaagcttcagtacactaactgcataattgttttwaaaaatagtaaaaggttcagcaaagaataatgcattactatcaaaagagcattgttaaattatctactcttaggtaggaattttactctaatttaggaga

SEQ ID NO: 177795 - DNA, 201 bp, Homo sapiens
gctggagccatttcaaactccagtgtgcttgacgttaaatttcaaaagtcaaggaaattgttgttaagaagcttagttgaagctatcttttcaagaatttaaatctactaattcattttgtttaatttttaggaatttgtatgtcattaaaatactctcaaaaatgctgttctgatttgaaatgaaatacgagtataaaaa

SEQ ID NO: 177796 - DNA, 201 bp, Homo sapiens
cctcagtttatcttatacatctaggagacttcactcattggttgttaatttaattggctcatgttgagagacttacaaggaactttgttttattattgacttttttttttgtttgtaattctgagctctcattgctaaagggaggatcattttaaagccttacttaaacctctctttggtagcactttctagagtatgaaa

SEQ ID NO: 177797 - DNA, 201 bp, Homo sapiens
cttcagtacactaactgcataattgtttttaaaaatagtaaaaggttcagcaaagaataatgcattactatcaaaagagcattgttaaattatctactcttaggtaggaattttactctaatttaggagaactcaggaaaatgaggtttggtgagtttagtacatataatcaataaagatgaaagatattttttttcttca

SEQ ID NO: 177798 - DNA, 201 bp, Homo sapiens
ttcagtacactaactgcataattgtttttaaaaatagtaaaaggttcagcaaagaataatgcattactatcaaaagagcattgttaaattatctactcttaggtaggaattttactctaatttaggagaactcaggaaaatgaggtttggtgagtttagtacatataatcaataaagatgaaagatattttttttcttcac

SEQ ID NO: 177799 - DNA, 201 bp, Homo sapiens
atctacacagatggttcacaggcaccagccagaccccctaaaccacgaccgcgcaggactgcaccagaaattcaccacagaaaaccccatgggcctgaggyggcattggaaaatgtcgatgcaaaaattgcaaaactcatgggagagggttatgcctttgaagaggtgaagagagccttagagatagcccagaataatgtc

SEQ ID NO: 177800 - DNA, 201 bp, Homo sapiens
tcaattcatcatttttcttcaactctgtgttttttgaaaagttggattcaaagacttttttgttttttaacctttcatcctttctactctttaaggttcaragttcctctacatgactcagtatgtaaagttttaccattggctgctttttgttggtgtatggccatagaatgcttggaagtgtttgttctgtcttctgtg

SEQ ID NO: 177801 - DNA, 201 bp, Homo sapiens
ttttcataaactttttttaagggcagcattaagttgaggttttcgtgatcaaccaccaagacatacgttgatacatacataacattgtttgtcttaatatrtattaccataaaaatttgcatgcatataggtgtttatttcttatcttcatttttttcccttgtgcctacagacgaaatctcacaaaactgtcccttatct

SEQ ID NO: 177802 - DNA, 201 bp, Homo sapiens
ccgtagcgagaataggctgtgtagagaagagattttgtggttttcttttttgttctctgtattctcttcctgaaaaatctgttttctgcctaatcatattyctgtaaagaacaatagacttgaacgtctgctgttaagtaacaaaggttgacctaaaccacataaggtcagattaacttttaaaatatccaagataatgtt

SEQ ID NO: 177803 - DNA, 201 bp, Homo sapiens
agctcttccataagcctttagaccttgctgatttctccttttgctgaacctgtcttcacttttaatagcatgcatactgatgtatatatatcaaaaacccttttttttttaaacattacttagaattgtggtggagttgtcactaaagattaaaagtaggttccattaataagagaccatatactttttggtatccaccgc

SEQ ID NO: 177804 - DNA, 201 bp, Homo sapiens
ttccaagagtgatttattttgtagctattccatgccatcagcatttccatacaccgcatcctgatgatgatggtaaaaaaatccctagtttacaatcttgyttattttcttatatatgtatctggaagtatttaaataaaaagaaatgatcagtgtttctcttgtaaattgataaatggagaagtacattgttgctaaaaa

SEQ ID NO: 177805 - DNA, 201 bp, Homo sapiens
tgacatggatgggactcaggacctgtggggacgttctgccatggctgtttgtgagcttgtgaacaaagtttcctctcatagaaacctcccaagattgttcytctggagaaccatcaaccagagcctgtgctgtagtagagtgtgaactgtattgctaaacaaagtgaaaggcttccctttttagatagttattttaattat

SEQ ID NO: 177806 - DNA, 201 bp, Homo sapiens; identical to SEQ ID NO: 31784

SEQ ID NO: 177807 - DNA, 201 bp, Homo sapiens; identical to SEQ ID NO: 31810

SEQ ID NO: 177808 - DNA, 201 bp, Homo sapiens
tgcctcttgaagcatggtgccctcgggatgtgtttgggactaatcagcttgtgggatgtcgactcctaggggagggctctccaaaacctggaatcacagcragttcaaatgtcaatggaaggcacagtagagtgggctctgacccagtgcttatgcggaaacacagacgccatgatttgcctttagaaggagctaaggtaa

SEQ ID NO: 177809 - DNA, 201 bp, Homo sapiens
tgtcagttcactgagaatggatgttactgcccagtttaagtttatataaccaggtacacaacagactagtcaatgaaccagaatgccaactgattaatttrcagaccagaaatacagtggtcaagagaggtagactcttggatatcaggctattccctgtacaggaagatacatgaaatcccaattactttcacaaatttt

SEQ ID NO: 177810 - DNA, 201 bp, Homo sapiens
gtttcctttgtataacattcctggggccatgcttggcacatagaatagggctcaagtactgctggtggccctacattccagcatctctccatgactgactragggataggggagatggcaattacttcagtcatctgtgccatctttacttagtgtgccatttccttttgaggtcaagtcaatcaactgaaaacattttat

SEQ ID NO: 177811 - DNA, 201 bp, Homo sapiens
ggctggactgcagtggcactatcttggttcactgcaacctctgcctccctggttcaagtgatttttctgtctcagcctcccgagtagctgggattgcagaygcctgccaccacgcctggctaatttttgtatttttagtagagacagggttttaccacattggtcagcctagtctcgaactcctgacctcaagtgatccag

SEQ ID NO: 177812 - DNA, 201 bp, Homo sapiens
gggtcccatttcttaactcagcatttcatataccaagaacacttgcaaagatttcttcataatgtgattttttaatttttcagttccagaagcatttcctrcagttcgaacgttattttttctctcagattttcaacttgaagctttgatttgcactgaattaacttggataaaattttagtttctctcttcagctaacag

SEQ ID NO: 177813 - DNA, 201 bp, Homo sapiens
aaaagaatatccacttgctgtaacagatagggatctcacacaatttctgtttttttttttttttttttgaggttttagtattaggtcacaaacccatatamatagttaccacttctatttttgttttgaagtggagttttatgaatatttgagaatatagacagcttcccattgaggattgtattcctcgtccagaggttt

SEQ ID NO: 177814 - DNA, 201 bp, Homo sapiens
ttaaaaataaattctcattatgttttgtgccatatataattacatatataattataaaatgtatataaaaatgtatgattatatccaactatgatgaaatkatgtttttccattaaattatatgtgtttctctgaacataggattttacttcacaaataagactatgtattgaactgttaaaagggctcactggacacata

SEQ ID NO: 177815 - DNA, 201 bp, Homo sapiens
tgatcttctaaaagctcttcgtgcaaaatagtggtattttctttattagcatgtgattagcaaaagaaacaactgcatcatccaagtgctgtgtgatgtcrtaggataccttgaagacattgttacttatttctcaaaaataacttgaatacatagtatattagaagaagcaacacttgaactctaaaagttttgagtcca

SEQ ID NO: 177816 - DNA, 201 bp, Homo sapiens
acatatttgttacctacacaatgatagtgtaatgactgagcactcactgacgcatcaagggatcccaattctagtcttgattctatttccaactagttgtrtcatgcaagtcctctgagttcctttacttatctaataattcatggagttacaccacagtatgtctaaggtcctttccagctctatgctgatatatacgat

SEQ ID NO: 177817 - DNA, 201 bp, Homo sapiens
gcagtatcatcacttgtgttaacagtgtttaatatttcagtagagcagtgcccttaaggttatccccaagtgtgagactgcactactttaaaggagacctrtcggcaactttattgaccacttctctgccagacctcaaagagaaatcagctcttattccatttggtgtttcttaatatataggtttctgttttcctccgc

SEQ ID NO: 177818 - DNA, 201 bp, Homo sapiens
tcagtacactaactgcataattgtttttaaaaatagtaaaaggttcagcaaagaataatgcattactatcaaaagagcattgttaaattatctactcttaggtaggaattttactctaatttaggagaactcaggaaaatgaggtttggtgagtttagtacatataatcaataaagatgaaagatattttttttcttcaca

SEQ ID NO: 177819 - DNA, 201 bp, Homo sapiens
agggaattatatgtagtttttaaacctggagaaattaattacaatgaattgcaatatttgcagagtaattatattactgtttaatattaaagacataattyttactctacagttaaacctacagtttattttactgtgtggattttttcctcgaatttgataagtataagattttaaaaattaattttatttggtaacatg

SEQ ID NO: 177820 - DNA, 201 bp, Homo sapiens
cagtacactaactgcataattgtttttaaaaatagtaaaaggttcagcaaagaataatgcattactatcaaaagagcattgttaaattatctactcttaggtaggaattttactctaatttaggagaactcaggaaaatgaggtttggtgagtttagtacatataatcaataaagatgaaagatattttttttcttcacat

SEQ ID NO: 177821 - DNA, 201 bp, Homo sapiens
ttgagggacagtatgaactatttgcttctattaatcagggtaaactaagggaattcattttaacaaatgtatggtgccagaaaccttcttccaaccaaatrtattctttaagaacagagaacactctgcacagctaataaacagcggcatctttctctttttctgttctagtgcactgacaggcagaactcaccagtcaca

SEQ ID NO: 177822 - DNA, 201 bp, Homo sapiens
aactctgggctctagccatttggccacctcagcctcccaatgtggtaggattacaggggtgagtcaccacacctagcctgactctccatttcttatagcartacctcttaatgaggaaagcacattagaattgcccacagggcttctaaaatatgcatatatctagaacccttcctcagaaaatctgatatttaggtagga

SEQ ID NO: 177823 - DNA, 201 bp, Homo sapiens
aaatgtgtttaataatgctaatccttacagaagcaatagaacctaaaagtctataatacatactttttgattccctctctgatagaaagtattttgtgatwctaactagaatatgttttagattttgcccaagtctgtatcgttgcctgagttttcaagctgtcagaatcctgggataattagatctgatgtgagccctca

SEQ ID NO: 177824 - DNA, 201 bp, Homo sapiens
tgtgtgtaagcatttttgtagcatataccctctctgaataatattctgtataggctactattttaaatactcttgatttttgttttgttcacaaaataaartgaaaaaactgagaatagtagcaagtaaaatatgcttagactattttatcatgtgataaaagttttatcaatgtcttcattaattttcacgcatttatag

SEQ ID NO: 177825 - DNA, 201 bp, Homo sapiens
ctctagttttttattttgctattttatatacaacttctttatctcatttgtaccatcctcttctgttattttttttgatagaaaccagttttttttttcakaactggataagattaatttttaataaaaactatgtaatcttgaataaaatacactggaatgttattcttttggtttatttctaatccaaatagactatta

SEQ ID NO: 177826 - DNA, 201 bp, Homo sapiens
aaaaatgaatgttaattcaggcatgtttgtttaatataccaaaggcctcttgctccctctatagaaggtgctgcaaaattgcagtcacttagtttttttgttttttttttttccttcctttttaaattgaacagatttctcatgaggttcatgatgattaacaaaaagatttggatccatgtgtgtattcccaatgccttg

SEQ ID NO: 177827 - DNA, 201 bp, Homo sapiens
tattctgtataggctactattttaaatactcttgatttttgttttgttcacaaaataaagtgaaaaaactgagaatagtagcaagtaaaatatgcttagaytattttatcatgtgataaaagttttatcaatgtcttcattaattttcacgcatttatagaaaaacattgactctctgagtccttctcatcatccttatta

SEQ ID NO: 177828 - DNA, 201 bp, Homo sapiens
tttggctcttacaaatgtgcagtaatttttaaaaactaaagtaggatgagctttttttggtctctttgggagtcttattttttttcattgctggataagtgaggagtataattttaatacgttaaattttaattgttacatcatattggatgtgattttttgtggcagagctcccaaatcttgaaaataaatttgaattat

SEQ ID NO: 177829 - DNA, 201 bp, Homo sapiens
ttggctcttacaaatgtgcagtaatttttaaaaactaaagtaggatgagctttttttggtctctttgggagtcttattttttttcattgctggataagtgaggagtataattttaatacgttaaattttaattgttacatcatattggatgtgattttttgtggcagagctcccaaatcttgaaaataaatttgaattata

SEQ ID NO: 177830 - DNA, 201 bp, Homo sapiens
tgcggaattggaatttcttagctgtgacacatccaggttacatggcatttctcacatatgatgaagttaaagcacgactacagaaatatagcaccaaaccyggaaggtaagactttttagcagtaatattatgtgatatatccaaagatgaaaaattctccatggtttgttcctaagtaagtcagcaatacccgctgatgg

SEQ ID NO: 177831 - DNA, 201 bp, Homo sapiens
tggctcttacaaatgtgcagtaatttttaaaaactaaagtaggatgagctttttttggtctctttgggagtcttattttttttcattgctggataagtgaggagtataattttaatacgttaaattttaattgttacatcatattggatgtgattttttgtggcagagctcccaaatcttgaaaataaatttgaattataa

SEQ ID NO: 177832 - DNA, 201 bp, Homo sapiens; identical to SEQ ID NO: 31798

SEQ ID NO: 177833 - DNA, 201 bp, Homo sapiens
gtaatattggttccatatgtatagctgcttacttgtttcatgtaatactttcatcacaaaaaatatatatctaatatttctgtgataaattataaatacartattggttttggtccttggaggaataaccttacaaacctttaaagacttttaattttaatttttattttctttccagctttattgaagtataattgacaa

SEQ ID NO: 177834 - DNA, 201 bp, Homo sapiens
caaacaagaagggaagggagaccaagtatttaaaaaaacaaaacaaaaaaaaaggaagtggggccaggtgcggtggctcatgcctgtaatcctagcacttygggagggcaaggtggcagatcacctgagatcaggagttcaagaccagcctggtcaacatggtgaaacctcgtctctactaaaaatacaaaaattagccag

SEQ ID NO: 177835 - DNA, 201 bp, Homo sapiens
atagcatttctatttctgttgtggtctgtatgatcagatgtttttgttaatgatttgtaagggaagataatgccttatatttctctgagtggttataacgyaacgtgccaacatttctaatctctagatagggctagatttaatcattatttaatgaaactttgaaggaaataagttattgctggacctcatgtgtttctg

SEQ ID NO: 177836 - DNA, 201 bp, Homo sapiens
tttgttagtggtgaaggaagtggctcataatatcaacattgtcctgatgattacatcaggaactttattattagttctgaagttaatcccttgacacattrcctttttaaaaaaataactgcaatagcatgaatttagtttgtgaataacagaaaatagcaattttcaagtctaattggtaggtatgtaaaaggcagagtt

SEQ ID NO: 177837 - DNA, 201 bp, Homo sapiens
cattcaacttaaaagtgtgaatttttattattagaatatgtgtttatgtataccctgtctcattcctaaagtattttgagatagcttaccaaacatgtgcttttttttttttttttttttttttttaagactcaaggtaatgaaaactatgagtagaatagtaaggtgtgacaggggacaaataagtagatataaaactat

SEQ ID NO: 177838 - DNA, 201 bp, Homo sapiens
tataataaaaccaaagttatgttttaagatttgctttatgtgtgtatttgtctgcttctatctgtttctccgttgcattggtttatccagatatctttctrtacattcactgctgtgtcactgttgcccagatgggtgcgtgcaggtagctgaactcaataaatatgagctaagtgaatgaatgaatgttcctaaatggtg

SEQ ID NO: 177839 - DNA, 201 bp, Homo sapiens
tgatagcatttctatttctgttgtggtctgtatgatcagatgtttttgttaatgatttgtaagggaagataatgccttatatttctctgagtggttataaygtaacgtgccaacatttctaatctctagatagggctagatttaatcattatttaatgaaactttgaaggaaataagttattgctggacctcatgtgtttc

SEQ ID NO: 177840 - DNA, 201 bp, Homo sapiens
tgggttgtcaggaagtgatttaaggcataatatttataatgtttaaaccatgtttttaatttttatatcatgaaatatgcaatatatgtattttaactagtcttctagcatttaagtgggtaaataagtaaaaaattaaaatggaaatcaattctcatctttaatattaagttcatcttattatacacttgctgtgactta

SEQ ID NO: 177841 - DNA, 201 bp, Homo sapiens
aggatgtcatggagggatgggcatttcatgactcatgaagtacaggcacaattgggaaaggcagaatgtgagaaaaaacaagggtgtgaaatttggcatcwttcaggggacggtgggaaactcagcgaattagatcattctccagtgggaacttctcttggaactgcgagatatttagcaggcataggagttggaagcaat

SEQ ID NO: 177842 - DNA, 201 bp, Homo sapiens
ttttttttttttttaagactcaaggtaatgaaaactatgagtagaatagtaaggtgtgacaggggacaaataagtagatataaaactatgctgcaatattytagttattaaagctgggaaatatgcaaatgtaagtagtgcttggaaccagagaaggttctatatttagctgttcttctgtagctaaatctgacaaattga

SEQ ID NO: 177843 - DNA, 201 bp, Homo sapiens
tattcctcgtccagaggtttcatttcagtggtaaatacggttaagtttgttacaaggtatttacatgagtatgtacagaagtgtattcatttatgcattarttcaacacatactatatgtaatgacgtcttaaagtgagaattaaaaatctctctgaatttctgagtttttaaacccagaatcaatttcattcacattgtt

SEQ ID NO: 177844 - DNA, 201 bp, Homo sapiens
ggatttgcagggaaaaggggacagacattcagtccatagcattgctttatcctcaagtgtccaacatagtgcccagcatatgtctctttgatggatagttggggatggatggatggatggatggatggatggatggatggatttgagtggacaaataggcaaaaggagggaagaatagctgatgtctgtattaaactaaat

SEQ ID NO: 177845 - DNA, 201 bp, Homo sapiens
cattcttatttcttaagaatcatgcagtggagatacgtgaatataattcaaggtaataaaagaattaatgtcctactactgatggtggcaaagtggtatgyggcttcagagaatagagtgattaattccaatttcggggactggagatagtttcactaggagatgaatggattttgataaacacccatgtgagggaaggct

SEQ ID NO: 177846 - DNA, 201 bp, Homo sapiens
taaaatgaattttgtagaccaaattgtgattatcaattcaaaacatgtctcaaatggtaacaaaattctgacaaggtcaattgtgagatattgactgtgcrtcattttatttgggaaaatttgatactaacaattcgtgctggaaatacattaacattactttctccctcctccccaaattccaggaacaatatgaattat

SEQ ID NO: 177847 - DNA, 201 bp, Homo sapiens
attcaaaacatgtctcaaatggtaacaaaattctgacaaggtcaattgtgagatattgactgtgcgtcattttatttgggaaaatttgatactaacaattygtgctggaaatacattaacattactttctccctcctccccaaattccaggaacaatatgaattatattgtgaaatgggctccacttttcagctctgtaag

SEQ ID NO: 177848 - DNA, 201 bp, Homo sapiens
gtaaatgatttgcatatagtaagtaagtacacagagaatacgtggatgcttggtttattgatttaaattttatctgctgaggtccttatttacaatagaargtcttagagcttcttcattccttcatctgcagttcactgaactcccactatacatatcaatgcaaaagaaaaataaggtagatcccagccccccagaaat

SEQ ID NO: 177849 - DNA, 201 bp, Homo sapiens
ccaaattccaggaacaatatgaattatattgtgaaatgggctccacttttcagctctgtaagatttgtgcagagaatgacaaagatgtcaagattgagccytgtgggcatttgatgtgcacctcttgccttacggcatggcaggtataatcattagcaacatggatgtctttcttatatgtcctactaatatttctctttt

SEQ ID NO: 177850 - DNA, 201 bp, Homo sapiens
tcatttcggtatacttaactcatctgcaaagaaacaactcaatactgttcatatttcccaatgtgtgtctcattttttactcctcattgtctttgttttcrtatgttgcattcactgcttggataggcagtcacccatgctctatccagtgttgccactttgaaagctttactttagtaccctaatggatatccctactct

SEQ ID NO: 177851 - DNA, 201 bp, Homo sapiens
agttttatcaatgtcttcattaattttcacgcatttatagaaaaacattgactctctgagtccttctcatcatccttattatagtaactgtatataccttkttcagatatggaaattcattaagtaaaaatcttgttaaaagtattataaaattgactttgattatctctgggactgtcagaactctcatcttattagtaa

SEQ ID NO: 177852 - DNA, 201 bp, Homo sapiens
caagcattattgtcctagaagtcacacttcagtagcttatttggcagtcagcagtgtcatttaataaagctttacttcactacaatcttgttatactttcytatgggagttagatagtttagaaatttatatcacttgtaattatttgtttttaagttgaagaggtatatttcagttaaatgtctttatgtctactaatct

SEQ ID NO: 177853 - DNA, 201 bp, Homo sapiens
ctaaaaaaatgtgtggaactaaaatttgaaaagatacttattttgttagtttagaaaatgtttagtatttcatataatcttaactttcaagtattttggcrtctatcttaatattttctcctttaagaaaagacaaaaattaaaaatcttattctaacttagtttagtccactcagtgaaacagcatttaatatttaatga

SEQ ID NO: 177854 - DNA, 201 bp, Homo sapiens
actttgccacacacattggtttggatgtctgttctgaggattttcattatactctttcagtatccaacaggctcttcaacacatctgaaatcaaatttacmccatttaaacatgctagaaatttactaactgcttaaatattagtaattaatccaatctagggtgaaagtcaagtcctaatactgataatgggctgttagc

SEQ ID NO: 177855 - DNA, 201 bp, Homo sapiens
tcttacaaatatatgactcaaggaaagatagtattttgccctagggtcaagagtgaaattatttaaacttattagtgcatatttatttcttttctattttrtgctaaaaaaatgtgtggaactaaaatttgaaaagatacttattttgttagtttagaaaatgtttagtatttcatataatcttaactttcaagtattttg

SEQ ID NO: 177856 - DNA, 201 bp, Homo sapiens
gtagttttttgatcctctctctcctcctgcccttcaccctcaagtagcccctggtgtctgttgttcccctctttgtgtccatgtgttcttggagagaactraacatcaagtgagagctaaacaagaggatatatggtatttggttttttgctcctacattagtttgcttcagataatggcctccagctccatccatgttgc

SEQ ID NO: 177857 - DNA, 201 bp, Homo sapiens
gggttgtcaggaagtgatttaaggcataatatttataatgtttaaaccatgtttttaatttttatatcatgaaatatgcaatatatgtattttaactagtcttctagcatttaagtgggtaaataagtaaaaaattaaaatggaaatcaattctcatctttaatattaagttcatcttattatacacttgctgtgacttag

SEQ ID NO: 177858 - DNA, 201 bp, Homo sapiens
gtcctgcctgtgtttcagtttaggttgttcctaggcgcactgctgacttctcttatgactttgggtagattcagtctttattggtatttgaacttttaatrtctgttgtgtactctccttagacacatttaaaactttaaagcatttgggcagggggaatgggtaaggatccagttttatttaagactgtcaggacccatc

SEQ ID NO: 177859 - DNA, 201 bp, Homo sapiens
ctaaaaggaggcatattttaggagctatatgaactgggcatttttaattttttttcattactttggggaatatttcaggatctcatcagcattcattacaygggaggacaggggattaaaaaaacaaaattgattgttaatgaatttttttttttttgtatttaggaagaagaaagactgtaacttaaaaagaattgtggc

SEQ ID NO: 177860 - DNA, 201 bp, Homo sapiens
gttttttgatcctctctctcctcctgcccttcaccctcaagtagcccctggtgtctgttgttcccctctttgtgtccatgtgttcttggagagaactaaayatcaagtgagagctaaacaagaggatatatggtatttggttttttgctcctacattagtttgcttcagataatggcctccagctccatccatgttgctgc

SEQ ID NO: 177861 - DNA, 201 bp, Homo sapiens
ggttgtcaggaagtgatttaaggcataatatttataatgtttaaaccatgtttttaatttttatatcatgaaatatgcaatatatgtattttaactagtcttctagcatttaagtgggtaaataagtaaaaaattaaaatggaaatcaattctcatctttaatattaagttcatcttattatacacttgctgtgacttaga

SEQ ID NO: 177862 - DNA, 201 bp, Homo sapiens
gcagagagcatatgtctgtagccccatgatttgccagaataagaagcagagtaagtatagttattttgtaaaatagatttaaaaggtcattatatgcattraaataatttgcatgctgttatcaaatgatattttacgctcatttttatagtgccatgacaagaaaaatgtgatgggagtatatttgcataagggcttaag

SEQ ID NO: 177863 - DNA, 201 bp, Homo sapiens
gatttgcagggaaaaggggacagacattcagtccatagcattgctttatcctcaagtgtccaacatagtgcccagcatatgtctctttgatggatagttggggatggatggatggatggatggatggatggatggatggatttgagtggacaaataggcaaaaggagggaagaatagctgatgtctgtattaaactaaatg

SEQ ID NO: 177864 - DNA, 201 bp, Homo sapiens
ttagaagagagccatgtatctttatgatctttatgtgaacatttaaccttttgtaagagtgctgtcccattacactatataatgctactgtgcaattctcwattatttcatttgaaagttatttatgtaaagagttgattatgccctttctggagggataagaatgtggtggactaacttactcttggctaaatcacatga

SEQ ID NO: 177865 - DNA, 201 bp, Homo sapiens
ttgcagggaaaaggggacagacattcagtccatagcattgctttatcctcaagtgtccaacatagtgcccagcatatgtctctttgatggatagttggggatggatggatggatggatggatggatggatggatggatttgagtggacaaataggcaaaaggagggaagaatagctgatgtctgtattaaactaaatgcaa

SEQ ID NO: 177866 - DNA, 201 bp, Homo sapiens
tctcttgtgtttagagttacgtaaacagcatttgcattagattcagtggtaatatacagttgcattataatatacttactataaaaagtaaaaattattcrtgatttttttgctggtaagtttgagtttttaacttaaattaagttgccttaatttcataaatttcagtgcaatttcttagcatttttattgaagtgaaga

SEQ ID NO: 177867 - DNA, 201 bp, Homo sapiens
tttacgctcatttttatagtgccatgacaagaaaaatgtgatgggagtatatttgcataagggcttaaggtatgacaaattatcacccttgtttcaaggcractcagaagagggaattatatgtagtttttaaacctggagaaattaattacaatgaattgcaatatttgcagagtaattatattactgtttaatattaaa

SEQ ID NO: 177868 - DNA, 201 bp, Homo sapiens
agattgctgaggtacatgactcagaccttgcatagcagtaggaagagtaaccagcagcaaagcaataagttgtttatcaaagggtgctggtgactcagtcrggaggatttggaatagaatgattgatttggaagtaggttaagctaaccaaataatatgaatctcctatgtgtttcttaaactgattattttgaactcaag

SEQ ID NO: 177869 - DNA, 201 bp, Homo sapiens
tgcagggaaaaggggacagacattcagtccatagcattgctttatcctcaagtgtccaacatagtgcccagcatatgtctctttgatggatagttggggatggatggatggatggatggatggatggatggatggatttgagtggacaaataggcaaaaggagggaagaatagctgatgtctgtattaaactaaatgcaaa

SEQ ID NO: 177870 - DNA, 201 bp, Homo sapiens
ctcgaatttgataagtataagattttaaaaattaattttatttggtaacatgctctgttgtctaaaatttgttggaagcacaatatatttagtagtgtttkattttcctgtattaccagttaacctggttttaagatcacacattattagaatatcatttagaattatgtaaacacaacagattccttttttctctgctat

SEQ ID NO: 177871 - DNA, 201 bp, Homo sapiens; identical to SEQ ID NO: 31815

SEQ ID NO: 177872 - DNA, 201 bp, Homo sapiens
acctggttttaagatcacacattattagaatatcatttagaattatgtaaacacaacagattccttttttctctgctattttctaacattaaaattacaartcaatcatcagattaaccatgtaaataaaagtcaaaagctacgaaaagcatactcattcaattcattgatctatacctttatatttctatgtaagaatca

SEQ ID NO: 177873 - DNA, 201 bp, Homo sapiens
ggcttccacaatcttctgaccccagcagcaggtacatccttgtagatgtcagtgtaagtctttatattatgaagagtatttgagagaatggtacaagaggrtgaaagggtgaatggaagttgggggcaaaataatggagggctaaagaatatagatttgatcttacaaaagctgtcgagaaaccattgtgcattcttaagc

SEQ ID NO: 177874 - DNA, 201 bp, Homo sapiens
tataatgaattttaacaatctattttatgtaacctaaaatatttaaaatattatgtcaggatgtattcattataacaaattcttaatgagatattttacatttttttttttttgagacagagtcttgctctgtcacccaggctggagtgcagtggcgcgatcttggctcactgcaacctccacctcccaggttcaggcgat

SEQ ID NO: 177875 - DNA, 201 bp, Homo sapiens
attgtatatgggaatctttttatggtacacatctgttttcatcaaataggtgagtagtattcgggcattaccttataccttctttaaagaattttcatccrttgctttaataattatattatgccagctctatttaatataattaaatttttttttaaaatttcctgttgtatcaacctgaaactactttgactagcattt

SEQ ID NO: 177876 - DNA, 201 bp, Homo sapiens
ccggtctaactgaaatttcgtatcctttgaccaatagctcttcatccactgcctcaactgcccacccccaccccaggaaattgtgattgatatattttttraggttgttgaattaattgtcttttttgcagttaaaaaatatattaatagtaaaatgggctaggtagagattttttcagagggcaagttaattctggacct

SEQ ID NO: 177877 - DNA, 201 bp, Homo sapiens
ggcatgcgggaagtgcttggtaaatgtttgtcacttttcttgcattcagggatttctaaagatattgaaacagtaaaatttaatgtttagccaagtatcatttttttttcaatttgacagttaaattatatgagcatgtggcatttataaaaaagataaagtcattttatattcctattttaaaaccatagattttgtctt

SEQ ID NO: 177878 - DNA, 201 bp, Homo sapiens
taaagtaataaatattgaataaactcccatgatataaccattgtggttggtttaaaaattaagtttttcttttgtattaatatgaaaagttagataacgtwtgtttttcatctctgcagaaaacatcagggttgtggcagaaatgtcttgatggctttctaccttagccttcttgaattggttgatacatattactcattt

SEQ ID NO: 177879 - DNA, 201 bp, Homo sapiens
gtttcaaaaaattaggaataagtcacttaattttcttaggtattgccctccaagagtaagttacctcattaattgtactttgtggctttactagtgatagrcatcattgcctgtatgacttgtcttcatgaaatttaatagtagtacataaaaatatgcaaactctgttattagtattttattctcatttacctaatgtgc

SEQ ID NO: 177880 - DNA, 201 bp, Homo sapiens
atactattaaaggaagatagattcttatatgtagaaaacaagcttactaattaagcatagcattggatactatctcctgtgctggcgtgaaaattcacttstttcttggtttgtttcaagtgtgcatatgtagaagatgaatgtatttatcactgaaggctcaaataactaacacaatgaatttaataaaatgtccaggtt

SEQ ID NO: 177881 - DNA, 201 bp, Homo sapiens
catttgaagtgcagagtagcacacatcctgagtgaccaccatttgggcatttgagatttaagaagtcaactttttaaagtcctctatgatttttatgtgtrtattaaaaatgttgaagctaggcagtttaagtgtgcagtcagagtgccatgtgagaactaacttcataaagttgtagcctaagagaaaagcacacagact

SEQ ID NO: 177882 - DNA, 201 bp, Homo sapiens
tatgtttttagttggcaactctggagaatactggttcctaagctcttttggctcacagatacctttaagagtctaatggtgacctagggattctctttacyggagagatgtacataagcatgtgagcgattttgcataaggccaaggaggaattagtgagactaagaagcaaactgggaactgttccagctggagaggaca

SEQ ID NO: 177883 - DNA, 201 bp, Homo sapiens
gggcatttgatgtgcacctcttgccttacggcatggcaggtataatcattagcaacatggatgtctttcttatatgtcctactaatatttctcttttcagktttcttaatggtttaggaagtaatgctggtaagtgctttatttgaaatgattgtgtaaagattttatatgtttgagttgctatatataatttgattttta

SEQ ID NO: 177884 - DNA, 201 bp, Homo sapiens
ttaacttttgagttccttatacttaaagtagctaaacacattttaaataatctgtaatacattaaaatattaaaaatatgcttttctcattaaaaatactrtcttttaccacttttataagtagggtattttacacagtgattaagtatcattttagtttcctctacctaggttttataagctattaaagttatagaccat

SEQ ID NO: 177885 - DNA, 201 bp, Homo sapiens
aaggtagatcaattttattagaaacacagatgaaaattttgtaagacaattattgattgctcagattcttttaaattccattactcatatttttttgcttytaattgtgaataagtttgatgagtttctcgtttagtttatggtgagcccacattcatatttcttgttttattactatgagagttacacataatttttgca

SEQ ID NO: 177886 - DNA, 201 bp, Homo sapiens
cctcctccagttaccaccctcctccctagcataaagtgagttttgttgaatttggagatcacttgtctatgcatcaagatatggtagagtggttttgagargttctcagtacagacactacatgatgaatagaaagtcattgatagtaaacagccagctgtatttacaaactaaattaccataaattaagatccttcccta

SEQ ID NO: 177887 - DNA, 201 bp, Homo sapiens
catgaatttatcctgtattggtgaactttcagagaatatatactgaagaacagttgtactttagaaagaaaagaacaagtattcattgtttaaaacctgartctttctattttttacagtcagtggcttctaagtggaaaaatttttaatggaatttttacacattattatggattatacttgcagcttctcttcctgttc

SEQ ID NO: 177888 - DNA, 201 bp, Homo sapiens
attttgttcactgtcctaaatgcaaccctaagacaaaatttattggtttctatgctgatatagcatatccttaattggatattactgttatccttgttctktttactgacaatgttctgtggccagctgtgtttatgcagaatttacatttgataaatgtttcataacaattcataataatgtaccattcttggtacacca

SEQ ID NO: 177889 - DNA, 201 bp, Homo sapiens
tagttgttcagtgagaagagagtgagagagttattccatccttgatccaaacatcactgttgggcaggtagatcactaatttcctattaaaccaagtggayaggacagtcctgaattaattatggaacagtttctttaaagacgtcagctctctgcatcccttgtcttgccactgaaatggtgctatttcatcccatttct

SEQ ID NO: 177890 - DNA, 201 bp, Homo sapiens
gcctgatcttttaaaatactgtaagaattcataaaattgaagtaattccatatgtagtgctgctctgttacttgtgatcttttactattctggtaataacygataaagaagcagagcacatttgcccccatatcagttttgctgtatcacagtgatgaaaacaaaaataaagaaaaagcttttaatcttctaaaaatatta

SEQ ID NO: 177891 - DNA, 201 bp, Homo sapiens
gacttctcacttgaaggatgttactactatcatttatatgtccaggaaggagtttatgtgtgcaggaaactgaagagacagcagcagaaatcatttacttkagaattcttggtagttccttggcagaggtatactgtaataatttctggtatttggttccagggtgcttttgactctgagattagatccttgccatcttcc

SEQ ID NO: 177892 - DNA, 201 bp, Homo sapiens
tagatattaacattatacccaactgtcattatttgttctcttgaggcagtaagaatactgctgtttcttatatgataaaactatctttaactggtcatgtwacttacagtgacattgtcctaaagatgacctttgcatgataatcttttgaagatgctgcaagataaatatatcaaatgatttccctttttgcagttgtgg

SEQ ID NO: 177893 - DNA, 201 bp, Homo sapiens
ttgtggcttgttgtacttttggtggagaggcacatgtttacattcatgaccttaaagttatctataaatttcaagggctgtctttcagaaaatcagtcctstgtgtgtgctggtttcatgtacagtctgacgttgaaggacaaattatagggatacttttgaggtagcatgtgtaggggtttacatgtgtaggataaggta

SEQ ID NO: 177894 - DNA, 201 bp, Homo sapiens
tttagatgaacggaaacatgatcatcattttataaagtacctgcgcatttaggtcctttgctatctcaatctactaattaggaaagaactatacagttctmttccaagttttgtattaggcgtattgtcaactctcagtacatatttatgaacagtttataggaataacagccattaagcaaattatatatatgtgtgtgt

SEQ ID NO: 177895 - DNA, 201 bp, Homo sapiens
caaggcaagagaatggcttgtgcccgggaggcagaggttgcagtgagtcaagattgaaccactccactccagcctgggtgacagaacaagacgctctctcaaaaaaaaaaaaaaaaaaatccatacttcctcctcctaatcattgataggtatccttcctttttttttgttgtttttttgtttagttttgttttgtttttt

SEQ ID NO: 177896 - DNA, 201 bp, Homo sapiens
ggtcctttgctatctcaatctactaattaggaaagaactatacagttctattccaagttttgtattaggcgtattgtcaactctcagtacatatttatgawcagtttataggaataacagccattaagcaaattatatatatgtgtgtgtgtgtgtatgtgtatatatgtatgtatgtatatatatgtatgtgtatatata

SEQ ID NO: 177897 - DNA, 201 bp, Homo sapiens
aagggtagcattgtgccatcctccatcaagcattatatgcttcctttgtgcttatgatgttgaccgtagcaaccttaaactgttaagacttgtttataaayggtgaagctccatcattccaacagagtcagcatgctaattcactctagttcaaatccacattctagttgaatccctgcaatgtaacttgacatttggaga

SEQ ID NO: 177898 - DNA, 201 bp, Homo sapiens
ttcataaccattccgttttctaaatcttttaaaaatattaatcttttgtctcttcagatttattgtttgagcatgagtttttgtttgaggatatatgtatrcatcaatggttcatagatgtgctgtaaacagcaagacacatgagatcattacaaaaagtgccctttatagattaaaataataaagagagattgaggctct

SEQ ID NO: 177899 - DNA, 201 bp, Homo sapiens
cctaaggaaagtgatttcactagttaatacttccattaataagtgcatctgagccaatcagcagtcaatattaatttaagccttactgtgtgtaaagcacygtaaggcatatgctataaaatggtaaaggagtaatagaatttttgtcctgaaagaggcccagtgtggcctaaattctccttgacaaaacgtaagtacaca

SEQ ID NO: 177900 - DNA, 201 bp, Homo sapiens
tgtgcctgtcattataccagtaccatgctgctttggtaactatagccttgtgttgtaatttgaggtcagatagtgtgatgcctccagatttgttcttttcrcttagtattgctttggtgatatggtctcttttttggttccatacgaatcttaggattgttttttctagttctgtgaagaatgttgatggtattttgatgg

SEQ ID NO: 177901 - DNA, 201 bp, Homo sapiens
gaaacattttctaactcagtagatgttttataatttccatttgataattttgatagttttgcttatgtggaaacatttcatgggagacatttaagttttgwttgataatgtatagattcccatagattttgatagctctcataatgctgactattcacaatgaggtcactcattctgtgtattcttgcctgcattttaagt

SEQ ID NO: 177902 - DNA, 201 bp, Homo sapiens
ctcaaaaactagcattgtttccctttttccattaaattaactctatgcacttctgctaacagtaagatcctacagaattttacccaactaaaatatttttyagtgattcctaatacttgccctgtaattatatctggattgttttttctgactttgtgagatttttatgctgttcctcctgtgcttcaccttttcctaatc

SEQ ID NO: 177903 - DNA, 201 bp, Homo sapiens
gctttggtgatatggtctcttttttggttccatacgaatcttaggattgttttttctagttctgtgaagaatgttgatggtattttgatgggaattgcatggagtctggattgctttgagcagtgtggtcattttattcttcccatccatgagcaggtgatgtgtttccatttgttgtgtcatctataatttctgtgtttc

SEQ ID NO: 177904 - DNA, 201 bp, Homo sapiens
tggaggagaggctgttatagactttgtgaatgaaggatgtcatggagggatgggcatttcatgactcatgaagtacaggcacaattgggaaaggcagaatrtgagaaaaaacaagggtgtgaaatttggcatcattcaggggacggtgggaaactcagcgaattagatcattctccagtgggaacttctcttggaactgcg

SEQ ID NO: 177905 - DNA, 201 bp, Homo sapiens
gttggttctttgggaaaaaattcacactgaatctctgcacattattctgtccttccaagtgggagaagcatgctgacactgcctccagtctgccatcttgaaaaaaaaaaaaaaacaaaaattagcattgagaagatttagacataaatttccaaacaaattataattcaattagaaacacagattctaactcttgaatct

SEQ ID NO: 177906 - DNA, 201 bp, Homo sapiens
gaagtttcttctgccagatgccctaaattatctctctgaagttaaaagttacacagatctctagggtggggcaaaatgctgccagtctctttgctaaaacrtagcaagagtcacctttacttcagttcccaacaagttccccatctccatctcagtccaccttaacctgcacttcattgtccatatcactatcagcatttt

SEQ ID NO: 177907 - DNA, 201 bp, Homo sapiens
aattggaattaaggcaggaggggaagaacattctgtttttatctaggtgggggaaacctgtttaagttttgtttgttcttttttttttttttatgagttgrgtattagttcagccttagctacttgaaacgtgagcaggatgcatctttaactcttagtattgtaaaagcaaatctaggatcactgctcttaaaactactg

SEQ ID NO: 177908 - DNA, 201 bp, Homo sapiens
gagggatgggcatttcatgactcatgaagtacaggcacaattgggaaaggcagaatgtgagaaaaaacaagggtgtgaaatttggcatcattcaggggacrgtgggaaactcagcgaattagatcattctccagtgggaacttctcttggaactgcgagatatttagcaggcataggagttggaagcaattatacatactc

SEQ ID NO: 177909 - DNA, 201 bp, Homo sapiens
gttccaaactttcccacatcttcctctcttcttctgagccctccaaactgttccaacctctccctgttatccagttccaaagttgcttccacagtttttgrgtatctttacagcagcaccccactctactggcaccaatttactgtattagtacattttcatgttgctgaaaaagacatactcaaaattgggtaatttata

SEQ ID NO: 177910 - DNA, 201 bp, Homo sapiens
tttctactctttaaggttcagagttcctctacatgactcagtatgtaaagttttaccattggctgctttttgttggtgtatggccatagaatgcttggaartgtttgttctgtcttctgtgaggttgtgttgctcttagataacaaaagagtaccagcaggttatttaagtctttgaccactcatgacaatcatctggtat

SEQ ID NO: 177911 - DNA, 201 bp, Homo sapiens
ccaattgaaacctttaaaagtggtccaaattctctaaataatgtaatttacatttgactttgtatgatggaagtttcatactctgtagcaatctaaaagcaaaaaaaaaaaaaagaaagaaaaagaaaaattttaaaaattattttatgtgtatcccgagatgaaggtagaattgaaaataagaaactgtcttggttacca

SEQ ID NO: 177912 - DNA, 201 bp, Homo sapiens
ggaacacattatgactttatttcatagatatctggggccaattataagtttagttgaggcaagactcagtatctttataactgaagaaatggaggttttawaaacaaatttctgtgtaaggatgtgccaaagcatccatgaaatcatgtgataacattcatctttgctttgatttgctcctgtctgtaaatattggctata

SEQ ID NO: 177913 - DNA, 201 bp, Homo sapiens
aagtcacttagattatttttgtcttcctagtgaatatagaagttgtatttatactatactgtagtctgttaggtgtgcagtagcattatgtctaaaaaaatatatgtaccttaactaaaaaagaattgctaaaaaatgctaacaatcagctgagccttcagtgagttgtaatcttttagctgctggagagttgtgcctcga

SEQ ID NO: 177914 - DNA, 201 bp, Homo sapiens
acaaaataattgagaagattagaaataatactaaagacactatttcctgtgttcctgcaatcttataaaaatatgattatagatttaggctgcagaatatkaatatgtgaaagatacttgtccactatacagagaagtaatgatggccccagctgcccatctggagtggctgctgcaaagatgctgcagtaggggaggcat

SEQ ID NO: 177915 - DNA, 201 bp, Homo sapiens
tgcacattgataattctgcaggtttaaaattgtattcattacattacaaaatggaattcgtatagagatacgagttttttcaaatgttaagatatgtttcsttagttttcttattatatttattcttgagactatttttatactaattatgccaactggaatttttatagcactttataaagctttaaactaatttatctc

SEQ ID NO: 177916 - DNA, 201 bp, Homo sapiens
tgctccgcttcttcttgaaacataagttccaattccatatcatatctttgtgaatgaataaaacttaatgcttttaacagtacccaagtcacctcttgaaygctttgctgcttagaagtttcttctgccagatgccctaaattatctctctgaagttaaaagttacacagatctctagggtggggcaaaatgctgccagtc

SEQ ID NO: 177917 - DNA, 201 bp, Homo sapiens
gtaatcaaaacatatcaaatatgttacaaatatcctattatcttctgaacaaagcttgccctctgtttaaagatactgacattgaacatatcttagttgaycaaggtgaattttctgacaacatttacataaaattagaaatagagttgggctgctgaatatagaacatattttctttttgtttaaaatgaggatgacagt

SEQ ID NO: 177918 - DNA, 201 bp, Homo sapiens
aggttatttttattaattagccaatatttcagcccacagtaagggtaaatcctctctaaaaaatttggttttcagcctgctcaactcacaagcgattaagraaaaaacagttgtgagaattcattagtgaaatatttaagaaacatgttttaagtctcttcccgagatttttttttttaaagcatgctgagatagccttct

SEQ ID NO: 177919 - DNA, 201 bp, Homo sapiens
gactccatctcaaaaaaaaaaaaaaaagttgccattattcaaaagaaggttctgtgcatgtcttttggtgcatatatgcatgcatttcttctggatatgtrgagtaagattgctgggttgttgggtatgtatatactctgttttggtagaatgtatgtatatatttttaaatgtagttttatgtatttatgtggtatctgt

SEQ ID NO: 177920 - DNA, 201 bp, Homo sapiens
tagcttctttgacttgaatatgtcacatcagacttgcctgttttgaatattatgcttaaactagattggattttttttcccctggtaggtgtactggtccrttagcaaattctctttcagagaaaacaagagacccagtagaggaagatgatgatgaatacaagattccttcatcccaccctgtttccctgaattcacaac

SEQ ID NO: 177921 - DNA, 201 bp, Homo sapiens
taggagtctctttatcaagagaattacctaagagaacgtcagtgggtggcatggtatttgattggttattgataatatgtgttttgagtttgccatattcrctcagtattctattttagatcatgaataaaggatatatttctttactacactaaatatttatcagatgaatcatttctggaagtgagggaattaactgtg

SEQ ID NO: 177922 - DNA, 201 bp, Homo sapiens
gaaaattcttttatcccatcaagggtcttaacaaaagattgaaaattgttttcatttgtatttgatataagaacagcttctctgatgataccctgtaattraaaaatgaacataagtgataaagtagcttctttgacttgaatatgtcacatcagacttgcctgttttgaatattatgcttaaactagattggattttttt

SEQ ID NO: 177923 - DNA, 201 bp, Homo sapiens; identical to SEQ ID NO: 31824

SEQ ID NO: 177924 - DNA, 201 bp, Homo sapiens
agattatatttcataaggatacagggaagaaacgctcctagctcatttgttatcttacaacagagaaatcttcaacagatcttttaaatttgggtaaaaakctaagaattcctaatgattaaattatgcctggtgataacgtattattgaaagtggttttctgttttgaactccccactcatgcagttctccctggtggaa

SEQ ID NO: 177925 - DNA, 201 bp, Homo sapiens
gccccacattgtgggcaatgagaaggagagaagagctgtggccctttggggagcccacacctacaggctccctgagctaggctgtgaagccccatttgggrgactgcagtttctggagtctccaagcttttgggtgccactggttcccctcctccagacacaggtgcccacagtggaagccacttgctgtgcatcagatcc

SEQ ID NO: 177926 - DNA, 201 bp, Homo sapiens
actgctggataaaccctgcgagtgaaattctttataagcagcaagagaaaatcaattattacttttgttagatgctgtgtattttgattaatgaagttctrctgctgatatcgacctttctttaaatgcaggtgaagatgcttttgatgccctccctccatctctcccacctcccccacctcctgcaaggcatagtctcat

SEQ ID NO: 177927 - DNA, 201 bp, Homo sapiens
atgcatgctgaagtttgacaaacactgctatagaaaattattgaatgaatatgaaagttgtacctttatggtgatatctcattgaagaggattgatatagmatggggccaggcacaatttagtttattctgcctgagtcttgtatttcagagatactggtaaaggaaacctaagatttaaatatttgctatcttataagag

SEQ ID NO: 177928 - DNA, 201 bp, Homo sapiens
ttttaaatacactggtcagagaaggcttcattgaggaagtgacatttggagacaggaatgagatggatatttgggggaagaaaattcaagtaaaggcatcrgcaaatacaaagtctctgagggggaagagggcttttttgttcaagacaatagcaggctggagaagatgcagaaagtgggagagttatagcagatggagac

SEQ ID NO: 177929 - DNA, 201 bp, Homo sapiens
ccaagtgcaaatttagaaaacagtttagcctacagggccttgatgaactgactctggcctatttcagatctctcgtactactcactcacagccttccttcytatgctctgatcttttagaataactgcatttacttctctcttaacatgcttgctctctggtgtctcttaagccttagcacactcctttgcctagaatact

SEQ ID NO: 177930 - DNA, 201 bp, Homo sapiens
tttttattcctccctccttctttcttcttcaagcctcctctaatgttaacatctttggcagtttggccagtgttgacaactactttttgattatttggtaytttaaaatatttggtattttaaaatgcttttattggccaggcgtggtggctcacaccttataatcccagtactttgggaggccgaggcgggcagatcatg

SEQ ID NO: 177931 - DNA, 201 bp, Homo sapiens
acagtttattcatcttgagggtggtgaatcttcctgttgccttttagcattaattaatgctttaaaattctccaggaataacaagaggaatttgagttgcyacagtgtgacagaagtaaggtagagaaatattatagtgattgtttattcttgtacacttttcaagaagtgctaacatcttgggaagtcagatatttatgt

SEQ ID NO: 177932 - DNA, 201 bp, Homo sapiens
taggagttggaagcaattatacatactctgggtagtaggctctaaatcagtgacaacatatgattatattctagtgctaaatgaactctggatatatgtgyatgtaataaaacatctaagctcaattacctttgataactcagagaacattagaaaatgaaatcttgctaattagagattaaatgttcacattctgtttat

SEQ ID NO: 177933 - DNA, 201 bp, Homo sapiens
taactcagagaacattagaaaatgaaatcttgctaattagagattaaatgttcacattctgtttattaaattcatattggcaagcgagctggaagttgcaktgtgcttcatttgtatttaacattaaatacctgcttctcctgtaaatgaagcaagaataacaaattgatagtaaaatgtattttttctaatacttcagtt

SEQ ID NO: 177934 - DNA, 201 bp, Homo sapiens
tttgggaccactgcaataaagtacatcgcaatgaagtgcatattgcaataaagcaagtcacttagattatttttgtcttcctagtgaatatagaagttgtrtttatactatactgtagtctgttaggtgtgcagtagcattatgtctaaaaaaatatatgtaccttaactaaaaaagaattgctaaaaaatgctaacaatc

SEQ ID NO: 177935 - DNA, 201 bp, Homo sapiens
tgctgggattacaggcgtgagccaccatgcccagcctttgtcttatttttaacaggaaaacttctctgggcctttccccatctggtagaagagaggatcartttaacttaaattatctccaaaatccttttgagattcagctttttaggttctatacagtgtgtttttttaaaggatactgatggcaaacctgacaataac

SEQ ID NO: 177936 - DNA, 201 bp, Homo sapiens
atttctactagttagctacctccctttgttgcctgttaaaaaaaatttcaggtatctttatgtcaataaggaaaataaaaacttacatatctattggaggyctattttgttcaattcattgtaacaagatacaaaacaactaagatgccaattgtaattttctacctgtaagcaatattcagtttggggaagacaggatat

SEQ ID NO: 177937 - DNA, 201 bp, Homo sapiens
gtgtaaattctcattcacaccagtagtatacagaagttcctgtttgcaaacaccctggcttctgttgatgttcaccctttgttgtatgaaatgtttttcawtttttcctatcagttgaaactaaaaccctgtagccttttatgaactagtggtttcatgaaaatattttaccttttttttttttaaaagaaatcattctcc

SEQ ID NO: 177938 - DNA, 201 bp, Homo sapiens
atgtcatgaaagacccttgaaaattagcatgtatatgataaaatttagtgttttgaggaaatgatttatatgtggcacatgtgcaaaaatcatttcaaatrtagctatattttgttttgtctcttctctggactatttatttgagttagacatttttccctgttaggattgggataatgtaatataagaaatatggtgtaa

SEQ ID NO: 177939 - DNA, 201 bp, Homo sapiens
tttgcaaacaccctggcttctgttgatgttcaccctttgttgtatgaaatgtttttcattttttcctatcagttgaaactaaaaccctgtagccttttatkaactagtggtttcatgaaaatattttaccttttttttttttaaaagaaatcattctcctcacactttctattttccattcttcttaccttttcttaaaat

SEQ ID NO: 177940 - DNA, 201 bp, Homo sapiens
gttacttgccttcagatactattaaaggaagatagattcttatatgtagaaaacaagcttactaattaagcatagcattggatactatctcctgtgctggygtgaaaattcacttgtttcttggtttgtttcaagtgtgcatatgtagaagatgaatgtatttatcactgaaggctcaaataactaacacaatgaatttaa

SEQ ID NO: 177941 - DNA, 201 bp, Homo sapiens
aaggctgtgattgaattgagccaggatgggccctggtaatggtaggctctacaagttcctcagatgattccgatatgcagctcaccttgggattcgttgtrtgttagaaggaactagaaagcatcctcctactcagtggttttcagccttggctcacattggaatcatctgggggaactgaactctctaatagccatgtcc

SEQ ID NO: 177942 - DNA, 201 bp, Homo sapiens
acctgcacaatgtgcacatacatgtaccctaaaacttagagtataataaaaaaaaaaaaaaaaaaaagaaaagatactgtttttcaagactttaaagaggwttactattgttttttggtagacagactagaactcattatctaataacaggattataacatagtcttatttatcatgttcttatctctcatgatattatat

SEQ ID NO: 177943 - DNA, 201 bp, Homo sapiens
ttagtcaatgactgaaaattgtcccatgccccataagatagaaattttttctactgccaaatgtcacatacatggatagataatgactaaatataaatctrattattttacctgttatttagtagtaagtaaaattaaacctgttttttgaatgagtttgtagaggaaaataaaaccccacatgtaattccagatggtata

SEQ ID NO: 177944 - DNA, 201 bp, Homo sapiens
gccaggtgattgtaacatacaggtaggtttgaaaaccactgaccaccgcttctgtttttcagatgaggaatttgaggcccaaaccaaagagattaggtgayttgtccaagatccacagaaccacaactagaactcagatcttcagacttgttatcaaatgtttttaccaggacatcacatatttttaagaaaatgtgggct

SEQ ID NO: 177945 - DNA, 201 bp, Homo sapiens
agttttatggtaattataatgaagctggacataattgcatatttatacttcattgtaaatcaacagcttcctaatattcttaaaagtgttccttttttttwaaaaaaaaacagcagcattttgttaaccttaatcagagcctgacgtgtgtttcttctaaatggcatctgatgtggtatctctcctcagttctctgtggtt

SEQ ID NO: 177946 - DNA, 201 bp, Homo sapiens
gcagggatcattaattatatgcctaattttaattaaattgtgatacagttagaaagatcagcccgagattcagaagatacaagctcttgtattggattaaygatattttaatggtcccttaatctttctagttcttagtttttttaaatctggaaatgaatggattgggtggaatctttactaagatcccttagagcaaga

SEQ ID NO: 177947 - DNA, 201 bp, Homo sapiens
ctgggatgggaaaagaaagggctatttttaagtcaagctactgtgaaaagttttatatcataaaatgaaaatcttacctgggctagggaatgcctaatcattttaaaaacatgattacagaagcagctgaagaactcttgttagcccgtgtatttctgagattcatcattccatttatttctatgctgtaatcaaatgctt

SEQ ID NO: 177948 - DNA, 201 bp, Homo sapiens
tgaagtattcattaggtgacaagagtggcattgaaccctaaaccacctcgtcaacatgaaagatacttcattttatatgcatatatatatatttttttaatttttttttttttttgagacagagtctcactgtgttcacccagcaggagtgcagtggtactatctgggctcactgtaagctccacctcctgggttcaaacg

SEQ ID NO: 177949 - DNA, 201 bp, Homo sapiens
aaactaattttaatgtctaaattacaaaggaatatatcgagttctaagcctgggtgacagagtaagactccgtctcaaaaaaaaaaaaaaaaaaaaccctmatttttatgtctaaattacaaaggaatatattgagttctacagtagaaactggctcagtttttgtctgaggtaggcaaattaaatttaaatttttactta

SEQ ID NO: 177950 - DNA, 201 bp, Homo sapiens
tgtttaatataccaaaggcctcttgctccctctatagaaggtgctgcaaaattgcagtcacttagtttttttgttttttttttttccttcctttttaaatygaacagatttctcatgaggttcatgatgattaacaaaaagatttggatccatgtgtgtattcccaatgccttgcaaactagttggtcgtcctaaagtgaa

SEQ ID NO: 177951 - DNA, 201 bp, Homo sapiens
catcaatggttgttatgacggcttaaaatagctaaaccttacctgtaaggcacataaaactgtgtctagcatataataaatattctattttgtggaataaytaaccaattgaaacctttaaaagtggtccaaattctctaaataatgtaatttacatttgactttgtatgatggaagtttcatactctgtagcaatctaaa

SEQ ID NO: 177952 - DNA, 201 bp, Homo sapiens
aagagaagatgtattttgtgatatctactcttataacaggcactcttaacaacatcagtaatttgtataacattaaatgttcaagtagcatagagaaaaayctaaattcagttttagatgaacagttctttgttttttcttgtgctataaagacacagttattgcctttcacctcctcccccttcaaaactcaatattttc

SEQ ID NO: 177953 - DNA, 201 bp, Homo sapiens
aatatttataattttaaacaagtggtaagtagaattaatgataaataacttacttattgaaggttttcaaaaaattagatgcatcagggtcttacctacaygtcttatgtatttttattcaaaatttttagaaatgaggaaacaggttaagtaaccttttctttatctttaaacaggctaaggatattaagccagtactaa

SEQ ID NO: 177954 - DNA, 201 bp, Homo sapiens
ccgcctgagctctgcctcctctcacatcagcagtggcatcagattctcaaaggagtatgaactctattttgaactgcacatgggagggttctaggttgtgygcttattaggagaatctaatgcctgatgatctgtcactgtctcccatcacccctagatgggactgtctagttgaaggaaaataagctcagggctcccact

SEQ ID NO: 177955 - DNA, 201 bp, Homo sapiens
tgactaaaggatggcaaatactgctggcattgagtgggaagggccagagatactaaatatcctgcaagcccatgggtggtcctacccaaaagaattattctgaccatagtactaatagtctagtcctcaccactgccttcccacaacatttaggtagagccgtgagtgacagtaagcaatccgaaggcacaggtttgttgt

SEQ ID NO: 177956 - DNA, 201 bp, Homo sapiens
agacaagtaagtaaaaatcatttttatagctgtggatctatctttcaagggttactgtatcctccctccagttggatatggtatatattttacttgagtgttttgtgaatgtattttattatttttgataagcattttgattggtaatttttatagtcaccaaaggtatgcctcaataatgcaatagttttttagtcacta

SEQ ID NO: 177957 - DNA, 201 bp, Homo sapiens
cgcaatggcaattaaattttaacatgaattttggaaggggcattcaaactatagcactgttgtttttgaagacatggtagtgctaccctctctgctcaggrcccaagcccagcagccaagaggcactgcctgccttgtggcccaaggggaacagtaacacatgtatcatggcaaatttgttgggagattctgtttatggtc

SEQ ID NO: 177958 - DNA, 201 bp, Homo sapiens
cctccatctctcccacctcccccacctcctgcaaggcatagtctcattgaacattcaaaacctcctggctccagtagccggccatcctcaggacaggatcyttttcttcttccttcaggtaggagggaaaagccaaagaaaactattcacttaaagcaaaaatatttccaaaaccatactatcaaataaatgttagtgatt

SEQ ID NO: 177959 - DNA, 201 bp, Homo sapiens
ggtgcatttggagaaaatacttttttatttctttactggttggtcttacctttttaaatttgtttcctcctttcctgaccttaaggatagaactagacacsgcagatggattgtttgcatttaggaatctcagaggttaatggtgattgatggagattattgagggaggaactaatttgctcctttctcgaattaggcaga

SEQ ID NO: 177960 - DNA, 201 bp, Homo sapiens
cagactctcccacaaaataattagatcccattatcaaagttggtgaactgctggataaaccctgcgagtgaaattctttataagcagcaagagaaaatcarttattacttttgttagatgctgtgtattttgattaatgaagttctgctgctgatatcgacctttctttaaatgcaggtgaagatgcttttgatgccctcc

SEQ ID NO: 177961 - DNA, 201 bp, Homo sapiens
tgaaacttgtttttatttttaagatccctttgttgatctagcaagtggccaagttcctttgcctcctgctagaaggttaccaggtgaaaatgtcaaaactracagaacatcacaggactatgatcagcttccttcatgttcaggtgagttggctagtaacagtaacaataataccttattgttatatagtgctttttgctt

SEQ ID NO: 177962 - DNA, 201 bp, Homo sapiens
atttaaatgtacaatgttttcataaactttttttaagggcagcattaagttgaggttttcgtgatcaaccaccaagacatacgttgatacatacataacaytgtttgtcttaatatatattaccataaaaatttgcatgcatataggtgtttatttcttatcttcatttttttcccttgtgcctacagacgaaatctcaca

SEQ ID NO: 177963 - DNA, 201 bp, Homo sapiens
tctgcataagcattatcatttgtaatgtttgtttttaaacaattgattcacgtctaattaaaaatccttaatttccagctcaaatccttctcttcctattrtaccatttccagcattacttttaaagaaaactaaaagatgcagatttctcattaatcaggaagtcactttattttatcagttctaaacacctatctcatg

SEQ ID NO: 177964 - DNA, 201 bp, Homo sapiens
gatacttctccccaaaatatttatgttctgttctttcttaaaaaccataatgtatctcatgttctcagttttgaatgctacttaagagtaaggatatttaytctattttggattattggtaagcttaaaatcttgggttctgggctgggcgtggtggctcacacctgtaatcccagcactttgggaggctgaggtgggcag

SEQ ID NO: 177965 - DNA, 201 bp, Homo sapiens
gaaaaaaataccaaggtgtttctcttaactttttgtttttctatcaagtgctatttaccttcctttagatcaaataagaatgtgaggaataggccaggcgyggtggctcacgcctgtaatcctagcactttgggaggctgaggcgggcagatcatgaggtcaggagtttgaaaccagcctgaccaacatggtgaaaccctg

SEQ ID NO: 177966 - DNA, 201 bp, Homo sapiens
tctcactgaggtaggaaatgcagcacttggaaagagaagcacattttcattttaagcagatgtctgtcttaataagtgaccctggttagaattatcaacaytctgctgaattattacccagaattgttaatagtctacagcgcaggactttatttttttaaaagcaagaacctaaacactccttgctattgctggtgttta

SEQ ID NO: 177967 - DNA, 201 bp, Homo sapiens
acgaggagctaattttatgtatcagaagaaccaagtagctagtgatgtatttgagaacaaaagatattccttctcatcaaatataagttgttacaattttyggttctttggctcttacaaatgtgcagtaatttttaaaaactaaagtaggatgagctttttttggtctctttgggagtcttattttttttcattgctgga

SEQ ID NO: 177968 - DNA, 201 bp, Homo sapiens
ccccccttctcttctttctctttccatcccaggtcctcctttttctcactatctgagagtcggaggaaacaaggagatgggaatttggagtggaagatagrtttaaggagatagttatcccactctggttctaaattcttgcacaatatctgatatggcattagctgaagaaccatgacatgattgatttctttttttcat

SEQ ID NO: 177969 - DNA, 201 bp, Homo sapiens
ttgtttccttcttttgtttgctaagttacctgaattttatctaagccatagtttaggtgggttagctttaatagtatttgaaatactgcttttgaattaayatactgcttgtttactttatcctttaaaatgtactttaccatttaattcttttagtagcactgagacataaatagggctgaggatgattttatttacatt

SEQ ID NO: 177970 - DNA, 201 bp, Homo sapiens
gagatagttatcccactctggttctaaattcttgcacaatatctgatatggcattagctgaagaaccatgacatgattgatttctttttttcatcccactrgtatatgttacaggctctcagtgtgccaaccttgtttgagacacaaaggatttagtagtgaataacctagatgcagtcctcatggagcagacgctgtgat

SEQ ID NO: 177971 - DNA, 201 bp, Homo sapiens
aaatttatagttttccctcaaattttatgtgtatctgagattttctataataatttttttaaatgtatgagactatgtacgtctcaaagtactgctttccrttcttcatgtgttaaagacagagggaccatcagatcttcagatcttgctttctttttttcttttcttttcttttttttttttttttttttggcacggggt

SEQ ID NO: 177972 - DNA, 201 bp, Homo sapiens
aatgaactatatctggccccttaaagagaagtggccaccagagagaatagaaatgaatttcagatgaagcattcttgcattatctattcaaatatccaccrtctcttccattacatacgcacttttactttgctctaaaaattcagagtaaatcagagaaaagtaaaatgtaaactctgatttctatagctctttgtcagt

SEQ ID NO: 177973 - DNA, 201 bp, Homo sapiens
tgggagggtgaggtaggcagatcacttgcggccaggagtttgagaccagcctgggcaacatggcaaaaccctactaaaaaataaaaaaaattggctgggcrtggtggtgcacgcttgtaatcccagctacttgggaggctaaggcatgggaattgcttgaacctggtaggcggaggttgcggtgagccaagatcatgccac

SEQ ID NO: 177974 - DNA, 201 bp, Homo sapiens
attataataatgaagaaacatcctatgtgtatttttgtttgtatccacaggtgaaggtatatgtaggtgtgtgtatatgttgaagttggctggtgccactstcactgttaatttcattaattctaattaggaagcatctcaccctgtttttagaagacagaatgtctgcacaccttacataacgcttcacaataacaagtc

SEQ ID NO: 177975 - DNA, 201 bp, Homo sapiens
tcaaatgctatttctgggtctattgagatgattatatatatttttaaaatttctgtttatgtgatgtgtcacatttattaacttacatatgttaaactgtmcttgtatctctgaaacccacttgattgtgatgtattagttttttgttgtgctgttggattagttagctagtattttgttgaggatttttgcatctatgtt

SEQ ID NO: 177976 - DNA, 201 bp, Homo sapiens
aattctcagaatgttcttgtttcttggccatttttatggaaatatttctgaattatatgtcacccttccctgccttctcaaaattggttatgcagctgagygaaccaaagggcataagaagccactgtagtcaacatgacacatttctaaaagcttacattttgctacaagatttgagggtagcttgcataaagagaagag

SEQ ID NO: 177977 - DNA, 201 bp, Homo sapiens
cagtctttcgcttgaagtgtttgcatgaatattaattctaggttaaagtctaaaatcacattaaacatcacaagctttagaaactttttcgctggcttctytttttctacttatcatttcggtatacttaactcatctgcaaagaaacaactcaatactgttcatatttcccaatgtgtgtctcattttttactcctcatt

SEQ ID NO: 177978 - DNA, 201 bp, Homo sapiens
ccaatagactggaaagtttctttggaggcagagactgcatcttacttatttttgtgtttttgagcctgacacgtttcctggaatgtttaggcaataataattttttttttttaggtggagttttgctcttgttgcccaggctagagtgcaatggcgccatctcggctcactgcaacctctgcctcctgggttcaagcgatt

SEQ ID NO: 177979 - DNA, 201 bp, Homo sapiens
aagtatgaccatgggtaagcaggaaatgattgtattgctctaacacaatattcttcatataagcttttgtttattatctgtggaggtactctaaaatagataacacaagtcatttacttaagctataatgccatatgaatatgtgagtatgtgtgtaagcatttttgtagcatataccctctctgaataatattctgtata

SEQ ID NO: 177980 - DNA, 201 bp, Homo sapiens
attaacgtttttataaaatggctctttaaaggtgtggataaaatgaagagtgactaaaatagaatgagttcccaattattattggtaattgctgaacatartgagatgggcttttgactactttacttcttagggtttttctgtcaggattttctgttaagattgaacatgtggatttctctgttcctcgtggtagttata

SEQ ID NO: 177981 - DNA, 201 bp, Homo sapiens
tgctgaacatagtgagatgggcttttgactactttacttcttagggtttttctgtcaggattttctgttaagattgaacatgtggatttctctgttcctcrtggtagttataaaggattctgtgcattttgtcagaaaaataaataatagtatttattaatttccaaagcaaaaggatgagtatgtagacgtaaaagaatc

SEQ ID NO: 177982 - DNA, 201 bp, Homo sapiens
taattttttttttttaggtggagttttgctcttgttgcccaggctagagtgcaatggcgccatctcggctcactgcaacctctgcctcctgggttcaagckattctccctcctcagcctcccaagtagctgggattacaggcatgcaccaccacgcccggcaatgttttttttgtatgtttagtagacgtggagtttctcc

SEQ ID NO: 177983 - DNA, 201 bp, Homo sapiens
gtgaataagttctatacagttaattctgtgttcacattctactttctatgctttatgacttaatttttccatacttatatttgtttgtcttaagattagakagatgaacatgaaggagtgacaaagaaaggaactcatttaagcagtgctcaaaaggacatgatactttagtcattcattaacacatgaaaaccagaagag

SEQ ID NO: 177984 - DNA, 201 bp, Homo sapiens
cggctcactgcaacctctgcctcctgggttcaagcgattctccctcctcagcctcccaagtagctgggattacaggcatgcaccaccacgcccggcaatgttttttttgtatgtttagtagacgtggagtttctccatgttggccaggctggtctcaaactcctgacctcaggtgatccacctgtctcagcctcccaaagt

SEQ ID NO: 177985 - DNA, 201 bp, Homo sapiens
caagcttttctgaactggctgttaggccaccagaaatacgaaatgaacctttccattttctcacaagtaccactgactagtattttgaatgacacaattgyagtatcttttgctcctgttctctctgtagttcaggactttattctcacctacatcaattacaaaaggctcctaactctgttacctacagtctttctctcc

SEQ ID NO: 177986 - DNA, 201 bp, Homo sapiens
gcaagttcagtaaatagtaatatcttttttttttttgagacagtctttctctgtcaccaggctggagtgcaatggcacgatcgtggctcactgcagcctcygcctcctgggttcaagcgattcccctgcctcagcctcccgagtagccgggattacagtcacgtaccaccatgcccggctaattttttgtattttagcaga

SEQ ID NO: 177987 - DNA, 201 bp, Homo sapiens
ataatattatttgtttaatattagtaaactaattttttatattagtatattttaaaatttcaaaagaggatctgaaataaaaatgaagacttaataaactrtctgttgcattagttagaattatcaggaaaaagaaaaaaaaatgttatatggaatctgctgatactaattaacagttccagtctgtcttgttagtgatac

SEQ ID NO: 177988 - DNA, 201 bp, Homo sapiens
aggggcaggggaggaggtagaaagtgtgataactctgcatcactccttcttctttgttctcatttataacacctaaggcattggaattccccagagtaagmattctagtgaaaagggaagcaaataaaatacatctgacagttgggatccttgggtttatacatgtgctgactaattacatatgaaatgagatatcccctt

SEQ ID NO: 177989 - DNA, 201 bp, Homo sapiens
tatttaagtcctgctcataaccataactaggtgtctttgtgcagtgcacaaaatacagtgtttttgtcagtctttatgctacctttattttgctgtttctstaacctgtaatctcacttgaagatcttatctaatcttaaagtcacagttcaactctgaaagctagccaaattgactttattaaagataaatggaagtttt

SEQ ID NO: 177990 - DNA, 201 bp, Homo sapiens
taaatatttccatatttatgtattttctttctagaatgtggattactttacctattttagaatctctctgctagcatgttatctgcacattggtcattackcagtaaatacttatagattgcatgctaggtaatgtaaaagaaaaggaagtctaaaagtacattaaataaaaagacagtattgtaggttgtgaaaagctct

SEQ ID NO: 177991 - DNA, 201 bp, Homo sapiens
cagatagtgaagaaaaaaaagaattaagaaaaacattccaggccaggtacaggctcatgcctgtaatcccagcactttgggaggctgaggcaggcatattkcttgagctcaggaatttgacaccagcctggccaacatggtgaaactccagctctacaaaaatacaaaaattagccgggtgttggtggctcgcgcctgtag

SEQ ID NO: 177992 - DNA, 201 bp, Homo sapiens
tacaacagattagtctctgtatgtgtatccatttatttctcaaacacttatataagtgataaattggctgtgatcatttcagtttgttttaatcctgtggwtataatatttttctttagtttttgaagaatttattttagaaaagctttattactttacaaagttttcttatcaggggacaattggtaattattatactct

SEQ ID NO: 177993 - DNA, 201 bp, Homo sapiens
cttcagccaatcaacagagatcatccttttaatttgaaacttgtttttatttttaagatccctttgttgatctagcaagtggccaagttcctttgcctccygctagaaggttaccaggtgaaaatgtcaaaactaacagaacatcacaggactatgatcagcttccttcatgttcaggtgagttggctagtaacagtaaca

SEQ ID NO: 177994 - DNA, 201 bp, Homo sapiens
atttttgttttgttcacaaaataaagtgaaaaaactgagaatagtagcaagtaaaatatgcttagactattttatcatgtgataaaagttttatcaatgtcttcattaattttcacgcatttatagaaaaacattgactctctgagtccttctcatcatccttattatagtaactgtatatacctttttcagatatggaaa

SEQ ID NO: 177995 - DNA, 201 bp, Homo sapiens
ctgacccactccagatcccacatctaagcctgccacccgtgcctcctcgcctggatctaattcagaaaggcatagttagatctccctgtggcagcccaacrggttcaccaaaggtagatcaattttattagaaacacagatgaaaattttgtaagacaattattgattgctcagattcttttaaattccattactcatatt

SEQ ID NO: 177996 - DNA, 201 bp, Homo sapiens
tgtctcagcctcccaaagtgctgggattataggcatgagccatcacgcccggcggcaataattgttaacagactacatgaataattgcatagatggacgaygtctatcctctactctcaatttccaatgacttcattatatataaattgatctctttttaaatgatcagttcctacatttctattccttagatgcctctct

SEQ ID NO: 177997 - DNA, 201 bp, Homo sapiens
ttatgcaataggaagtgttacgtacaaattgaaatacttactggcttttcgatgctactttatctaccagacaatatggaaaacttgtagtaacagaaacwtagtttttgccagaagtacagacagactttcctagatatagttcattgtgtttcaagaaaaatgtttaacttgagaatcttttccatgtgtagtattaag

SEQ ID NO: 177998 - DNA, 201 bp, Homo sapiens
ttatatgcattgaaataatttgcatgctgttatcaaatgatattttacgctcatttttatagtgccatgacaagaaaaatgtgatgggagtatatttgcataagggcttaaggtatgacaaattatcacccttgtttcaaggcgactcagaagagggaattatatgtagtttttaaacctggagaaattaattacaatgaa

SEQ ID NO: 177999 - DNA, 201 bp, Homo sapiens
gagaagtgaattgtcaatatgtagaaaaagtgacccagtaaatgagtaattcaatttaatttcagtaaaaatccatcattattatgaagattcaatacatrataactatttttaaatgaactatatctggccccttaaagagaagtggccaccagagagaatagaaatgaatttcagatgaagcattcttgcattatctat

SEQ ID NO: 178000 - DNA, 201 bp, Homo sapiens
ggtagaattgaaaataagaaactgtcttggttaccacagggggaaaatggtttatttatagctcaatttattgcctctatgattgatttcctgcaaaagcrataagggccttctttggtttcccgtattttcctttcacttttaatatgaaagaaaggaaaatactttctttacctttccagcgagtgagatatatattct

SEQ ID NO: 178001 - DNA, 201 bp, Homo sapiens
catgcatacctcagagatattgtgggtttagtttgggaccactgcaataaagtacatcgcaatgaagtgcatattgcaataaagcaagtcacttagattatttttgtcttcctagtgaatatagaagttgtatttatactatactgtagtctgttaggtgtgcagtagcattatgtctaaaaaaatatatgtaccttaact

SEQ ID NO: 178002 - DNA, 201 bp, Homo sapiens
gctccttgattcatgggctgcagaatgagtactgtgttagaagacatgaaaacaacattaatctcctcgtacatctccatcaaatcttttgggtgatcagrggcattgccaatgagcagtactattttgaaaggaattgttttctctacacagcatatctcaacagtaggcttaaaatattcagtaatccaggttttttgt

SEQ ID NO: 178003 - DNA, 201 bp, Homo sapiens
aggatatgatatagaaaagattgaatggtaggagaacagaataggatttatttatattatgacaaacgtgactatcagttaataaattggagatagtaagktaagatcattatttatattatggaaaaatgaagaaataggacatggttctctaactttttaatttttctgtgaaataaaatattatgacttattttattt

SEQ ID NO: 178004 - DNA, 201 bp, Homo sapiens
aatgatttatattcctttgggtatatacacaataatggaattgctgggtggaatggtaattctgttttaagtactttgagtaatcaagattgctttcacartggctgaactaatttacactcctaccagcagtgtataagtgttcccttttctcagcagtgtataagattcccttcccagcacctgttattttttgacttt

SEQ ID NO: 178005 - DNA, 201 bp, Homo sapiens
tgtagagttccccatatgtagaccatgggaggaataggcactgtgggaacatagtggtttatgtgactggcttcctatccttaagagtaatttttttctgttttttttttttctttcccttttctccctccctctctttcattctttcattcttatttcttaagaatcatgcagtggagatacgtgaatataattcaaggt

SEQ ID NO: 178006 - DNA, 201 bp, Homo sapiens
ttaacattattgaatgcatactctttatcagttttctaagctaattatttattgctgtatagcaaaccaccccaaaatttcgtggcttgatttaacagcarttattatttgtcatggttttgtgggtttaccgaatgttttttctgcttcatataatgttggttgggatgctagttcagctggaaggtccagtggctttac

SEQ ID NO: 178007 - DNA, 201 bp, Homo sapiens
ttctgagattagcctaatcactatccttggaatttacctttgcttgccagccttttatcctgcccctttctcctccctttcctatttccagtttatgcagrtattctttcttattactggcatagctaacattcccactctatccccatgcccatcttggctctgattttctgatcattctagctaaaatgtgtcttttcc

SEQ ID NO: 178008 - DNA, 201 bp, Homo sapiens
ccaaagtgctgggattacaggcgtgagccaccgcgcctagcccagggctttctatattgtttttaagaatgaggcagttcacttgagagtatatgacttgrttcagtgtaactgaatgctccatgaagtgaggcgtgttttataatgaaagtcttatagtataggcacaattccttactgttgaaattttcattttatttg

SEQ ID NO: 178009 - DNA, 201 bp, Homo sapiens
gatagctctcataatgctgactattcacaatgaggtcactcattctgtgtattcttgcctgcattttaagtgtccaagtgaattttgttcactgtcctaartgcaaccctaagacaaaatttattggtttctatgctgatatagcatatccttaattggatattactgttatccttgttctgtttactgacaatgttctgt

SEQ ID NO: 178010 - DNA, 201 bp, Homo sapiens
aagtgaattttgttcactgtcctaaatgcaaccctaagacaaaatttattggtttctatgctgatatagcatatccttaattggatattactgttatcctygttctgtttactgacaatgttctgtggccagctgtgtttatgcagaatttacatttgataaatgtttcataacaattcataataatgtaccattcttggt

SEQ ID NO: 178011 - DNA, 201 bp, Homo sapiens
tataatagcaaacaaaattacttgtaattattttttgtaaaggtctgtagctgaaataagtttttttcaggtgtgtaatgcatggttaatttatgcattastttttataaatatattggaaaacatggcatattctacatttcccaataatacatttttgtatttattgatataattgaatttgtaagtacctttttttaa

SEQ ID NO: 178012 - DNA, 201 bp, Homo sapiens
gtaaaggtctgtagctgaaataagtttttttcaggtgtgtaatgcatggttaatttatgcattactttttataaatatattggaaaacatggcatattctrcatttcccaataatacatttttgtatttattgatataattgaatttgtaagtacctttttttaacattcttaccgattttaatgtataaagtgccatctc

SEQ ID NO: 178013 - DNA, 201 bp, Homo sapiens
agccctggttatttcttaacaatccctgttttctttaattttgtgataatctctggaggattaattagaataattataacttattaaatctgtttataaasttttccctgttgcacatagaaaataaataattgggaagtgttttccatgttggtgacaaagagaaggcaacaaacaccacattcattttgtctttaatat

SEQ ID NO: 178014 - DNA, 201 bp, Homo sapiens
tatttcttaacaatccctgttttctttaattttgtgataatctctggaggattaattagaataattataacttattaaatctgtttataaagttttccctrttgcacatagaaaataaataattgggaagtgttttccatgttggtgacaaagagaaggcaacaaacaccacattcattttgtctttaatattaaaatatg

SEQ ID NO: 178015 - DNA, 201 bp, Homo sapiens
ggcatactgattttctatgaagtatgtggagctgtcaattttattcttttttccagagatttcagaaaattttcatttaactaaagatttccatcctggtyagctgggtctcatttacctgattaaaataggtttgcatggataaagtcttaaagcaaattctccttaccacattttgtgtgaattttttcctctttaata

SEQ ID NO: 178016 - DNA, 201 bp, Homo sapiens
cctgccttggcctcccaaagcgtcaagatcacaggcatgagtcaccacacccagctgatagctgcagttttgtgtgtgagagttgatcttcttgcctttaytgtgacaaaacatctttatggaaagacaaacagtattcgttacgtttattttacctgtgtattcaagaatgtttatttttttcataagctacaaaaccag

SEQ ID NO: 178017 - DNA, 201 bp, Homo sapiens
aggatcactgctcttaaaactactgtgtgtaaagattgagagtgtaaattcacaagcttattgataaagatgaatccggaacttttggttttgctctaatygatggaggaagatgcagtggtacaagttagtctctagttttctggtgggtaaatattttcaaaaccaactaacttttctttttttaaatctgccttttaa

SEQ ID NO: 178018 - DNA, 201 bp, Homo sapiens
gtcccataagtagttgcccttgaggtctgacctgagagagaagctaactcactctaaaacaatgatgctccagtccagtagtgacgttagcagcctccccrcttgggagggactgactgatagatatgtggtttgggacaacagagaggaattgctttcacaaatctttaagtaagtactgagatcttgaagatgctttag

SEQ ID NO: 178019 - DNA, 201 bp, Homo sapiens
cagaataggatttatttatattatgacaaacgtgactatcagttaataaattggagatagtaagttaagatcattatttatattatggaaaaatgaagaartaggacatggttctctaactttttaatttttctgtgaaataaaatattatgacttattttatttttatctttgtttttaggtaagactgtgccaaaatcc

SEQ ID NO: 178020 - DNA, 201 bp, Homo sapiens
agttctgcaaacttagcagtgccttttaaactacattcaataaatgtagatatgttggtagaagacagaattgtttgcaagtttatttcaaatgtgtcagkaggaggtattatagagatattgactcagtgatagattgtctgtaattggactacttaggattggtgtacctgataatcattcagtgtttcaggatacgtg

SEQ ID NO: 178021 - DNA, 201 bp, Homo sapiens
ccacctgacagaaactagggcagagtaaccaaagtaacatttgagactttatggttagacgtctaatttgcatgtgacagtagtccatttataaagtgtgrtggatgaagtcatattagagtaagtaccattagagacacattcattgtgatctgtgtttttgcaaatcaaaattaatggtcattgcagctgtttgttgat

SEQ ID NO: 178022 - DNA, 201 bp, Homo sapiens
agtaactctcctaatgacagtctcaagtggtaacagtattatagtaactgtagtattgatggtctcaagtagtagcagtggcggtcggccacatcactctsttcttttatatgctcagaaaaggaaagctgaatcaaaatttactcctaaaccagggcttctcaaatctttctttctcaaagaagagttgacagtgaacaa

SEQ ID NO: 178023 - DNA, 201 bp, Homo sapiens
gactgaaaattgtcccatgccccataagatagaaattttttctactgccaaatgtcacatacatggatagataatgactaaatataaatctaattattttmcctgttatttagtagtaagtaaaattaaacctgttttttgaatgagtttgtagaggaaaataaaaccccacatgtaattccagatggtataattagttac

SEQ ID NO: 178024 - DNA, 201 bp, Homo sapiens
agttgctcaaacaacaagaatttaaagatcagtattgaaatttttttcaaagataggtatcaataaacatacacttgaaaaatcttagtttttctttgatytttgaatgtcctatctaatgacttagataatatggttgaaacttaaatctttagatttttcaaaatgccttcttgtaatggtcacaaagaaaagccccta

SEQ ID NO: 178025 - DNA, 201 bp, Homo sapiens
ctttaaaatattaatgaccttatatcttttaagaaaattggtaacccagaagatgtactatttatattctgtggctcacattcttgtacttattttgataycactgcaattactcataagagttcaaaaataccatgaacatggatggtagcactagagcaaacacatgcttttccaaaataactatttttaaggatgatg

SEQ ID NO: 178026 - DNA, 201 bp, Homo sapiens
tagaattgcttgaactcgggaggtggaggttgcagtgagctgagactacgccattgcactccagcctgggcaacaagagtaaaactccatctcatgtataygtatagtgtgtgtatgtgtgtattttttgtctaggcttttgagataaagtgctatacataaccaggaaatacatgatgaaagtgccctgtcaagttagct

SEQ ID NO: 178027 - DNA, 201 bp, Homo sapiens
ttttaaaaactaaagtaggatgagctttttttggtctctttgggagtcttattttttttcattgctggataagtgaggagtataattttaatacgttaaattttaattgttacatcatattggatgtgattttttgtggcagagctcccaaatcttgaaaataaatttgaattataaccatcattaccatttttctattgt

SEQ ID NO: 178028 - DNA, 201 bp, Homo sapiens
tttttgtttaagttttgtaacctttaatcctccatattctcatgtctgtcatcccaggggtgtcacaactgtaaaaatctacaatattagaaagcagctaytacagatgtggaagagagaacacttgtataagacaatgctgtactgaagttaaataacaaggtcccctgatacttatgcctgcattactttgagggatgc

SEQ ID NO: 178029 - DNA, 201 bp, Homo sapiens
tggtggtgcacgcttgtaatcccagctacttgggaggctaaggcatgggaattgcttgaacctggtaggcggaggttgcggtgagccaagatcatgccacwgcactccagcctttgcaacacacagatacacacacaacaaaacaaaaaaagccccaacaactcaagcatacttttctggtaagtagtaccctttacaaac

SEQ ID NO: 178030 - DNA, 201 bp, Homo sapiens
atctgtatatttgcatatgggttaagtgtgattatggaactgacttttcattaaatttaaatagctaaatgtggatgggtgactactttatatgacaaagtagacagattttccaacctgtctttttaccttgacctttttctaggtcttcttatgcgtgtcatttttttcttcatactgtttactctacttagacgatcc

SEQ ID NO: 178031 - DNA, 201 bp, Homo sapiens
ttttcctttggacagtcataaccagtatcaatacttacctattatttcagggacatcagcaatttataacttactttgaattactttagttttatttcttytccatttttatgcattctctcgtctctttccttaagttccccacaaaatttttgtatattcacacatcataatagacacagtttatgtgtacatgtgtgt

SEQ ID NO: 178032 - DNA, 201 bp, Homo sapiens
aggctgtttcaggtaagtttatacttgcttagtctatccattcccttcttctctctccctgtcttttctctctgtttctctctctctctgtctctctctcwcacacacacacataaacaaacatatggaaaatagtgtcattcctattagtctgtaattttattggtatgtttggtcattgttaaaagtttagagtgagcc

SEQ ID NO: 178033 - DNA, 201 bp, Homo sapiens
gttagacgtctaatttgcatgtgacagtagtccatttataaagtgtgatggatgaagtcatattagagtaagtaccattagagacacattcattgtgatcygtgtttttgcaaatcaaaattaatggtcattgcagctgtttgttgatctgttgagtaatgtaaactctcaacaacaaagctgaagagaagatgtattttg

SEQ ID NO: 178034 - DNA, 201 bp, Homo sapiens
tttatattattgaatttataaactgaaatctattatttctgggtttgtttgttttacctgactgaaatatatgaggtactcagtactcccagctacaaaayttactttctgagttctggtttcctttgtataacattcctggggccatgcttggcacatagaatagggctcaagtactgctggtggccctacattccagca

SEQ ID NO: 178035 - DNA, 201 bp, Homo sapiens
aatcatacatatagagtgagaaatttttatgaagtaaacataatccatgtttacagtatgtatccatgtttatctcctacccagataaagtagtaataccytgctgcctgcatcttggaagacgccctctctcagcgcgtcagaaagtcgcacatagtcaccacccagtagttctgatacatgccatcataaatcatacat

SEQ ID NO: 178036 - DNA, 201 bp, Homo sapiens
tattcttttagtacactagagcatattagacatataaaaagttaaaaaccatgaacaaatacagaaaatatatttttgaaatcacttataatcccttccamaagccagttattaaatttgtggcatctccagacattatagtttaacattggatcataaaggacaaaattttaaaaatactatttccatttagtagtatcc

SEQ ID NO: 178037 - DNA, 201 bp, Homo sapiens
aaaaatgacaaattcaaaactattcagaaggttgaaataataaattacatttatgttactagacagtaatgttattgtcttaatctgatcattgaattttscacctaaattaatgaaaaatatgcaaacctttattttcagtattgtttttgaattctcctcacacaaagcagctcatcattaataagcatcctcctgata

SEQ ID NO: 178038 - DNA, 201 bp, Homo sapiens
catgttacatgaacttctctgatttataattctgcttggcactagctagcaaggattggatgactggtttttgtaataaaaaccacaatgcacaggattarcttttaatttatgaaggaacccattattagaagagagattaactcctgtcaacagtacatataggatgtgaaaccccgcctctactaaaaatacaaaaaa

SEQ ID NO: 178039 - DNA, 201 bp, Homo sapiens
aattctgcttggcactagctagcaaggattggatgactggtttttgtaataaaaaccacaatgcacaggattagcttttaatttatgaaggaacccattawtagaagagagattaactcctgtcaacagtacatataggatgtgaaaccccgcctctactaaaaatacaaaaaattagctgggcgtggtgatgagcacctg

SEQ ID NO: 178040 - DNA, 201 bp, Homo sapiens
ggattggatgactggtttttgtaataaaaaccacaatgcacaggattagcttttaatttatgaaggaacccattattagaagagagattaactcctgtcarcagtacatataggatgtgaaaccccgcctctactaaaaatacaaaaaattagctgggcgtggtgatgagcacctgtagtcccagctacttgggaggctga

SEQ ID NO: 178041 - DNA, 201 bp, Homo sapiens
ttttggacataatttccttaggtgaaatccctagaagtagatgttcttagtcataatgtataggcttttgaaatttgtttccaaattgccttctagaagtrctgtgtaaattctcattcacaccagtagtatacagaagttcctgtttgcaaacaccctggcttctgttgatgttcaccctttgttgtatgaaatgttttt

SEQ ID NO: 178042 - DNA, 201 bp, Homo sapiens
  misc_feature (1)...(201): n = A,T,C or G
ctctctgtctctctctcacacacacacacataaacaaacatatggaaaatagtgtcattcctattagtctgtaattttattggtatgtttggtcattgttnaaagtttagagtgagccatttggcttaagtttggagttatcagatgctgtgagcctggtggctgcttgttagctttgagaggatccatccaaaagagctt

SEQ ID NO: 178043 - DNA, 201 bp, Homo sapiens
ggtttctagtttgtgactggttcataattgatctgcttattgatggacatttgttttgaataatgttgccattggctcacgcctgtaatcccagcactttsggaggccgagttgggcagatcacaaggtcagcagatctggaccatcctggccaacatggtgaaaccctgtctctactaaaatacaaaaaattagccgggc

SEQ ID NO: 178044 - DNA, 201 bp, Homo sapiens
tataatcattagcaacatggatgtctttcttatatgtcctactaatatttctcttttcagttttcttaatggtttaggaagtaatgctggtaagtgctttrtttgaaatgattgtgtaaagattttatatgtttgagttgctatatataatttgatttttaactatcttatattttatctttaaatgtataaattttatta

SEQ ID NO: 178045 - DNA, 201 bp, Homo sapiens
tttatttatttatttaggaaacattctttgagcagctgcaatatcccatgttctgtagtatgctctgaactgaaaagaactctgagacacaatccttagcyccaagaagttaaagttaaaattaaacctgaaatttctattaaggggcatggtgttaataattacttaaaatgagtatcctgttatccttcaaatttaatt

SEQ ID NO: 178046 - DNA, 201 bp, Homo sapiens
tcttcaccaacttttccttccatctgatgccctactttggtttaattgaaattcattagagacttaaattttatgtaattaacagaaaacttaagaaatgygcagtagctgtgtcagtagttataggctgcaagtggttactctttaattgctgtcataatggcccattagtcatgcctctgaagaggtgtcagatgcttt

SEQ ID NO: 178047 - DNA, 201 bp, Homo sapiens
tctcttctgtgtctcccatggtatccagaacagtgctttatacttggcaaacactcataataatatatggttatttctttagaattactataggatgattkgaaaatcctgatgtattcctagattacgagctgctggggcctggagggaggcagaagagagatgttacaatggaaagtgttgaagtgtctgaaggcttgt

SEQ ID NO: 178048 - DNA, 201 bp, Homo sapiens
agttatgattaatctatgcacattgataattctgcaggtttaaaattgtattcattacattacaaaatggaattcgtatagagatacgagttttttcaaawgttaagatatgtttccttagttttcttattatatttattcttgagactatttttatactaattatgccaactggaatttttatagcactttataaagctt

SEQ ID NO: 178049 - DNA, 201 bp, Homo sapiens
ctgaatactgtagcagttggctcaaaactccaacttaatttttttacttgtattttgatctgtgcattggtgctctataaagtttagcattttttttcaamcactcttccactaatttgtgtggactttaatggaagtgacccaaatatttgtttggtatttctttcatccttgtccttcatagatgggtagaacaaaaca

SEQ ID NO: 178050 - DNA, 201 bp, Homo sapiens
ttttactgtgggtattaaatgctagaattccttgcagttatatattgaaagtatgagggcaacttaatgttggttaaacgattacctaaactgctatttartatgtggacatattttcttataagctgttttactttaaaacagcacaagtcaaccttaatactctaaggaatatatatcttatttactttcactgggatg

SEQ ID NO: 178051 - DNA, 201 bp, Homo sapiens
tctcatttgcttcatctctaaaggaagaggtagtagaaaccaccactgtctttttgcagaagtttaaatggaggtgtgaaaattcatgctttctgggttcmcttcctctcatatacctcagagaagaatggtagccacttagtcttaagaaagtttagagccttagtgcaacagtttagaataatctaatttttttgtttg

SEQ ID NO: 178052 - DNA, 201 bp, Homo sapiens
tatcttgtctttgctaaagagtgtgcatttgaaggtcactctcactgcctaaatcattagttggggtaagagaaggaattcaaggtttttctctaacttayctgctacgtaagtggacagcaaatggttcagattctataaaggggctgttctttttcccccaccctccaactttgagtggtcagtgtttgtacatttgtg

SEQ ID NO: 178053 - DNA, 201 bp, Homo sapiens
actggtttttgtaataaaaaccacaatgcacaggattagcttttaatttatgaaggaacccattattagaagagagattaactcctgtcaacagtacatayaggatgtgaaaccccgcctctactaaaaatacaaaaaattagctgggcgtggtgatgagcacctgtagtcccagctacttgggaggctgaggcaggagaa

SEQ ID NO: 178054 - DNA, 201 bp, Homo sapiens
tttgtggtgagcctggatgactttttactgtgggtattaaatgctagaattccttgcagttatatattgaaagtatgagggcaacttaatgttggttaaaygattacctaaactgctatttaatatgtggacatattttcttataagctgttttactttaaaacagcacaagtcaaccttaatactctaaggaatatatat

SEQ ID NO: 178055 - DNA, 201 bp, Homo sapiens
tcaacatgacacatttctaaaagcttacattttgctacaagatttgagggtagcttgcataaagagaagagaaccataaatttaaattaaaatcacacatrtatttggatcaggatataaaatttgtgtaaatgtttaaagtaaaatacaaaactttaaagaaatttcaaggttatggaggctgatcataggccaggagat

SEQ ID NO: 178056 - DNA, 201 bp, Homo sapiens
ttcaaacacaaaataataggatggaaaatacagaaaatagcatgagagacatacggtatttggtaaaggaatctgaaatgtttgtattgaaatcccaaaargagaggacagataaacagaatctgcagatcaaatatgaaggaaatctagaggggttttgccaggcaaaaggaaaatgattctatatagaaatacagagat

SEQ ID NO: 178057 - DNA, 201 bp, Homo sapiens
tgtaaaagcctcctaagttttccacttccatttttgtgcctacctttcccatctgttccatgtggaattcagagtaatatttttaaaaccatagttaggtstggtggctcaatacgtggcacagggtgggtgtcagtatgtccttgtgtattgaatgtataaatgagtattgttctgctgattttgctgatggaatttcaa

SEQ ID NO: 178058 - DNA, 201 bp, Homo sapiens
ccacgcccagctaagctgaaacttttcttaaaggcttttgtttgtttttgcagttttactcaattatatgccagtcctctcatctttgaaatgtgggtttrtgagaaaactttggagagaaagaaagaggcattcttctattccctcactcctgatgttagattccgctcgttttactcattcacgagtgggtaggcaggg

SEQ ID NO: 178059 - DNA, 201 bp, Homo sapiens
taggacttctgtgttccataaacctttgctagaattcacctataaagcaatttgggtcaggggtttttgagaggagtcagattatttttatagcaatttcragattcctgtccagtccacacatcaaactgcccacatcaaacccctagttaatacatgaatttagcctctaatttagtagctggtgactctgtaatctac

SEQ ID NO: 178060 - DNA, 201 bp, Homo sapiens
aaaaaactcagcgaatactatgtttaagatgaataggagctggtgaaggaggcgaaagagaaccagagaggtaaaaagaggatccaggagagtgccatatwatggaaactgaatgtggcaagagtgattttaccttgcactacaggaggcaggttaggatgagttttgacaattatgtaggaaaaattatcaaagacttag

SEQ ID NO: 178061 - DNA, 201 bp, Homo sapiens
tttttcaacagttttttcactgctattgccctgttggttttggtaggagaacagatcccaatggagactatatcaggtaaatcaagggtgattactactcrgtttggaatagttaattcaagaagagcttttcatgtttaatcaatgcttaaagtattccccactcatgatgggcagcagagatgagaagggtaaacagat

SEQ ID NO: 178062 - DNA, 201 bp, Homo sapiens; identical to SEQ ID NO: 31836

SEQ ID NO: 178063 - DNA, 201 bp, Homo sapiens
tagaaaagtgcacaactcctctgtctgatgaccatgatgagaaatatggagtcccttcactggaagagctaggtgagtgtaaactgtagtcagtgtgaggyttgcaagttaataaatcataaattactcagaaaattccccttttaattttgccatgtaaagtattttgcattaggagagaaagaaagggcagggggagaa

SEQ ID NO: 178064 - DNA, 201 bp, Homo sapiens
ttccattctcccagtaacactgcagaggttggaaaagtaaattctcttcagaagcatactatattaccactatgtttctttctctggaagagctcattatrgaacagaacatagggaagctaactttggaatgtttaattttacaattctgtgctagattttctttgccttgactttggctctactgtgaccttgaaaatg

SEQ ID NO: 178065 - DNA, 201 bp, Homo sapiens
tgagtcttggttattcttattgggggacgatatttaaaaaccaaaatctgggtgctgtattcaacttttacagctttatttttcttttcctggcactcttycccacccccaccccatagtcctaccactatgaaagcatctgaaaaacttgaattcatctagcgtaaaaataggaatatcagaaaaccagcatatatagct

SEQ ID NO: 178066 - DNA, 201 bp, Homo sapiens
ctgttctaccagtgagttttatacttttgcatatttacgtgatagtgattattgtctttgtgtttttagatgtaggatgcctttgagcattttttttttttgaggcaaagtctcactctgtcacccagcctggagtgcagtcacatgatcttggctcactggaacctccacttcctgggttcaagtgattcttgtgcctca

SEQ ID NO: 178067 - DNA, 201 bp, Homo sapiens
gaattgcttgaacccagggggcggaggttgcagtaaatggagataatgccattgcactccagcctgggcgacagagcaagagtccatctcaaaaaaaaaaatctgaatggatactagcattcaaaaaataatataattgctttgaacagttattttataatagtacttgttttctatattagtctacctattggtttgtca

SEQ ID NO: 178068 - DNA, 201 bp, Homo sapiens
ctttttcagatcttgctttgccttgctttattttctctttttggaaatacatttgtagccggccaccgtggcttatgcctgtaatcccagcactttgggargccgaggcaggcaaatcacctgaggttggaagttcgagatcagcctgaccaacatggagaaaccccctctctactaaaaatacaaaaaatttgtcgggtg

SEQ ID NO: 178069 - DNA, 201 bp, Homo sapiens
ccattggggaacatttttcttttatctcagatgtatcttttagaattctctatagaaaaagactggtgatggtaaactctcttaggtttgtttgaagatastggccttgtttacactggatatagaattctaggttgacagtgattttctctgagcctgttggggatgtagttatagtcagctgccactcccactcatact

SEQ ID NO: 178070 - DNA, 201 bp, Homo sapiens
gttactcttgccaagaggtttatcttggacttttgttctctctttaggtttgtacactcctatttaaagtttcttattgaagcgtgtgagtgtgtgtgtgygcatctgtgtctgtgtgtatgtatttaccaggtgctagtggaagaggacgttctgcattctctctgtcatttattaatattatattattctgagttatag

SEQ ID NO: 178071 - DNA, 201 bp, Homo sapiens
cttatgggtttggaggctgggaagtcccaagatgaaggggctggcatttgataggaccttcttgccccatcatcccatggcagaagagcaaagagaggacragagagagagagcaataggaggctgaacttgtccttagatgaagaacccacttctgtgataatggcattaatgaaatagagccctcctggcctcatcaca

SEQ ID NO: 178072 - DNA, 201 bp, Homo sapiens; identical to SEQ ID NO: 31830

SEQ ID NO: 178073 - DNA, 201 bp, Homo sapiens; identical to SEQ ID NO: 31832

SEQ ID NO: 178074 - DNA, 201 bp, Homo sapiens
taggtgcagtggtatagtctccatgcagctgctccagctgcattgaacatcagcaataactgtgggcacctcagtagcctaggctgtagaactttgtggcrgcagcagctgcagcagcatagattgttaatgttcttggtgtcataggctttttgggattcttctattctcattttccccacaattaggagacttagccaa

SEQ ID NO: 178075 - DNA, 201 bp, Homo sapiens; identical to SEQ ID NO: 31834

SEQ ID NO: 178076 - DNA, 201 bp, Homo sapiens
tcagttgcatcttagtctcagagatgaaggagagtcacggctactcaccgccagagcaagacaccctccagccatagttccaattctacgatggcatagcrtagtagccctgtagctgcagggtgtggagcctagtgtttgctttttctctacggtgagcacagttacgtggactccaggtaattccgtcagctggacttt

SEQ ID NO: 178077 - DNA, 201 bp, Homo sapiens
tctgagtgggggtgagatacaggtcattaacacataaataaattatatagtatgttaaagagatagcaaggaagggggctcaggaatgctaggggccagargtggggagaggtctattttagataagatggtcagagagagcctcacttcagagatgacctttgagcaatgacctaaagaaagagaggaattgaaccctgt

SEQ ID NO: 178078 - DNA, 201 bp, Homo sapiens; identical to SEQ ID NO: 31828

SEQ ID NO: 178079 - DNA, 201 bp, Homo sapiens
gaagcaacagctactaccagtttcttatgtatccaattccagtttcttgtttatccaattagaaatattctttgcataaacaagaattttttgtgtgtgtrtatatatatatttttgtgtgtgtgtgtgtatatatatatgtgtatacacacacacacatccatgtgtttgtgtctgtgttactatcccctttgttaaaag

SEQ ID NO: 178080 - DNA, 201 bp, Homo sapiens
ggactatgaaagaaagagaggtcaaggatgatgtggtagtgttcaccaatatccaattcaccattcgtacctgggctatgcaacatttcaattctcagctmtctttgcagtctggcgaggccgtgtgactctttctggccaatgaattgtgtgaggaagtacttggtgaaggcaatgtaaagccctgtatgtttcccagtt

SEQ ID NO: 178081 - DNA, 201 bp, Homo sapiens
accaaacacatacatgttagttgcactggatcatttttcttactattaatatgagggactgccagaaagtttgaatgtcactgatttcgtccacttattaratgaggaaataggtccagtgagattaaaccacttgccctaggccatatctgtgcttacagtgtcttaatataaaacgtgattgattagattccaaatcct

SEQ ID NO: 178082 - DNA, 201 bp, Homo sapiens; identical to SEQ ID NO: 31829

SEQ ID NO: 178083 - DNA, 201 bp, Homo sapiens
gtgtcttaacttgctaatgcattataattagtgtataatgtggagtgaggatgaccagaggtcactttcgtctccatcttggtttggtgggttttggctascttctttactgcattctgttttatcagcagggtctttatgacctgtatcttgtgataccagtcctgccgacctcctgtctcaccctgtgactaagaacgc

SEQ ID NO: 178084 - DNA, 201 bp, Homo sapiens
gaataattcctgtataagtaatggatgaagcatgcctggatgagattggatacagccataaaaagttatgttagtcaaaagcccagtgaaaaaactcagcraatactatgtttaagatgaataggagctggtgaaggaggcgaaagagaaccagagaggtaaaaagaggatccaggagagtgccatattatggaaactgaa

SEQ ID NO: 178085 - DNA, 201 bp, Homo sapiens; identical to SEQ ID NO: 31831

SEQ ID NO: 178086 - DNA, 201 bp, Homo sapiens
gtttcaccgtgttagccaggctggcctcaaactcctgacctcaggttatccgcccgccttggcttcccaaagtgctgggattacagatgtgagccaccgcrcccggcctttactccttttttttcagacagagtctcactctgtcgcccaggcttggagtgcagtggcatgatctcagctaactgcaacctctgcctcctg

SEQ ID NO: 178087 - DNA, 201 bp, Homo sapiens
tgtgtattttatatttgtgtgtatgtatgcatatacgtgtgtgtatatgtatgtatgtataatattttcttaatccattcttttggattcattccatcttrtggctattttgaatagtgctgcagtgaacttgggagtgctaatattgctttggaatccttagtttagttcttttggataaaaaccttgagttgagtggcc

SEQ ID NO: 178088 - DNA, 201 bp, Homo sapiens
tttttagtttccggaatagagccaaaataggatttttaatgttgaatgttgaggataagataatagggtttcttttctttttttttttctttttttctttytttttttttttttttgagacagggtcttgctctgttgtccaggctggagtgcagtggcacaaccttggctcactgcatccgcctccacttccagggttca

SEQ ID NO: 178089 - DNA, 201 bp, Homo sapiens
tgggaaaagggacaagagtgagggaggaatgtctatctcactcttgcccctatgttttaccttcatggtcaagtttcaaattgtcatctagtaaggaaatrttttttagaaaatgatcatcaatgattttgcctttgagctgtcaacacttctgtgagcctaaatttaagttttcctggtttgagcatgtgatttttggtt

SEQ ID NO: 178090 - DNA, 201 bp, Homo sapiens
ggtcgcgccactacactccagcctgggcgacagagtgagactccatctcaaaataaataaataaataaataaataaataaataaataaataaataaataaaaataagagaatccagcgatgtggctagatacaatttttattagccttaggtgcagagaattagtttaagacattatcattacaggtttatgtaaggtctc

SEQ ID NO: 178091 - DNA, 201 bp, Homo sapiens
aggtcgcgccactacactccagcctgggcgacagagtgagactccatctcaaaataaataaataaataaataaataaataaataaataaataaataaataaaaataagagaatccagcgatgtggctagatacaatttttattagccttaggtgcagagaattagtttaagacattatcattacaggtttatgtaaggtct

SEQ ID NO: 178092 - DNA, 201 bp, Homo sapiens
aaggtcgcgccactacactccagcctgggcgacagagtgagactccatctcaaaataaataaataaataaataaataaataaataaataaataaataaataaaaataagagaatccagcgatgtggctagatacaatttttattagccttaggtgcagagaattagtttaagacattatcattacaggtttatgtaaggtc

SEQ ID NO: 178093 - DNA, 201 bp, Homo sapiens
caaggtcgcgccactacactccagcctgggcgacagagtgagactccatctcaaaataaataaataaataaataaataaataaataaataaataaataaataaaaataagagaatccagcgatgtggctagatacaatttttattagccttaggtgcagagaattagtttaagacattatcattacaggtttatgtaaggt

SEQ ID NO: 178094 - DNA, 201 bp, Homo sapiens
tttatggtttatatcattagcgataagcctcaatgcccctttcccacccaaagatgatataaatatttacaatgtttttgtaatacatttagagttttatttacacatataaatctttgttccatctagaatttacattgacactgaggttacactctaacttctttttccccaaatgatgatcattttccacaaaatgat

SEQ ID NO: 178095 - DNA, 201 bp, Homo sapiens
ttttatggtttatatcattagcgataagcctcaatgcccctttcccacccaaagatgatataaatatttacaatgtttttgtaatacatttagagttttatttacacatataaatctttgttccatctagaatttacattgacactgaggttacactctaacttctttttccccaaatgatgatcattttccacaaaatga

SEQ ID NO: 178096 - DNA, 201 bp, Homo sapiens
cttttatggtttatatcattagcgataagcctcaatgcccctttcccacccaaagatgatataaatatttacaatgtttttgtaatacatttagagttttatttacacatataaatctttgttccatctagaatttacattgacactgaggttacactctaacttctttttccccaaatgatgatcattttccacaaaatg

SEQ ID NO: 178097 - DNA, 201 bp, Homo sapiens
catggtggcgcatgcctgttatctcagccactcaggaggctgaggcacgagaatcgcatgaacctaggagacggaggttgcagtgagctgagatcgtgccwctgcactccagcctgagtgacagagtactctgtcgcaagaaaaaaaaaaaaggacttatagtttggtgctatataaaaagcaccaaaattcagtgctttt

SEQ ID NO: 178098 - DNA, 201 bp, Homo sapiens
aaacttttttgtattcaaacttttatggtttatatcattagcgataagcctcaatgcccctttcccacccaaagatgatataaatatttacaatgtttttstaatacatttagagttttatttacacatataaatctttgttccatctagaatttacattgacactgaggttacactctaacttctttttccccaaatgat

SEQ ID NO: 178099 - DNA, 201 bp, Homo sapiens
gctttgcacagggtatagaaggcatttggttatttgtgtgaattgataaattggagatcactagtagtttttgttttttgttttttgttgtttttttttttgagacagagtttcactcttgttgcccaggctagagtgcagtggcacgatcttggctcactgcaacctccacctcctcggttcaagcgattctcctgcctc

SEQ ID NO: 178100 - DNA, 201 bp, Homo sapiens
cctcactctgtcgcccaggctggagtacagtgtgcagtggcatgattacagccagctcagtgcagcctcaacctcccaggctcaattgatcctcctgcctyagcccaccccaagtagttaggactacaggcatacgccaccacgcccagctagtttttttgtactttttgtagagatgagatctccctatgttgctcaggc

SEQ ID NO: 178101 - DNA, 201 bp, Homo sapiens
gacctcagccaggcagcttataccatatcaatatcaaaggttagttaaagaccagttcttagactcaacagacataaattcaggtggtctggctttctgtkaactctggcaggtccctaagttttaaaaataaacttatctccaaaatggaaatactaaccaaagtgccaaactctgagtgttgttttgaggctcaaatga

SEQ ID NO: 178102 - DNA, 201 bp, Homo sapiens
tacagccagctcagtgcagcctcaacctcccaggctcaattgatcctcctgcctcagcccaccccaagtagttaggactacaggcatacgccaccacgccyagctagtttttttgtactttttgtagagatgagatctccctatgttgctcaggctggtctcaaactcctgcgctcaagtgatccacccaccttggcttcc

SEQ ID NO: 178103 - DNA, 201 bp, Homo sapiens; identical to SEQ ID NO: 31827

SEQ ID NO: 178104 - DNA, 201 bp, Homo sapiens
agtgtgatatgaacttaaagggataggaattgggaaaggtattccaagccaaggaaaggccctggagcacattccaggagattgaatgtgtgctgaaagasaagtttggtttggtgtgagagaaaggggtatgaggtaggaaatcaacctagaaccctaggttagtagccaagcaaaatgatttgttgtgtattgtatagg

SEQ ID NO: 178105 - DNA, 201 bp, Homo sapiens
agtggctccttaggactggggaagctagggagttgggaggtgatagctaaggggcacaaggtttctttttgagatgatgaaactgttctagaaggtgatgratgattgtacaactctgtgcttgtctgggatgattagcagtattctgaactcttgcaccactttttgctgttgctcctcacatcactcttagcatttgct

SEQ ID NO: 178106 - DNA, 201 bp, Homo sapiens
aaaccagatacatatgtagtgtatctcgtttttcttctactttgaaggaatgtatgctaattatcaattttaaactttttttatgaagttaaaaaaatgtrtttgtttctctgtttctcacccctatctcaaacccccactccctaacggggagatatgattaatagcttggtaagtatttttccaattattttcttgtgc

SEQ ID NO: 178107 - DNA, 201 bp, Homo sapiens
ctgaacgtttaattattttctctgtaggccttttgctagtataaatgccagtgaacttacttgtccacatttatgaatctttgctcacatgggccagtacmtttgtgtgataattcttagaagactttctgggtcaaaggattgtaacaatggacattttaccaataatacagaatttgtagtgcttttttctttcttttt

SEQ ID NO: 178108 - DNA, 201 bp, Homo sapiens
tttaattattttctctgtaggccttttgctagtataaatgccagtgaacttacttgtccacatttatgaatctttgctcacatgggccagtacctttgtgkgataattcttagaagactttctgggtcaaaggattgtaacaatggacattttaccaataatacagaatttgtagtgcttttttctttctttttttgagat

SEQ ID NO: 178109 - DNA, 201 bp, Homo sapiens
caggttcaagtgattctcctgcctcaacctcccgagtagctgggattacaggtgcccaccactgtgcccagctaattttgcatttttagtagagagagggytttaccatattgcccaggctggtcttgaactcctgacctcaaatgatccccctgcctcagcctcccaaagtgctgggattacacgcatgagccaccgtgc

SEQ ID NO: 178110 - DNA, 201 bp, Homo sapiens
gaaggcagtgagctggcttgacccatagttggctggccccttgctacatataagcaaccagttagcaaatataacaggaagaaaaattctgtgtataatarcaacaaagagaaatacaacaatctagagataaattcagatacaaagagaatgatgattggatcttgttctctactgaagctcttgttcttatggaatagt

SEQ ID NO: 178111 - DNA, 201 bp, Homo sapiens
tcttattgtttatcattgtggtttggtggttttctgtagttgtaagtttttattctttttctaatttgtgttatctgttctaccagtgagttttatacttktgcatatttacgtgatagtgattattgtctttgtgtttttagatgtaggatgcctttgagcattttttttttttgaggcaaagtctcactctgtcaccca

SEQ ID NO: 178112 - DNA, 201 bp, Homo sapiens
ctgcctggacagccagacttcttgacatatcttgtgaaatctaggtggaagctgccaaacctccatggatcttgtattctgtatacctgcagacttaacaycacttggaaaccatcaaggcctatggtttgcacccactggagtggcagtccagacagtacctggggccttttgagccctggctgcagccagagcagccag

SEQ ID NO: 178113 - DNA, 201 bp, Homo sapiens
attttgtgtccctatccattataggcagtattattgatgctgggtatacagtattgaataaaacagaaaaagttgctgccctattccagtggggggaaaayggacagtaagacaaaaataatgtatcaggtggtggtaaattcaatggagagaaataaagcagaatgtgagaacagggacctaaaggaagaggaaacaggc

SEQ ID NO: 178114 - DNA, 201 bp, Homo sapiens
aaacagacctgaatagttacatgtgctaagtcatagatcaaaaaaagtggaataatttttcagcattattaatatctttttgaaggacagaaatttgaaayagggctgttagactacagaaaagcattattcatagatctgggacagcatgtttttgaacacgttaggcagatgttattttagttgtatgtagatccttta

SEQ ID NO: 178115 - DNA, 201 bp, Homo sapiens
tgagttctctgtggggactgtaaccccatatttccccttggcaccagcctagtagaatctctctgtaggagctctgctgtggcaggcttctgcctggacasccagacttcttgacatatcttgtgaaatctaggtggaagctgccaaacctccatggatcttgtattctgtatacctgcagacttaacaccacttggaaac

SEQ ID NO: 178116 - DNA, 201 bp, Homo sapiens
atatgtttggaggagctctgaagcaaaagcgtgggaaaagggacaagagtgagggaggaatgtctatctcactcttgcccctatgttttaccttcatggtsaagtttcaaattgtcatctagtaaggaaatgttttttagaaaatgatcatcaatgattttgcctttgagctgtcaacacttctgtgagcctaaatttaag

SEQ ID NO: 178117 - DNA, 201 bp, Homo sapiens
acgtacattttttacctttctggcaataccatacatttgccccatccaaggaccatttctgagcttgtgtgtgtgtgtgtgtgtgtgtgtgtgtgtgtgtgttaatctcttatatttcctagtacaccgttgtatacaaagacaatatataacatacttaatgaatatatataaaaatcatttattttaattctattttct

SEQ ID NO: 178118 - DNA, 201 bp, Homo sapiens
ttacgtacattttttacctttctggcaataccatacatttgccccatccaaggaccatttctgagcttgtgtgtgtgtgtgtgtgtgtgtgtgtgtgtgtgtgttaatctcttatatttcctagtacaccgttgtatacaaagacaatatataacatacttaatgaatatatataaaaatcatttattttaattctatttt

SEQ ID NO: 178119 - DNA, 201 bp, Homo sapiens
gcagctattaagaaactggcaactgaagctggagtagaagtcattgtaagaatttcacatacattatatgacctagacaagtgagtcctttttttttttttactgtgggaaaatgcgtataacataatatttaccatcttaaccatttttaagtatatagttcggtggtattaactacatagataagtttttaactgaggt

SEQ ID NO: 178120 - DNA, 201 bp, Homo sapiens
gttagcccatacctaccaggaagtttctcagccaaccagcaggttattggtatgaaacacctttggtcattgccctccggtaaatttctttacagggaaggttgtgtgttcctgtggcagcacgctccatccaatgagccatgaatctcagtggcttggtggagggagcttttgttaagttttttattcattccttgttta

SEQ ID NO: 178121 - DNA, 201 bp, Homo sapiens
gactaggattgcaacccctaagcagctttagttttaaagctgcttttatgtttttagatatctttatagcaacaccccattcctggtaccagttttttgtstttgtctgtccccatgactcagatacctcttgctaggctccatctgcagtattagagatcaagttttaacatgggatttgaaggggacaaatatgtaaac

SEQ ID NO: 178122 - DNA, 201 bp, Homo sapiens
atttattgctgtttttaggacaatattattatatcccaaaatatctaggagaatcaactgaaaaggtactattaataataagagaatccaggccgggcgckgtggctcacgcctgtaatcccagcactttgggaggccgaggcagggggatcaccaggtcaggagatcgagatcatcctggttagcacggtgaaaccctgt

SEQ ID NO: 178123 - DNA, 201 bp, Homo sapiens
tgttcagtttccatgtagttgtgtggttttgagtgagtttcttaatcctgaattcgaatttgattgcactgtggtctgagagactgtttgttatgatttcygttatttgcatttgctgaggagtgttttacttccaattattggtcaattttagaataagtgctatgtggtgtgagaagaatgtatattctgttgatttgg

SEQ ID NO: 178124 - DNA, 201 bp, Homo sapiens
ttcttttgtttggaataatttcagaaggaatggtaccagctcctctttgtacctctggtagaatttggctgtgaatccatctagtcctgggctttttttgsttggtaggctactaattactgcctcaatttcagaacttgttattggtgtattcagggatgtgacttcttcctggtttagtcttgggagagtgtatgtgtc

SEQ ID NO: 178125 - DNA, 201 bp, Homo sapiens
ggtgaaaccctgtctctactaaaaaaaaaaaaaaaattagccaggcatggtggcaggtgcctgtagtcccagctactcaggaggctgaggcaggagaatgstgtgaacccgggaggcagagcttgcagtgagccaaggtcgcgccactacactccagcctgggcgacagagtgagactccatctcaaaataaataaataaa

SEQ ID NO: 178126 - DNA, 201 bp, Homo sapiens
tgccctggccagaatttccaatactatgttgaataggagtggtgagagagggcatccttgttttgtgccagttttcaatgggaatgcttccagcttttgcscattcagtatgatattggctatgggtttgtcataaatagctcttattattctgagtaacgttccatcaatacctagtttattgagagtttttagcatgaa

SEQ ID NO: 178127 - DNA, 201 bp, Homo sapiens
tttagtttttgctttttttttaatactttaagttctgggatacatgtacagaacctgcaggtttgttacgtaggtatacatgtgccatggtggttttgctrcacccatcaacctgtcatctaggttttaagccccacatgcattaggtatttgtcctaatggtctccatccccttgcccctcaacccctggcaggccccgg

SEQ ID NO: 178128 - DNA, 201 bp, Homo sapiens
ggctgaggcaggagaatcgattgaacccaggaggcagaggttgcagtgaggcgagatcgtgccactgcactccagcctgggcaacagagccagactctgtmtcaaaaaaaaaaagaaaaagaaaaaaaagaaagaaggaaaatatttcaaggaagagtgttttacttacgtcagatgctaccgataggtcaagaggagaac

SEQ ID NO: 178129 - DNA, 201 bp, Homo sapiens
cctagtttatttcacttagcatagtgtctctacatgcattcacatcacaaatgacagaattttctgctttttaaaggtcgaatagtattccatcccggtcrtaatagaatatttctataattacagaaagttctctcataaccctttttgagtcaatccattcagggaacttaaaaaaaaataagtatactctcagtttct

SEQ ID NO: 178130 - DNA, 201 bp, Homo sapiens
gcgttgggacgcgggggcgtgtcttgggggggcgggggttggcggtcatctcccgagccctgattggccatgggcgaagggactgatggcctggttggcgstgctgagaactgtcgggagcttcttgagaccgaggaccgaaatcccggctccaggcctcggggactgcggactgtggggaggctggccggagagagaggg

SEQ ID NO: 178131 - DNA, 201 bp, Homo sapiens
tttctgggtcaaaggattgtaacaatggacattttaccaataatacagaatttgtagtgcttttttctttctttttttgagatggagtcttgctcttgtcrcccaggctagagtgcaatggcgcaatctcagcgcactacaacctctgcctcctgggttcaggtgattcttctgcctcagcttcctgagtagctgggatta

SEQ ID NO: 178132 - DNA, 201 bp, Homo sapiens
agagccctcctggcctcatcacatcttaaaggtcccacttctgaacgttgttgcattggggattaagtttctaacatgtgctttttgggggacacattcamactatagcaccacatatctcatagaattgtttgagtattaaatgagataaagaaaaatacttagcatactatattggggaaattatactcagtaaaatgt

SEQ ID NO: 178133 - DNA, 201 bp, Homo sapiens
ctctccccttctctctctttctctttctttccttccttcccctccctccctcccccttctttttctttctttctttcttcccttttctttcctttcctttycttttcttttccctccctcttcctttccttttcttttcttttccctccctcttcctttcctttcctttcctttcctttcctttcctttcctttcctttcc

SEQ ID NO: 178134 - DNA, 201 bp, Homo sapiens
aataggtttttctacaccttttcccttcttcttctgaaactcccataatagaaagttttgtttgcttaatgttgtctcataagtcttgtaggctttcttcrttctttttcattcttatttccttttctttctccaatgacaaatttcaaataacttaccttcatattcagagattctttctttttgatcaaagtgtgctgc

SEQ ID NO: 178135 - DNA, 201 bp, Homo sapiens
ttttctacactgatcacaccattttgcagcgccaccaacattacattagggttccagtttctccatatccttgccaacacattgccttttatttttttgayaatagctaataggtataaggtgatatctcattgtggttttgatttgcatttctctaatgatttgtgatgtgaacatcatttcatatacctgttggccatt

SEQ ID NO: 178136 - DNA, 201 bp, Homo sapiens
tactgttaaatctaggtattgaaattcaaaggtaactacgtgttgcttaaaataaaaacctgctctaacgagtagataagcctggacaacatgctgagacygcatctctacaaaaatttttaaaaattagctgggtatggtggcgcatgcctgtggtcctagctactcaggaggctgaggtgggagggatgatcacttgaa

SEQ ID NO: 178137 - DNA, 201 bp, Homo sapiens
aaaaattagacaagtatggtggtgcccactagtttcagtactcaggaggctgaggcagaagggccacttgagccagggaggttgaggctgcagtgagctgygatcatgctactgcactccagcctgggcaacagaacaagaccctgtttcagaaaaataaacaaaatctctattcatgtcccatttttggttatgatatca

SEQ ID NO: 178138 - DNA, 201 bp, Homo sapiens
ccctcccagaagcaacagctactaccagtttcttatgtatccaattccagtttcttgtttatccaattagaaatattctttgcataaacaagaattttttktgtgtgtatatatatatatttttgtgtgtgtgtgtgtatatatatatgtgtatacacacacacacatccatgtgtttgtgtctgtgttactatccccttt

SEQ ID NO: 178139 - DNA, 201 bp, Homo sapiens
ccagccacagcctacatacaccctctggtgaatttctgtgtaagcctatttataccctctgataagtttctatgccacctggtggacagcttctacagatmacctggttagcccatacctaccaggaagtttctcagccaaccagcaggttattggtatgaaacacctttggtcattgccctccggtaaatttctttacag

SEQ ID NO: 178140 - DNA, 201 bp, Homo sapiens
tttttcaaactttctggagtcttttagatgtctcttgtaaatagcatatattaacttttgtttatttagtctgatagtttttaattaattgaagcctttcrttagtctgtttacatttgttataattaccaaagtatttggatttattgtcatattattttgtgttttctttttgtccttcctgttctattttttaatatt

SEQ ID NO: 178141 - DNA, 201 bp, Homo sapiens
atagatctgtctttatttgaagctctgtcatttttactttatacaatttgaaatgctaaaattaaatatatgttctcctggtgaagtgaaggcttttgttyttatcattacgaggtgtggagaaatgtgtaaaatatgtatatatttagatgattattaacctggttaaagtcattatgaacgtgactttatagtatattt

SEQ ID NO: 178142 - DNA, 201 bp, Homo sapiens
aggcttgcaagttaataaatcataaattactcagaaaattccccttttaattttgccatgtaaagtattttgcattaggagagaaagaaagggcagggggrgaagaaaaagaaccctttaagaagtgatatgtttgttcatcatttatgtgttttataaatatgtgatctattgttaccaccttaagatgtacatcctgaa

SEQ ID NO: 178143 - DNA, 201 bp, Homo sapiens
ctttgggaggctgaggccaggagttcgagaccagcctggccatcgtggcaaaaccctgtctctattaatactgaaaatataaaaattaggtgagcatggtrgcgcatgcctgttatctcagccactcaggaggctgaggcacgagaatcgcatgaacctaggagacggaggttgcagtgagctgagatcgtgccactgcac

SEQ ID NO: 178144 - DNA, 201 bp, Homo sapiens
aaattagcttaatagattctttgtatgcatgcatacatgtgcacccagacacatctcttcactccattgatgacattttagagatggaaaatatcattacrtataatagatactgggtcaagttaaagctcttgcaaactgaggagagcaattttaaggataaaatgaaactcaaatgtcatattttcagaatgcttatta

SEQ ID NO: 178145 - DNA, 201 bp, Homo sapiens
agttctttcagatctcttgttcagttcacagcctgccttgtcagcccacacatgagtgagggacagaagctctgtgaagcactaagataacaggcaggtakcaatgggctaggaaccaagggttgggctaatacacaatgatggcacagactgcttcttagaccactcaaacctgtgtcgtttatttggaattatcttcaa

SEQ ID NO: 178146 - DNA, 201 bp, Homo sapiens
aggagagtctcaaatctaattacgttagattttttagaattctctatagtaaaaggctgctaatggtaaactctcccaagtttgtctgaagataccatccytatttacactgggtatagaattctaggttcttttatgaccttcttgattttctttttcttgtctttctctttaaaaatcatccttaccaagtaaccgtta

SEQ ID NO: 178147 - DNA, 201 bp, Homo sapiens
cattagggaaatgcaaattaaaacaactatgggatagtacttcatactcacttagggtgagcaactgccactgattgcctgggattgaagttaattaaaaygaaagtaagtgcacagtcttgttcaggccataaggtgttgacctatccacctgctcatggataggtccagaatgctcatatttttccataaactggacac

SEQ ID NO: 178148 - DNA, 201 bp, Homo sapiens
ggaagattgagatttagtcttaaaagcatataaatgaccttaagtacaagcgctaaaagttggatttgtagacttaataatacatacatcttggatttgaytttaagtaattttactgtgttttaaatactaacaggttgctctcaagggagtggtattttacactatgctcatggcgacagtcagcaaactcacctgttg

SEQ ID NO: 178149 - DNA, 201 bp, Homo sapiens
ggtaactacgtgttgcttaaaataaaaacctgctctaacgagtagataagcctggacaacatgctgagaccgcatctctacaaaaatttttaaaaattagytgggtatggtggcgcatgcctgtggtcctagctactcaggaggctgaggtgggagggatgatcacttgaacccaggaggttaatgctgcagtgagctata

SEQ ID NO: 178150 - DNA, 201 bp, Homo sapiens
gggaaaggggaagtaagaacttcacatggccagagcaggaggaagagagaaggagcggggaggtgccacactttaaaaaaaacaaaaaacaaaaaaaaaaacagatcttgcaagcactcactcactatcagagcaccaaggggaaatctgccaccatgatccaatcacctcccaccaggctccacttccaacattggcgat

SEQ ID NO: 178151 - DNA, 201 bp, Homo sapiens
ggccagtacctttgtgtgataattcttagaagactttctgggtcaaaggattgtaacaatggacattttaccaataatacagaatttgtagtgcttttttytttctttttttgagatggagtcttgctcttgtcgcccaggctagagtgcaatggcgcaatctcagcgcactacaacctctgcctcctgggttcaggtgat

SEQ ID NO: 178152 - DNA, 201 bp, Homo sapiens
atagaagtaattaacagtatcactccttcaaacacattttagaaattttgtagaggaattttcagttgtcataatgattgattttttttttttttttttttgaggcaagacctcactctgtcgcccaggctggagtacagtgtgcagtggcatgattacagccagctcagtgcagcctcaacctcccaggctcaattgatc

SEQ ID NO: 178153 - DNA, 201 bp, Homo sapiens
tatagaagtaattaacagtatcactccttcaaacacattttagaaattttgtagaggaattttcagttgtcataatgattgattttttttttttttttttttgaggcaagacctcactctgtcgcccaggctggagtacagtgtgcagtggcatgattacagccagctcagtgcagcctcaacctcccaggctcaattgat

SEQ ID NO: 178154 - DNA, 201 bp, Homo sapiens
aatttgaggctgcagtgagctatgatcatgccactgcacttcagcctgggcaacagagtgagactctttctctaaaataaataaataaataaataaataaaataatttctaaaaaacaaatttatattatgttccaacctctgctcaaaagctttcaatgagttcccaactcactcagagtaaaaacttaagtctctacca

SEQ ID NO: 178155 - DNA, 201 bp, Homo sapiens
gaatttgaggctgcagtgagctatgatcatgccactgcacttcagcctgggcaacagagtgagactctttctctaaaataaataaataaataaataaataaaataatttctaaaaaacaaatttatattatgttccaacctctgctcaaaagctttcaatgagttcccaactcactcagagtaaaaacttaagtctctacc

SEQ ID NO: 178156 - DNA, 201 bp, Homo sapiens
ggaatttgaggctgcagtgagctatgatcatgccactgcacttcagcctgggcaacagagtgagactctttctctaaaataaataaataaataaataaataaaataatttctaaaaaacaaatttatattatgttccaacctctgctcaaaagctttcaatgagttcccaactcactcagagtaaaaacttaagtctctac

SEQ ID NO: 178157 - DNA, 201 bp, Homo sapiens
aggaatttgaggctgcagtgagctatgatcatgccactgcacttcagcctgggcaacagagtgagactctttctctaaaataaataaataaataaataaataaaataatttctaaaaaacaaatttatattatgttccaacctctgctcaaaagctttcaatgagttcccaactcactcagagtaaaaacttaagtctcta

SEQ ID NO: 178158 - DNA, 201 bp, Homo sapiens
gcagaggttgcagtgagccgagattgtgccactgcactccagcctgggtgacagagcgagactctgtctcaaaaaaaaaaaaaaaactaaaaaaaaaaaaaggaaagaaagtattcatctctcataactgacactgtatacctgtcgattagcaacttcctgtttcccctttcctgtagcaccagatagccaccattctat

SEQ ID NO: 178159 - DNA, 201 bp, Homo sapiens
ttatatttttcatatatggagattttctttggttctttttcaaatctgccatttcttattccttgctttttttactttaaacatgttgattaaattatatkggctctgccttcaaaatgtatccaagttcggaccatctcatgcttccacattaactaccgaataatttcccttcagattctctggttctctccttcttcc

SEQ ID NO: 178160 - DNA, 201 bp, Homo sapiens
atctcagagtaaaaggcagagcccttaccatagtctacaagatgtcatgtgaactggaacttgataactttctaacctaataatctcttgccactctttcrctctctgtgctgtggccatactggttttttgagtattctttttaaagtgccatgcatgttcttcacctgtgttgtacatctgctgttccctctgcacaaa

SEQ ID NO: 178161 - DNA, 201 bp, Homo sapiens
aattttttgtgtgtgtatatatatatatttttgtgtgtgtgtgtgtatatatatatgtgtatacacacacacacatccatgtgtttgtgtctgtgttactrtcccctttgttaaaagttaaaatgacacactatacacaccattctctgccatgctttgttcacataaccatatcttttggaagttgttccatatcatttc

SEQ ID NO: 178162 - DNA, 201 bp, Homo sapiens
attacaattggtgtacattgttcccctttctcttactttaggaatggaacattactaaactttcaattgagtatgattctgagccctttggaaaggaacgrgacgcagctattaagaaactggcaactgaagctggagtagaagtcattgtaagaatttcacatacattatatgacctagacaagtgagtccttttttttt

SEQ ID NO: 178163 - DNA, 201 bp, Homo sapiens
tttaactcaagaaaatacccaaatgttgattgaaagaatgagtgaatgaaagtgcttcagatacaattttctgcattttattggtcactaatattttaccrtaaaaaggacataaaagcagtaggactataagaatatttaaaaattaatacaggcctaaatgtaactttttacctaaataagataatgtgactcacagga

SEQ ID NO: 178164 - DNA, 201 bp, Homo sapiens
tgaatgaaagtgcttcagatacaattttctgcattttattggtcactaatattttaccataaaaaggacataaaagcagtaggactataagaatatttaawaattaatacaggcctaaatgtaactttttacctaaataagataatgtgactcacaggattagttaagaatagttctgttgtttctgtttgtttgtttgtt

SEQ ID NO: 178165 - DNA, 201 bp, Homo sapiens
atccttatttacactgggtatagaattctaggttcttttatgaccttcttgattttctttttcttgtctttctctttaaaaatcatccttaccaagtaacygttagaaaaacctcgtgcaaacttgggatagttgtttacaatttatatcataggtcagaaaaatcagaataattttcagcatttttgaataatttttttg

SEQ ID NO: 178166 - DNA, 201 bp, Homo sapiens
ccatcatttttaaaatgagataccttgtaaaattgttgggaatataatatatgtaaagtatccagcacaatagacattcagagaatattctttcccattcwtgttccttcttcattgactgttgaatcaagcctttaaaatccctttcttctgctttcattaatttatttagtcattagatagatatttattgaactcctg

SEQ ID NO: 178167 - DNA, 201 bp, Homo sapiens
tgagcaactgccactgattgcctgggattgaagttaattaaaacgaaagtaagtgcacagtcttgttcaggccataaggtgttgacctatccacctgctcrtggataggtccagaatgctcatatttttccataaactggacacactgacagaaatgtttccctaaaacatacttctctgttctagccaacctattctcct

SEQ ID NO: 178168 - DNA, 201 bp, Homo sapiens
tatttctttttttaattatttctatttttatttttattttttgagagagagtcttgctctgttgcccaggctggagtgcagtagtgctgtcttggctcacygcaacatttgccttccaggctcaagccattcttgtgcctcagccacccacgtagctgagattataggcatgcaccaccacaccttgctaatttttgtatt

SEQ ID NO: 178169 - DNA, 201 bp, Homo sapiens
cttggatgtctcataggcacttcaaactaaatacatgttaaactgggcatttctacttctggaagtggctgatttggttgtcctagaccaaacaccaggtrtgtatactaaaaatacataggaaagctgagaaaatattttttaaaaatctctttgaagccatcagagagttacacagataataagaatttggctggacac

SEQ ID NO: 178170 - DNA, 201 bp, Homo sapiens
atatcagaaaaccagcatatatagctcctccatttgcttttgtaaacatgttgaacatacttcatttagttccatattaatcctgtaaagcctagaagtakattttatacatgatttttggcctgtagtgttatgttgcagcagcttctaaaaatacacatggaatagtaaaagtcctatatttcaaatactgttatgtga

SEQ ID NO: 178171 - DNA, 201 bp, Homo sapiens
tctgtgtcttctgcttgtcgtatgatttgaattgtttaactcatcgggcaggcccttattcccttatcctcaaggaaatatgtttggaggagctctgaagsaaaagcgtgggaaaagggacaagagtgagggaggaatgtctatctcactcttgcccctatgttttaccttcatggtcaagtttcaaattgtcatctagta

SEQ ID NO: 178172 - DNA, 201 bp, Homo sapiens
tgcttcttaatcactcctcttcacaagtaagagataattgctattctgaaagaccatgtggcctgtgaaaaaggcagacaaatacttaaccttgagatcaraaacataaaagaagcaaaataggaaataagatacgtccagctgaaaagaacagaatctaaatgaaacttaacatgagtcaaataataagattggaccttc

SEQ ID NO: 178173 - DNA, 201 bp, Homo sapiens
gtctatctcactcttgcccctatgttttaccttcatggtcaagtttcaaattgtcatctagtaaggaaatgttttttagaaaatgatcatcaatgattttkcctttgagctgtcaacacttctgtgagcctaaatttaagttttcctggtttgagcatgtgatttttggttcataggaagattgagatttagtcttaaaag

SEQ ID NO: 178174 - DNA, 201 bp, Homo sapiens
tagagaagagtaaaatgtgggatagtaaatgtcaaggtgagggaaagttactttatatggaatcaaagaaggcctcactgataaggtgacatttgagcaarcatatgaagagtgagccatgcatctgggttgtggtatatcatatccacaatattttgcagctctttccgtcaaaaggtagagtttatttccttaccccat

SEQ ID NO: 178175 - DNA, 201 bp, Homo sapiens
tgcttgatagaatgtattcaacagatactgattgagtgcctgctatatacaaggctgtgtctgaggtactggagatacagtagtgaaacaaaaaatttctrtcttcatggtgcttacactgtagtggaaggagacagatagtaaacaaataagtaaacatgcaatgtcaggtggtgatatgtgctgtagagaagagtaaaa

SEQ ID NO: 178176 - DNA, 201 bp, Homo sapiens
caaaatgatctagaccaagcagctttttagaacaatctgtccagtagaactttctgcaatgatggaaatgttctgtagctatactgttcagtatggtagcyagccaccagctatacatgtggctgttgaggacttgaaatgtggcaagtgtgactaaggaactgatttttaaatttaactaacttaaatttaaatggctac

SEQ ID NO: 178177 - DNA, 201 bp, Homo sapiens
atcaggaatgtaggtccaaggatacaaagtagaagttatgtaagatgaacaacactagaggtctagtgtacagagtaaggattttagttaataaaattgtmttttatttggaattttaatcaaataagtagattttagctgcttttgtcacacacatacaaaaaagtaactgagattataaatatgttaatctgcttcact

SEQ ID NO: 178178 - DNA, 201 bp, Homo sapiens
tgggatgtctttaacatcctcataaaaatatagcaccttgactcttcaagctgtacagatggtgctcctaaagaggaagaagtgtcagacctgactagtgyacttatgtcactaataactacagttgtaaaaaatcaacaagacttatttggtgaaatgatggtatcggaatgtgtaaagcgaacaaaatgatctagacca

SEQ ID NO: 178179 - DNA, 201 bp, Homo sapiens
gtgccactgtactccagcctgggtggacagatcaagacctcatctgagctgggtgtggtggctcattgcctgtaatcccagcactttgtggggttgaggcrggaggatcacttaaagccaggagtttgagaccagccctggagacttagcaagaccccatctctatttttaaaaaatcaatataaaaataaaaaaaaagta

SEQ ID NO: 178180 - DNA, 201 bp, Homo sapiens
tttgttgtgtcttgttttgtgacctaacgtgtggtctgtccacaagaacgtttcatatgccaatgaaaagaatgtgtattctacaactgtggaacgaagtrttctaaatgtctgttgggtccatttggtcttgagtgcagtttaagtccagtgtttctttgttgattttcttctgcctagatgatcttctcaatgctgaga

SEQ ID NO: 178181 - DNA, 201 bp, Homo sapiens
tttgagaaacacaactgactcttcatatgtctagaactttaactgattggaataggaattggacttattagaaagcagtagcctattttatttttgtcaarctgaaattagccatgtccatcagtcagcatggcctctgtatgctttgcacagggtatagaaggcatttggttatttgtgtgaattgataaattggagatc

SEQ ID NO: 178182 - DNA, 201 bp, Homo sapiens
gctttgtttttgcttgtctggttccttgtaatgcattgttagattgtttatttgaaatcttcctacttttctgacataggtgtttgtattagtctgttctyataccgctgtgaagaaatacctgagactgggtaatttataaagaaaagaggtttaattgactcacagttctgcagggctggggaggccttaagaaacctt

SEQ ID NO: 178183 - DNA, 201 bp, Homo sapiens
gtgatgaaaataagttcagctggcatgaacgtgtttgagaaacacaactgactcttcatatgtctagaactttaactgattggaataggaattggacttaytagaaagcagtagcctattttatttttgtcaaactgaaattagccatgtccatcagtcagcatggcctctgtatgctttgcacagggtatagaaggcatt

SEQ ID NO: 178184 - DNA, 201 bp, Homo sapiens
aatgtcattgacttctccctctgcattcgtgaatatgcttctttattgctgtttgacatcaaattggtaaacacggaaatccattgaatctattaatatamttctctcagatttcaaaggaggtcaatgaaatcatggtaaaaatgccataccagtgtttcataaatggacagttcacagatgcagacgatggaaagactt

SEQ ID NO: 178185 - DNA, 201 bp, Homo sapiens
taaacaaaacaaattaagccatatttcaaatgaataacatgaccccattgaagagaatgaggaagcatgaacccaagtcacttttgactaactttggactrtatgtcctcaggataaaggcaacgcaaaacaacaacaacaacaaaaaaacccaaatacatattgaactctaattaataggcttctttttcatagggacat

SEQ ID NO: 178186 - DNA, 201 bp, Homo sapiens
ggacagttcacagatgcagacgatggaaagacttacgacactatcaacccaacagatggatctgtgagtaattctttagtgtgagtagtgatcactggtcrtggatttttagttaatacaccattgtaaaagaggcagtcttaagaagcccttttattctctcactctgcctctaagtacttcacacaaatgtacttcatg

SEQ ID NO: 178187 - DNA, 201 bp, Homo sapiens
aaacaccaagacagcgtttaaaacaaacaaacaaacaaacaaaaacagagagacctcagaggagggcttggggagggtcccggatgggaactggcacgcargccattgtcttctgccgggagggggctgaggatgcagtttttggacgtgtcaagtctggctgggatggcaaggtgggaacagtcacttggtaaggaggac

SEQ ID NO: 178188 - DNA, 201 bp, Homo sapiens
ttttggacgtgtcaagtctggctgggatggcaaggtgggaacagtcacttggtaaggaggacagagtctgcttcctttcctttttcacttcaatcatgagmtccctggtcaagagctggagccatatgggaccgagactgtctcctggaggaggggagtatcaagtcaatagggtcctcgttggcggcctgggaggtgtaa

SEQ ID NO: 178189 - DNA, 201 bp, Homo sapiens
gcaaggtgggaacagtcacttggtaaggaggacagagtctgcttcctttcctttttcacttcaatcatgagatccctggtcaagagctggagccatatggraccgagactgtctcctggaggaggggagtatcaagtcaatagggtcctcgttggcggcctgggaggtgtaagcgctcgagactggcacgcagggccggtt

SEQ ID NO: 178190 - DNA, 201 bp, Homo sapiens
gcgctcgagactggcacgcagggccggttcagataatggcactcaaagctgatggctgcaagctcagtattcctgagctgagctgcagatggcaaaatttytagaattgccaggcgctgcagaggcagccacgctggaacactattctactgtagcacaagaaccgagctctggcccagccccgcgccttggaattgcatc

SEQ ID NO: 178191 - DNA, 201 bp, Homo sapiens
ccatgtctctctttcttggagaagagaatgacaaatgtaaaaagggcagaaggatagaatcgaccctaagatatcggataaaggtatcagtgtaaactcaygggttttaatgtatttagatagctaaataaagaaatggatataggtatatgagggatagatacacacatacatgtagatgtgtgtgtgtgtgttgtgtat

SEQ ID NO: 178192 - DNA, 201 bp, Homo sapiens
aggcttctttttcatagggacatggcttaacaattctcaaattactttctctatgttttaggattaagcaaataagtaaatgtattgtggataatgggagscatgtctctctttcttggagaagagaatgacaaatgtaaaaagggcagaaggatagaatcgaccctaagatatcggataaaggtatcagtgtaaactcat

SEQ ID NO: 178193 - DNA, 201 bp, Homo sapiens
atattgaactctaattaataggcttctttttcatagggacatggcttaacaattctcaaattactttctctatgttttaggattaagcaaataagtaaatrtattgtggataatgggagccatgtctctctttcttggagaagagaatgacaaatgtaaaaagggcagaaggatagaatcgaccctaagatatcggataaa

SEQ ID NO: 178194 - DNA, 201 bp, Homo sapiens
gcatgaacccaagtcacttttgactaactttggactatatgtcctcaggataaaggcaacgcaaaacaacaacaacaacaaaaaaacccaaatacatattraactctaattaataggcttctttttcatagggacatggcttaacaattctcaaattactttctctatgttttaggattaagcaaataagtaaatgtattg

SEQ ID NO: 178195 - DNA, 201 bp, Homo sapiens
tgctgatttgaataaaaggaaacaggaaagataaactagagactaatgaaattatctatagaacatgggatgaatggggtggaaaggagggtgggagaacracattctctgaatggatgttttgaatagtcctgacttttggaagcatagtccccatatttaatgacagcaaagaaaagaaatataatcaacaaagatggg

SEQ ID NO: 178196 - DNA, 201 bp, Homo sapiens
ctcgatctcctgaccttgtgatctgcttgcctcagcctcccaaagtgcggggattacaggcgtaagccaccgcgcccggccttgagtatgttttaattccygttttattccctaattctacaggtggcatagcaggacaacgtctgtctgaacatcctgacatccgcaaacttggtttcactggatccactcctattggca

SEQ ID NO: 178197 - DNA, 201 bp, Homo sapiens
gaatccctcagttaaaagatacatgtatttgtgtgatagatattgacaaatccatccatgggggtcatattagctcaccagcattatacaagagtactgtytcccactcttgtttaataggtgcacaacccattaaacagcaagaagctagttgagtgaagtgaggagacaggtaatctagcccagtagagctccacactg

SEQ ID NO: 178198 - DNA, 201 bp, Homo sapiens
tcatcaagtaattacttgaaatgatgaaatgatcatcttcactgtccatcttccccattcaactctaagcttcttaaggaaagggactttgcacaacattygtattgctattttccagtgtcagaaacagtggctggtacattgtaggtacctaataccatagggacacaatactgtgggttgaggtgggccttcctaccc

SEQ ID NO: 178199 - DNA, 201 bp, Homo sapiens
ttaacgtgagcggaggaggctgcagtgagctgagatcaagccactgcactccaacttgggcaacagactgagactctgtctcaaacaaaacaaaacaaaayaaaacaaagaaggggagacaactggataatatgtgtctcctgatggaataaaacgtgtaatacacagtatcacctatgaagtgttcctgccaaaaaagct

SEQ ID NO: 178200 - DNA, 201 bp, Homo sapiens
caaaatttgtttctaatggtacatctttattgttacacatacatttttttaaaaaaatgctcagggaccaaaagggggaaaggataaacaaaatctctcamatcatgctaaatcaaaacagagtatctccaagaagctctcatcactaacaaggccaagaggattgtctgtgacttatctatattgcctgctgtcttccaa

SEQ ID NO: 178201 - DNA, 201 bp, Homo sapiens
gctgggattacaggcacctgccaccatgcccagctaatttttgtatttttagtggagatggggtttcactgtgttggccacactggtcttgaactcctgascttgtgatctgcccgcctcagcctcccaaagttctgggattacaagcgtgatccaccacgcccagcctagattttcttttaacacaaaatttgtttctaa

SEQ ID NO: 178202 - DNA, 201 bp, Homo sapiens
aaagaaacttgggctccttggagaagtagctggagtagggaagaatcaagatgaatctgaaatatcttgttgggcctgaaagcaatgtaatgctcaaagagtaataggggcacgtcagaatgataaggggccgtactgaagggactgcctcagccaaatctagaacaattgaacatcaaaatcaataacaatagtaaacga

SEQ ID NO: 178203 - DNA, 201 bp, Homo sapiens
ttctaggccaaggcaggaggattgcttaagcccaggtgttgagtccagcctgggcaacatagtgagaccctgtctctacaataaataaaaatagaaaaaawtagctgggtaaggtggtgcacacctgtagtgccagctacttgggaggctagagagagtgggactctatctctaaaaaataaatttaagaagagaataatc

SEQ ID NO: 178204 - DNA, 201 bp, Homo sapiens
tgcactccagcctgggcgacagagagaaacactgtcttaaataaataaataaatacaaataaaaaattttaaaaattgtgattatacaatctaatgtagakatttttaaaagcaaaacttggtatacaagttattacatttaaatgtatagaataatctagattttctaggccaaggcaggaggattgcttaagcccaggt

SEQ ID NO: 178205 - DNA, 201 bp, Homo sapiens
gtggccccagctactagggagactgagatggaggatcacttcagcccaggaagttgaggctgcagtgagccatgatcacgccactgcactccagcctgggygacagagagaaacactgtcttaaataaataaataaatacaaataaaaaattttaaaaattgtgattatacaatctaatgtagagatttttaaaagcaaaa

SEQ ID NO: 178206 - DNA, 201 bp, Homo sapiens
tgtctgaacatcctgacatccgcaaacttggtttcactggatccactcctattggcaaacagatcatgaagaggtattggttttaaaatgttgattcactrcagatcctgttaaactaggtttcaatttttgtttaaacagggtactttttgagtgagaaaaactacatcaactttggaagggaaatctacttatcactgc

SEQ ID NO: 178207 - DNA, 201 bp, Homo sapiens
cccaaacccaagacagtcaacatatttttgtaatgtttaaagataaaatgtatgcacaggaaaagcatggtatttcaaagcattcattatactttgttttygagatgggatctcactatgttgcccaggcaggtcttaaactcctgggctaaagtgatcctcctgccttggcctcctaaatgggtggaataacaggtgtga

SEQ ID NO: 178208 - DNA, 201 bp, Homo sapiens
agtatgttttaattcccgttttattccctaattctacaggtggcatagcaggacaacgtctgtctgaacatcctgacatccgcaaacttggtttcactggwtccactcctattggcaaacagatcatgaagaggtattggttttaaaatgttgattcactgcagatcctgttaaactaggtttcaatttttgtttaaacag

SEQ ID NO: 178209 - DNA, 201 bp, Homo sapiens
ttagggcttctagcttctccctcctttccctacaacatctcatcccatcaacctgaacagtcctacttttacctgttttgcacattgagcttctggtaagygttttagacacaacaaagggtttcatatttaacaagtaattagcaacatcaatttcctggttttaacaatgtactatggttttataagatgttatcatgg

SEQ ID NO: 178210 - DNA, 201 bp, Homo sapiens
cgggaggctgaggcaggagaatctcttgaacccaggaggcggaggttgcagtgagctgagatcacgccactgcactccagcctgggcgacagagtgagacyccgtctcaaaaaaaaaaaagaaaaaaaaataggtgcttgcttctaaaacacatttcacctccttttttatcagagatcttaaatgagatttgggttttgt

SEQ ID NO: 178211 - DNA, 201 bp, Homo sapiens
gggaggccaagacgggtggatcacttgagatcaggagttcaagacgagcctgaccaacatggtgaaaccccgtctctagtaaaaatgcaaaaacattagccgtgcgtggtggtgggcacctgtagtcccagctacccgggaggctgaggcaggagaatctcttgaacccaggaggcggaggttgcagtgagctgagatcac

SEQ ID NO: 178212 - DNA, 201 bp, Homo sapiens
atgggccccacagatctgcataggctgccttgtgtaaagtggaaagaggctggaattcagtggggagataaggatgtgaatccctgcttcccactcgctgrtcttgggcaggatgattcttccctttgagtctgttttgccatctttataacagagaggagaatcttgtctgtctgccttcccaatgccagattctgggag

SEQ ID NO: 178213 - DNA, 201 bp, Homo sapiens
tttttgcatctttttgtaagtctgaaattatggcaaaaaaataagacaatgtacaataaaaataaaatgagatctagtgcagctatcaagggaaaactggkttctgggctaaaggtcaggttagggcctgaagaaggtaattgctgtttgcttctcctcaggtcacgcccttgactgctttgaagtttgcagaactgtctg

SEQ ID NO: 178214 - DNA, 201 bp, Homo sapiens
gtgagaaagaagggaaaataagaaaatatgtatttgctgatttgaataaaaggaaacaggaaagataaactagagactaatgaaattatctatagaacatrggatgaatggggtggaaaggagggtgggagaacaacattctctgaatggatgttttgaatagtcctgacttttggaagcatagtccccatatttaatgac

SEQ ID NO: 178215 - DNA, 201 bp, Homo sapiens
ttatgaaattaggtaagatccttcagcacatgcatgcattcttttttttagtatatgtgctgctgaagcaagcacttatgcatgcattcttgagcatggtrcagggcaagtgctcagaggcagcagctgcagagttgcagcagcactggtggtgtctgttattttcataatagattctaattcaaatacctacgtccaagt

SEQ ID NO: 178216 - DNA, 201 bp, Homo sapiens
ctttttaataccttgcattgatatattacctcagtttttcctcacagtaactgcatgaaggcagtatcattatccccattgcattgttgaaaaaaactgakcctcatcaaagttcattgactaacctcaatttgcttgccagccactggcagagagtacaatttacgcaacacatgtgtaacagacaaaaagtgaaaacag

SEQ ID NO: 178217 - DNA, 201 bp, Homo sapiens
ttgtgaagagctccagacccatttcatccccaccagaggctactaggctgctggttttcacagctaccatacttgcaatgaagttggcttttcaaggctaytgcagagcttttgagaaagatgggaataaggcagttaatacaccataaagctcacttttcttactgtgattcagctattcttcttgaaatggattattgc

SEQ ID NO: 178218 - DNA, 201 bp, Homo sapiens
cagttctttgggatgaggcttgtgaagagctccagacccatttcatccccaccagaggctactaggctgctggttttcacagctaccatacttgcaatgawgttggcttttcaaggctattgcagagcttttgagaaagatgggaataaggcagttaatacaccataaagctcacttttcttactgtgattcagctattct

SEQ ID NO: 178219 - DNA, 201 bp, Homo sapiens
gcacaagccctgcttgtatattggtcttctggattcccaggaatatgtcagagcttttcaatgcctcttatggatatctcattcccagttattcctcttgktttttggtcagccattttttagtggctgtgggcagctgcaatattaaataattgccactgattatttttgacaaatgtcccaggaatagggctgtttgtg

SEQ ID NO: 178220 - DNA, 201 bp, Homo sapiens
tctgaggctctgttcatttttctttattcttattccttcctgttgttcaggcttttttcaccttcttgaatttgctattgggtccctccagtgattttttwatttcagttattgcacttttcaacttaagcatttttatttggttctttttaaaataatttttatctcttcattgatattctctgtttggcaagacattat

SEQ ID NO: 178221 - DNA, 201 bp, Homo sapiens
aaaactgtttggcagttttatatgtagttaaacataaacctatcatatgaccccggaatcacactcctaggtatttactcaaaagaaatgaaaccttattygcccgcatagaaacctgtttattgatgtttctagaggttttattcataattgccaaaaactggaaataaattgtcctcagctggtgacaggataaacaag

SEQ ID NO: 178222 - DNA, 201 bp, Homo sapiens
attgtcctcagctggtgacaggataaacaagctgtggtatatccatccatacaatggaattctactcagttgggggaaaaaggaatgaactactgatgcayacaacatggatggaactcaaatatgtatgctaagtgtaagaatcagactcataatgctacatattttatgatttcatttatctgacattttggaagagta

SEQ ID NO: 178223 - DNA, 201 bp, Homo sapiens
ttatgatttcatttatctgacattttggaagagtaaaactatagggacagaaaaaagatcagtgatgtctggagctggagataggaggaaggattgattayaaataggcataaaggaatttgggcggtaatggaactgttctacatcttgattatggtagtggttacgtgactgtgtgtttgttaaaactcacagcacagt

SEQ ID NO: 178224 - DNA, 201 bp, Homo sapiens
ccactgtattgtttatggaataatgacaagaaaaattatacatgtctagtacagatgcaattttttccaaatgttttcgattcatggttggttgaatccayggatacagaacccacaaatacagagggcgactgtgtactcctttaatcctcatgatatctcaatgaagtaggtactaggttaagcatcccaaatctgaac

SEQ ID NO: 178225 - DNA, 201 bp, Homo sapiens
ttctgtggtcaccagcctcggcccaggagctctctccagcctctgagtcctgggcatccccctctggcatcacctgctcataggcccctgtactgacatcyctccttttaaaatattttatcctttttatgatgaaaaaacaaaagttggccagacatccaagaaagccctcactgatatcttctttatataatgaggcaa

SEQ ID NO: 178226 - DNA, 201 bp, Homo sapiens
tatcctttttatgatgaaaaaacaaaagttggccagacatccaagaaagccctcactgatatcttctttatataatgaggcaataggaacatcaagttgcrcaagcttgccatttaggatggtatcctgaatcttgcagatctacctctatgtaaagtgtacttgttgcttctgttagtatgagagtttgttacaattggt

SEQ ID NO: 178227 - DNA, 201 bp, Homo sapiens
gcatcttgggatgactgggtcaagaattctcaggtccttaccaatgctggacttccatctcatggtccaaggtagctgcctcagcccctactatcacagckccattccagcaagcaggaaggaaaagagtgggaatcagggaaaagctttttattaagggcataatccatattactcccacttgtatcccattggccagaa

SEQ ID NO: 178228 - DNA, 201 bp, Homo sapiens
atgagatctagtgcagctatcaagggaaaactgggttctgggctaaaggtcaggttagggcctgaagaaggtaattgctgtttgcttctcctcaggtcacrcccttgactgctttgaagtttgcagaactgtctgtgaaagcaggctttccaaagggggtcatcaacatcattccaggctcaggtaagccactaaatgacc

SEQ ID NO: 178229 - DNA, 201 bp, Homo sapiens
ctaggtgatcaagacaagaaactaggcatgcttgaacagttgtgaggtcctgattggttactactgttgcatgaactcccctgagatctagacatacagcrtgaaccaggacagcatttaccaagaatagcctatggagtactagctccattgactgttactaggtattgagcaaacaaaggttttatggtcagtaagttt

SEQ ID NO: 178230 - DNA, 201 bp, Homo sapiens
gctcctcaaattatagatttctcagctgtgattcatgagttcccagaaacttctaattggcttaactaaatatttcaatactacattatgatgattattaktacagatagggcctcactctgtcgcctaggctggagtgcagtggtgtgatcacagctcacttgcactagcagccttgcactcctgggatagccatccttt

SEQ ID NO: 178231 - DNA, 201 bp, Homo sapiens
tatatatgcttccaataccctctgcttctcctttgtaattcttgaaacaaatgatttatgaaaatatttgtttaatgtctttcttgcctactggaccatgrtctctataagggcagagatctgatccatatgtgtttacctctgaattctccgtccttaggatactgcattatatgtgacaggagctcaatcaatacttgt

SEQ ID NO: 178232 - DNA, 201 bp, Homo sapiens
cttttaaaaatttgtccttccagtttcttagctaattttcctccaatatgacatcagaattgagaagctctgggtgagaatgctaacagtgaatttcctaygcagcctgatccagaatattatctgaataatatctgacacctgatattaataatattaccagaataatatctgatacctgatattaattatgctttcccc

SEQ ID NO: 178233 - DNA, 201 bp, Homo sapiens
ttttactttaaggctggttgaagagatcagacagaaatgtggtgggcttcagttgcagaatgaagatgtctatatggccaccaagtttgaaggctttatcyaaaaggtcgtgaggaaactgagaggagaagatcaagaggtggagctggttgtagattatgtaagcttttccttgatgttgcaaccctaaatcagtgagat

SEQ ID NO: 178234 - DNA, 201 bp, Homo sapiens
gtacagctgagtgtacaagatgaagagggaattggtttggtgaagagctagcccagtctctgccacattgttctacgtggcacttccctcataagagtttyctttttgtgtaggtcatctgggctggaattttaagcaatgtccccattattgaagactcaacagacttctttaaatctggagcaagctcaatggatgttg

SEQ ID NO: 178235 - DNA, 201 bp, Homo sapiens
tgggtaaaaaaccaaaaagatacataaatgtgaaatttatatattttatatgacaaacctggattatttataaatggagtccgccaaagcaatttttttttaagctgtaagcaatctaaatgtccaaaataaagcagttgttaaaatatgtcaatgtaatggaacactgtgcagtcatgttcatagagaattttaataaca

SEQ ID NO: 178236 - DNA, 201 bp, Homo sapiens
gatcagaactttatttcctctttttttgtattagctgcaagaggaaatcaacctccaaattcatatgcttaaacacagtatatacaaactgatttttcacrtaagtcatccaaggcagttccaggttggcacgggggttaggggtgaagtcattcaggaacccagtttctgttattttcaaggtctccctggggggcgtct

SEQ ID NO: 178237 - DNA, 201 bp, Homo sapiens
caaagaaacttgggctccttggagaagtagctggagtagggaagaatcaagatgaatctgaaatatcttgttgggcctgaaagcaatgtaatgctcaaagagtaataggggcacgtcagaatgataaggggccgtactgaagggactgcctcagccaaatctagaacaattgaacatcaaaatcaataacaatagtaaacg

SEQ ID NO: 178238 - DNA, 201 bp, Homo sapiens
tttgtatgatgagttccttctctcttgctgcttttgagattttctctttgtcttttgataatttgttatgatgtgtctaggtgtggagcctttgaattttyccattagaatttgttgagcttcttggattgtgcattcttgaaatgtgcaaattaatgtttttcatcaaatttaggaaattttcagctattctttcttcaa

SEQ ID NO: 178239 - DNA, 201 bp, Homo sapiens
ttgagatgtacctatccctggacctcactttttcctttctgctgccattattcaagtgccatttcagcccttttacacataatggtgaatgcttttaatcygtatttttccaaataaacttgcccttatatgcatataatctataggactcctcccaccagcctcacttttgtattgtctcaatcctcaatttttatgctt

SEQ ID NO: 178240 - DNA, 201 bp, Homo sapiens
taaactcatgggttttaatgtatttagatagctaaataaagaaatggatataggtatatgagggatagatacacacatacatgtagatgtgtgtgtgtgtkttgtgtatacatacatctctttcccagctctgtctgctaagagggcctagaagcgatgacccctcaataatgtccagatatcttggtttctaaaatacca

SEQ ID NO: 178241 - DNA, 201 bp, Homo sapiens
ttgccttctggccttcatggtttctgataagtcaactggtaattttattaaggactcttttgtatgatgagttccttctctcttgctgcttttgagatttyctctttgtcttttgataatttgttatgatgtgtctaggtgtggagcctttgaattttcccattagaatttgttgagcttcttggattgtgcattcttgaa

SEQ ID NO: 178242 - DNA, 201 bp, Homo sapiens
aaaggtatcagtgtaaactcatgggttttaatgtatttagatagctaaataaagaaatggatataggtatatgagggatagatacacacatacatgtagaygtgtgtgtgtgtgttgtgtatacatacatctctttcccagctctgtctgctaagagggcctagaagcgatgacccctcaataatgtccagatatcttggt

SEQ ID NO: 178243 - DNA, 201 bp, Homo sapiens
ccttcatttctgaaggatatttttgttgggtatagaatttttggacggtatttttcttttatcattttaagtatttcatcgtattgccttctggccttcayggtttctgataagtcaactggtaattttattaaggactcttttgtatgatgagttccttctctcttgctgcttttgagattttctctttgtcttttgata

SEQ ID NO: 178244 - DNA, 201 bp, Homo sapiens
tcaatggatcctcttgcacaccccatttttagagtccaagctaaccaaatactgacttaagactgaatggacgttggtttttaagagtgtgaaggtattgctttcattttgctttggagatttgcattgctataatagatgtttaaggtgagatccatattatgccactttttatgtgagaaagaagggaaaataagaaaa

SEQ ID NO: 178245 - DNA, 201 bp, Homo sapiens
tctccttcatttctgaaggatatttttgttgggtatagaatttttggacggtatttttcttttatcattttaagtatttcatcgtattgccttctggcctycatggtttctgataagtcaactggtaattttattaaggactcttttgtatgatgagttccttctctcttgctgcttttgagattttctctttgtcttttg

SEQ ID NO: 178246 - DNA, 201 bp, Homo sapiens
tggctctatctgcagtttaaaactggcagttttatagttgaagataatttaaatcctgagaatgaaagacccaaaggtgccattgttatgctggacttttwaattttattggataatattatgcagtgatgcatttataatattagggctctgtgtgaaagtcaagaggactgaattgagatgactcctcttaaacctgtt

SEQ ID NO: 178247 - DNA, 201 bp, Homo sapiens
atattgctaattaatgggcataaagtttcaattactggccaggcaaggtggctcacacctataatcccagcactttgggaggccaaggcgggtggatcacytgaggtcaggagttcaagaccagcctggccaacatggtgaaaccccatctctactaaaaatacaaaaaattagctgggcatggtggcggatgcctgtaat

SEQ ID NO: 178248 - DNA, 201 bp, Homo sapiens
atttatctatgttcttttgccacttgtgctttcttgtgtcttgtctgacacctttttattcctcaatttctccctcactgctttcttttatgttaaatatrtctagtatgcctttttaatcccttatttttaatttaactgtatttttaagctattttcttagtggttgccttgaggattataattaacatttttgcttaa

SEQ ID NO: 178249 - DNA, 201 bp, Homo sapiens
cccagagacaaccaatgtgattgttatctattagtggcttagatatcccagagatagtctctacatatatatgtgtatatttatgaatatgtagtttcattatgtatatgtagagagatatatattattatatgtagatatatatagtattatatatgtgtatatgtatatattgctaattaatgggcataaagtttcaat

SEQ ID NO: 178250 - DNA, 201 bp, Homo sapiens
ccccactggcagagatggggccccatatcagcattgtaaaaggagggatctgatttaattggtctgagttggagaccacgcattggtattgcttaaaagcktcacgtttttccaaggcacagccaggatagagaaccactaaatgaaatccaatgagtgctaatcactgaggaatggcaatgagtatatataatgtccaaa

SEQ ID NO: 178251 - DNA, 201 bp, Homo sapiens
atattttctctcattctgtagatttgctgaaaactttgagtgtcctttgacacacaacaggttttaattttgatgaagtctaatttatctatgttcttttrccacttgtgctttcttgtgtcttgtctgacacctttttattcctcaatttctccctcactgctttcttttatgttaaatatgtctagtatgcctttttaa

SEQ ID NO: 178252 - DNA, 201 bp, Homo sapiens
actaaattagaattatgtttattcttctgtgtttcatggttctcttgagaaacaaatagctgttccttctttggcatgaatatagttcttatcaacaaacrctcttttcatatcagctaacaaaaagtaagagaggaagacagaaaatggatcctttgagatgaaatttacttatttaaattagtaaaataagtatcaact

SEQ ID NO: 178253 - DNA, 201 bp, Homo sapiens
ttacacttctaaagtccaaaaaattctgaattccaaaacataactggctacaagtgttttaagaaattgtacaccctattagtagtagcaataatattttrtgtggcaaagcaaatgaatagctttcattaaaggctactattgtgattccgttaggattaagttggctgcatataacagccaacttattcctgttttttt

SEQ ID NO: 178254 - DNA, 201 bp, Homo sapiens
tagctcattttaaaactggcttgtctttttattgctgagtcttaagcgtccttcgtatattttcgatactagatccttatcagatgtaagatttgcaaatrttttctctcattctgtagatttgctgaaaactttgagtgtcctttgacacacaacaggttttaattttgatgaagtctaatttatctatgttcttttgcc

SEQ ID NO: 178255 - DNA, 201 bp, Homo sapiens
aaatactagcatgtttgattatgggaggcttacccaaatcctgctggggtagtagataatataaggtatatgcactatattacacttctaaagtccaaaamattctgaattccaaaacataactggctacaagtgttttaagaaattgtacaccctattagtagtagcaataatattttatgtggcaaagcaaatgaatag

SEQ ID NO: 178256 - DNA, 201 bp, Homo sapiens
aagcttcttaaggaaagggactttgcacaacatttgtattgctattttccagtgtcagaaacagtggctggtacattgtaggtacctaataccatagggayacaatactgtgggttgaggtgggccttcctaccctttctgccttctctcctttacctgcacattttcctaatattcctcagtgtcaagtcattggaataa

SEQ ID NO: 178257 - DNA, 201 bp, Homo sapiens
tcacagagtatcctattttatcttctgttcttattccgcctaatacagggtcaaatacgatgtaggaattggacccaggtgggcaaattacttgatcttgmagtagaaaactgatccctgggagtcaatgagtggtagtaacgatagactctaatgcctttttaaattcactgcaagtcattactgtacattaacaagaaa

SEQ ID NO: 178258 - DNA, 201 bp, Homo sapiens
accacctgacttgtagggtggttgtggaaattaagtgacactatttgtgcaaagcatctggcccatggtaggtgctcataaaatgatcattacaatcaacrtagcattttgtgtgttcagtgatatttgctgaagcccagattctagacctagttatagcctagatggaggtgggtggaatgagctgtaaacttggctctg

SEQ ID NO: 178259 - DNA, 201 bp, Homo sapiens
tttcataataaagacattaaaaaataagaacctgggcatgccaacaccaaatagagaaatgcaactcttcttggttttactgggccagagggaaagaaaarattataatgtaattaagtgagaggactattaattgaaaatgacttaacctacagttgacattttttctttgttttttccaaaaaggctttttcatggagc

SEQ ID NO: 178260 - DNA, 201 bp, Homo sapiens
caaaatggggaaatgttttagagtaaaagatccttaagaaatctaaacaccaaatacaatgtgtagaagaatttgaatcctaaatcaaacaaaccaactgygaaaaagctaatttctagacattaaggaaattaaaatataaactctgaataaagaatacttactaattttgttaagcatgacactgtatagtggttatat

SEQ ID NO: 178261 - DNA, 201 bp, Homo sapiens
gcccgccttcttcagttggaatggacagcgacagtttaagaccagcctggccaacatggtgaaacttcatctctaccaaaaattagcccagtgtggtggcrcgcacctgctactggggaggctgaggcacaagaatcactttaacctaggaggcaggttaacgtgagcggaggaggctgcagtgagctgagatcaagccac

SEQ ID NO: 178262 - DNA, 201 bp, Homo sapiens
tctcagaagtgtgggttctgggaatgtggttccaatgactggtactggctcagtcattgttctacttcttacacatagatgaggcaagttatatatgcttycaataccctctgcttctcctttgtaattcttgaaacaaatgatttatgaaaatatttgtttaatgtctttcttgcctactggaccatgatctctataagg

SEQ ID NO: 178263 - DNA, 201 bp, Homo sapiens
aaaaagaaggaagtgagaaagggggagtggtaagaggaatttaacaaagcattcttaccttcccagtaccttttgctcatatccctccttggccatctctrtctgctaaggagactgggaaacatcatatttcatctgcatacattgctgccaccaatgttaatgtacagtcagacagacctgagtcaagtctcagctctg

SEQ ID NO: 178264 - DNA, 201 bp, Homo sapiens
tgttggccaggctggtctcgaactcctgacctcaagtaattcacctgccttggcctcccaaagtgctgggattacaggcatgagccactgcgcctggccamaaaaaaatttttttaaagaaaaactttgataaagatacaggaataataaataaatatttcattttactgtatgataataaatagcaaacacagggtgatc

SEQ ID NO: 178265 - DNA, 201 bp, Homo sapiens
gcaattctcctgcctcagcctccctagtagctgggattacaggtgtgcaccaccacgcctggctaatttttgtatttttagcagagacggggtttcaccawgttggccaggctggtctcgaactcctgacctcaagtaattcacctgccttggcctcccaaagtgctgggattacaggcatgagccactgcgcctggccaa

SEQ ID NO: 178266 - DNA, 201 bp, Homo sapiens
cagaggccagagagctaccgtagatggtggaagcagactgagtataagaaaaactttgtctttgaatatgtgtcctaggagaaataaattaaaaaaaaaaatttttttttctttcttttgagatggagtcttgctctgtcgcccaggctggagtgcagtggcgccatctcagctcactacaacctcgcctcctgggttcaa

SEQ ID NO: 178267 - DNA, 201 bp, Homo sapiens
acagaggccagagagctaccgtagatggtggaagcagactgagtataagaaaaactttgtctttgaatatgtgtcctaggagaaataaattaaaaaaaaaaatttttttttctttcttttgagatggagtcttgctctgtcgcccaggctggagtgcagtggcgccatctcagctcactacaacctcgcctcctgggttca

SEQ ID NO: 178268 - DNA, 201 bp, Homo sapiens
tatttgaaaaagtaggtatacgttcaaagttttcaaaattcaaaagatacaaagaggtagatagtgaaatgtctcccttctatcattattccccagccaascagtttacctcccagagacaaccaatgtgattgttatctattagtggcttagatatcccagagatagtctctacatatatatgtgtatatttatgaatat

SEQ ID NO: 178269 - DNA, 201 bp, Homo sapiens
ctctagagtggccccaaaggaacagctcagagaaccactacaaatacagaagaaaaataaatagagaagttgaacacaaaagatgagtcttaccgtatcayagtcattatacagtcctgcacttaccttcccataaaacttgtgaacaccaaacagaaatctgttgcagtgtttgtaattcattgtgtacgttgctatctt

SEQ ID NO: 178270 - DNA, 201 bp, Homo sapiens
atcattccaggctcaggtaagccactaaatgaccgactgtgctataactaatgaatggtactggggtagctgagtggctcttttacctctagagacttgtyctgaattataactgtattaaaactaaatacaattcaccaaacagttaaggatgaatatacttaccatgtgctaaaatcttaaaatggaaatacagtggtg

SEQ ID NO: 178271 - DNA, 201 bp, Homo sapiens
tgtgtaaggaataggaacaaggaagaaaaataataaggactgggaagaatattataaatcagtaatgaaggatgccaggagtgattagattcaatcataarttccatttgctgtttacctaaaatccaatatcggacctagatcaatagatctcctagagcaatgatatgatttggctgtgtccccacccaaatctcatct

SEQ ID NO: 178272 - DNA, 201 bp, Homo sapiens
ataaagaactgttcacaaagacgtggccgaggtcaaagaaatccaataaaggatactgaaacatccaggcagggctagcagcagggggaagctgctatgtyaaggtctgaagggacaggggaaggagctgttactggaatctggcaagatctgtagctatacgagaaaaccacactgcagtggagggacatggcagcttct

SEQ ID NO: 178273 - DNA, 201 bp, Homo sapiens
caagtctcttgggtatgtacctaagagtggaattgatgagtcatatggtaactctatgtttaacttttttgagtaactgccaaactgttttccgaagtggytacaccattatgtaatcccaccaatgtatgagggtttcaacttctccatatcctcgccaatatttgctctcatctgtcttttctcttttagttgtcctag

SEQ ID NO: 178274 - DNA, 201 bp, Homo sapiens
atgttagtattgcttgcatcaggcaggtcccagctggaaaagaagtttaataaagaactgttcacaaagacgtggccgaggtcaaagaaatccaataaagratactgaaacatccaggcagggctagcagcagggggaagctgctatgtcaaggtctgaagggacaggggaaggagctgttactggaatctggcaagatct

SEQ ID NO: 178275 - DNA, 201 bp, Homo sapiens
gctacttgggaggctaagacatgagaatagccggacgcagtggcaggcgcctgtaatcccagctactcaggaggctgagacatgagaacagcttgaacccrggaggcagaggttgcagtgagccaagatcacaccattgtactccagcctgggcaacaaaataagactccacctcaaaaaaaaaaaaaaaaaaaaagaagt

SEQ ID NO: 178276 - DNA, 201 bp, Homo sapiens
attaaatcctatatatgttgattatgttagtattgcttgcatcaggcaggtcccagctggaaaagaagtttaataaagaactgttcacaaagacgtggccraggtcaaagaaatccaataaaggatactgaaacatccaggcagggctagcagcagggggaagctgctatgtcaaggtctgaagggacaggggaaggagct

SEQ ID NO: 178277 - DNA, 201 bp, Homo sapiens
gaaaccccatctctactaaaaatacaaaaattagccgagcgtggtggcagacacctgtaatcccagctacttgggaggctaagacatgagaatagccggaygcagtggcaggcgcctgtaatcccagctactcaggaggctgagacatgagaacagcttgaacccgggaggcagaggttgcagtgagccaagatcacacca

SEQ ID NO: 178278 - DNA, 201 bp, Homo sapiens
acctaggaggtggagggtgtagtgagccgagagtgcaccactgcactccagcctgtgctagaaagcaagactctgtctcaaaaaaaaaaaggaaaaaaaaraagcaaaacaaagtgagtctactacctttggatattggctaacattgccaagattttaaaaattcctgcaaaacattctagtattcacctaatatgaaat

SEQ ID NO: 178279 - DNA, 201 bp, Homo sapiens
gaattgcttgaacctaggaggtggagggtgtagtgagccgagagtgcaccactgcactccagcctgtgctagaaagcaagactctgtctcaaaaaaaaaaaggaaaaaaaagaagcaaaacaaagtgagtctactacctttggatattggctaacattgccaagattttaaaaattcctgcaaaacattctagtattcacc

SEQ ID NO: 178280 - DNA, 201 bp, Homo sapiens
gatttatgaaaatatttgtttaatgtctttcttgcctactggaccatgatctctataagggcagagatctgatccatatgtgtttacctctgaattctccrtccttaggatactgcattatatgtgacaggagctcaatcaatacttgttgaatttatttctttcactgaccacacagacttgcagacctactggaagaga

SEQ ID NO: 178281 - DNA, 201 bp, Homo sapiens
aacttaaggaaagcaaacttaaaatggcaccagtgtaaaaggaaacctattgacaaaggcattttcaatgatttcaatgaaggcaacagctgcgctccacyaatgctgccactagatggtggtgtttccattatctagaggtcttgtgagttaccttttatctgttaagaaagaaaatctgaaatctgtataaagcctggc

SEQ ID NO: 178282 - DNA, 201 bp, Homo sapiens
aagctctgagtcagatctagtaaagacaagcccaagccaggcatggtagcatgtgcctgtagtcccagctactcaggaggctgaggcaggaggatcactttgagtccaggagtttgaggctgtgatgcacttgatcagacctgtgaatagccactacactccagcctggataacatagtgagaccctgcctctaaaaccag

SEQ ID NO: 178283 - DNA, 201 bp, Homo sapiens
ttcaccatgttggccagggtggtctcgatctcctgacctcgtgatccacccgcctcggcctcccaaagtgttgggattacaggtgtgagccaccgcacccrgccagtactgtattattaatacttttttttttgctagcaagatactcctgcaggaattactcattttctgtttgagtgtctggcttaccataatcatctg

SEQ ID NO: 178284 - DNA, 201 bp, Homo sapiens
gggattataagcaaatgccaccacgcccagctaatttttgtatttttaggagagacggggtttcaccatgttggccagggtggtctcgatctcctgacctygtgatccacccgcctcggcctcccaaagtgttgggattacaggtgtgagccaccgcacccggccagtactgtattattaatacttttttttttgctagca

SEQ ID NO: 178285 - DNA, 201 bp, Homo sapiens
ctttcatctcatcctccctactagttgggattacaggcatgagtcatcacacctggtacatcacacacagtactgtattattattattattattattattattattattattattattttgagacagagtctcgctctgtcgccaggctggagtgcagtggcgcaatcttggctcactgcaacctccgtctcccaggttca

SEQ ID NO: 178286 - DNA, 201 bp, Homo sapiens
tcattgacgcccacccccaacacctccccacccacccaaaccctaccttcaggctataaaggctgagagctttttatctcattcacctttgtatcaatgcraatatgtgataaatgcatactcatgtcacctggatgtggggcattttggactctccagtgacatattcacagactatttcttgccttgtgtcatttcttt

SEQ ID NO: 178287 - DNA, 201 bp, Homo sapiens
cccagagataagagactccagcacctggtcaaggacttgcaaaaggagttcagtgaagccagggtctgaactgtgaggacaggcatggggagagctgaggygggagaggcgggcagggcctgaagggtcttctatccatgggtaattgactcagcccaggctctcaggtttcacctcttcggggaggtttcctgatctcac

SEQ ID NO: 178288 - DNA, 201 bp, Homo sapiens
gattattacctttgtaagagatattacagataaatctgggcttcccatggttcttccttggtcatgaggcaggtctgtgattcactctcccctttactcarcatgtattaagcatttattgtgcagcagacactaaatccagcgcctgatctaaggagcctgcagttttatggggagtgcagagaagtgaataaacattct

SEQ ID NO: 178289 - DNA, 201 bp, Homo sapiens
cacatacacaccaactaataatatggagggtcccataaacctgagacaaaatctaggtgcggacaaagcagagagctaagacagacacaaacaaactagacaaaaaaaaaaagaggcagagacttaacagaggtgggaacttcaaaaaaaagttcaacctaataaaaacccaacataaaactctccaacagctactggcct

SEQ ID NO: 178290 - DNA, 201 bp, Homo sapiens
acacaggcatcaggtaatattcatatccaacaccaatccacacatacacaccaactaataatatggagggtcccataaacctgagacaaaatctaggtgcrgacaaagcagagagctaagacagacacaaacaaactagacaaaaaaaaaaagaggcagagacttaacagaggtgggaacttcaaaaaaaagttcaaccta

SEQ ID NO: 178291 - DNA, 201 bp, Homo sapiens
aacagcattagttataggatttgaagatagcatataggacatttgatttttttgagaagaggaaattaaatggtcagccatgcattatctgcaggtgaatwtgctgttgttacagagttaatctgtttgtttgcaagtatttgttgaagcttacttaggttctttggggatagaaagtttggctgaccctaggatgttttt

SEQ ID NO: 178292 - DNA, 201 bp, Homo sapiens
tggagtgggtgggcacttagtcaaatgtgcatagaaaggagaggagatactatgcaaacaaacaaacaaacaagcaaataaaaaatgcccagaaacgcctmttcagtctgcccaacaatccttcgctctgcagttaaaatgtcaaaatatcactagctacatgctaatgaaaagggcaaaggggatattccttaaaaaatc

SEQ ID NO: 178293 - DNA, 201 bp, Homo sapiens
tataaatacttaagatataaggcacacagtaaaaatgacatttcattatgaaaaaaataggcgtgtgctgtttgcactttggtgggccattccattttcayatggcattaggatggagccatttgtttgggaggggacagcgctcttctcaggaaggagaccctggtctgcttagtgaggccaagccccttagcaggagct

SEQ ID NO: 178294 - DNA, 201 bp, Homo sapiens
atgtatcaccttagtgtgatccaattacaacaggtgaaattctagtcacaatctaaattgttcttcaccatgttttatttgtaaatatttcatgaaactgkaaaattacaacatatgaattcatagtgatgtaaaattatggctaacttctaaaaaaaaaatcttcttttttatgctcagctttggctgcagagaaagatg

SEQ ID NO: 178295 - DNA, 201 bp, Homo sapiens
tgccaaaaggtaagccagcttgccctagccctacctgttagagtagacaggtagccagacatacgcaggagaggggagtcccctaaagaaaataaagtctrggaagactcgtgtctggaagaccactcaaaatttgcatattaatagtatctctaatgctggagtgggtgggcacttagtcaaatgtgcatagaaaggaga

SEQ ID NO: 178296 - DNA, 201 bp, Homo sapiens
tctgttcccctgtggctccctccgtgtgctcttgggtgggttggtcagcagctgtgagtccttagagagaaatctgagaacttgaactcacgtgggcctcrcagtgaaaatgggaggctctcgactcaaggcaaacgtaaatataacagagaagaaaatgcaggacacctcccaaaggcaatcaagctcatggatagattt

SEQ ID NO: 178297 - DNA, 201 bp, Homo sapiens
gggccattccattttcatatggcattaggatggagccatttgtttgggaggggacagcgctcttctcaggaaggagaccctggtctgcttagtgaggccaagccccttagcaggagctgagcatgtattctccttggcctctcacctttgttaatttatttgtttggtgaatttgggagaaggaagtagaaaagctcagct

SEQ ID NO: 178298 - DNA, 201 bp, Homo sapiens
ccactgcagtccggcctgggcgaaagagcgagactccgtctcaaaaaaaaaaaaaaaaaaaaaaaaaaaaatatatatatatatatatatatatatatatmctacttatatataaaactgtgtacttaaatatatatataaatacttaagatataaggcacacagtaaaaatgacatttcattatgaaaaaaataggcgtg

SEQ ID NO: 178299 - DNA, 201 bp, Homo sapiens
gcttgcagtgagctgagatagcaccactgcagtccggcctgggcgaaagagcgagactccgtctcaaaaaaaaaaaaaaaaaaaaaaaaaaaaatatatawatatatatatatatatatatatactacttatatataaaactgtgtacttaaatatatatataaatacttaagatataaggcacacagtaaaaatgacatt

SEQ ID NO: 178300 - DNA, 201 bp, Homo sapiens
gggcttgcagtgagctgagatagcaccactgcagtccggcctgggcgaaagagcgagactccgtctcaaaaaaaaaaaaaaaaaaaaaaaaaaaaatatawatatatatatatatatatatatatactacttatatataaaactgtgtacttaaatatatatataaatacttaagatataaggcacacagtaaaaatgaca

SEQ ID NO: 178301 - DNA, 201 bp, Homo sapiens
tccagcctgggcaacaagagtgaaactctgtctcaaaaaacaaacaaacaaacaaacttcaatcatgtaagatgaataagttctagaggtcctctgtgcartattgtacctatagttaattaatactatattttatacttcaaaatttgttaagagagtagagctcacgttaaatgttcttaccacaataaaatttttaaa

SEQ ID NO: 178302 - DNA, 201 bp, Homo sapiens
aaaaacaaacaaacaaacaaacttcaatcatgtaagatgaataagttctagaggtcctctgtgcagtattgtacctatagttaattaatactatattttayacttcaaaatttgttaagagagtagagctcacgttaaatgttcttaccacaataaaatttttaaaaacacacacaaaaagtagcattctatatacttagc

SEQ ID NO: 178303 - DNA, 201 bp, Homo sapiens
agagagtagagctcacgttaaatgttcttaccacaataaaatttttaaaaacacacacaaaaagtagcattctatatacttagcaaaaaaaaaaattctamctttttttagcagtttccattgtatagataaaacatattttacttaatcaatccataattatggatattcagattttttctccttttgctgtataaacca

SEQ ID NO: 178304 - DNA, 201 bp, Homo sapiens
agtgtttcataaatggacagttcacagatgcagacgatggaaagacttacgacactatcaacccaacagatggatctgtgagtaattctttagtgtgagtrgtgatcactggtcatggatttttagttaatacaccattgtaaaagaggcagtcttaagaagcccttttattctctcactctgcctctaagtacttcacac

SEQ ID NO: 178305 - DNA, 201 bp, Homo sapiens
cggggcttgcagtgagctgagatagcaccactgcagtccggcctgggcgaaagagcgagactccgtctcaaaaaaaaaaaaaaaaaaaaaaaaaaaaatatatatatatatatatatatatatatatactacttatatataaaactgtgtacttaaatatatatataaatacttaagatataaggcacacagtaaaaatga

SEQ ID NO: 178306 - DNA, 201 bp, Homo sapiens
gcggggcttgcagtgagctgagatagcaccactgcagtccggcctgggcgaaagagcgagactccgtctcaaaaaaaaaaaaaaaaaaaaaaaaaaaaatatatatatatatatatatatatatatatactacttatatataaaactgtgtacttaaatatatatataaatacttaagatataaggcacacagtaaaaatg

SEQ ID NO: 178307 - DNA, 201 bp, Homo sapiens
ggcggggcttgcagtgagctgagatagcaccactgcagtccggcctgggcgaaagagcgagactccgtctcaaaaaaaaaaaaaaaaaaaaaaaaaaaaawatatatatatatatatatatatatatatactacttatatataaaactgtgtacttaaatatatatataaatacttaagatataaggcacacagtaaaaat

SEQ ID NO: 178308 - DNA, 201 bp, Homo sapiens
aggcggggcttgcagtgagctgagatagcaccactgcagtccggcctgggcgaaagagcgagactccgtctcaaaaaaaaaaaaaaaaaaaaaaaaaaaaatatatatatatatatatatatatatatatactacttatatataaaactgtgtacttaaatatatatataaatacttaagatataaggcacacagtaaaaa

SEQ ID NO: 178309 - DNA, 201 bp, Homo sapiens
ccgccttcttcagttggaatggacagcgacagtttaagaccagcctggccaacatggtgaaacttcatctctaccaaaaattagcccagtgtggtggcacrcacctgctactggggaggctgaggcacaagaatcactttaacctaggaggcaggttaacgtgagcggaggaggctgcagtgagctgagatcaagccactg

SEQ ID NO: 178310 - DNA, 201 bp, Homo sapiens
atatatactattatattatacaagtaatatataataatatattataaaatgtatatatcatataggatattaatagatatcataatttctataatttattaatatatacaattatatattaataatagtatgtatatatattttatacacttaaacacatttttttagagaaagggtctcacttcgttgcccaggctggag

SEQ ID NO: 178311 - DNA, 201 bp, Homo sapiens
tatatatactattatattatacaagtaatatataataatatattataaaatgtatatatcatataggatattaatagatatcataatttctataatttattaatatatacaattatatattaataatagtatgtatatatattttatacacttaaacacatttttttagagaaagggtctcacttcgttgcccaggctgga

SEQ ID NO: 178312 - DNA, 201 bp, Homo sapiens
atatatatactattatattatacaagtaatatataataatatattataaaatgtatatatcatataggatattaatagatatcataatttctataatttattaatatatacaattatatattaataatagtatgtatatatattttatacacttaaacacatttttttagagaaagggtctcacttcgttgcccaggctgg

SEQ ID NO: 178313 - DNA, 201 bp, Homo sapiens
tctcctttgtaattcttgaaacaaatgatttatgaaaatatttgtttaatgtctttcttgcctactggaccatgatctctataagggcagagatctgatcyatatgtgtttacctctgaattctccgtccttaggatactgcattatatgtgacaggagctcaatcaatacttgttgaatttatttctttcactgaccaca

SEQ ID NO: 178314 - DNA, 201 bp, Homo sapiens
ctctgtctcaaaaaaaaaaaaaagaaaaaagaaacaagattagattatagaacttatcatccagatttggaaatgactgtgtgtcattttatgccctttckcactaatgcgacagacacctatagtgagagccggttaaagaatggtgctgtctcccacgtcacttccactgtggcatttccttaaacaggctgatggaac

SEQ ID NO: 178315 - DNA, 201 bp, Homo sapiens
agcgctagctgactgttgctatatggcgccacagaccagggttgacaaacctcctgagtttttttgatttttgttttttgagacagagtcttgctctgtcrcccaggctggagtgcaatggcgcgatctcagctcacagcaacttctgcctcccgggttcaagcgatcctcctgcctcagcctcctgagtagctgggaata

SEQ ID NO: 178316 - DNA, 201 bp, Homo sapiens
tggagatggggtttcactgtgttggccacactggtcttgaactcctgagcttgtgatctgcccgcctcagcctcccaaagttctgggattacaagcgtgakccaccacgcccagcctagattttcttttaacacaaaatttgtttctaatggtacatctttattgttacacatacatttttttaaaaaaatgctcagggac

SEQ ID NO: 178317 - DNA, 201 bp, Homo sapiens
agctcctccagaaatggaaccgagagaggacacgttgcactgcggtgctgccttcagcacccagggggcctcgggactgtttagggaagagagagagagaraaaaaaaaaataaaaactgtcttatgtatcgtatcttttataggaagtacataaaagaatttgcttatcgattctttttctcggccatgccaaagccata

SEQ ID NO: 178318 - DNA, 201 bp, Homo sapiens
aacaggtaaagcaaatgagagatttgagctgcatagagggcaagaccatgtctagggtaaaggggccaccactgctcagcgctagctgactgttgctatayggcgccacagaccagggttgacaaacctcctgagtttttttgatttttgttttttgagacagagtcttgctctgtcgcccaggctggagtgcaatggcgc

SEQ ID NO: 178319 - DNA, 201 bp, Homo sapiens
caagaccatgtctagggtaaaggggccaccactgctcagcgctagctgactgttgctatatggcgccacagaccagggttgacaaacctcctgagtttttytgatttttgttttttgagacagagtcttgctctgtcgcccaggctggagtgcaatggcgcgatctcagctcacagcaacttctgcctcccgggttcaagc

SEQ ID NO: 178320 - DNA, 201 bp, Homo sapiens
ggctggagtgcagtggtgatcacagctcactgcagctttgaattcctgggctcaaacgatcctcctgcctcagcctcccaagtagctgacactacagtcayacaccaccatacctacctaattttcttattttttatagagatgaggtcttgccatgttgctcaggctggtctcacacttccggccttaaaggatcccttc

SEQ ID NO: 178321 - DNA, 201 bp, Homo sapiens
tttttaagagacacggtctaacactgtcacccaggctggagtgcagtggtgatcacagctcactgcagctttgaattcctgggctcaaacgatcctcctgyctcagcctcccaagtagctgacactacagtcacacaccaccatacctacctaattttcttattttttatagagatgaggtcttgccatgttgctcaggct

SEQ ID NO: 178322 - DNA, 201 bp, Homo sapiens
atacaaaaattagctgggcatggtggtgtgtgcctgtaatcccagctactagggaggttgaagcacaagattcacttgaacccgggaggcggaggctgcastgagccgagattgcaccacttcactccagcctgggtgaccatggagtgaaaccctgtctcaaaataaataaataaagtaaaatatatcagtccaattttc

SEQ ID NO: 178323 - DNA, 201 bp, Homo sapiens
agtccgccaaagcaatttttttttaagctgtaagcaatctaaatgtccaaaataaagcagttgttaaaatatgtcaatgtaatggaacactgtgcagtcaygttcatagagaattttaataacattgaaaagtgttgttaaaataataaatggaaataaaaataaagtataacattgtatacactggatgatctcaactat

SEQ ID NO: 178324 - DNA, 201 bp, Homo sapiens
tgtgatctggtatccttttaagtccattcctaaaaacaggatgttatgtatgcctctaataaagtgggaaataagggaaaattaaatttcttcaaaaacasagtttctcagtgaggctttactaatttagaattacttgccagaacattagcgaatcccatttagattggagggggataaacatcctaagttcagatcccc

SEQ ID NO: 178325 - DNA, 201 bp, Homo sapiens
atacataaatgtgaaatttatatattttatatgacaaacctggattatttataaatggagtccgccaaagcaatttttttttaagctgtaagcaatctaartgtccaaaataaagcagttgttaaaatatgtcaatgtaatggaacactgtgcagtcatgttcatagagaattttaataacattgaaaagtgttgttaaaa

SEQ ID NO: 178326 - DNA, 201 bp, Homo sapiens
attatccagaaattatccatggacactaaaactagtggataaaaatttgaggagtatctccccacaaaatatttgttaactacaatgtataaaatagtaayttacagtgatgaaagttggcagaccacatttgccaaataatcaaaactaactttccagtattggaactattctacagcacgtgcctcctgatgtcctgag

SEQ ID NO: 178327 - DNA, 201 bp, Homo sapiens
attacagtaagaatctttgtgttcacactgatattaattaattgaacggaatggaaaacacttagagtagagagccaactactacacgtaaaaggaatgakggaattggaaaatcaccatttggcaaccatcatgatactttaggattattatccagaaattatccatggacactaaaactagtggataaaaatttgagga

SEQ ID NO: 178328 - DNA, 201 bp, Homo sapiens
agaacaattgaacatcaaaatcaataacaatagtaaacgatgataacctgctgattacagtaagaatctttgtgttcacactgatattaattaattgaacrgaatggaaaacacttagagtagagagccaactactacacgtaaaaggaatgatggaattggaaaatcaccatttggcaaccatcatgatactttaggatt

SEQ ID NO: 178329 - DNA, 201 bp, Homo sapiens
atgtaatgctcaaagagtaataggggcacgtcagaatgataaggggccgtactgaagggactgcctcagccaaatctagaacaattgaacatcaaaatcartaacaatagtaaacgatgataacctgctgattacagtaagaatctttgtgttcacactgatattaattaattgaacggaatggaaaacacttagagtaga

SEQ ID NO: 178330 - DNA, 201 bp, Homo sapiens
tgtgccacctctaccatgcactacgcccagagtgtggcaaagcctgaaaacatgcttgttggatgagtcttgcacagagtcaggcacagtttggggcactstgtgccggatgctccatgaagtgttaggcacctcagggtctcaggaaaatgtactttgttttattcttttgtgtgaaggtcctctgtgtgaaactgccaa

SEQ ID NO: 178331 - DNA, 201 bp, Homo sapiens
tgccaattcttacttggatagctttggccttactttacaccctgcccagatggttctattagcatctggccaaagggcttcagatcagggcagactcttcrcactgtgccttgaagttttctttggaaagctatgtgtacctttttttttttttttttttaattcttggagcatagtcagggtctgtattaacttgcttcc

SEQ ID NO: 178332 - DNA, 201 bp, Homo sapiens
ggccattccattttcatatggcattaggatggagccatttgtttgggaggggacagcgctcttctcaggaaggagaccctggtctgcttagtgaggccaarccccttagcaggagctgagcatgtattctccttggcctctcacctttgttaatttatttgtttggtgaatttgggagaaggaagtagaaaagctcagctc

SEQ ID NO: 178333 - DNA, 201 bp, Homo sapiens
cgccaggcttgcccacagtcactctgctcctcagctgcctggcctctggggcagttcagtttcacacaccaggaatgccctgagcccagatttcctacctstgttttttacttctgtttttgcttctgtttctttccccagatgtcctcatagctttcttcttcactttcttccagggactcaaatatcacattttcagtg

SEQ ID NO: 178334 - DNA, 201 bp, Homo sapiens
cctgtagtctgcagctgtcggcacagaggaggccctagagtgggtggcttctctctgtaggcagcttgtcccattgtctctgcagctcttagcagagagartagctcctctctgcatctggtcatctcatcttctccccatcccctgccctgctctagctgagcccggggcttttatgggcctcagagtggaggaagtgtg

SEQ ID NO: 178335 - DNA, 201 bp, Homo sapiens
gctcctcagctgcctggcctctggggcagttcagtttcacacaccaggaatgccctgagcccagatttcctacctctgttttttacttctgtttttgcttstgtttctttccccagatgtcctcatagctttcttcttcactttcttccagggactcaaatatcacattttcagtgagaccatctctggtcaccctatctc

SEQ ID NO: 178336 - DNA, 201 bp, Homo sapiens
tactgcacagtcagacatgctggctgctgctgtggggctgtcagctctaggtgccagcatgggcactggctctctgtgaggctgcggctggaccaggtgcrctgcagacagcttccccagctggcaccaaggaatgcaatggctcccagaagcttggagatgccaggaaccatggggccccaaagaaggagtcacagccct

SEQ ID NO: 178337 - DNA, 201 bp, Homo sapiens
ggttggaaagctgtggccagtggtgtctttgtccaacttttgtttgggcctgctgggcttgttcctcccacttggcctggcaggctgcacttagctcatgstaccggcctggatcccacacctccaagggagactgagtcaggcgtggactggcaagacgtgtgtgagtgagtgcggggttgggctactgcacagtcagac

SEQ ID NO: 178338 - DNA, 201 bp, Homo sapiens
tgaggtcaggagatggagaccatcctggctaacatggtgaaaccccatctctactaaaaatacaaaaaattagctgggcgtggtggtggatgcctgtagtyccacctacttgggaggctgaggcaggagaatggcgtgaacctgggaggtagagcttgcagtgagccgagatcgcgccactgcactccagcctggcaacag

SEQ ID NO: 178339 - DNA, 201 bp, Homo sapiens
attaagccaggatttcctgaggcatgggaactacctaacttgacttacatcatgctgaattgagaaagacacatcatatttataatgcttctttttttttwaaaaaaaatagcatttttggctggacgcggtggctcacgcctgtaatccagcactttgggaggccgagcgggtggatcatgaggtcaggagatggagacc

SEQ ID NO: 178340 - DNA, 201 bp, Homo sapiens
atttggagacctaacatggtttcaccatgttgccccgactagtctcaagctcgtggcctcaagtgatccgcctgcctcggcttcccaaagtactgggattrcaggcatgagccactgcatctggcctctggccctcctttgaggctccctctcgtcttttatagaggccccttcagaatcggggtccctccactcactgcc

SEQ ID NO: 178341 - DNA, 201 bp, Homo sapiens
gtgttctgtcttcatccttcacctctctgctaacatgctgccctcactgcctagatggttgttacatctcggatgtccatgtggtgctctctcttcatccytcacctctctgctaacatgctgccctcactgcctagatggtttcatctcggatgctcatgtggtgctctctcttcatctttcacccctctgctaacatgc

SEQ ID NO: 178342 - DNA, 201 bp, Homo sapiens
ttcatccttcacctctctgctaacatgctgccctcactgcctagatggtttcatctcagatgtgcatgtggtgctctctcttcatccttcacctctctgcwaacatgctgccctcactgcctagatggtttcatctcagatgtgcatgtggtgctctctcttcatccttcacctctctgctaacatgctgccctcactgcc

SEQ ID NO: 178343 - DNA, 201 bp, Homo sapiens
gtgctctgtcttcatccttcacctctctgctaacatgctgccctcactgcctagatggtttcatctcggatgcccatgtggtgctctctcttcatccttcrcctctctgctaacatgctgccctcactgcctagatggtttcatctcggatgtccatgtggtgttctgtcttcatccttcacctctctgctaacatgctgc

SEQ ID NO: 178344 - DNA, 201 bp, Homo sapiens
agatggtttcatctcggatgtccatgtggtgctctctcttcatccttcacctctctgctaacatgctgccctcactgcctagatggttacatctcggatgyccatgtggtgctctctcttcatccttcacctctctgctaacatgctgccctcactgcctagatggttacatctcggatgtgcatgtggtgctctctcttc

SEQ ID NO: 178345 - DNA, 201 bp, Homo sapiens
ggatgtgcatgtggtgttctgtcttcatccttcgcctctctgctaacatgctgccctcactgcctagatggtttcatctcggatgtccatgtggtgctctstcttcatccttcacctctctgctaacatgctgccctcactgcctagatggttacatctcggatgtccatgtggtgctctctcttcatccttcacctctct

SEQ ID NO: 178346 - DNA, 201 bp, Homo sapiens
ttatttttagaatggaaatttgagtcaaacacattaaagtgtatttacccccttacatctaatcccgcagaagaacgttcagataggaattctagccatargcatcatttaatttttcctaaaaattctgaaggtattttggcaaaagccaaaataagtttctgtgtgtgtgtgtgtgcacgtgtgcctctgtgtgtgtcc

SEQ ID NO: 178347 - DNA, 201 bp, Homo sapiens
taggtcatctcatcgcagaagagattcctcctgcattgcactgtggcttagcaaaacagcacaaggctagaaagccagtgagacaggcctgggtccggctyggctacttgtcctgactcaggacaggtgtgcagcctctgtgcgtttctctttcttcacctctcacttgggatagtctcagccctcatgttctatgctttt

SEQ ID NO: 178348 - DNA, 201 bp, Homo sapiens
gtgctgggattataggcatgagccaccgcacctagcctcaaatattctaaaccttcgttcttatagtgggttgggtggtagcccccagaaagatatgtccrcatcctaatatctgaacctgttgatgtgaccttatttggaaatgaggtctttgcagttataattagttaaggatcttgagatgaagggatcatcctggat

SEQ ID NO: 178349 - DNA, 201 bp, Homo sapiens
ggtttcatgtttttttttattttccatgaaatttccttgagctcaaaaccttcaaaaaaaaagactattgtgtctaatatgtttgtaaggagaatattaaygaaagacttcagtgataaaatttcaaagcagttggaatgttaagatcctcatttttttccattctaattcctcaaaagttagagagagagaatgagagag

SEQ ID NO: 178350 - DNA, 201 bp, Homo sapiens
gagtaattaaataaaggttatgatttattttaatgtagttgcaaaatatctggttagggtgtgtgtgtaaatatatgtgtgtgagagacagacacacacasacacaggcagagatggaagaagccaaaaggtgatgtccacaattaaatttagattaatatttgctgggattttgattggatttactttctgtcttgaaag

SEQ ID NO: 178351 - DNA, 201 bp, Homo sapiens
ctttgcctgttggttattggcaaaatatggatttttagttaattgtcataagtaactttctatgtcaatttcttcttgtttctcattcatcattcatacayacacaagcatcttttcacttacccaatggaattacttttcatagcaaattagtatttttcttcctctgctttgtgattcttttgctgaactccaacttgg

SEQ ID NO: 178352 - DNA, 201 bp, Homo sapiens
tctcggatgtgcatgtggtgttctgtcttcatccttcgcctctctgctaacatgctgccctcactgcctagatggtttcatctcggatgtccatgtggtgytctctcttcatccttcacctctctgctaacatgctgccctcactgcctagatggttacatctcggatgtccatgtggtgctctctcttcatccttcacct

SEQ ID NO: 178353 - DNA, 201 bp, Homo sapiens
tggtctccagcaaattaaggttactaaacatgaactctcactaaatgcacaaggaaagaaaccaccatcagtcaaagtcagcataaataacaagtaataartaagtccccccaaaacttcagatactggaattatctaattcagaatataaaattacaaaaacatgtgtaaataaagatgtcaaatcagaaaaaataagca

SEQ ID NO: 178354 - DNA, 201 bp, Homo sapiens
gttatttaaaaaatctggacacataaaaaaaaaatcatagcctaaatgtcacaccagtattcacactgtgcttccacagtgggcctactgtactgtccaaagaaacttggcattttgtctaagaataagtcaataacaggaactccatcataaatgccctggtttcctgctaatacaagactctcagctgctgactctcac

SEQ ID NO: 178355 - DNA, 201 bp, Homo sapiens
tttttagggccacttactggcttctagaggttttataaatgcacgtttgataatgctaaacataggtaaaataagcagaagttttctagaattcagtccakagagagagagagagagagaacgtgtgtgtgtgtgtgtgtgtgtgtgtgtgtgtgtatgtgtatgtgtatgtatgtgtattagagatacattacatgcaag

SEQ ID NO: 178356 - DNA, 201 bp, Homo sapiens
tttctctcttctccctctctactgtctctttctccctccttcccccactgatatggtttggctgtatctctacccaaatctcatctcgaattatagctcccattactcccacgtgttgtgggaaggacccggtgggagatcactgagtcatgggggtggttgcccccatgctgttcttgtggtagtgagtgagtctcatga

SEQ ID NO: 178357 - DNA, 201 bp, Homo sapiens
ggaggccgaggcagtcggatcacgaggtcaggatatggagaccatcctagctaacacggtgaaaccccgtctctactaaaaatacaaaaaattagccggtygtggtggcgggtgcctgtagtcccagctactctggaggctgaggcaggagaatggtgtgaacccgggaggccgggaggcggagcttgcagtgagccgaga

SEQ ID NO: 178358 - DNA, 201 bp, Homo sapiens
cctttgttaaaagaacattttaaggccgggcatggtggctcactcctgtaatcccagcactttgggaggccgaggcagtcggatcacgaggtcaggatatkgagaccatcctagctaacacggtgaaaccccgtctctactaaaaatacaaaaaattagccggtcgtggtggcgggtgcctgtagtcccagctactctgga

SEQ ID NO: 178359 - DNA, 201 bp, Homo sapiens
ctggtaattgcgtctattacagtattccccctttgctgtgagtattcttaaattgcctaacagaatcagtatgcctcaaggaccaagcttctattgtttasattcaccagtgcttaagcacctgatgagtacccaataattgtgtaatgaggcaccgaatgaatggagacatttgggccaaagggtcggagataagcagtg

SEQ ID NO: 178360 - DNA, 201 bp, Homo sapiens
tcatctcttgtcctttccttgcccacatcagttaccttgtcctgcctgggctgttatagtaacctcctacctggtcttctgcttccagtctttttttttttccattcatttgctgccagtgagttttagctggagtgaccatctgatcatgtcagatggtcgctcctcagcttaaactattggtggctctctcttgccctg

SEQ ID NO: 178361 - DNA, 201 bp, Homo sapiens
tatttcataaacttttttccttaacatttattcagaatagtaaaaataatgttcactattgaaaaattggaagtataggaggatataaagtttcagggggraaaaaaacaacacccgcaatcccaccactcagaagtaattactgcctgcattatcttttcttcattgttttgactaacttgttactgattgacttcactg

SEQ ID NO: 178362 - DNA, 201 bp, Homo sapiens
tcactgaatccttactttacctaataatggccccatggtgcaagcgttttgatgctggcatattgttatcattgttctattattagttcttgttgttaagytcttactgtgtctaatttttaaacgatttatcgtggatatgtatgcatgggaaaaaacatcgtgtgtgtacggtttggtatttgcaatttcaggtatcca

SEQ ID NO: 178363 - DNA, 201 bp, Homo sapiens
aaaaaccacctattgtatgattccatttgtatgaaacatccacagtaggcaaatatatagtgacagggctgttggggtcagagtgagagttggggaccagrgagtggctgctgatactaggttctgaggtactgagtactaggtacggagtttctttttggggtgatgaaaatgttctgggcttagatggtgatgatggca

SEQ ID NO: 178364 - DNA, 201 bp, Homo sapiens
ttaggaaaaagaaaaaccacaacaagatagcacttcacaccactaggatggatataacaaaaaagaccacagcaagtctatgtaggatgtggagaaattgraactcttgttcattgatggtgagaaggtgaaatgacgcaggcattttggaaaatggtctggtagttcttcaaaatgttaaatatagtgttactgtatgac

SEQ ID NO: 178365 - DNA, 201 bp, Homo sapiens
ctagctattccttcttggagctgtttaggcggcatgtctataaatgaaaaactagtcaaggaaagagaaaaaactcacaacattctcattgttgttcaaawttgactggtcccttgaaaaagactgcaaataccatgggataagaacttatacctaaaaatattttgagtacagacacttgatgtcagagaagatcttcag

SEQ ID NO: 178366 - DNA, 201 bp, Homo sapiens
ctcccaacctatccagtgaaactcagcttaatgccacctccttctggaggccccaggctcccagagcatatatacacatacttgctaaagtcctttttctstgcgtaccatatgcccatacttctgattgtgcagtaaacagattttaatgttattattgctttgcatctatgagacccagatatatcatgggttcctcaa

SEQ ID NO: 178367 - DNA, 201 bp, Homo sapiens
gtgcagtaaacagattttaatgttattattgctttgcatctatgagacccagatatatcatgggttcctcaatgacaaagtttgcgcctcatttatctttstgttcccaaactcagcacagtgcctggcctgagtaaatggttcataaatgtttgctgaagggttatttatggcctgccttcttgatgctttgtgaaaatt

SEQ ID NO: 178368 - DNA, 201 bp, Homo sapiens
agaagagtcagggtatggtatttaggagaaagaagctgaggcttagagaggctcatttctttgcctgttggttattggcaaaatatggatttttagttaaktgtcataagtaactttctatgtcaatttcttcttgtttctcattcatcattcatacatacacaagcatcttttcacttacccaatggaattacttttcat

SEQ ID NO: 178369 - DNA, 201 bp, Homo sapiens
aaggtgattgaattagaaatgaggatttggaggtcattagtgtataaaatggtaggtgactgtgaggaaatcagtctgacaaaatgagttctgtaggggamagagacagacattgggaacaccaagtgtcaagggtgtcgagtgaaaagagcctggttaggagtgattagaaaagtagcaggagaattaggaggtggtgat

SEQ ID NO: 178370 - DNA, 201 bp, Homo sapiens
gaatctcagtgagtttttctctagaaaagacccggatagttacttctggtgccattttcttatacagaaatcatgacagatttttctgtatttatcagcarctgataaactgtaaaatgacagagaaaaggcatctaatatggctaatttctgataattggggtcacaaagtatttttaaattaagattttctaaaaaaaa

SEQ ID NO: 178371 - DNA, 201 bp, Homo sapiens
gtgtgtgttgttcccctccctgtgcctgcggaccctactttgatctgtccatgtcatctgtccctcctttggatctctatcctcccaccccacactttgtmaccatctcaggatgcccttcttaatccctgtggcctcccttttgtagcctcttcaaacctctgtctactcgacacccataaggcaggctacaggctacag

SEQ ID NO: 178372 - DNA, 201 bp, Homo sapiens
tgggggacggggtgtaagaactgggaaagaattcacaattggggcaggaggtgctgtgggaatgaaccagccgcatgaacagagacataggcagggactctgtcaggtggagtgggtgggtggcccagtccgggaaccctgagaagcaaggctggtagagccaatatcaccacaccctgccctggccaggccttctctcac

SEQ ID NO: 178373 - DNA, 201 bp, Homo sapiens
aacttggaccttttggtcattgaagagtcttagcatactttgacattttagaaaagaaaaacagaattgaaggggacacaaggtacattggtttatgggawgttcctcaaaccctttctcaaatattttggatgtatttcatttcctaacaaatatttttttcctattttgaggcaggaagtgaggatatgcctgttgaca

SEQ ID NO: 178374 - DNA, 201 bp, Homo sapiens
cagtggaagaacagtggaatattggtgcgcacataagtcagcgtggccagctacaggcgaaaaatcagtcagcagaattgtaaatggtatttctgttaacsctttgacttggttggaggtactatcacgcaagtatctgctgaacttgtttctctttgcgaagaacgaaatgtgagcaaaaatagatcaaacatgcctgtg

SEQ ID NO: 178375 - DNA, 201 bp, Homo sapiens
gaatgcatataaaatgtaaaggccatgctctgtttttccccttgaatttctgctgccttttttcatcatccagtgagttagtctaaaccctccttgccaaragcctcctctgtccttgcagtttgctttaaccctgccatttgagcctcatgtttgcaaatagggattagcaggctctgtcattcacaaagtaagaatatg

SEQ ID NO: 178376 - DNA, 201 bp, Homo sapiens
gggctggtgctgaggcaggtcgtggcaggcaacactgccccacctgacttgctctcgtgggatctagtcattgtcctgggagggtgcccaagggggcccasgtggcgagggctgcgtagaagggcctggaggtcagcactgacctccagacataggagtgaacggcctttccaacaagtacagctgccagctgtggaatct

SEQ ID NO: 178377 - DNA, 201 bp, Homo sapiens
ttagcaataaagccaacagttttacccagaatcccaacagtggggaagaaaaaagcagagaggagaagtggaggtggcagacgccacagttaccagtggtrgagatgagcctcagggatggccggggtgcgccacatgggcatctgcccgctggccagccgtgagttcagactgacgggaaatgcatggcttccacggcct

SEQ ID NO: 178378 - DNA, 201 bp, Homo sapiens
aatacagaactgttcctactatcatttttaattggaaactgaaatatcaggaaatgttacagaatcatgaaataaatgccagttgtttaatttgttttatrtaaagaggtttagagactgaattataaaacaggattgcttcatataaatgaattttgaatatatatatatttacgtacacatatggcatctaaagattta

SEQ ID NO: 178379 - DNA, 201 bp, Homo sapiens
gaagtgttttcagttcatatattttatgacatttccagccccagctcttgtgacctcatccatcagattgctagatcttaaaggatatgtattactatatsataaatttgcttttcagaatattttgataatggtttttcttttttttattattattatactttaggttttacggtacatgtgcacaatgtgcaggttagt

SEQ ID NO: 178380 - DNA, 201 bp, Homo sapiens
tttgtaggttttcctagaaattagtaaaaattgtattttgtggcagttgttaagaaatgcatagtaattatgagcagagatttagaacccagcgctttttycttcatgccagaaaccagtggatttgatgatgtctatacttgtcttatctttctttttccttttctggagacaggatcttgctgtgtggttcaggcagag

SEQ ID NO: 178381 - DNA, 201 bp, Homo sapiens
cctagcaactcttgtcgaaatcagtcgatcctagacacatgggtttttttctggactcatgtttctagtccattgatttgtgcatctattcttatgccagyacagcactttctttattactgttgcttgtattataagtttggaatttaggaagtgtgagtcctccaactttgttctttttctggttattctggatccttt

SEQ ID NO: 178382 - DNA, 201 bp, Homo sapiens
agtcgtcgtctctgaagccagacccaaatgtagttgtcttggtgattactgggcattgtctaatccaggaaaaaacactcttttgtagaaatataataagrcagtgtgggtggtgctggatctgcagttttgtcattttgaaatttattgggttgatgcaaaaataatcacaatttttgccactaaaagtaatggcagaaa

SEQ ID NO: 178383 - DNA, 201 bp, Homo sapiens
tctccctgaacctgaaatttacccctcccagactaccatttgaggaagagagctagtccattatgagagactcaggaccaaggcgaggaattggaacactrtaaaccccccaagaggggagtgggccttgcagagagttccagaatagtgcctgatcagcagtgtctcaggatcatcaaagatcctggcttcaggagctgg

SEQ ID NO: 178384 - DNA, 201 bp, Homo sapiens
tatatttactgactgcttcctagagatacataggtaaattagacagactttattctgtgtttgttttctggattttaatttttctccactcagttaattgyatctaatcatcaacacatctgccatttatttatttatttttgccatttgcttgtctgttcgggtagttgatcttggacttcctaggctccaaatctgtga

SEQ ID NO: 178385 - DNA, 201 bp, Homo sapiens
aataaatatttgtttaataaatgaatgaatatattctagagctatttgtacaaggcagagatttccagatcacagtgttcatatgtataacatacaatccygtaatgtttctaatttgctatggtatggaatagcatttaccatatatagcttaggtttgtaggctttatcttttagaaatccttaattcttagacttctc

SEQ ID NO: 178386 - DNA, 201 bp, Homo sapiens
tttgagaggtagtatctcattttttctcctcaatctgagagactttgtctttaatattggggaggtcaattcatttatgatgatcatcataaaagataagytcagttctacttgtgccttcttattttttgttttaaatgtattcttgcttttcgtgggggttgggaggtctgctttttgttacacatgctgtctttgatg

SEQ ID NO: 178387 - DNA, 201 bp, Homo sapiens
ttcacccattaaaaaagatgaaatgggtgaatttaagcatggagttctaaacttttctatgcgagacctgaagatatcttagcaggaaagaatggtattcraacattctcttatcctttttaaaaagtacttttgtaagcattttatcatccatcccctcagccttttgaagtagattgtgtatttgattatattttttga

SEQ ID NO: 178388 - DNA, 201 bp, Homo sapiens
aacaatacttaagatgaaaaaataaagttttaaaaaatttagcatggtctttatccttgatttagatactctgcaagcatagtttaaaaaagatgaaattyacccattaaaaaagatgaaatgggtgaatttaagcatggagttctaaacttttctatgcgagacctgaagatatcttagcaggaaagaatggtattcaaa

SEQ ID NO: 178389 - DNA, 201 bp, Homo sapiens
agcttgctctggcaaatacctctagaagcaggcttcagctccttcagataaataatccctacaggtgcttaaagaattttcaagattttataaaaaacctraaaaggttaggaatatgtgtgttcggatgaatcctcagaaagctggaataaaaaactttcttctatcgcctgagtgacatggcatcctacagtgtttatt

SEQ ID NO: 178390 - DNA, 201 bp, Homo sapiens
ttctgtgtgtgtgtgtgtgcacgtgtgcctctgtgtgtgtccacgggtacactcgtgcgcccacttgggtgaagtgggaggctcagcttagttgggaagcrggccaaagggcaggcccgatcccggtgaagccaccatactgtgtgcattggaattcattccagtggctagacttgggaccctggtccgggacctagagag

SEQ ID NO: 178391 - DNA, 201 bp, Homo sapiens
tcgtaagaatcaacatattaatagagtttttcaacagagtaaaaggaaaaggcaccttcctctaagacactcaaaagatgcctttgagctagcagccaccmtgtagaattggtggtggttatgcagtgtttgtcttttaatatttgcatcgttttggctcttccagtatctccaaataccatgcagatagaaaggaagatg

SEQ ID NO: 178392 - DNA, 201 bp, Homo sapiens
gacctacacgatatcctagggatcggtaggagtaaaggtttgaaagttcctatttgaaaacaagtcttagtgatcaaaatgcctctttgctggctggtgargtatggaccaggcccagaacaccctatgtttgacagaagtaagttgggggatttttaagttatttgtgttccagtactttccataaggaagaagtatgtt

SEQ ID NO: 178393 - DNA, 201 bp, Homo sapiens
acattttaatgcaatttacattttatttttaaagacttacagtgacatatttgaacattctgaaaattaaactttgtatgaacgtaattgcaagagttagyggaaactgaaatgaaatataaagacttccacttcctgtatatgaatttttagccttttcccaaactttctctattgtaaacttaaaacaaagtcttatca

SEQ ID NO: 178394 - DNA, 201 bp, Homo sapiens
gcccctatggcagtcagtccattgagtgcagtattcacatataagatgtcgaagttcttgagagagtcttcattgcttggctcccacagagaattttcccrgtaacttcctttactaggcaagcgtttattaaaatgtgttcctgtccacagaaaattcaggattcgggacgggggtacaccacacttaccaacactttga

SEQ ID NO: 178395 - DNA, 201 bp, Homo sapiens
tgtttgtttgtaacttgcattacgtgtacagtgtagctggatggtgcaacagtcgccctcacaatgtcattagtggctgccagatccggtgagctccaaastgccactgaggcattttaaccaacccgaacgctgtttgttgagattaccctcaagaccacacattacggctattctacaaatttttcctttttttaagtc

SEQ ID NO: 178396 - DNA, 201 bp, Homo sapiens
atgatgagatagttcctctggtgtggtctgtgtggcctgcctagagagccctgatgccccacagtggctgtagacctggccccaagtcctgaaggcttctrccttcccaggtgcatgtcttatcctgtttcctatatttcatatttgtggttgagcctttagaaactaggcaccattcggccaggcatggtggatcatgcc

SEQ ID NO: 178397 - DNA, 201 bp, Homo sapiens
acatccacatggccctgtagggaacaaagtgattggtcacaagggtaagatgtctaggatggaatatcaaaactacgcagcctaaagagttccacaccaarcacttctaagctagctgctgggtctagggtggagccccctacctgttgaactctgttggaaataagagtctgtactcttgcattttgtccagatccgcta

SEQ ID NO: 178398 - DNA, 201 bp, Homo sapiens
tgagtctggggtctttataggcagaggatggggtacaggacgggctatcggtagttttgaaaaaggcaacatttgatgggcaaaaaggcattattccgaargaaccattcaggagagagtgggcaaacaggagtagagttgtcgccttgggccgtgagtttcaggctttttggtttgaaggtggagcttcaccagggacct

SEQ ID NO: 178399 - DNA, 201 bp, Homo sapiens
ttaagacagccacttccagccaagatggagtgacagggacagatttgccctcctgcccaaaagacaaaacaacaacaacaacaacaaaaatatatggaaawatgttttttagtacacactggatgtcaggcaacggaggacagtaacctctgagatacaggaaacaaatgaggtgagcccttcgagtaccctagctcactg

SEQ ID NO: 178400 - DNA, 201 bp, Homo sapiens
tactatactcttcagacacatatattatgatgttccggtgtgatctcaggcaaccttgtaaacctgtctaaatctttaatttaaagaagaattttcatttrtaagacttaaaagaagcttgtgggacgtgtcagaatttttaaattactgctcttttattcacaaaaagctatgtgggtactccatgtaaattgagagata

SEQ ID NO: 178401 - DNA, 201 bp, Homo sapiens
ggacaccagaattacatgttgtcagtgtgcatttagctgtagtcacatctgctgtcttcagcctcttgacagtaaagcatctgtgctctgaggcacttttktgtgatccagttttgtacacaggcagtttgttgggagcgttaccattgcctctggttcctcatgtgtaaaatggtgagaaaatagtattaccttataaaa

SEQ ID NO: 178402 - DNA, 201 bp, Homo sapiens
gtgaagggtcattataccattgcagatcatgaagtgacccattgtacttaagaaagtcatggtgctagtcttgagagcaaaactcctaggaaaatagtgtragaaaattcttacactaaagaactgttcacacttaggttagctattcactttcacacttaccaagtccatgagattccttgagctttctcagtccacccc

SEQ ID NO: 178403 - DNA, 201 bp, Homo sapiens
gaattaacaagaaaacaaagaaattctacttgaaatggcaccctcctctgtggtattgtgaggaagcattccttactcaaagaacgttagacaaacacctkccaaagcagggttggctctgggtcttactgcacaaaactaggtaggaatctataaaagtaataggtacttttcatttggacaggtgtatgtcctagttta

SEQ ID NO: 178404 - DNA, 201 bp, Homo sapiens
tagttcttcaaaataatataattgagaaattgccccataatacatgggattttgatagtacttgagtataaggggaccaactctctttttactaaggagtrttagggaggaaaaatggaaagtgtaaaccacaacttaaatgttcacttctccaccgttttttctatactatctgttgattttcacatttctttctaccag

SEQ ID NO: 178405 - DNA, 201 bp, Homo sapiens
gggctggacaccagaattacatgttgtcagtgtgcatttagctgtagtcacatctgctgtcttcagcctcttgacagtaaagcatctgtgctctgaggcamttttgtgtgatccagttttgtacacaggcagtttgttgggagcgttaccattgcctctggttcctcatgtgtaaaatggtgagaaaatagtattacctta

SEQ ID NO: 178406 - DNA, 201 bp, Homo sapiens
gctgggactacaggcatgtaccaccatgcccggctgaatttttttttctttttagtagagatgaggcctccctatgttgcccaggctggtcttgaactccrgagctcaaatgatctgtccacctcggccccccaaaggactggattataggtatgagccaccatgcccggccttattcttatttttaaaggaagaatatct

SEQ ID NO: 178407 - DNA, 201 bp, Homo sapiens
tggaccccgtcatgggctgcatttgtcaatccaagtaaatgaccgtcctcacacttttatcctcagggaagtttgttattttttttttaatttgctcatakaaagaaatatgactctgttctctgtgttttacactgaagagatacagaattaacaagaaaacaaagaaattctacttgaaatggcaccctcctctgtggt

SEQ ID NO: 178408 - DNA, 201 bp, Homo sapiens
gcctatattggcttataattctgttttatttagtataaaagtgcccatattggctcattggcccataggggctctgaagtcacttgaagtttactcacccrgcaagcttgactccttagcaggtgaatattcaccctatgcgaggggtgcatttatttcaaaggtttctgagaatgctgataaattccaccacctttctta

SEQ ID NO: 178409 - DNA, 201 bp, Homo sapiens
cgagatctggttgtttaaagcatgtggcacctcttccctttctcctcttcctcctgctttggccatgtcagacatgcctccttccccttcacctccttccmccatgattgtaagcttcctgaggcctccccagaagccaagcagatgccagcatcatgcttcctgtatagcctgtggaaccgtgagccaattaaacatctt

SEQ ID NO: 178410 - DNA, 201 bp, Homo sapiens
gcagtaagaagaaaagaaaagccttctgcagtaccattttctgtccctcgtgagtgtgatttcatttcctccctggtcgcacatcacccacatgctcagaygacatatccctgttcttgggtccgtcctccagcttctgactcacagagcagagcgatagtctgtgggtgcctgtgttggagggtacaggttgcattccag

SEQ ID NO: 178411 - DNA, 201 bp, Homo sapiens
caactgtgccttccatccttctggctgcagtaagagaaaccagattttcctcagcccctccaggctctttcttatctaactcaggagcgcctcctgccagsggggctgggcaaagaacagacccagaggtctccatttttgtaaaaaggttcatggcaggtcggttatttttcagtatattttttaaaggcgtggttgagc

SEQ ID NO: 178412 - DNA, 201 bp, Homo sapiens
catttgtaaaatgggaataataacaatctgcagagttttgggggagataatgagttgattgaatgacagtggaaggaatgtgagcatattctagaaactcwgggtgcagccccagccttactacatagacgaggctgatgtgttctgaatggggaccttattttaatcacaagctgatgaggcttcaggaaattgggttat

SEQ ID NO: 178413 - DNA, 201 bp, Homo sapiens
ttgccttctggccacgttcagcttgctcatggagccacaggcttcatctcagcactgtttgttctcagggccaagtcactggaaaccaggctcttaagttkgagcctggaaaagaacacgtgggactctgaagaggcggtgccaggacctcagagtgacagggcagggtccctgcacacaggggccttgcagggaaaagca

SEQ ID NO: 178414 - DNA, 201 bp, Homo sapiens
tagcttttggattaggacttatccaggtcttcctttagttccacacaattccatgtactcaacaaaagggtgcctaattaaattccgattgaagaaattcwtatgaaaagcaatgtgcaacattaattctccgtatgtgcaaagtactgcatttgaagtaggaaacaagaaagtgtataattcaaaaccctatatcgtgat

SEQ ID NO: 178415 - DNA, 201 bp, Homo sapiens
tatcccctgattacagtaacataaacatctgaagtgatttttgaattgctacacaaacagtattctattaacattgtacattaaaacattgcagcggtccscataggctgtggaaatgagtagatttcattttcctacattccctttatgtttctgtttgtacacttggtttttacatggcaaatttcattggttcctagt

SEQ ID NO: 178416 - DNA, 201 bp, Homo sapiens
aaatataaagatctatcactagaacttattttaaaccctggaagattgtcctattctattcctgtagtgctttgtcatttacatctttgtatttgattctyccaacacatatttgaccatggttaggagagcacggattgttttttgtcattttcataggaaaaggctgacattgaaaggagaaacccttgtttgatgtct

SEQ ID NO: 178417 - DNA, 201 bp, Homo sapiens
gtaggccctagccattttgctcagggaggactgcgctcttcgggaaaagttctgttgcaagtcacagattataggtgtgtggtagaaggccaagcctgagytgtcacttcctcagtgtcaaagggtctcattacatttcattacagtgattttctttttgctgaaacattaggaaccctggagcactgagccaagatcatg

SEQ ID NO: 178418 - DNA, 201 bp, Homo sapiens
gtcttgaaccccggtgctcaactgcctgagattgaactcagtcaaaccaactcagcctcaaatccaagtgtccagcttctttatgggaaaagcaaaaccastggttctgtggggacacatattctctgcagatacagtggatggttcgaggtctaagggcatgcgaggcctccgtgctgctctccctttagtggatgccag

SEQ ID NO: 178419 - DNA, 201 bp, Homo sapiens
agaagcagagcaacggagaccgggaagtttccgtctgtgtcctggattgcagccaactgcttaggcacacacacctgctgccctcccggctctgagtcacytcctctcctctccctgtccaacgagcagctgccaaatggcagccaaatccaacagatgtaagccgggaccccacctgtgtttgaattactttctttgaaa

SEQ ID NO: 178420 - DNA, 201 bp, Homo sapiens
tgccttattttgggaatcagctaagttgagtaggtagacttatgccagatttcattaattggtatttttgctaattttaagggatacttaaaaatatcccytgattacagtaacataaacatctgaagtgatttttgaattgctacacaaacagtattctattaacattgtacattaaaacattgcagcggtccgcatagg

SEQ ID NO: 178421 - DNA, 201 bp, Homo sapiens
ggctggccactgcctgacttgcagacctcccaaggtatcctcaccatcccaaggtcatgacaacctcgcacacttctgcccaggcctaagcaggagggggkcctgtgtgggagagagggcctagcacctcactcatcagagctgtgtacatgaccacactgctgtgcttcagggaggcccagtggctggatgttgagcttt

SEQ ID NO: 178422 - DNA, 201 bp, Homo sapiens
gctttttagaacatatacatagctagcattcacatgtggccacagatgaaatgatatgcttgactcccctaaaggtgcctttcttgtcagtgtgttacttyacggagatactttaaccttgatcgtccgcagccatactggattcccatggaacaagagagcaggaagtgcttccatcatattttccccgttcagtttgag

SEQ ID NO: 178423 - DNA, 201 bp, Homo sapiens
ccagaaagggcatgtgggcagtggtggggggtaggaatcctcaggacacatgcaggaggaagaagatgaacctgccatttgtagtgtcctaggagcccagrgtctttccaccagaaggctgtgctcagctgtgtaagaacatacaattgggaagatcatgactgaaaaactttagacttgatgagttattgcagttcaata

SEQ ID NO: 178424 - DNA, 201 bp, Homo sapiens
aagcactgtatctctcaatgtaaattttttctaaatagaacactgtgaggaggcatttttgtgtttcttccattttgcattttgtctcagagctcactacytctctaaggagtagtttaggtctgcttggatgagagtcaagcttgtgacatgactgttggtgccataggtaaaccaaactgagagaaatatgaacatttg

SEQ ID NO: 178425 - DNA, 201 bp, Homo sapiens
ttacataactaaagggtgtggcattcagtttatagtttgtgtggcagaggtaaggtcagtctcatccagaagggcaatgtgtaatgctgctttgggcttgyggtacacacagagaatcccagctggtcactgggcacattttcagaggggtgtgtgcatgaggttgaaattctgtatttttatgttgtaatattctacaga

SEQ ID NO: 178426 - DNA, 201 bp, Homo sapiens
tttctttgcaacctcaaaacataaaccctcaagctcatttccgcagcctgatgtgcagtcttcctctctgtcttgtgtctctcctctcacccatgcctccrtgggggacagaaggctacaccgtgtggctctggcagcccctcactccacacagtgtaggcatgtgctgttctatcacacatggacactaagagatcttgt

SEQ ID NO: 178427 - DNA, 201 bp, Homo sapiens
gattcaatgctactccactatgtcctcatgcctgaatattgctatgaggacttaacagcaggggtccccaaccccctgagccacagaccagtactggtccrtggcctgttaggaaccaggccgcacagcaggaggtgagtggtggaaaagccttacctcctgagtgccacctcctgtcagatcagtggtagcattagattc

SEQ ID NO: 178428 - DNA, 201 bp, Homo sapiens
tcccggaaggggtctgctgccgggaggtgggacggaaggtacggtgcagttagtgtgttgcgtgtggggtgtgcgggatacatcgagcgcctctggtcttyctctgggggctgtgagcgtgtgtgccgcgcgggatgtcgcgctcacacccgggcaggaccgcccgctctcacctgcccctcaggtgaccgcagcgtctct

SEQ ID NO: 178429 - DNA, 201 bp, Homo sapiens
ttttccctttggctctcaaggggagagatggattagtgaccagcatatgatagtttcagacatcccagatgaggcagctggggagactaaaagaaggttgytgatactgtttttataggcagtgctaaattacctttggttttggaattaaggtgttgaataagaaagctaaaattattttttggccattgatgcatttca

SEQ ID NO: 178430 - DNA, 201 bp, Homo sapiens
tgtgtaaggtaatgcaaagtgtttaacctgttacctatcacatagaaagaactctaaaaagttggagtgctccccacagtcctttgattagatcacttttwaaaaaattttttttagacaaagtctcactctgttgcccaggctggagtgcagtggcgtgatcttggttcactgcaacctctgcctcctgggatcaagcca

SEQ ID NO: 178431 - DNA, 201 bp, Homo sapiens
cgggagcctctagaggcagccagccctgcccacaccaagaacgtaagaggatcgacacgtattgttttaaacccctacacctgcgttaatgtgttaggctrgactggctccagcctctcccctctagcctctcagcaacctccacagttaggccctcctggagacccctcctggctgcctcaggccatctcctgtacatcc

SEQ ID NO: 178432 - DNA, 201 bp, Homo sapiens
cagatgccctcctcaggggccctactctcctggccacttcactgaagaattggccatttcccgccttgtctgcaatgctttattctcagccctgtgagccyctgccagggcctggctgacaatgcttgcatctggcccctagcatctctcacagcgtcttgaaccccggtgctcaactgcctgagattgaactcagtcaaa

SEQ ID NO: 178433 - DNA, 201 bp, Homo sapiens
atatgttccctgaggtcgtacatctaatgagtgtcagaactgagatctgaacccagatctcagcagttgctgtaagtcattttgttatacagactgtggtragccttatgagacagagagaaataaatagtcttactctaagaagagatttcagattcaaatgccactgctctggcacttggggctatcatggcatttgtg

SEQ ID NO: 178434 - DNA, 201 bp, Homo sapiens
ggtttgtaatcttcctttgccctctttctagctggtcacctgacctgacctcctcaagactctttatttcctcatccttaaaattgggataattatgggamcctccctaaagggttgttcagaaggctaatgcacatagaatacttccagtgctgcctgtggtaaatattgcctgttatttttattattactgtttttaca

SEQ ID NO: 178435 - DNA, 201 bp, Homo sapiens
actgcaacctctaccttccaggttcaaatgattctcgtgccttagctgcctgagtagctgggattacaggtgtttgaattactgcttagctctttctgaaytgcactggctttgggtaagtcacttatcttttctgccaggttggaagaataattcttatcaaataggaaataaatctgcacatagtagtggcctttgcct

SEQ ID NO: 178436 - DNA, 201 bp, Homo sapiens
gaggggaaggggtgatctaaaatgagaatcacttttatttttacgtaacaataggcgaattgctcttaggggtagtattcattccttcaacaaatatttaytgagcatctgctaggtgctaggaacaaaaccgtcctaggaacaatgcagacaagttaatgggcaatttgaatccaatacagattttgtaagtttgattac

SEQ ID NO: 178437 - DNA, 201 bp, Homo sapiens
tgaattactgcttagctctttctgaactgcactggctttgggtaagtcacttatcttttctgccaggttggaagaataattcttatcaaataggaaataartctgcacatagtagtggcctttgcctcattactggaatggaccttccctccatagtgttaacagaataataaaagatttcttgacttttaggaaaggaag

SEQ ID NO: 178438 - DNA, 201 bp, Homo sapiens
atcttttctgccaggttggaagaataattcttatcaaataggaaataaatctgcacatagtagtggcctttgcctcattactggaatggaccttccctccrtagtgttaacagaataataaaagatttcttgacttttaggaaaggaagttgaatgtgggaggtattactatttagccttgctttgcatggggaatctatt

SEQ ID NO: 178439 - DNA, 201 bp, Homo sapiens
tgaaaagttcgcttttgccttataggcagtttgcagatatgctttctgaaatgtgtcggcctcactttgttcattcttttctcactgaaaagagctttgcrgtcaagctaacaatgcatgtggtggactatttttaagaccaaggagtctttggctctggcttacctttacctgtccttttccacttctccacttcttcat

SEQ ID NO: 178440 - DNA, 201 bp, Homo sapiens
agaggcttctccagcacccatggtttggcttaatgccttggccgtacactcccagggtgtcttatacttctctttcatatatctcgtctcactctttcctyctcctaaagtgctgatcttcccgttagacagtacaccctcaccaagtctatttcagtgtactcgaacacccagaccgcacaaaccaaaatatcagcctgg

SEQ ID NO: 178441 - DNA, 201 bp, Homo sapiens
atttgatttgatataatgacactgaaaatggaaaggaaaggatgagtgaaaacaacctgtagaaatggaaaccacgtggtttgactaatgcctgtgtgggrgaggcacaggaaaggaacgaatcaaagatggctttatgtatcagaccaggagaatagatggcaataccagtaaaaatcaggagttggctttgtgaaagaa

SEQ ID NO: 178442 - DNA, 201 bp, Homo sapiens
caatgtttaaaaagtcaatgcttaactcattcagagaaaaactcctgtgacacatttcctggagggcattggcctcaccacttgtttttattaacaatctrtatatacttgtggaatttatctctagatggaatattcagtcttatccctacactttcctcagactgaggcttttcatggtgaggttggtgactgcacgcc

SEQ ID NO: 178443 - DNA, 201 bp, Homo sapiens
gagacattagcatgtccctggagacagtttccccagctctggttacgcggatcagtatgtagggaaagcttattacttttagaaacgttcctcttggaggrccctgtctattacccacatcaaatatatggtacacgttgctgttttctttgctttcgaaatgcttcagaactagcccctccatctttccctgactgtagg

SEQ ID NO: 178444 - DNA, 201 bp, Homo sapiens
atctgactgaattttccagcatcttctataccttctatatctgaagccccaaacctccaatctcttgcagttttctcttgatcttagagtccgtttctaarcattgaagagggttagagagtaggctgcagtcataaacttgtaaacagaggagaagtgttgggtgttaatgaaggctcaggcgaggggccggatggggct

SEQ ID NO: 178445 - DNA, 201 bp, Homo sapiens
gtgttctgtctctttcatttttcttatctatccttgtccctttcctgtccatgtttttattaaccctcacttggtattttgcagtctcattggttttactrgattcagtgttctccaccagttcatataactatgaaatttgttttcttagagcagccttctgatactgagttcagctcttcagccaagtgttctagcttt

SEQ ID NO: 178446 - DNA, 201 bp, Homo sapiens
atcttcatgcatcaccacctcctcctaaaggtaggatggggatggccgtcagtgccaatacattgtctcttctttcagctggcgggggtgggcagtgggarggagccacggggcggagacgcagagcaaacagtgccagcactggatcccagcgtgggccggtggtgggtgccaggagcagccagggcctgtgcctagtcg

SEQ ID NO: 178447 - DNA, 201 bp, Homo sapiens
cagtgcatctgagttctcaccctccatggtctgggagaggaacatgtgccatccacccttgcctcctctcggaggctggggctgtgtgcagggagcccctrcggtgggttctctgcccatttcctgctatgtaaagtgttattagggaatgaatggctggtgaaaaggaccttgcagcctgtgctttgagtagcctgggac

SEQ ID NO: 178448 - DNA, 201 bp, Homo sapiens
tgctgggcccgaggagggacagcgcgaggtgtgctggcacctgcagtcttctttcttgccaccgcataggacatcactagacaaaagacatcaaaatcagwtgctgttgtcccacgttgccatctctctcctcaaatcagtgtcccaatattcaggccgacttcggttcatcctgttttagctgtgcccactagaatttaa

SEQ ID NO: 178449 - DNA, 201 bp, Homo sapiens
ggtatctagtcattctacagttaattacctaaagattcctgaacccagactttttagtccctggtttgtcaccccggcggcatcatcagcctgagctggcytcctgggattttgcacttcactgttatgatttacgaataggataagttatgactgacccttcttgactcctgccacctgtctgtcagttatcttttaaag

SEQ ID NO: 178450 - DNA, 201 bp, Homo sapiens
gcaaaggcatgcgctgtaaatatgggaggcgggtatctagtcattctacagttaattacctaaagattcctgaacccagactttttagtccctggtttgtyaccccggcggcatcatcagcctgagctggcttcctgggattttgcacttcactgttatgatttacgaataggataagttatgactgacccttcttgactc

SEQ ID NO: 178451 - DNA, 201 bp, Homo sapiens
tcttccaaactttccttgtcttaaagggggcattccagtttctagttcgataatacccaagagaggcgtgcgtcatttgagaagaatctctcacacccccrtcgcaaaaatgttggccatctgacattttataacatcatgtctgcctgtaaaaggcaaactcctgtgttgtgaatcagctttcagctactttggaagaac

SEQ ID NO: 178452 - DNA, 201 bp, Homo sapiens
ctataggatagaaagctgattatcagtaatgttcttggcagtggggcaccaatgtgccaaacctagtctttggcaagctagtaagcaattttcctgccaaratcttgtgacttaccataagtagtaacccaattgtttatataaatttactcattgaaatgactcagctttccaggatattattttggcatttacttatgt

SEQ ID NO: 178453 - DNA, 201 bp, Homo sapiens
gaacatctcgttaccaagcccaagtagtaacacgttgttaaaattcagaaaaggctgactttaagagcttgccatagtcaacatcagaattatgttccacrgtcgtggagagaaacgtatcgtaattagcacaggccatctctgtagcccggaatattgggcaccatgtggcgactccaggcatgcttgcccccaggagct

SEQ ID NO: 178454 - DNA, 201 bp, Homo sapiens
cttaatgctgagtgaaaaagcctctaattggcacttttagaaatcttttaaaatcaaaacatgatttttctatgtttcttagaatggtactgtatttctaycacttttcacaaaagttagatttttagtattgctttattcgaactatatttttacatcggttctttaaaaatgatgaattggaattttgcaagtatatgc

SEQ ID NO: 178455 - DNA, 201 bp, Homo sapiens
agagaaacgtatcgtaattagcacaggccatctctgtagcccggaatattgggcaccatgtggcgactccaggcatgcttgcccccaggagctgagagccrggagccacggaaccagggagccacatctaaaaggctcactggaaagcaggtgcaggcacccaagggctgcttacgctctgctaccagcgcttcgccgttc

SEQ ID NO: 178456 - DNA, 201 bp, Homo sapiens
ccaaggagccataccaggcattcctgccactctaaacgtctgtaattctctccaaggctctctagcagtgcctgagttaagctgcacctttacgaagagtyggagtccagctactgctgtcaaagctcgagcttgcatcaggcattgctgagaaaaccgccagctctgactggcgttgtggcgcctttcttccaaactttc

SEQ ID NO: 178457 - DNA, 201 bp, Homo sapiens
gtggtgctgagcaaccaccaactcttcccaggaaggaggtgaaaagataacacacactggagtccagtggaggcgaggacacttcatcccacagggaccgyagtggccaagggaatggttttaatggtggtttgacttggcatacttatgaaaaggctagcgcccacccgctggcctgtgggtttatttggcaaaacataa

SEQ ID NO: 178458 - DNA, 201 bp, Homo sapiens
tgggtcagcaggcagtatgaacttcatgtttgtgacagctctgtttgtatagtattttcttgcccctcaaagaccatgtgggtaacacggtggctgggtgrgtctaggtggatgttgcccatgcagtgggtatgcaccacagttgagaaaatctgagattgggaaaccccaattttttataagggaactaataatcctgcc

SEQ ID NO: 178459 - DNA, 201 bp, Homo sapiens
tggaaagcaggtgcaggcacccaagggctgcttacgctctgctaccagcgcttcgccgttctctgacgtggatggttgctgaagacatgcctttcttgctrgtaaatgtattaggaagtggcctgggaaggaaaaagttgcagcataactactttctcccttgcgtggtagtgagttagcgcgacatgttggcataactga

SEQ ID NO: 178460 - DNA, 201 bp, Homo sapiens
caacttcacagtgtgccaaaaataaaacagccttggccctgcggccactggtgagctgagtgcgaaccaagcctgtgccatggggtcctcaagtgcagctmagccctgggctgctttcacaccagtgtgatgcccaggaggtgaatgatgtccccacagtacacctggcagctgtggggcaggacacctcggcagatgcca

SEQ ID NO: 178461 - DNA, 201 bp, Homo sapiens
aatgagccttagaaagtcagggtgcacagactttcagaaacacataatctggtttgcaaggacaatgttcttaaattcatttttacaagaagctaatgccraaggtgaaagaaaaggaaaagagaaatatgattactctaagtcttaaacatagatctgaacatcaagttgtgggagaaatacaacttcacagtgtgccaa

SEQ ID NO: 178462 - DNA, 201 bp, Homo sapiens
atagcaccaggctttcttgacgaaggtcttctctcttgaacggagtctactccttaaaaagttccatgggtcacctttattccactttgccatatcaagcrttgtaactgctactcactttagtccccttagccaggacgcgtggggaccacggtcttacattttctcctagtaataaagttagatattactaattatgcc

SEQ ID NO: 178463 - DNA, 201 bp, Homo sapiens
tactcctatcatttttgagaatgtttctctggtgtctaccatatgctaatagggcctgccctcgaggtcagaaaatttatgtcttttcaaatcttgtaagwttgctaggattttattttttttattttttttgatacggagtttcgctcttattgcccaggctggagtgcagtggtgcgattttggctcactgcaacctcc

SEQ ID NO: 178464 - DNA, 201 bp, Homo sapiens
caatttcagcatgtggaagaggtgttgatattgtcatatgacctcagccctggatcctcatctgtcttctagctcagtggttatcaaacttctagtgtgcrtaggaatgacctggtagtcttgttaaaacactgattttggtcttcactcccagaggtctcatttagtagatctgggtgggacccacgaatgtgcattttt

SEQ ID NO: 178465 - DNA, 201 bp, Homo sapiens
acttaccgcgtacgtattacacactggacactgtgctcaaaactcccggtgcatttggtaatttactcttttcagtgacatcacaacacagatattttcaygctccgcatccacctgtcctggccctcttcctttctggggtgttcctttaattttttgaagtttctttctagttggtcttgctgatttcctccttttgct

SEQ ID NO: 178466 - DNA, 201 bp, Homo sapiens
tcttgttaaattaggagatcaagtacttaatactaagtggcagtttcttttaaataacttggaaatttttgaatcctccaggactgcccctgttttccaarttagcataatctactctggaagttcagggattaggctagaatatgaatgggctgggctcttgttctgacacagccattcatagcaccagcttatttctta

SEQ ID NO: 178467 - DNA, 201 bp, Homo sapiens
ggaaaggttttttttcgtcatggtggggaaatgggcttctgtgcagtcaggggagaagccgatggaggaaaggagtagtgtggttatggaagaggctgaargggagaaggtcgcgggcatctggaggcctgagatgtgcatgagcatccagtcctgcaccggcgctggtgctgcagtggtgccgtctctgtcactgcagtg

SEQ ID NO: 178468 - DNA, 201 bp, Homo sapiens
gatatatggtggctaggttattttgaaagtaagaatcttaggagtaacaaattgctgtctgctatcacagtatttaaaaaaaaaaacccgttttacacacyaaaatgtaagaagaacatgctcccagaataaagaacactcaccaaattatatacttttgactatgtgaactactttttctcatttccatttttttcattt

SEQ ID NO: 178469 - DNA, 201 bp, Homo sapiens
gatataaagtttcagggggaaaaaaaacaacacccgcaatcccaccactcagaagtaattactgcctgcattatcttttcttcattgttttgactaacttkttactgattgacttcactgcttttcagcaaatgttactggccttgagttggatatggaacttaaattccatctggaatcattcctggatgattctttcag

SEQ ID NO: 178470 - DNA, 201 bp, Homo sapiens
aagaatctcagtgagtttttctctagaaaagacccggatagttacttctggtgccattttcttatacagaaatcatgacagatttttctgtatttatcagyagctgataaactgtaaaatgacagagaaaaggcatctaatatggctaatttctgataattggggtcacaaagtatttttaaattaagattttctaaaaaa

SEQ ID NO: 178471 - DNA, 201 bp, Homo sapiens
ctctgctggttttccttgtacctctttgtcagtgcattgttctgcccacccttgcaggttagtgtgtcttaacataccattcctgactctctcctactttrttcactttctatgtctacaactgcagtcactcttcccttgtgaatcccaaagccttgtctccagtccagatttgtttcctgagttccagaccctgagttc

SEQ ID NO: 178472 - DNA, 201 bp, Homo sapiens
ggcaggagctgctgtctgtcgggcacttacccaacatcaggcactgattttatctctgatctttagcattggtcgatatcattcaacaggcttatacatcrtggaacctaggcccagtgaggttcagggcatccaggaagtaagtggcagaactggaattcagcttggatctgtgttttcattttgttttgttttgttttg

SEQ ID NO: 178473 - DNA, 201 bp, Homo sapiens
tgaaggcaaataaccctcaaaattatgtcttttcacttggaattcagaggcacgttttctagataatcattcaggtatctatttgcaaacacacacccccrgcactccctgcctctgagcagttccaagagaatgctccagaaactccagaccccggcgctacgcaaggcaggcctgtagaggcagccagtttgctgccat

SEQ ID NO: 178474 - DNA, 201 bp, Homo sapiens
actcagggatctatggcacgacccatgaggatttatcccaaatggataattgaaaaaggtatcagtgaggcctgtacgcagacttcaggccagttacagcrctccgtagcagttttccagaagccgagaggactgccccatggtatttgctgcaaatggtgttcgttgtaatcacgtgggaactctgatccttagatgcca

SEQ ID NO: 178475 - DNA, 201 bp, Homo sapiens
aaacaatagaacaaatgctgtcatagccaggtggccttaatattaatccacaaagcaagctccacgcaggcagggactgtgtttattacttccaatttacrtatttctcttctcacacatgaaaatacccacaacaacggaagttcaggagtgagcacttaccgcgtacgtattacacactggacactgtgctcaaaactc

SEQ ID NO: 178476 - DNA, 201 bp, Homo sapiens
gacaaatcagtggggaaggaacgtcacaaaaattaactcaaaatggatcctagctggaaatgtaagtgctaaaattgaggcatcaactgttcacattgacrcggctggggtaaaaaatagtaacactttcttttgaaaacaccattgaaccttaatccaccctgctaaatttgtgtctgttatttttaagtaattcatatg

SEQ ID NO: 178477 - DNA, 201 bp, Homo sapiens
acacttactggtcaaaatgttcagtagtcatcgctttgtcgtttagtggtatttaataattatctatagaactagtatcctaccatcaaaagttactgagktgggaaatttccaccttggctttcttcagcattttcaacatgagtagtactattaaatgctttaataacacaaccattcaatgactcagtttcaaaggta

SEQ ID NO: 178478 - DNA, 201 bp, Homo sapiens
ccccttcactctcctgaagagcaatacagaaagtttcagtgtagagtggggcctttgctctgctctgcatccagccctacttgtgttatttgtcagatgtyggtcagcatctaaaccaagtttttccacatttctttcatctttcttttaagatgtttttggccaggcgcggtggttcacgcctgtaatcccagcactttg

SEQ ID NO: 178479 - DNA, 201 bp, Homo sapiens
aagacagcctaattaaaaataggcacaagacttaaatagacatttccccacagaaaatattcagccgacatgaaaggacatgcacgtgaaaagatgtgccrcaccattagtcattaaggaaatgccgctcaaaaccacagggaaataccacttcacccccactagactggctgtgataaaaaagacagactgtaacaagta

SEQ ID NO: 178480 - DNA, 201 bp, Homo sapiens
aaggaatattcacgtttgattatggtgtgctggccagatggtgctggggctgctcagaaagatgggattagggtaactacaaacttaccacctgcctatcragagtacaaggggcaggggacagaggcagcaccaggacaagcctaactcagcctgtcctggcagcacagggcaaatgtccacctgtgtgttttgtgccca

SEQ ID NO: 178481 - DNA, 201 bp, Homo sapiens
tcttcccccttcactctcctgaagagcaatacagaaagtttcagtgtagagtggggcctttgctctgctctgcatccagccctacttgtgttatttgtcaratgttggtcagcatctaaaccaagtttttccacatttctttcatctttcttttaagatgtttttggccaggcgcggtggttcacgcctgtaatcccagca

SEQ ID NO: 178482 - DNA, 201 bp, Homo sapiens
ttttttctttcttaactccctatgcaaagtccttcgttaattatttctctctcttctgtttaattgattctgtgtcatgattattctaattgcaaaatatrgaatcttgtaattaacttgtcatactattctaagagcacctctcattacactttggtttatttcattctagccatttattcatatttgagtgtatacagt

SEQ ID NO: 178483 - DNA, 201 bp, Homo sapiens
aacttgagattcacttaactgctaaaatactactctgttatccacaaactaccagttataaatgtttccgtgcctgattcagttgacagcaagagacttcrgaaggctataagttaggaaccagtatgagatgccaaatgcttccttgccttcccgaaaatactgccatgagagtaggcctttaaagcaatttccttcagg

SEQ ID NO: 178484 - DNA, 201 bp, Homo sapiens
tgacatttccagctggccattgttggaacataaggccattgtttctgctgctgaagttatctttgtttctaaagagttttgaagtatattaatggaggttrgttagaattaggaaaatattagggtcaactatattgctcgtctgctttcacagtgaaaggtagcatggaagtgtatacttgctggttaccctggcagaaa

SEQ ID NO: 178485 - DNA, 201 bp, Homo sapiens
tggagttcagtggcacgatcagggcctcctcaccctcaaatgcctgggctcaagaagtccttccacctcaacctcctgagtagctggggcaacaaacgtgyaccaccacacctggtgatttttttttttttttttttttttttgtggaaatgaggtctcgtttcattgttcaggctggtcttaaactcctggcttcaagca

SEQ ID NO: 178486 - DNA, 201 bp, Homo sapiens
tcagtttgctaatgacattatttaatactgactttattcgttcttcacataagacattattgaaacttaaattgaggaagttgcttctcctaggaagggtstgggactgctgctggacacagaggtttaacttgcaacccttttactagttaaaaggcttaaattttcactggctttttgacaagtatccgtttagaatca

SEQ ID NO: 178487 - DNA, 201 bp, Homo sapiens
tggacattgtttcatttcttttattctcttttctctgcattgtagtttgcgatgcatctattgatatatcttcaagctcactgactttttctgtggtcatrccaggggaactcatttctgtcagtgttttcatttctatcattttcttttggttctttttcccacctcttttcttgcattacgcatatcttcttgtatgtt

SEQ ID NO: 178488 - DNA, 201 bp, Homo sapiens
gcggccttgagtcgcttggatgagtcagggacatgaagcgctttgccttatggtgcgggagagcctctggcatcacctcctactaaagccagtaatgggarcagttatcataatggatgtgtcagtttgctaatgacattatttaatactgactttattcgttcttcacataagacattattgaaacttaaattgaggaag

SEQ ID NO: 178489 - DNA, 201 bp, Homo sapiens
caagaagtccttccacctcaacctcctgagtagctggggcaacaaacgtgcaccaccacacctggtgatttttttttttttttttttttttttgtggaaakgaggtctcgtttcattgttcaggctggtcttaaactcctggcttcaagcagtcctcccatctcagcctcccaaagtgctgggattacaggtgtgagccac

SEQ ID NO: 178490 - DNA, 201 bp, Homo sapiens
ttagccctgcagaatgggctcctctgtgagaacgtggcttccatgagaggggtgtcttcctttgccatccctacttgtgccattgtttctctcacaaggcrgctgtgtcctgttagcacccagaattaggaagtgtggaaaattaaagccatattatcctgttaaagtgtttcagggaaatgggatactttgatttgcatg

SEQ ID NO: 178491 - DNA, 201 bp, Homo sapiens
gctgcaagttctgcattcttcgttacttttctcattggctggtcctggtctcaggctcccttccagtggctgcttattttagtaaatttcacacactttcycatcattcgttcacagtaagcctgtggcacgatgtgcatcatttccattttatagatggggataggaatgatcagagaagttactttgtacagtgtctcc

SEQ ID NO: 178492 - DNA, 201 bp, Homo sapiens
taataaaatcagtttattgtctctcctatcatctttgtcaatttcccttaacatctcatatgtaagacgaggtcatgtgttcttgcagtgtaggtcgtgcytcttatacccttaaatacagtatcagggttcaaaaatgttatcatcctagaaaggctgtactatctctgaggtctcatacacgatatcgagatcagatct

SEQ ID NO: 178493 - DNA, 201 bp, Homo sapiens
tatgcaattcaggatcccctgtggcctaggtaggcattcctagatgagaaggtgcggggtaaagataagccagatgacaagtactttagcttttacctccragatactttgctttgcacagaactttcatctctaggaaagaggccacctgcaacagatacaaaatctcttaagttgcattttggatgtgattgttttgtg

SEQ ID NO: 178494 - DNA, 201 bp, Homo sapiens
taatatactgtatacattgagaaaaaccacaaaggaaaaaaaccccatctacattgtactgtgtagtactcatgtccgaagcagtggtggtggggcggagsgggggacatttctaagaggtgggtagatttcctaacaaactagaaggaaacaagcttaaggaaaattaccttcctcttatgcaattcaggatcccctgtg

SEQ ID NO: 178495 - DNA, 201 bp, Homo sapiens
tatgctatgaagtaagggcaaacttcattcttttacatgtagctctccagttgtccgtgcaccatttgttgaaaagactactctttcccactgaatggtcmtagcaactcttgtcgaaatcagtcgatcctagacacatgggtttttttctggactcatgtttctagtccattgatttgtgcatctattcttatgccagta

SEQ ID NO: 178496 - DNA, 201 bp, Homo sapiens
taaaggaacttaaaaaatctgccatatctatgttttctactgctgctctaccaaataactacaaacctagtggcttaaaacaacaaaaacttactgtcttrtggttcttacaggagacctgaagccaacataggtgacactggcaggcggtgtccttctagaggctccaggggagaatgtatttcattgcctattgaagct

SEQ ID NO: 178497 - DNA, 201 bp, Homo sapiens
ataataaaggaacttaaaaaatctgccatatctatgttttctactgctgctctaccaaataactacaaacctagtggcttaaaacaacaaaaacttactgycttatggttcttacaggagacctgaagccaacataggtgacactggcaggcggtgtccttctagaggctccaggggagaatgtatttcattgcctattga

SEQ ID NO: 178498 - DNA, 201 bp, Homo sapiens
atatgcttagattagggtatatggcaccagacttaaacatattcttccaaagaatacaaaaatagggaatacttctcaacttcctttataaagtggtacarcttagtgagaatagttagagaaaggaacattacagaccaatctcacttatgaaccttcataccaaaaaaccccacaaaaaatcctgcaaataaaagccag

SEQ ID NO: 178499 - DNA, 201 bp, Homo sapiens
agagcatagaacacctgtttacttattgtttctggctgcttccacatagagttaaatagctgcaacagagaccatgtggctttgaaagcctgaaatgtttactctctggcccttcactgaaaaagttttctaaggtttgctgtagagctctcttccttagggtggatagtggaattgctactgatcatagatgatatctcc

SEQ ID NO: 178500 - DNA, 201 bp, Homo sapiens
ctggactcatgtttctagtccattgatttgtgcatctattcttatgccagtacagcactttctttattactgttgcttgtattataagtttggaatttagraagtgtgagtcctccaactttgttctttttctggttattctggatcctttgctatttcatatggtttttaaaatcagtgcatcagtttcaaaaacctaat

SEQ ID NO: 178501 - DNA, 201 bp, Homo sapiens
ccataataatctatgctcttggtctagaccatgtgtttcctgaccacctggaagagtgaataccagaacaaaattaggactctggctgttaccaaggaagraatgtaaggtggagactgttgttcttactcacagattttagatggcaaagatatttcagttccatgaaagagccatattctctttgccttcaggaccttg

SEQ ID NO: 178502 - DNA, 201 bp, Homo sapiens
tccaagcaggtcgtctctggaggccggtgccctgttcgaggcagtggtcacccttcctcccactggtccgtctgcctcctgcaagctgtaattacaccacrgccctaatacagctgtggcctttggggaacacaaaggcacaatcgattgattgtttcatgtgaataaagcgagtgtgtggtataagaggatttgatgagt

SEQ ID NO: 178503 - DNA, 201 bp, Homo sapiens
gctacgctcagcactgcattccggccagtgtttgtgctgtgggctgtgccaagggcattgttgtctactgccagaagacagggagggtgacaactgggatrgagaggaccatggatgagggaaagattaatttgaaagaggggatctgagaaagtaattgtccagtaatagggaaaggaggatgctttgctagccagaagt

SEQ ID NO: 178504 - DNA, 201 bp, Homo sapiens
agctcatactcactactaactacctgctctctgtatggcactcagtagctccaaccacttaacatttttaagccttttttcccctctgtaatgtaaacttsgtgaagctcaggcctttttaaaatgtatacccttcgctaagtacgcttgatacaataaaatctttgttctctgcagcattgcagattcatatatgtatat

SEQ ID NO: 178505 - DNA, 201 bp, Homo sapiens
tagacttgacaccaagtagttgtaatattcctagtagtaatttttctgctattacaaatctgctaggttggagaaatgaaagagaaataggaaatacaagrttctataattaaggacaaaatgaagaggataaagttctcaagaaaacttaattgaggaatatttcttacagaaagcagtttatgtctgtggtaagtgctg

SEQ ID NO: 178506 - DNA, 201 bp, Homo sapiens; identical to SEQ ID NO: 31856

SEQ ID NO: 178507 - DNA, 201 bp, Homo sapiens
tatattatgatgttccggtgtgatctcaggcaaccttgtaaacctgtctaaatctttaatttaaagaagaattttcatttataagacttaaaagaagcttrtgggacgtgtcagaatttttaaattactgctcttttattcacaaaaagctatgtgggtactccatgtaaattgagagatactgaatgtccccttccccac

SEQ ID NO: 178508 - DNA, 201 bp, Homo sapiens
tattgtctgtaaatcccagttaagtactcaaagatttaaagtgtaatgaaacttagatggttgggaaagtggttgaagtgaatgttctctgtgaagctttyttattatttaaaagtttgggtaattccgttgttctcttttcctaaatatattcaagaatacctgctttcagttcagattttaacaatcataattttcagt

SEQ ID NO: 178509 - DNA, 201 bp, Homo sapiens
gatgtggtagttctttatcttagaatggcccatgagtgttccaagatgataattatagacaactaccttagtatattttgatcataatcacagaaatgcarttcctaacaagggtggcaacttctagactgtcagaatggttgcagccatatatatgatttttattaataaacaaaaccaagaagtctgcacatggactag

SEQ ID NO: 178510 - DNA, 201 bp, Homo sapiens
ttatagacaactaccttagtatattttgatcataatcacagaaatgcagttcctaacaagggtggcaacttctagactgtcagaatggttgcagccatatwtatgatttttattaataaacaaaaccaagaagtctgcacatggactagggctcagtcttgctaaaaatatagtgaataacacaaatacactttattatct

SEQ ID NO: 178511 - DNA, 201 bp, Homo sapiens
ggtggtggccctttcctcttccaggcactccatcccagggagacatcagagctctgtccctaatacatgcgcttgggcatggctggtgggcccaccaggtrggtcccgtccagtgaggaggaatggattgatgtcctgcctaaagtagcagtctggcctttaactgacaaagctgctttggttcactgctggggggaccct

SEQ ID NO: 178512 - DNA, 201 bp, Homo sapiens
gaggatgttgaaacggttgtggggagattttggatttgagagattaggtacacagacacactgtctgtatgaatatgtatttataaatccaatttgtcacrgtcagaatctccctgtaatgtacctgcatgcatccatccatccatacgtgtgtttgtgtgtgtgcattgtagtagcagatagaaaagagaaggttagact

SEQ ID NO: 178513 - DNA, 201 bp, Homo sapiens
cagtagatagatctatttattgaagggagacaatgccccagaagagcgactgctgcatgcaaccatgcaggactctcaggtgcccatccagcgcctcaggyagatgcttctcttgggccactaagaagcttcccctcctgtgaccacagatgggaaaattgcctcaggacctgctgcagggaatattgctggcaggctttc

SEQ ID NO: 178514 - DNA, 201 bp, Homo sapiens
  misc_feature (1)...(201): n = A,T,C or G
cgtctacagcgttcctggacgctaagcctaagaattgcttcgtgaaactccagtttcgttttatgaacgcgtgtgtgcgggaggcgacgtgaactgacttnactgtgggtacgaaaagcccaaagccaccgcccaggaagaaccgcgcttggctgcggcccgggaagaaacatccacggccgcgttagaaagagggtcgca

SEQ ID NO: 178515 - DNA, 201 bp, Homo sapiens
ctggagcaagggcatgtcttctgtgggtagacaagagtgaggaaatatcactaagagtaaatgtggtgtgtggtagtggcagataaagaccaggagagccmgtcaggaatttactaagcagtgttccacaggatactggttttatgatatacactctgatgggaatcctttggacatatctgtgttcaggaattggaagaa

SEQ ID NO: 178516 - DNA, 201 bp, Homo sapiens
ccaggatgccacgatgatgaagagtaaccagatacatttagaaaaggtgcctctccggggcccagagctgttgccaaggcgcactggtgcattcggcacaragcggtgcgggcagaaattaacatggtctgcatcaggtggaggctgtgttaattttccctgtgcactgactgtctaacctaaacatcccatggtggaaac

SEQ ID NO: 178517 - DNA, 201 bp, Homo sapiens
cttccctggggctctaggcaggaataagccttcgaggtttacaggtagagtctcatgctggatgactgggttacaatttagtattcttcaggtagagcaamcaaataatgctttgaaagattcatttatcttataggtcaacagtttttgttttctatttagttgtagtaagattgtgttaataggcaaatatttttgtca

SEQ ID NO: 178518 - DNA, 201 bp, Homo sapiens
accagcaaggggagctcagggtcacagcttcacttcaggcaggaggaaatgaagggtggagcggcatctcagtagccttcagaggctgagcgtgtcctcakttggccagaagagggacagccctatcacagcacaccctagcaggtgctggaataggatggccaggttactgcctctggtgatccctagtctccatgtctt

SEQ ID NO: 178519 - DNA, 201 bp, Homo sapiens
gcaccagggtgtggtctctaaccccaggagagcattttagacgcctagggaaagcagctctgcagtcagattgacaggatcggagtaaacctctgagaagytccaaaactcaatcccagatcatacttcttacagtgagtgctggtctaatgatttccatagaatttgcatcgtaatttggtgacagtgtgtaaaagctgt

SEQ ID NO: 178520 - DNA, 201 bp, Homo sapiens
acacagacaggtttcagtgctgtgcctcatcctcttgagagctactgggaaaggagaaggcctttaaccagcaaggggagctcagggtcacagcttcactkcaggcaggaggaaatgaagggtggagcggcatctcagtagccttcagaggctgagcgtgtcctcatttggccagaagagggacagccctatcacagcaca

SEQ ID NO: 178521 - DNA, 201 bp, Homo sapiens
gaagtcagacagttttgaagtgggtggtaattgagaggccaccttcgttgatatctttttgcttgagagagggagaggggagatctcagcaataaacatakctattctggaattccaaagacctcattagaacagaaatgatgggtcattcacctacgctgaatttttcattgtgaatattctctaaaacagagagaaggg

SEQ ID NO: 178522 - DNA, 201 bp, Homo sapiens
cttttacatagtgcacatggacacagagagacacacccagagagagacagagaaaaacacatacacacaagagtatggtaaaaatgttttcaaaacacagrcaggtttcagtgctgtgcctcatcctcttgagagctactgggaaaggagaaggcctttaaccagcaaggggagctcagggtcacagcttcacttcaggca

SEQ ID NO: 178523 - DNA, 201 bp, Homo sapiens
aaaattagccgggcgtggtggcgggcgcctgtagtcccagctacacgggaggctgaggcaggagaatggtgtgaacccgggaggcggagcttgcagtgagycaagatcgcgccactgcactccagcctgggtgacagagcaagactccgtctcaaaaaaaagaaaaaaaaagagttttatttagattattttattagagct

SEQ ID NO: 178524 - DNA, 201 bp, Homo sapiens
aggatggagttcaaagtgagcgggttctcactgtaaacgagtggacttttacatagtgcacatggacacagagagacacacccagagagagacagagaaaracacatacacacaagagtatggtaaaaatgttttcaaaacacagacaggtttcagtgctgtgcctcatcctcttgagagctactgggaaaggagaaggcc

SEQ ID NO: 178525 - DNA, 201 bp, Homo sapiens
tgtaatccagcactttgggaagccgaggcaggtggattgcttaagctcaggagtttgagaccagcctgggaaacatagtgagaccctgtttctacaaaaartacaaaaattagccggtgtggtggtgagcgcctgtagtcccagttacttggaggctgaagtgagaggatcacttgagcccaaaatgttgaggctacagtg

SEQ ID NO: 178526 - DNA, 201 bp, Homo sapiens
cctaggagttctctgtcagtcctctttcccccaccaccgcctccaaccccagggaggccttttctgctctttctccaagatcatctcaagttcacccacgmctttccgtcgctatgtcccctccccacccctcgtgtccaggccaccatcgtctctcaccacatctgtgactggagtctcttagctggtctctcccctgct

SEQ ID NO: 178527 - DNA, 201 bp, Homo sapiens
cacagtcactctgctcctcagctgcctggcctctggggcagttcagtttcacacaccaggaatgccctgagcccagatttcctacctctgttttttacttstgtttttgcttctgtttctttccccagatgtcctcatagctttcttcttcactttcttccagggactcaaatatcacattttcagtgagaccatctctgg

SEQ ID NO: 178528 - DNA, 201 bp, Homo sapiens
caactgtggactctggagaggggtcttcagaggagtctcgcaactgtggactctggataggggtcttcagaggagtctcgcaactgtggactctggagggrggtcttcagaggagtctcgcaaagcctgtagtggaataggcagcattgttgtttccatggcagcttggaatgtggaggtggaagctgcttccctggggct

SEQ ID NO: 178529 - DNA, 201 bp, Homo sapiens
tgaagcctctcagtcatcttcttcagtctgcactgtacctttcatagatttctgattcaattagctgcagattggtttttgtggcttcctacctgaacgamgatagaaaatgatgatatatatgatggtggacggtaagatgacaaaccagttttgaagtcctctaagaaacatgaaagtggatgtgagtggtagatcaca

SEQ ID NO: 178530 - DNA, 201 bp, Homo sapiens
atataatattatattgtttgccaaatgaatttaaatattttaatgttgaaatgatatcagcaaatacctaaaacttatttcctgttgcaataaaatacacrttttctcagtctcacaactttccacattaataataattaaaaggttagaaggcagccttaattacatagctaatcactcggcctttcccctcgttgtttg

SEQ ID NO: 178531 - DNA, 201 bp, Homo sapiens
cctcttcaccgcctcacctccaagcctgtctgtgcagcagcttagccactcctcttatttgtacctcctattttcttgcctttttctttcttgctgtcacragtcttaaaaccagtcatatgtcatcattaaactccacatggccactattctgataccattaatctgtcttttgatacctgccatctgacccctgatggg

SEQ ID NO: 178532 - DNA, 201 bp, Homo sapiens
cttgcattaatttcaatgctttctctttttttgctttaaaattgtacctgatgtaaactctcataccttcatttagagattactcctatcatttttgagartgtttctctggtgtctaccatatgctaatagggcctgccctcgaggtcagaaaatttatgtcttttcaaatcttgtaagtttgctaggattttatttttt

SEQ ID NO: 178533 - DNA, 201 bp, Homo sapiens
taatcacctgggattctgggtggtgggaacagatgagcagaggcacagaggttggaaacagggccatgagcagaggctacataacggagcactgtgactckacaagcggtagatgatgaaatggggcggtacgttgggacctggtcttggagattttacatgcaaaggtgagaagtccacgcttcactctgtagccggtgt

SEQ ID NO: 178534 - DNA, 201 bp, Homo sapiens
ctgaaaattgccatgaatgactatttcattgttgttcccccatgatttttctcaccatcttctagatttcttaaagaatatttaccctagggcaggtgccrtggctcatacctgtaatcttcaggaggccaaggcaagaggatcacttgagcccaggagtttcagaccagcttgagcaacacaggaagaccctgtctctac

SEQ ID NO: 178535 - DNA, 201 bp, Homo sapiens
gtcactttgatagtctaaaatctatgttggtttactattgctgatgtaacaagtaatcacaaacttagtggcttaaaactacccagattcattgtcttacmgttctggaggtcagaagaccaaatggagtcccactgagctaaatcaaggtgctggcaaagccaccttccttgttgaggctccagagttcttggacagtga

SEQ ID NO: 178536 - DNA, 201 bp, Homo sapiens
gtagctctgaagtacatcacctaaagaatagaattacttatgagagatccattcgtccctgatgtgattacctgttccatctttattttcatctttggccratgacctctgtattcggaaatctaaaaaatccctctctcttttttttttttttaaacaaatcagcagtgctcttcctgttccaccaagccttatttatct

SEQ ID NO: 178537 - DNA, 201 bp, Homo sapiens
ataggtgcagcttgaacttccattttctttgtcatgattgcagacccaaatattttaaacacaagagaagacactgctaaaatcaggtttttttttctcaratccaggaaaaaaggtgtaggttgttaatgtttcttgttacaaagttttgaaatattttctcagataatgaaggctatttataattgattttaggaaaac

SEQ ID NO: 178538 - DNA, 201 bp, Homo sapiens
tttatttgaggcagggtctcactctgtcatccaggctggagttgcagtggcacgatctctgctcagcgcaacctccacctcatgggttcaagtgattctcrtgcctcagcctcctgggtaactgggactacaggtgcgtgccaccacacccagctaatttttgtattttcagtagagataaggtttcgccatgttgcccag

SEQ ID NO: 178539 - DNA, 201 bp, Homo sapiens
tgggatttgcagttggctaatacagagtcatctaggacccaggcttctctttgctgtccacagtattgacatcatccccagactggtccctgctgtggctrtaagtcggctgccagcagcagttggagtcacattcttctccatttggagaaacagagtgacttccctggcctttcctgaagtcctcagcaggcctcctct

SEQ ID NO: 178540 - DNA, 201 bp, Homo sapiens
ctttgctgtccacagtattgacatcatccccagactggtccctgctgtggctgtaagtcggctgccagcagcagttggagtcacattcttctccatttggrgaaacagagtgacttccctggcctttcctgaagtcctcagcaggcctcctctcccatctccctagctagagttgggtcatatatccagacccaggctatt

SEQ ID NO: 178541 - DNA, 201 bp, Homo sapiens
ttttgattctcttctgtattcacttagttgtaaagggaaattttttaatatgtctggctctaagtaattagtttgcaaatttgtaatgtgagatgttgtasgagctgagttgggaaaggagagcaaagcctcctccctttttcttttattagcatttcctgtatctggagacttcctgcaaggatggaacattcctttaag

SEQ ID NO: 178542 - DNA, 201 bp, Homo sapiens
gcgctatgttaaattgctaattactactttttgtattctacttttcctgaagaatctgtatatggacttttagggccagcagaaataacttgttttagtaytattaacactctggggaggaaactggtacttcagtgtattgcgaaatgcaaagcgtttgaaaaagtagtgatggatgatgagaacgacagcgagagtcgc

SEQ ID NO: 178543 - DNA, 201 bp, Homo sapiens
atactatatttacttacttgaatgaactgtaattaaaaagagatgggttaaattattaccaattgttgaaggtttagttaaattttaggtgacgaaactgkgaaaagggataggaaagtcatatttttggaaggcttttatgtataatgtcttacaagagtacctagttcctactttggctcacctaaaagactggaagtc

SEQ ID NO: 178544 - DNA, 201 bp, Homo sapiens
gtatttcagctacattgagctcttccacagtttgggctgccataaatctatgggaaagtgttttgaataattatgcagacagtttcttagaagcatctaasatatgtgggcctccatcagtaccacctctttgtggccctgcaagctgtgggaaaattgtctgtacagcttgtatataatactctacaattttcctgtgac

SEQ ID NO: 178545 - DNA, 201 bp, Homo sapiens
aaaaaaagacatgatagcagttcctggagtccaggatctttggagaagcagaacgacattgttagtgacttgtgcagactaaccagccaaaaatggataaygaaacatacttgaagcttctagtgagtattactaagcacgttttaagatgctcatttttttattggttttcagcctttctgatcctgtttctgaaagttc

SEQ ID NO: 178546 - DNA, 201 bp, Homo sapiens
aagatcacaccactgcactccagcctgggcgtcagagcgagattccatctcaaaaaaaaaaaaaaaaaaaaagacatgatagcagttcctggagtccaggwtctttggagaagcagaacgacattgttagtgacttgtgcagactaaccagccaaaaatggataacgaaacatacttgaagcttctagtgagtattactaa

SEQ ID NO: 178547 - DNA, 201 bp, Homo sapiens
attcctacttagacaaggtgtgggattgataaggacacagaacaaaagaattcactgaacaggaaaaggaccctcagactaacaagactgttcttgaatcygcatcgaccccctttcctgccgtgaccgacgccgcatccctcccgtttcttttgttcattcaagtgctatcatcatacctgttctgcagctctgttgaca

SEQ ID NO: 178548 - DNA, 201 bp, Homo sapiens
gatcacatatttatgcaaatgcttttctgtatctacaatcaaaaatggtcatctcagagaaggaaatttactaagccaacagaaacctcaatttttacaasttaaatgtggctctttccctctctgacaccaaaatagtttcaaaagctaggaagtcattaagaatggcttgtctgtcattcctacttagacaaggtgtgg

SEQ ID NO: 178549 - DNA, 201 bp, Homo sapiens
ggagttcaagaccagcctgaccaacatgtgaaaccccatctctactaaaaatacaaaattagccgggtgtggtagcgcatgcctgtaatccccactactcrggaggctgaggcaggagaatcgcttgaacccaggaggcggaggttgcagtgagccgagatcgcgcgccattgcactccagcctaggcaacaagagtgaaa

SEQ ID NO: 178550 - DNA, 201 bp, Homo sapiens
caagcgtttattaaaatgtgttcctgtccacagaaaattcaggattcgggacgggggtacaccacacttaccaacactttgagtcgtgccattaagcatcrtgtatgcaagtaacagattaggaagcaaaaaggccacattgtcatggaatctaaatcctgagtaaaatgtaagttgtttagggtttcccattctgcaaag

SEQ ID NO: 178551 - DNA, 201 bp, Homo sapiens
acttttaaaaaatatcttaaggccaggcacagtggctcatgcctataatcccagccctttgggaggcagaggcatgcagatcacctgagctcaggagttcragaccagcctgaccaacatgtgaaaccccatctctactaaaaatacaaaattagccgggtgtggtagcgcatgcctgtaatccccactactcaggaggct

SEQ ID NO: 178552 - DNA, 201 bp, Homo sapiens
aagtgggcagatgtaaagagaccggcaaagttcacgtgactgtggatctcaagtactaccggccaactgaagtggtaaggactctctggccacccagtgcrtggccacatttggctggctggctgggcaaatgcgctcatggaatgcctggtgccagcctttggagctgtcagttcagctccctggcatccttcagcgtgc

SEQ ID NO: 178553 - DNA, 201 bp, Homo sapiens
tccagacgttaccattaagtgagtggcttgatttataaaaaatgagaacataaaatggataagtagaattttagcgagaaggtaatctcgaagcatatgarctcatcctgcatagtgtggacttgaggactcgctcctgggatccttactgctgtcaaccttggatgttcagggaaggaaacttgtgtgcaaacagtatcc

SEQ ID NO: 178554 - DNA, 201 bp, Homo sapiens
ctccgtctcaaaaaaataataataaaataaaataaataaaaaataaaataaaataaaaagcaaatgaaaaaaatgtctaatgactcccatgaacattaaaytgatggcctcttctttccttgatttaacagttattttttgccctattaccaaattgatatcttaaagaattgttttactccaaatgcacttattatgtgc

SEQ ID NO: 178555 - DNA, 201 bp, Homo sapiens
gctcattcaatgtagctatattaattgtagagggcaatgccatgcccttagagactgttttgactgtagacagcatttgcaagatgcaagttcagcagacrgcgttcagacagtggcaagaaagtcgtgcaggggagctggtgcctgttgagtgccaaagtagcaccagacccaagtctgactttcaggctgtatttaata

SEQ ID NO: 178556 - DNA, 201 bp, Homo sapiens
agccatcactccagtcacagagtcaaatgctacaaataaaaattaatctctaaggagttttggattgttttttttgtaggggtatagagagtctcactccrtcccccaggctagagtgcagtggctcaatcataactcactgcaacctcaaactcctggtgggttcgaggagcttccagactcagcctccctagtagctgg

SEQ ID NO: 178557 - DNA, 201 bp, Homo sapiens
cagatatagtttatcattcgcttacattctaggcaaaagcaactacatcatttattgctgtagttattgttggcttaaaaaaactagagaagtgttgtacytttgttagagtggaaaaccactcactgcttagggcttgcttctgtctcatcttcttgtctttatttcttaacatacattgaacccctgtactatatcctc

SEQ ID NO: 178558 - DNA, 201 bp, Homo sapiens
cctagatctttgattaccttaaagatagttatttatctggtaagtccaaagtttaggcttcctcaggtatgttttatgtcattttattttgttcctttgartgctctgtactttccttttcctttctatgtcttatttttccattgttgttgaaacctggacatttgaatcttagaatgtggtaactttggaaatccagtt

SEQ ID NO: 178559 - DNA, 201 bp, Homo sapiens
gcgaggacagagagtggaggcatttgaaggcagaaagtaaatggattgtgtaggccattgtatcaggtttatattttattccattagaaatgggaagccartggaatgacatttgatttgtattttataaagatttctggctgcctgtgagttgttgtgtcagagaattaatttattttgggttcctgttaaggtccaaca

SEQ ID NO: 178560 - DNA, 201 bp, Homo sapiens
gcaggggaccctaggaggagttagtcatctagtgcccacagtgttctaggtactcagagcttttttgcgtttcaaagattaaacaaagtcttttggatttytccttacaaatctgcagagtgaattttctgcctcttgaatttaaatgtgaagtgtcacgctgggtgaaaatatgaacatgtgaacacaaagcctttctta

SEQ ID NO: 178561 - DNA, 201 bp, Homo sapiens
agtgaaaggacttggagccaggagtctataaaaggttcacatttgataccacgagttaccccataatctcactgcgctccattattaaaacagaaacgctgcttactacacattgttaccaacccagtagtcctggagtcatgagttatcttggtcactttaagtttgagcagaattgatctctgtgttgtagtagttgtt

SEQ ID NO: 178562 - DNA, 201 bp, Homo sapiens
ctcactctgtcacccaggctggagtgcagtggcacaatctcagctcactgcaagcgccgcctcccgggttcacaccattctcctgcctcagcctcccaagyagctgggactacaggcacctgccaccatgcccagctaatttttttgtatttttagtagagatggggtttcaccgtgttagccaggatggtcttgatctcc

SEQ ID NO: 178563 - DNA, 201 bp, Homo sapiens
ttttgaccctggttttcagactttccaaatatgcatttcaattttgatgtttttaaaaattgagcttatgttgcttttctctatctaatgggatgtttttktatcctgaagacatgaagttgcactatggcgatctcactgacagtacctgccttgtgaagatcattaatgaagtaaagcccacagagatctacaaccttg

SEQ ID NO: 178564 - DNA, 201 bp, Homo sapiens
agggtgaggcagtgagtgtcggggagggaatcaggccccagactgctgcctatggagatttgcaatcaggtctcacttcctgagcatttgggaacttctgmaagtgtaaattggggccattctcagctctcccactgttggtttaggagacttttctaggacttctgctaagtcctttaacactcatccatctgctttcca

SEQ ID NO: 178565 - DNA, 201 bp, Homo sapiens
tctctgatgcccagaggagcctccccagtgtcctcattggaaggaaataggcctgactgtcagcccacagagagctgtgtggtgggcctcagtattcaccrtgcatacaagcacctaatttcctctgtcttcagcatggtgacccactcttcactgagcctgtagccttcagtccagccaccttctacctcagggagggtg

SEQ ID NO: 178566 - DNA, 201 bp, Homo sapiens
aatctctgatgcccagaggagcctccccagtgtcctcattggaaggaaataggcctgactgtcagcccacagagagctgtgtggtgggcctcagtattcaycatgcatacaagcacctaatttcctctgtcttcagcatggtgacccactcttcactgagcctgtagccttcagtccagccaccttctacctcagggaggg

SEQ ID NO: 178567 - DNA, 201 bp, Homo sapiens
tgaggcactctaatgttcttatcttccttcttctggtttttcatgtctacacctttttgctctactttctgggagattagatttcctcaactgtatcttcraaatcatctcttggattgtgaatttctatgttttgttttcaacttctaaaatcctgtgtttcacattatttctttttatgtagtatcctgttcttgtttg

SEQ ID NO: 178568 - DNA, 201 bp, Homo sapiens
caaagatgtcatcccctccccatccagaggcagggtgacaggggaatcctgtaaggaagtgctgggtctgtagcggagctagtgtgacagaatacccatcyctggggcagagctcaggctggggtgtgctgaggcccatcttcttcgttgcagtctcgctttctctgcaacgtagaggggcctgcggggagggggtttgtc

SEQ ID NO: 178569 - DNA, 201 bp, Homo sapiens
ggaatgttgatggagccaaagatgtcatcccctccccatccagaggcagggtgacaggggaatcctgtaaggaagtgctgggtctgtagcggagctagtgygacagaatacccatctctggggcagagctcaggctggggtgtgctgaggcccatcttcttcgttgcagtctcgctttctctgcaacgtagaggggcctgc

SEQ ID NO: 178570 - DNA, 201 bp, Homo sapiens
atggtgagtgcctgtacatgtgtaccattttctatctttttatttttttgagagagagcctcaatctgtcgcccaggctggagtacagtggtgtgatctcygctcactgccacctccccctcctaggttcaagtgatcctcgtgcctcagccacccaagtagctgggattacatgtgcatgccaccacgcctggctaattt

SEQ ID NO: 178571 - DNA, 201 bp, Homo sapiens
agaatttttaatgttgtcaccagaaagaaatatgtgcatgagctgatagagatacactaactaccctgaatggatcattatacaacatatacatgtgtcaraatatcaaaatgtaccccataaatgtgtacaattataatgtgtcaattaaaattttaaaaacaaaaataagaacactcagaaaaagagatactgcccaat

SEQ ID NO: 178572 - DNA, 201 bp, Homo sapiens
tgtacagtgtttacaaattctacagtagtgtgcagtcatgtcctaggccttcatattgactcacctctcactcactcactcacccagagcaacttccagtsctgcaggcttccttcatggtgagtgcctgtacatgtgtaccattttctatctttttatttttttgagagagagcctcaatctgtcgcccaggctggagta

SEQ ID NO: 178573 - DNA, 201 bp, Homo sapiens
cttgataaaacctcagaattgaaaatgcaatcaggtattatgtgtaattaaagtcaggctattttaacttgcctcattaatttggagtttataactatatygacaatatctgcagaaaggatttgtttagcatattaatggtttagacaaggtccaaataatgcacacctacaacaaacttttaagcacttaaaataattt

SEQ ID NO: 178574 - DNA, 201 bp, Homo sapiens
ctttgggaagccgagacaggaggatcatgaggtcaggagttcaagaccagcctgaccaacatggtgaaaccccatctctactacaactacaaaaattagcygggcgtggtggtgcgcgcctgttatcccagctactcaggaggctgaggaaagagaaccgcttgaacccgggaggcagagattgcagtgagctgagatcat

SEQ ID NO: 178575 - DNA, 201 bp, Homo sapiens
ccctgtgcctgcggaccctactttgatctgtccatgtcatctgtccctcctttggatctctatcctcccaccccacactttgtcaccatctcaggatgccyttcttaatccctgtggcctcccttttgtagcctcttcaaacctctgtctactcgacacccataaggcaggctacaggctacaggagggcaaggcaaggcc

SEQ ID NO: 178576 - DNA, 201 bp, Homo sapiens
tggataaatatcaaggacgtgtgaaagattcttaagaaaattagtgaaactgtcaagtattttttttttaatagagacacagcctcactgtgttgtacagygctcaggctggagtacagcggtgatcatagttcactgcagcctcggactcctgggctcgagagatcctcctgccattgcctcctgagcagctgggtcgac

SEQ ID NO: 178577 - DNA, 201 bp, Homo sapiens
tgaaaccccatctctgcttaaaaaaaaaaaaagaaagaaagaaaaagaaaaagaaaaattaattgggcatggtggctcattcctgtagtcccacctactcrggaggctgaggcaggagaaacacttgaacccaggaggcggaggttgcagtgagctgagatcacaccactgccctccagcctgggtgacagagctagactc

SEQ ID NO: 178578 - DNA, 201 bp, Homo sapiens
attatgaagatattctgtgtttctttgagaagctccatagttgtggctttcacatttacctctatgatccactgctaactaattttgtgtgtgatgtgagrtagggatggagattaattactttccacatggacatccagttgctctggaatcttactgaaaacacctcccttggccccactgaatggctttgatggtgtc

SEQ ID NO: 178579 - DNA, 201 bp, Homo sapiens
tataactccccctaattctctctttgtgtacctcctaatgagaacttattttttgtctttgtagatgttaaccactaactaaaaaaaaaaaaaaaaaaacrtattttaaggccaggcacagtgccccacatctgtaatcccagaactctgggaagctaagttcgggggatcacttgagcccaggagtttgggaccagcctg

SEQ ID NO: 178580 - DNA, 201 bp, Homo sapiens
ggcctgcttgtctgcaaggttatgtccagtcatctcctttggctgaggaaacccttagtaattttgacccctgccaaccttccctcttcccctcctccctstctgttccctggcagatcaggctcttcacgcctctttcacataccctgctccccctgccataaaactgctcctttcagccaggtgtggtggctcacgcct

SEQ ID NO: 178581 - DNA, 201 bp, Homo sapiens
gataactgccagccctatcctcagacccactgttaacattccttcagaaaagttctctctttaaacatacaaagagggttctgctctacatattgttctgyagcgtcaggcttctattaaatctctttaggaacttgacctcaactgtagcatacaccattttgttttgttttattatatgcctggaaatcagtggtacca

SEQ ID NO: 178582 - DNA, 201 bp, Homo sapiens
ctcttatgctagaactgacattctgatttggtttaaaattatgtggtcaatcttagtttttcttatcaacatgtcagaatctgctgaaatgaaagtggaawcacaaatcacaaataggctccaggttcccttagaacactgaacttcattttgaaagtacagcacagctctcataatgtcagttttcaaaatttactcaca

SEQ ID NO: 178583 - DNA, 201 bp, Homo sapiens
gcctcccagttttgctaactaaaaaccttcttgtagccacattgcatttaatcagactcttatgctagaactgacattctgatttggtttaaaattatgtrgtcaatcttagtttttcttatcaacatgtcagaatctgctgaaatgaaagtggaaacacaaatcacaaataggctccaggttcccttagaacactgaact

SEQ ID NO: 178584 - DNA, 201 bp, Homo sapiens
ttcacataaatggattattccatggccatattcaccaagtggaaggtccccttttaattccatataaggctgttgcgcaggtctagggatctattcagtgkgatcaataaggttgagaccacatgtagccttcgtttagaacttagcagtaaaaatgaaggcactgaaattttctgctgtaactatttttctccagaagta

SEQ ID NO: 178585 - DNA, 201 bp, Homo sapiens
gctcctgtatcccacaatccttattttgatcacttctgctgtctcctcacacaattttgggaaatgtcattggatgaagtgttcaggatttctttcctgtktccagaagtctcaagttgtggtatcacccgctaagttcagtgatagttcagaaggcttctgtcagtaagaatattgagccaagcccaggggatgtgtctt

SEQ ID NO: 178586 - DNA, 201 bp, Homo sapiens
cactccatgatgtttgcacgatgaaattgcctagtgacacatttctcagaatgtatccccgctgttatgtgatacatggctgtatgttagcggaattcaarcactccagtccacaaatctaaatgagggacatattcccaaagaaaaacattagttaaggttagtgtgccttcacgttgcccctgccttctgccattaatg

SEQ ID NO: 178587 - DNA, 201 bp, Homo sapiens
tatccccgctgttatgtgatacatggctgtatgttagcggaattcaagcactccagtccacaaatctaaatgagggacatattcccaaagaaaaacattakttaaggttagtgtgccttcacgttgcccctgccttctgccattaatgagcaactatatgtccagagtgcacagcagttgaaactccaaataaccctcatg

SEQ ID NO: 178588 - DNA, 201 bp, Homo sapiens
atccacctgcctcagcctcccaaagtgctgggattacaggcatgagccaccgtgcccggtctaaaaatttgatatttaaggcttcttagatacgtttggtrttttgggtactaaatgtttctgttatatgtgagcttacactatacttagtgcttaataaacccttgaaatctattcatactacctgttatcatacaccta

SEQ ID NO: 178589 - DNA, 201 bp, Homo sapiens
catatccccctttctttggctgaattctaagtgcatctgatactggaatttttaaacacaaattcttattgagaagtgtaaagtgctcttgagctaatatmttagaattttgaaaagtttcaacttacgggactgttagtgatgttagtaatgatgatagcatagcaggtaacacttatttagttctgaccatgtgccaga

SEQ ID NO: 178590 - DNA, 201 bp, Homo sapiens
cagcctcccgagtagctgggactacaggcgcccgccaccacgcctggctaatatatatatatttttttagacgcaatctggctctgtcgcccaggctagcrtgcagtggcgccatctcggctcactgcaagctctgcctcccagattcacgccattctcctgcctcagcctcccgagcagctgggactacaggcgcccgcc

SEQ ID NO: 178591 - DNA, 201 bp, Homo sapiens
ctggaagagaaattgctcttaccaaatatccctgacagctccccagaccattaaattaatagcaatgagtggagagataagcaaaactaatggcatgcttwaagctttgtgacagaggtttggagtcatcatgattctcagggtctcctgagatcactcctacagccctcctttcattttcatactgtagtgtttgattat

SEQ ID NO: 178592 - DNA, 201 bp, Homo sapiens
gtgtatatgtaccacattttttaattcagtctatcattgatgggcatttaggttgattccatgcctttactaatatgaatagtgctgcactgaacatacgsatgcatgtatcttcataatagaatgatttatattcttttgaatgtatacccagtaatgggattgctggataaaatggtatttctgcctctgggtctttga

SEQ ID NO: 178593 - DNA, 201 bp, Homo sapiens
cctgtggtactttaagtgagtttattttcttaagttggttgaacatttactcatcagtcttcttgttccctgttattacagggaacaaacccttttttttytacatggtgtagaaaaaccttggtaaacctcaatctagtcctaggtatccagtcacccatgctgaatttgtagagcccaagttgatgcagtttttggggg

SEQ ID NO: 178594 - DNA, 201 bp, Homo sapiens
caaatatgttatttaccagtaataaaatctactcttaaagattatgctataaattggaacatgggaagcaagcctatttagtaaagctaacaatatttctrgttttgactgtttattacattaggaggtaaataagaagaataactactgttcatcacatatgtaatgtaaccagttggggctaattatgtcttaattctt

SEQ ID NO: 178595 - DNA, 201 bp, Homo sapiens
tatgtaccacattttttaattcagtctatcattgatgggcatttaggttgattccatgcctttactaatatgaatagtgctgcactgaacatacggatgcwtgtatcttcataatagaatgatttatattcttttgaatgtatacccagtaatgggattgctggataaaatggtatttctgcctctgggtctttgaggaat

SEQ ID NO: 178596 - DNA, 201 bp, Homo sapiens
tctgtgagacttcctagggtccacgtcctggaggagaaagccctgacccaggggtgtgacggagaaagttgttctgtgctgccggctgttggcaggcctgsctctcatacccagcagccctttgctttccgcaggagatcagttgaagatttccgtctttcgatgaggatatttttcttatgttgactcattttagtcttt

SEQ ID NO: 178597 - DNA, 201 bp, Homo sapiens
atctgtgaagctttaagtatttactgtctggctcttcacagaaacagtttacagaccccaccaaagtctaaagacccctcaggcacggcctcagtcctctyctgactcacacgctccctcctaaaacaagaaaagctctccaagtctttaccaaggctttgtcgatttaaatatgtgtgtgtgtttgtgtgtgatttttta

SEQ ID NO: 178598 - DNA, 201 bp, Homo sapiens
tcagctttgaaacagtgaacaagttgaagggtcctcagtagagaagcaacatctgctgggtgatgactggtgttttcatcccaatcccggtgaagagatcrtgctgtggacaccttcagtaggaaggacagtggcatgtataaaggcagctcacgatggaccacccaaattgaaggcaaataaccctcaaaattatgtctt

SEQ ID NO: 178599 - DNA, 201 bp, Homo sapiens
actcttatgttcctcagcaaggcccaggtgggaaagccttcgggaaaatgcgacttcgcaaattgcagcttcagctttgaaacagtgaacaagttgaaggrtcctcagtagagaagcaacatctgctgggtgatgactggtgttttcatcccaatcccggtgaagagatcatgctgtggacaccttcagtaggaaggacag

SEQ ID NO: 178600 - DNA, 201 bp, Homo sapiens
gaagaaatgttactcagatgcttgaggaatggtagatattcctaaaaccaatcttatgaaatgctagcgtaagactcagtgggtgtggaaaccatctattwtataatctctgaatatgggcttattgcacttataaaagctaccactgcagtaattcagaagcctgggtattttccttgactcttgattatcagaactaca

SEQ ID NO: 178601 - DNA, 201 bp, Homo sapiens
aagcctgggtattttccttgactcttgattatcagaactacaagcaaccacagcctttataagcaatcagggaattattttttcctgtatcattgatgtaraatagaacttcctgttttcactacttctctgtataacttcaatttatgcccactcagaattaattatacaaagaaaaatggatacatattaaactgtctt

SEQ ID NO: 178602 - DNA, 201 bp, Homo sapiens
aatagaacttcctgttttcactacttctctgtataacttcaatttatgcccactcagaattaattatacaaagaaaaatggatacatattaaactgtcttstgtgcccccagtctctacttttgaacccttctaaatccgtgactttctctgccttgctgccctccttccctccatgccctgtaaaaacatggaagcatct

SEQ ID NO: 178603 - DNA, 201 bp, Homo sapiens
ttcattcatgattttgctctcagcctgcgtgtggttggtgtacaggaatgctagtagtttttgcacagtgatcctgagacttggccaaagttgcttatcarcttcagaagtttttgggctgagacaatggggttttctagatacaggatcatgtcatctgcaaacaaagatagtttgatttcatctcttcctgtttgaata

SEQ ID NO: 178604 - DNA, 201 bp, Homo sapiens
tttcactacttctctgtataacttcaatttatgcccactcagaattaattatacaaagaaaaatggatacatattaaactgtcttctgtgcccccagtctmtacttttgaacccttctaaatccgtgactttctctgccttgctgccctccttccctccatgccctgtaaaaacatggaagcatctggtattagttaaagt

SEQ ID NO: 178605 - DNA, 201 bp, Homo sapiens
aaatattccaagaaatacaaatgaaaataactaaataaatagtctctcctttatctgtatttagaagaacgtggtttctgtgttgtttctaacaaaccaawcatttaagaaaggcaattcaagggccttgattaataaagaaaaaagaacagctttatttataggaaaagaaaagcttgtaacagtttcctgcatctttga

SEQ ID NO: 178606 - DNA, 201 bp, Homo sapiens
gtaaaaacatggaagcatctggtattagttaaagttatcaaatcatcggctgggtgcaggtggcctaaaactggttcattctgaagtatgttgtcttaaamtatggatttgtactttaactcctttaatttcttactgtagatgaaaacatttctaccctcctgctctttttggataaactaggtatcagcaagtaggcag

SEQ ID NO: 178607 - DNA, 201 bp, Homo sapiens
ctaccaccacgcctggctaatttttgtatttttagtagagatggggtttcaccatgtcagccaggctggtcttgggactcctgacctcaggtgatccaccygcctcagcctcccaaagtgcctggattacaggtgtgagccaccgcacctggccaaagtattttctgttaatacctagtttactgagagtttttacatgag

SEQ ID NO: 178608 - DNA, 201 bp, Homo sapiens
gtctaatattatcagtggagtgttaaagtctcccactattattgttgggagtctaagtctttttttgaaggtctctaagaacttgctttatgaacttggcrgtgcttttttattgagtgtttgtatatgtaagacagttagctcttcttgttgaattgagccctttaccattatgtatgcccttctttgtctttttttttt

SEQ ID NO: 178609 - DNA, 201 bp, Homo sapiens
caaaagactaaactcagaactggaccacactgtgcctttggtggccttcagccaaccgaggcaggatttgggaaaggtgattctctccagcagttttggtmccagcctggctgtgtctggtgttcactaaaatatgcctgatatgacagtcacagggccgacttccactccgctctgtgcactcgaaacacagacacttcg

SEQ ID NO: 178610 - DNA, 201 bp, Homo sapiens
cattgatggtcataaacataacacaagcttatggtggatgtggtagttctttatcttagaatggcccatgagtgttccaagatgataattatagacaactrccttagtatattttgatcataatcacagaaatgcagttcctaacaagggtggcaacttctagactgtcagaatggttgcagccatatatatgatttttat

SEQ ID NO: 178611 - DNA, 201 bp, Homo sapiens
cggaggagggggctactattggtgtctggtaggtagaggccagggatgctgctgaacatcctacagtgcacgggatggctctataacaaacgcctgtcctrtccagatggttcatagtggtgtgcacgggatggctctataacaaacgcctgtcctgtccagatggttcatggtggtgaggataagaaactctgccctagg

SEQ ID NO: 178612 - DNA, 201 bp, Homo sapiens
tctagataggaaattcttttctttaagaatgttgaatattggccaccaatctcttccagctggtagggtttccactgagaggtctgctgttagtctgacgygcttccctttgtaggtgatctggcctttctctctggctgccctcaacattttttcttttatttcgaccttggagaatctgatgattatgtgtcttgggga

SEQ ID NO: 178613 - DNA, 201 bp, Homo sapiens
agccaacagaagatggtcctgaaccaaaagccaagaatctttcagtggtgttgacagataaaacagagtagttcggcgagacacccatgaattgcaaaaarataaaatgtaagtagtattgaagaattgctggaatcacaggaaaagccattcaaaacgagattttggcaggtaaaccagttaacatttgaattaggaaag

SEQ ID NO: 178614 - DNA, 201 bp, Homo sapiens
acaaggaggagtataacggagtcctgcttaaagaagcagtctggccacacctctacaaaacagccttcatggtggggaaccccctttgcctcagtcggctwggactctccaaagctggcaggctggaatggctgagttatccaaccaacccaggtggtggccctttcctcttccaggcactccatcccagggagacatcag

SEQ ID NO: 178615 - DNA, 201 bp, Homo sapiens
attttttttttaatagagacacagcctcactgtgttgtacagtgctcaggctggagtacagcggtgatcatagttcactgcagcctcggactcctgggctygagagatcctcctgccattgcctcctgagcagctgggtcgacaggtgtacactaccacaccaggctaattttttcaagtatttttttaagtgatacatgt

SEQ ID NO: 178616 - DNA, 201 bp, Homo sapiens
atgctggaacccagatcagagatccagcgagaagacttactttgcagggggaggtgttgaggtgttccgtcacactcccggtgccttcgggatatctgtgytgcaaaatgagggaggcagttggagctggaggcctagtgtagagaaaagaggtcagggctagggcctagatgtgcaagatgtgcaagagctgaaatcctg

SEQ ID NO: 178617 - DNA, 201 bp, Homo sapiens
ttgattaataaagaaaaaagaacagctttatttataggaaaagaaaagcttgtaacagtttcctgcatctttgaaacataaaatgtttagattaagcaaamaaccattttcctgatctggctatggaaaactctgtataacaaattcagcttgccatttctctttttttctcttcttcatcctgtgcagtaaacttttcag

SEQ ID NO: 178618 - DNA, 201 bp, Homo sapiens
tagttcctaatcgaattgtaaagttatcaaaggcctgaaaaaaacacacacacacacacacagaaaagaaaaaattatagattgaacaagtgccaggcatwaataaaattctacctggaaccattaacagacatatttagctgtgaaacacttgaagtgttccaattaataatggcatttcctgtattcactttgaaacta

SEQ ID NO: 178619 - DNA, 201 bp, Homo sapiens
atgtgtgtgtatatatatatgcatgtgtgtatatgtatatccttgggtctttagggaacacccagcctctttaatcagtagatagcagtcaaggggaagarcagaaccttgttaacctgtgcattctggaaggggatgagcatcccaggtgttagtatctcctggcccccaggagaaacaaacagtgactgtctcaggagg

SEQ ID NO: 178620 - DNA, 201 bp, Homo sapiens
tggatccgctgccagctgctgttggctgatcaatgtttgtttcatgctgtttgaaaatacagtatagacttcgcaattcccaatcctcgctgaaatgcccrgctgggagtggtgggagtgcacagccagcaattagatgtttcttttgtcacatccagaaaggacaccagggaatgcctttattccagccctgtgacatct

SEQ ID NO: 178621 - DNA, 201 bp, Homo sapiens
gattctcctgcctcagcctaccaagtagctaggattacagacacctaccaccacgcctggctaatttttgtatttttagtagagatggggtttcaccatgycagccaggctggtcttgggactcctgacctcaggtgatccacccgcctcagcctcccaaagtgcctggattacaggtgtgagccaccgcacctggccaaa

SEQ ID NO: 178622 - DNA, 201 bp, Homo sapiens
caggaaataccccagaaggagaccacccctttctatccccggtcaccctatggtgagaacatgcgtgcacaccggagcacatgtgtggcgttatctgtggrtgtggggggtgtgtgtttttcctttcattctgttcatgtctcacagctgaagtcatttgggtgtgaggttaacattaaggtagactaaagtgactgaact

SEQ ID NO: 178623 - DNA, 201 bp, Homo sapiens
gtatttaggagaaagaagctgaggcttagagaggctcatttctttgcctgttggttattggcaaaatatggatttttagttaattgtcataagtaactttmtatgtcaatttcttcttgtttctcattcatcattcatacatacacaagcatcttttcacttacccaatggaattacttttcatagcaaattagtattttt

SEQ ID NO: 178624 - DNA, 201 bp, Homo sapiens
gctgggcaagtggccatcttccccactggatactgaggtcaacaggtggtgacttatcccccctggagctcccttcttaccactgaatacagagctgatayacaactggtcccatatactcgtggtccagaagtcctatttgctctttatccaaacttgtttgctaaaggagcagaaaccaactcaaagaaattcatggaa

SEQ ID NO: 178625 - DNA, 201 bp, Homo sapiens
cctcatgaggaccctgagtactcctcctcctctggtgtactgggttgtctcctctgtgttcccacagctcctttcacactggcccctctcccatcattttrgtggctggctgggcaagtggccatcttccccactggatactgaggtcaacaggtggtgacttatcccccctggagctcccttcttaccactgaatacaga

SEQ ID NO: 178626 - DNA, 201 bp, Homo sapiens
tgcataggacactaggttcccagttacaaagacggtgcatgtcccagcctgccatctttagaggcgctcaagggtgggcggtcctcggcggtggggactgygggggccatgggttgatgacaccctcatgaggaccctgagtactcctcctcctctggtgtactgggttgtctcctctgtgttcccacagctcctttcaca

SEQ ID NO: 178627 - DNA, 201 bp, Homo sapiens
ggggagacgctggggttttatctccatgcccctggagaattgacttactgaatgcttcccttgaagacctaagtcactggttcttcagcccctttgcatartcctctcactgaaatcagaactgaatttgttctttttcatttttggttaagaagatgcacattagaagacagctcagagcaatggggctgacctagtggg

SEQ ID NO: 178628 - DNA, 201 bp, Homo sapiens
agtcccatctggcttgactcagaggtcagtctgggagactcgggagtggtggcagctcagagaagaattcaagggagggccaccaatagcacattctgctyttgttgcttgtttttatctgaagtacatttgaaaagatggacagggcataaggttgaagtaataacttgactttgcttggccatctttttttccttttaa

SEQ ID NO: 178629 - DNA, 201 bp, Homo sapiens
ctgtacttcagatctcattgctctcctcagcccccagtgtttaacagtgttcagggagctaccaagccattgtagactccatctgcttgtgtggactatcycaaaacagtgaacaacttgtatttcatgccttttaaaagctcatgctttatcattagtagtagtagtggtagtataacatttaaaaagtcttgtggctca

SEQ ID NO: 178630 - DNA, 201 bp, Homo sapiens
gcctgccctggcagccagctctgggactgctcactcctgaccacaacccgggtacagccctgaagtttcgtcgtgagtaacccgtcagcaggagcccatgyctctctgaaagggcattttgtcttttttggcagtaccaaatggcaggataattagtgttagggagggaaaaaacagaattgaaaaccacatccgatacct

SEQ ID NO: 178631 - DNA, 201 bp, Homo sapiens
ttgatattattgatttataaacaaaatgatcagcattccctaatgtctcgaagcaaagaaattagggtaacacatttaaaatttatcagtttgaaactttstaaatactcttccttaataataaccacaatacactgaaaatgtcaagttctgtaaaaaatgaacagggacgcgaatgtgtcgggcttcattttgaagacc

SEQ ID NO: 178632 - DNA, 201 bp, Homo sapiens
gaggcctgccttggttccctgaaacacaaggccattttcttactgttggtcagcaaagagctttttctaaacagcaagctgtcatgtgccttctcggtgtycttcgtcttgcaatcgtgttttcccacttaaggcgagcgcttgggattcgatgcttttacaacacagattggtttttgtcgaactgcaacagtttcagag

SEQ ID NO: 178633 - DNA, 201 bp, Homo sapiens
ccaggagccgggcagcaatctgcacactgggcaaggaccaccagcagcagcaggaacacagcccattctgagctctgtccttcacccgggacctgaaccarcagcaaggacacctggaggaaggaccacgaaggcagggagccaggcagagctggagaccccttcgtgaggcctgccttggttccctgaaacacaaggcca

SEQ ID NO: 178634 - DNA, 201 bp, Homo sapiens
ctcagactcatgggtggtaactgaaatcatacttcgtttgttttagtcttagtctggtttaaatgtcagccagagatttgggcagagtttatacacagaayttatgcatcgtcttctctaggtctgtctctttgctgggattcactgttattgccaacctcatttccaatagctatggttgccttaaactctgtcctttgg

SEQ ID NO: 178635 - DNA, 201 bp, Homo sapiens
gacattattcttgtgcagatttgaggcttatggtattggtgaacattcaaagttaataaaaagatggaactcaagaaaaacagaggtacttacatgtgcastggctaatagcaagagctctgaaaccagtttgcctgtctttgaatcctgccttactgtttaccacctttgtaatttagggacttacttaactttgtggac

SEQ ID NO: 178636 - DNA, 201 bp, Homo sapiens
gttgaactcctgaactcaggcaatctgctcaccttggccccccaaattgttgggattacaggtgccacccggcctgatgacatgtttaatggacgtcactrccagcaattttagctgaaatctaggaccttttaaacaactttgaagtgtgtgatggatgcccctagtctagtgggcagaatggatcggaggtcggaaggt

SEQ ID NO: 178637 - DNA, 201 bp, Homo sapiens
ataataataataaaaaaatagccaggaatggtggcacatccctgtagtctcaggtacttggtgggctgaggtgggaggatcattttagcccaggcggtcarggctgcagacagccatgattgcaccgttacactccaggctaggccacagagcctctgtctcaaaacaaaacaaaacaaaacaaaaaaacctaaaaactaa

SEQ ID NO: 178638 - DNA, 201 bp, Homo sapiens
gcagagggcccaggtagagtcccaggctgttaattcacctgatctgtgaccctgggcattggcaaatgcatcaggatgccacaggagcacttccagctccrgaagcaggatacttcccccggccaggaggctgtgttagtgggactgggctagaatggtcagaactgggcctgggctcagaggggagcatcaggggatgaa

SEQ ID NO: 178639 - DNA, 201 bp, Homo sapiens
tggcgtgagcgagccctgcagcctggggaggtggcagtgagccgttgcgtgttgatgctgccggcacctgggcaggagacgggcagaggatgggcagagcmgcgcgggagccagctcctgggcctggcacccagcagccccgctctcctcaggcaggcagagaggctgggaagcaggaggggaaggagagggtttataact

SEQ ID NO: 178640 - DNA, 201 bp, Homo sapiens
cagatgaagagaagacagggctggtgctgaggcaggtcgtggcaggcaacactgccccacctgacttgctctcgtgggatctagtcattgtcctgggaggrtgcccaagggggcccacgtggcgagggctgcgtagaagggcctggaggtcagcactgacctccagacataggagtgaacggcctttccaacaagtacagc

SEQ ID NO: 178641 - DNA, 201 bp, Homo sapiens
agaccattgcagctagctgggattttaattttttttaaaaaaagacattaaggtatgaatgacctactatcttaacccttggagagtctgttaatctaaayaaatctccaaccgatataaatgtgtgaggaggtatttgaagtagtggttgagttttcttgtgtgttcagagagggagtcccaaaattagtgtatctagga

SEQ ID NO: 178642 - DNA, 201 bp, Homo sapiens
tgacttcagtgtttgtctgatacttgagtcaggcattagggatacagtggtcaacgaagcaccatacttccatacttccctcaagggatgtataattttgygggacatgcccaagtaaatagattattaaaatatcagagcccattaagacttgcacctgcaccccgtggaacctcaggagcaagatctcccaaaggaagg

SEQ ID NO: 178643 - DNA, 201 bp, Homo sapiens
gtttaaaagccaaaatgcctaactttgatcattaaatggtgttctaatgaaattagccacagtgataaaggaataatcgttctaaatgccaatctgatctygccattggcctgcttgtctgcaaggttatgtccagtcatctcctttggctgaggaaacccttagtaattttgacccctgccaaccttccctcttcccctc

SEQ ID NO: 178644 - DNA, 201 bp, Homo sapiens
ttttctgaagtgtttgggtacattttcacatatcggtctacaaaacaggcatattctcgaagaggttctaagagttatatatatttcttatccctgaaatrccttatagtatagtgtgtatactatagtgtatagtgtggaggattcaattttatataaatttcagataatttaatatcttgttgataataactatcacat

SEQ ID NO: 178645 - DNA, 201 bp, Homo sapiens
tgtcatctcagttaagtgcctgcccccccccaaaacacaaaaaaagcactgagatacggccatttctcctttaatgtaccctgccaaggcttatagatgaycttaaaccattaaaattcattttttaaagttgaatagattgtaacttcttatgtagacagtaaggaaaaaacaaaaattgtcgtttttattacgttctca

SEQ ID NO: 178646 - DNA, 201 bp, Homo sapiens
agaaacaaaaaaatattctaagccaactgaatatttaaacttttaagaatgtggacaaaatagtcaagtgactttaaatgtttaatttactgaatagctaygcatacatttgtaaaataacattaaaatatttccaaacattggggttttttcttctcgcattttgaaaaacaattttattcagtatcctttaacacatcc

SEQ ID NO: 178647 - DNA, 201 bp, Homo sapiens
ccctctgcctgcggctggatgcagcatggtatcccaggccagcctgccactgcagtagtttaaacaaggtttgtggtcttcacgttccataccagaggagragcgatgtcccgtagggaatagcaagtagatggtaacatcagacacttaaacgtgggaagcgggcagcccacagactgacaaggtggactctgccctcta

SEQ ID NO: 178648 - DNA, 201 bp, Homo sapiens
gtcagattccccggatttgtcagtcgtctatactttcttacatgctttccccacgttctgaagtcaccttctcctttgcccatttgtccactctagttccygccagactttgaggtccttcgtgtgaggactttgtccttccctcttgttattctcaccacttgtttgcagtaagttcctcaagaatgttatggagtaaat

SEQ ID NO: 178649 - DNA, 201 bp, Homo sapiens
gtctcttctttcactgacgtctcccacttttttgtgacttctgtgaaagtctggaaaatctgaaaatatgaactaaactgactgtttaattttaataacargactgtccacaggaaatagatgtaaatatctctcacaagatgtgacatcatctaaatttagtgatgattttgcttatatcttcaatattcagtgcttcat

SEQ ID NO: 178650 - DNA, 201 bp, Homo sapiens
caatgtctctgtcagcaagccccagggacaaaaacaatgggaaagtattcagtcaagaaggattttgcatcaagtatgtaagcatgattggtcagaatatrctttttctctccctctgctcttcctcctcccacacttcggttttttgtaaaccttctattggccttatttcttattctgatttccaaaataattttacta

SEQ ID NO: 178651 - DNA, 201 bp, Homo sapiens
tagttgagaccaattcatcaggataagaagtagaaaaggtatgtagaaagaaaaataaagacagctgaaatgccctgtgcactttatcttaaaaatttctratttgggtttcgtaggtaatttaacagggaatttaggatttgacgtttattattctggttttgatccagttaacatctgggatgtgggttcagtagggaa

SEQ ID NO: 178652 - DNA, 201 bp, Homo sapiens
tttcatcacttttactcttttttccccccttcgttgctttaatcaaagtgtttccattttagacataaagaaagtgaggtataggtatgtgctgtgaactkcccaagatcacattcaaagtaagaaacattggcataagcagctcgagcttggaccgtcttggaattggtattcagtcttcgcaatcatttgcctttttgc

SEQ ID NO: 178653 - DNA, 201 bp, Homo sapiens
gtttcatgtaaatggaataatacagtatgtaatctttttttaataggagttgttacatttttaaatgtttgtaaaagaaaaacagcaaagatgattatacracagagatgatatgtggcctggaaagtttaaaatagttactgtctgtccgtaaactaaagaagtttactgacccctgttatagaagataagtgcacatat

SEQ ID NO: 178654 - DNA, 201 bp, Homo sapiens
tgtatacatatgtaacaaacctgcacattgtgcacatgtaccctaaaacttaaagtataatttaaaaaatccactttcctgtaaaaaaaaaaaatttatarcattaacatgacaatactgctcaaaggcatctactatatcagtgcagtccctatcaaaatagcaatgtcatttctcacagaaatagaaaaaataattcta

SEQ ID NO: 178655 - DNA, 201 bp, Homo sapiens
gatgatttaaggtatataggagaatgcatgtaggttatatgcaattactataccatttcacataagggagttgagcatccttggatttttgtatctgcagraggtcctggaaccgatcctctgtaaatactgaagaatacctgtatggagtagtttttaagtaatttgggaggaagaagaaaataaattgctgagggttga

SEQ ID NO: 178656 - DNA, 201 bp, Homo sapiens
acaaacctttgataaaaatatttaaagagtttttgtgagactattgtatgagcccatacaatggccttgttaagttgggggatattttctcagttttacasaaaattgaggctactataattattcagttgggccatatgaaattgcgatcttgtagcacccaaatacagtagttgaatatcagcagtattaggttgttca

SEQ ID NO: 178657 - DNA, 201 bp, Homo sapiens
gcatatttttctgtcctgattgttttgttttgtttttttttccaccacagaagtgctgattttaccatatctttttcatctttcaaaagtttaaaatatakaacatgggtttctcactaagaatctgacattttacgtttactaacacattttaaaacaaacctttgataaaaatatttaaagagtttttgtgagactatt

SEQ ID NO: 178658 - DNA, 201 bp, Homo sapiens
atgaaggtttgtgagaaatcagagacttgattgtaaaatgaaggcaaaattagctttctgagggtataggcataaccttcaactcttgattatctagaagrtgtttgggtcaatctttcaaagtagttagaattaaccaaaatatcagaagaggtgtctgtattctgtattcagtgtggcattttcatttgaatgatttga

SEQ ID NO: 178659 - DNA, 201 bp, Homo sapiens
ggactgttagccttgcacttcgtctccctaccttctgctcgttcctcacaacccagctcagggaaaatcttctctgggaagtatttcccaagagccctcayttcactggcctgtgagcgcctcctgcgtcccactgtgaaggtagcttaatccttccacttcccccagtgggaaaatgctaggcacgtcacccagtatctg

SEQ ID NO: 178660 - DNA, 201 bp, Homo sapiens
aacaccactgggtccttgaacagctgtctgcatctggactgttagccttgcacttcgtctccctaccttctgctcgttcctcacaacccagctcagggaawatcttctctgggaagtatttcccaagagccctcacttcactggcctgtgagcgcctcctgcgtcccactgtgaaggtagcttaatccttccacttccccc

SEQ ID NO: 178661 - DNA, 201 bp, Homo sapiens
attacatacgcaagtagtatgatttttcttttataaacaaatggttaccttttactttgccctgatctccctgcttttaaatatccatgttggttctgtgktcagacatgagcaagcatggtagagacattgtcctttccctggagtagcctgtccttgttcaagtgctcacagatttcctgtgctcatgagcctatttct

SEQ ID NO: 178662 - DNA, 201 bp, Homo sapiens
gcatttgcatttggaagtcatgagttttcaggacaggtgcagagcaggaagagagtcagggcaaagagagtacctggtagcagtgacagcaatccagtaamgaaaatgataagggcctgggccagatggaattattcgctgagtttgtgcttgtgcgtctatcaggactctggctttagaaatggcaaaaagcgaacctca

SEQ ID NO: 178663 - DNA, 201 bp, Homo sapiens
ggtgtggagtgggtgagcagaggtgggcagagccccatggagtgggagacctctcatcaccgtcccgtggcactgggagaatataggaaatttgcagctagagctagctttttaggcaagaatccactcacattccatacgtggctgatgataagtctttgtctggatttttaagtttcttttgaacttatataaatcttt

SEQ ID NO: 178664 - DNA, 201 bp, Homo sapiens
agaagtccttccacctcaacctcctgagtagctggggcaacaaacgtgcaccaccacacctggtgatttttttttttttttttttttttttgtggaaatgaggtctcgtttcattgttcaggctggtcttaaactcctggcttcaagcagtcctcccatctcagcctcccaaagtgctgggattacaggtgtgagccactg

SEQ ID NO: 178665 - DNA, 201 bp, Homo sapiens
gaaaagattctcttttcttttataccaagattgtcttttcaggatcttaatcctgatctgttcttaggatttcagaattctttcactagccctcttctttrtcactagttctttaatttacacagttggttggctggttcctgttactcggcctacaaatctgtcctatgtcatctcctttgagtaatttatatcctccat

SEQ ID NO: 178666 - DNA, 201 bp, Homo sapiens
ccccagccgtactaaacggggcagttctgggaggttctctaacaccactgggtccttgaacagctgtctgcatctggactgttagccttgcacttcgtctycctaccttctgctcgttcctcacaacccagctcagggaaaatcttctctgggaagtatttcccaagagccctcacttcactggcctgtgagcgcctcctg

SEQ ID NO: 178667 - DNA, 201 bp, Homo sapiens
tatttcttatccctgaaatgccttatagtatagtgtgtatactatagtgtatagtgtggaggattcaattttatataaatttcagataatttaatatcttkttgataataactatcacatagatttctgaacaggtgccagatatagtttatcattcgcttacattctaggcaaaagcaactacatcatttattgctgtag

SEQ ID NO: 178668 - DNA, 201 bp, Homo sapiens
cagaacctaagctctgactttgtgattcagttatgtttgtatatacatgtcttcatttttgagtgagtaagaatattagagttgttctatggatttgatgygatatatgcattgtgattttaaggagagcatgtttctcatttagatattgactagaaatagagaaaacctaaccaacaacttcttaatttactttgtttg

SEQ ID NO: 178669 - DNA, 201 bp, Homo sapiens
tttgtaactgtttttaaaaaatccttacaagaatacatcataattggctttccttactattcacaacagcagcttaggacagaattttgtcgtatttagcrtggaacaagtatcaagtatgtttaaaacaaggatcattacgtttttctattataaaattggtagatgaacccttttattatttcatgaaaaaaagtaatt

SEQ ID NO: 178670 - DNA, 201 bp, Homo sapiens
aaccagaacctaagctctgactttgtgattcagttatgtttgtatatacatgtcttcatttttgagtgagtaagaatattagagttgttctatggatttgrtgcgatatatgcattgtgattttaaggagagcatgtttctcatttagatattgactagaaatagagaaaacctaaccaacaacttcttaatttactttgt

SEQ ID NO: 178671 - DNA, 201 bp, Homo sapiens
agtgatatatttgatacatcctaaaagatatgagctgtacataaatgttctaagtgtttgtaaaatacctgctcaaatgctgccctgaggctttgctttcyggtacacacagtcttctggccacatctctcactgtcactgagtgttcccctcagtacgttgctttgcctagcccttgtctttcagagtacggtttgcaat

SEQ ID NO: 178672 - DNA, 201 bp, Homo sapiens
ctcttttccagtgaggtatcaatgtctacggtcagactcctgggtaagtgctgcatctggatgtcagcaagagctgcaagacagtttgctagtcaatcagytactgccagggctggctggaagcaccatctctgtgcaggtctgactgcaaacaaagcacagacctgtagggcagactgcgtcacctcagacctgagaatc

SEQ ID NO: 178673 - DNA, 201 bp, Homo sapiens
actcaggataacgacagctacatttttatctcttgttttgaagagattgtcgtgtgtgacccttgaagcatggaaactaggattaattaatgttatttcaractatcatgtcctctctctccaccactccaacgtagtacttagttcttcaaaataatataattgagaaattgccccataatacatgggattttgatagta

SEQ ID NO: 178674 - DNA, 201 bp, Homo sapiens
tcatttatgccatgggagccgaggaaggcatgagcaccttgacagccacctggagatgagcacagttgcagcaacagagcctcgggggctcagctgccccrtgggcagtcagggttcgttttcaggaaggcgtaaggaaattgcatttccttacaatgcctgtgtgtcctgccaaatgggctgggtctcagggacaccaag

SEQ ID NO: 178675 - DNA, 201 bp, Homo sapiens
tgccctttatttggttaatactgaaacaaagtatatggggtcaaaattccttttagatatatttaaatgttaaaatttaaatattcatgttttaatggtgragctttttcattgcttggctcagcacacaaaataatttgtacatttttaagtaggaggaaatgtctttcagtacgaggggagctgacttgtagtgctgtg

SEQ ID NO: 178676 - DNA, 201 bp, Homo sapiens
gaaagtgtaatgattcagtcacagtttaaaattgcttgggagaaacagtggccttgaaggtgtcataggtttgctgggcagttctgactatgcaattgcarttgaatcatctatttgtagaggcaacggtcttccctgggattttccttggcctatttcagctgcctgggattaggaacagagaatgtaaacaagatcttg

SEQ ID NO: 178677 - DNA, 201 bp, Homo sapiens
ctggtgaaaaggaccttgcagcctgtgctttgagtagcctgggaccgttgggaacagccgcttctgtctgtgtgatccgaagatagctcccagatgggagrgctcctactcctttccttgtcctccctccctgccctctagcacaaaagcttttggaactgcaggaaaccctctggcttgcaaacccaggacccgtaggct

SEQ ID NO: 178678 - DNA, 201 bp, Homo sapiens
taccacggctctgtttttagaccagtaactccagcaggctcctaaaggtgaaggttcaagacatgacccctgagaaggtacactacactccaaaataactrcttgagttttctaacctatacagacagaaacctggggaacaaatgtgggcatgtatattaagactgtggaataatggtggaagaaacgtgaagttgtatc

SEQ ID NO: 178679 - DNA, 201 bp, Homo sapiens
aagaatattcaaaagccattgtactcttgggatcaaatttccagaggatttttgacttgttagagttgcttcagaaactatgctgcatatgccccaaacasataaatttgaggtatagttaagtgaaagtctccttttccttttagaagagaaaaacaattggacttctactagggccagttagttacaggtacagtttac

SEQ ID NO: 178680 - DNA, 201 bp, Homo sapiens
agacaagtactttcaagccccagaggtataaggaaaaaattatgggaaagaactttggaaacagatgtctattatttgattttagccacagaaagccacartcttaattagtggaaccctggtgttccatgggaggagattttgagaaccaccaaacttgtctagtcagttccttgtcaccattgcaaaaactggcctccc

SEQ ID NO: 178681 - DNA, 201 bp, Homo sapiens
aggtcttggctttctctccttttattttgactttttagcagtctgagtcacagccaggaagtcctttgaaaccaaacccttagcccttttttgtgtttcarggacagtttgggaaatgtcccttaaaggggtcctttggtttctctgttgggtcccttatctttttcaccagccccacgtaggtccttgttctgtcctaga

SEQ ID NO: 178682 - DNA, 201 bp, Homo sapiens
cagcttcctaaacttcacctctttgacaaagctgatataatacacaggatgtaataataggtctttgagaaccttccatcaagactaacttcaggccggaygtggtggttcatgcctgtaatcccagcactttgggaggccaaggcgggcggatcacctgaggtcaggagttggagaccagcctggccaacatggtgaaac

SEQ ID NO: 178683 - DNA, 201 bp, Homo sapiens
gatttttagtctgagaataaacgtgaagtccaatgttataagttgtttcatgaccaacaactagtaagcatataatttttccgtgaaattttatgtgactrtatagctgcctaattacaccaacaagtcatgaagaaagattaaagcgacaggtttataaatgaatctttagcgtcagtacatttttattttataattgct

SEQ ID NO: 178684 - DNA, 201 bp, Homo sapiens
ggttggctctcattgagcatggttatgtgttaactacccatatttcctggaaatgccacagaactgaagttggaagcaggtaggagagcctatgtctggayagcaaggggagtcctgggcagctgcacttacatggaccttggggagctggccccgttgttgccttgctgtcatggccactgagattcagctgctattgtg

SEQ ID NO: 178685 - DNA, 201 bp, Homo sapiens
aattcttattccttttaaggtgagtctcagtgttctcagcctaatcctgataaatgcagccattccaggaacttcctctgtatttacatgtatgcagtccytgttgattgtataagtaatttcatatcttttgtcttgagattatgaactactttaagatagaaatctcattttcagcctgttacctcccacatgccttca

SEQ ID NO: 178686 - DNA, 201 bp, Homo sapiens
aacataaaataaaaatataagcagattagttttctttctagaattgccacatttaaaaaaatatcacacatcctccgaagcaacatgaacattaaggaagyagtgtggaatagtggaatgaacattacctttgaagtggacaggatctccaggctgcctaggagctgtgctatgtaggcgcagcagcgcgtctcccctcca

SEQ ID NO: 178687 - DNA, 201 bp, Homo sapiens
tccaggctgcctaggagctgtgctatgtaggcgcagcagcgcgtctcccctccatgtcttctgccacccagcaggagccacgtaacctgtttcactgccgkcgtgaggattaggggtatggcccatgcccatatggtgcctggcacacggtaggcattcatcagtgaggggctttattatcattatgccaaattttacagg

SEQ ID NO: 178688 - DNA, 201 bp, Homo sapiens
cagagcccattaagacttgcacctgcaccccgtggaacctcaggagcaagatctcccaaaggaagggatatcagagtctttaagttgagtgattaagtccygtttgaggtttggtgttaaataacttgttcagaattcagctccccagttactcccctagttataccagtttcttaaccttctcctctctcctctcctctc

SEQ ID NO: 178689 - DNA, 201 bp, Homo sapiens
tggagactatattgtaaataagcttttagttaggtgtgaggtcccaagagccaatggtctagagccattttgtatgagtcctgaaaagcaccaagcttctytgaggtttgtctacattcaacttaggatacatgtggaattctctcacatctaaactgaatctttccttctcagggactcagtccatcctgcacatgccaa

SEQ ID NO: 178690 - DNA, 201 bp, Homo sapiens
ttttatctccttgggattgttttttgaactgatgataaactagaaagttaatttatttttgcaaaaagtgacaaaacttaaataaatgaaacgttatgacmcacccctcttagagaaattaattgtatcaattgaaaatggccacacttttttgctggtttattggctaatttgtttgaaattgattaatgctttttttaa

SEQ ID NO: 178691 - DNA, 201 bp, Homo sapiens
gattgttttttgaactgatgataaactagaaagttaatttatttttgcaaaaagtgacaaaacttaaataaatgaaacgttatgacacacccctcttagakaaattaattgtatcaattgaaaatggccacacttttttgctggtttattggctaatttgtttgaaattgattaatgctttttttaaatgacacattagaa

SEQ ID NO: 178692 - DNA, 201 bp, Homo sapiens
ctctactgtgtggcctcttgtgaccacacctgactgggatcacctaaaatagcatagaacgtatggtttgtaatcttcctttgccctctttctagctggtsacctgacctgacctcctcaagactctttatttcctcatccttaaaattgggataattatgggaccctccctaaagggttgttcagaaggctaatgcacat

SEQ ID NO: 178693 - DNA, 201 bp, Homo sapiens
cttcccaaagtgctggaattataggaaggagccaccacgcctggcccaaatcagttcttttaaacaaaagtgaaccagttttgtcaatgtacttgtgaaarttaaaggaaaatgattttttggatactcaatttcgttatgagaaaacttttaagtatatttggtacaggttgggtacatgaatttactttttcaatgatc

SEQ ID NO: 178694 - DNA, 201 bp, Homo sapiens
gttaaagaacataaaaaggcagtgcaaacgagtgctttctcttcttgcagaaggggttattctatttcctgatgcctgagatgatctaaacaaagagattsgttttattagtggtgtggtttctttagcccagtaccatgaccgtatcctgttcaaagaagccgccacagggtgcttaagtagaaacatacagtatgattt

SEQ ID NO: 178695 - DNA, 201 bp, Homo sapiens
cgctttcccacacaggccctccccacgccaccctttaagtatgtcctgtgcctagaaccttgcaggatgaaccattgactatatcttttctataaatgacmcaatgggaagaagtaagaaattccttcaggaacagttaagtgtaaaacaagctgggatgctcgtagtctttccttaaaagttgattggaacataagctta

SEQ ID NO: 178696 - DNA, 201 bp, Homo sapiens
ttgaacctaggcaggactttataccagaataattgtgttcatactgaatgagttacagatttagtctgtttgttccttgtttcagaggagtcaagcgtcasaacttaatggtggttgtaggttctcatttgctgtgacatttcagtcattagtctgattggagcattctttatcagctctgtgcttcaagaggaggcggaa

SEQ ID NO: 178697 - DNA, 201 bp, Homo sapiens
cttgaaattctcatctcaaccttcatgtcagtcagtcttcacagagctgtaagaaagacattggtgagtaggggctgagagcaggattaagttcttctccrctggttttcttttagccagccttccttccagggaagcctcttaagtcgatggagatgaaatgcccttgtttcctcgagtggagcagttggggaaagcggg

SEQ ID NO: 178698 - DNA, 201 bp, Homo sapiens
tccaaacagttctcataggagcgtccctgacaacttcatgttataaaaaaaaaaaaaaaaaaaaaaaaaagcattaagagcccaagggacgccttggggaraagaggtgtggaggtagctgggggtggatcgcggtcacggtcctcacgggtccgcacagcacattcttaaccgcgacctagtgatttacggcgccgagag

SEQ ID NO: 178699 - DNA, 201 bp, Homo sapiens
ataaactagaatatttacctcaagaagtcagaagaaaatctgctggagattttagccctggcatggtggctaacgcctgaatctcagcctttgggaggccyaggcaggcagatcacgtgaggtctagagttccagatcagcctggccaacatggtgaaaacccgtctctactaaaaatatgaatattagctaggggtggtg

SEQ ID NO: 178700 - DNA, 201 bp, Homo sapiens
tttatttgttgagacggagcctcgctctgtcaccaggctggagtgcagtggtgcgatctgggctcactgcaacctccgcctcccgggttcaagcgattctyctgcctcagcctcccgagtagctgggattacaggtgcccgccaccacgcctggctcattttttgtatttttagtagagacagggtttcaccatgttggcc

SEQ ID NO: 178701 - DNA, 201 bp, Homo sapiens
agtgttggttttagagaaagacctatatttattcaggctagattaacctaacgccttaatatctgttaaaaggaatagcttggcagagagatgcccatacygtgtttcagatatttgggatgagctgagagatgtttggtggctagagaggaattagtgatgttgttgtgtatcgagtgaacctagaaaatgagctagctg

SEQ ID NO: 178702 - DNA, 201 bp, Homo sapiens
tagaaggaaacatggttgacactatagcgggaaagtacacagccacaaagcataatcagaaattagttctcttcctagtccaggggaaatgtgagctctcygcatattgtgggactgtaagtgtgtttatccttactgtattcaactttaataggctgctgtcctcaattttaagagattcgtataattcgagaataaacc

SEQ ID NO: 178703 - DNA, 201 bp, Homo sapiens
ttttttatttttatttgtttatttgttgagacggagcctcgctctgtcaccaggctggagtgcagtggtgcgatctgggctcactgcaacctccgcctccygggttcaagcgattcttctgcctcagcctcccgagtagctgggattacaggtgcccgccaccacgcctggctcattttttgtatttttagtagagacagg

SEQ ID NO: 178704 - DNA, 201 bp, Homo sapiens
cagaaggctggttcagggatctgggaattgttctttctaacacgaccccagtcagtgtgacattgcttgcctgggtactacagatagagaaaccaccacarctaaaggtttagatgagatcaggtgattgattgaatcatatgatgaagttgaacacggtaccctaagacattttaaatccgtgaggccttgcttctctgg

SEQ ID NO: 178705 - DNA, 201 bp, Homo sapiens
aagatataaaataatctttgaagtgtaatttggttatgttgattcttttggccttctattttattttttaaagaagatacctcatttttcaaaaaaaaaaattggccttcttctcttgtggactgaaaaatgcattgttggattgattatgtttggaattgagggtttttttatacttttcaaatataaaatttatgttgc

SEQ ID NO: 178706 - DNA, 201 bp, Homo sapiens
tggagatactttctttcttaatctgtgagaatccttgaactggttttcttctgggttgttatcccagaagcctttatactttgattaaaaaaaaggctaakcttttatggatttcatgttgaaactatactgagtgttggcagggctgaccaagtctatgtcctttaacgttgccacttactagctgtgttatctcaggca

SEQ ID NO: 178707 - DNA, 201 bp, Homo sapiens
ggcggaggttgcagtgagccgagattgtgccactgtactccagcctgggcgacagagcaagattctgtctcaaaaaataaataaataaataaataaataaaactaaagttttatttttacttctccaaattggatttgtagaacagatagattaattatatacttacagaagagtacgtgtccaaatttaagtaatattta

SEQ ID NO: 178708 - DNA, 201 bp, Homo sapiens
aggcggaggttgcagtgagccgagattgtgccactgtactccagcctgggcgacagagcaagattctgtctcaaaaaataaataaataaataaataaataaaactaaagttttatttttacttctccaaattggatttgtagaacagatagattaattatatacttacagaagagtacgtgtccaaatttaagtaatattt

SEQ ID NO: 178709 - DNA, 201 bp, Homo sapiens
gaggcggaggttgcagtgagccgagattgtgccactgtactccagcctgggcgacagagcaagattctgtctcaaaaaataaataaataaataaataaataaaactaaagttttatttttacttctccaaattggatttgtagaacagatagattaattatatacttacagaagagtacgtgtccaaatttaagtaatatt

SEQ ID NO: 178710 - DNA, 201 bp, Homo sapiens
ggaggcggaggttgcagtgagccgagattgtgccactgtactccagcctgggcgacagagcaagattctgtctcaaaaaataaataaataaataaataaataaaactaaagttttatttttacttctccaaattggatttgtagaacagatagattaattatatacttacagaagagtacgtgtccaaatttaagtaatat

SEQ ID NO: 178711 - DNA, 201 bp, Homo sapiens
ggctcctttccactaatcacactcaccagcaaaatcttgagaaattgtggcagccacgtcctggggcaaagcgtgcaatgaagttggtagagggctttcaragaagcctgaattaaagctgcaggctgtcctcagtgtactttcctgttccccctcctaagattcttcagggaacagccagccttgttcaagtataataat

SEQ ID NO: 178712 - DNA, 201 bp, Homo sapiens
actatcctcatagatacccacttgtacactacacagtggcaagaaggtgttgctgaaggagaagacaatttcttttttttatgtttaatttttttttttttgagataaagtctctgtcacccatgctggagtgcagtggcacgatctcagctcactgccacctccgcctccagggttcaagtgattcttgtgcctcagcct

SEQ ID NO: 178713 - DNA, 201 bp, Homo sapiens
tttttcctctgattatgtgattaattttagagtaagtctcacgtggctatgagaagaatgtttctgggtggacagttctgtaaatatctatcagatcctcktgatccagagctgagttcaggtccaaaatatcttggttaattttctgttttgatgatctgtctaatattatcagtggagtgttaaagtctcccactatta

SEQ ID NO: 178714 - DNA, 201 bp, Homo sapiens
tcaggtttgtcaaagatcagttggttgtgggtgtgcggtctcatttttgggttctctattctgtttcattggtctatgtgtctgttcttataccagtaccrtgctgttttgattactgtagccttgtagtgtagtttgaattcaggtagcatgatgcctccagttttgttctttttgcttaacattgtcttggctgtttgg

SEQ ID NO: 178715 - DNA, 201 bp, Homo sapiens
gattttttagttttgggttttacatttaagtctttagtccgtgttgagttgatgtttgtatatggtgtaaggaaggaatccagtttcagttttctgcatayggctagcaagttctctcatcaccatttattaactaaggaatcctttccccattgcttgtttttgtcaggtttgtcaaagatcagttggttgtgggtgtgc

SEQ ID NO: 178716 - DNA, 201 bp, Homo sapiens
cctgaatggtattgcctagattttcttctagggattttttagttttgggttttacatttaagtctttagtccgtgttgagttgatgtttgtatatggtgtraggaaggaatccagtttcagttttctgcatacggctagcaagttctctcatcaccatttattaactaaggaatcctttccccattgcttgtttttgtcag

SEQ ID NO: 178717 - DNA, 201 bp, Homo sapiens
attcacaattggggcaggaggtgctgtgggaatgaaccagccgcatgaacagagacataggcagggactctgtcaggtggagtgggtgggtggcccagtcygggaaccctgagaagcaaggctggtagagccaatatcaccacaccctgccctggccaggccttctctcacgcagccagcaggccacccctcttcaccgcc

SEQ ID NO: 178718 - DNA, 201 bp, Homo sapiens
agtcacctcagactgccattaaaagcatttcatgttctgtgggcaattctgaactccagcttttcttttttttcttttaaaattattatttttaaaaaatatagtgttcagtggtaaaatccagagtgagggaaagctccccaatactggaatactggtgatcacttcctcattagctggcccacatttatagccccgcaa

SEQ ID NO: 178719 - DNA, 201 bp, Homo sapiens
tgagtgaactcttaccctgctgggagcttttttgctgtgtgctctgtgcttattagcctcctagccctcgtttgaccctgttccctttttaaattaatgcwtctccaattccctaatctagacttttttttaatctcatgtttctttgtttccacccaatttgaggaaatagctgaggagttttcaactgtttacccaaag

SEQ ID NO: 178720 - DNA, 201 bp, Homo sapiens
tgtcctttaacgttgccacttactagctgtgttatctcaggcaacatcctcattcatggaatgggaccagtaatattatagtaagggtgttgtgatgattwagtgatttgatacatacagagaacggtgtccagtacatgatcattgctgtgtaagtgttagctattgatattacttaaataatctatacttttcaaaagg

SEQ ID NO: 178721 - DNA, 201 bp, Homo sapiens
cattaatgaagtaaagcccacagagatctacaaccttggagcccagagccacgtcaaagtaagcattttcattgggatttctctggccgtgtttctgtggygttctgtattttacttgtgtctgctgcttctcagtgtagtaatataatcactggtcttagtcttcaagttgaattgtcagtgttagtttaagtattaatc

SEQ ID NO: 178722 - DNA, 201 bp, Homo sapiens
ttgtggaatgtgtctttagtggagacagaaagtcacttagtcttttttttagttttgaaaaggattttcaaattctttctcagcgttacaaaccatgagtrtgtctttctttcactttctcttactcagattgaataacccatactttctactccttttctaaccctttaaatatctgtattactttccttttcaagtctc

SEQ ID NO: 178723 - DNA, 201 bp, Homo sapiens
ccacacaaagctatgcttgttgggtttttcacccttaatgtgtttataaatagtggcttgtttactaaataaaatccagagtagcattattttagtattgyaacattattttatatatattaagctaaaattaatacaaatagctaaatgaacatatttaccacaatattaatttctagatgctatttataaaaatggtgg

SEQ ID NO: 178724 - DNA, 201 bp, Homo sapiens
aaacagttctcataggagcgtccctgacaacttcatgttataaaaaaaaaaaaaaaaaaaaaaaaaagcattaagagcccaagggacgccttggggagaaraggtgtggaggtagctgggggtggatcgcggtcacggtcctcacgggtccgcacagcacattcttaaccgcgacctagtgatttacggcgccgagagccg

SEQ ID NO: 178725 - DNA, 201 bp, Homo sapiens
ttttgaaaaatgtctaagatcgaagatgagtgattagtaggtatcacttttactctttgaaaaatggcagagtatgttcctagtttggaaatgttaatttraagtgtaatccacagcgaatttagatttgctttatttataagaaaccgcacatcaagccttggtttggcatgttacagctccgttaacagtttatcgtta

SEQ ID NO: 178726 - DNA, 201 bp, Homo sapiens
attctaaatgggagctgatagagaagaggcagcagtttcgcacttcttatgctgtttggtatatcagggtaaaaaaacctgttcctgagtttcttttctaytcccattccatatatttcattggtgccaggtttttatttttttagtatataacagtaaagtcttttagaaattagtggtattgacaaaataaacctttta

SEQ ID NO: 178727 - DNA, 201 bp, Homo sapiens
atctacctttgatctttgatgttggtgaccttcggatggagtttttgtgtggacgttctttttgttgatgttgatgctatttctttctgttagttttcctyctaacagtcaggcccagctgggcacggtggctcatgcctgtaatcccagcactttgggagcctgaggcaggtggatcacaaagtcaggagatcaagacca

SEQ ID NO: 178728 - DNA, 201 bp, Homo sapiens
acttgtgtatgcttcacgaagttctcatgctgtgtttttcagctccatcaggtcatttatgttcttctctaagctggttattctagttagcaattcatctracattttctcaaggttcttagctttcttgcattgggttagaacatgctcctgttgctcagaagagtttgttgttacccaccttctgaagcctacttctgt

SEQ ID NO: 178729 - DNA, 201 bp, Homo sapiens
gccattgtttttcaatgaagtgttaatggttagtggaaaaatttgtgtaatataaatgccctaaagttcaattttggcgctaaatttaattgccttttttyccccacagtttgtgtctttattttagataaacacataagttcataaatgtattgctcatatttcgtctttcttgaggaatggtttcagatagatttgata

SEQ ID NO: 178730 - DNA, 201 bp, Homo sapiens
cccagggatgaagccgacttgatcgtggtggataagctttttgatgtgctactggatttggtttgccaggatgttattgaggattttcacatcgatgttcrtcagggatattggcctaaaattgtctttttttgttgtgtctcaccaagttttggtatcaggatgatgctggcctcataaaatgagttaaggaggattcct

SEQ ID NO: 178731 - DNA, 201 bp, Homo sapiens
tctatgatagctaaaaatatttcaagtagattactttctttattactaaattttccttatttgaagagtaattataaaaataatttatgtggctgggcgcrgtggcttacgcctgtaatcccagcactttgggaagctgaggcaggtggatcgactgaggtcaggagtttgagacctgcctggccaacatggcgaaacacc

SEQ ID NO: 178732 - DNA, 201 bp, Homo sapiens
gggtacagtggtcttgcagtatagttcgaagtcaggtagtgtgatgcctccagctttgttctttttgctgacgattgtcttggctatacgggcatttttttggttccatatgaaatttaaagtagttttttctaattctatgaagaaagtcagtggcagcttgatggggatagcattgaatctacaaattactttgggcag

SEQ ID NO: 178733 - DNA, 201 bp, Homo sapiens
aggttgcagtgagcagagatcacgcattttttggttgtggagatcacgccactgcactccagcctgggtgacagtgcaagactccgtctcaaaaaaaaaaataaaaaataaaaaacatttaaactctgtgttacctaaaggatatcaaaattttgtgtctgtgctaattgatgttggtttgttagagctttaaactattga

SEQ ID NO: 178734 - DNA, 201 bp, Homo sapiens
ctgaagttacatgccacactgattcaatcagatgactgcagtgatgactgatgaaagtttgcttctttataaccacagaggagagttttggaagctgttcytttaggtgaagtcgtttccaccccaacatgagttagcatgcctttctgcacatatgttttcaatgtgactgtagcctgaaacatctttcctggatatttg

SEQ ID NO: 178735 - DNA, 201 bp, Homo sapiens
attacttaaaacatccttttaacatctcagaggagaggtgccagattgcttaaatatctcctgttttatcagagtgctacattcatttttcactcatttcratgtagtttcctcctatagttaaatcaccatttcaaaatttaacattgagttagggagcgtatagataaatgatagaactttgtgactgaaatagataaa

SEQ ID NO: 178736 - DNA, 201 bp, Homo sapiens
aggaaaggaagttatgaccagcagggttcatttcagaggatattcacagcgggatgttattctcccggctgacaattcagagggcttaaggccatgtgtggaagagccatcaccacatttgatttgaggtggcctcacctgggtgtgagggtgccagggagacagcagaggggagtaggccctagagttcaggcttcacac

SEQ ID NO: 178737 - DNA, 201 bp, Homo sapiens
aaaggaaaggaagttatgaccagcagggttcatttcagaggatattcacagcgggatgttattctcccggctgacaattcagagggcttaaggccatgtgtggaagagccatcaccacatttgatttgaggtggcctcacctgggtgtgagggtgccagggagacagcagaggggagtaggccctagagttcaggcttcac

SEQ ID NO: 178738 - DNA, 201 bp, Homo sapiens
gggatttgtgtttgaagttagcccactttactcctgctcgtcaatatttcaggacagctgggattctctaaaaatcagtttttgccaaaaaaaaaaaaaaagttggtttgagaggattgcaccagttctatattattattcctacaatactgtaaaattgtacaaaggcccccatgaccattaagaatattggaatatggt

SEQ ID NO: 178739 - DNA, 201 bp, Homo sapiens
tggggcaccagttttccatgcaattctaatactttttgcattttgtcatatcaattctgttttttttttggagatggagcctcactgtgtcgcccaggctrgagtgcagtggcgcgatctcggctcactgcaacctccgcctcccgggttcaagcaattctctgcctcagtctcccgagtagctgggattataggtgccca

SEQ ID NO: 178740 - DNA, 201 bp, Homo sapiens
gtacggcattctgtgctatattgtaaacctgggtgcacgtgtttagtgttttgggggagtgtggcatctgctccacagtttctagagaaaataaccattcrtttgattcttagtgagaaaatttcatagagaatcatttcattttcagtgttggtatagttgtgcttcccatactgtgcctccgttggtttaacacatcaa

SEQ ID NO: 178741 - DNA, 201 bp, Homo sapiens
gaggcttcaagattgttgggaaattatcacaggattgtttcttgagaaatctgtctcccaccataagcactgttttccaggtcttcctaacaaatttcaartgaaattttaataatacaaaagtgacataatattagcacaaatttggaaaaccaaaaaaagttacctaaaatcttaacaccagacctatgtttttttctt

SEQ ID NO: 178742 - DNA, 201 bp, Homo sapiens
atttcgagactggaagaatgtgtgagttatcaggcaagatgaggttgataggaggaacctgcattcactggtggttcattatagtttgcaggtctttccaygtattatctctttttgtctttataccaatcctatgatacaggcaaagcagattcctattattaccattttacagacaagttaatgtctagctagcctttc

SEQ ID NO: 178743 - DNA, 201 bp, Homo sapiens
ggtcgtgaactcccgacctcaggtgatcggcccaccttggcctcccaaagtgctgggattacaggcgtgagccaccgcgcccagccagtcctcttttctartataccaccagatagcaccttctgaatcagcccagcacccttaaagcagtaattgatagtcagggcttgccagctgaacacgtaactgagttctctctgg

SEQ ID NO: 178744 - DNA, 201 bp, Homo sapiens
ggagtgcagtggcgtgatcttggctcactgccacctccacctcccaggttcaagtgattctcctgcctcagcctcctgagtagctgggattacaggtgccygccaccacacccagccaatttttatattttcagtagagacggggtttcaccatgttggtcagattggtcaagattatcaaactgacttttcagttctctg

SEQ ID NO: 178745 - DNA, 201 bp, Homo sapiens
tagctttatccagcagttttatgttgattcttgccctgttagactaaaaagccaccttttatcctttctttgagaaaaatttgttatagcacagattgtttctgcatcagaactattcttgaaaattctctaagtaactttttcttcatattttatgaatagtaatgttcaaaactaattgtgcagtagttcaattaattg

SEQ ID NO: 178746 - DNA, 201 bp, Homo sapiens
ctatagctttatccagcagttttatgttgattcttgccctgttagactaaaaagccaccttttatcctttctttgagaaaaatttgttatagcacagattgtttctgcatcagaactattcttgaaaattctctaagtaactttttcttcatattttatgaatagtaatgttcaaaactaattgtgcagtagttcaattaa

SEQ ID NO: 178747 - DNA, 201 bp, Homo sapiens
cttccgttgtacattttgagtaactggtagtcattcttttgttcttttcttttccactgtaatcatagttttcaacttactgcagtgataaaaaaaaaaaaccacaaattactgacagatttccttgattttaataatttcgctatacaactgtctcatttaggagatgccacagctcctgctctcataaccaaaaccagg

SEQ ID NO: 178748 - DNA, 201 bp, Homo sapiens
tgatttttgctgatatacatgtgtctttgtttatttaaatgttttgtaccacctcagtggtttatatatggtgctgcaattttccaagtatttttttttttgcctcagtgaagttattttagagaatatcttagattaataaatctttggattagagtagacatacgtaaatgggatttggaatgcaattatttaactgga

SEQ ID NO: 178749 - DNA, 201 bp, Homo sapiens
ggagttgcatcttgcaatgatagcttttaaattcttaaaacttttaagacaggagtgtgtgtgtgtgtgtgtgtgtgtgtgtgtgtgtgtgtgtgtgtgtkctctgtaattagaagtaaatttatacatcaaaatttaagcaaggttgttcttcagagtgcagtcacagttaatgaaatttctagaactttggaatgagtg

SEQ ID NO: 178750 - DNA, 201 bp, Homo sapiens
gttcagttacaaaagagcctacagactcgggtctcattaaggatttgtgtgtatgcatgtgcgtgcctgtgtgtgtgtgtgtgtgtgtgtgtgtgtgtgtkcccatgtgctcgaggtctcttttgacagttgatagagcacccatcctgaaattcagtctttctttgatttgaattacattgacagcataaaccctaatct

SEQ ID NO: 178751 - DNA, 201 bp, Homo sapiens
tttcaaagtgaacctgagttgtattgtaacgtatcaccctccggttaccgtaaatattccatgcgtggttgttgcatcactctccctccattcccctgaawagagaaaagattctcttttcttttataccaagattgtcttttcaggatcttaatcctgatctgttcttaggatttcagaattctttcactagccctcttc

SEQ ID NO: 178752 - DNA, 201 bp, Homo sapiens
gtctgttccctggcagatcaggctcttcacgcctctttcacataccctgctccccctgccataaaactgctcctttcagccaggtgtggtggctcacgcckgtaaccctagcactctgggaggccgaggcaggtggatcacctgaggtcaagagttcgagaccagcctggccaacacagtgaaaccctgtctctactaaaa

SEQ ID NO: 178753 - DNA, 201 bp, Homo sapiens
atgtttcaaatgcttgttgtaacaggaagcaagacacctctttcccgtaagtctccagaaagcattgtgaagggcttcagttgaaaaaaaaaaaaaaaaaagcttgactagtctaaatattttaattattgtacaaataagattttgtgtcttaaagatacaataaaatgaaataatctactccagttaaaagcagtactc

SEQ ID NO: 178754 - DNA, 201 bp, Homo sapiens
cgctccacgtgcgtgaccatagcaaggtgcggggtttccacgagccgtcgttcatctgtgtaatgggggcaaatgcccacacttgagagtttctgagactrgtagagaaaatatgcttgacacttagtaggtgctcagcaaatgctggtattctttttgctgaaaccccaaagcatcagagtcaacattgactcccctccc

SEQ ID NO: 178755 - DNA, 201 bp, Homo sapiens
tccctcctagccagagaagtgcagcaattccaaacagttctcataggagcgtccctgacaacttcatgttataaaaaaaaaaaaaaaaaaaaaaaaaagcwttaagagcccaagggacgccttggggagaagaggtgtggaggtagctgggggtggatcgcggtcacggtcctcacgggtccgcacagcacattcttaacc

SEQ ID NO: 178756 - DNA, 201 bp, Homo sapiens
tgttttggtttttatttgtcacatttgttcttggatcctttcccccgtcttttcttgccttatttgggttgaatttggtatttttaaagcattcttttaartctttatcttatttgtttatacctgtttgattttttaaaaaataatttctctagattttgtaataagcacctgtatcttatctctctctatttgtagaca

SEQ ID NO: 178757 - DNA, 201 bp, Homo sapiens
ttaagttttaagtaagaaaatgtgtacccccatcattacttctgatttactgaagcatgagaaagctttacaaagcatgcacatgctttacaaagtaaaarttatctgtaagccttccaagaagttttattaaatttcgctatcatttagatttttagtctgagaataaacgtgaagtccaatgttataagttgtttcatg

SEQ ID NO: 178758 - DNA, 201 bp, Homo sapiens
ggaacatatgactttgttttctctgaacaagttaaaaaagttaaggtttcagagcttagtaagtgataagtaaagtaggtaagatctggtaaagtaacttrtgggatattgaatattaaatgctagaagaataatggtctttgcttctgttgtttatgggctaattcccagatattgttattagatgtttctggtgtggac

SEQ ID NO: 178759 - DNA, 201 bp, Homo sapiens
cggtggctcctggcctgagagagctgttgggtgggatgtgtcctcaaaagactaaactcagaactggaccacactgtgcctttggtggccttcagccaacygaggcaggatttgggaaaggtgattctctccagcagttttggtaccagcctggctgtgtctggtgttcactaaaatatgcctgatatgacagtcacaggg

SEQ ID NO: 178760 - DNA, 201 bp, Homo sapiens
atatgtatagccaaatctcaatttaatgcttcctagggttgaatgtttgcctcctaaaatgtgaaaccaagtttgcgaagttcctttcctaaaatattttmgtgtttaccaacttttcttgggtttcgttcttttggaaaataatgttgatgagtgcttttcttccaaagcaactaaccaacagaaatattaactgtgggt

SEQ ID NO: 178761 - DNA, 201 bp, Homo sapiens
ataattcttattctttcccaagattcttgaaaacatattgattcttaatatctaattttatttcaatttttttaattaaggtttttttttttttttttttyttttaagagacagagtcttgctctgtcacacaggcttcagtgcggcggcacattcacagcttcctgtagccttgaactcctaggctcaagtcatcttccc

SEQ ID NO: 178762 - DNA, 201 bp, Homo sapiens
cttattatatacatttgcatataataacttggggtaaattttttacttatatggctaattgagactctaagcctgcctaaggtgaattgctgaatttttttcggtagatgaattgcatttttattgcagacaatacatgcattgggtgacaaaatctgaaatgatctgaagtatttgaacacagagtggagccccagcttt

SEQ ID NO: 178763 - DNA, 201 bp, Homo sapiens
acattactcctaaaatgtctacttgtcatattctatctctatgagaaacataacccaaggtagatatatatatatatatatatatttttttttttttttttgaggcagagtctcactttattgcctaggctggagtgcagtggcatgatctcagctcactgcaacttctgcctcctgggttcaagcaattctcctgcctct

SEQ ID NO: 178764 - DNA, 201 bp, Homo sapiens
gtgaagcaaggagacaaacattactcctaaaatgtctacttgtcatattctatctctatgagaaacataacccaaggtagatatatatatatatatatatatttttttttttttttttgaggcagagtctcactttattgcctaggctggagtgcagtggcatgatctcagctcactgcaacttctgcctcctgggttcaa

SEQ ID NO: 178765 - DNA, 201 bp, Homo sapiens
tctccaacacacataaaaaaaataaaagccatcactccagtcacagagtcaaatgctacaaataaaaattaatctctaaggagttttggattgttttttttgtaggggtatagagagtctcactccgtcccccaggctagagtgcagtggctcaatcataactcactgcaacctcaaactcctggtgggttcgaggagctt

SEQ ID NO: 178766 - DNA, 201 bp, Homo sapiens
acatttggccaattcccctgctgattaatgtgcctgagggtccatgccaccctttgcccccttccagtgcattagtttaaaaaaaaaaaaaaaaaaaaaaaggctttcatacgctccactgccgggtgagctgggcacaggtccagcggcgccagcaattttccgtcctttgtgtgagtgatcagaggccaaccccacaaa

SEQ ID NO: 178767 - DNA, 201 bp, Homo sapiens
tgtactgtctgttctgtaccaaccaggcagaatccaggtagaaattctctttattttattttattttattttattttattttattttattttattttatttgatgcagggtcttactctgttgctcaggctggagagcagtgacacgatttcagctcactcactgcaacctccgcctcctgggctcactgaccctcccacc

SEQ ID NO: 178768 - DNA, 201 bp, Homo sapiens
ctgtactgtctgttctgtaccaaccaggcagaatccaggtagaaattctctttattttattttattttattttattttattttattttattttattttatttgatgcagggtcttactctgttgctcaggctggagagcagtgacacgatttcagctcactcactgcaacctccgcctcctgggctcactgaccctcccac

SEQ ID NO: 178769 - DNA, 201 bp, Homo sapiens
tctgtactgtctgttctgtaccaaccaggcagaatccaggtagaaattctctttattttattttattttattttattttattttattttattttattttatttgatgcagggtcttactctgttgctcaggctggagagcagtgacacgatttcagctcactcactgcaacctccgcctcctgggctcactgaccctccca

SEQ ID NO: 178770 - DNA, 201 bp, Homo sapiens
atctgtactgtctgttctgtaccaaccaggcagaatccaggtagaaattctctttattttattttattttattttattttattttattttattttattttatttgatgcagggtcttactctgttgctcaggctggagagcagtgacacgatttcagctcactcactgcaacctccgcctcctgggctcactgaccctccc

SEQ ID NO: 178771 - DNA, 201 bp, Homo sapiens
ctgcaagtgcctcagtggcatccttaacatggtgcgttgtggaggccaccacacagccctctctcctccgctcctgctcctcttcaagcctgagccctctscccgtatccacaggcacccacctccttatctgctagcctgcccttgttgcctgccgcagacacaggtacctgtcggagatcaccatctatgtcagtctcc

SEQ ID NO: 178772 - DNA, 201 bp, Homo sapiens
tggcccccagccgtactaaacggggcagttctgggaggttctctaacaccactgggtccttgaacagctgtctgcatctggactgttagccttgcacttcrtctccctaccttctgctcgttcctcacaacccagctcagggaaaatcttctctgggaagtatttcccaagagccctcacttcactggcctgtgagcgcct

SEQ ID NO: 178773 - DNA, 201 bp, Homo sapiens
agtgctacgcagggcgatctttctgagccaggggccagtaggaaaggacaggggcatcctgaaggagcaggtgaaacgagggccttcttcggggttctgaraacttcctagtgtgcttccactgtttgggacaaaagaagtgtgccgagttgttggggtatttccgcttcacctttcatgaaggtaagtcagagagatgcg

SEQ ID NO: 178774 - DNA, 201 bp, Homo sapiens
gttgaaaggaaaggaagttatgaccagcagggttcatttcagaggatattcacagcgggatgttattctcccggctgacaattcagagggcttaaggccaygtgtggaagagccatcaccacatttgatttgaggtggcctcacctgggtgtgagggtgccagggagacagcagaggggagtaggccctagagttcaggct

SEQ ID NO: 178775 - DNA, 201 bp, Homo sapiens
ggacagctgggattctctaaaaatcagtttttgccaaaaaaaaaaaaaaagttggtttgagaggattgcaccagttctatattattattcctacaatactrtaaaattgtacaaaggcccccatgaccattaagaatattggaatatggtgactcatctttcagtactaagttgaaaggaaaggaagttatgaccagcagg

SEQ ID NO: 178776 - DNA, 201 bp, Homo sapiens
agcacaacagcctgttgctgtgcagtctgttgaacttggcggcgaggtgtagggaccgggatttgtgtttgaagttagcccactttactcctgctcgtcartatttcaggacagctgggattctctaaaaatcagtttttgccaaaaaaaaaaaaaaagttggtttgagaggattgcaccagttctatattattattccta

SEQ ID NO: 178777 - DNA, 201 bp, Homo sapiens
aggctggagtgcagtggcgtgatctctgctcactacagccttgacctcccaggctcgagtgatcctcccacctcagcttccagagtagctgggaccacagktgcatgctaacatgcccgactattttaaatttttttttgtaaagatggagtcccactatgttgcccaggctggtctcaaactcctgggctcaagcaatcc

SEQ ID NO: 178778 - DNA, 201 bp, Homo sapiens
aagcatgggaaaatggttttattcttttctgcagtctctagaagaagtggcataagggtgtcaatcacatgacccagagcagtaagtccaaaagtttctcyaccatccatctccccagatgtctccagatttgttttatccctctcagctccagactttgctctgacatccggccaaatctgctgtctcctctctcccctc

SEQ ID NO: 178779 - DNA, 201 bp, Homo sapiens
aaaggaaatgtcatcccttcttgggagtaagagggtgctgaatggtgcgcagaaaatgagcactgctgaagctcacagagatgagctctaccaagccactrtggcagattatgctctaaatacgaccacattggagtcccacatgctcttccagagccttgctacccccatcaggagatggagcctccttccctgccgagg

SEQ ID NO: 178780 - DNA, 201 bp, Homo sapiens
aatctgtactgtctgttctgtaccaaccaggcagaatccaggtagaaattctctttattttattttattttattttattttattttattttattttattttatttgatgcagggtcttactctgttgctcaggctggagagcagtgacacgatttcagctcactcactgcaacctccgcctcctgggctcactgaccctcc

SEQ ID NO: 178781 - DNA, 201 bp, Homo sapiens
tgaaagttgctagataggtgcagcttgaacttccattttctttgtcatgattgcagacccaaatattttaaacacaagagaagacactgctaaaatcaggkttttttttctcagatccaggaaaaaaggtgtaggttgttaatgtttcttgttacaaagttttgaaatattttctcagataatgaaggctatttataattg

SEQ ID NO: 178782 - DNA, 201 bp, Homo sapiens
atcatgtacatgaagtcactacattcctactcccctgtgttcattcatgagcacgtgtggcctgtaggtgcatgaagatgaaacagtttgatcagcatgcrtatggtggtcatattcttttatgaatccctaggtttatattaccagatgttttcctgaaatgtagcattttttaatttatttactaaatgtttattaagc

SEQ ID NO: 178783 - DNA, 201 bp, Homo sapiens
agtctcgctctgtcgcccaggctggagtgcagtggcgcgatctcagctcactgcaagctccgcctcccgggttcacgccattctcctgcctcagcctcccsagtagctgggactacaggcgcccgctaccacgcccggctaattttttgtatttttagtagagacggggtttcaccattttagccaggatggtctcgatct

SEQ ID NO: 178784 - DNA, 201 bp, Homo sapiens
acgtggttgtccagatgtgtatacacacacacacacactcatatgagttatctccttgtataatctttttttttttttttttttttttgagacggagtctsgctctgtcgcccaggctggagtgcagtggcgcgatctcagctcactgcaagctccgcctcccgggttcacgccattctcctgcctcagcctccccagtag

SEQ ID NO: 178785 - DNA, 201 bp, Homo sapiens
cagcagattctctttgatagcttgataagctgcacctagcattgagtaaagcagtggtgtgtgttgctaatacatttcagtgatgtccccccggattcgaagctgtgccagcaggatcctttgtcttttcctgatacctcttgttcaaggtgtattgatgtaaagggagaaccattattttagtttaaaatattaaacaaa

SEQ ID NO: 178786 - DNA, 201 bp, Homo sapiens
tacatgtttgaaattttttttaaattctaacattcagagagtttgttgatacatatctttccagtccgtgtgtgtgtgtgtgtgtgtgtgtgtgtgtgtgkaaatacaaaaaaagacttcaatataaaatgtatttggttaaatcagagttattcaaatatgtgaatatctcaaatcagagatattcaaatattataaaca

SEQ ID NO: 178787 - DNA, 201 bp, Homo sapiens
tcaatattctttaaaaaaaaaaaaacctttggtaacataataagaaataagaataggtttctgtcttcaagaaatatttagtttttagcttaacataaaaatgcctatattggcttataattctgttttatttagtataaaagtgcccatattggctcattggcccataggggctctgaagtcacttgaagtttactcacc

SEQ ID NO: 178788 - DNA, 201 bp, Homo sapiens
cctgggctcaagaagtccttccacctcaacctcctgagtagctggggcaacaaacgtgcaccaccacacctggtgatttttttttttttttttttttttttgtggaaatgaggtctcgtttcattgttcaggctggtcttaaactcctggcttcaagcagtcctcccatctcagcctcccaaagtgctgggattacaggtg

SEQ ID NO: 178789 - DNA, 201 bp, Homo sapiens
cttacctcctgagtgccacctcctgtcagatcagtggtagcattagattctcatagcacagcctctattgtgtactgtgcatgcaagagagctaggttatrcgctccttatgaaaatctaatgcctgatgatctgaggtggaacagtttcatcccaaaaccatcgccccacacccccagtccgtggaaaaattgtcttcca

SEQ ID NO: 178790 - DNA, 201 bp, Homo sapiens
gaatgtagatcaccggcacaacataataagaagtatggaatttttttacccagggaactatgtgaataaaacgttagatgttttcaagttaatttgacagrgttgtcattccaggatattgctgaatgcagctgggaaaggttctttggcaaagactaatcagtacaagctccagcaagttgtggaaatatattaatcaca

SEQ ID NO: 178791 - DNA, 201 bp, Homo sapiens
tcatccagcactgaggagcaaggagggacagaaagaggaaaatgacattaaagggccactgaattaaagccttcaactcaagtgccagagacaccgtgctrgcagacgccagccctgtgtggctcttgtcctggcatggtcttcctatctgcccaggaaggcaggccccaggcacaacctgtgagagaacaggcactgcct

SEQ ID NO: 178792 - DNA, 201 bp, Homo sapiens
ctaaagggttgttcagaaggctaatgcacatagaatacttccagtgctgcctgtggtaaatattgcctgttatttttattattactgtttttacatatgtyaatggacacaactgtcttatttactgcattgctgttttttgaaggcaaggcatctctgtaaccttggaccacttcctaaaacagcagatttctgatgaat

SEQ ID NO: 178793 - DNA, 201 bp, Homo sapiens
gagttcagttcatttggccccagtgtgtggccccagcctgggatgctgaggtcccctcctgcccatgaagcctctgctatgcttgctcaggctgtgcgagrggcttgtcttaagtctttgcatcctattcccagagactggagtcccactctttccctggcctgctggccttggttcttactggtgcttgcccatagccaa

SEQ ID NO: 178794 - DNA, 201 bp, Homo sapiens
cccaaaaacatgcagtaaatgttcaagtctattagcctttcgcttttattaagtgggaaactttagttttgttttgacacagatgagtctggagagtcatragtggctgcggggctgagcttgctgatgggcccttggctgtgggtacgcgctggcagagtggcgcgaggctgtaggtacgtgtgaggtggctcatggtca

SEQ ID NO: 178795 - DNA, 201 bp, Homo sapiens
gcaggtctgggctcccagtctgcctgtctcgggttgccttctccacactctcccatgccacctcccactagccgcacctccagcaccaggcggaggtccayatttcagtcctgtacacactcctctttgaaaaatgatgcatttgccagcaaaaccttagggttaaaaagtttacaaaagtgtgtgtgtcccacaaaaaat

SEQ ID NO: 178796 - DNA, 201 bp, Homo sapiens
tcctgagttctgtgagtcatcctagcaaattatgaaacttaaggtggagacccctcaggtttataaccagttggttataagtgcaggtgacctggggaccygcaaaccggggctggtgcccgaagtgagggctgtctcgttggggatcatgcccttcagtctgcagagtcacttcctaactccaggtgggtagcagcagaa

SEQ ID NO: 178797 - DNA, 201 bp, Homo sapiens
atagaaaccctgggcagtgcagcttctgggtagtgaacacgttgatgtaataagggggtgatgcatcttgagcacatggaagctttgcctttggggccctyccagaccgtcccctgctgtcccttcatttggctggtcctgagttgtatcctttctaataacactgtcattacatgactattgtgtcctgagttctgtgag

SEQ ID NO: 178798 - DNA, 201 bp, Homo sapiens
cctactgggctgtggtaagaccatgcctaactcccatggagactttggaggcattcagtaattgtgagctcttattattattattgctaattattggctcrtcttctttttgagaagaggggcttgtctaataagccctaaatgctgaaaatttctttctgagctgtcatactggagtgtgaccatttatttctggatttc

SEQ ID NO: 178799 - DNA, 201 bp, Homo sapiens
aaaactaacagttaagcctggtggggaaaggggatgggtttttaaagaaaggaatgaaatcatgttatactagttgactctgaagaaaataatatttatayagaaactaataattgctactatgaatatagacttaaccaaaaattgagaagtaattatagaggggaagtgagtttaaaagtatataaatatgctaaaaat

SEQ ID NO: 178800 - DNA, 201 bp, Homo sapiens
caaacacatatcatttttaatgtaattatcctccatgtacttttctgagaaagctattggtagatatactctaccaaaacaagggaatacatcaagaaagrtgaaggtgtagtattcaggaatagttgcaggagatccaacacagagagagaagggaattctcaggatgacagcaaaggaagtcccaagcagacaacagta

SEQ ID NO: 178801 - DNA, 201 bp, Homo sapiens
tgctcacctcctgctttgcggcccagttcctaacaggccatatactggtactggtccctggcctggggtttagggatccctgcttgagcacacagcagtcrtgatctaaggatcatttgttgggcatatagtaacaccattcttcctacatttttgagccatttgaataaacattcctcactgaatcagatcactttttta

SEQ ID NO: 178802 - DNA, 201 bp, Homo sapiens
tgcaggctgctcacctcctgctttgcggcccagttcctaacaggccatatactggtactggtccctggcctggggtttagggatccctgcttgagcacacrgcagtcgtgatctaaggatcatttgttgggcatatagtaacaccattcttcctacatttttgagccatttgaataaacattcctcactgaatcagatcac

SEQ ID NO: 178803 - DNA, 201 bp, Homo sapiens
cgccctccaacaagccagccccctctgcagtcgctccctcgcactcccatcagccgaaactcaggtctccgccaactcttgtgctgccagaccctagaacrtgggcttcatgacagccacggccttctcttgtccacgtttgcttctccaaggcttaaagcagtaaatatgtggcaacaagcaagcaagagactgtgaaat

SEQ ID NO: 178804 - DNA, 201 bp, Homo sapiens
gtggccaaatgagtgataacagaattatagtaaacctaaagagttgtcatcatgctcatctcctctccatacctctccaaaaatttgctaacagatatcayagtaattgtcttaatcttttctccaatataaaagtccccagagaaatggccaaaaagcaagaatctggatgtggtcaggtgtttggctaggccttgagtt

SEQ ID NO: 178805 - DNA, 201 bp, Homo sapiens
gcagagcagaagaaaattcataacagaataaaactctggatccagttattataaacacgtggtacctcattctcaccttcatagctctttcttcctgttttggaggtagccgaacataaatatgttcggtgtaaatttggggtttttttacttaatcaaaaatatacctagaaacgttgataacttgcagttttgtaaagt

SEQ ID NO: 178806 - DNA, 201 bp, Homo sapiens
caggcggtcaaggctgcagacagccatgattgcaccgttacactccaggctaggccacagagcctctgtctcaaaacaaaacaaaacaaaacaaaaaaacytaaaaactaaaaatacagtgcaactatttatataacatctacattgtatttagtattatgggtaatctagagatgatttaaggtatataggagaatgcat

SEQ ID NO: 178807 - DNA, 201 bp, Homo sapiens
ggtgggctgaggtgggaggatcattttagcccaggcggtcaaggctgcagacagccatgattgcaccgttacactccaggctaggccacagagcctctgtytcaaaacaaaacaaaacaaaacaaaaaaacctaaaaactaaaaatacagtgcaactatttatataacatctacattgtatttagtattatgggtaatcta

SEQ ID NO: 178808 - DNA, 201 bp, Homo sapiens
ccttaatccaccctgctaaatttgtgtctgttatttttaagtaattcatatgaagtgttaaaagcttaattaaaagtggatttattgtgggctttggtaaraggtacattacaggcagattccagatttccaaggctgattgattgaaaacacaggtgagagatactcttcttgaactttaattagacatagccttcttag

SEQ ID NO: 178809 - DNA, 201 bp, Homo sapiens
ctgcctggtggctgcatctccccaggttcctgcccacccaagaatatggaggaggacagaaaggcatccagggttgggagggcactgaggggagggaggcgcccgtaagcacatctgagtgaactttatctagtttggagaaaacaggacaagctttccagcaaggcaagaagaaaaatctatgtcagactgtgtgtgtac

SEQ ID NO: 178810 - DNA, 201 bp, Homo sapiens
atttatgtttgctagatacttgtgtggcatcctgaattccatagaagagtcagggtatggtatttaggagaaagaagctgaggcttagagaggctcatttmtttgcctgttggttattggcaaaatatggatttttagttaattgtcataagtaactttctatgtcaatttcttcttgtttctcattcatcattcatacat

SEQ ID NO: 178811 - DNA, 201 bp, Homo sapiens
tgcacaggcacctttgaggtccaacctacacgccagcacccacagctatgtgctggccccacatgcagatgcacaggcacctttgaggtccaacctacacrccagcacccacagctatgtgctggccccacatgcagatgcacaggcaccttttaggccccacctacacgccagcacccatagctatgtgctggccccaca

SEQ ID NO: 178812 - DNA, 201 bp, Homo sapiens
ctaaaaatgtcttttagatagtttgctaccaaatttccttggcagcaaactgaggcaactgagaatataatccagacatttttaccacatgcaaactttcytttttttttttttttttttgtttgtttgagacggagtctcgctctgtcgcccaggctggagtgcagtggcaggatctcggctcactgcaagctccgcctc

SEQ ID NO: 178813 - DNA, 201 bp, Homo sapiens
aaggctggcctcctcttcccctggcctcctgctctcttcccttactgcaaagctctgaatcactgagaccattgcagctagctgggattttaatttttttwaaaaaaagacattaaggtatgaatgacctactatcttaacccttggagagtctgttaatctaaacaaatctccaaccgatataaatgtgtgaggaggtat

SEQ ID NO: 178814 - DNA, 201 bp, Homo sapiens
ggaaatgtctacttgtgcccccttcctcaagaggccaccttgcatagcttcctcacagaatatttctctgttcctgaaaggtaatttcggtgcaggtctcrtagaataagcacattttacagctctgggcaggctattctagtcacaggtcctcatggtccgggctccagggagcacctggaagcagattgtatcccccga

SEQ ID NO: 178815 - DNA, 201 bp, Homo sapiens
cattgaaaatgagcgtatgatgttaaagaattttagaaaatcacaaaatagaataaacacatttctgccatgtaaaaaaaaaacctattgataaggattcraagtgagtttttaataaatttttagaattttctgtttgctggcttctttctataaagttaatgtataatgaagttctataattttaaatgaaagcatata

SEQ ID NO: 178816 - DNA, 201 bp, Homo sapiens
tgggatgttaaggataaatattctgagagagaatctccaggcctctgagcccacccctctacggctgcagccctggcatccacaccaagaagttcctcatrttattcggatactcagtaaaagttgggagccattgctgttgtgcttagaatatgctatgaaattcatgctcatgttccagctgtcgatgtccatatctga

SEQ ID NO: 178817 - DNA, 201 bp, Homo sapiens
caaaatggacagagtggaaacaatgtttaagccccgatttgttcagttacaaaagagcctacagactcgggtctcattaaggatttgtgtgtatgcatgtrcgtgcctgtgtgtgtgtgtgtgtgtgtgtgtgtgtgtgttcccatgtgctcgaggtctcttttgacagttgatagagcacccatcctgaaattcagtctt

SEQ ID NO: 178818 - DNA, 201 bp, Homo sapiens
tggacacagtttctgccctcatggggttcacagtccatgggtctaccccttgattaagattgaaacagggacaggattgtatgagagtaacaatccgtcarcttaagcatgggatccctatcagtaaatctcactgcctctaatatgttctttgaatttttaaactaaatattgtgactaaaacaaaacaattaggctgag

SEQ ID NO: 178819 - DNA, 201 bp, Homo sapiens
ttcctctaaacacaggaccagctctcatcaagattctgtttcatgttgtcagaatcttcctaaaacaattacaaaccactttacagcaatactgggagagsgaaaaaaaaaactaggagaaaagacaagctcatgcctaagtatcattgtgagatacttcccgtttccacagaaaatgccacaaggatacataattgccac

SEQ ID NO: 178820 - DNA, 201 bp, Homo sapiens
ggtaaattttttacttatatggctaattgagactctaagcctgcctaaggtgaattgctgaatttttttcggtagatgaattgcatttttattgcagacartacatgcattgggtgacaaaatctgaaatgatctgaagtatttgaacacagagtggagccccagctttctatgtgaaaaagatgtactatgtacgtggga

SEQ ID NO: 178821 - DNA, 201 bp, Homo sapiens
tttcattttagttgctaaaaacaaggaagtattttatctaggccagggaaataattgggagcccaactagaaatcttagcagattctctatataggacatygctgttagtggagggcttagggatggatccaggaaacctgagattactgcttaggtctttgaagaatggagatcacttaacctttatgggctgtggtttt

SEQ ID NO: 178822 - DNA, 201 bp, Homo sapiens
taaaaacctgagattgatatatggtggctaggttattttgaaagtaagaatcttaggagtaacaaattgctgtctgctatcacagtatttaaaaaaaaaaacccgttttacacaccaaaatgtaagaagaacatgctcccagaataaagaacactcaccaaattatatacttttgactatgtgaactactttttctcattt

SEQ ID NO: 178823 - DNA, 201 bp, Homo sapiens
atcactgcccactgcaacttcggcgccccccaccgggatcaagagagtctcatccctcagcctcctgagtagctgggactacaggtgcctgccaccatgcytggctaatttttgtatttttagtagaattggggtttctccatgttggccaggctggtctagaactcctgacctcaagtgatctgcccacctcagcctctc

SEQ ID NO: 178824 - DNA, 201 bp, Homo sapiens
cctccagagtacctgggattacaggcatgtgccaccacgcccggctaattttctatttttagtagagacggggtttctccatgttggtcaggctggtctcraactccagacctcaggtgatccgcccaccttggcctcccagagtgctgggattacaggtcctcacttgtttttaatttactcactgagtgaccgtaaact

SEQ ID NO: 178825 - DNA, 201 bp, Homo sapiens
ttaatttttggctttttttccaccttgtatctttacttatgcatttattgtttctagtgattgaatgcttaagtttttggactaagcctttaaacactcaytttatgtctctttattattaggaaaaaggcacctagatctcttagtctgttaatcgactatcttaagggtctagagaccactacaactagtgtctcatct

SEQ ID NO: 178826 - DNA, 201 bp, Homo sapiens
agaaatgcaaccactgggaaggaaaatcagttttctgggggaagacagtgaattattttgttcctctggagtttgaagtgcagtggtgcaatcatagctcrctgcagctttgaactcctgggctcaggtgatcctcctgcttcagcctccctggtagctgccaccaagcctgactgatttttttactattttttttttttt

SEQ ID NO: 178827 - DNA, 201 bp, Homo sapiens
ctaatggcttacagctacaaatattcaatttgcacaaacacaagctactaaaaatttgcattttatggggtatagatagcagttcaaacttttttttttttgagacggagtctcgccgtcgcccgggctggagtgcagtggtgcgatttcggccagttcaaacttttaaaatatttttatcttaagtatttacctgacccc

SEQ ID NO: 178828 - DNA, 201 bp, Homo sapiens
ttactgtagtgctaatggcttacagctacaaatattcaatttgcacaaacacaagctactaaaaatttgcattttatggggtatagatagcagttcaaacwtttttttttttgagacggagtctcgccgtcgcccgggctggagtgcagtggtgcgatttcggccagttcaaacttttaaaatatttttatcttaagtatt

SEQ ID NO: 178829 - DNA, 201 bp, Homo sapiens
aaaaattagtatttaagtaattactgtagtgctaatggcttacagctacaaatattcaatttgcacaaacacaagctactaaaaatttgcattttatggggtatagatagcagttcaaacttttttttttttgagacggagtctcgccgtcgcccgggctggagtgcagtggtgcgatttcggccagttcaaacttttaaa

SEQ ID NO: 178830 - DNA, 201 bp, Homo sapiens
tgttgatgatgtaggaagcattttatagttctcatttatgtgttctgaacaaagtctaaattacgtttattcagtaagaatttatagcttggtaccctccrttttaagaaatatgatcattccttgcaattttaagtgtattaacataagattacttcagagatttatgactaaaggtaaatttgttgccaaaattaaagt

SEQ ID NO: 178831 - DNA, 201 bp, Homo sapiens
ttagtttactcactgtcttcattcactcagcaaatactgtgccaaggcgtgcttccggcatgggagacactgcggagaacaagatgaaacccagctctcayggagcttaccttttaattggggagatagatcataaataagtaaacagataaaagtttaaagttaacgtgaaatgaagcaggataaagacgggtggataag

SEQ ID NO: 178832 - DNA, 201 bp, Homo sapiens
atttctgttatgcacaaaataattagctttgactttagattttgaacagtgcaacatttagatctatttatttatttatttatttatttatttatttatttttgagacagagtctctctctgttgctcaggctagagtgcagtggcatgatttcgcctcactacgacctcggcctcccaggttcaagcgattctcctgcct

SEQ ID NO: 178833 - DNA, 201 bp, Homo sapiens
cttgtggaaggagacatgattgcatcattttatggacatttatcttgtcccaattttctatcagatcaagaatttgaatcaaaggtcttttgaagatttcsttactttgcagtctttatgctgggtggctataagccaatactatttttgttaagttacttcgaacgtgaaattttttttttttttttttttttttgagac

SEQ ID NO: 178834 - DNA, 201 bp, Homo sapiens
gatttctgttatgcacaaaataattagctttgactttagattttgaacagtgcaacatttagatctatttatttatttatttatttatttatttatttatttttgagacagagtctctctctgttgctcaggctagagtgcagtggcatgatttcgcctcactacgacctcggcctcccaggttcaagcgattctcctgcc

SEQ ID NO: 178835 - DNA, 201 bp, Homo sapiens
tgatttctgttatgcacaaaataattagctttgactttagattttgaacagtgcaacatttagatctatttatttatttatttatttatttatttatttatttttgagacagagtctctctctgttgctcaggctagagtgcagtggcatgatttcgcctcactacgacctcggcctcccaggttcaagcgattctcctgc

SEQ ID NO: 178836 - DNA, 201 bp, Homo sapiens
ctgatttctgttatgcacaaaataattagctttgactttagattttgaacagtgcaacatttagatctatttatttatttatttatttatttatttatttatttttgagacagagtctctctctgttgctcaggctagagtgcagtggcatgatttcgcctcactacgacctcggcctcccaggttcaagcgattctcctg

SEQ ID NO: 178837 - DNA, 201 bp, Homo sapiens
ggatgtcaacatgcaaatgaatgaagttagaccctttcatcacaccatatataaaaatttactaaaaattgatcaaaaattcaaatgtaagaagaaaaacyataaaactcataaaaatatataggaataaatcttcatgaccttggattaacgaagccttctcgaatatgacaccaaaagcatctgccacacaagcgaatg

SEQ ID NO: 178838 - DNA, 201 bp, Homo sapiens
gaaacatcatccagggtaacctgtcatgaaaagctgccttttaggtcacttatgtccatttcagaaatggcaagggctctgggcatccaccaggcaccagrccctattataagaagacccctttgcagtcatctttttgtggtttgttcaatgggcacatgctgggcaaaggcacttaccaggcaaaccattatgtggctc

SEQ ID NO: 178839 - DNA, 201 bp, Homo sapiens
gattcgggcagagcccagcaagttccctaagcttagaggacagagttcagggcagccggactggtaagagaacgcagggcagaggtgaggagaattgcagwgattgctccagagatctgcagaggtgcccctggagcagtcagggcagtgctgatcagcacaggaggaaactacctaaggctggggaacaaccatccaaaa

SEQ ID NO: 178840 - DNA, 201 bp, Homo sapiens
tgagattccatggcaagatgagtgttaagttcactcacaacttacacttgtatatccaacctttgaaaaggtcatatttcgtttctattgctttacctctrtacatgtcttttcactaattctttcatttctgccactttcctgtctccttatgtttctgctgatgttctctccttttttcttcatctgttctgaaactct

SEQ ID NO: 178841 - DNA, 201 bp, Homo sapiens
tttgtgcaggaaactaatgacattaattatagaaaattaaggcaaaaataagatctttttcaaattttacgtataatatggggagttggaaaatagcatawagataggaagcaagaagatataaaataatctttgaagtgtaatttggttatgttgattcttttggccttctattttattttttaaagaagatacctcatt

SEQ ID NO: 178842 - DNA, 201 bp, Homo sapiens
tctaatcttgtcttcatgctttatttcattaagttgaccttcaatctctgatatcctttcttccacttgattgatttggctattgatacttgtgtatgctycacgaagttctcatgctgtgtttttcagctccatcaggtcatttatgttcttctctaagctggttattctagttagcaattcatctaacattttctcaag

SEQ ID NO: 178843 - DNA, 201 bp, Homo sapiens
actgagtagtattccatggtatatatgccacatttttaatccagtcttccaatgatggacatgtatgttgtttccacatctttactattgtgaatagttcygtgataaacatataattggaggtatcttttttatataattgtttcttttcctctggatagataccaagtagtgggattgctagatcgaatgatagttcta

SEQ ID NO: 178844 - DNA, 201 bp, Homo sapiens
tctctaatcttgtcttcatgctttatttcattaagttgaccttcaatctctgatatcctttcttccacttgattgatttggctattgatacttgtgtatgmttcacgaagttctcatgctgtgtttttcagctccatcaggtcatttatgttcttctctaagctggttattctagttagcaattcatctaacattttctca

SEQ ID NO: 178845 - DNA, 201 bp, Homo sapiens
ttttttctctaatcttgtcttcatgctttatttcattaagttgaccttcaatctctgatatcctttcttccacttgattgatttggctattgatacttgtrtatgcttcacgaagttctcatgctgtgtttttcagctccatcaggtcatttatgttcttctctaagctggttattctagttagcaattcatctaacattt

SEQ ID NO: 178846 - DNA, 201 bp, Homo sapiens
attgggccaccaggaagccgagtgacttgcccaaggtcacgctgtgtgctagtggcacagccagtttccaggccgtgctcccccacgaagcctctgcaacyttcctcccagatcacgtgcactgggtcacccaaaaactttgcccttctgcacattagcctctaaggacagctgctctaagcactttctagccaggcccct

SEQ ID NO: 178847 - DNA, 201 bp, Homo sapiens
agtaaaacatgtggttacaaaaatgtttaaaattaatccaaaactttttcttgaaatcaagaaaacaattgtatttataataaaataaaaaagaataaagkgtttaggaacaaatttagcagaagtgtaaaaattattctctgaaaactattaaacattgttgaaagaaattttaaaagaccaaaataaaggagaaagaca

SEQ ID NO: 178848 - DNA, 201 bp, Homo sapiens
actgcaacctccacctcccaggttcaaatgattttcgtgcctcagcctcctgagtagctaggattatatgctcgcaccaccacacctggctaatttttgtwtttttagtagagatgaggttttaccacgttggccaggctggtctcaaactcctgacctcagttgatctgcccacctcagcctcccaaagtgttgggatta

SEQ ID NO: 178849 - DNA, 201 bp, Homo sapiens
tgtatctaaacatagaaaaggtaaagtaaaaataccatataaaggacaaaagatatgcctgtattgggcagctctattgtaatttttttttttttttttttgagacagagtctcactctgtcattcaggctggattgcagtggggtgatctcagctcactgcaacctccacctcccaggttcaaatgattttcgtgcctca

SEQ ID NO: 178850 - DNA, 201 bp, Homo sapiens
gggtgtatctgcacctacttaatggtctgaatctataaaccagcagtcagacacctgctgtgcattcaggggacataacctgtcatgcctacctgtggagytgagtcagtgtacacggttctcggcaatcaggggacatcagacagctgcaccctcttttccagtgacacaggcaccaggtatgaaggctttgagggattt

SEQ ID NO: 178851 - DNA, 201 bp, Homo sapiens
ttgtatttcatttatttataccttaccttactccagaaaatgtttaataacgcatgtgaatagtaaggatgtagcctagtttgtgaagtctttggtgcaayaacagatttggtacttgaaaacctttttctcccagaaagcgtgttttaaatgatacgagggccccagccctgccaacacaagcctattttcccaataaca

SEQ ID NO: 178852 - DNA, 201 bp, Homo sapiens
tatagaagatagagatgttatgttggtatgctttataatataatagaaactttaacatggactctgtgtgtgtgtatgtgtatatgtgtgtgtgtgtgtgtatatatatgtatataggtatatatatgtatatatatgtatatatgtgtatatatatgtgtgtgtatatatatatgcatgtgtgtatatgtatatccttgg

SEQ ID NO: 178853 - DNA, 201 bp, Homo sapiens
gttatagaagatagagatgttatgttggtatgctttataatataatagaaactttaacatggactctgtgtgtgtgtatgtgtatatgtgtgtgtgtgtgtgtatatatatgtatataggtatatatatgtatatatatgtatatatgtgtatatatatgtgtgtgtatatatatatgcatgtgtgtatatgtatatcctt

SEQ ID NO: 178854 - DNA, 201 bp, Homo sapiens
tgttatagaagatagagatgttatgttggtatgctttataatataatagaaactttaacatggactctgtgtgtgtgtatgtgtatatgtgtgtgtgtgtgtgtatatatatgtatataggtatatatatgtatatatatgtatatatgtgtatatatatgtgtgtgtatatatatatgcatgtgtgtatatgtatatcct

SEQ ID NO: 178855 - DNA, 201 bp, Homo sapiens
tttgttatagaagatagagatgttatgttggtatgctttataatataatagaaactttaacatggactctgtgtgtgtgtatgtgtatatgtgtgtgtgtrtgtgtatatatatgtatataggtatatatatgtatatatatgtatatatgtgtatatatatgtgtgtgtatatatatatgcatgtgtgtatatgtatatc

SEQ ID NO: 178856 - DNA, 201 bp, Homo sapiens
ttcctttaatgtttgttatagaagatagagatgttatgttggtatgctttataatataatagaaactttaacatggactctgtgtgtgtgtatgtgtatatgtgtgtgtgtgtgtgtatatatatgtatataggtatatatatgtatatatatgtatatatgtgtatatatatgtgtgtgtatatatatatgcatgtgtgt

SEQ ID NO: 178857 - DNA, 201 bp, Homo sapiens
tttcctttaatgtttgttatagaagatagagatgttatgttggtatgctttataatataatagaaactttaacatggactctgtgtgtgtgtatgtgtatatgtgtgtgtgtgtgtgtatatatatgtatataggtatatatatgtatatatatgtatatatgtgtatatatatgtgtgtgtatatatatatgcatgtgtg

SEQ ID NO: 178858 - DNA, 201 bp, Homo sapiens
ttttcctttaatgtttgttatagaagatagagatgttatgttggtatgctttataatataatagaaactttaacatggactctgtgtgtgtgtatgtgtatatgtgtgtgtgtgtgtgtatatatatgtatataggtatatatatgtatatatatgtatatatgtgtatatatatgtgtgtgtatatatatatgcatgtgt

SEQ ID NO: 178859 - DNA, 201 bp, Homo sapiens
ttttcaagtgttttcgctgcttcttttaaatatgagaaataatgtttcatggtcttgtagacctgtttttctttaaaagtagagatttctcaaaactcaayaagaatggcttaaggtaaatatgtttggacttaattcacagtccgtgtagttggacgtggaaagactggtcacaatggaaatatttgacttggtggtgag

SEQ ID NO: 178860 - DNA, 201 bp, Homo sapiens
tttttcctttaatgtttgttatagaagatagagatgttatgttggtatgctttataatataatagaaactttaacatggactctgtgtgtgtgtatgtgtatatgtgtgtgtgtgtgtgtatatatatgtatataggtatatatatgtatatatatgtatatatgtgtatatatatgtgtgtgtatatatatatgcatgtg

SEQ ID NO: 178861 - DNA, 201 bp, Homo sapiens
  misc_feature (1)...(201): n = A,T,C or G
aatggaatagaatttttattagacaaattttggttacttcaagtaccatttggatatggatggataatgtttagatatgtatgtatgcatgcatgcatgcncatatacaatcgtgtatctgtagacacacaaacaataaaaattgccacagggccataggaaatatacatttgaaaaagaagtaattttgtatagtgtgat

SEQ ID NO: 178862 - DNA, 201 bp, Homo sapiens
caagctccgcttcctgggttcacgccattctcctgcctcagcctcccgagtagctgggactacaggcgcccgccaccacgcctggctaatatatatatatwtttttagacgcaatctggctctgtcgcccaggctagcgtgcagtggcgccatctcggctcactgcaagctctgcctcccagattcacgccattctcctgc

SEQ ID NO: 178863 - DNA, 201 bp, Homo sapiens
gcccagaacctggtttcctgtgcattcctcaggcagggctgccttacccccacacccaccccgccttgaatctcagtgcctttattcaggctgcccccacmcctgcggtcctctttctccttctgattgctctgttacatttacagccagcagccccaagtcagcctggagacaaccttgtgttgttgactcactgtatca

SEQ ID NO: 178864 - DNA, 201 bp, Homo sapiens
aacgtgaaattttttttttttttttttttttttgagacggagtctcgctctgtcacccaggctggagtgcagtggcacgatctcggctcactgcaagctcygcttcctgggttcacgccattctcctgcctcagcctcccgagtagctgggactacaggcgcccgccaccacgcctggctaatatatatatatttttttag

SEQ ID NO: 178865 - DNA, 201 bp, Homo sapiens
atttcgttactttgcagtctttatgctgggtggctataagccaatactatttttgttaagttacttcgaacgtgaaattttttttttttttttttttttttgagacggagtctcgctctgtcacccaggctggagtgcagtggcacgatctcggctcactgcaagctccgcttcctgggttcacgccattctcctgcctca

SEQ ID NO: 178866 - DNA, 201 bp, Homo sapiens
aacacaaattcttattgagaagtgtaaagtgctcttgagctaatatcttagaattttgaaaagtttcaacttacgggactgttagtgatgttagtaatgawgatagcatagcaggtaacacttatttagttctgaccatgtgccagatgctctgtcactcatctcttttaatccccataataaaacgatgaagtagttgta

SEQ ID NO: 178867 - DNA, 201 bp, Homo sapiens
tcctcctgccattgcctcctgagcagctgggtcgacaggtgtacactaccacaccaggctaattttttcaagtatttttttaagtgatacatgtatttttwtaatggtcctgtaaaaatcttacatgaaatgtatatggttgtgtcaattacaagaagaaaaccttactttactttgtgactagactaacaaaaattacat

SEQ ID NO: 178868 - DNA, 201 bp, Homo sapiens
gtgttttgtaatgtctgtgacatttatgtttgaaaccaaactgataactgtctgatgacatgtagcacagttccctgcaatatagccacgcagtatatatacacagagaatttggccactcatcatcagctgtgtgcatttgggcacgtcacttactcagatctcagtttctgcatctgcacatggagaggttaataacgc

SEQ ID NO: 178869 - DNA, 201 bp, Homo sapiens
agtgttttgtaatgtctgtgacatttatgtttgaaaccaaactgataactgtctgatgacatgtagcacagttccctgcaatatagccacgcagtatatatacacagagaatttggccactcatcatcagctgtgtgcatttgggcacgtcacttactcagatctcagtttctgcatctgcacatggagaggttaataacg

SEQ ID NO: 178870 - DNA, 201 bp, Homo sapiens
tgcttttcaatctaacaagactgttttattctttagagcatttaatcttaagagtcagaggatgagaatagaaaattggctgggcacagtggttcacggcyctaatcccaacagtttgggaggccaaggcaggtggatcacttcaggtcaggagttcaagatcagcctggacaacatggcgaaacccccatctctactaaa

SEQ ID NO: 178871 - DNA, 201 bp, Homo sapiens
cctaaatagagtctgtggcttactgctctctcagttgtaatccactcttactatatggaagccctgttgatgaatgttggtaaggtcctatttttaaaatraggctgaatttctggcctgtggccagaattgtttcttagcagttttttttctttctctttcaaaggagacaggacagatagatgcggccagagttgagtg

SEQ ID NO: 178872 - DNA, 201 bp, Homo sapiens
tttcttgggtttcgttcttttggaaaataatgttgatgagtgcttttcttccaaagcaactaaccaacagaaatattaactgtgggtgtgttgtatccttygcagaagtcaatttctcatgtatgccatttaaaatgatgacatttctttctgtttgaaagaaagtcttatattcttataatttacctccgtatttggaat

SEQ ID NO: 178873 - DNA, 201 bp, Homo sapiens
ataacttagctagccttaaagcaaaaataggcatttgcagatgacttgaaaagcaatagcgtgtactaacagattgattagttgtggttaatcactttgtrtcacctcacgcacatttagactcctgaagccgtggggccttgccatcaaatgtggccactgaaatccacacatctgatcatgctctgaatgaaccgtttg

SEQ ID NO: 178874 - DNA, 201 bp, Homo sapiens
ccacctcagcctcccaagtagctgggactacagttgtgtgccaccatgcccagataatttttctgttttttttttttttaatttattttttttttttttaraaacagggttttgttgcctaggctggtctctatttcctgggctcaagcaatctgcctgcctcggcctcccaaagtgctgggattacagacctgtgctgct

SEQ ID NO: 178875 - DNA, 201 bp, Homo sapiens
gttatttttattttaggttgccattgtccttaagttaggtagccttttaaatgcttttctcaaaactcttcatctagaccacctttctataccactatgasactgacgttttgcaattttttctttctccccaggatggttcctacctggctgagttcctgctggagaaaggctatgaggtgggtgactcaatgggaagcg

SEQ ID NO: 178876 - DNA, 201 bp, Homo sapiens
aaccgccagctctgactggcgttgtggcgcctttcttccaaactttccttgtcttaaagggggcattccagtttctagttcgataatacccaagagaggcrtgcgtcatttgagaagaatctctcacacccccatcgcaaaaatgttggccatctgacattttataacatcatgtctgcctgtaaaaggcaaactcctgtg

SEQ ID NO: 178877 - DNA, 201 bp, Homo sapiens
cagtgttttgtaatgtctgtgacatttatgtttgaaaccaaactgataactgtctgatgacatgtagcacagttccctgcaatatagccacgcagtatatatacacagagaatttggccactcatcatcagctgtgtgcatttgggcacgtcacttactcagatctcagtttctgcatctgcacatggagaggttaataac

SEQ ID NO: 178878 - DNA, 201 bp, Homo sapiens
tcagtgttttgtaatgtctgtgacatttatgtttgaaaccaaactgataactgtctgatgacatgtagcacagttccctgcaatatagccacgcagtatatatacacagagaatttggccactcatcatcagctgtgtgcatttgggcacgtcacttactcagatctcagtttctgcatctgcacatggagaggttaataa

SEQ ID NO: 178879 - DNA, 201 bp, Homo sapiens
atctgttacggtgatctgtgatcagtgatctttggttttgctgttgtgattgttttcaggcaccatgaactgcacccataaaagacagtgaatttaatccrtaaatattgtgtgtgttctggctgctccaccaactggccattaccaccccctgccaccgccgccccgttccctgagacacaacaatattgaaattaggcc

SEQ ID NO: 178880 - DNA, 201 bp, Homo sapiens
cttggtaaacctcaatctagtcctaggtatccagtcacccatgctgaatttgtagagcccaagttgatgcagtttttgggggccatatactttttctctamcaaagtgtaattgtcaaaggtgccctctcactgcatgaataacatttcatgagaatttctgactttcaaaagtggggaaaagtattttttaatctaacaa

SEQ ID NO: 178881 - DNA, 201 bp, Homo sapiens
aatataactccccctaattctctctttgtgtacctcctaatgagaacttattttttgtctttgtagatgttaaccactaactaaaaaaaaaaaaaaaaaaacatattttaaggccaggcacagtgccccacatctgtaatcccagaactctgggaagctaagttcgggggatcacttgagcccaggagtttgggaccagcc

SEQ ID NO: 178882 - DNA, 201 bp, Homo sapiens
ctttttctaaactgttatgagattatactgaagtgataaggtttcatgtttttttttattttccatgaaatttccttgagctcaaaaccttcaaaaaaaaagactattgtgtctaatatgtttgtaaggagaatattaacgaaagacttcagtgataaaatttcaaagcagttggaatgttaagatcctcatttttttcca

SEQ ID NO: 178883 - DNA, 201 bp, Homo sapiens
aaaggattataaatcatgctgctataaagacacatgcacacatatgtttattgcagcactattcacaatagcaaagacctggaactaacccaaagacctggaacaacgatagactggattaagaaaatgtggcacatatacaccatggaatactatgcagccataaaaaatgatgagttcatgtcctttgtagggacatgg

SEQ ID NO: 178884 - DNA, 201 bp, Homo sapiens
caaaggattataaatcatgctgctataaagacacatgcacacatatgtttattgcagcactattcacaatagcaaagacctggaactaacccaaagacctggaacaacgatagactggattaagaaaatgtggcacatatacaccatggaatactatgcagccataaaaaatgatgagttcatgtcctttgtagggacatg

SEQ ID NO: 178885 - DNA, 201 bp, Homo sapiens
ccaaaggattataaatcatgctgctataaagacacatgcacacatatgtttattgcagcactattcacaatagcaaagacctggaactaacccaaagacctggaacaacgatagactggattaagaaaatgtggcacatatacaccatggaatactatgcagccataaaaaatgatgagttcatgtcctttgtagggacat

SEQ ID NO: 178886 - DNA, 201 bp, Homo sapiens
tacccaaaggattataaatcatgctgctataaagacacatgcacacatatgtttattgcagcactattcacaatagcaaagacctggaactaacccaaagwcctggaacaacgatagactggattaagaaaatgtggcacatatacaccatggaatactatgcagccataaaaaatgatgagttcatgtcctttgtaggga

SEQ ID NO: 178887 - DNA, 201 bp, Homo sapiens
tatatgcttgaattttgtctatttttcagtaattttaagtaacaaaatcacagttcttaacttgtatgtttcttcagtgatttacaatgtttcctgtctgyctggaactctatagtggcagagcagatctgaaatgcatcagagagttgacaagtgacatttctatcatgacctgcacatattttaagaacggtcttaact

SEQ ID NO: 178888 - DNA, 201 bp, Homo sapiens
ctgctctctcagttgtaatccactcttactatatggaagccctgttgatgaatgttggtaaggtcctatttttaaaatgaggctgaatttctggcctgtgrccagaattgtttcttagcagttttttttctttctctttcaaaggagacaggacagatagatgcggccagagttgagtgtctgcttttcccctaggtcaga

SEQ ID NO: 178889 - DNA, 201 bp, Homo sapiens
ggctaaatagtacctgagaatccctaggattgtgttagtttcatggtgcaaaggctcactgcacatttggaactggcttactgagtcctggcaccccagcyctcaatgctggcacttgactatttgcaggaatggggaactgaccacccacagaatggcttatatgcatatgtaggatggcttatatacatatatacatat

SEQ ID NO: 178890 - DNA, 201 bp, Homo sapiens
tagcagtaatgccacaaagattctccttatcctttttctcaggtaaagaagaaagttcaatcctctctgtgagtgttgggtcatttgtatctgttatttcmgttttctacctgttgacttcaatacagctgggataattgatggctttgtagtgctgatttgatcctgaaatccctgtgactctgattgatggcccagggc

SEQ ID NO: 178891 - DNA, 201 bp, Homo sapiens
ttagaaccatgtgaagtaggaaagagcaccaaagcatgctttggggaatctgcattgagcagccacctcatttgtggcctactagaggctgggatggggarttatttaggactgctgaagaaacagactcagaaggacttgatgagcagttgactaatggaagagtgagaaaggaatcaaagaggactcccgggctactgg

SEQ ID NO: 178892 - DNA, 201 bp, Homo sapiens
gccaggcagttgggaactagctgtggatacagatgtttctcagagaaggggccgtccagagaaggagaagacacctgtgcatgctggggggtctgcacacmgtaggatgtcactggagagagctgtgagggggacagggcaggaggagatgctggggacggggccggtgacagggcacacaggagcttccggcccataggc

SEQ ID NO: 178893 - DNA, 201 bp, Homo sapiens
ggctctatgacttgtatcaggtcatcttttaacccctctgagcctcactttccgcatctgtgaaatggacatcataatgtctgccttaccttctgccttagcttgtcttgaggagaaatagaaatgatgtctatgaagctgtcagtaacgtgtgaaagcgctgtccctatgagcatatatgtgttaaaccttctgttattc

SEQ ID NO: 178894 - DNA, 201 bp, Homo sapiens
tattgaaattattctccattagaagcttaaacatggaatttagaaaaaggcatctacagaggaagaagccttttggaaatactgtcttctctgaggatctytgccatattggatgatattggaacaccctgctcctattcattcattccctcaagaaacattgctgtgttcccgttatgtgccaggcactgggttaggcac

SEQ ID NO: 178895 - DNA, 201 bp, Homo sapiens
ttaaatgtaattatagtattcataaaaggaaagtaaaactttataataatattataataatgaagactgtatgttgtttactgtgtttcagtctctttatwtgcagctgaagtgacttttcattatttgtccccaaattactataatctgggtggtaactggcagcaaacattaaatcttctatttatctcttgattatct

SEQ ID NO: 178896 - DNA, 201 bp, Homo sapiens
aattttaggtagttgtcatactgtagtcaaaacatgattctgtgaatttctggaattggtctttaatttttacataactctgtctggaacatttctgagtrcttcatgaaaagtgagggtccatcccctcggaagaacaggataggcgtcaggaacactgaaacctggccccatgggaccctggtgccctgccctttggcc

SEQ ID NO: 178897 - DNA, 201 bp, Homo sapiens
cctagagaactccactacccttacaaagctctggtctttttcagtggaatcttgaaaatgttttctatcagtaccactgagtagagattttaaaaagtatrtggttgaataagagctaagcccccgctgctgttggcaaaagaaagcaaagcaacaaaataaagaacaacctaaaagcattagtcctatagaggttcaaac

SEQ ID NO: 178898 - DNA, 201 bp, Homo sapiens
ggctcaactgatcctctggcctcagcctcccaaagtgtcgggaccacaggtgtgagccactgtgcctggccaacacttctaagctttaggaattgatcagycacaatgtactgttcagattttctttttttaaggaaaccacttaatttgttactttatattgtaaaacactttgtaaccaattagattttatcagctaat

SEQ ID NO: 178899 - DNA, 201 bp, Homo sapiens
gtttcagaccatcgctcttgcattttggccaaccggtaacttttttaaggtttcatcaaaaccaaacagctttctgaatagtactgtttttctcttcatcycagtatactgcctttgactctacaatagtaaaagaaaatagacatcttgagtttaagaatcaactgggtaagtataagtcaaataggactcctattttcc

SEQ ID NO: 178900 - DNA, 201 bp, Homo sapiens
gcttggatacatctttacatttttttgagtctcttaaagaaaaaggtctgtgttttgtagcatgatctgctttgtaagcatctcattaagaaatgaatccytgtgagaaatacaagcttgttgctcttctcacttgatggatggtggtggcatgtatgtggagaggggagggataaattgataaatgtaggggactctaga

SEQ ID NO: 178901 - DNA, 201 bp, Homo sapiens
cattaaggtagactaaagtgactgaacttgttgagaagcatacctttatacgttgctaactacaagtatttgctgccattgccttcggggtgaaattaccrcctcacttcaccaacccatgttcattcagcccttccatacagatcacttgaaatggaaaatcagacccaatgtgattctttttctaaactgttatgagat

SEQ ID NO: 178902 - DNA, 201 bp, Homo sapiens
ggtagaattactgtttaatttttgtatttcctatttaagaaaacctgtttctttacggccctttgactttcattttctctttttcttcccactgacctggyggcttcttaaaggggcagcaccaagtttcctgttgcccctgtgggcagtggccacagattgtcttctttttcttcttttataccccatggcacattctga

SEQ ID NO: 178903 - DNA, 201 bp, Homo sapiens
aactgttatgagattatactgaagtgataaggtttcatgtttttttttattttccatgaaatttccttgagctcaaaaccttcaaaaaaaaagactattgygtctaatatgtttgtaaggagaatattaacgaaagacttcagtgataaaatttcaaagcagttggaatgttaagatcctcatttttttccattctaattc

SEQ ID NO: 178904 - DNA, 201 bp, Homo sapiens
cttgaattcaccatatccacattagtcatggttctctggagaaacagaaccagtgggatggatggatatggatatatatatatgtgtgtatatatatatakagagagagagagcgcgctattgattgattgattgattgattgattgatttgaaggaattggttcatgtcattgtgggggctggcaagtctgagatttgca

SEQ ID NO: 178905 - DNA, 201 bp, Homo sapiens
aagcagccaacttaaagcactttgggggtgtttggagcacgtaaatgcagtgtaaaagggatagcacaaagggctatgaagaatcctagtgattatattacagatgtgcttcctccttagaaaatttgtatgtgtgcaagttgatagttaagcaggtttcagtgacccaggctggcattgaactcctgggctcaagtgctc

SEQ ID NO: 178906 - DNA, 201 bp, Homo sapiens
actgtgctttcttctggtcctgctgtgtcctctaatgctcgctgattggtattctccttatgtgggttagtttttaaagggtgctcttcctagctgccctrcactgaagcacggcccagcaatctgctctgggactacccttgttttatttttttactccgtatgtgcccctccttcaccccaaactatagtagaactgtt

SEQ ID NO: 178907 - DNA, 201 bp, Homo sapiens
tcttcctagctgccctacactgaagcacggcccagcaatctgctctgggactacccttgttttatttttttactccgtatgtgcccctccttcaccccaarctatagtagaactgttttgtgtacctttatgacaaaatcaatttgtattttatttgctctcctttttcaaagtgagtttacatcaaatatcccatttaat

SEQ ID NO: 178908 - DNA, 201 bp, Homo sapiens
agagggtgggtgtagaccctccaggtgccgtgcccagagatgcgggttcaggaggagacaccactgcccatggcccacctctgtctgtctcttaccccacsttgggagtaagcagacctttcctgggagcccctagctgatttcctttcccaccttgggagtaagcagacctttcctggaagcccctagctgatttccttt

SEQ ID NO: 178909 - DNA, 201 bp, Homo sapiens
tcccaccttgggagtaagcagacctttcctggaagcccctagctgatttcctttcctgtctcattggtctgaaatgaaccccatactcatgtcttagcccrtccattctcgaggcactcctggggctgcgttacaccaggaaaggatgggtaagcacattggggattttgttagataacttggtagttaacaaaccctgac

SEQ ID NO: 178910 - DNA, 201 bp, Homo sapiens
cttttctaatctaaactgctccagcagcagttttgggtgatggcgtaaacttgagggtagaagccagatatagaaggaggctacctaggtcattgattatygttgaccccgtaatcagcagttcttgactggctaccatcagacttctcttacatgatgtgtgttgggttctaacttatgcgcagcttcacctaatcctaa

SEQ ID NO: 178911 - DNA, 201 bp, Homo sapiens
tccttagggcaagattctggactgtacaaataccagaagcatcatggccagacatgatagtaagtaggaagactgtgaatgtcatatagtaaatagtggascagccaacgattaggtgattttcttcattgttgatggtcatttgactgacatgcctatgtgtggctttctttgtatttatcctgtttgggatttgctgac

SEQ ID NO: 178912 - DNA, 201 bp, Homo sapiens
tgggtaattttatgggctctcttgactcatgtttgcagtattgggtgtggagcagtccgatgaagaggaagagagaagtggttgcagaatccttccctaaytgtattctaccaagtttgaagtatggaatcccacacaggccattcctcctgcaactctaccatggttaaaaatatatatctgacacaaccacaacctcag

SEQ ID NO: 178913 - DNA, 201 bp, Homo sapiens
tttttcaatgcaaccctcatagcaagaacatgttataagaaagtaacctctacagtaatgatcatccacatctgcattctctaatgtcagttttaagtgakttttagggaaaatggctgatgttgaagtgctatcatttatttcccttccaaaacttgcaggaatatgtagagagctgactttaaaaaaataaaataaact

SEQ ID NO: 178914 - DNA, 201 bp, Homo sapiens
tgccctcttacccccatgccctctctccaaccacactgacccttcagcttcaccttggggcactgacacctgctcctcccccagaaagttagagggcaggrctgctccccacactctttcagtctctgcatcagagaagcctccgtggcttctctgaacccccctcacgttcttcacctgcctctttgtgtctctcctccc

SEQ ID NO: 178915 - DNA, 201 bp, Homo sapiens
aagcaagagctggagggtgctgtgagaacagagccctgcatatgctttctactctgacttgtgagagctccaattcgcctctgtggctaaaatgtaaacayatgacaaaaatcaataccattatttcaacaaatattttccagccctcctgtgtgctaagcagtaggggtgagagatggaaagccatggcccccacagtgt

SEQ ID NO: 178916 - DNA, 201 bp, Homo sapiens
caggagctctttcgtttctgttatgggagttttttgtcagtgagaaggttcgtgaaccttgaaggggttactgatgtaggtaaggacatctctggggcctracaaacggggtggcgcctcttgtcctggaaaatattatagttgtgattttgcctaaaactgaggatggagttccagtcctacttgtgattttaaacattt

SEQ ID NO: 178917 - DNA, 201 bp, Homo sapiens
ttttttattttgactttttatattgattagtgaggtattgctattgttttccattgtgggaaaaaatcttctagccttctgtggagctatttaatatactstctttgaaaaatattccaagaaatacaaatgaaaataactaaataaatagtctctcctttatctgtatttagaagaacgtggtttctgtgttgtttctaa

SEQ ID NO: 178918 - DNA, 201 bp, Homo sapiens
caaagtgtcagagatcccagtgacactcactcatcagcttccccccacaccctctccaaccatttccagttggtcttccagcaagaccattttaattatgyagccatgcacttgcttctgggtgtggtttccctgattgcatacttaagtgcagattacaaatatttggcaggattccttcctctgtgggaaccagacaag

SEQ ID NO: 178919 - DNA, 201 bp, Homo sapiens
cattttttaaaaacgtactaggtacttacccgaggccatggtttgacctgcagatgacttcaacgtttggaactatggaatgcagaatgaaaactaaaagyatggctgaagacaaaaggcacgaggagatggttatctttctctctagcactactgaactattaccttaggaagaatatatttagagcatggaagtctatt

SEQ ID NO: 178920 - DNA, 201 bp, Homo sapiens
taggcccagtgaagcctgcagtgaggtattaagtgggcaccaccctgagccctaacttggccaacaggaaggtactgcgcattgctggtgtgggagccggsgagtcactgttctgacaacccacgctcaaggacacagcagtgagcacagcactctactatcggctctgtcaggaaagcctggccggaaaggaaacaaatt

SEQ ID NO: 178921 - DNA, 201 bp, Homo sapiens
aaaatttgtctttaaaaagaatctattttaaaaaagagttaataaagttggagtttggtgtcagacctaggttgattcctagttctttctagctgaaaagkgttccacctataaaatgggatcatagtagtgcttatccattatatcttagtgaagattaaatgttagaagctgtgttacatatttagtgcaaggcctgga

SEQ ID NO: 178922 - DNA, 201 bp, Homo sapiens
cttgagggtagaagccagatatagaaggaggctacctaggtcattgattatcgttgaccccgtaatcagcagttcttgactggctaccatcagacttctcytacatgatgtgtgttgggttctaacttatgcgcagcttcacctaatcctaacagagtaaagcttatgttttcatgaccttataagtaaaacttttctaat

SEQ ID NO: 178923 - DNA, 201 bp, Homo sapiens
caggtgtggtggtgtgcacctctagttccagctacccaggaggctgaggtagctggaactacctggtggttgaggctgtagcgagccatgatggcaccacyacactgcagcctgggcaacacctgtctcaaaatcttcatagacttatataacaaccatgacaattgaatgacatttttctacaacttgaaaatttgtctt

SEQ ID NO: 178924 - DNA, 201 bp, Homo sapiens
gcatgtagagaaaatggtgtgaatcttaaccctatccctaaccctatcaaaataaagacaactaggatgctagttttgtagtttcctgaaataagtttccytaagaatgttagtcacccaaattaagaaaatttgtaaagtcaggttttccagagatacctctgcttagcttcaagggaaatcacaccctcccaccctcaa

SEQ ID NO: 178925 - DNA, 201 bp, Homo sapiens
acatctcctttttcaagaagcaaaaatgtgattatttcatagatccccaaatcatccaaccataagacttctcaagagatctttaaaattattactttgcrctgtgtttcaaatagctaccctcaccccccttccccttcagatgatgagatagttcctctggtgtggtctgtgtggcctgcctagagagccctgatgccc

SEQ ID NO: 178926 - DNA, 201 bp, Homo sapiens
ctgttactaatgtttgtaagtttttgggcacaaacttatgttttgcttaataaaataaaaacttagacattatttgtgttttggctgaaatcagtccccarttgtcatcttgggatgttatgattatttacttatatatgtatatatttattttggcatatactctccacagttgcaaatgaaattaatagatagatgttt

SEQ ID NO: 178927 - DNA, 201 bp, Homo sapiens
cctttctcctttcctcctttcttccttctttcctattttgtaattcatcttgaaattctcatctcaaccttcatgtcagtcagtcttcacagagctgtaasaaagacattggtgagtaggggctgagagcaggattaagttcttctccgctggttttcttttagccagccttccttccagggaagcctcttaagtcgatgg

SEQ ID NO: 178928 - DNA, 201 bp, Homo sapiens
ttgaaattctcatctcaaccttcatgtcagtcagtcttcacagagctgtaagaaagacattggtgagtaggggctgagagcaggattaagttcttctccgytggttttcttttagccagccttccttccagggaagcctcttaagtcgatggagatgaaatgcccttgtttcctcgagtggagcagttggggaaagcggga

SEQ ID NO: 178929 - DNA, 201 bp, Homo sapiens
gtatagccttcccctccacccccaggcttttgcagatccaacttcagcaaagcatgcttgagttagcatgtgtctatttgccacctagcgacccagctggrcattgttaaacaaagaagtagagatcaccaaaaagaaggaaatgtaacctcaggcagttaagcaggaccagaaagagggaggtgttcccagaaccaggtt

SEQ ID NO: 178930 - DNA, 201 bp, Homo sapiens
gcatgttcgatgtgcagctcctccgtgtaagcagatctggtgagactggttcaacatccccaggtgggaaccgtctgtgggaaacggggcgcttgctgggycttctagaaggggagagcctctgcaggctgcctgaggtgagcttccctgggctccggaggcactggagtagcgaggcccaccttagaccctcctcccgag

SEQ ID NO: 178931 - DNA, 201 bp, Homo sapiens
caaaggaagacttcaccaggggatattcaggaattcactgataagcttaagaagatttttgcaattgttagctcttaaaatcatttttaattagtgaagcmgagaaatgctgagtgaaacagccatacttttccccaacttgattgggaaaatctccatcctgtgcccctccattccttcccatccttcctcttcactccg

SEQ ID NO: 178932 - DNA, 201 bp, Homo sapiens
cctcctctattactttttaattcaagtgtctcaaggtgctttacaagtgttaattaagtctaccttttttttaaggtgggtaagtagttaaaaaaaaaggkgggggagagagggagcagttttgtgtcatagtatttgaaggagaaaagcaacacttaagcctgacatcattgtggcttcagtggcaggcacaggttgata

SEQ ID NO: 178933 - DNA, 201 bp, Homo sapiens
caagtgtctcaaggtgctttacaagtgttaattaagtctaccttttttttaaggtgggtaagtagttaaaaaaaaaggggggggagagagggagcagtttygtgtcatagtatttgaaggagaaaagcaacacttaagcctgacatcattgtggcttcagtggcaggcacaggttgataattctaaatggcaactaacagg

SEQ ID NO: 178934 - DNA, 201 bp, Homo sapiens
tctatctctaaagcacccttgaaaaacaaggcatttgggcagctatacttttaaataggaacaagcgaatattgttgtttatcgagtgccaggtgtagggsttttgcatacacattatctcatttacttccttacaactctgtggggtagggctcatgggtctatctgaggatggagaggttggcacggagatcacctcaa

SEQ ID NO: 178935 - DNA, 201 bp, Homo sapiens
tggtaaatgccctccaaacaaggagggtggaaactattattttgcccatattatagaaaaggaggttggaccctaggaagcgaatgggctgactgtaatcwcatcacttgtatgaaacatactggcaccagagctgtctatacctgcaagcatgagtttcctcatcttaaagagactcaactaggcagtttctaaggtatc

SEQ ID NO: 178936 - DNA, 201 bp, Homo sapiens
agagcagatcagcacggagcagcattagctggggcccccttgcctggcctggcagtgaagatagagcaccatgccagttgttcagcttctcagcgcttgcrtcagctgacctaaattatttaaggatgttgtcacctctaaataaatatagtcattgtcctggtctctatttatattttaaaactctttcccagcccaccc

SEQ ID NO: 178937 - DNA, 201 bp, Homo sapiens
ctaaaggcagcaatcttgcccccagggaacgtttccaatgtctggcgacagtttttagggggagtgcacatatctaatgggttgaggccgaggatgctgckgaacatcctccgatacacagggcaacaatgaatggtccaagctaaaaggccagtagtgccaagtttgagaaactctgccttagctccagcccttacataa

SEQ ID NO: 178938 - DNA, 201 bp, Homo sapiens
agacctttgttagggagaacagagtcctctgggtatatttcaaaatggttacttttctcctcctcctgccagaagcacaggggattttttcctgatcttckccttgagaacctactaaggggtaaaactcacgcaagttgtggggtccctcctaaggctggccaccaagagtttttgatctctcaagctaataaaaaccag

SEQ ID NO: 178939 - DNA, 201 bp, Homo sapiens
tggactcggtttaacccccagctttaatgaggtataatttatttaaaataaaaatcacccactaagggtgtacatttgatgagttttggccatatacagtygtgtaaccatcaccacagccaagacaggaccatctccagccccagcaaaaagctcgctcctcctgctttgtagtcagtcctgcccccaacaccgcccctt

SEQ ID NO: 178940 - DNA, 201 bp, Homo sapiens
ctatttgctaaaggtgggagaagatggtgcatcagacccgggattcctggccctctcacatgtttcccaccagagtttcttgggttaaaataatttctccrttatgacagggcttgaggcagatatcctaagacctttaaaactagagccatccaggccgcgcgcggtggctcacgcctgtaatcccagcactttgggagg

SEQ ID NO: 178941 - DNA, 201 bp, Homo sapiens
tcctgcttcagcctccctggtagctgccaccaagcctgactgatttttttactattttttttttttttttgtagagacaggatctcaccagctgaccaggstagtcttgaactcctggcctcaagcaatcctctggtcttggcctcccaagtgctgataatacaggtgtgagccactgcacctggcctctttgtcttaaaa

SEQ ID NO: 178942 - DNA, 201 bp, Homo sapiens
ggaagttgcaggtcatcatgaccaggcagcacgagcttagctctcgctggagagcgcagtcagcataggtgtgcgaaggttctccctccgactcagttcayggcgtaggagcagagacagtgggagaggtgagcgaggcggggttgagtcgtgtagtcaggatggggtgtgtgtttaagatttgagcaggaagaaaagtcc

SEQ ID NO: 178943 - DNA, 201 bp, Homo sapiens
gaagagaatactcgcggtctcccatgtgagtgaacgatgaagttgtaagaacactcccccacctcactgttggtgacagaggacagtgtggttccaggggstgggcaggtgagagggtccagagagtgaaggagatgcttggatgatccagaaatctggggccagctcattggcccagactttcattagttttgactgaag

SEQ ID NO: 178944 - DNA, 201 bp, Homo sapiens
atgttttgaccagagtttcaaaatatcattcactagagaaacatctcttggctttagcatgatttttatcttggtaaaaaaaaaaaaaaaaaaaaaaaaamcaaataaattgttagcagctgcgctattcatgagtgatggttacacagtttatatattaaaacgtttggaatgtgcacaattacctcttttactttctca

SEQ ID NO: 178945 - DNA, 201 bp, Homo sapiens
ttttttaatggatattatgtaacaattatgatcatctttttactagaagtttctgagcttcagttactcagtttcctgaataacaaagtctttctcaagtmattcagtgttgctgagagaaccattgaagtttattatgatacatggtcagggtgaaaagtgtcctctgcccgaaacagattcactatatgggagtatggg

SEQ ID NO: 178946 - DNA, 201 bp, Homo sapiens
gccatagtcccaagagacctgctttagttgaaactctgtccccatgggacctcattgggatgaaaggttctgacactgatgtatcatgaagcttgcacaaygtggtaaagttactaaaggccactgaatcgtgcagttgaaacgagtgaattttatgatatgtaaaacatgcaacagtgatgtttaaaaaaaaaaaaaagg

SEQ ID NO: 178947 - DNA, 201 bp, Homo sapiens
aggctgggtaatttataaagaaaagaggtttatttggttcatggttctgaaggctgtacaagaagcatggcaccagcatctgcttctgctgaaagctttargcttccactcatggagctagtgtatgcagagattacatggtgagagaggaagcaagaggtggggtggggtgtggggtgccaggctctttttaacaaccgg

SEQ ID NO: 178948 - DNA, 201 bp, Homo sapiens
atgagacagagagaaataaatagtcttactctaagaagagatttcagattcaaatgccactgctctggcacttggggctatcatggcatttgtgccaagaygggctcttaaatgggttgtcccaaattcccgcttgagaatagtgcggacagccagggtgtcctgtctgctgtgtatctctagtacgtattgtcaggcttc

SEQ ID NO: 178949 - DNA, 201 bp, Homo sapiens
cttcagatgatgagatagttcctctggtgtggtctgtgtggcctgcctagagagccctgatgccccacagtggctgtagacctggccccaagtcctgaagrcttctaccttcccaggtgcatgtcttatcctgtttcctatatttcatatttgtggttgagcctttagaaactaggcaccattcggccaggcatggtggat

SEQ ID NO: 178950 - DNA, 201 bp, Homo sapiens
ccgtgcactggttagggctggggtcacaggcagcctgtgtccagtcagagctgtagctagcagaggagtagacctggaggtgtggtgcaagactggtcttyccattccctctctgtcactgtggtcctcccttgtaccccactgtaaacgatctgtggcacaacacctaccctcccaattacatggtgagccgtgttctcc

SEQ ID NO: 178951 - DNA, 201 bp, Homo sapiens
atcacgggccactcatggatctgaaccttcttacaaggtcgataccaacaggtatgaggagcagagagcagatcagcacggagcagcattagctggggccyccttgcctggcctggcagtgaagatagagcaccatgccagttgttcagcttctcagcgcttgcatcagctgacctaaattatttaaggatgttgtcacct

SEQ ID NO: 178952 - DNA, 201 bp, Homo sapiens
atttcctaaataataagttccttgattcttgatgactgaaacttaagagttgttgtcgtttctgttatacaggacctctgtgactaattattttgtaattwgccattttacaaaggatattttcttttatgcgtttaatgaaatttgggggggtggtgggtggaaaatatgtttccggttttaaaatcatattccctttgt

SEQ ID NO: 178953 - DNA, 201 bp, Homo sapiens
acatggagaaactccgtctctactaaaaatacaaaattagccaggcgtggtgttgcatacctgtaatcccagctacttgggaggctgaggcaggagaatcrcttgaacctgggaggtggaggttgcagtgagccgagatcgcatcattgcactccagcctgggcaacaagagcaaaactctgtctcaaaaaagaaaaaaag

SEQ ID NO: 178954 - DNA, 201 bp, Homo sapiens
gccagttagggattaagagctactgcttctatgtgtggatcctatatccacccatttacaattagtaccttgaaggtttgcccttcctaccctggctgatrtatttgctttaaatttttctttaccctcctatgagattttctttagattttgctccactttggtttttttagaccctgttccctgtccttctggttttgc

SEQ ID NO: 178955 - DNA, 201 bp, Homo sapiens
acatcataatgtctgccttaccttctgccttagcttgtcttgaggagaaatagaaatgatgtctatgaagctgtcagtaacgtgtgaaagcgctgtccctrtgagcatatatgtgttaaaccttctgttattccaaaagagaggtttggcacatcaactcgaggaatatttacttaagtggaggagaaacaaagcaactaa

SEQ ID NO: 178956 - DNA, 201 bp, Homo sapiens
tctctcctcaaatcagtgtcccaatattcaggccgacttcggttcatcctgttttagctgtgcccactagaatttaaaatgtggccgtgcagctcctgacyctgctgagggtgcctcggaaccagaagactgtagagctgcttttctcccaggggagaaactaatgatttgcagaagctagtaatttagagtctatggaac

SEQ ID NO: 178957 - DNA, 201 bp, Homo sapiens
caacccatttcttctcaggcaatactactactttaagcaaaaccgcaggcatcctttgtcaagggtggctaccctagtccatggttcttaagcctagtacrtcagactcatccagaaagctgttgaaaatacagtcttccaggattcatcctcaaaccacttgagcggtggaccctggaaacgtaggactctgcagggatc

SEQ ID NO: 178958 - DNA, 201 bp, Homo sapiens
ttctcgccaagataatttcatccgtcagttactttatagaatatcactgacttgaaactattaccattgtcccaaccagcatgccacatctccaaagcatrtaaaatagaccaaaatcttgtcttccatatgatttaaaacaatcttgtaatagaccaaaaatacaaaaacatacacaggaaataacttcaggtaaaagag

SEQ ID NO: 178959 - DNA, 201 bp, Homo sapiens
atggaaaggaaaggatgagtgaaaacaacctgtagaaatggaaaccacgtggtttgactaatgcctgtgtgggagaggcacaggaaaggaacgaatcaaaratggctttatgtatcagaccaggagaatagatggcaataccagtaaaaatcaggagttggctttgtgaaagaaaataaggttgatttttaaaatataagc

SEQ ID NO: 178960 - DNA, 201 bp, Homo sapiens
atcaaaaccataatgaaataccagtccatatctattatgatgagtggaatcaaaagtcagatcataacaggtgttggtgaagaaattagagaattggaaayctcgtacactactgatgaaaatgtaaattagtgtagccacttctgcaaacagtctgtagttcttcacattgttaaccgtagaactaccacttgatgatct

SEQ ID NO: 178961 - DNA, 201 bp, Homo sapiens
catgagctatcatgcctggccacgtttttgtgttgagataaaatctatatactgtgaaatgcacaaatgttgaactgcagtttgatctgttctgacaaacrcacacactcttgtaaccgacactcctattcatataaggagcatttcctcactccagaaagttccttggtgaaccttcccagtcagtactcctcccctgtc

SEQ ID NO: 178962 - DNA, 201 bp, Homo sapiens
ctagtcatttcgcttggcagtgctttgatttgttggaattttaagtaaattattttacttatggtttcctaatttgcaaaattgaaatacgtggtctctcyttacctcaaagagatacaaagaatattaataaggtaacattcccaacctcagtgggattctgatgccacataaatatatggtatcatcatcctcctgctc

SEQ ID NO: 178963 - DNA, 201 bp, Homo sapiens
tctttgcctgttggttattggcaaaatatggatttttagttaattgtcataagtaactttctatgtcaatttcttcttgtttctcattcatcattcatacrtacacaagcatcttttcacttacccaatggaattacttttcatagcaaattagtatttttcttcctctgctttgtgattcttttgctgaactccaacttg

SEQ ID NO: 178964 - DNA, 201 bp, Homo sapiens
aaggaaacagacattgacctgcgttgtagtagaataatcatgagcaatattcaaaagaaaataagatatatctcctgttcagtgtagggtgtgttttcccrtaaaatctaaatactgtattgcacagcaatttaaatatgaaaaagttgaaaacacagcattcatgtttttccattttggaaactatgtggtgaatacctt

SEQ ID NO: 178965 - DNA, 201 bp, Homo sapiens
catggaatttagaaaaaggcatctacagaggaagaagccttttggaaatactgtcttctctgaggatctttgccatattggatgatattggaacaccctgstcctattcattcattccctcaagaaacattgctgtgttcccgttatgtgccaggcactgggttaggcacatactggtgaacaagacagaggtagttcctg

SEQ ID NO: 178966 - DNA, 201 bp, Homo sapiens
tggtttttttagaccctgttccctgtccttctggttttgcatcttctacttttggtacagcttataagagttgcctgtgtcgtctttccataccctgttgycttgttaggcttaggcagcctgtcaggctataaaactcaggcttcaatgaaaagcattccctcatcctcaagtccagcttttctcatcctttggcttatt

SEQ ID NO: 178967 - DNA, 201 bp, Homo sapiens
tctgagcagatagaaaaatggaaaggcagaaggataaactggccctgttttacaaaataatatttaaaaatcactaatataccattagcttataagaccargtacccatgggagtacttgatgatattgacatcagctcattcagaaacctttttgtgtgatcatcactctatttcctctcagttttcaaggatctcattt

SEQ ID NO: 178968 - DNA, 201 bp, Homo sapiens
agaccctgttccctgtccttctggttttgcatcttctacttttggtacagcttataagagttgcctgtgtcgtctttccataccctgttgccttgttaggsttaggcagcctgtcaggctataaaactcaggcttcaatgaaaagcattccctcatcctcaagtccagcttttctcatcctttggcttattaggattacac

SEQ ID NO: 178969 - DNA, 201 bp, Homo sapiens
ttcagcacctatgcacttctacttggaaaccatctgagagtataattcagccagcaaattgatgaagcaaaataaaattggaatagtaaagccacagtaamaggaattggtggcaaatagtgaatgtatttaaatataaaactgagactgctacatttaggtcttagatccatttgagttaagttttatatatgctatgaa

SEQ ID NO: 178970 - DNA, 201 bp, Homo sapiens
taaacatataattggaggtatcttttttatataattgtttcttttcctctggatagataccaagtagtgggattgctagatcgaatgatagttctattttyagttctttgagaaatctctatactgtttttcatataagttgtattaatttacattcccaccaacagcgtatgtgtttccttctctttgcatcctcaccaa

SEQ ID NO: 178971 - DNA, 201 bp, Homo sapiens
tctaagctcatcacagggcaaaaggggcaataaaagcaatggcggtgaacacctgatagtttaatccttaagtaactaatttccagaagccttcttatatyctgaaagcattcttttaagaaataaatttattcttataaatcaaacattgttaattttttccttaggaagttacttacaaaaggtttaagaagacagaag

SEQ ID NO: 178972 - DNA, 201 bp, Homo sapiens
atttattttaagtcatattaattaaaacagtgaggcattggcctgagagtaacatatagaccagtggaacagagtattaaggactttgtgtagtgccttgrgaaggacttatctttttaataattgatgctggccatatggaaaaaattcttataccatctataacatttctacatggattatagaatgtgaaagaaaaaa

SEQ ID NO: 178973 - DNA, 201 bp, Homo sapiens
aatttgatgctggtgctgccacttggacatttctgctttaatttttgtcacagattcttttggggagtgggtgggatataaatgacaagtgcttgctaaawttatggtttaatgggcagattgtttacactagtcatttcgcttggcagtgctttgatttgttggaattttaagtaaattattttacttatggtttcctaa

SEQ ID NO: 178974 - DNA, 201 bp, Homo sapiens
acagcagtttaaggggggaaaacagtggatttattactaataaaatattaaaactcttatatttaaagccaggcataatttacattcagtttcacccctcrtcgttttagctgtccattttctacttaagctgcaccctctttctcttcccagaagccttcatcctccttttagccacccccgcaccaccatctccttccc

SEQ ID NO: 178975 - DNA, 201 bp, Homo sapiens
tggcatgatcatagctcactgcaacgtcaatatcctaggctcaagcgatcttcccacctcagcctcctgagttgctgggactacagacatgggccactacwcttggctatttttttttttttaattgtttgcagagtcaaattctccctgtgtttcccaggccagtctcaaactcctggggtcaagtgatcctcccacctc

SEQ ID NO: 178976 - DNA, 201 bp, Homo sapiens
atcagtcctgttgtcccttcacctgtgtggacacagcccccgtgataacttaatacagtttgtaaccacttttatttgttacagcgcaaaattgcaatacraaacctttttcattttataatttcatgtttaggtttataatgaataaacaccacgattgtaaatatgactagtttattcccatggttcttaggaagaagt

SEQ ID NO: 178977 - DNA, 201 bp, Homo sapiens
tttgtggcagttgttaagaaatgcatagtaattatgagcagagatttagaacccagcgctttttccttcatgccagaaaccagtggatttgatgatgtctrtacttgtcttatctttctttttccttttctggagacaggatcttgctgtgtggttcaggcagaggtgcagtggcatgatcatagctcactgcaacgtcaa

SEQ ID NO: 178978 - DNA, 201 bp, Homo sapiens
cgattagctgggaagatgccttaggagtaattagacaacatggagttaaagaacataaaaaggcagtgcaaacgagtgctttctcttcttgcagaaggggktattctatttcctgatgcctgagatgatctaaacaaagagattcgttttattagtggtgtggtttctttagcccagtaccatgaccgtatcctgttcaaa

SEQ ID NO: 178979 - DNA, 201 bp, Homo sapiens
aattatttgccgtgtgtcctgcaaataattctcccagttgctttgaacactgtgtttgcaaaacttcgtatattttgtattcatataaattaatttaaagrtcagaatgttgtgaagtaattttgtgtgattaatttatttaggggaaagctaaatgccttgctagctttttggttacagaatggaaaaggtggtagaaat

SEQ ID NO: 178980 - DNA, 201 bp, Homo sapiens
gacagaattcgacctataacagatcccgcttttgccaggtattgttgttattgttatttaaacagctccttcgaatatgaacaggaacctgctcttttttstcttatggcctagggacaaaaacgtaaaattgaaactggcttgtagtaaacgtgcagtaaaacttaaatagtaaggtctttgttcaagtgccataattta

SEQ ID NO: 178981 - DNA, 201 bp, Homo sapiens
agtcagtgaagaaaaacgcatcatatgtaagtgtgacaagtattggtttaaatatgtataaatcaaagccatatattttgtttttcatcaagaataaataraagaaacaatcctaacaagaaattttacatttaaaacgatgttaaaaatgctttcctactgaaatttagtgctaagaaaatgttgctgtcttgggaagaa

SEQ ID NO: 178982 - DNA, 201 bp, Homo sapiens
caggttgcctttttattgcccagtccctttgcttggaaagtccttcttttattcttatcctcgtggaagcttctatgtttcctttattgttgatgtgcttygagtgctgcctttgtggatctttttctcaccttccagaggccttcattgtgtctcctacctggccttactttgtgcagtcactatgctggggatgtagca

SEQ ID NO: 178983 - DNA, 201 bp, Homo sapiens
attatgtgcactggaaaacaatgtgtggccactgagtgtgacttcaaagtgaacttgcctctctttccctctaggctatgtggttgatgttgcagaatgaygagccggaggacttcgttatagctactggggaggtccatagtgtccgggaatttgtcgagaaatcattcttgcacattggaaaaaccattgtgtaagtat

SEQ ID NO: 178984 - DNA, 201 bp, Homo sapiens
aagaagttcctcatgttattcggatactcagtaaaagttgggagccattgctgttgtgcttagaatatgctatgaaattcatgctcatgttccagctgtcsatgtccatatctgattatgtgcactggaaaacaatgtgtggccactgagtgtgacttcaaagtgaacttgcctctctttccctctaggctatgtggttga

SEQ ID NO: 178985 - DNA, 201 bp, Homo sapiens
caccaaaagaatgcaggaagactgtctttttcctccttcattccttgagagacagagagaagactgacctctaaaacatgtaacctcaacactgtttctcyagtcagaagccaaagctgggtggcgatttgatcacagagtgtggcctggccatgtcatgggtcatgtggtccagcatgtgaacaggaaggtgagaacggg

SEQ ID NO: 178986 - DNA, 201 bp, Homo sapiens
gtcttgaccctctcaaagtcatccatgaggattggaatcaacttcttccaaacttatgttaataagttccaaacttatgttaatgttgctattttgacccytttccatgaatcatgaatctagaatggtgaatccctatctagaagattttcattccattagatgaatcacttgctgtggcaggtatagcctaagaaaaat

SEQ ID NO: 178987 - DNA, 201 bp, Homo sapiens
atctcaacagactactttctttgcttatctataagaagcaactcctcagccattcaagttttatcatgatattgcagcaattcagtcctatcttcaggctrcacttctgtggttcttcctccatggcagtcttgaccctctcaaagtcatccatgaggattggaatcaacttcttccaaacttatgttaataagttccaaa

SEQ ID NO: 178988 - DNA, 201 bp, Homo sapiens
tctactaaaaatacaaaaattagccgggtatggtggcgcacaactataatcccagctactcgggagtctgaggcaggagaatcgcttgaacccgggaggcrgaggttgcagtgagccgagattgtgccactgtactccagcctgggcgacagagcaagattctgtctcaaaaaataaataaataaataaataaataaaact

SEQ ID NO: 178989 - DNA, 201 bp, Homo sapiens
gtagttcctgttattaaatttgcctctaaaattcatggttttatgtatgtatgatttgcttctcaagagattggcctcctccaaatggagcagaataagcrcattgttcttcaaatattggtcagttgaagacaaccttcttttctattaatttaatcagacttaaacaaagagtataccctcattcaggtcttctggact

SEQ ID NO: 178990 - DNA, 201 bp, Homo sapiens
ggaacatttttcttgagttgtgtagatatttttcgagttccaggtgaccatctcaaagtgtggttaccaggacttcacagcctcctaggggtgcaggaacstcaggcttctgcagagggactctgctttctactctgcttattctttgttgagactacattttcttggcttgttagtgtcaaaccaaagcctggtgtcttt

SEQ ID NO: 178991 - DNA, 201 bp, Homo sapiens
acatcagacatcatgcaagtcataggcaaaagaatagaaattataagtactgaattattctagttcatatagactgaattattacagttaaaatattatckgttccctttgtgaaaacaagcaatccctgctagccagcccggtggatgtgctcggcccagctacgctcagcactgcattccggccagtgtttgtgctgtg

SEQ ID NO: 178992 - DNA, 201 bp, Homo sapiens
gtcctgcctagaagccttagctctacttcttgtcttaaatgaactctcccatatggatagttgagacttacattgttgtaaccacaggccatgttgtggcrtctcagtcattgaagcatttcagtaagttctcttttttttgttgttgttctgtcattttatctattaactaaagaattattagctatttagatgccaagg

SEQ ID NO: 178993 - DNA, 201 bp, Homo sapiens
tacccctcatataatcagtccctttattcactcctgtgctatcactctctgccaacagagcttggggatgttaactcatcttggtagatatatgatcaaartaactcagattaaagttataaacattacaaaatgcattcaaaagctaatgtaattgtttaatttttgattgtgtgtacatctctagtgtcatgttaatgc

SEQ ID NO: 178994 - DNA, 201 bp, Homo sapiens
gccaacagagcttggggatgttaactcatcttggtagatatatgatcaaaataactcagattaaagttataaacattacaaaatgcattcaaaagctaatktaattgtttaatttttgattgtgtgtacatctctagtgtcatgttaatgccttagtgtatttatgtacttttggagctttgtcattgaggtcaggaacct

SEQ ID NO: 178995 - DNA, 201 bp, Homo sapiens
gaacaaactatagactggcatatataatttgctccagaatagcttctacttacattacataaatatagcactttattccccaaacattgccggtgcatttrtctctccttttgctcatgctgatgatccctgccccctttagaatgtctcatcctcacctttccaaacccccactcccccagtccctatcccccacccctg

SEQ ID NO: 178996 - DNA, 201 bp, Homo sapiens
aaaaataaaggaatggaaaaaattactccacacgaacagaaaccaaaagtgagtaggagtagctatacttatgtcagataaaacagactttaagtcaaacmcagtaaaaaaaaaaaaaaaaaaaaaaaaaagacaaggtcattatgcaatgacaaaggaatcaattcagcaacagaatattatggctctaaatatatatgt

SEQ ID NO: 178997 - DNA, 201 bp, Homo sapiens
gaaggaccacgaaggcagggagccaggcagagctggagaccccttcgtgaggcctgccttggttccctgaaacacaaggccattttcttactgttggtcarcaaagagctttttctaaacagcaagctgtcatgtgccttctcggtgtccttcgtcttgcaatcgtgttttcccacttaaggcgagcgcttgggattcgat

SEQ ID NO: 178998 - DNA, 201 bp, Homo sapiens
aaactcctcacctcaagatatccgcctgcctcagcctcccaaagtgctaagattgcaggtgtgagccactacacccagccagaagccaattttattgtcaytggcataacctcctagccaaggaacaccgcagattgtgatctggggtaaaggcaaagtgaaagcaaacatcgccagagagcaccagggcagccctacaat

SEQ ID NO: 178999 - DNA, 201 bp, Homo sapiens
agaaggtgttgctgaaggagaagacaatttcttttttttatgtttaatttttttttttttgagataaagtctctgtcacccatgctggagtgcagtggcaygatctcagctcactgccacctccgcctccagggttcaagtgattcttgtgcctcagcctcccaagtggctgggattacaggtgcccccgcccccaccacg

SEQ ID NO: 179000 - DNA, 201 bp, Homo sapiens
ctgggattacaggcatgagccactgcatctggcctctggccctcctttgaggctccctctcgtcttttatagaggccccttcagaatcggggtccctccastcactgcctggcctctctctccccctgttctgccaaaaggcatcaaggagccacctccacacacagcctcaccccatccattcagctcccgacaccctat

SEQ ID NO: 179001 - DNA, 201 bp, Homo sapiens
gagcagatgttaggaactatacacacaggctatgaattttgcacaaaataatttcagtcctaaaaaacccataaaatagtattacctattagagagaagcrgaaactatcctcatagatacccacttgtacactacacagtggcaagaaggtgttgctgaaggagaagacaatttcttttttttatgtttaattttttttt

SEQ ID NO: 179002 - DNA, 201 bp, Homo sapiens
tcccaggtcaacttcatactgctgtgctggcagcgggaatttcaagccagcggatcttagcttgctgggcaccatgggggtgggatctgctgagcaagacracttggctccctggcttcagccctctttccaggggagtgaacggttctttctcactggtgttctaggcaccactaggatatgaaaaaaaacctcctgcag

SEQ ID NO: 179003 - DNA, 201 bp, Homo sapiens
cacagcagctttgccaagctgtggtgggctccgccgcatttgaacttcctgatggctttgtttacactgtgaggggaaaaccacctactcaagcctcagtwatggcgaccccccttcccccaccaagcgctggcatcccaggtcaacttcatactgctgtgctggcagcgggaatttcaagccagcggatcttagcttgct

SEQ ID NO: 179004 - DNA, 201 bp, Homo sapiens
actggggttgctgcctttctttcagaaatgctctgcccagagaggaggaatctagagaggcagtctggccacagcagctttgccaagctgtggtgggctcmgccgcatttgaacttcctgatggctttgtttacactgtgaggggaaaaccacctactcaagcctcagtaatggcgaccccccttcccccaccaagcgctg

SEQ ID NO: 179005 - DNA, 201 bp, Homo sapiens
ttgttgttacccaccttctgaagcctacttctgtcaattcatcaaactcattctctgtccagttttgttcccttgctgccgaggagttgtgatcctttggrggagaagaggcattctggtttttggaattttcagcctttttgcactagtttttcctcatctttgtggagttatctacctttgatctttgatgttggtgac

SEQ ID NO: 179006 - DNA, 201 bp, Homo sapiens
cagcattgtctgcctctgaatagtgctaaaggaccatggaggggaaggatttggcactgatatcagaaggggggaaattaaaaatacaccttgcatttatractcattcattcaactcgggggattttctacaatgaataagtaagtttgatccacatagaattgatatatttctccatatatggacaactcaaactgata

SEQ ID NO: 179007 - DNA, 201 bp, Homo sapiens
gtagtttgtatttctgtgggatcagtggtgatgtcccctttatcattttatattgtgtctatttgattcttctctcttttcttctttattattctggatarcagtctacctattttgttgatcttttcaaaaaaccagctcctgtattcattgattttttgaagggtttttcatgtctctaatctccttcagttatgctct

SEQ ID NO: 179008 - DNA, 201 bp, Homo sapiens
aaagatttcctgttctctggttatcttttaccacatgtagttcttttgcagacagatctctttttccgacaccacatttgtagtcaggaaactttggctcrttcattgagattttttaaatggaatttgctccatatataaagtttgttccattcttaattgtgtactgaaatcattggggaattatatgcctaaacttca

SEQ ID NO: 179009 - DNA, 201 bp, Homo sapiens
tgcgttcagtagatttcagaattttaaaaatgtgtgctctttaattgtattaatattttgaagtaagagtacagtatgtggggaggaaatatgagggagaygcagtgggtcagtgttggcagaccactcacactagactcctgatgactatagccgcctctctccctgaacctgaaatttacccctcccagactaccattt

SEQ ID NO: 179010 - DNA, 201 bp, Homo sapiens
acctgaaatttacccctcccagactaccatttgaggaagagagctagtccattatgagagactcaggaccaaggcgaggaattggaacactataaaccccscaagaggggagtgggccttgcagagagttccagaatagtgcctgatcagcagtgtctcaggatcatcaaagatcctggcttcaggagctggaatgttact

SEQ ID NO: 179011 - DNA, 201 bp, Homo sapiens
tgtgaaaactattgttattgttatgctagagctttggaatttatagagagttttatctgtcttgccctttgaaattttaccttttatttcagtaatattarattatcaaacttgttttatcattctcatagctcattttctttcctactggtttttgtgtttttgtgttgatgtttgtatatttgacatttagatttctca

SEQ ID NO: 179012 - DNA, 201 bp, Homo sapiens
tttttagcgagggaggcagggcagtggtgaggggcacagcatacagaggggtcagcagcgtgaaggctccaggcaggaccagctgacgccagactaggacmgcagggtggccggagaggctgcatcgtcgtagtgggggatgagtgtggtaggttatgaggtcaagtgccagggtgccaggtgggggaggactcaaattga

SEQ ID NO: 179013 - DNA, 201 bp, Homo sapiens
tacagaggggtcagcagcgtgaaggctccaggcaggaccagctgacgccagactaggaccgcagggtggccggagaggctgcatcgtcgtagtgggggatragtgtggtaggttatgaggtcaagtgccagggtgccaggtgggggaggactcaaattgaactagttagaggttcctgcagtggttcccatgaaaggtgat

SEQ ID NO: 179014 - DNA, 201 bp, Homo sapiens
gggaaagatctctcatacaggacataaaaagcttaaccagttttttgatctttgcagtttgaatgatgaggttcctcttggtcatcagagactgttagcaygtgagaatgtgtacacatgaataatggctgttgacttcttgaacgctagttttcagagtgattgcaccatacattttttagtgctgttactcagtatgaa

SEQ ID NO: 179015 - DNA, 201 bp, Homo sapiens
catgatgctaccaagggctccctccttttatctcacaagttcaggctgttcctacctcattacctttcgcctccaaaagataactccaggtacaacaggartagaaattaggatgtatctactgagcacttatttaaaaccttacttacgaaagtgtgttttatggttcaggatagcataaggtgagctacgccacgttaa

SEQ ID NO: 179016 - DNA, 201 bp, Homo sapiens
caagggctccctccttttatctcacaagttcaggctgttcctacctcattacctttcgcctccaaaagataactccaggtacaacaggaatagaaattagratgtatctactgagcacttatttaaaaccttacttacgaaagtgtgttttatggttcaggatagcataaggtgagctacgccacgttaatttggagaata

SEQ ID NO: 179017 - DNA, 201 bp, Homo sapiens
tttctcttgcttggaatagtttcagaaggaatggtaccagctcctctttgtacctctggtagaattcggctgtgaatccatctggtcctggacttttttgsttgataggtattactgcctcaatttcagaacttgttattggtctattcagggatttgacttcttcctggtttagtcttgggagggtgtatgtgtccagga

SEQ ID NO: 179018 - DNA, 201 bp, Homo sapiens
cttgtgatttttgcacattgattttgtaccctgagactttgctgaagttgcttatgagcttaaggagattttgggctgagacagtggggttttctaaatayacaatcatgtcatctgcaaacagataatttgacttactctcttcctgtttgaatactcttgatttctttctcttgcctgattgccctggccagaacttcc

SEQ ID NO: 179019 - DNA, 201 bp, Homo sapiens
tcattcttcctatccatgatcatggaaagtttttccatttctttgtgtcctctcttgtttccttgagcagtggtttatagctctccttgaggtccctcacrtctcttgtaagttgtattcctaggtattttattctctttgtagcaattgtgaatgggagttcactcatgatttggctgtttgtctattattggtatatag

SEQ ID NO: 179020 - DNA, 201 bp, Homo sapiens
ctatacgggcatttttttggttccatatgaaatttaaagtagttttttctaattctatgaagaaagtcagtggcagcttgatggggatagcattgaatctwcaaattactttgggcagtatgtccattttcatgatattcattcttcctatccatgatcatggaaagtttttccatttctttgtgtcctctcttgtttcct

SEQ ID NO: 179021 - DNA, 201 bp, Homo sapiens
gatcccatttgtcaattatggcttttgtttccattgcttttggtgttttagtcatgaagtctttgcgcatgcctatgtcctgaatggtattgcctaggttktcttctagggtttttattgttttaggacttacttaagtctttaatccatctttagttaatttttgtataaggcataaggaaggggtccattttcagtttt

SEQ ID NO: 179022 - DNA, 201 bp, Homo sapiens
gtttatggtaattctgttcatatcctttgcccacttttggatggggttgttgttttcttttacatttgtttaagttccttatagattctgcatattagccytttgtcagatggatagattgcaaaatttttcaaccattctgtaggttgcctgtttactctgatgatagtttcttttgctgtgcaacagctctttagttta

SEQ ID NO: 179023 - DNA, 201 bp, Homo sapiens
cctgaggtcaggagttcaagaccagcctgaccaacatggtgaaaccctctctccactaaaataaaacacacacaaaaattagctggacgtggtggtaggcrcctgtaattccagctactcaggaggctgaggcaggagaattgcttgaacacgggaggcggaggttgcagtgagctgagattgcgccattgtactccagcc

SEQ ID NO: 179024 - DNA, 201 bp, Homo sapiens
acctgaggtcaggagttcaagaccagcctgaccaacatggtgaaaccctctctccactaaaataaaacacacacaaaaattagctggacgtggtggtaggygcctgtaattccagctactcaggaggctgaggcaggagaattgcttgaacacgggaggcggaggttgcagtgagctgagattgcgccattgtactccagc

SEQ ID NO: 179025 - DNA, 201 bp, Homo sapiens
acaatgtcagaacgcttagctggagaatggccacgtggaggagaactgaggtgcatccagcacccagcaccagacctgtgagggaggccatcttggccccrctgccccagtcagtccgccttggccatcaccaccgggagcagagaggaactgtcctctgagccctcttgagttcctgcacactgaatcacaaacaatcaa

SEQ ID NO: 179026 - DNA, 201 bp, Homo sapiens
ggggtgtgagtgcggtttggatccgtggatatattgtgtggtggcgaaatctgggtttttagtgtaatcatcacccaaatagagtacattatacccaccaygtaatttctcatccctcacccccctcctgcccttccaagtctgtgatatcttttattccactctctatgtccatgtgtacacattatttaactcccattt

SEQ ID NO: 179027 - DNA, 201 bp, Homo sapiens
tgtggccctgctgtggtgaggaaactacggccaggggaagtggttgagtgatctgctcagtggccactaccagtggtcccagagccctgacacccgctctyccaaggccttctcaatgcactgtttcctcaaaataaggccgtggcttttcctgataacaaaaagacccagtgcaaaaaccattcaacagggaaaaactgg

SEQ ID NO: 179028 - DNA, 201 bp, Homo sapiens
ttatttaactcccatttataagtgaggatatacagtatttgactttctgtttctgagctatttcacttaagataatggcctcttgtttcatacacattgcyagaaaagacatgattttgttcttgttttattttactttttatttttgaagacagagtcttgctgtagacaagaatgcaatggcataatcatagctgattg

SEQ ID NO: 179029 - DNA, 201 bp, Homo sapiens
ggttgagtgatctgctcagtggccactaccagtggtcccagagccctgacacccgctctcccaaggccttctcaatgcactgtttcctcaaaataaggccrtggcttttcctgataacaaaaagacccagtgcaaaaaccattcaacagggaaaaactggccttttcaacaaatggtgctgggacaactagatatccatct

SEQ ID NO: 179030 - DNA, 201 bp, Homo sapiens
agccagtcactaaaaaccacctattgtatgattccatttgtatgaaacatccacagtaggcaaatatatagtgacagggctgttggggtcagagtgagagytggggaccagggagtggctgctgatactaggttctgaggtactgagtactaggtacggagtttctttttggggtgatgaaaatgttctgggcttagatgg

SEQ ID NO: 179031 - DNA, 201 bp, Homo sapiens
tgtcaaataatgcactgttggcattacaaaagtaagaaattcttaaaatatttcctggtgaacatgattgacaggtgtaataacctttatttcgtctttgsgttttgatacttttttgtatttggatgcattacaagttattatttcggccaagatgttactgttgaagatggtgagaatcactgtcttttacaacaaact

SEQ ID NO: 179032 - DNA, 201 bp, Homo sapiens
tgtagtgatcaaatcagagtaattagcatatctgtcacctcagacatttattgtatgtttgtgttaggaacatttaaaaacctcttttctagctaattgaraaatacttaatatgataaactatagagcactccacagaacactagaatttaatgtgtctgtctagctataattttatattctttaagaaatctcccctta

SEQ ID NO: 179033 - DNA, 201 bp, Homo sapiens
ttgtagatgttaaccactaactaaaaaaaaaaaaaaaaaaacatattttaaggccaggcacagtgccccacatctgtaatcccagaactctgggaagctawgttcgggggatcacttgagcccaggagtttgggaccagcctgggcaacatagtaagatcctgtctctcaaaaaaataaaaaacgaatcagccaggtgtgg

SEQ ID NO: 179034 - DNA, 201 bp, Homo sapiens
gtagatgttaaccactaactaaaaaaaaaaaaaaaaaaacatattttaaggccaggcacagtgccccacatctgtaatcccagaactctgggaagctaagktcgggggatcacttgagcccaggagtttgggaccagcctgggcaacatagtaagatcctgtctctcaaaaaaataaaaaacgaatcagccaggtgtggtc

SEQ ID NO: 179035 - DNA, 201 bp, Homo sapiens
agatgttaaccactaactaaaaaaaaaaaaaaaaaaacatattttaaggccaggcacagtgccccacatctgtaatcccagaactctgggaagctaagttsgggggatcacttgagcccaggagtttgggaccagcctgggcaacatagtaagatcctgtctctcaaaaaaataaaaaacgaatcagccaggtgtggtcat

SEQ ID NO: 179036 - DNA, 201 bp, Homo sapiens
gtggtaagaaggctagagaaggtagactagagatggtgtagcagttccatagggctagcaggggtggcagcttcttctttttccccccaaccatcctcagsctgggtttcttcctcatggtctcaaaagtggttgcttgaccttgggaatgatgcctaccttccaggccagaaacggattggctggcttctcctatctgct

SEQ ID NO: 179037 - DNA, 201 bp, Homo sapiens
tgtgttctcactttatagtatttattaaatattttgtgcagacagtgcagcttatagtgatgcaagtacattatcattagtaattaaattgaaatgtttgytttaaattttttatttcaatagcttttggggtacaagaagttcttggttacgtgggtgaattgtatggtggtaaaatctgagatttcagtgtacctgtca

SEQ ID NO: 179038 - DNA, 201 bp, Homo sapiens
tgctatattgaaacaatcagctgacattagagttatcacaagatagctctttgtggtagatttttttctagagatggctacggtaacccctcccatcctgmgtgtccttttgcagtgtgactctaccacccctcccataagggggagagtctgtttcccctttgtttgaatttgggctgatcctgtcgccaatgcgtgcgg

SEQ ID NO: 179039 - DNA, 201 bp, Homo sapiens
taaaaactgcaagctgaagcaatgtttatattagagacaagaataataacttcattgctatattgaaacaatcagctgacattagagttatcacaagatarctctttgtggtagatttttttctagagatggctacggtaacccctcccatcctgcgtgtccttttgcagtgtgactctaccacccctcccataaggggga

SEQ ID NO: 179040 - DNA, 201 bp, Homo sapiens
tagcaggataagcaaacaggattagagtagggtgtcacatagcaaggttccttctccctcttgaacataaggctggctctgtagccccacacagcccagcrtggtagccacagccttgtgtgtctgctgagcactcaaattgtgcctcttctgagtggagatgtcctgtgaggacaaaagacaggctacacttcaaagtct

SEQ ID NO: 179041 - DNA, 201 bp, Homo sapiens
tattttagagttttcaaatactcgataagttaaatactttaaaagtgttaattcattgtaggctttttctacttgtttttccagatttcatctagaattawgtagacttaattttttaaaaactcccttgatcatctataatgtgtttttaaaataattgaacttcaaggtacgctcttgatttttattctgaatcttgga

SEQ ID NO: 179042 - DNA, 201 bp, Homo sapiens
agaatctggcacaggacatgttttcatggaactgcttatcaaaactaagcttctgccgtttcatttagacggggtagattgggtggaaaactggcccaggraccaggaaatttgccttctgttcctgctcagccgccgcgtgaccctgttgcaggtcagtcctccaagcatgtctcagtttctccatctgtaaaattagac

SEQ ID NO: 179043 - DNA, 201 bp, Homo sapiens
agatgttactgttgaagatggtgagaatcactgtcttttacaacaaacttcattgcttaaaaaaaattattccaacaggggcagcaaaactctatgcctaytggattgtggtgaacttccgtgaggcgtataatctctttgcagtgaacggcattctcttcaatcatgagagtcccagaagaggtcagtaaatatattaac

SEQ ID NO: 179044 - DNA, 201 bp, Homo sapiens
aagagtcctgggctgagtctcgcaagggccttctcaaggcctttgcgtttgttctgctatttcctaaacctttctccactgtgccgaaggagttaaagggytccgagccctaaccctccatcggggagtgtctcgggcaccagcgagaatctggcacaggacatgttttcatggaactgcttatcaaaactaagcttctgc

SEQ ID NO: 179045 - DNA, 201 bp, Homo sapiens
acagctgtggtgtgagaggaaggtttggggatccctgctcgattttacacttaagtcagattcagcaggaaataaagaacccttacccggtgctcctttargccagattgctgagctgggagacctagctgaccagatctggcccattgccaggctttgtttagtccagtcagtgtttcagcccacagctaacattttaga

SEQ ID NO: 179046 - DNA, 201 bp, Homo sapiens
taatccttactaatttcagtaatttcatttaaaaaaattgtattgcctccaaggataacacattagtttgtttagtcctttatcttaccagtacctcagartgaatggttttaacccttttataaagcattgccagccctgcaacctgggcagctcaatttcagaagttgctgcgttaatgtactgtgcactgtgactcag

SEQ ID NO: 179047 - DNA, 201 bp, Homo sapiens
ttcatttcattttctactgaacagaataaagttcagtgtgccctacagctgtggtgtgagaggaaggtttggggatccctgctcgattttacacttaagtsagattcagcaggaaataaagaacccttacccggtgctcctttaagccagattgctgagctgggagacctagctgaccagatctggcccattgccaggctt

SEQ ID NO: 179048 - DNA, 201 bp, Homo sapiens
catcagtagataacctaacttaaattataatatactagtgaataattttttatcactgagtacttttctctctgtagaatatagtataatcagacagagtragctgttatttcctctcctgggcatattattctgtatcttttatctcttacaatattgaaggaatattaaaaggaactcaaaatgaataagcacacaaaa

SEQ ID NO: 179049 - DNA, 201 bp, Homo sapiens
atcccagctacttggaaggctgaggcacgagaatcacttgaacctgggaggtggaggttgcagtgagcagagatcacgcattttttggttgtggagatcasgccactgcactccagcctgggtgacagtgcaagactccgtctcaaaaaaaaaaataaaaaataaaaaacatttaaactctgtgttacctaaaggatatca

SEQ ID NO: 179050 - DNA, 201 bp, Homo sapiens
aatagcagtgccagatactcctctattactttgtttgtttgttgttttttgtttttgagatggagtctcgctctgtcacccaggctggagtgcagtggcgygatctcggctccggcctcagcctcccaagtagcttggattacaggcatgtaccaccacactgggctaatttttttggtgtttatagtagagacggggtct

SEQ ID NO: 179051 - DNA, 201 bp, Homo sapiens
acccaggctggagtgcagtggcgcgatctcggctccggcctcagcctcccaagtagcttggattacaggcatgtaccaccacactgggctaatttttttgstgtttatagtagagacggggtctcaccatgttgaccaggctgatctcgaactcttgacctcaagtgatctgcccacctcggcctcccaaagtgctaggat

SEQ ID NO: 179052 - DNA, 201 bp, Homo sapiens
ccaggcgacagtgcgagactccatctcaaaaaaaaaaaagctaataaatgattttgaagtaaagattcaatctgatatacattaataaacagataaaattygttttttgttaataatctttgtaaacctagaatttcctgtggtactttaagtgagtttattttcttaagttggttgaacatttactcatcagtcttcttg

SEQ ID NO: 179053 - DNA, 201 bp, Homo sapiens
gagaaccgtgtaatacatctagagatgtaagaatcacctatgctagcatcagatcaacagttggaaatcactgatttagggaatagagccaataatctgcractttgcatccctcagtcagccttccagtcactccgttggtgaaagcaagagggtggatggcacttgtgctatagacttgcttcttatgaaatgggagca

SEQ ID NO: 179054 - DNA, 201 bp, Homo sapiens
aggatatacagtatttgactttctgtttctgagctatttcacttaagataatggcctcttgtttcatacacattgctagaaaagacatgattttgttcttrttttattttactttttatttttgaagacagagtcttgctgtagacaagaatgcaatggcataatcatagctgattgcagcctcaagttctaggctcaggg

SEQ ID NO: 179055 - DNA, 201 bp, Homo sapiens
ccaataatctgcgactttgcatccctcagtcagccttccagtcactccgttggtgaaagcaagagggtggatggcacttgtgctatagacttgcttcttaygaaatgggagcactttagtaatatttactacaaattaataagaataacagaattttagaattaaatgtctataagtcatgaaaatgtatatagtagtata

SEQ ID NO: 179056 - DNA, 201 bp, Homo sapiens
gtgaagatgctgtgaatgttgtcaaaataacaaaagaagggtttataatactacataggtttagttgttaaagcagcagcagggtttgagagattgactcyaattctgaaacaaattctactgcgggtaaatgctgttacacagcactggatgctacagagaaatctttcctgaaaggaagagtcagtgattgcagcagac

SEQ ID NO: 179057 - DNA, 201 bp, Homo sapiens
cacagccgctccagcctttagcaaccaccatcctgatcagttagcagccatcgacactgaggcaagccctctaccagcaaaaggcacagatggtcattaayggttttcagtgataaagtaatttttagttaaggttgtacagggcttttaaaaacatactattattacacacttaataaactgctttttccttttgtattg

SEQ ID NO: 179058 - DNA, 201 bp, Homo sapiens
agttgaacttgagcaaagaaacccctgtgacactgagtgggccacctcagcttggcagtgaagcaagtggacaagttggaaacggaatgtctcagctgctsttatctttgtaaaagaccattagtttgcttaaaggcaatattcctttaagatgtttgacagaaataattacaataaacatagttttataatattagaata

SEQ ID NO: 179059 - DNA, 201 bp, Homo sapiens
gccatttctagatgagataggacattcctttaaatatgggcttcataagaaatcatatacatcagtctaaacacagtattcacctgactgaaagaatctgrcatttttaaggttcatgaacttgtggttttgagttttcgtcttgagcatttttttagctgccaagtactttgctttataaaatgtctgactgtatttatc

SEQ ID NO: 179060 - DNA, 201 bp, Homo sapiens
cttgtcccaacggaggagggggctactattggtgtctggtaggtagaggccagggatgctgctgaacatcctacagtgcacgggatggctctataacaaaygcctgtcctgtccagatggttcatagtggtgtgcacgggatggctctataacaaacgcctgtcctgtccagatggttcatggtggtgaggataagaaact

SEQ ID NO: 179061 - DNA, 201 bp, Homo sapiens
ttcttgtggttttgtttttgttgttttgtgtttgtatgtttgtttgtttttaatagtctggccactccagaccctagttgcctcagtttttccagtacctrtcaccagtgaaggctgtgatatagcaaagatggcagcttgccccttcctctggaagcttcatcccacaagggtactgacctattgctggcctgaacgcac

SEQ ID NO: 179062 - DNA, 201 bp, Homo sapiens
gcacctggaacatacgccgttcatgacactttgcctttatgggcccctttaactcgaggatctcaaagggcctcagcagtatgaccttgcgtgtcctggcygggcgcccaagggagggaggccagaaggtccacgctgctttccgtgtgagaagtcaggtcacggtgccggatcagaactaacacctggcctgcaccctca

SEQ ID NO: 179063 - DNA, 201 bp, Homo sapiens
cagacccactttttacctttattatgaaactagggtttggtcagctgagggcaagctgtatgcataacatagctggcagtatagtcggtgaactgtcaccragaagagagtcaaaatgtaaacactgagcaattctacagcagcttagagccgggattaactgggatcacctagtattctgtttttaatgaaactctctcc

SEQ ID NO: 179064 - DNA, 201 bp, Homo sapiens
atgtgaatttcatccaaagatcatctaatttaaactctagttctattccctacacatgcctgctgaatgcacataattgcatttcaggagcagagacgtgytcaacattctcctttttcctagaaatattgatgtcattacaatctcgggaaactcttttcagagtgatggtgtaacacacactgttgaaatggagtctcc

SEQ ID NO: 179065 - DNA, 201 bp, Homo sapiens
tctttatgtgcagattcaaatggagggggtatgccatgtttttctctggggattaaaagaaaggactcaggaaattatgtgcatcagaatttctccacacmtactacaagcactttccaattataagaaacatgttttttcttttctttagcatattccttccttgtcctaccctcaggggttaaaaaagagagagctcat

SEQ ID NO: 179066 - DNA, 201 bp, Homo sapiens
taaacctgtcacacctctgcagctgtttaggggctcaggctcagccgctgctgctgctgcgcgcaagatggctccttcggaaggccgggtccgcttggcckcgggcgctggcgaggagcgggtcggcgctggcaaaccccacaggcatggctttgggttctttttcgccccttttagtagccttcgcctacaccaaccacc

SEQ ID NO: 179067 - DNA, 201 bp, Homo sapiens
tggctggtttgtgagggtcgcctcttagaggtgttgcagtaggtgggatccgaccgctgtgtcttaccaagctgtgctgttttagattcagtggtcatgamgtaatcgtgcccacatattgctgtagaaagaatgtgatgtgtgtgctcctgggtatctctgggtggtggccaatataacactgagataaaggtgataatg

SEQ ID NO: 179068 - DNA, 201 bp, Homo sapiens
ttaatatttgcatcgttttggctcttccagtatctccaaataccatgcagatagaaaggaagatgttgtatgagtaaagaagatgagtagtggggtcttaycaaggttgtccataaaactccccaccttcagccatgcatgcgcttgctagcataattctccatctcttctctagaaggcttggtatttctgaagaacttc

SEQ ID NO: 179069 - DNA, 201 bp, Homo sapiens
ccaaagcccggaaggcggggtgcgggagaagtgaggggagctggaacgagggacgcggaggcctctctggggccgacacccggggtggggtgtcaccaggrgagagtggcagaagctcctccctcacgcccacccctgtgttgcaggagctggtgagggagatggtgcacgccgacgtggagctcatgaggacaaacccca

SEQ ID NO: 179070 - DNA, 201 bp, Homo sapiens
tggtggtggttatgcagtgtttgtcttttaatatttgcatcgttttggctcttccagtatctccaaataccatgcagatagaaaggaagatgttgtatgastaaagaagatgagtagtggggtcttaccaaggttgtccataaaactccccaccttcagccatgcatgcgcttgctagcataattctccatctcttctcta

SEQ ID NO: 179071 - DNA, 201 bp, Homo sapiens
cccctgctaaacatgaggtcaaggaaggttcaaagtatagtgggtccaagcacatcatgtccagtgagagtgccactcttacagacatctttgatttgtawacttgtggtaattttctggcaagtgacagtaaagtgttttatcgtaagaatcaacatattaatagagtttttcaacagagtaaaaggaaaaggcaccttc

SEQ ID NO: 179072 - DNA, 201 bp, Homo sapiens
caggcttcaaagtaatgtgttttgacccctgctaaacatgaggtcaaggaaggttcaaagtatagtgggtccaagcacatcatgtccagtgagagtgccaytcttacagacatctttgatttgtatacttgtggtaattttctggcaagtgacagtaaagtgttttatcgtaagaatcaacatattaatagagtttttcaa

SEQ ID NO: 179073 - DNA, 201 bp, Homo sapiens
ccaacatttcacagtgtgtgaaattgtagtctttgttcctgctgacagcacctttgtgctatgaagctattaatgcagccctgtctccgcctgctttttcyagatttcctttgacctcgctgagtacactgcggacgttgacggagttggcactctacgacttctagatgcagttaagacttgtggccttatcaactctgt

SEQ ID NO: 179074 - DNA, 201 bp, Homo sapiens
aaaacaaaaaactttcattgcatttcacagcaacatggaaactatctggcaaaacactgccttttttatatccctggatccctggagcagggcatcaggcyagctgcaaatcgctctatatacacaggcttcaaagtaatgtgttttgacccctgctaaacatgaggtcaaggaaggttcaaagtatagtgggtccaagca

SEQ ID NO: 179075 - DNA, 201 bp, Homo sapiens
atccccccaggacttggcagatcttgggggagaagagtgtcagtcttcacccgtatatctgcgcatttcctgtttaatggtctttcagggcaggcaagttragtgcccagatagaaaggagcaaaatcagtgctttgaaaatttacttagaggcaggtttcgatggtgtaaatctgaaacagagcctaacagtccacatat

SEQ ID NO: 179076 - DNA, 201 bp, Homo sapiens
agagggtttataactgaccaaaaggctcctggtgctgcagacaggcagagaggtggaggccctgccatgccgtcctctcccaggccagcagaggaagcgcyctcaggaagctgtggggacaccgttgccactgcatgagtaacccataataacagtagtagttgccatttattgaatacattctgtgtgtcttctagcatc

SEQ ID NO: 179077 - DNA, 201 bp, Homo sapiens
tgaaatcaggggatgaagtaatctcctgttggagttcagtagagcattataggttttacacaataccatttgtctgtccataaatggttagattgttggcygctactcttggacccaccaggttctgggtagcctttctggttggggcacaaagtgacatcatctggtttaccattgcatttgtagactatgatacttcat

SEQ ID NO: 179078 - DNA, 201 bp, Homo sapiens
acttcatagatgacatgtacacttggcgatcacaaagctgtctggcccatgttattctttgtggagagatgaggtgtaattgcttaaacataaaagacttytgaagcaatacttggtctaatgcaggtgctgattaccaccaaacaaaatgaaatccctcccatctcctgaggtgagatttctggaattgttaaattgaat

SEQ ID NO: 179079 - DNA, 201 bp, Homo sapiens
aacgctgcagtgccagccaacagaagatggtcctgaaccaaaagccaagaatctttcagtggtgttgacagataaaacagagtagttcggcgagacacccrtgaattgcaaaaaaataaaatgtaagtagtattgaagaattgctggaatcacaggaaaagccattcaaaacgagattttggcaggtaaaccagttaacat

SEQ ID NO: 179080 - DNA, 201 bp, Homo sapiens
gtttagagaagtgaaattactttcccatagtagtgaaggatataggatttggactcatgtggtttgaccctggaactgtgtgactgtccattaccttgtgyggctcctttggtggcctgccccttccatcacatttcattgccccagtgagtatttttccagttacattagctgcctttcctggccctctagtttttcctc

SEQ ID NO: 179081 - DNA, 201 bp, Homo sapiens
gcctggccacttccattgccccattgtcgactggagccttattttactcacttctcagatgtcatacctggatcccacttgttgaagctgtcaacgggggrtattggggctaattccaggggcaaaaagggagctctacagcactacacagttgtactgagaaagctattccatgcagcaaatgcattgttcagggttact

SEQ ID NO: 179082 - DNA, 201 bp, Homo sapiens
catggctgccctggggatggggaagggatgctttcttaattgtactctgcatgggagaaatgtttctttctcttaaaagcagttttacctgtttaaaaaaygggctcagctcaaggcagatcacttaaggtgggacggagagggtttggagtgtatattgaagaaaaggagagtgcttataaaggtgggggaggaaaagga

SEQ ID NO: 179083 - DNA, 201 bp, Homo sapiens
gtgtctggcacataatattaataaatattcattaatgttttactcttggctgtcctgaacattagtctgctttgacctagaattcttttcctgaagacacrctataattttgatgagagtaaacaactaactcttatttgcatgttcaaataaacatgtttttatgaaggtacttggtgttcattaacaaatgctatactt

SEQ ID NO: 179084 - DNA, 201 bp, Homo sapiens
caagtttaggaaaaacacaagtgagacaaaagcacctctcatgtctaaaggtttttcccccaaatgcgtgtatcgtgtcatttctatgtaataaccgatcytcatccttgaaagccatgagggcagtggtcacatcctatttgctaaaggtgggagaagatggtgcatcagacccgggattcctggccctctcacatgttt

SEQ ID NO: 179085 - DNA, 201 bp, Homo sapiens
ttatttttaataatttgtttgaatcagggtccgaataaggtgatacattaaattggtcaatgtctcttagcctgtctttaattacctcctttcccccttcyttcctttccttcctttctcctatttttcttccctccccatctctttctctcttctccctctctactgtctctttctccctccttcccccactgatatggt

SEQ ID NO: 179086 - DNA, 201 bp, Homo sapiens
gttgcccccatgctgttcttgtggtagtgagtgagtctcatgagatctgatggttttataaagggaaacccttttgcttggctctcatttttccttttgcyttctgccatgattgtgagacctccccagccatgtggaactgtgagttcattaaacctctttttcttcataaattacccagtctgagttatgtctttatca

SEQ ID NO: 179087 - DNA, 201 bp, Homo sapiens
cattaaacctctttttcttcataaattacccagtctgagttatgtctttatcagcagcttgaaaacggactaataacatcctctctctgtctctttttctstgtgtctctatctctgtatgtgtctctttctcccttccccatcctctcttataatctgtttgttgaggacactgagccatttgctgtgttttgtttcttc

SEQ ID NO: 179088 - DNA, 201 bp, Homo sapiens
ttcatttaatcagaaactctgaagagtgttagtttaccccttctcccccttaagcttgaattctagccttcgtcctcctattctcatagaccccactgtgmtttcttctggtcctgctgtgtcctctaatgctcgctgattggtattctccttatgtgggttagtttttaaagggtgctcttcctagctgccctacactga

SEQ ID NO: 179089 - DNA, 201 bp, Homo sapiens
gacacacgctcttatggtttatagtcagaatccatgtcgagctgcacatgtgaaaaatgaatgtcatgttgttttcaagtagtaagctcaatgtttctaawttagttttttttttttttttttttttacaagttaatctaattttggtataagtggaaaagttgataattaaagaaagcaggtcctttctaacacaaagac

SEQ ID NO: 179090 - DNA, 201 bp, Homo sapiens
ttccttctcagcccagaggaagccttatttaaggaagggaatccacatccttgctctccttctagagctgtgtgcgctttcccacacaggccctccccacrccaccctttaagtatgtcctgtgcctagaaccttgcaggatgaaccattgactatatcttttctataaatgacacaatgggaagaagtaagaaattcctt

SEQ ID NO: 179091 - DNA, 201 bp, Homo sapiens
ttgtatgagcatttgccaccacctaattccttctcagcccagaggaagccttatttaaggaagggaatccacatccttgctctccttctagagctgtgtgygctttcccacacaggccctccccacgccaccctttaagtatgtcctgtgcctagaaccttgcaggatgaaccattgactatatcttttctataaatgaca

SEQ ID NO: 179092 - DNA, 201 bp, Homo sapiens
cccacgctcccctctcactcctcacagttctgtatctgagcacagcagtttggaccccgttgtatgagcatttgccaccacctaattccttctcagcccaraggaagccttatttaaggaagggaatccacatccttgctctccttctagagctgtgtgcgctttcccacacaggccctccccacgccaccctttaagtat

SEQ ID NO: 179093 - DNA, 201 bp, Homo sapiens
agaaacaggcttaatgacttttccagcatttggtctggcgctttatcagttcactttaacaagaacgtaagccaggaaagcctaaaaaatggctgcagccraacatgccctcctccatgctgctgtttgcagctctgtaaatgtatgcctggatggtacagctaaaggacaactcccgaaggtcaaatgaatacacacagt

SEQ ID NO: 179094 - DNA, 201 bp, Homo sapiens
aaaaggggagaaaatgaaatgagactgtgaacctcaaaaaatcatcctatgtgatacagtctgttgaatagcattccccacaatggttttagagaaagtgrtatggaggtgggaggatcccaggcaataaatgtgttaaagaaggatcaaaataacatcgggggaaggaatgaaaactaaccagtgtgattttaaagctgc

SEQ ID NO: 179095 - DNA, 201 bp, Homo sapiens
ctccctctgccacttcctctccactgcctgcaccctcctcgggccagtgctgactgactccatttccctgaggctgcctgagcattgtttgagctctgcckacggacagtcccaccgagtcccgcttcctgagcagacaggaccgcctgctgttttcttctcctctcttattgccccttgtcatgaaaggagaggtctgac

SEQ ID NO: 179096 - DNA, 201 bp, Homo sapiens
ttatctcctgtcctcggggttttgccacctccttccagcatgggtaaatctttacaccctagatccagttattaacagtaaccagtaatttccgaccaacrtggtgctggctttgaagcctggaatgctgaggtcactgacaaccttatctccttttcattaaatggcccccgcatcacaactatgagtcagccacccccc

SEQ ID NO: 179097 - DNA, 201 bp, Homo sapiens
ggtcctgccatactgcccaggctggtctcaaacttctggcctcaagcagtcctcctacctcagcctctcaaagcactgggattacaggcatgagctatcaygcctggccacgtttttgtgttgagataaaatctatatactgtgaaatgcacaaatgttgaactgcagtttgatctgttctgacaaacgcacacactcttg

SEQ ID NO: 179098 - DNA, 201 bp, Homo sapiens
gacagaggtttggagtcatcatgattctcagggtctcctgagatcactcctacagccctcctttcattttcatactgtagtgtttgattatgtaaagtctrccttcacagagaagtctgaagattagctattaatacagctttgtgataatgtagcaccacattcttagaaacttaagacaactttcttaggtatttaatt

SEQ ID NO: 179099 - DNA, 201 bp, Homo sapiens
tctagtgtgacactttttgtcttttttgaaaatatacttttaatctcctttttgaaaagaaaaatgagagttagtgattcagtatagtgagttattttatktttcaagttaagtatcagtggaatttttttttttttttttgagacggtatctcactctgtcaccaggctggagtgcagtggtgtgatcttggctcactgc

SEQ ID NO: 179100 - DNA, 201 bp, Homo sapiens
taaggtagtgaaagactaggtttcatagggaattcacagatgcaagttctgggtctttgttgatggtaagtttagaagccttatcagttttttccctgccrttgtaccacgtatcagcctccagcattgagggaagcacactgttttcgtattatacttgtccagacggcactggtacttccctggatagttaacctggaa

SEQ ID NO: 179101 - DNA, 201 bp, Homo sapiens
tgtttcagtttgggaaatctggatgccaaacgagattggggccatgccaaggactatgtggaggtaggaactgacacattacattcttgaaaatacccgtwtccattgatattctaaatgccaagcgtacagtgaaaaagtgtgacctagaggtgggggcatacaaacctttgccaaggcaggtatgtttacactcatgct

SEQ ID NO: 179102 - DNA, 201 bp, Homo sapiens
gaaggttttagaaaggagccatacctgatagttccctgataactacctgaagcctctgtcccaaaagttatttcttaaatcagatttggacttttaaaacsctttttcctatataaatgtttaaagcacgtaggccaggcacagtgtcttccctgtctgttcctacgtggtctatcgccagactctagcacagtgcccagc

SEQ ID NO: 179103 - DNA, 201 bp, Homo sapiens
gcctctgtcccaaaagttatttcttaaatcagatttggacttttaaaaccctttttcctatataaatgtttaaagcacgtaggccaggcacagtgtcttcsctgtctgttcctacgtggtctatcgccagactctagcacagtgcccagcaactagcaggcacactgtaaacattcatttcttgtctggtcaggtccccag

SEQ ID NO: 179104 - DNA, 201 bp, Homo sapiens
ctaaagtggagagaatttcagctggggaacttgggaagggaggaaaaagtgcaaggtggtgagaaaggcaggagcaaagtgcaggcagcagcaaagttttragcctgtggggagtgcagcctagcggctcatatgcagcctatttatggcaatggtgagacgccaacaggaaggcaggaaggctctggctgtgttgagggc

SEQ ID NO: 179105 - DNA, 201 bp, Homo sapiens
ggcatgagatggccttccattttcacttccagcccagactcctcagtgcccacccatgatctgtgctctggagatcccccttcacctggggattttctttsatttctttgaggctcagctttgtatttaacaaaataggaatagtaatattttacccagcatatactggtttttaatgtggcagtttttgttgtctactgc

SEQ ID NO: 179106 - DNA, 201 bp, Homo sapiens
tgtgagctgggctctgttagcctcttggtttatctgaaacagcttaagaatctgtcttaagcctagcattaaacattgtggtaaatcgtattagaaccccsaagatagattttcctcccaattttaaaattattttttcttacgtgtccttttttagggccacttactggcttctagaggttttataaatgcacgtttgat

SEQ ID NO: 179107 - DNA, 201 bp, Homo sapiens
agcatgccgtgcacatgccatcatgggggtagaaggcgccatttgcacagtgattgaaaagtgccttctgccatcaagacagcatccgtgggatattttakcgctgatgggtgcaggaagctatgctaggcacagcacgggtgactgaaaatgggcaccatagattctctgcccatggggggcttgcattcagtttgggga

SEQ ID NO: 179108 - DNA, 201 bp, Homo sapiens
ttgtttttggtcataacaataaaaaatgtgtgtgtgtttgaacagctaatactgatttctgttatgcacaaaataattagctttgactttagattttgaayagtgcaacatttagatctatttatttatttatttatttatttatttatttatttttgagacagagtctctctctgttgctcaggctagagtgcagtggca

SEQ ID NO: 179109 - DNA, 201 bp, Homo sapiens
tacctaggtcattgattatcgttgaccccgtaatcagcagttcttgactggctaccatcagacttctcttacatgatgtgtgttgggttctaacttatgcrcagcttcacctaatcctaacagagtaaagcttatgttttcatgaccttataagtaaaacttttctaatctgggaagggaatacctgtctgccttttccac

SEQ ID NO: 179110 - DNA, 201 bp, Homo sapiens
gaggcagcaggccagtgatcgccgtaatagtttaaacttagaccagtaaaacggagctattttacaaaaaactgtggcattctaaatcgttgaaagttacrtttcattatttgggagtggtaattagctagacaatgtatgattaaagtattatgaaactaacggatctgacagttctctttgcaaagaaggaggcaagag

SEQ ID NO: 179111 - DNA, 201 bp, Homo sapiens
accctgaaggcttggactgaagagtgaaaaagagtccaacttgtagcaatctgtgggggtagatggaagagatggaagcagagatgcagtggctccagcawaagaacttctttggtaacatctctgcatatcgcaagggctgcattgtgcaggacttgtaagaatgtaggcatttggatgtcattctaattggaatcggaa

SEQ ID NO: 179112 - DNA, 201 bp, Homo sapiens
tacaaggtgcaaagatagcagatttcaattcctctaggactcttgctttaatggcgtattatgagcaaaattaaagtgtattattaaatgtgtcctgaaakaggctggatgcacagtgtacagtcagttttaatgttcatggcataagtatcatgagttaaatttagagttgggaaattatcagatattctgacctcaatt

SEQ ID NO: 179113 - DNA, 201 bp, Homo sapiens
tatttatttatttatttatttatttatttatttatttttgagacagagtctctctctgttgctcaggctagagtgcagtggcatgatttcgcctcactacracctcggcctcccaggttcaagcgattctcctgcctcagcctcctgcgtaggtgggactataggcatgcgccaccacacccgactaatttttgttttttt

SEQ ID NO: 179114 - DNA, 201 bp, Homo sapiens
gaagaaaacctggtagagttattggaatcagcgtaaactacttatatttctttggtataccagttagattctattttaaaaacacatttttttttcgtagygttaaccactgtctccaaatcattacagaaaacattgttttaaaagttatttaaaaaatctggacacataaaaaaaaaatcatagcctaaatgtcacacc

SEQ ID NO: 179115 - DNA, 201 bp, Homo sapiens
aagaagagacagtttggaaagaacctggggtcattggccttgtgtttgagaatgagttggaatgtagcaaagggaaaaagatgccctttggcctgcacatraagatgcagtaattagggcaggagcatttggatctagtgcatctgtgccttggataacgtgccttcatgttacaaggtgcaaagatagcagatttcaatt

SEQ ID NO: 179116 - DNA, 201 bp, Homo sapiens
aatttttatatttttagtagagacggggtttcactgtgttgaccaggatggtctccatctgttgacctcatgatccacccaccttggcctcccaaagtgcygggattacaggcttgagccactgcacctggccctatataggtattatttatccaaactcttctccaagttcaaggaaccaaatcgattaaatttcattca

SEQ ID NO: 179117 - DNA, 201 bp, Homo sapiens
attgtatcaggtttatattttattccattagaaatgggaagccaatggaatgacatttgatttgtattttataaagatttctggctgcctgtgagttgttktgtcagagaattaatttattttgggttcctgttaaggtccaacagagatatttgagtataatactttgttgccatccataaaactaaatattttcattaa

SEQ ID NO: 179118 - DNA, 201 bp, Homo sapiens
tgtattgtggacatgaagttaaaaacaaaaggtaaattagtctaaatatttataccattatgtccaataagaaatgaataatgttgaatatgaagtttttwatatgaattagggaattacattttgaaatattttaggataggaaaatgggtagatgattagagattcagctttatgtataaagatagttgtatgttctct

SEQ ID NO: 179119 - DNA, 201 bp, Homo sapiens
tttcttctctgcagcattacttttctttattgcttaattctcttgtttttttttttttgtttatttgtttcttatccagtgatctctggaacatgattaaraactcatataaacttggaccttttggtcattgaagagtcttagcatactttgacattttagaaaagaaaaacagaattgaaggggacacaaggtacattg

SEQ ID NO: 179120 - DNA, 201 bp, Homo sapiens
aaaacacttgatctctgtttacacatgcctgcagacacacagagaggccctaatcagcggcttgtggacagccttctatcatagctacccacttttctctrtgaccttccctgttcttccactccatgtctatcctgactctcattcacgcatcacggcttggacacttgtgctgcctttatcatttgggaaaacatggcg

SEQ ID NO: 179121 - DNA, 201 bp, Homo sapiens
ttcccaaggaagccctgtgacctctccagtcacccagccatcatgggaccggcggtgacagctttttttttttttttttttttttttgagatggagtctcrtctcgctttttcacccaggttggagtgcagtggcgcgatctcggctcactccaacctccgcctcccaggttcaagtgattctcctgcctcagcctcacta

SEQ ID NO: 179122 - DNA, 201 bp, Homo sapiens
gaatgagagtgttaagtaagtaaggaggaagtcttgtgtcaacgagtagatctgaaagaaggacgctgctgtcatctcacttcccaaatgccaagctagckccactgtgagtgtagtccacatctgggcacaacacttcccaaatgccaagctagcgctgctgcgagtgtagtccacatctgggcacaacaggcccacgtt

SEQ ID NO: 179123 - DNA, 201 bp, Homo sapiens
tgagagtgttaagtaagtaaggaggaagtcttgtgtcaacgagtagatctgaaagaaggacgctgctgtcatctcacttcccaaatgccaagctagctccrctgtgagtgtagtccacatctgggcacaacacttcccaaatgccaagctagcgctgctgcgagtgtagtccacatctgggcacaacaggcccacgtttga

SEQ ID NO: 179124 - DNA, 201 bp, Homo sapiens
ccatctcatttacacacacgttttaattatacagctgaaatgggaaaggttcccttatccccctcgcagagcgtgtgatggtggtatgggttgcttcctcrgtgccccactgctcagacctcttggaggagcatgcagatgggcaggttgtggggctcaaccccacagcagtatctaggggtgaatgtttacagctgaagc

SEQ ID NO: 179125 - DNA, 201 bp, Homo sapiens
actgctcagacctcttggaggagcatgcagatgggcaggttgtggggctcaaccccacagcagtatctaggggtgaatgtttacagctgaagcctctgtgygcatgtgttacagggtgctctttcagtttagccatccataggtggcttgtgttagctcagttagacccctttccttatctccaggacagagggctttctg

SEQ ID NO: 179126 - DNA, 201 bp, Homo sapiens
gtcttggcaccaaaagtaaaacttgtagagtctaattaaggttgtgtgcatagcactaggtgtttatcagtgcagtgagggaaataaaccaccaggtggcycaagtatatagcatctgcgtgttttagtccttgataattatagttttgcagttgctttgtacttcagggagaccatttaatataaaccattgtaataatt

SEQ ID NO: 179127 - DNA, 201 bp, Homo sapiens
actaatgtttgtaagtttttgggcacaaacttatgttttgcttaataaaataaaaacttagacattatttgtgttttggctgaaatcagtccccaattgtyatcttgggatgttatgattatttacttatatatgtatatatttattttggcatatactctccacagttgcaaatgaaattaatagatagatgtttaactt

SEQ ID NO: 179128 - DNA, 201 bp, Homo sapiens
gtccaagaagaatgaggtagtgtggacacttgaaggatggtgaaggtggatgtattagtccgttctcatgctgctgataaagacatactggagactgggtrtttataaagacaaagaggtttaatggactcacagttccacgtggctggggaggcctcacagtcatggtggaaggcgaaaggcacgtcttacatggcagca

SEQ ID NO: 179129 - DNA, 201 bp, Homo sapiens
atatatgtatatatttattttggcatatactctccacagttgcaaatgaaattaatagatagatgtttaacttcactgttgaaatttaaactgtcagcatkatttattatttatatatttatttttattaactttttttttttttttggtagagacaaggtctttcttatgttgcccagggtggtttcaaactcctggtat

SEQ ID NO: 179130 - DNA, 201 bp, Homo sapiens
tagtgtggacacttgaaggatggtgaaggtggatgtattagtccgttctcatgctgctgataaagacatactggagactgggtgtttataaagacaaagargtttaatggactcacagttccacgtggctggggaggcctcacagtcatggtggaaggcgaaaggcacgtcttacatggcagcagggaagagagagaatga

SEQ ID NO: 179131 - DNA, 201 bp, Homo sapiens
ttttgtattgtgaatattataatgccatttctctctgctttaatgttcttttaaagaacattcaaagattacagtgatttaaaaaattaaccttgaactcragaagaactcaatggagaatacagaagcaccttaatcaatagatgccttttcctcccctcacacacacacacagtccaaactgctgacagagctgagatt

SEQ ID NO: 179132 - DNA, 201 bp, Homo sapiens
ctctgaagtcaagttttccctctccagtcaaaccacgtttctctcttctactgactgagtctggggtctttataggcagaggatggggtacaggacgggcyatcggtagttttgaaaaaggcaacatttgatgggcaaaaaggcattattccgaaggaaccattcaggagagagtgggcaaacaggagtagagttgtcgcc

SEQ ID NO: 179133 - DNA, 201 bp, Homo sapiens
aaatgaaaagcaagttgtttgccaggagaacttgcatctcagtattcagatgtggagaccctgctgcctagggtgtggaggaactgctcagaggccacacyttgggagcatccctgctgtggcagctgcagatgcagactgtggcacgtggatggcagtggagactcagcaagcactggtggtgtgctgttggtgtcattg

SEQ ID NO: 179134 - DNA, 201 bp, Homo sapiens
attgtgtgatgcttaggtgtggagcgtgaatgaatctgtcactcaggtagtgagcatagtgcctgatatggtttggatttgtgtccctgcctaaatcttaygttggattggaacccctggtgttggaggtagagcctactgggaggtgattggatcatgggggtggatctttcatgaatggctttcatgaatggcaccacc

SEQ ID NO: 179135 - DNA, 201 bp, Homo sapiens
tcccatttccccctcccgccctgggtcccccagtgctgcctcctcctggtgccctccccgcagcagttgtgggtgagagtggtggtgtggggctagggtcyggagccactgatgttccaggcctgggagcgggtcctgcctggccacatgagggtgggggcagcacagtttgctgccttggggacacggggcacaggggac

SEQ ID NO: 179136 - DNA, 201 bp, Homo sapiens
cttgtgcataggccagactcccgggatgtcagccgcatgtgatgtggagataactgtgatcttattatctgaaatgtttgaatacggagagggtcccagtyttcattagaaagaaacttaaccaggacagtaaatatgttcaattcctcttaaaatgtccaatttactgataagtggggcacattttttttcatttaaaaa

SEQ ID NO: 179137 - DNA, 201 bp, Homo sapiens
ggtcagaagaatgcagcgtcagacagagcacagttaaccccagaattttgcatcaccactgttccattgcctggtgaggtgcttagattctctggcaaacstatttgaacaggagggttttcactttctggaaaggtacccagtctggtggtgatgaaacaggttttctctctgtactcccgggtgaaccctctgcagtct

SEQ ID NO: 179138 - DNA, 201 bp, Homo sapiens
caatttttcatttttaaaggattttaattctttcagcatgttcatatggttttataaagccccagatacccagcaaatccccttggtgttgtaagacaagwttgctgttaaaaaatgtttaggcttagtcagcttcttctcactgctgacttcacgaggggctctgggaaatggtgtttatactgagcttaaattgatagg

SEQ ID NO: 179139 - DNA, 201 bp, Homo sapiens
atagtctatgtattataggactcaacttgacataccaaatccaaacctaccagatatattaaggtgatatttagaaagtagttcttatttgagctcaggaragctttttcacacagcgggcttccttgtagcctgaagacatgatgatatgtacacagaccctgtttttctagggctgtttagctattatgtgtagcaagg

SEQ ID NO: 179140 - DNA, 201 bp, Homo sapiens
tataatatctaatacaatgaaaatgctatgtaaatagttgttatactgtattgtttagggaataatgacaataaaggtctgtacatgttcattacaggtgyaaaaccatccattttttttccctcatatttttgatctgcagttggttgaatcctcaatgaggaaccgatggatataggggccaactgtattcggttactc

SEQ ID NO: 179141 - DNA, 201 bp, Homo sapiens
caggaggagatctgtgccatgaagaaaaataaagcagggtaaaggtgatcaaggaaggcctctctgatgagacatttcagcagagccatgaaggaaatgarggagcagggcacacggatcttcaccagtcaccgggggactcctgtgcaaaggccctgtggcaggtgtatgctttgccagttgaaggaacagcagtggggc

SEQ ID NO: 179142 - DNA, 201 bp, Homo sapiens
gcagcacagagcatcaccagacatctgtaccagctgctaaaccacagcaacagcacacagcagcaggctttccgtctccatctgtgaggccttgtgttgaytaaaaggttaccgtacctgtatcttgtgtttggtgggtgaaaagaaacatcagaagtattgaaggaccgggaaattgagtcctctagggataaggaggcg

SEQ ID NO: 179143 - DNA, 201 bp, Homo sapiens
caggggcaaggataaaagcaaggaaaagggagcttggtttcctgctcttctaggagagatgatagctaaaatctcttctagggaactttgggacgtttcakttaagtaggtgagaacaagaagcaatatgggggtgctttggtgaaggaggtcccacagttcagactgagctgggctcctaaatgaaaacagtggctgcct

SEQ ID NO: 179144 - DNA, 201 bp, Homo sapiens
taaaatctcttctagggaactttgggacgtttcagttaagtaggtgagaacaagaagcaatatgggggtgctttggtgaaggaggtcccacagttcagackgagctgggctcctaaatgaaaacagtggctgccttttctgagccaacgacctgcacggtgcttctgtgcgttgccatcacttcccagcatccctaacgaa

SEQ ID NO: 179145 - DNA, 201 bp, Homo sapiens
tgatcataatatttgcctccctgcttcatctgcaaaagaacatagttaaagtcattggtatgtgataaatcatgatattcacatatctaaactgtatgaawccattattaactagctaatatgagtattattaccttgagaatttggtattaaatggtgttttctcataaccttacctagataacaaggtaaaactgtctc

SEQ ID NO: 179146 - DNA, 201 bp, Homo sapiens
cacatgagggtgggggcagcacagtttgctgccttggggacacggggcacaggggacccacctttgccattgctgctcctgcagccgctcctgctgccgcytcccgccaccacccacgcctcccctgccgtggacagccccctgctgccatcaataggactgttaagaaccttctttgtgataggcagtgataggtgctgc

SEQ ID NO: 179147 - DNA, 201 bp, Homo sapiens
agaaccttctttgtgataggcagtgataggtgctgccaagtggaggatggtgccactggtttccttccccaagagagtgcagtcttttttgcaaaaaaacrtgtgctgtgtcagggagggtgaggtaacttggccgctggtggaatccagaaaaaagtattctctcccaaattgtggcagcctcttggggtcctgtccgag

SEQ ID NO: 179148 - DNA, 201 bp, Homo sapiens
atccctttgttaaaagaacattttaaggccgggcatggtggctcactcctgtaatcccagcactttgggaggccgaggcagtcggatcacgaggtcaggakatggagaccatcctagctaacacggtgaaaccccgtctctactaaaaatacaaaaaattagccggtcgtggtggcgggtgcctgtagtcccagctactct

SEQ ID NO: 179149 - DNA, 201 bp, Homo sapiens
gaatatgatattctcattaattcatttactcatgttgcaaaattcactaaaatccctttgttaaaagaacattttaaggccgggcatggtggctcactccygtaatcccagcactttgggaggccgaggcagtcggatcacgaggtcaggatatggagaccatcctagctaacacggtgaaaccccgtctctactaaaaat

SEQ ID NO: 179150 - DNA, 201 bp, Homo sapiens
tttttcgttgttgtttgttttctttttgcttgggactgctataatgtgaatatgatattctcattaattcatttactcatgttgcaaaattcactaaaatycctttgttaaaagaacattttaaggccgggcatggtggctcactcctgtaatcccagcactttgggaggccgaggcagtcggatcacgaggtcaggatat

SEQ ID NO: 179151 - DNA, 201 bp, Homo sapiens
gacttcagcatactagtcgcttccagctaatcacctccatgcaggggagcctagactgaaacattgttgcttttcattattttggagaataatttaggtaraattactgtttaatttttgtatttcctatttaagaaaacctgtttctttacggccctttgactttcattttctctttttcttcccactgacctggcggct

SEQ ID NO: 179152 - DNA, 201 bp, Homo sapiens
agaatactaaatgcattaagtgaatttctcaaggtggatgggaaggttttggggtttttttttgaggagaagtaataatacatagtagatttttgttaaasttttgcttttctacatttaaatataaaccttgaaaaggagaaataggaagagttgaccaagtattgaagtccctttttttttccttttggcttttttatg

SEQ ID NO: 179153 - DNA, 201 bp, Homo sapiens
attagaaagatgctagttttaaagtaatgtttaatactactaaacattaataccagaagtattaataccagtatactattatcattaattttttcctcttrtagtatctgttgctgaatttcctaatcatatgcttatatcaggtttgttacatcattgttattattgaaattattctccattagaagcttaaacatggaa

SEQ ID NO: 179154 - DNA, 201 bp, Homo sapiens
tgcaagatctcccctcgtttgtgacaccaagatgttcctatggagcccacccagcccctcccgaccacctgcattcccaaggaagccctgtgacctctccrgtcacccagccatcatgggaccggcggtgacagctttttttttttttttttttttttttgagatggagtctcgtctcgctttttcacccaggttggagtg

SEQ ID NO: 179155 - DNA, 201 bp, Homo sapiens
gtatttagtggcctagataaaagttttactgtgcatgtgtagaagcgcctcactacaacatgtatcttgacacttaggtccataataatgagtttctaatkagcagaacctgggtaatagacactgaagcgaaaccagaaagatcctgcttttaacacagtctaggaatgtatttacatccgatagcagcttggcacaagg

SEQ ID NO: 179156 - DNA, 201 bp, Homo sapiens
tgtgcatgtgtagaagcgcctcactacaacatgtatcttgacacttaggtccataataatgagtttctaatgagcagaacctgggtaatagacactgaagygaaaccagaaagatcctgcttttaacacagtctaggaatgtatttacatccgatagcagcttggcacaaggaagaaagtgttcaggagtttggccatctg

SEQ ID NO: 179157 - DNA, 201 bp, Homo sapiens
ataataatgagtttctaatgagcagaacctgggtaatagacactgaagcgaaaccagaaagatcctgcttttaacacagtctaggaatgtatttacatccratagcagcttggcacaaggaagaaagtgttcaggagtttggccatctgtttgctgcagtttatgcctttatttggaggcagttagcagaagacccatgag

SEQ ID NO: 179158 - DNA, 201 bp, Homo sapiens
ctgggatggggaattatttaggactgctgaagaaacagactcagaaggacttgatgagcagttgactaatggaagagtgagaaaggaatcaaagaggactyccgggctactgggtgcagggtgagaccattcaccatgcagggccatccagaaagttgtgttagcttggggtaaaaggagaagcgaactagagttaatggt

SEQ ID NO: 179159 - DNA, 201 bp, Homo sapiens
aaccccacagttataaagaacctcaaaaagttatagatatgattcaagcagagaggctaagtcactagtaagaaagccataatttctcttccttgcatttktcattccttagtattactttatattgtatgtcgacaactaagacagtgttttctgactggcacacaattcttagaagtcatcctttatttctaattgtgc

SEQ ID NO: 179160 - DNA, 201 bp, Homo sapiens
tggcctctttctgaaatgctgatacttggttagccttacactcatcacccaatactagaaggtattgtgtctggccacagagcggctctcttttcttgatrggtttgaggtgtatgtgcaaccactgagcacctgtttgcgaggctattgcccttgaaaggagggaaggggtggctatgtaaagagtatcttagctgctgg

SEQ ID NO: 179161 - DNA, 201 bp, Homo sapiens
tgctacgcaggttattcaatattttgaatttcacccctagtttcacacaatatttttgaaattcagtttttattccagctctacatgtgcgtatgataaasaggcctgtgtccagtttaggtcatgaaatcttagacttgtggaagctggtcagttttgaggtccagcttcctatgcagtgtgggttttcttctcctgtgg

SEQ ID NO: 179162 - DNA, 201 bp, Homo sapiens
tatactgcctttgactctacaatagtaaaagaaaatagacatcttgagtttaagaatcaactgggtaagtataagtcaaataggactcctattttccttcrcctttggtcctgcagtgccagttaatggtgtaccagatctatcagcaatatcctctttccagtcttcatacccttgggatgcaccgttctttctaccaag

SEQ ID NO: 179163 - DNA, 201 bp, Homo sapiens
tgctcgacttcatgaaacactgctcacttcacaaacatgtgaaacaacttagctgaagtaatgcagctgggaagaaccaaatttctgacatcaaagtctgwttttaaccattgctgcattgtcttaagtgcttggaattctttccacagtgagataaaatattaagaaaaaaaaattttttttaagaaaaatgggtttttc

SEQ ID NO: 179164 - DNA, 201 bp, Homo sapiens
cctggctgcctggccacttccattgccccattgtcgactggagccttattttactcacttctcagatgtcatacctggatcccacttgttgaagctgtcarcggggggtattggggctaattccaggggcaaaaagggagctctacagcactacacagttgtactgagaaagctattccatgcagcaaatgcattgttcag

SEQ ID NO: 179165 - DNA, 201 bp, Homo sapiens
aatatatcccctaaacaagagaaaaagaaccaatcaaaatcaacccagaactgatgcagatgttagaattagcagtagagatgttaaactaatttttagarccttattctgtatgttaagaaagttaagtagaaggaagatataaagaagacactcagattgaacttaaagatgaaatctataatgtctgtcatgaaaatt

SEQ ID NO: 179166 - DNA, 201 bp, Homo sapiens
tgggatacaaaccccagcagtcataagtcaacatgatgtattggccctcctcttagcgagggttggggtggagctgtcacagagccgaagttatctttcayagagaagcgatttccccagattgaggttagggtcaccagatgggcagtgaggcggacattatctgctatccaatgtccagagctccaagaccctgagtgc

SEQ ID NO: 179167 - DNA, 201 bp, Homo sapiens
ctgccctgaggcactctaatgttcttatcttccttcttctggtttttcatgtctacacctttttgctctactttctgggagattagatttcctcaactgtrtcttcaaaatcatctcttggattgtgaatttctatgttttgttttcaacttctaaaatcctgtgtttcacattatttctttttatgtagtatcctgttct

SEQ ID NO: 179168 - DNA, 201 bp, Homo sapiens
atgcagacgctatggcctcagttctcccctttcttcttttggaggggcctggtgggatggagcatggcagcatcagaggctaccctgttctcagcaaaggytggctttaaccaacatactccacgcatgcatgcatttatttatttatttgaggcagggtctcactctgtcatccaggctggagttgcagtggcacgatct

SEQ ID NO: 179169 - DNA, 201 bp, Homo sapiens
acgcctggctaatttttgtatttttagtagagatggtgtttcaccatgttggccaggatggtttccgtctcctgacctcgtgatttgcccaccttggcctmccaaagtgctgtgattacaggcatgagccaccgtgcccagccagtcttcactttctcaagaaaaccatcaataactgagacctattccttcctcaggtct

SEQ ID NO: 179170 - DNA, 201 bp, Homo sapiens
ttaatccagtcttccaatgatggacatgtatgttgtttccacatctttactattgtgaatagttccgtgataaacatataattggaggtatcttttttatrtaattgtttcttttcctctggatagataccaagtagtgggattgctagatcgaatgatagttctattttcagttctttgagaaatctctatactgttttt

SEQ ID NO: 179171 - DNA, 201 bp, Homo sapiens
taagtggcaaaacctaaacccaaatccatctgattctggaacttcatgctgtctgttgatgcatatcactttcctggatttcattttcatcctctgtcttytgtggagctcaaatgaatactgtttgtgaaaatgctttgtgtatagtggaacaccatgtggtatttattgacattattggtgttatttttattttaggtt

SEQ ID NO: 179172 - DNA, 201 bp, Homo sapiens
tgagagactcaggaccaaggcgaggaattggaacactataaaccccccaagaggggagtgggccttgcagagagttccagaatagtgcctgatcagcagtstctcaggatcatcaaagatcctggcttcaggagctggaatgttacttgctgtgcttcttggaaaaagagtcacaatgtgtgacatttctgacctcaagga

SEQ ID NO: 179173 - DNA, 201 bp, Homo sapiens
accttttaattggggagatagatcataaataagtaaacagataaaagtttaaagttaacgtgaaatgaagcaggataaagacgggtggataaggatagaayggcaaggacgggatgtttttagcgagggaggcagggcagtggtgaggggcacagcatacagaggggtcagcagcgtgaaggctccaggcaggaccagctg

SEQ ID NO: 179174 - DNA, 201 bp, Homo sapiens
taataatacatagtagatttttgttaaagttttgcttttctacatttaaatataaaccttgaaaaggagaaataggaagagttgaccaagtattgaagtcyctttttttttccttttggcttttttatggacaacggtggtttttaattttatcccttatcaattttgctattttgactaatttagtaagttcaaattatt

SEQ ID NO: 179175 - DNA, 201 bp, Homo sapiens
aaaacaaggaagtattttatctaggccagggaaataattgggagcccaactagaaatcttagcagattctctatataggacatcgctgttagtggagggcktagggatggatccaggaaacctgagattactgcttaggtctttgaagaatggagatcacttaacctttatgggctgtggtttttcttctctttaaatata

SEQ ID NO: 179176 - DNA, 201 bp, Homo sapiens
aatcctcctggcagaggtaacaagctgttttgtgctcatgcaccttgctcccttcatttgacactgtttcctgatggatgggatttctggaccctgggtcytaagcttcatgaagcctctggaggccgatcttgaagacagctcctgagaaggaaggcctggcagcaggttccagggggtggatcctgcagccagtgtagc

SEQ ID NO: 179177 - DNA, 201 bp, Homo sapiens
gtagcagagctgggattcaaaccagagtgtgtctgaggcccaggccttcctcatggtttctttcagcatcctaagttaggttgaagagagtgaggaggaaragaagacaaagaaacccccagcacagccatcctcagtgggatgcatctggaactgaatatgatttgtttgactgtctggaagctgacacgctccagatta

SEQ ID NO: 179178 - DNA, 201 bp, Homo sapiens
taattaaatccagggtatatttcaccaaagggaaataaatttgacagctaacaaccaatactggattaccaccttacagaggttagggatcatgctagtarttgtaggtggtttacagtttttaacccagtactaatcgggaggatgattgcttacagttacagattaccatactaaagaaagttaagtcttatgagccaa

SEQ ID NO: 179179 - DNA, 201 bp, Homo sapiens
cagaggaactgcttggtcagtccacctgcagttaacctgttctttgtaatgggcactggtaggaaattgtggtgttacaatgcatctttctcatctttaartgtgatcagatagatgggtgtatcaccttaagtttcatttctatttctaaacgatgggtgttttgagatagatgagtgtttcaggatatttgtatgatct

SEQ ID NO: 179180 - DNA, 201 bp, Homo sapiens
taaattcagctgtgttctaaagcacatgttccaaaacttctctgtacataaaaatcaactggggctcattaaaaatgtaaatttcctaggtccctaccccycaaagagattggttcagactgaatttttaaggaagatcccagataattctgaggaatagggtttgccctataataacccatgccctaggaactccagcct

SEQ ID NO: 179181 - DNA, 201 bp, Homo sapiens
ctattcatatggtgtgaatatgggggcagagattggaccacaagccaaggaatgccatcacatgctgagacagcatcagggttctcctgtagatattctcraaggagcatggccctgttggatattaaccttcaagcctccagagctgtgagacaggaaattttggttgttcgaagccacccagtgtgtgggagtttgtta

SEQ ID NO: 179182 - DNA, 201 bp, Homo sapiens
gggagacattagcatgtccctggagacagtttccccagctctggttacgcggatcagtatgtagggaaagcttattacttttagaaacgttcctcttggakggccctgtctattacccacatcaaatatatggtacacgttgctgttttctttgctttcgaaatgcttcagaactagcccctccatctttccctgactgta

SEQ ID NO: 179183 - DNA, 201 bp, Homo sapiens
attagctaggggtggtggcacgcacctgtaatcccagctatttgggaggctgaggcacgagaatcgcttgaacccggaggcagaggttgcagtgagccacrataacagcactgcactccggcctgggtgaaagagcgagactccatcttaaaaaagaagaagaagaagaaaatctgctctaggttttaatgaaccacagaa

SEQ ID NO: 179184 - DNA, 201 bp, Homo sapiens
tttctgcttccttttagcagacaagtactttcaagccccagaggtataaggaaaaaattatgggaaagaactttggaaacagatgtctattatttgatttkagccacagaaagccacagtcttaattagtggaaccctggtgttccatgggaggagattttgagaaccaccaaacttgtctagtcagttccttgtcaccat

SEQ ID NO: 179185 - DNA, 201 bp, Homo sapiens
gcctaggactcttcagaatgaacttatggaagagagctgtggcataggagcaggagaaggtacaagttagggagcagtttggtattgcacttcatctttarttcagctttgttgcagggatcaagactgcaagttaaagggcaagttagggggcacctctgtctttaatgagatcataggataaaggcttatttatttgtt

SEQ ID NO: 179186 - DNA, 201 bp, Homo sapiens
tttccattgagacttaattgtagataccattaacattgtaatgtaatcattataataatgtctaacagttactgagtacttactgataaccagaaaacctrgattttctcctttaaacatcaaagcttttaggtactattactatccttattttacaaacaaggacatagtgatgttcttacatttctgtaagaaatgcca

SEQ ID NO: 179187 - DNA, 201 bp, Homo sapiens
ggggaggtgacgatgctggaacccagatcagagatccagcgagaagacttactttgcagggggaggtgttgaggtgttccgtcacactcccggtgccttcrggatatctgtgctgcaaaatgagggaggcagttggagctggaggcctagtgtagagaaaagaggtcagggctagggcctagatgtgcaagatgtgcaaga

SEQ ID NO: 179188 - DNA, 201 bp, Homo sapiens
tctagtcattgtcctgggagggtgcccaagggggcccacgtggcgagggctgcgtagaagggcctggaggtcagcactgacctccagacataggagtgaayggcctttccaacaagtacagctgccagctgtggaatctcccagctcaggccccagacaacacctctgtccaaattgcgggcccaaagaattcatgaccat

SEQ ID NO: 179189 - DNA, 201 bp, Homo sapiens
gatggatacaaagaatcagagcttgccaggagcagcagctgccactggagccagcattgggtgggaacattgggagggtgattgactaagggctacagackcggtgtggactagcttgaggggagacctttgttagggagaacagagtcctctgggtatatttcaaaatggttacttttctcctcctcctgccagaagcac

SEQ ID NO: 179190 - DNA, 201 bp, Homo sapiens
atgttgtcacctctaaataaatatagtcattgtcctggtctctatttatattttaaaactctttcccagcccaccccgatggcctaaaacaattcatatayttcagtagaagagggtgtcacagggctatttgcacaggtttggatccagtgccagcgttagccttcacacaagttacactcctctgagatgtaactgtct

SEQ ID NO: 179191 - DNA, 201 bp, Homo sapiens
cgttcatgacactttgcctttatgggcccctttaactcgaggatctcaaagggcctcagcagtatgaccttgcgtgtcctggccgggcgcccaagggaggraggccagaaggtccacgctgctttccgtgtgagaagtcaggtcacggtgccggatcagaactaacacctggcctgcaccctcattggtgtggtactttgg

SEQ ID NO: 179192 - DNA, 201 bp, Homo sapiens
tcatactgtattataattaaaaagtcacatttttactgtactttttctgtttgggtacacttaaatacacgagtttaggcatatgttattttattgcttcrtagatattgcttttttcttcttttcatactgaaggtgtgtggcaaccctgcattaagcaaatctgtaggtactattttttcaggtgttcacctcctgtct

SEQ ID NO: 179193 - DNA, 201 bp, Homo sapiens
attcaaatgtaagaagaaaaactataaaactcataaaaatatataggaataaatcttcatgaccttggattaacgaagccttctcgaatatgacaccaaargcatctgccacacaagcgaatgtagacaaattggacttcatcaaaattaaaagataaaaaagcttttatgcttcagagagcacaaccaagaaagtgaaaa

SEQ ID NO: 179194 - DNA, 201 bp, Homo sapiens
atgtgatatgaaataaataacttctcttgcctgttatcaagaagttggtaataggaagaactaatataaaagacattaaaaatcaggccgggcatggtggctcatgcttgtaattccagcactttgggaggctaagacaggaggataacttgaggccaggagttgtagaccagcctgagcaatatagtgaaacctcatccc

SEQ ID NO: 179195 - DNA, 201 bp, Homo sapiens
tctaaatacgaccacattggagtcccacatgctcttccagagccttgctacccccatcaggagatggagcctccttccctgccgaggatgctgggcaggayggtcatggctgcccagatgaagagaagacagggctggtgctgaggcaggtcgtggcaggcaacactgccccacctgacttgctctcgtgggatctagtca

SEQ ID NO: 179196 - DNA, 201 bp, Homo sapiens
taaatgataaaacattttcatggagttattaaaatcacatcattctgcatagattatatgaccttgagcttcactagaaagactttccaagaccttcaccrtctccaaattctcggacggcactggaatatcacgctgaagcagcagcacgctggttttacgtgaatttttttttcctttaccgctgtcatatttaacatc

SEQ ID NO: 179197 - DNA, 201 bp, Homo sapiens
cagcgccactccaggtagtgcctgaaccatcacaaactcagggccagagttcagttcatttggccccagtgtgtggccccagcctgggatgctgaggtccyctcctgcccatgaagcctctgctatgcttgctcaggctgtgcgaggggcttgtcttaagtctttgcatcctattcccagagactggagtcccactctttc

SEQ ID NO: 179198 - DNA, 201 bp, Homo sapiens
gtttctactctgcagtctgaattctgtctttggtgtccaggaaaatgtttttataccttcttcacattaaaaatgtttcaagtatccaggacttgttcgcyctcctttttcatgtatttagatgaagagactttgcatattaattttgttgtttaaaaaagagtcaaaccaattgatactaaaattaaaaagctaacaatt

SEQ ID NO: 179199 - DNA, 201 bp, Homo sapiens
gaaccaggaaatttgccttctgttcctgctcagccgccgcgtgaccctgttgcaggtcagtcctccaagcatgtctcagtttctccatctgtaaaattagwcaatgaaatgaatgttatttataagaaacctgagggaaatccttctgattatcttcactgaaacaatgcgaatgaatatttttgtgggggctctgccttg

SEQ ID NO: 179200 - DNA, 201 bp, Homo sapiens
ttgctccagaatagcttctacttacattacataaatatagcactttattccccaaacattgccggtgcatttgtctctccttttgctcatgctgatgatcmctgccccctttagaatgtctcatcctcacctttccaaacccccactcccccagtccctatcccccacccctgcccacccccatggaccctactttttctc

SEQ ID NO: 179201 - DNA, 201 bp, Homo sapiens
ggaaccaggaaatttgccttctgttcctgctcagccgccgcgtgaccctgttgcaggtcagtcctccaagcatgtctcagtttctccatctgtaaaattakacaatgaaatgaatgttatttataagaaacctgagggaaatccttctgattatcttcactgaaacaatgcgaatgaatatttttgtgggggctctgcctt

SEQ ID NO: 179202 - DNA, 201 bp, Homo sapiens
tgctattttgattagattaaaaattcattaaaaaatgtgtcatttggctgtatattataaacagtagtaaagtttaaaaatatattcaggtttaatctttmctaaaaacaccaaaatgcacgttgtattctaggaacaggaaataatatgttaattccacttaggaggaagggaacaaaccatacttgtttcttatttttt

SEQ ID NO: 179203 - DNA, 201 bp, Homo sapiens
acagggcataaggttgaagtaataacttgactttgcttggccatctttttttccttttaacccaaaatttactttaaggtgaactggtatttttatttccyaaataataagttccttgattcttgatgactgaaacttaagagttgttgtcgtttctgttatacaggacctctgtgactaattattttgtaattagccatt

SEQ ID NO: 179204 - DNA, 201 bp, Homo sapiens
ttcagaaggaagatcagtagactccacacagtcattttagccattagactagtgttgtatgcattagtgtaattttgatgccttgtgggttttagatatarctgggaattccttaaaaaacaaaaaatctgtacctcagagtctttggtagcatgtagaagtctatgtatgaaaatacattcatttttgatgatgatgatg

SEQ ID NO: 179205 - DNA, 201 bp, Homo sapiens
cctctccagtatacctaattgcagtctgcaggcgtgaggcctgagaatttgtattttttaaaagtgccacaagggtctgaaaatacactaagagtagtctrtaacctggaccagcttcactttttatcctattttttgaagatctatcatactgaaaaatgacaagtttcatactttttcttacatagattttttttccta

SEQ ID NO: 179206 - DNA, 201 bp, Homo sapiens
cctggggtttagggatccctgcttgagcacacagcagtcgtgatctaaggatcatttgttgggcatatagtaacaccattcttcctacatttttgagccayttgaataaacattcctcactgaatcagatcacttttttactgacttactgtaagggaatgggtaaagcatctgatgagcgtatcaaacatcactacagtt

SEQ ID NO: 179207 - DNA, 201 bp, Homo sapiens
agaatctgtagtaagatgtcacccatggcagccaagcagaagcttttatcacagcccaacaagtaccagcgtgtcttggcggcagggtggcaggacactgygaggaggcaggtgtgtagacacagtcctcttctgcattggcacatgccctgtgctcatcgcctctcggtgggggaggtgtgtgtgtgtgtatataggtgt

SEQ ID NO: 179208 - DNA, 201 bp, Homo sapiens
ccaggcattcaatgaattcctcttcagggagttttctaaatgtgcagaagtggggagtcttcagcctatgcctgattcctggttaatctgacttttcctgmatgcaggatataggtggaaaaaaatgggaaataaacctggaaaaggaggttgggatcatattgaaagatactgggctgggcatagtggctcatgactgta

SEQ ID NO: 179209 - DNA, 201 bp, Homo sapiens
ttatggtgggggttgctggtgagatcccctggcctctctgcctggggctgccagggagctggcggatgccactctccaccggaggccttccctggcagtcrtagactgttcccactgtgcgcctgggtctaccgcctggtcctcctcacctggagccacactgatttccatcttgtcctgaatggcagagctttcataatt

SEQ ID NO: 179210 - DNA, 201 bp, Homo sapiens
tgggaggctgcagtgagccatgatcgtgccactgcactccagcctaggtgacagagccagaccctgtctcaaaacacagtggtcagatattggaggtcagsgtgagagtttggcttttatttggcaagtaatggagggtcctgactaagggactgtcacagaaaagccctaggtggaatgagcacggaccccagagcaggg

SEQ ID NO: 179211 - DNA, 201 bp, Homo sapiens
cagcctgggcaacatagcaagaccttgtctctataagaaatacaaaaattagccgcacactgtggtgcgtgcctatagtcccatctactcaggaggctgaratgggaggatcaccagcgtgcagggaggtcaaaactgcagtgagctgtgatcgtgccactgcactccagccttagtgcatttctgcacagacacactgag

SEQ ID NO: 179212 - DNA, 201 bp, Homo sapiens
ctcaatctctttcatgtgggctgaccagaaatgccagcagtgaggctgagcttggtagcagtggaggcctgaggaggcgggggttggcagaggagctcgtytgggctcagacactgctgcctctttctgtctgaaggtgttatgaagtgtacctatcttttgggacatagattccttttactccttcctttgtatttgtca

SEQ ID NO: 179213 - DNA, 201 bp, Homo sapiens
caaaaaagaaaaaaagaaagaaatttaaaacaatgtaatttacattaacacccccaaaaaagaaatagttgtaagtctaaaaattatgtgtaagatctatwtgaagggccagccatgttggctcacacctgcaattccagtacttttggaggccaaggcaggcagattgcttgagcccaggagttcaagaccagcctgggc

SEQ ID NO: 179214 - DNA, 201 bp, Homo sapiens
acttttggaggccaaggcaggcagattgcttgagcccaggagttcaagaccagcctgggcaacatggtaaaaatccatctctattaaaaaaaaaaaaaaawtagctgggtgtcccagctacctgggagactgaggtgggagaatagcttgagcccgggaggttgaggctgcaatgagccgtgtgaatgcatcactgcgctc

SEQ ID NO: 179215 - DNA, 201 bp, Homo sapiens
gcaaggtggtgagaaaggcaggagcaaagtgcaggcagcagcaaagttttgagcctgtggggagtgcagcctagcggctcatatgcagcctatttatggcratggtgagacgccaacaggaaggcaggaaggctctggctgtgttgagggcaggtttggatgcccagcagagggcttccaggtggcaatctgcagtccacc

SEQ ID NO: 179216 - DNA, 201 bp, Homo sapiens
ggcaggagaatctcttgaacctgggaggtggaggttgcagtgagccgagatcacaccactgcactccagcctgggcgatagagtgagactctatttttttyttaaaaaaaaaaaaaaaaaaaaaaaagatggaaactgcccagatttcaagagaattgaggcttgctgcgctccccttagtttctgaagagcagggttcca

SEQ ID NO: 179217 - DNA, 201 bp, Homo sapiens
gtggttaacaagcagacaagtgttctgcttttaagttgatacttgaatgaagaagactgaaataaaggaagatactaataatttcaacaaatgataaaaarccatgaaaatcatcttaggaatagagattgaaatgagcttggggcattgcattaagttgttggtaagaaggccttcagaggagctgaaaatggagaggag

SEQ ID NO: 179218 - DNA, 201 bp, Homo sapiens
cttttagtatgtgtatttgaagcttattaatgtgaatgagcaagcttccttgtcagatagcttatacctactgaatgttttcaaatttctctctaccttgtattttcagtagtaataaaattaccacctcttaaaatagccaagtatttattgtagcaatgttatcactacctatgtaaaacatcatggcttctcctaagg

SEQ ID NO: 179219 - DNA, 201 bp, Homo sapiens
ctgtatatgaataaatcgaattaatggtggtattttgttgggtccccatgatacagtcatcagtgaacacctgagctttggaatgagacaaaattggaatycagtcataaatcagtcgttttatgtgatttaagactcctaaataagctctctgaatccatttccttatctggcagtcataaaaatattatttctctaagg

SEQ ID NO: 179220 - DNA, 201 bp, Homo sapiens
agtccaaagcagaggatacaggagaatgaaatcgttactgggagtgaggatattaaaataacagctaaaaaatattgagcacttaaaaagtaccaggtacktaataggcattatatttcatttaatcctcacatcctaactgttaaattttgtccctgctttaaaaggaggccctaggtgtggagagttcaagtagtttac

SEQ ID NO: 179221 - DNA, 201 bp, Homo sapiens
atttttaagaggtaagaaaatatatgctttgtagaatttttatgttttctgtatccaatgaacatgttctcccaagagtcatgatgttttgaaggatgctmtacaagttaaacgtcatcagcgatcttctcagccaatgcgttgctttggcacatgtaaatacccactaggcattgtgtcctgtgtgcaactctgaaatgg

SEQ ID NO: 179222 - DNA, 201 bp, Homo sapiens
gagcccagctgggacaccttcagtcctaccactctgctgccacagctgcctggagccatgcctggcgctgggctaggaggcacagtgcggggtccccaagrcaagaagcagtctcaaggtgttatgcgagcaccagcaggcctggcagaatggcaagcagtagcttggagaggggccgttagagttcttccggtcccagcg

SEQ ID NO: 179223 - DNA, 201 bp, Homo sapiens
cactacgaggagtgtgttgcccccgccccacttagctctaatagtccccaaacttgactcatggtcactacaaggagtgtgttgttcccccgcccccaccracttaggtctaatagccccaaacttgactcatgtggctgactttgcttttgttgctccttcaaaggaatgccgagttgagtagattttcatagcgctttg

SEQ ID NO: 179224 - DNA, 201 bp, Homo sapiens
gtctcaaggtgttatgcgagcaccagcaggcctggcagaatggcaagcagtagcttggagaggggccgttagagttcttccggtcccagcgatcccccgtktgcaggtgaggcaagcccaggttcagagcttgtgctacagggccaggcctaggcctcacctctcctccctgctgccttccacgccattcccattcctgca

SEQ ID NO: 179225 - DNA, 201 bp, Homo sapiens
atgcatacaagcacctaatttcctctgtcttcagcatggtgacccactcttcactgagcctgtagccttcagtccagccaccttctacctcagggagggtkaggcagtgagtgtcggggagggaatcaggccccagactgctgcctatggagatttgcaatcaggtctcacttcctgagcatttgggaacttctgaaagtg

SEQ ID NO: 179226 - DNA, 201 bp, Homo sapiens
aatcaaacttgcaaggacataaccgtagcgtggtaagggctgcctgtgtggcagccagtgcccccaatcctaggctcatggtgtcaggctaggccctgagmtctccatcctgggggctcatccctccatgggagcccgttcctccatgggggccgcatcagcaccaaccttccaggcaccttcaggacggccagagaggtg

SEQ ID NO: 179227 - DNA, 201 bp, Homo sapiens
tcaatgaaggactggatatacagtggcaccataagattatagtggtgctgaaaagtttctatcacctagtgatgttgccattgtaatattgtagcacaacrtgttacgcaggtgtttgtgacgctggtgtaaacaaacctactgcactgccagtggtatagaagtctagcgcatacagttatgtactgtacataatacttg

SEQ ID NO: 179228 - DNA, 201 bp, Homo sapiens
gaaggcttggtatttctgaagaacttcattcctgggtccttgatttattattacttttcctgtcaatcatattagctgttacagattttattaagttgttrtctctaacagacttgtctttcggaatcagccaaagacaggaggccatcgagcaggctccgcttggaaatttctcatccccttcaactccccctggaatgg

SEQ ID NO: 179229 - DNA, 201 bp, Homo sapiens
agagtcgcctttctgagatacagatactgtcatatttcaacttaaaaccatcactgtctccaccatggaataaaggccgctgtctggagcatgcattctcrgccttgggcagggccccagcgtcctcctccggagctgggagctgctggccctgcaccgtgccggccctgggctgcccctgctgcttgcccttggagtcct

SEQ ID NO: 179230 - DNA, 201 bp, Homo sapiens
acatccccccaggacttggcagatcttgggggagaagagtgtcagtcttcacccgtatatctgcgcatttcctgtttaatggtctttcagggcaggcaagytgagtgcccagatagaaaggagcaaaatcagtgctttgaaaatttacttagaggcaggtttcgatggtgtaaatctgaaacagagcctaacagtccacat

SEQ ID NO: 179231 - DNA, 201 bp, Homo sapiens
gtcctctgactttccaaactcgatggaaagagaaatggtctttattcactgccctcccatgaatggttgagaaaactctgtgtcttcttgagcctggtgtrtagtcaactccggattctgaacggtcacggctttcgttggaggttgatgcaggcactgagtctctgagtccagctggctgcccgtgtcattccacgacgg

SEQ ID NO: 179232 - DNA, 201 bp, Homo sapiens
gactttccaaactcgatggaaagagaaatggtctttattcactgccctcccatgaatggttgagaaaactctgtgtcttcttgagcctggtgtatagtcarctccggattctgaacggtcacggctttcgttggaggttgatgcaggcactgagtctctgagtccagctggctgcccgtgtcattccacgacggtagcagt

SEQ ID NO: 179233 - DNA, 201 bp, Homo sapiens
tggaaagagaaatggtctttattcactgccctcccatgaatggttgagaaaactctgtgtcttcttgagcctggtgtatagtcaactccggattctgaacsgtcacggctttcgttggaggttgatgcaggcactgagtctctgagtccagctggctgcccgtgtcattccacgacggtagcagtgcagaggttgtgctag

SEQ ID NO: 179234 - DNA, 201 bp, Homo sapiens
gagaaatggtctttattcactgccctcccatgaatggttgagaaaactctgtgtcttcttgagcctggtgtatagtcaactccggattctgaacggtcacrgctttcgttggaggttgatgcaggcactgagtctctgagtccagctggctgcccgtgtcattccacgacggtagcagtgcagaggttgtgctagtacagc

SEQ ID NO: 179235 - DNA, 201 bp, Homo sapiens
ttcctgctggagaaaggctatgaggtgggtgactcaatgggaagcgggcgcaggctggtggggttgctcgcatgcagcggccacatgcttcctctgctgcygtcctcctgagtgtgttttccactgaaacgcagataacaaatcagaatccggggaagaatgtgtctttgggcttgtgagcctgccaacccattgtgctgt

SEQ ID NO: 179236 - DNA, 201 bp, Homo sapiens
ctgtgggagttgaacatgaaagaatggtgctttcatgaggaaggaggtattgatgtggttttgggggctgaggtttgtttttgtttcagctaccaccttakagacaatagtgaatcagaactgtatcaggcaggcagattttaatgcccatttccaaacagagatgtctctcttagatactcagggaaagagtcacataga

SEQ ID NO: 179237 - DNA, 201 bp, Homo sapiens
ggccactgtgggagttgaacatgaaagaatggtgctttcatgaggaaggaggtattgatgtggttttgggggctgaggtttgtttttgtttcagctaccaycttagagacaatagtgaatcagaactgtatcaggcaggcagattttaatgcccatttccaaacagagatgtctctcttagatactcagggaaagagtcac

SEQ ID NO: 179238 - DNA, 201 bp, Homo sapiens
tcttttgctgggattttattccaccctttggtcattgagaggttctaacttctacacttgttctttatggatctttgtgtgtgcccattttcaataataarttctgattatacaattataaatttttaatatagtttaagacttaggagaaattaggcagtaataaaaatggctaatgttttcataaggcatttcactaaa

SEQ ID NO: 179239 - DNA, 201 bp, Homo sapiens
gactcccgccgcttcgggggaggcatgggcccgggcaggcctaggaggaagctgcacagcccgaggcccgggcgggagtggcgggccgcgggcaagggaaygtatatttggaaggggtcaggacctcggctggagtctggctttttatggcgaggaagccgactgggaagggccctctggcgaggctttcctgttgtgcca

SEQ ID NO: 179240 - DNA, 201 bp, Homo sapiens
attccacgacggtagcagtgcagaggttgtgctagtacagcacaggaggggacaggacacccattgtattgctcagtagaatattatcataaaaccccacrtacctcccatctccctttttttatttctcaaaaataaacttttcttttttcacaataaagacagaaaagaataaatgttcattttagagaatttagagaa

SEQ ID NO: 179241 - DNA, 201 bp, Homo sapiens
aggacacccattgtattgctcagtagaatattatcataaaaccccacatacctcccatctccctttttttatttctcaaaaataaacttttcttttttcayaataaagacagaaaagaataaatgttcattttagagaatttagagaacttgaagaaaaaataactattatgtaaagacagccatctattactcatatttt

SEQ ID NO: 179242 - DNA, 201 bp, Homo sapiens
tgtcaaatggaggtaatcatacttaacgacatcacaggggtgtcgtctatattaattaattaatgtttgtagtgagctttgaagatgcaaagctgcttaartgttgaggtattctgatgatagtccttgcgtgttattagaaccttcccaggttcctggaccatcactcactgattacaactaggatctaatagcatctgc

SEQ ID NO: 179243 - DNA, 201 bp, Homo sapiens
cttcccaggttcctggaccatcactcactgattacaactaggatctaatagcatctgctgtgcaatccactcagggatctatggcacgacccatgaggatytatcccaaatggataattgaaaaaggtatcagtgaggcctgtacgcagacttcaggccagttacagcgctccgtagcagttttccagaagccgagaggac

SEQ ID NO: 179244 - DNA, 201 bp, Homo sapiens
acatcttttgatgtagggtctattttttaaaaaaacatatagggcagatgttactattaattagtcttatctaaagtttaacatgcaaattagagaattgwaggagaaagtaattgaaagtgttatacacattaaaaataagcagatgtcatttggaaaacaaatagatacttgagattattttattacttcttcagcagg

SEQ ID NO: 179245 - DNA, 201 bp, Homo sapiens
gagcctgacttggcacaggtgacagctccccggaagtccagccgtgccttcacgggggagagtttgaagcagtagtttcctcggggccttgttcagcacamcagaactgagtcagacctctgccctccaggccacctgcctcctcacaagtgctgtctgcggggccggccgggaagcacatgcccagctgcggggctcctg

SEQ ID NO: 179246 - DNA, 201 bp, Homo sapiens
ggtggaggttgcagtgagccgagatcacaccactgcactccagcctgggcgatagagtgagactctatttttttcttaaaaaaaaaaaaaaaaaaaaaaaagatggaaactgcccagatttcaagagaattgaggcttgctgcgctccccttagtttctgaagagcagggttccaagtgagcgaggacaggatgaaaagga

SEQ ID NO: 179247 - DNA, 201 bp, Homo sapiens
tgaacctgggaggcggaggctgcagagagccactgcactccagctgggcaacagagcgagactccgtctcaaaaaaaaaaatatgtgtgtgtgtgtgtgtrtgtgtgtgtgtgtgtgtgtaaggctttcaaacgtaaggaaaaaaactaatgtaaatattttacataaataggaaaatgtgtcaattgaaaaaagaatata

SEQ ID NO: 179248 - DNA, 201 bp, Homo sapiens
ccttcagtcctcactctccactctgtctggggaagaatgtccttgaaacagagattccagcaggcccatgacacatcgtcagggacttcatgcttgtcagkagtctagtggcatcaaagatctctttaagaggattcgtggtcagccatccatgaatcagtcaagaggaccaaggctcccaaggagccaatggtcatcctg

SEQ ID NO: 179249 - DNA, 201 bp, Homo sapiens
acttgacctgctgtcttcaggcacagcctctctcatttcagcacctgcctaagtgcataagcaccgcttccagcacagaggtcgatgggtgctgtccaccktgcacctgcgctgtctctttctcccttcagtcctcactctccactctgtctggggaagaatgtccttgaaacagagattccagcaggcccatgacacatc

SEQ ID NO: 179250 - DNA, 201 bp, Homo sapiens
gtagaggcagccagtttgctgccatgcgcagagctcacttcactttaaaaaggggagggggatgggatgccacttagtctaattatgggattttctttttytttttttttttttttgcttgagttctttgttacaaggatcttttaggagtaaagaataaaagaaatgacagagaattttgcccaactctccagggagaga

SEQ ID NO: 179251 - DNA, 201 bp, Homo sapiens
tgttagggaagatttctaggttttgcttggaatgggtgctatttacagacagggaggggccatgggaaagaagagctttggagacagcttcaggaaccctrtttggggccatctcagtgtgacatgtgaacatatgagaggctgttgctccaagaggtgccctggaggtgggcctttgggcccatttggacagatggtgaa

SEQ ID NO: 179252 - DNA, 201 bp, Homo sapiens
atatatatttcatctaatttctttttttctttctttctctcttttttttttttttttttttttttttttgagatggagcctcactctgtcacccaggctgsagtgcagtggcacaatctcagctcactgcaagcgccgcctcccgggttcacaccattctcctgcctcagcctcccaagtagctgggactacaggcacctg

SEQ ID NO: 179253 - DNA, 201 bp, Homo sapiens
tcatttacactttagaagataatagttctattaacatttacaggataattaaatatataaatatatatttcatctaatttctttttttctttctttctctcttttttttttttttttttttttttttttgagatggagcctcactctgtcacccaggctggagtgcagtggcacaatctcagctcactgcaagcgccgcct

SEQ ID NO: 179254 - DNA, 201 bp, Homo sapiens
actgtaaaatgacagagaaaaggcatctaatatggctaatttctgataattggggtcacaaagtatttttaaattaagattttctaaaaaaaaaaaaaaaacaaaaacccaggagacttagtttaatatttgttttaaataattttaactaattagaacaaattagaatttattttaaaattatatattttttaattgaaa

SEQ ID NO: 179255 - DNA, 201 bp, Homo sapiens
tttcaccatgttggccaggctggtcttgaactcctgacctcaggtgatctgcccgcctcggcctcccaaagtgctgggattgcaggcatgaaccaccgtgmccagcccattggttacctttttatgggcattagtaatctgttggcattttcatcatagtgcatgtagttctacagtatcactcctgacttcttgaatgcc

SEQ ID NO: 179256 - DNA, 201 bp, Homo sapiens
gagacgggatttcaccatgttggccaggctggtcttgaactcctgacctcaggtgatctgcccgcctcggcctcccaaagtgctgggattgcaggcatgarccaccgtgaccagcccattggttacctttttatgggcattagtaatctgttggcattttcatcatagtgcatgtagttctacagtatcactcctgacttc

SEQ ID NO: 179257 - DNA, 201 bp, Homo sapiens
ttgctgccatgcgcagagctcacttcactttaaaaaggggagggggatgggatgccacttagtctaattatgggattttctttttttttttttttttttttgcttgagttctttgttacaaggatcttttaggagtaaagaataaaagaaatgacagagaattttgcccaactctccagggagagagaaagtaagtgggat

SEQ ID NO: 179258 - DNA, 201 bp, Homo sapiens
gcctcctgggttcaagcaattctcctgcctcagcctcccaagtagctaggattacaggcgcccaccatcgtgcctggctaattttttttttttttttttttaatagagacgggatttcaccatgttggccaggctggtcttgaactcctgacctcaggtgatctgcccgcctcggcctcccaaagtgctgggattgcaggc

SEQ ID NO: 179259 - DNA, 201 bp, Homo sapiens
tttgctgccatgcgcagagctcacttcactttaaaaaggggagggggatgggatgccacttagtctaattatgggattttctttttttttttttttttttttgcttgagttctttgttacaaggatcttttaggagtaaagaataaaagaaatgacagagaattttgcccaactctccagggagagagaaagtaagtggga

SEQ ID NO: 179260 - DNA, 201 bp, Homo sapiens
tgcaacctctgcctcctgggttcaagcaattctcctgcctcagcctcccaagtagctaggattacaggcgcccaccatcgtgcctggctaatttttttttyttttttttttaatagagacgggatttcaccatgttggccaggctggtcttgaactcctgacctcaggtgatctgcccgcctcggcctcccaaagtgctgg

SEQ ID NO: 179261 - DNA, 201 bp, Homo sapiens
gcatacgccccacagaggcccatggttcatgaggagtttgccactggcccacaaggctgccttttccactctcagaaggccatcagaaagttgttttgggktttttttcctattaaactcaaacctgcctcacgtgacttctacatatatctaccccaagtagttccagcccctcacagccttgtgagagccgttcaggta

SEQ ID NO: 179262 - DNA, 201 bp, Homo sapiens
ttggcctcctccaaatggagcagaataagcacattgttcttcaaatattggtcagttgaagacaaccttcttttctattaatttaatcagacttaaacaaagagtataccctcattcaggtcttctggactcataatgggctgatctatgatctctatccatattctttattattttacaaagcctaaatcattgtactac

SEQ ID NO: 179263 - DNA, 201 bp, Homo sapiens
tgcccagcctccctccacagagcaggaactgcatacaccccacagaggcccatggttcatgaggaatagcaggaactgcatacgccccacagaggcccatkgttcatgaggagtttgccactggcccacaaggctgccttttccactctcagaaggccatcagaaagttgttttggggtttttttcctattaaactcaaac

SEQ ID NO: 179264 - DNA, 201 bp, Homo sapiens
aggcgtgcaccaccacacccagctaatttttgtatttttagtagaaatggggtttcaccatgttggccaagctggtctcaaacttctgacctcaggtgatycgcctgccttggtctcctgaagtgctgggattacaggcatgagccattgcgcctggcccccagtgtgtcttaaaatattacattttctacctaattttta

SEQ ID NO: 179265 - DNA, 201 bp, Homo sapiens
attggcctcctccaaatggagcagaataagcacattgttcttcaaatattggtcagttgaagacaaccttcttttctattaatttaatcagacttaaacaaagagtataccctcattcaggtcttctggactcataatgggctgatctatgatctctatccatattctttattattttacaaagcctaaatcattgtacta

SEQ ID NO: 179266 - DNA, 201 bp, Homo sapiens
atcacaggggtgtcgtctatattaattaattaatgtttgtagtgagctttgaagatgcaaagctgcttaaatgttgaggtattctgatgatagtccttgcrtgttattagaaccttcccaggttcctggaccatcactcactgattacaactaggatctaatagcatctgctgtgcaatccactcagggatctatggcacg

SEQ ID NO: 179267 - DNA, 201 bp, Homo sapiens
gtttcaccatgttggccaagctggtctcaaacttctgacctcaggtgattcgcctgccttggtctcctgaagtgctgggattacaggcatgagccattgcrcctggcccccagtgtgtcttaaaatattacattttctacctaatttttataatctacagtttataattcaaaggcctttttatcttattaagatatatta

SEQ ID NO: 179268 - DNA, 201 bp, Homo sapiens
cgcctcagcagcagggaatgctgaagcaagggctgcaccccccatcactgcagctggacccagcagtggatttgctagagcttgctcttgctcactcgctstctgtcagactcttactaactcttttgggttggaacgtggttgaggaagatccgggcagggtcctcggacagcctgtcagcagatctcctgcagccacag

SEQ ID NO: 179269 - DNA, 201 bp, Homo sapiens
aggcaccgagaagtgctggctcccttccttcctttcccagtcccgcacaatgccttccagccacgcagttcctctctctccaccagcagcttcggagccarggcgagtcgccatttgtgactcccggtgctcctgctgtaggatttcatctagttctcaggtccttcctccatctccccagtgtagctgtctgtcatgggt

SEQ ID NO: 179270 - DNA, 201 bp, Homo sapiens
aaaacacagtgcccttcccccagagggtgctccattaatgggagagttgactccattcactgctgggcagaaggtggatagaaagccagtgccaagctgarttcaggctgtcaaagagaggagatgaagaagttagttcccagtctccactatcgttccgcttagaaggacactgtgaccttgaggaccaaaaatgtaaat

SEQ ID NO: 179271 - DNA, 201 bp, Homo sapiens
agttgaacccggggggcagaggttgcagcgagccaagatcacaccactgcactccagcctggcgacacagtgagattccgtctcaaaaaaaaaaaaaaaaagtaattaaaagtatggcaaaaaccaagattacttttgcaccaaccttaatatcttatacatacttagggatggacaaaatgctttcctctcaaattctca

SEQ ID NO: 179272 - DNA, 201 bp, Homo sapiens
attctagcttttcatatcagtgttttcttctctgtcttatcccggtgtagataagccaatttcttttacatatctgagctgctcattaattaagaaaaacwcagcattagttaccgttcatgagtcctcaaaaacacaaaattccacattccagcatgtgttacattaagtggaaaagatttgtctaatgctgtcctcatt

SEQ ID NO: 179273 - DNA, 201 bp, Homo sapiens
agtccccgagctgctggtgccacagggaggagttgagggggtggggcagtgcggtgcacgtgcgcagcgctctgacttgaggcttccaggagacgtgatgkgtttcaaaacagtgtgcaagatctcccctcgtttgtgacaccaagatgttcctatggagcccacccagcccctcccgaccacctgcattcccaaggaagc

SEQ ID NO: 179274 - DNA, 201 bp, Homo sapiens
cgctgcctgctgggaatgctgccttgcaaaggagtgacgtctcaagtgtcgggaaagttacagccttcgagttgtttccttccctacctttgagatatacmcagatgccgcattttgtttcacgcttttctgtggatggtgagcaaatggctgattctttatggccctcagagccccaggagggtgtggacaagcaccttt

SEQ ID NO: 179275 - DNA, 201 bp, Homo sapiens
tctacgtatttgcttggtggtttacatttatatacattgtgactgtaaacccagaaaataataatgccctttagtagagtagccttttgtggtggggtgcrtgggggtgggtgttgtttttggcttgatcccaaaagcaaggcattcaacctgctgaagattgtggggcttcccagagagcaccccagcaggggagcagtc

SEQ ID NO: 179276 - DNA, 201 bp, Homo sapiens
gattggcctcctccaaatggagcagaataagcacattgttcttcaaatattggtcagttgaagacaaccttcttttctattaatttaatcagacttaaacaaagagtataccctcattcaggtcttctggactcataatgggctgatctatgatctctatccatattctttattattttacaaagcctaaatcattgtact

SEQ ID NO: 179277 - DNA, 201 bp, Homo sapiens
aatattacattttctacctaatttttataatctacagtttataattcaaaggcctttttatcttattaagatatattacgaagtcatttctaaaagagttkataaatcttcaacatttatttgttctccagtatcctattttagcattttaacagaaagtaacagtatcctacttatttggaaactcagccacaaagtaac

SEQ ID NO: 179278 - DNA, 201 bp, Homo sapiens
agattggcctcctccaaatggagcagaataagcacattgttcttcaaatattggtcagttgaagacaaccttcttttctattaatttaatcagacttaaacaaagagtataccctcattcaggtcttctggactcataatgggctgatctatgatctctatccatattctttattattttacaaagcctaaatcattgtac

SEQ ID NO: 179279 - DNA, 201 bp, Homo sapiens
gaagaagttagttcccagtctccactatcgttccgcttagaaggacactgtgaccttgaggaccaaaaatgtaaatgtcataagtcagccgtagacgttayaggagaagcctactacgcaacacctccagagagggaccagcttaaactgtagctccggatcccaagggtccttttcattctgtggaaactcggtgattcc

SEQ ID NO: 179280 - DNA, 201 bp, Homo sapiens
ttagaaagatgctagttttaaagtaatgtttaatactactaaacattaataccagaagtattaataccagtatactattatcattaattttttcctcttakagtatctgttgctgaatttcctaatcatatgcttatatcaggtttgttacatcattgttattattgaaattattctccattagaagcttaaacatggaat

SEQ ID NO: 179281 - DNA, 201 bp, Homo sapiens
aaccttttaaatttgcaagaacttttaatataaacaagtaggtagacaaacaggtagggatttacctccctggtgtaactaggctgagagggtagaggaarggtcagggctgtacacttagcacttaaccatatttcctccataaataagaaatattcttggtcttggtgcatcatcaggaccaacaggagaggaacccta

SEQ ID NO: 179282 - DNA, 201 bp, Homo sapiens
aagttcttgtagcatgttttttagcttagctctatcaggttggttctgttcctctagactggctattttggctgtcagctcccatatgtattgttttagcktcttcgctttgggttacaacatgctcccttagctcagcaaagttcattattacccacattctgaagtctccttctgttatttcagccatctcatcctcaa

SEQ ID NO: 179283 - DNA, 201 bp, Homo sapiens
gttctttgcccactttttaatggtttatttttttcttgtagatttaagttcctaatggatgatggatgttagacctttgtcagatggatagattggaaaawtttttttccattctgtaggttgtctgtttactctgttgatcgtttcttttgctgtacagaagctcttctgtttaattagatacaatttctcaacttttgc

SEQ ID NO: 179284 - DNA, 201 bp, Homo sapiens
ttcttcagtgcctactacatttccatttttatgtttcattcttttgcttagaaaagctttaccatatttaaaagtacaacccaacgtcctctccctttccwgcttttttcccccatagttcttatcactattgaacttactatatatttcacctctttatattgtcagttttcttctcctctcactagaatgtaagctcta

SEQ ID NO: 179285 - DNA, 201 bp, Homo sapiens
gagatcaaggccatcctggccaacatggtgaaaccctgtctctactaaaaatacaaaaattagccgggtgtggtggcgcacacctgtaatcccagctattygggaggctgaggcaggagaatcagttgaacccggggggcagaggttgcagcgagccaagatcacaccactgcactccagcctggcgacacagtgagattc

SEQ ID NO: 179286 - DNA, 201 bp, Homo sapiens
ggccagcctttctgctcttactgctcactgctcccggcataactcttgacaagtgcagcttgcccagatcaacctggggttttcttaagctttttttttttggttctcacctgtgtttttttccaaaccatttatctatatcctattcatctctcaaagctagctaacaaacattcaaaatatttcaaaatccacttctca

SEQ ID NO: 179287 - DNA, 201 bp, Homo sapiens
agaaaatgaacaacctgatttaaaaatgagctaatagacacctcaccaaagaagatatacagatggcaagtaagcatatgaaaatatgctcagcgtcataygtcactagggaatttaaactaaaacaaccatgagataccactacaatcctattagaatggcaaaacattagaatactaacatcaaatgctgactaggagg

SEQ ID NO: 179288 - DNA, 201 bp, Homo sapiens
tacttttggaggccaaggcaggcagattgcttgagcccaggagttcaagaccagcctgggcaacatggtaaaaatccatctctattaaaaaaaaaaaaaaattagctgggtgtcccagctacctgggagactgaggtgggagaatagcttgagcccgggaggttgaggctgcaatgagccgtgtgaatgcatcactgcgct

SEQ ID NO: 179289 - DNA, 201 bp, Homo sapiens
ggaccctaggaggagttagtcatctagtgcccacagtgttctaggtactcagagcttttttgcgtttcaaagattaaacaaagtcttttggatttttcctyacaaatctgcagagtgaattttctgcctcttgaatttaaatgtgaagtgtcacgctgggtgaaaatatgaacatgtgaacacaaagcctttcttagcctt

SEQ ID NO: 179290 - DNA, 201 bp, Homo sapiens
gtacttttggaggccaaggcaggcagattgcttgagcccaggagttcaagaccagcctgggcaacatggtaaaaatccatctctattaaaaaaaaaaaaaaattagctgggtgtcccagctacctgggagactgaggtgggagaatagcttgagcccgggaggttgaggctgcaatgagccgtgtgaatgcatcactgcgc

SEQ ID NO: 179291 - DNA, 201 bp, Homo sapiens
gtttggaagggagtgtaccagtcttggtttgttgtggcaggggaccctaggaggagttagtcatctagtgcccacagtgttctaggtactcagagcttttktgcgtttcaaagattaaacaaagtcttttggatttttccttacaaatctgcagagtgaattttctgcctcttgaatttaaatgtgaagtgtcacgctggg

SEQ ID NO: 179292 - DNA, 201 bp, Homo sapiens
aagagcaaaactctgtctcaaaaaagaaaaaaagaaagaaatttaaaacaatgtaatttacattaacacccccaaaaaagaaatagttgtaagtctaaaaattatgtgtaagatctatttgaagggccagccatgttggctcacacctgcaattccagtacttttggaggccaaggcaggcagattgcttgagcccaggag

SEQ ID NO: 179293 - DNA, 201 bp, Homo sapiens
ctttgtctttcacaagtgacataatggtctatatagaaaatcccgaagaaacaaccaaaaaaaaaaaaaaatcctggaactaatttatagcaaggttgcasgatacaagtttaatatacaacagtcaattggttttccatattctaacaacgaacgagtgcaattttaaatttaaaacaatgtatcagcactttgggaggc

SEQ ID NO: 179294 - DNA, 201 bp, Homo sapiens
taaggcttggctgaccacaaaactactggaggtcctgactcaaactaaataccaggctgccatcatgaaaacagctactaaataatgtttagagatgaaaygcatgtgaatgggtacacactgggcatcctttctctggaactttaatttccatttgttcaaatttccatgatttttattagagttacttcatacatgttc

SEQ ID NO: 179295 - DNA, 201 bp, Homo sapiens
aattaatttttctataagatgtaaggaagggatccagtttcagctttctacatatggctagccagttttcccagcaccgtttattaaatagggaatccttyccccatttcttgtttttgtcaggtttgtcaaagatcagatggttgtagatgtgtggtattatttcagggactctattctgttccattggtctatatctct

SEQ ID NO: 179296 - DNA, 201 bp, Homo sapiens
tttagagatgaaacgcatgtgaatgggtacacactgggcatcctttctctggaactttaatttccatttgttcaaatttccatgatttttattagagttayttcatacatgttctcccctgaaatgcgtatacatacataagtgtgtgtgtgtgtgtgtgtgcgtgcgcgtgtgtgtgtgtgtagttttaaggtttttgtg

SEQ ID NO: 179297 - DNA, 201 bp, Homo sapiens
catgcctatgtcctgaatggtattgcctaggttttcttctagggtttttatggttttaggtctaacatttaagtctttaatccatcttgaattaatttttstataagatgtaaggaagggatccagtttcagctttctacatatggctagccagttttcccagcaccgtttattaaatagggaatcctttccccatttctt

SEQ ID NO: 179298 - DNA, 201 bp, Homo sapiens
gaacacctggggcctgaatgcagctcctgaccttgatacctaccacctgtctgatcttaggcaagaccttgacctagaacattggcctcatcctcctcccytggaggttggaggcctgcgccacttccaggtctgaaacccaaccagcccgtgaagtgcgggagagtctaggtagcaggtgctgttcacgtccttcctgat

SEQ ID NO: 179299 - DNA, 201 bp, Homo sapiens
ttaaatgttgaggtattctgatgatagtccttgcgtgttattagaaccttcccaggttcctggaccatcactcactgattacaactaggatctaatagcayctgctgtgcaatccactcagggatctatggcacgacccatgaggatttatcccaaatggataattgaaaaaggtatcagtgaggcctgtacgcagacttc

SEQ ID NO: 179300 - DNA, 201 bp, Homo sapiens
gactcacatggtcacagggtgaagtcccaccataggctgtctgcaagccgaggaaccaggaagccagtccgagtcccaaaaccttaaaagcagggaagcckatagtgcagccttcagtctgtggccgaaggcccaagagcccctggcaaatcactagtataagtccaagagttcaaaagctgaagaacttggagtctgatg

SEQ ID NO: 179301 - DNA, 201 bp, Homo sapiens
atcagtgttttcttctctgtcttatcccggtgtagataagccaatttcttttacatatctgagctgctcattaattaagaaaaactcagcattagttaccrttcatgagtcctcaaaaacacaaaattccacattccagcatgtgttacattaagtggaaaagatttgtctaatgctgtcctcatttttagtgcaggtgaa

SEQ ID NO: 179302 - DNA, 201 bp, Homo sapiens
aacaagcgaatattgttgtttatcgagtgccaggtgtaggggttttgcatacacattatctcatttacttccttacaactctgtggggtagggctcatggrtctatctgaggatggagaggttggcacggagatcacctcaaagatggtaaaaactgaacagtcacatttgtgtgatgccaaccacaggctcacatctgaa

SEQ ID NO: 179303 - DNA, 201 bp, Homo sapiens
tctcagcactttgggaggccaagatggaaggatcacttgaacccaggagttcgagaccaacttgggcagcaacatggtgaaaccctgcctctacccccccmaaaaaaaaaaaattagctgggtgtgctgatctgcgcctgtagtcccagctactctggaggctaaggtgggaggattgctttagcctgggaggcggagatt

SEQ ID NO: 179304 - DNA, 201 bp, Homo sapiens
cccccaggcttttgcagatccaacttcagcaaagcatgcttgagttagcatgtgtctatttgccacctagcgacccagctgggcattgttaaacaaagaagtagagatcaccaaaaagaaggaaatgtaacctcaggcagttaagcaggaccagaaagagggaggtgttcccagaaccaggttcagcttctcttcccagtc

SEQ ID NO: 179305 - DNA, 201 bp, Homo sapiens
acccccaggcttttgcagatccaacttcagcaaagcatgcttgagttagcatgtgtctatttgccacctagcgacccagctgggcattgttaaacaaagaagtagagatcaccaaaaagaaggaaatgtaacctcaggcagttaagcaggaccagaaagagggaggtgttcccagaaccaggttcagcttctcttcccagt

SEQ ID NO: 179306 - DNA, 201 bp, Homo sapiens
cacccccaggcttttgcagatccaacttcagcaaagcatgcttgagttagcatgtgtctatttgccacctagcgacccagctgggcattgttaaacaaagaagtagagatcaccaaaaagaaggaaatgtaacctcaggcagttaagcaggaccagaaagagggaggtgttcccagaaccaggttcagcttctcttcccag

SEQ ID NO: 179307 - DNA, 201 bp, Homo sapiens
gcctggaacacaggagaaggacggtgcctggaacacaggagcttgctgatggcctgctgagtggaggagttagtattggccctggaatccaatgggaagcrttctgggctgaaattcagaacacctggggcctgaatgcagctcctgaccttgatacctaccacctgtctgatcttaggcaagaccttgacctagaacatt

SEQ ID NO: 179308 - DNA, 201 bp, Homo sapiens
gcatgtcttatctatttgtacttttttggctgaagtatttcccaagtaatatcttgcattggttgtataatttctgagtctttttgttttaaaaaaaaaamagttttcctttatttttatgcttaatacagctgtcccttggcatccatgggggattgcttccaggagccttcttggataccaaaatccatggatgcccaa

SEQ ID NO: 179309 - DNA, 201 bp, Homo sapiens
tacacactgggcatcctttctctggaactttaatttccatttgttcaaatttccatgatttttattagagttacttcatacatgttctcccctgaaatgcrtatacatacataagtgtgtgtgtgtgtgtgtgtgcgtgcgcgtgtgtgtgtgtgtagttttaaggtttttgtgacagtagcacgtaaagcacaaaagcac

SEQ ID NO: 179310 - DNA, 201 bp, Homo sapiens
tcagcaaatgctggtattctttttgctgaaaccccaaagcatcagagtcaacattgactcccctccctctctcacaccccacaacttatccatcagcgaayggttcactcactctccttcggaaatcaacccagaatccagctgtgtctcaccagcctcccaagccccgctaaacaaagccgccatcctctctgctgtgga

SEQ ID NO: 179311 - DNA, 201 bp, Homo sapiens
ttgcatgtcttatctatttgtacttttttggctgaagtatttcccaagtaatatcttgcattggttgtataatttctgagtctttttgttttaaaaaaaaaacagttttcctttatttttatgcttaatacagctgtcccttggcatccatgggggattgcttccaggagccttcttggataccaaaatccatggatgccc

SEQ ID NO: 179312 - DNA, 201 bp, Homo sapiens
ttaataagtgtttgtggcttggatactgaactggaggttaacgtcgaggtggaagcaattgtagaatccagatttttaagacaaacacacatcccaccacmgaaggcatgcacggaatcaggtgtagtcagtcggctgtggtgatgcactttgagtgttctccttcattggtccagctctgaacagccaccagagctggca

SEQ ID NO: 179313 - DNA, 201 bp, Homo sapiens
aatactcatttatgattaatccaggtatgctcctcttgacctaaggaaatcacgcgtcttcactttattacaatttttcagaagacgtttatgaggtgatyatttgctagacattacagtatattaatcctttgccaaggtgaccgttgaattagaattgtagacaatgttgttggacaaaaatcctgggaagataaatag

SEQ ID NO: 179314 - DNA, 201 bp, Homo sapiens
ttagtagagacggggtttcaccatgttggccaggctggtctcgatttcctgacctcatgatatggccgccttggcctcccaaagtgctgggattacaggcrtgagccaccgcacctggcctattatctgcattatttaaaatggtttgggataattagaattattatctttattacttattgcttgttgcatgtcttatct

SEQ ID NO: 179315 - DNA, 201 bp, Homo sapiens
agcaaaagatgttttctttaaaacaaatgatgctcaaattatttgtatatgtaaatgggtgcccagttttttgtgggttggtttgtttgttattgttattyttgagacaaggtcttactctgtctcccaggctggagtgcagtgatgcgatctcggttcactacagcctctgcctcccgggttcaagagattctcctgcct

SEQ ID NO: 179316 - DNA, 201 bp, Homo sapiens
gactgctacatttaggtcttagatccatttgagttaagttttatatatgctatgaagtaagggcaaacttcattcttttacatgtagctctccagttgtcygtgcaccatttgttgaaaagactactctttcccactgaatggtcctagcaactcttgtcgaaatcagtcgatcctagacacatgggtttttttctggact

SEQ ID NO: 179317 - DNA, 201 bp, Homo sapiens
aaaccttaaaagcagggaagccgatagtgcagccttcagtctgtggccgaaggcccaagagcccctggcaaatcactagtataagtccaagagttcaaaarctgaagaacttggagtctgatgttccagggcaggaagcatctagcatgggaggaagatggaggccagaaggctcagcaagtctgcccttcccatgtctgc

SEQ ID NO: 179318 - DNA, 201 bp, Homo sapiens
acctgtactctgattatttgtgtctatttctaccactgtctttttggctctttaagcatagggaaggtgttttgttccatttgtatccccagtgcctggcytgacatgtggtcagctatcaacacttactggtcaaaatgttcagtagtcatcgctttgtcgtttagtggtatttaataattatctatagaactagtatcc

SEQ ID NO: 179319 - DNA, 201 bp, Homo sapiens
agacgagctttcctggaccccgtcatgggctgcatttgtcaatccaagtaaatgaccgtcctcacacttttatcctcagggaagtttgttattttttttttaatttgctcatataaagaaatatgactctgttctctgtgttttacactgaagagatacagaattaacaagaaaacaaagaaattctacttgaaatggcac

SEQ ID NO: 179320 - DNA, 201 bp, Homo sapiens
aaactctcctgaagctacctctcctcctccctcaggtctcaggtttactggaacttcctctggaaagtcctccagcttcccaggagtgagctagacgttcyctcttctgttgccatggacacccacacttacagccccacaccatgcgcagtccattatccgtgattccaaaatccaaagagctcagggaaaatcaaaact

SEQ ID NO: 179321 - DNA, 201 bp, Homo sapiens
tgggtgagatgctgagccccagggcttaggccagctgcctctgcgtatggaggctgtgtgtgcccctcagctgtgccagggaggagtcacagcagacggcrtgctgccatcctaatctctgtggcacacaggagaatgtccccacccccaaggaagtccccatgctaattctagaatacgtggctatgtcaccttacatga

SEQ ID NO: 179322 - DNA, 201 bp, Homo sapiens
tgatttaaaacaatcttgtaatagaccaaaaatacaaaaacatacacaggaaataacttcaggtaaaagagaaattattttaaattttattttttagaagwtttctacaaattccaatgaataaaaaggaaattaaacttttttggtggcattttctaagagaaaataggctggctcattgattttagcaacttcttgttt

SEQ ID NO: 179323 - DNA, 201 bp, Homo sapiens
caaggctctctgttatcttccctatggaatgagcttcagtcatagcaagtgtggatctttttggtgctgctttctctgccctcctaactactcctcccacrtacagtgaaattataaaaccgagccagaatcaatgctatcaggaaagggttctgcacatcaagctcttaaatgggcaaagaatatttttaatcaagactc

SEQ ID NO: 179324 - DNA, 201 bp, Homo sapiens
ctgtactccagcctgggcgacagagcaagattctgtctcaaaaaataaataaataaataaataaataaaactaaagttttatttttacttctccaaattgratttgtagaacagatagattaattatatacttacagaagagtacgtgtccaaatttaagtaatatttatacccatcttgacttggccatcaaaagtcaat

SEQ ID NO: 179325 - DNA, 201 bp, Homo sapiens
ccaagtagctggaattacaggcatgcaccaccacgccctgctaatttttgtatttttagtagagacggggtttcaccatgttggccaggctggtctcgatytcctgacctcatgatatggccgccttggcctcccaaagtgctgggattacaggcgtgagccaccgcacctggcctattatctgcattatttaaaatggtt

SEQ ID NO: 179326 - DNA, 201 bp, Homo sapiens
gcgccgccacccttctcattgctgtgtgggtctagccccagatcgctgggtgcccagccgcctgccaggactgcaacttgatggtcattcctgccctccccagttcccaaactctcctgaagctacctctcctcctccctcaggtctcaggtttactggaacttcctctggaaagtcctccagcttcccaggagtgagcta

SEQ ID NO: 179327 - DNA, 201 bp, Homo sapiens
tatttcctcccatattagttccaacttccaggcaccttatcaacaaccggttaattgctattcaacaatgacgaattcaactcaccctaaaacttcttcarggcttaatgccccccagatgcacctgttcttgcaagggccttcctgctgcgccgccacccttctcattgctgtgtgggtctagccccagatcgctgggtg

SEQ ID NO: 179328 - DNA, 201 bp, Homo sapiens
aagcgaatattgttgtttatcgagtgccaggtgtaggggttttgcatacacattatctcatttacttccttacaactctgtggggtagggctcatgggtcyatctgaggatggagaggttggcacggagatcacctcaaagatggtaaaaactgaacagtcacatttgtgtgatgccaaccacaggctcacatctgaatct

SEQ ID NO: 179329 - DNA, 201 bp, Homo sapiens
gagctctcggaagactgtatgttttagatcttttatcagcaagatctctgggacagctagtggagaaatcaaacagggaggcagcaggccagtgatcgccrtaatagtttaaacttagaccagtaaaacggagctattttacaaaaaactgtggcattctaaatcgttgaaagttacgtttcattatttgggagtggtaat

SEQ ID NO: 179330 - DNA, 201 bp, Homo sapiens
ggtctctccttacctcaaagagatacaaagaatattaataaggtaacattcccaacctcagtgggattctgatgccacataaatatatggtatcatcatcytcctgctcgttatcatccattagcaacattgtcgtcaaggttttctctgtatctagattaattatgactaaggagtaaattattccatatatggaatctg

SEQ ID NO: 179331 - DNA, 201 bp, Homo sapiens
gattaaatgttagaagctgtgttacatatttagtgcaaggcctggacactctctgttaatgtcagccactgtcactcttctgatgagaaattgttatccgmacttcactcttctcagagttcagatatgatattttggctgaacttgcaatttagaaagataaaaactatcgcatgtagtaaaaatctgttggaaaatata

SEQ ID NO: 179332 - DNA, 201 bp, Homo sapiens
tggtggcaaatagtgaatgtatttaaatataaaactgagactgctacatttaggtcttagatccatttgagttaagttttatatatgctatgaagtaaggrcaaacttcattcttttacatgtagctctccagttgtccgtgcaccatttgttgaaaagactactctttcccactgaatggtcctagcaactcttgtcgaa

SEQ ID NO: 179333 - DNA, 201 bp, Homo sapiens
tatgttacgtacctgctagggcatgtaacaaactaagatcagtgctgtggagcacatgtctacaccaccttgggagcaaaggaacttccagcaggactcayaggacaagtatgaagcactagttaatctctgagattcatttaagatataaaatatttttctaaatgagtcattttctacagtcttggcctattgatatgg

SEQ ID NO: 179334 - DNA, 201 bp, Homo sapiens
tagagtaattggcaaagtaagtaagagagaaagctgaaacttaaacacaaaaccaaaaaatgaggtatgttacgtacctgctagggcatgtaacaaactaagatcagtgctgtggagcacatgtctacaccaccttgggagcaaaggaacttccagcaggactcacaggacaagtatgaagcactagttaatctctgagat

SEQ ID NO: 179335 - DNA, 201 bp, Homo sapiens
tggcattgtgaaaagttcccagctgggaatcttggattctagtctgcttttgacagcaattacaggacctaagatctctgaggtgtagtttactaaaccaytggttcctgaatctggccatgtacctaaagataacgttctgaattcccattcctcaagtgtctgatatcatagatgtagtatgggatttgggaagctatc

SEQ ID NO: 179336 - DNA, 201 bp, Homo sapiens
tttttctggcattctcattacatgttggttacaccttttgtaatggtatcacagttcttggacattgtttcatttcttttattctcttttctctgcattgkagtttgcgatgcatctattgatatatcttcaagctcactgactttttctgtggtcatgccaggggaactcatttctgtcagtgttttcatttctatcatt

SEQ ID NO: 179337 - DNA, 201 bp, Homo sapiens
gcttgttttttgacaagcttctttcaaaatactctctttctctttggttttttgcagttatgatatgcatatatatatatatatggtttttatcctctctsgtgttctctgagcttccttgacttttgatttgttatttgttgctagatttgggaaattctcagccattattactttaaatatttcttcctttctttgctc

SEQ ID NO: 179338 - DNA, 201 bp, Homo sapiens
tccttttagtgtatgactggacacacttacttaccatgtaaaggtgcttcttttttacatttaaaacccaaagctgtgagatgcagcgtacagagacgtgwccccggttggccttttgctgtttcagatggcagtactcagaggaacgccagccaggcccagaggcccccggcgctcactggcctttctttcatgtgccct

SEQ ID NO: 179339 - DNA, 201 bp, Homo sapiens
gctggtctctatttcctgggctcaagcaatctgcctgcctcggcctcccaaagtgctgggattacagacctgtgctgctacatctagccttcctttaaggkgaaatctcccaacaaggaaagaaaaaaaccataaactgaggttgctaagaatgaatcttctattcttaaaatgggaaagaaaaagtcatgctagttttgc

SEQ ID NO: 179340 - DNA, 201 bp, Homo sapiens
aaaattagctgggtgcagtggcacgcgcctgtaatcccagttactcaggaggctgaggcaggagaattgctggaacccaggaggcggaggttgcagtgagyggagatagcgccactgcactcctgcctggcaaacagagtgagactctgtctcagggggaaaaaaaaaaataaaaagaatcaactgtggttgtttatggca

SEQ ID NO: 179341 - DNA, 201 bp, Homo sapiens
ggtatttgtttcaaaccctgagttgatgataagccattatgtctgctgcgtcttctctccatgtgagtgacattttgcaccccaggcttagttatagggarcaagttaggaatgtgtgttttgcagtttctgttgtttatgtaaaccatcgatatcagtttattcatctgaaggaaataagaaaaaacacttcagtcaaaa

SEQ ID NO: 179342 - DNA, 201 bp, Homo sapiens
ataagttctactcagtgaatggccatcatggctggtattggtatcgtggaaccaaggtcttccggaaacctggtggcatgatattcctttttttcttcacytagaatcttcaatgtttttcttttttttttttaatgtaagtgcaaagaacttaaatatatgattgtgtaagatgatagtcatttagaacaacatttttta

SEQ ID NO: 179343 - DNA, 201 bp, Homo sapiens
catccagccctacttgtgttatttgtcagatgttggtcagcatctaaaccaagtttttccacatttctttcatctttcttttaagatgtttttggccaggygcggtggttcacgcctgtaatcccagcactttgggaagccgagacaggaggatcatgaggtcaggagttcaagaccagcctgaccaacatggtgaaaccc

SEQ ID NO: 179344 - DNA, 201 bp, Homo sapiens
tggtgtaccaaggcaggtaaactggagatattgtggcagggaatagttaaaatgtttatctttggaaacaaccattatactagtactacttacagtacttrtttatctatttatttatttatttttaccgcttttctctttcccctgctctcttgtcttcatttgctccttgtctttatgtcttcctttcaggctccttta

SEQ ID NO: 179345 - DNA, 201 bp, Homo sapiens
cagatcacaaggtcaggagattgagaccttcctggctaagatggagaaaccccatctctactaaaaatacaaataataataataataataataataataawaataattagccagggagggtggcgggcacctgtagtcacagctactggggaggctgaggcaggagaatggtgggaacccgggaggtggagcttgcagtga

SEQ ID NO: 179346 - DNA, 201 bp, Homo sapiens
caggaaacaaacaattagttctgtactttttggaggtttaatcatctgagacttactaagggggcccaccattgacgggagagcaggagaacttgtatgtgatccagggatgcattgaatggttaattaggttacaaaacttattcccaaatggaatgtgttgaattaactctgaatatccctaaaactacaaaagaaaga

SEQ ID NO: 179347 - DNA, 201 bp, Homo sapiens
aacttgtttctctttgcgaagaacgaaatgtgagcaaaaatagatcaaacatgcctgtgaaatacaaatatactttcatctactgaaagcctaaccaaaawttttttaaaaggttctacttaaacaattaactttagaattagatagttatttaaaaaaaataataataatgacttaaccaattgtcctcccttcctgtgg

SEQ ID NO: 179348 - DNA, 201 bp, Homo sapiens
ctttgaaggtgttactccattgcctattaatttgcagtatcaccatgggaaaccaagagccattctgactcccagtcccgtctgtcccctctagaaagtgyttcagaccttctcttggtcccagtggtgtggaacttgatgtgaggtgggtctagacccattcgttattggaggacaccctttcggtgtggaaatgcatgt

SEQ ID NO: 179349 - DNA, 201 bp, Homo sapiens
gcccctatttcctgacatcttattcaagactacttggtttggtaaagcaaaatcataattagtttcctgagaaagatacctgggaaacaaatactttgtgrcaaaatatacctgaaaatatctctagtccaatctcaaaattaataatgttgctggtatatatttctagattggaaataattttccttcagaactttgaag

SEQ ID NO: 179350 - DNA, 201 bp, Homo sapiens
gtcaccaggctggagtgcagtggtgcgatctgggctcactgcaacctccgcctcccgggttcaagcgattcttctgcctcagcctcccgagtagctgggaytacaggtgcccgccaccacgcctggctcattttttgtatttttagtagagacagggtttcaccatgttggccaggatggtcttgaactccagaccttgtg

SEQ ID NO: 179351 - DNA, 201 bp, Homo sapiens
tggaacatacgccgttcatgacactttgcctttatgggcccctttaactcgaggatctcaaagggcctcagcagtatgaccttgcgtgtcctggccgggcrcccaagggagggaggccagaaggtccacgctgctttccgtgtgagaagtcaggtcacggtgccggatcagaactaacacctggcctgcaccctcattggt

SEQ ID NO: 179352 - DNA, 201 bp, Homo sapiens
actgtattgcacagcaatttaaatatgaaaaagttgaaaacacagcattcatgtttttccattttggaaactatgtggtgaataccttttgtttctattaraaagatgctagttttaaagtaatgtttaatactactaaacattaataccagaagtattaataccagtatactattatcattaattttttcctcttatagt

SEQ ID NO: 179353 - DNA, 201 bp, Homo sapiens
ttagaactgctctttttgtaaataataccataaaaaggttatttgccatagacactgcttcacatcacattcctctacgttgtggtctgaggacctgcacyatgagaatcacctgggatgttaaggataaatattctgagagagaatctccaggcctctgagcccacccctctacggctgcagccctggcatccacaccaa

SEQ ID NO: 179354 - DNA, 201 bp, Homo sapiens
tgtgttaactctgctaagaccagggctgtttaaaagcccccaaagattctctgtgaagagctattttaaaataggggaaaaaactcagtgaggaaggggaytccataaggagtaaagggaaggggcttcgtggggcccggctttaggagcagagatccgaggcccatcctgatcttcctgttggacttggagagacagacc

SEQ ID NO: 179355 - DNA, 201 bp, Homo sapiens
ttctttctttcttttttttttttttgagatggagtcttgctatgtcacccaggctggagtgcaatggcacgatctcggctccctgcaacctctgcctctcrggttcaagcgattctcttgcctcatcctcccgagtagctgggactacaggtgaccaccaccacacctggctaatttttgtatttttagtggagacggggt

SEQ ID NO: 179356 - DNA, 201 bp, Homo sapiens
atattcttccagttgaaaggtaaccagaactggagactatattgtaaataagcttttagttaggtgtgaggtcccaagagccaatggtctagagccatttkgtatgagtcctgaaaagcaccaagcttctctgaggtttgtctacattcaacttaggatacatgtggaattctctcacatctaaactgaatctttccttct

SEQ ID NO: 179357 - DNA, 201 bp, Homo sapiens
accccgtgacaggtgcataacacacctgcaggtgtggcatgcctgaggatgaggacaccaagccacctcaaacgtggtgaatctagtgtcaacctaagtcyctgtgaccctaaatcccatgtgcttctccacgggcacagtttcagtgaagaagaggaagcatattccaggctgtcgggaaccaactgcatgaggagggca

SEQ ID NO: 179358 - DNA, 201 bp, Homo sapiens
acatacttaccattgtgtcacagttgcctacagtattcagtacagcagcctgctgtacaggttgggagcctaggagcaataggctctaccatacagcctakgcgtatagtaggctgtaccatccaggtttatgtaaattcactccatgatgtttgcacgatgaaattgcctagtgacacatttctcagaatgtatccccgc

SEQ ID NO: 179359 - DNA, 201 bp, Homo sapiens
gggtggcattgtcacctctgctcttggacacatatcttctttttaaaaaggtatttgtttactttatctccacttctgtccatgctgctatttgtaatagwctttctaccatttttacctgaaacttttctaggagtttccaaatttatgtgtttttacaatgtcatatggtataaaattgatgtttaaaaaatgtatcaa

SEQ ID NO: 179360 - DNA, 201 bp, Homo sapiens
gtgccatttaattttcggagtgctttgaaaaaggtgagatagttcctaatcgaattgtaaagttatcaaaggcctgaaaaaaacacacacacacacacacagaaaagaaaaaattatagattgaacaagtgccaggcattaataaaattctacctggaaccattaacagacatatttagctgtgaaacacttgaagtgttc

SEQ ID NO: 179361 - DNA, 201 bp, Homo sapiens
tgtgccatttaattttcggagtgctttgaaaaaggtgagatagttcctaatcgaattgtaaagttatcaaaggcctgaaaaaaacacacacacacacacacagaaaagaaaaaattatagattgaacaagtgccaggcattaataaaattctacctggaaccattaacagacatatttagctgtgaaacacttgaagtgtt

SEQ ID NO: 179362 - DNA, 201 bp, Homo sapiens
tctattcgattcttctctcttttcttctttattagccttgctagcagtctatcaattttgatcttttccaaaaaccagctcctggttttagtgattttttraagggttttttgtgtctctatgtctttcagttttgctctgatcttagttatttcttgctttctgctagcttttgaatttgtttgctcttgcttctctagt

SEQ ID NO: 179363 - DNA, 201 bp, Homo sapiens
cttcctgacagtacatcacagtattattccaaaccaggacccccagtggctagacagggttaacgtgtcattcctgccccatgaaccctagacttactggmaagtgatttgcagcataacccaaaacctgatgtatgaataatatttgaaggacagtgtcataaatttacactttttaaaaataagagttgtaattatatg

SEQ ID NO: 179364 - DNA, 201 bp, Homo sapiens
ccaggacacagcaaccgtgctcctgcctcacggccttctgctcccagacgccttcacaacttgcttcttttcttttctttccctttccctttctttttttyttttgtttttttagatggagtcttgctctgttgccaggctggagtggcgcgatcttggctcaccgcaacctccatgtcccaggttcaagcgattctcctg

SEQ ID NO: 179365 - DNA, 201 bp, Homo sapiens
ggtggaaagaggctggggagagaatggtaaatgggtacaaagtaacaataagataggagaaataagttctggtattctgttgtacaatagggtgtctaagrttaacaatacctattgtatatgtcaaaatagctggaagagagaatttttaatgttgtcaccagaaagaaatatgtgcatgagctgatagagatacactaa

SEQ ID NO: 179366 - DNA, 201 bp, Homo sapiens
ccctagacttactggcaagtgatttgcagcataacccaaaacctgatgtatgaataatatttgaaggacagtgtcataaatttacactttttaaaaataaragttgtaattatatgtgtgtaaatgtgaatgactgccttaaacgtaagctcatgttctctctctgattctgtatagtgttgccttgagaaccattatatc

SEQ ID NO: 179367 - DNA, 201 bp, Homo sapiens
tacatttaaagttaatattgttatgtgtgaatttgatcctgtcattatgatgttagctggttattttgctcgttagttgatgcagtttcttcctagtctcratggtctttacattttggcatgattttgcagtggctggtaccggttgttcctttccatgtttagcgctttcttcaggagctcttttagggcaggcctggt

SEQ ID NO: 179368 - DNA, 201 bp, Homo sapiens
aagaggcctggctaccacccgtgcccacaggagccatcaaggtggtctttttgtaagagactgagtgagcccagtaggccccctctgacctggcttttgarctaacctccccaccccaccccccaccacatggggtgcccaggacccaggcattcaatgaattcctcttcagggagttttctaaatgtgcagaagtgggga

SEQ ID NO: 179369 - DNA, 201 bp, Homo sapiens
tgtcttttaattggagcatttagtccatttacatttaaagttaatattgttatgtgtgaatttgatcctgtcattatgatgttagctggttattttgctcrttagttgatgcagtttcttcctagtctcaatggtctttacattttggcatgattttgcagtggctggtaccggttgttcctttccatgtttagcgctttc

SEQ ID NO: 179370 - DNA, 201 bp, Homo sapiens
tgggtgcaaggctcacagtacaggtgcaagaaacggcagtgggggtggccgtgaaccctggctctgtggtcaccagaaaacctcacagtccctcctcttcrccataaatcagggaccttgggatctccttcctgggcgggcagcagggattagagcagctccctgtgggacggtacctggctcctcccgacaggagatgct

SEQ ID NO: 179371 - DNA, 201 bp, Homo sapiens
acagcaaaggaaacagtcaaaagaatgaagaaacaacctattgagcggaaaaaaatatttgcaaactattcatccaacaatggactgatatccaaaatgtrcagggtactcaaatagctcaacaataaaaaaaatcccattgaaaagtaggcaaagcccataaatggacaattctccaaagccatgcaagtggccaacagg

SEQ ID NO: 179372 - DNA, 201 bp, Homo sapiens
agtaattttgtgtagtgtggtaagtagaactgtccctagtaggacttagtgaacctcccatagggtttcttccttacgtctacggcatcatcagagggcgyccaaggttgcattttgtttttaaaaataaatctctattgaagtaatacattgtggaaaagattgtgacctaatatgcaatcaaattctttaataaattgg

SEQ ID NO: 179373 - DNA, 201 bp, Homo sapiens
tttttaacctacgtttcattttgagacagtcttgctctgttgcccaggctggagtgcagtgtcatgatcatggctcactggagcctcaacctcctgggttygagtaatccttctgcttcagcctcttgagtagctgggaccactggtatgtgccaccacagccggctaattttttttacttttaattttttttgtagacat

SEQ ID NO: 179374 - DNA, 201 bp, Homo sapiens
ctactggattcggtttgccagtattttattgaggtttttcacatcgatgttcatcagggatattggtctaaaattctcttttttcgttgtgtctctgctaygctttggtattaggatgatgctggcctcataaaatgagttagggaggattccctctttttctaatcattggaatagtttcagaaggaatggtaccagctc

SEQ ID NO: 179375 - DNA, 201 bp, Homo sapiens
tgcctggaaaggccttactgggcagaggtgcagggagaccagggccaagggaggcctctccaccctttgccacctgacaatctgctgagtcacccagctcmcccagacacctggcttgactcagactcagtgcagacaacgagccagatggagcccagctgggacaccttcagtcctaccactctgctgccacagctgcct

SEQ ID NO: 179376 - DNA, 201 bp, Homo sapiens
agattggtttttgtcgaactgcaacagtttcagagaaaaactcgctccccacagaccagtcttcaaactcaaactgtgttcagaatgagatgtgaaaggamaaggagaagggaaatctggttctagtttttaaaatataagtttggttccttgatgtaatttgtaaatcctgggttacagttcagtctctctgattaaatg

SEQ ID NO: 179377 - DNA, 201 bp, Homo sapiens
agtgccaatacattgtctcttctttcagctggcgggggtgggcagtgggaaggagccacggggcggagacgcagagcaaacagtgccagcactggatcccrgcgtgggccggtggtgggtgccaggagcagccagggcctgtgcctagtcgtcacatgtggtgctgagcaaccaccaactcttcccaggaaggaggtgaaa

SEQ ID NO: 179378 - DNA, 201 bp, Homo sapiens
aagatcatgccactgcactccagcctgggcgacagagtgagactccctctcaaaaaaagtctgaaaaagtgttgggcttatagagattttcctaataaggkgtacagtgtcttcttctttgcacatccattttggtggaaaattcagtcaaatgcactagaatagtctttggatatgttttctaaaacaagtatctaattc

SEQ ID NO: 179379 - DNA, 201 bp, Homo sapiens
attggtatcgtggaaccaaggtcttccggaaacctggtggcatgatattcctttttttcttcacctagaatcttcaatgtttttcttttttttttttaatrtaagtgcaaagaacttaaatatatgattgtgtaagatgatagtcatttagaacaacattttttaaatttctgaaaaagtgaggccgggcacagtggctca

SEQ ID NO: 179380 - DNA, 201 bp, Homo sapiens
agtgagaaataagttctactcagtgaatggccatcatggctggtattggtatcgtggaaccaaggtcttccggaaacctggtggcatgatattcctttttytcttcacctagaatcttcaatgtttttcttttttttttttaatgtaagtgcaaagaacttaaatatatgattgtgtaagatgatagtcatttagaacaac

SEQ ID NO: 179381 - DNA, 201 bp, Homo sapiens
tcagccaccatctttcctttacccactctgaggctatatttgtggaacaaagtgtcacctagcataaaagacactcagttctctggctttccccatgacaygcgtttctctgctactctgaaactttctgaattacaaagtgagaaataagttctactcagtgaatggccatcatggctggtattggtatcgtggaaccaa

SEQ ID NO: 179382 - DNA, 201 bp, Homo sapiens
ccaggagttcaagacccaccttggcaacatagtgagaccctacctttgttaaaaataaataattaattttttaaaagacttaaacgtaagacccaaagctrtaaaactactagaataaaacatagggaaaacacttaaggatgttgttctagacaaagattttatggttaagatctcaaagcacagagaactaaaacaaaa

SEQ ID NO: 179383 - DNA, 201 bp, Homo sapiens
agcgtaggcaattgtttgtgtctgtgtgtgcgtatgtgtttctcctcagagcatctggcttttatgagaccctcacggagggagtggctgaatcctgcttytgtggtgagcctcatccagggactcacttggagtcctggttctgctgctcctaggcagtgtggcttttagcacctccatctttctgaacctcagtaccta

SEQ ID NO: 179384 - DNA, 201 bp, Homo sapiens
aaaaacaagactaccacaaaaaactcttagaactgataaacaaattcagccaagttgcagaatacaaaatgaacatgtaaaaatcagtagtgttcctatayaagtataatgaaatagccaccaaagatatcaagaaggcaattctatttacactagctattaaaaaaacataggaataaatttaaccaaggaggtaaagat

SEQ ID NO: 179385 - DNA, 201 bp, Homo sapiens
ctcccctcaacccctaaactgcaccaaatatgcctacccacttcttaggtaagttctcctttaaaatgtgaatgttattcttaaatctgctccgtttttttccaagtacttaggtcatgactgtccttatagaatgtggtactgaacacggtacatggcacgaccgtcttctcttttcagcagtctagaattgtatttgct

SEQ ID NO: 179386 - DNA, 201 bp, Homo sapiens
atctctactaaaatataaaaattagccgggtgtggtggtgggcacctgtaatcccagctacagggaggctgaggcaggagaatcacctgaacctgggagayggaggttgcagtgagcgagccgagatcgtgccactgcacaccagcctgggcgataaagagatttcgtctcaaaaaaataataataataatattatgtgta

SEQ ID NO: 179387 - DNA, 201 bp, Homo sapiens
tctgtttgctttgcatttgctttatattaaatattaggaaagtgttttggtttagtgatcatttctttttttttttttttttttttttgagacggagtctygctctgtcacccaggctggagtgcagtggcgtgatctccgctcactgcaagctccgcctcccgggttcacgccattctccagcctcagcctcccgagtcg

SEQ ID NO: 179388 - DNA, 201 bp, Homo sapiens
tgttcagacaggatggttagtggacctgagaaataaaagcaagtaactcttaagttataaaagcccctcaaaagtccagaaaatgtatgaggttttttttkgtttgtttgtttgtttgtttgttttgctatttaatgaacaagtacaggagtcttatttcagaaagtttttcttaggtgattggctatttttctgtatccc

SEQ ID NO: 179389 - DNA, 201 bp, Homo sapiens
gaaagaacttgaaattttccattttatcaccttgttaagtgggacatgaaatttgtcaaaaaactcattttcatttattgtaagacctcagtgtttcagaattatattttgtttttgaactactataactttgtaatgattttgattaagtttatataaagccaaattcagctcttttatcttttcagtttggttcctaac

SEQ ID NO: 179390 - DNA, 201 bp, Homo sapiens
aggggcaaagtcaggagaaggaaactcactgcagctctgtattattccctaacctttcaatgtggtgtgtttagaccagccaccgttgatccctgagatakatttaactcccacctcagcagcttgccaaagcttcttttgatgtccatgctgtgaccaggtggagtaaaatctgtgacactgagtgatggaaatataact

SEQ ID NO: 179391 - DNA, 201 bp, Homo sapiens
gaaggaaggcctggcagcaggttccagggggtggatcctgcagccagtgtagctactgtaatgcattcctcgggaatttgcagagcttgggactgtcaaaytcactgtgggagagcacatccctccactcagtcagttgttggtgatgaacagaactctcatgtaatgagccatacttctaagggttctatgtaggggcaa

SEQ ID NO: 179392 - DNA, 201 bp, Homo sapiens
ctgaatgcttcccttgaagacctaagtcactggttcttcagcccctttgcataatcctctcactgaaatcagaactgaatttgttctttttcatttttggktaagaagatgcacattagaagacagctcagagcaatggggctgacctagtgggaaaagacactggtttcttttcacgtttctggatggcccgtggcccac

SEQ ID NO: 179393 - DNA, 201 bp, Homo sapiens
tctgcaggctgcctgaggtgagcttccctgggctccggaggcactggagtagcgaggcccaccttagaccctcctcccgagccatacacaagagagaaatyacttttcaaagtaagcgactttgttcattagaaagtgagttatagcagatatataaatatgatactcatttcttcattggttcccattaggattctcaag

SEQ ID NO: 179394 - DNA, 201 bp, Homo sapiens
tagtccagtcagtgtttcagcccacagctaacattttagagtttgttgggtttttaaaaaacataacgcagtttttagcatgttcgatgtgcagctcctcygtgtaagcagatctggtgagactggttcaacatccccaggtgggaaccgtctgtgggaaacggggcgcttgctgggtcttctagaaggggagagcctctg

SEQ ID NO: 179395 - DNA, 201 bp, Homo sapiens
ttcttccttgcaaatcctctcaagaggagtgaaacggttagaattcctgtgtcagacactccccaaggagaactgggccagtccatctgacagccatcgaygctgctcagcacaggcctgtttccgagccagtcgagcccttctctggcccactgtgaagctgtcacaccacacgtgctcagatttccctccgatgtgcac

SEQ ID NO: 179396 - DNA, 201 bp, Homo sapiens
ccacttgggtgaagtgggaggctcagcttagttgggaagcgggccaaagggcaggcccgatcccggtgaagccaccatactgtgtgcattggaattcattscagtggctagacttgggaccctggtccgggacctagagagaggtcagcattcccagacagatgaggagacagggtgttccaggccgcgggaatttcactt

SEQ ID NO: 179397 - DNA, 201 bp, Homo sapiens
aatccacctgccttggcctcccaggtgctgggattacaggcatgagccaccgtgcccggcctcagcttggatctgactccaaagctcatgctcagctggcratgactgctttgcacctggggggtccacattcagcaaacgagagagttccacttggcccccagccgtactaaacggggcagttctgggaggttctctaac

SEQ ID NO: 179398 - DNA, 201 bp, Homo sapiens
acgtttgcttctccaaggcttaaagcagtaaatatgtggcaacaagcaagcaagagactgtgaaatgtttgcagaaattgagggacagcagagtacaaaawcttctacactctgttacagctattcagaaaatgattatctaaaattagaggaagggttggggtgcagggtaaaagttgcatgtaagtatcaaagaaaaac

SEQ ID NO: 179399 - DNA, 201 bp, Homo sapiens
gctgagcactcaaattgtgcctcttctgagtggagatgtcctgtgaggacaaaagacaggctacacttcaaagtcttggtacatagaaaaggaacgtgaartatctcaatcatattttgtattgaaatggtaacatactggatatattcgattaaatgaaacatcaaatttagcttcaccttttctttttactttttcaat

SEQ ID NO: 179400 - DNA, 201 bp, Homo sapiens
gcaccagttctatattattattcctacaatactgtaaaattgtacaaaggcccccatgaccattaagaatattggaatatggtgactcatctttcagtacyaagttgaaaggaaaggaagttatgaccagcagggttcatttcagaggatattcacagcgggatgttattctcccggctgacaattcagagggcttaaggc

SEQ ID NO: 179401 - DNA, 201 bp, Homo sapiens
aaaattaactccacgattgcaattcagatgtagaacaggtacagacagacgcagcaccttgtaaataggtatgatgcaagatgacatccccaaagtcttayatggttatttcatttaaagaaacctgttagacacctacctatgagtaggcagctccccaaaagcttcccagcgcagcctctgagaagtgctttcctctgc

SEQ ID NO: 179402 - DNA, 201 bp, Homo sapiens
cagagagttttagcaggataagcaaacaggattagagtagggtgtcacatagcaaggttccttctccctcttgaacataaggctggctctgtagccccacrcagcccagcgtggtagccacagccttgtgtgtctgctgagcactcaaattgtgcctcttctgagtggagatgtcctgtgaggacaaaagacaggctacac

SEQ ID NO: 179403 - DNA, 201 bp, Homo sapiens
tgttagaaaataatgggtcaacttcttagactttgaggtgttactatagctttatccagcagttttatgttgattcttgccctgttagactaaaaagccascttttatcctttctttgagaaaaatttgttatagcacagattgtttctgcatcagaactattcttgaaaattctctaagtaactttttcttcatatttta

SEQ ID NO: 179404 - DNA, 201 bp, Homo sapiens
gatccaacagaacatttcaagatctgttttttcccttactgtaagtgaaattcccattaatggcagccaggcctgaacaccgatagtgaatggggcctctsgtgttctgagatggacttatcacatggttagcagctgggatttatgtggagactcattaaataaaacagcagtggcagctacctcctgctgtagtacact

SEQ ID NO: 179405 - DNA, 201 bp, Homo sapiens
tgcaccccaaacttcagtggatgacctctgcatctctgttcaagcgttttttactttaattgaagaaataagtagaatttgtaaaatgtctaaccattgtyggatgcagttccagtacccagtgaaatcctttaatggccccttttggatttgaaacttgccttttctctttatgtgcagattcaaatggagggggtatgc

SEQ ID NO: 179406 - DNA, 201 bp, Homo sapiens
gccagcgggaagcacagaactagctgcctcccctcaccacccgcaccctccaccctcgtcacggccagttctccactcttactccacctccagcccagatscctggctccagtcccttccctcgctaatctttgacctacacgatatcctagggatcggtaggagtaaaggtttgaaagttcctatttgaaaacaagtctt

SEQ ID NO: 179407 - DNA, 201 bp, Homo sapiens
gcctccagggtctcttccggggtgggatttgccacccagtggagaaccctgagcagaagagggtaagggaggccagggtaggtgtccaggatggcaagggwggccagggtaggtgtccaggatggcaagggtggccaggtataggtgtccaggatggcaagggaggccaggataggtgtccaggatggcaacggaggccag

SEQ ID NO: 179408 - DNA, 201 bp, Homo sapiens
ctttcagcttcgttatgtgattgtccgtgctgtgcctgtaggagtggccagacaccatgaatcggggactctagggagaacaggacactcattcatctcasgcctctctaaggagaaacaattcctctcctctgaagagaatactcgcggtctcccatgtgagtgaacgatgaagttgtaagaacactcccccacctcact

SEQ ID NO: 179409 - DNA, 201 bp, Homo sapiens
acgtgactgtggatctcaagtactaccggccaactgaagtggtaaggactctctggccacccagtgcatggccacatttggctggctggctgggcaaatgygctcatggaatgcctggtgccagcctttggagctgtcagttcagctccctggcatccttcagcgtgcatttccaaaatcagaacacagtgaattcaattt

SEQ ID NO: 179410 - DNA, 201 bp, Homo sapiens
gccagacaccatgaatcggggactctagggagaacaggacactcattcatctcaggcctctctaaggagaaacaattcctctcctctgaagagaatactcrcggtctcccatgtgagtgaacgatgaagttgtaagaacactcccccacctcactgttggtgacagaggacagtgtggttccagggggtgggcaggtgaga

SEQ ID NO: 179411 - DNA, 201 bp, Homo sapiens
aaggaaatacgattttataaaaaaagagaatatcttctttttttaaaagttcatttgtatgtgtgcataataatacaaatctgatccccatccctgctccctgccaccttaaaaccttttcaagccttcagtgattttccagaacctttagggttagcagccagctgtggccattgcctggaaaggccagccctccaaagg

SEQ ID NO: 179412 - DNA, 201 bp, Homo sapiens
gatgacatccacgttcttattgtgctgttagaaaataatattttctcaccaacatttcacagtgtgtgaaattgtagtctttgttcctgctgacagcacckttgtgctatgaagctattaatgcagccctgtctccgcctgctttttccagatttcctttgacctcgctgagtacactgcggacgttgacggagttggcac

SEQ ID NO: 179413 - DNA, 201 bp, Homo sapiens
tcagtcctggtcaggtctgtttcacatcagctctctaaataatcacagctcttgccacctcagggatctctagcacgtttacctctggcttttttttttttaaacatttaatgtagctatggtagaacacaaagcattcaaactttttattccaagagaatgattagaagtatagtgttgcctgcttcaaaacaataatag

SEQ ID NO: 179414 - DNA, 201 bp, Homo sapiens
agctattgtgaataaagggtgaaacacacataatattcagcattctttttttttaaatgtgatttttcagttttcagtatgagtgtagaattagccgcttwgatttcctacactaagaacagcagcctcggtttctgtgagacttcctagggtccacgtcctggaggagaaagccctgacccaggggtgtgacggagaaag

SEQ ID NO: 179415 - DNA, 201 bp, Homo sapiens
ttcagtcctggtcaggtctgtttcacatcagctctctaaataatcacagctcttgccacctcagggatctctagcacgtttacctctggcttttttttttttaaacatttaatgtagctatggtagaacacaaagcattcaaactttttattccaagagaatgattagaagtatagtgttgcctgcttcaaaacaataata

SEQ ID NO: 179416 - DNA, 201 bp, Homo sapiens
ggatcacctgaggtcgggagtttgagaccagcctgaccaacatggagaaaccctgtctctactaaaaaatacaaaattagccgggtatggtgacgcatgcytgtaatcccagctactcgggaggctgaggcaggagaatcacttgaaccggggaggcagaggttgcagtgagccaagatcgtgccattgcactccagcctg

SEQ ID NO: 179417 - DNA, 201 bp, Homo sapiens
tttatctttataaattaatcttcagaatttttaaaataattcatgtaaaaattacttgtcaaaatttaagtaaaatttggggtaattttccttttgatttkttttttaaagattgtctttatttgttgctgtaaagataagattaatgctctagaatagtggttctcaactaggggtggggaatggggagagagtggctct

SEQ ID NO: 179418 - DNA, 201 bp, Homo sapiens
gaatattttccatctgacgttggtttaatccgtggatgcagcgggccatctgtgtttccattgggttgtctctttattttatttatttatttatttatttwttttgagacagagtctcactctgtcgcccaggttggagtatagtggcaccgtgccagctcactgcaacctccatctcctgggttcaagcaattctcctgc

SEQ ID NO: 179419 - DNA, 201 bp, Homo sapiens
gcatcctcttgtctcagcctcctaagtagctgggactgcagtcctccgtatactttaaatcatctctagattacttatataatacagtgtaaacactgtawaaatagttgttatactatatttttaaatgtggcattgctgtttttttattgtttgttttctgaatattttccatctgacgttggtttaatccgtggatgc

SEQ ID NO: 179420 - DNA, 201 bp, Homo sapiens
tcatgggtctcactcaaatctggtaatgtagggaagcaccaggaaagttttgtgtgtgtgtgtgtgtgtgtgtgtgtgtgtgtgtgtgtgtgtgtgtgtgttggaatgttatgaaaacctgatatttttattctattatttgaaccaggaataattttgctagcaataagtaagactgttttaagtatgaagtttaaaatt

SEQ ID NO: 179421 - DNA, 201 bp, Homo sapiens
tgagtctgacatctcaccaggcactaggactcctgtgatggcgtgagcgagccctgcagcctggggaggtggcagtgagccgttgcgtgttgatgctgccrgcacctgggcaggagacgggcagaggatgggcagagcagcgcgggagccagctcctgggcctggcacccagcagccccgctctcctcaggcaggcagaga

SEQ ID NO: 179422 - DNA, 201 bp, Homo sapiens
ctcatgggtctcactcaaatctggtaatgtagggaagcaccaggaaagttttgtgtgtgtgtgtgtgtgtgtgtgtgtgtgtgtgtgtgtgtgtgtgtgtgttggaatgttatgaaaacctgatatttttattctattatttgaaccaggaataattttgctagcaataagtaagactgttttaagtatgaagtttaaaat

SEQ ID NO: 179423 - DNA, 201 bp, Homo sapiens
atacttgtcattgttttgctggagtttttgcctccttggtttagtagagtccacagtgatatatttgatacatcctaaaagatatgagctgtacataaatrttctaagtgtttgtaaaatacctgctcaaatgctgccctgaggctttgctttccggtacacacagtcttctggccacatctctcactgtcactgagtgtt

SEQ ID NO: 179424 - DNA, 201 bp, Homo sapiens
ctcacctagcaggctttctgctcttttctgggatgttggtgctgtagtgtggcccagagctcttcaccaaacacagtgcatgcattaccttttttaaaaayaaaacttttatattgtaactactacatttgtaaaggttaattattttgtttttcttggtctcagcaggtttaattgttaaacttcgggaaacaattcaga

SEQ ID NO: 179425 - DNA, 201 bp, Homo sapiens
ctggtacaaagccatacagctgcacacaatataaagtaaggttaacagcatatttggtgcgtttataacttccctagggcattttaacattaaaaatagckattgttaacccggtccatctgaacttaaatatgagcttactttgcaagaaatgaggggtaacgtctaagcacttttctctaggttttattattattttta

SEQ ID NO: 179426 - DNA, 201 bp, Homo sapiens
ttctgtcagcagcgccgaagtagcaccagggttccacgttggaatcctcttttccagtgaggtatcaatgtctacggtcagactcctgggtaagtgctgcrtctggatgtcagcaagagctgcaagacagtttgctagtcaatcagctactgccagggctggctggaagcaccatctctgtgcaggtctgactgcaaacaa

SEQ ID NO: 179427 - DNA, 201 bp, Homo sapiens
aggcgccatttgcacagtgattgaaaagtgccttctgccatcaagacagcatccgtgggatattttagcgctgatgggtgcaggaagctatgctaggcacrgcacgggtgactgaaaatgggcaccatagattctctgcccatggggggcttgcattcagtttggggaaggaagtgtgctggatgacagggtataagaatc

SEQ ID NO: 179428 - DNA, 201 bp, Homo sapiens
taaccatgctatgcaaagctctggggcatttccccactgtcacggatggtttcatatccctattttaatatttcttttgcactttattatttcacttgtaygtgttcacattgtaagaacatattaaatcatttttagaaggagagtagatacaaattatgagtaattcattaaaataaatattttaaacatattcataat

SEQ ID NO: 179429 - DNA, 201 bp, Homo sapiens
gtgcgggactactccccctgcagggggaaggtgagctagtcagccagttctggcatttgccattgagctgaggctgcttaaaacatcagatctgcagagtmcattgtgttcagtggcccagacttttttatttccttaactagtagcctctacccccacagtatgtactaatttcaggttcactgtggggcaaccagtgct

SEQ ID NO: 179430 - DNA, 201 bp, Homo sapiens
aatatttagtttttagcttaacataaaaatgcctatattggcttataattctgttttatttagtataaaagtgcccatattggctcattggcccatagggrctctgaagtcacttgaagtttactcacccagcaagcttgactccttagcaggtgaatattcaccctatgcgaggggtgcatttatttcaaaggtttctga

SEQ ID NO: 179431 - DNA, 201 bp, Homo sapiens
ccactgtcaatcataactctgcctaaacagtaccgtgttggcattcgtgaccccccccattacccaattttctttttatcagaggccttgtaaccacctgrttgtttccttgattgcctgtttactgacagtgcccccacagtagaacatgagctccccgtgtgtctggttggctgctgtgtcggcagccctgggcctgcg

SEQ ID NO: 179432 - DNA, 201 bp, Homo sapiens
tagcacaaaagcttttggaactgcaggaaaccctctggcttgcaaacccaggacccgtaggcttcacaggtcttgtgaatggccagcattttgggcttcayaccccactaacctcttgagaatttctttgaaaaactagagtatcatagagatgtgaaaagagtttgatttctaaaatcagtgagtgcatgtattcagata

SEQ ID NO: 179433 - DNA, 201 bp, Homo sapiens
cctgccctctagcacaaaagcttttggaactgcaggaaaccctctggcttgcaaacccaggacccgtaggcttcacaggtcttgtgaatggccagcatttwgggcttcataccccactaacctcttgagaatttctttgaaaaactagagtatcatagagatgtgaaaagagtttgatttctaaaatcagtgagtgcatgt

SEQ ID NO: 179434 - DNA, 201 bp, Homo sapiens
gtctgtacccatcaccaacacatgcaaattagaagcaggtcatgttgtaataataggactttatttttaaatacatatagaatttaaagattcttatgtakttatttgacagtggctctgggaatatctgtggaaacagtgcagtaagaagaaaagaaaagccttctgcagtaccattttctgtccctcgtgagtgtgatt

SEQ ID NO: 179435 - DNA, 201 bp, Homo sapiens
ttaataacaagactgtccacaggaaatagatgtaaatatctctcacaagatgtgacatcatctaaatttagtgatgattttgcttatatcttcaatattcmgtgcttcatctttatactcatgcactctggagagggcaaaacgtatttgcaatcaaggcagtcttttgcacacataccatacgttaatcactctatctct

SEQ ID NO: 179436 - DNA, 201 bp, Homo sapiens
tttgtccactctagttcccgccagactttgaggtccttcgtgtgaggactttgtccttccctcttgttattctcaccacttgtttgcagtaagttcctcamgaatgttatggagtaaataaacaaacatgtcccaaaggccttagctcagtgcttctctaaaggcagcaatcttgcccccagggaacgtttccaatgtctg

SEQ ID NO: 179437 - DNA, 201 bp, Homo sapiens
agtttagaaacatgagactgggtgcattcttagatcacattttcagtttgatttaaaccacataaaattgagcatatgtcattaaatcagaaaagcagttrttggccagggtatgtatggagagaggatgcaaatgcatagagaataaagttgcatgttcatataaaatgggttaggtatagtgcctgtggacgtggatta

SEQ ID NO: 179438 - DNA, 201 bp, Homo sapiens
tttccgtcacgttgcatggagatatgttgcatttgcagagaatgtgacaagaattgcagcccctggaatggtgcaacactggccaccctggatgaggagamggttataaggcaactcaatcacatagtatacttcaagggtcccgggctaaagggatggtggtggaaacagatgagaagagaagcctcaggcttgcactag

SEQ ID NO: 179439 - DNA, 201 bp, Homo sapiens
agtgcacacctgaattcactggttgtgcacacagccttggagtttccgtcacgttgcatggagatatgttgcatttgcagagaatgtgacaagaattgcarcccctggaatggtgcaacactggccaccctggatgaggagacggttataaggcaactcaatcacatagtatacttcaagggtcccgggctaaagggatgg

SEQ ID NO: 179440 - DNA, 201 bp, Homo sapiens
ggtctcttccggggtgggatttgccacccagtggagaaccctgagcagaagagggtaagggaggccagggtaggtgtccaggatggcaagggaggccaggrtaggtgtccaggatggcaagggtggccaggtataggtgtccaggatggcaagggaggccaggataggtgtccaggatggcaacggaggccaggataggtg

SEQ ID NO: 179441 - DNA, 201 bp, Homo sapiens
gaggccctaggtgtggagagttcaagtagtttacaaaagactacttgagtagttcatgttagtggagctggggtttggatcctcatctgatacccacatgsttacactctgccctactgaaaacttcatgggagagaccaacagaagacagaccaccaggcattgtgagaggtgggcatttggtgatatttttccaaaaca

SEQ ID NO: 179442 - DNA, 201 bp, Homo sapiens
tctcatgggtctcactcaaatctggtaatgtagggaagcaccaggaaagttttgtgtgtgtgtgtgtgtgtgtgtgtgtgtgtgtgtgtgtgtgtgtgtgkgttggaatgttatgaaaacctgatatttttattctattatttgaaccaggaataattttgctagcaataagtaagactgttttaagtatgaagtttaaaa

SEQ ID NO: 179443 - DNA, 201 bp, Homo sapiens
gatgtagtttcgttgttgttgcccaggctggagtgcaatggcacgatcttggctcaccacaacctccacctcccgggttcaagcgattctcctgcctcagsctcccgagtagctgggattacaggcatctgccaccacgcctggctgattttgtatttttaatagagatggggtttctttatgttggtcaggctggtcgtg

SEQ ID NO: 179444 - DNA, 201 bp, Homo sapiens
tttttggtatttttagtagagatggggtttcactatcttggcaaggctggttttgaactcctgacctcgtgatccacctgcctcggcctcccaaagtgctrggattgcaggcgtgagccactgcgcccggccatatcaattctttttaatctttcagtgtaatggtagttcaaacagaaattcatgctttttgtgtcttaa

SEQ ID NO: 179445 - DNA, 201 bp, Homo sapiens
aattaattatacaaagaaaaatggatacatattaaactgtcttctgtgcccccagtctctacttttgaacccttctaaatccgtgactttctctgccttgstgccctccttccctccatgccctgtaaaaacatggaagcatctggtattagttaaagttatcaaatcatcggctgggtgcaggtggcctaaaactggttc

SEQ ID NO: 179446 - DNA, 201 bp, Homo sapiens
gccccagtgcctcttatgaccctaacagttaatttgtacataagaaataaaccttgttttaaggaggatgaaggtgtttctcagaggaacactgataaatkttttttgaggaagacaaaataggttggtgagaaccttagtaccagcatatccccattctggctggcagacgactgtgtggtcccaagttcacagagaaca

SEQ ID NO: 179447 - DNA, 201 bp, Homo sapiens
tttagaaactaggcaccattcggccaggcatggtggatcatgcctataatgctagcactttgggaggccaagatgggcagatcacttgaggtcaggagttygagatcagcctggccaacatggtgcaatcccgtctctactaaaaatacaaaaagttagcctggcatggtggcacgtgcctgcagtcctagctactcggga

SEQ ID NO: 179448 - DNA, 201 bp, Homo sapiens
tatttgtggttgagcctttagaaactaggcaccattcggccaggcatggtggatcatgcctataatgctagcactttgggaggccaagatgggcagatcayttgaggtcaggagttcgagatcagcctggccaacatggtgcaatcccgtctctactaaaaatacaaaaagttagcctggcatggtggcacgtgcctgcag

SEQ ID NO: 179449 - DNA, 201 bp, Homo sapiens
cttcccaggtgcatgtcttatcctgtttcctatatttcatatttgtggttgagcctttagaaactaggcaccattcggccaggcatggtggatcatgcctrtaatgctagcactttgggaggccaagatgggcagatcacttgaggtcaggagttcgagatcagcctggccaacatggtgcaatcccgtctctactaaaaa

SEQ ID NO: 179450 - DNA, 201 bp, Homo sapiens
cctccttggccctgcactataacctgtgtgcaggactgccctagcactgaaaggtgtcttctgcagggaaggaagcaattacttctgggccaattcccacrttactccccaggattgtctggggagagtttctgagagggagtgtgagatgaaggatctctccatatggctattctttcccacctttcttgcttccttgca

SEQ ID NO: 179451 - DNA, 201 bp, Homo sapiens
ccagattaagccagattttatgtttcagaaggtttgcgtctgccttctatttctgttggtaagtttaagattcctgaaaggctgctaaagcaggatgtacrtgaggataaccagcccatgagggtatgcaagtaaggaagtgaacatcagtgcggtcacagagaaaccctcctggcagcaagaaaggtgggttttcagcac

SEQ ID NO: 179452 - DNA, 201 bp, Homo sapiens
ttccagtgtggttggaaagtctgagaagcagcctgggtgagaagaacaagaccttattgacagggttcagtcctggtcaggtctgtttcacatcagctctstaaataatcacagctcttgccacctcagggatctctagcacgtttacctctggcttttttttttttaaacatttaatgtagctatggtagaacacaaagc

SEQ ID NO: 179453 - DNA, 201 bp, Homo sapiens
tcccctctgtaatgtaaacttcgtgaagctcaggcctttttaaaatgtatacccttcgctaagtacgcttgatacaataaaatctttgttctctgcagcaktgcagattcatatatgtatatacacacatgcactgtctaatatttatctggtctggaataagcattaatctttaattactatataaacattttaaacagg

SEQ ID NO: 179454 - DNA, 201 bp, Homo sapiens
aactgagtgtgttttgggggagagaattctgtgccatggtagaccaatatcaaggatgattgaaagcctctggcctctttctgaaatgctgatacttggtkagccttacactcatcacccaatactagaaggtattgtgtctggccacagagcggctctcttttcttgatgggtttgaggtgtatgtgcaaccactgagca

SEQ ID NO: 179455 - DNA, 201 bp, Homo sapiens
aaaagcattagtcctatagaggttcaaactgcagtctcagtatctcgccaactgttcattttatcccctttatttctgtggtggagctgagctatctagawtcacaccatgattgtgcagtctacaaggcagtgacactggaagacagctgcacaagcatgaaggaggcacagactttgggacttttaatatgtgattcct

SEQ ID NO: 179456 - DNA, 201 bp, Homo sapiens
tagagatacattacatgcaaggtttgacttggcacttgaaaactgacagcaggtgtgtgagtacccactgtggtcaaggcatcttggctaacacctgcctrttgtgcgggactactccccctgcagggggaaggtgagctagtcagccagttctggcatttgccattgagctgaggctgcttaaaacatcagatctgcaga

SEQ ID NO: 179457 - DNA, 201 bp, Homo sapiens
tcttttaatggacctaggttcaggtggctgaaaaagccattctgtggtagacgcctcacataatccttatgtgcgtgtttattgtgtgtgcctgttcatgrgagttctgtggcagttaaattgtccacccaggatttccagacagaaggaaacacacatgtaagtgatgcagtatttgctggtggtgtggctaaaaaaata

SEQ ID NO: 179458 - DNA, 201 bp, Homo sapiens
ctgaagaagaaagactaaatatacttcatggtttttccatttttgtgtctaaaatctaccctgaaatataaaaatcttttaatttaaattttcaataaacrtgattgtgacttggaattgtgcgtgttgggaagaataattagttgaatgcttgaatatagaaacataaaaagcaaccttcatgcatcctttcttactttt

SEQ ID NO: 179459 - DNA, 201 bp, Homo sapiens
taaaacagcccacttaaaaatattacatcttcatccatgatgttactgcaagaaatgaaaagaatcgtttttcctacattttagtgataaataatagcctyaatggaaagcctgtataggatgaattagaaatggttctagctgttaaaagcagctgtgcaattttgaattctcacacaactttgcaagccttgctgtccc

SEQ ID NO: 179460 - DNA, 201 bp, Homo sapiens
tttgcagcttctcagcttttgtgttttgtctgttaaaatataattactaggaaatagtaaagataaacttggttgtagatagtcttctgagtgttaaggayaaatatccttatgatttgatatctttgcattatatcagattgggcatataaagcctcatttaaagatgttaatttgtttgcttttttgaagtggtcgaca

SEQ ID NO: 179461 - DNA, 201 bp, Homo sapiens
ttcttacagtgagtgctggtctaatgatttccatagaatttgcatcgtaatttggtgacagtgtgtaaaagctgtcattatcagacttcagcatactagtygcttccagctaatcacctccatgcaggggagcctagactgaaacattgttgcttttcattattttggagaataatttaggtagaattactgtttaatttt

SEQ ID NO: 179462 - DNA, 201 bp, Homo sapiens
gcagcctgataaagttcatcgtgtgcttcacatgttcatgctgacttttccgctgaagctcatcaggtctgtggcaggcaaagacagaacttacgagacasaaaatgaaaagttcgcttttgccttataggcagtttgcagatatgctttctgaaatgtgtcggcctcactttgttcattcttttctcactgaaaagagct

SEQ ID NO: 179463 - DNA, 201 bp, Homo sapiens
aatctcccttttatggactattttcgtaagaatatttttctgcaaactgatgtagttagtagatgtcattatactaatgaaaggacattagctattttatyataaagtatgcaccagcactttgcagattcagtgaaactctaaaaatgtctttatctagcaacataatagaaaatactatgatagacatccaaccataaa

SEQ ID NO: 179464 - DNA, 201 bp, Homo sapiens
ttcttcttcttcttttatctaatgtgtaagaaagcgcatttgatggatggaacattcccgtccacaacctctccagtaaatctctcaaagtccttaacctygtacagcctgcctgatagagcatttgctgttgtttatagtctgttatcccagggattggctttctgtgtaataaagtactaaaagtctcgtagagtagga

SEQ ID NO: 179465 - DNA, 201 bp, Homo sapiens
gagagagtgtagctgctgagttgtaagtaggaatagatacaggcaacctctcacaggtaggttagagcacatttctgtgacgttgtggcaagcctgtgtgrattataaagagagttttcattttcagcaactttattcaccaaaatcagaagatgaaaaaagttagggtattttaaagacacatacaccagcattatcacc

SEQ ID NO: 179466 - DNA, 201 bp, Homo sapiens
ggagttcaagaatatgtggaatttaaaataaacattccatttgatgaattaaagaattatttgtctgaagcaacaattggtctgcataccatgtggaacgrgcattttgggattggtgagtttggcctttaaacaacttgtttggtgccatgagatacacattttaagttcttttgataaaatgataatactctggaaatc

SEQ ID NO: 179467 - DNA, 201 bp, Homo sapiens
gagtctggtctggaaataaaaaatgaggattgtccttgtgcaggtagttatcaaagctcccgtggatgtggttaagatcgcctggggaatatgtacagagygaaaagaggctctcagtacaaaatgcagagaacaggaacagctgagaaatggggagaagaaatggagaggcggggaaagccatccaagtgcagtgtctta

SEQ ID NO: 179468 - DNA, 201 bp, Homo sapiens; identical to SEQ ID NO: 31858

SEQ ID NO: 179469 - DNA, 201 bp, Homo sapiens; identical to SEQ ID NO: 31859

SEQ ID NO: 179470 - DNA, 201 bp, Homo sapiens
ctgttttctccactggactgaacttctgaagataaagactctctctcatctccatacccccaaaacctggcatctcattactagatgcttaataaatttgttttttttttttttttcagatggagtttcattgttgttgcccaggctggagtgcagtggtgcgatcttggctcaccacaacctccgcctactgggttcaag

SEQ ID NO: 179471 - DNA, 201 bp, Homo sapiens
tctccaaaaaaaaaaaaaaaatcaaatcttctttataactgtaagaaaatagttatctacaactttttgcttgattttaacctaatatattcttttttttktttttgtttttgtttttttgagacggagtttcacacttgttgcccaggcaggagtgcagtgatgcagtctcggctctcagtctctcagggtaggtagcag

SEQ ID NO: 179472 - DNA, 201 bp, Homo sapiens; identical to SEQ ID NO: 31860

SEQ ID NO: 179473 - DNA, 201 bp, Homo sapiens; identical to SEQ ID NO: 31863

SEQ ID NO: 179474 - DNA, 201 bp, Homo sapiens; identical to SEQ ID NO: 31861

SEQ ID NO: 179475 - DNA, 201 bp, Homo sapiens; identical to SEQ ID NO: 31864

SEQ ID NO: 179476 - DNA, 201 bp, Homo sapiens; identical to SEQ ID NO: 31866

SEQ ID NO: 179477 - DNA, 201 bp, Homo sapiens; identical to SEQ ID NO: 31867

SEQ ID NO: 179478 - DNA, 201 bp, Homo sapiens
atgttaggtattgtttgaagtgctttacatgtgttagctcacttgatcctcagaacagccttttgcagttgttaccattatcctcatttgacaaagaagaraactggggcactagagcccatgttctgaaccacatgctaaactgcctgccttatgaaaagacagtgaaaatgagaaaagagaattcagagtagagagaac

SEQ ID NO: 179479 - DNA, 201 bp, Homo sapiens; identical to SEQ ID NO: 31869

SEQ ID NO: 179480 - DNA, 201 bp, Homo sapiens; identical to SEQ ID NO: 31872

SEQ ID NO: 179481 - DNA, 201 bp, Homo sapiens; identical to SEQ ID NO: 31873

SEQ ID NO: 179482 - DNA, 201 bp, Homo sapiens; identical to SEQ ID NO: 31875

SEQ ID NO: 179483 - DNA, 201 bp, Homo sapiens; identical to SEQ ID NO: 31877

SEQ ID NO: 179484 - DNA, 201 bp, Homo sapiens
ttttataataacattaatgtaatatttgcctattttactatgttgataagtgcaaaagtgatagcggataaaactaagtgatagtggattttaattaacastgtgaaaaggtcattgatagggtttcagagtctgtattgcaactgacattaagaaactgcataacttgtcaaatgtggtctagcatcagagaagaatatc

SEQ ID NO: 179485 - DNA, 201 bp, Homo sapiens; identical to SEQ ID NO: 31878

SEQ ID NO: 179486 - DNA, 201 bp, Homo sapiens; identical to SEQ ID NO: 31879

SEQ ID NO: 179487 - DNA, 201 bp, Homo sapiens; identical to SEQ ID NO: 31881

SEQ ID NO: 179488 - DNA, 201 bp, Homo sapiens
gatactttttcatcttgctctggccacattgcgtttctcatccctccccattccttcacaggtactttactctgacatgcagaacaaggagcagctccctsaacacatcatgctctctctcgagtccttccctttctatatagtgttcttttcttctgaaataacctttttctccccagttaatttctacaagcctttcct

SEQ ID NO: 179489 - DNA, 201 bp, Homo sapiens
tcatttgacaaagaagaaaactggggcactagagcccatgttctgaaccacatgctaaactgcctgccttatgaaaagacagtgaaaatgagaaaagagarttcagagtagagagaacaaccactgcaagtcccctaaggctggttggagcttggcgtgttaaaaaaaaagaatgccagtttggctgcaccctggagggca

SEQ ID NO: 179490 - DNA, 201 bp, Homo sapiens; identical to SEQ ID NO: 31862

SEQ ID NO: 179491 - DNA, 201 bp, Homo sapiens; identical to SEQ ID NO: 31865

SEQ ID NO: 179492 - DNA, 201 bp, Homo sapiens; identical to SEQ ID NO: 31868

SEQ ID NO: 179493 - DNA, 201 bp, Homo sapiens
atttctctcctatacatccaggatgatatcagctctgtaccatccttcagataattgggaaagcagtcacttgaatcattccctgaagggcttaattctcytaggaatatggctaagaagggctggctagagtaatttatatttcatgtgtatcatttggcagaaactaaccacaactttcatttagttcagcactgttgt

SEQ ID NO: 179494 - DNA, 201 bp, Homo sapiens; identical to SEQ ID NO: 31870

SEQ ID NO: 179495 - DNA, 201 bp, Homo sapiens; identical to SEQ ID NO: 31871

SEQ ID NO: 179496 - DNA, 201 bp, Homo sapiens
ctaaagtacctaaagtaaaaaatgaattcctttttaaactgttcttcaataagaaaatatttctttcatgtgcccacataccttatatgatcttatttgaytttagttactatgataaagaaatagacaaacccaggcatggtggctcacaccagtaatcccagtactttgtgaagccgtggcaggtgaatcacttgagcc

SEQ ID NO: 179497 - DNA, 201 bp, Homo sapiens; identical to SEQ ID NO: 31874

SEQ ID NO: 179498 - DNA, 201 bp, Homo sapiens; identical to SEQ ID NO: 31876

SEQ ID NO: 179499 - DNA, 201 bp, Homo sapiens; identical to SEQ ID NO: 31880

SEQ ID NO: 179500 - DNA, 201 bp, Homo sapiens
tctggctaatttttgtaacttaatatattcttaaccattacattctattttaggtatcctgaagcagtttatgttgtttataccggcgatgttaatgtcarcggtcaacagatactagaaggtgctttcagaagatttaacatcagattaattcacccagtgcagtttgtttttttaaggaaacgctatcttgtggaagat

SEQ ID NO: 179501 - DNA, 201 bp, Homo sapiens; identical to SEQ ID NO: 31883

SEQ ID NO: 179502 - DNA, 201 bp, Homo sapiens
ttggtctgcataccatgtggaacgagcattttgggattggtgagtttggcctttaaacaacttgtttggtgccatgagatacacattttaagttcttttgrtaaaatgataatactctggaaatctgcatcatgccctaattctcttgccctcatccaccaaatgtgctttcctcacttgagaccttgtaagatagtagtt

SEQ ID NO: 179503 - DNA, 201 bp, Homo sapiens
agagtagcaaggtgggctgggccgggcctctgggctggagtcatggtcctagagctgggtgtggttggtgagggtcagactagctgggatcatggggtcartaagtccaggcactgttggctatacacagggcttgggatggggttcaaatgcatgagacgtggtccttgacctcaggcagggaggaggtagggattagac

SEQ ID NO: 179504 - DNA, 201 bp, Homo sapiens
ggttcgtgggagccacagggcaagtgtggagcccttggggtgggcatggctgtggggtgagccccggccaggctctactcagctctcccctctccgtgctyatgcccagccctgcctgcagtactggccagagccaggccggcagcaatatggcctcatggaggtggagtttatgtcgggcacagctgatgaagacttagt

SEQ ID NO: 179505 - DNA, 201 bp, Homo sapiens
agtcacagggaaggagggagaggcacggaggggatggagctctgtgggaggctgtgggtttgacttggggtttgggtacgtttgtgcctgtgtgcccacgwtgccaggtggtgaccagtcttctcagcattcctgttccaccttgctctctgggtacgcgcttgctgctcctccgcccttctttgtcactgtctttgtctc

SEQ ID NO: 179506 - DNA, 201 bp, Homo sapiens
atggcctatcctgtgggtggcagtggcttcatcctttgcccttggagagtcactggggtggaagatgttggagggagggagacaagccagatgagatttcrgcccccaacttgtggggtgagccagcgtggccgggcagagctgtaggtagagagttttccagggatctgagctcccctctcctccagtgcatcacaggga

SEQ ID NO: 179507 - DNA, 201 bp, Homo sapiens
ctagccccgccccttacctctgggtcctctgccccgcccttctgagttccctagttctgcccctcaccttgggctctttggccctccttagtttcctagcyccgcccctcacctctggactctttggcccctcctttctgggtttcctagctctgcccctcatctctgggctctttggcctcttccttctgggttccctag

SEQ ID NO: 179508 - DNA, 201 bp, Homo sapiens
tgggtcctctgccccgcccttctgagttccctagttctgcccctcaccttgggctctttggccctccttagtttcctagccccgcccctcacctctggackctttggcccctcctttctgggtttcctagctctgcccctcatctctgggctctttggcctcttccttctgggttccctagctccgcccctctcctctagg

SEQ ID NO: 179509 - DNA, 201 bp, Homo sapiens
aggttccttagcacccactctcccatatctgggccccaccactgggccttggttctagccctgtggtcctaaaacattacccccatttctcccttctcccygagggcgggcctgggctcgggctcgtgcttgccctctcactccccgttcccctccccccacaatactggagttggggtcaggctcatgattccctccctc

SEQ ID NO: 179510 - DNA, 201 bp, Homo sapiens
  misc_feature (1)...(201): n = A,T,C or G
acattacccccatttctcccttctccccgagggcgggcctgggctcgggctcgtgcttgccctctcactccccgttcccctccccccacaatactggagtnggggtcaggctcatgattccctccctctcttcctctccccaggatcagtaccacttttgctacgatgtggccctggagtacttggaggggctggagtcaa

SEQ ID NO: 179511 - DNA, 201 bp, Homo sapiens; identical to SEQ ID NO: 31990

SEQ ID NO: 179512 - DNA, 201 bp, Homo sapiens
tggaggtgaagttcttttatttatttttcctcatttattgattactccattcaacaaaatatttattgtgggattacaatgtgtggggccctggggaaacygagggagacaaaaagacaaggattctgtcctcctgtactttgtagccagtggagagcctggcatgaaattagaaaaagcacaaatggaagagataattgc

SEQ ID NO: 179513 - DNA, 201 bp, Homo sapiens
gtaggcttggtccagcctgtagtaacatggttggcctccacctcaggacaccctgcttcaaccttgagcttgcttaagccccatcaccacagatctccagmttctaggcccctcctcggcctcattctcatctcctgttccaggagcagtacatcttcattcatgatgcaatcctggaggcctgcctgtgtggggagacca

SEQ ID NO: 179514 - DNA, 201 bp, Homo sapiens
tggctgaccctctgtgcctcagtttctccagtggtcagaggatacaacccattctaatgacctcacaattcagcatactttaatctgagttaaaaattaaytggccagttaggatcacacttggatagggcacagactgaccccctcatcctcattctgagctgacctctgagccttacgcgatgcatcacaaatgtgtgt

SEQ ID NO: 179515 - DNA, 201 bp, Homo sapiens
gcacttattaatcatattctccttgtaatctctcttattaaattttcaccattttataccattttaccctgcttagtagctgtttttttttttttttttttgaaacagggtctcactgtgtcgcccaggctggagtgcagtggtgcaatcctggctcactgcaaccctctgcctcccgggttcaagtgattctcctgcctc

SEQ ID NO: 179516 - DNA, 201 bp, Homo sapiens
gaaattgtctttccacccatgaaagtgatttatattgccccatttatttaggtcttgaatgtctttcaataattctctccataaaatcttgtacatctttwtttagatagatgtccctaggttctttatttttgacttctattgcaaatggtacacttttcaaatattacatttccatttcttatatagagaaatgcagtt

SEQ ID NO: 179517 - DNA, 201 bp, Homo sapiens
agatgagagagagagctggctggggccaccttgcctgaggccagacaccagcaagagagagagagtctaggggtggagtgtgcagcggagtggaggagatsggggggatggcccagccagggcgatacactctgatttttcccctcgttgttcctgcacagctttaagagagactattttaaagtatcatttaatgaggga

SEQ ID NO: 179518 - DNA, 201 bp, Homo sapiens
atgattccccacaacttggatgctccaaagaaacatctggtgagcaaggaaaaggcatttctgcttccccaaggagaggctgtcagtatgggatgtcacamgccaagacgtgaccgagactgtaactggaaatatttaaatttgtcaggattcacttatttactctccactttgttctgcagaggatttggaggagctcat

SEQ ID NO: 179519 - DNA, 201 bp, Homo sapiens
catcttgtttagccttactaaagtcaacacatggtggcctaattcaacagctgttaaatgttatcctcattgttttaatgtgcattttgacctctgatctyggagtgacctgtagccctgtgtaatttagagggatggggctttgaggtccccaagttctgttttgtcagcgtgtgttgacagttgaagagagtgtgtctg

SEQ ID NO: 179520 - DNA, 201 bp, Homo sapiens
atcatagcacagggttccgcagaggatctctattgcactccccttagtgtacagatggggaagctgaaacccagagaggggaagagacttggctgtgatcmgacagtgggtcaagaacccaggtttcatgatgacggctgttgattattcccattttacagatgaataaactcagatttagagatttagccacttgtacaa

SEQ ID NO: 179521 - DNA, 201 bp, Homo sapiens
cattgttttcctgccagcatgctgggattctgctcagttataatacctggacaatgtgctcgattctagatggcctatcctgtgggtggcagtggcttcakcctttgcccttggagagtcactggggtggaagatgttggagggagggagacaagccagatgagatttcggcccccaacttgtggggtgagccagcgtggc

SEQ ID NO: 179522 - DNA, 201 bp, Homo sapiens
ttgttgtgttgcccaggctggtctcaaactcctgggctccagcgattctcctgcctgggcctcccaaagtgttgggattacaggcatgagccactgtgccyagcccagtttctttatttataagatggggatagcattctggtccatagagtcatcaagaaaccgtaaaacataacatgcacctcccttctgctggggtag

SEQ ID NO: 179523 - DNA, 201 bp, Homo sapiens
gccaggaaaggtaagtccgctgagttcctgcagcctttcagcggcaggtttctcacctgcccagcgctggggaggtggatcctgaggacctacggctgtgrgagtagaggagggtggttgggcagtcctggggccaggaggggcttcctgctgggtttccatgtgccctacctcaagggcgccttctcccagggtgacagc

SEQ ID NO: 179524 - DNA, 201 bp, Homo sapiens
agtgagtgctgaaatctctcttcgatggctccatgtataactggagacatgctgcttgcctgcattccagggaagaaaggaaaccttctgggtggaaacasaatcttgtattgtgctgtacatggggccagtgttgaaaactgtgttactggtgcactcccaagataggagcagcctgggcgaatgctttcctttgcatct

SEQ ID NO: 179525 - DNA, 201 bp, Homo sapiens
gcttcagcctcctaagcagctggggctacaggcttgcaccaccatgcccagctaatttatatacaaatatatatatatatatatatatatatatttttttwttttttttttttttttttttttgtagagacagggtttcactctgttgctcaggctgatcttaaactcctggcttcaagggatcctcctgtttcagcctcc

SEQ ID NO: 179526 - DNA, 201 bp, Homo sapiens
ttgcttcagcctcctaagcagctggggctacaggcttgcaccaccatgcccagctaatttatatacaaatatatatatatatatatatatatatatttttwttttttttttttttttttttttttgtagagacagggtttcactctgttgctcaggctgatcttaaactcctggcttcaagggatcctcctgtttcagcct

SEQ ID NO: 179527 - DNA, 201 bp, Homo sapiens
tcttgcttcagcctcctaagcagctggggctacaggcttgcaccaccatgcccagctaatttatatacaaatatatatatatatatatatatatatatttwttttttttttttttttttttttttttgtagagacagggtttcactctgttgctcaggctgatcttaaactcctggcttcaagggatcctcctgtttcagc

SEQ ID NO: 179528 - DNA, 201 bp, Homo sapiens
tccaggttggaagtcaaggggatttgtattccaggaatttagactcagggatgggggctggaagggaagttggaatcctttcattcaatctctgttctacwtattcattcagcttgcgtcctgaggcctcacagcctggtgggagacacacaggcactttagtaacgacccagggggcaggagagaagcccagggtgggag

SEQ ID NO: 179529 - DNA, 201 bp, Homo sapiens
tgaaggtagagattgaagaaccaggtttccctccaggaatctggaaaattcctggagggtgggggatggtgttatgttgtgaaaaggccatgttgagagtrtcatctgggagctttgagttggggaggttgagtccctggcaagagactgaagggaacgggcctcctgcctgccagcccctcccccaggctctggccccac

SEQ ID NO: 179530 - DNA, 201 bp, Homo sapiens
agggaggcatcatgaccctcccagcaacactgttgcagcgtgccaggctctggactgctctggatgtgcactgtctgggattcctgggtccagcctccttrcacagccctgtgtctcagccctctacttcactgggattgctgcattgcattgagggtgtgcgttctcctgagtttctgcatgctctgcctctgcattgtc

SEQ ID NO: 179531 - DNA, 201 bp, Homo sapiens
attcctggcaaaggagccatatcagtgaggactgtggcgtggaagtgcagaaggtatcagggatggtgaggaggtagatttgctcaaaaggcaggacacayattgaggatgtagggcggtttgtgcagcccagtttgttccttgggcacagccacctacaggaggggctcgatggtccctgtctttcctctgatcccttgt

SEQ ID NO: 179532 - DNA, 201 bp, Homo sapiens
cagggaggcatcatgaccctcccagcaacactgttgcagcgtgccaggctctggactgctctggatgtgcactgtctgggattcctgggtccagcctcctygcacagccctgtgtctcagccctctacttcactgggattgctgcattgcattgagggtgtgcgttctcctgagtttctgcatgctctgcctctgcattgt

SEQ ID NO: 179533 - DNA, 201 bp, Homo sapiens
tatggtggtgtccatgtatccaggatgtgtccacaaggggtgtggacgtgttgggtgggaatgtcctggtggctgtacccaactcaacctctggtagcccyttccctgggacttgcctcctgatcgctcttcagactccaaagccagaagccttggaaggggccccgatagttctgtttttcaacggtcagcctagagctg

SEQ ID NO: 179534 - DNA, 201 bp, Homo sapiens
ccaccacgctcggctaattttttgtatttttaataaagacggggtttcactgtgttagccaggatggtctccatctcctgacctcgtgacctgcctgactsggcctcccaaagtactgggattagaggcatgagcccccgggcccggcccaggcttttggtttctaatgcttccaccaccctgtggctggaataagcttct

SEQ ID NO: 179535 - DNA, 201 bp, Homo sapiens
aggagttcgagatcagcgtgggcaacatagtgagattgtctctacaaaaaatacaaaaattagctgggcgtggtggctcatgcctgtagtcccagctactrgggaggctgaagtgggagggttgcttaagcctgggaggcagaagttgcagtgagtcgagatcgtgccattgcactccagactgaccaacagagccagtcc

SEQ ID NO: 179536 - DNA, 201 bp, Homo sapiens
ctctgactgcaggagaccagcgcagcggtggggtcactgaggccagcagcctcctggggggctccccgaggcgtccctgtggccggaagggctccccataycacacggggcagctgcaccctgcggtgcgtgtcgcagaccttctgcagcacatcaaccagatgaagacggccgagggttacggcttcaagcaggagtatg

SEQ ID NO: 179537 - DNA, 201 bp, Homo sapiens
tgcacgccggccccgggccagcaggatccctgcagaggcctcacctggctcttactctctgtggactctgaccctggcaaccctcagcctagtcctggttrgacgcctgctctgacagtttccaactcaacctttttgacctcgactctgaccctcatcctaattttagactgatttggtttttcactctcatgctaaccc

SEQ ID NO: 179538 - DNA, 201 bp, Homo sapiens
tttggacctcagtttccccatctgtaaaattaagggtttgggcatcccaccacaatggcataactggtacttgatttgccatccagctgtaagcaaccagwaatccagctaaaatataggaatcaattgctttcagacattgaactataggcagctgaagaccgtggttcctgagagcagagaagcaaatgaggtgaagtc

SEQ ID NO: 179539 - DNA, 201 bp, Homo sapiens
tggagtctttgtggtggtcaagtctgcaaggagccctgttgggcacccaggcctgagttttggaatctggctgggcctggccttgaggagttgttaatcakgagccttcagagagtcctggagagagatcgctgggggaccaggggggctctttgtttctctgcactgcaccttgcaggattacaaagggcagatcaatat

SEQ ID NO: 179540 - DNA, 201 bp, Homo sapiens
gaggttcaatttgtaaaatttcccttttatgaattgtggttttggtatcaagtctaagaactccttgcctatccctgtctcccaaagattttctcctgggktttttttttttttttttttttttttttgatacggagtttcactcttgttgcccaggctggagtgcaatggcatgatctcagcttaccacaatctctgcct

SEQ ID NO: 179541 - DNA, 201 bp, Homo sapiens
acttcctgagaggtgtgtagtgatatctcatcatggtcttaatttgcatttcttcagtgtctagtgatgtcgaacatcttttcttttcctcttttttttttgagatggaatctcactctgttgcccaggctggagtgcagcagcatgatctcagctcactgcaacctccacctcccaggtacaagcaattcttgtgcctca

SEQ ID NO: 179542 - DNA, 201 bp, Homo sapiens
gctcctcgcattgcagcactgcaccgtgccaacagatggcatgctaccacaacattgcatcttggcatcacacagcatctctgtactgcactgcactattrcatggacgtcagtattgcatcaggactgtgaacttttcctgagtttctgggcatggcccctctgcattccacagttgcattgtaccaacagtgcactttg

SEQ ID NO: 179543 - DNA, 201 bp, Homo sapiens
gatgttacccactatgagctggagctagaactgggtctggcccagagacacaggtctagagacggacatgggtcagggagagggagtgaatctggttaagraatcactctgaggctgggtacagtggctcatgcctgtaatcccagcactttgggaggccaaggtggaggcaccacttgaggccagaagtttgagaccagc

SEQ ID NO: 179544 - DNA, 201 bp, Homo sapiens
atgtgttcagctgtctggaagctctccgaaccctgtccttttgggtatttacggaggtttccttacataagcatgatggacaaatgtgattgcacataaarcacctgatctaaacccagcaaggcctgtctgcttagactttacttggcctttccgtggcattccttcctctagggtatggggcaggaccctctctggaat

SEQ ID NO: 179545 - DNA, 201 bp, Homo sapiens
ttgactcttcccttattccctcattccctcttcctcaccctcactgggactaggaggtccctgagggcagggcagagtcttcatcatccttgtacctctamtagtgccagcctgggacctgctttgtactggcagggaaaaatcccctgtgaatgaagctgaattaacacttatggccagcagaagggcaggctttgtttt

SEQ ID NO: 179546 - DNA, 201 bp, Homo sapiens
tgtgtgaagacagagcaaggtgtcagccgctacaccatcaagaacctgctgccctatcggaacgttcacgtgaggcttgtcctcactaaccctgaggggckcaaagagggcaaggaggtcactttccagacggatgaggatggtaagagtctcagtcccaattcccggggccctgtgtacctcccacagatacgccatgtc

SEQ ID NO: 179547 - DNA, 201 bp, Homo sapiens
agccaggcccagtacgatgacttccagtgggagcaagtgcgaatccaccctggcacccgggcacctgcggacctgccccacggtaagtctactctccatcrccattaccccttcttctccttccagaggcacttctacccacctgctgtgtgaccttgggcacattacttaacctctctgggccccatctacatttgcatc

SEQ ID NO: 179548 - DNA, 201 bp, Homo sapiens
actttgagttaatttttcaaatgtggtgtgaggtagggatccaacctcattcttttttttttttttgagacagagtttcacccttgtcgcccaggctggartgcaatggcgcaatctcggctcactgcaacctccgcctcccaggttcaagcgattctcatgcctcagcctcctgagtagctgggattacaggcgcgtgcc

SEQ ID NO: 179549 - DNA, 201 bp, Homo sapiens
tatgttgctagtggctctcattgtactggttaatgcaggcagagaacatttccatcctctcagaaagttctgcagacagcactggtctagaggcatgaggyggcctgcagcaccttcagtgaggcctgggcatctctgggaggggaattggtctggatggaccatgactcagtggctcttgacaaaaggttttgttcaatc

SEQ ID NO: 179550 - DNA, 201 bp, Homo sapiens
cggtttgctattctctgcccccttcctcggaccctgtccctctcttcccagtccgcagctcgtgttaaagccttccagaaaccccagtccccttccccggyttcggcgccgtctcttactcgacgaccttggctggatccccgtggtgcccatagacaagcgcccggacccgggcaggctcggcggatgcggagtaggagg

SEQ ID NO: 179551 - DNA, 201 bp, Homo sapiens
tcagttgatggaaattggggttgtttacacttttcagctattatgaacagtattgctatatttgtgtacaggtttttatattgatatatgttttcattttycttatgtaccatatatatcataagatatctctgtgtttattcattgaggaactgctggactgttttccaaagcagctgtaccactttaaatttccactac

SEQ ID NO: 179552 - DNA, 201 bp, Homo sapiens
tggatatagagccagcacaggtggcgtttttgcattgtgtactagaggagcttgcaaggaattctgctagcaaaagaggaatgcaaggtccattgtgacartcgtcaaggaggaggtgctgctgtaggatcagagggatcagagtggcctcaccccttattgagcacctgttatgtgagaggtggggatacagtggctgag

SEQ ID NO: 179553 - DNA, 201 bp, Homo sapiens
ctcctgggttcaagcgattctcctgcctcagcctcccgaatagctgggattacaggcacccgccaccatgcctggctaatttttgtatttttagtagagayggggtttcaccatgttggccaggctggtcttgaactcctgacctcaggtgatccacctgcttcggcctcccaaagtgttgggattacaggtgtgagccac

SEQ ID NO: 179554 - DNA, 201 bp, Homo sapiens
ggttagtgggtatttataagtggggagtgtctctgtgttgtgtccaggtatggggctggccaggtgcctgagtgtctggttgtaggggtccccaagtgtcygggtatctgagggtgggggtatctgtgtatgaaacaacagggacccagtcattgaagtatccagttgttagtgagtctgggtgtggggtgccatgtgtct

SEQ ID NO: 179555 - DNA, 201 bp, Homo sapiens
gtgtctcgctatctaggtgtggacaacccagtaccagcatgtgggaggatcagggtgtgcagacagaggctatcccagcatccctggggctggaggtgggkgtatccatgtgtctgggagtcctcaggttagtgggtatttataagtggggagtgtctctgtgttgtgtccaggtatggggctggccaggtgcctgagtgt

SEQ ID NO: 179556 - DNA, 201 bp, Homo sapiens
gctcccatggctttagccaacctgggctcctttctgtgccctggacaaactgtgtttattgaccaccttgctttgctcccctgggtcttttgccacaaatgccttccacccatctctacctatccttcttggctctgcttagatgccgcctcttccaggaggcctttcccctctacctggccccctcccctggaccccctc

SEQ ID NO: 179557 - DNA, 201 bp, Homo sapiens
ctgcctggcaacagtcatctagaggtgagcagtagctgccccttttggatgggacactactgtcctgtttgccgtggtctttacccagcatacgtcccccrtttacatggaacttctcctgcccttctgtaaatgctgcaggaggactaggaagcagaatgcttctgccaagccctagaggctggaaaggaatgcagggca

SEQ ID NO: 179558 - DNA, 201 bp, Homo sapiens
agtagcttgtctgaggttatgtgggtggcaaggaggtagactctggtctctagagctctatccaggccctataatggcctagagacagggagtctggctcygtgccctgtacccttctctctggacctcagtttctccatccataaaatgggattagtaactcagtccaccctccttcatggggatgtgaggaggcccagc

SEQ ID NO: 179559 - DNA, 201 bp, Homo sapiens
ctactggtaagccctgagactctaggttccctggctgccctgcctgtgccctatcccctagcctccaggaatccctccctgactgcctagctctgggctcsccagttcagcccctgcccacctgctctgtgtttacagatgatcggcaccgagtgaaactgcacccgatgctgggagaccccaatgccgactacattaatg

SEQ ID NO: 179560 - DNA, 201 bp, Homo sapiens
actgatccaggagccgcctccatagggcttctagcttacagagatgaatgagatcgcctccagcagagtccctggggagccctcctggagcggggatctgwgtgagcttgtgttggctggcagccaagcccgggaggaggcagcgctgggtggtttcgggtgccctttgggaagcccaaatccccccgccaggtcctgagc

SEQ ID NO: 179561 - DNA, 201 bp, Homo sapiens
attgatcagggagatggggagtgggcctggcataaggtcccctgctgtacttggtttccttccattctccgtggagatggcaagatgttggcattgtcagrctgtgtgttggctctgtgggtggtgctagctcaactttccctgtggcccagccctgggcgatctttctggttgcagctatggtgactcctgggtgattag

SEQ ID NO: 179562 - DNA, 201 bp, Homo sapiens
cctgggtgattagaaaatgggcatactgctcccagccctgactacaattaatgacccatcagtttgtcagggctcttcgggcagctctgggagcctcagcytaggtctagatgagttgacttgggcaaggagagtagcaaggtgggctgggccgggcctctgggctggagtcatggtcctagagctgggtgtggttggtga

SEQ ID NO: 179563 - DNA, 201 bp, Homo sapiens
tagaggctcagtgggaaaaagatcccggtcttccgcctcccatttgaatacttgaaactcagtaccaggctgtcctgtcatcttagagccatgagtgcacrtgtgcacacacacacacgcacacctgcacacactcacacgcacacctgcatgtggacacatgcatggggaggtgtggagcccctcccaccagggagaccc

SEQ ID NO: 179564 - DNA, 201 bp, Homo sapiens
ttggggttgtatttgaattcccccacccacaactgggcatgtacctgggcttgggtgaaatcccagcccctaaatgtgcaacctgttgggaaaagttttgyttctcctgggaccactcttgggaattggatgttctattgacaaaccaaagggcagaaaagtctcattgcaaacaggctctgtttgccaggtgtcttcaga

SEQ ID NO: 179565 - DNA, 201 bp, Homo sapiens
acaggtgaggaggtaaggattcagagagggcaagtcacctgcccaaagtcacaaagggacttagaggctcagtgggaaaaagatcccggtcttccgcctcmcatttgaatacttgaaactcagtaccaggctgtcctgtcatcttagagccatgagtgcacgtgtgcacacacacacacgcacacctgcacacactcacac

SEQ ID NO: 179566 - DNA, 201 bp, Homo sapiens
aggtacaaggcctggcccaccgggtctgaataaatatatatggcctgaaagaataaagtttaagggggccaagttcagaggtggagatgccagatgggggygcactgattccactgaaggtagagattgaagaaccaggtttccctccaggaatctggaaaattcctggagggtgggggatggtgttatgttgtgaaaagg

SEQ ID NO: 179567 - DNA, 201 bp, Homo sapiens
cctttcctgggcttcaggcagagctgagactagaaactgaggctcaggatacttagcctggaggatgtgtgtgtgtatttgtacgtgtgtttgtgtgtgtkaggtcatagggctgtacctcctctgtccctccacagtctggagtctgggagggggttgtatttaggaccctgactccatggaggggtcctggggcagaag

SEQ ID NO: 179568 - DNA, 201 bp, Homo sapiens
gtcctctggccgcctgtgatcccctgtacgctctcctccctgtccagtgtgtaccaggtgattgtggaggaggagcgggcgcggaggctgcggcgggagcsaggtggacaggactgcttcccagtgccattgaccttcgaggcggcgctggcccgaggcctggtgcactacttcggggccgaactggcggccagcagtcta

SEQ ID NO: 179569 - DNA, 201 bp, Homo sapiens
accgctgagtcttgctgagagacagagagaggcaggaaacatgggctctgctcctgggattcactgatgagttggggagtcaggactgacccagggaagtygggaccaggctaattgctatgtggatagtggggacaatcagtgctgttagttttgagaaaatatgcccttgggcaggagtggtcagcattttggtgagat

SEQ ID NO: 179570 - DNA, 201 bp, Homo sapiens
ggagacagggagaggtgtgactgcactaaatcctccagtgggtgctagagagagcgggagatcagggtggtgtgggctcatgcctaaccgctgagtcttgytgagagacagagagaggcaggaaacatgggctctgctcctgggattcactgatgagttggggagtcaggactgacccagggaagtcgggaccaggctaat

SEQ ID NO: 179571 - DNA, 201 bp, Homo sapiens
aattgcaaatttgtttctactgcatcatgctgcacctcgagggatgggtaggattcagaccgcagagatgggaaggaaagggcatgtgtagaggaggcacygtatgtgcaaatgtgtggtgataggcatgggaggagacagggagaggtgtgactgcactaaatcctccagtgggtgctagagagagcgggagatcagggt

SEQ ID NO: 179572 - DNA, 201 bp, Homo sapiens
tagaagcctggcttgatggcatccatagtctcctttgcttagccttatctctcacttccctgggacatggtgggtggaggctgctggtcagggatgctctkaccatccagtgcccacctgcctgccaatcctgcccccagatcagctaccagagcatcgagtcatcagacccggcagtgaacgtgccaggcccacgacgta

SEQ ID NO: 179573 - DNA, 201 bp, Homo sapiens
agcggcaaggctggaatttaaacccaggtgtctggcaccaaagcccactttcccctggcccctgctgcctttcccttgcagtgcccagtgggattgcagcygagtccctgaccttcactccactggaggacatgatcttcctcaagtgggaggagccccaggagcccaatggtctcatcacccagtatgaggtgggtttgg

SEQ ID NO: 179574 - DNA, 201 bp, Homo sapiens
agcccgcagggccctgtgttaggagagggagggaagcttcctggaagaccctcccttagtcctcagtcctagatcctagggtgggcgggtggggtcacagyctctgttctcaccgcttgtgcaccggagggaagggaggagaactgcatcccgtggtggccctggcagatggggttggggaggctggctgaggtgtgtgca

SEQ ID NO: 179575 - DNA, 201 bp, Homo sapiens
ccctcctgggttaagagctccatgaagggcagagaaagccctgtcttgtctatatctccacagtctagcccaggggagtcgggtctccccactctgaggtrtagggaggagtggtttgtgggcactgctgggtgcttcccggtgctgaggcctcacagcagtccctgtgggagattattattaacctcactgtgtatgtat

SEQ ID NO: 179576 - DNA, 201 bp, Homo sapiens
tccccacatcaggtgagttctgtaacacctgcaaccaaaagtgaagcatctgtggtgctcctgctggataccttctggatatagagccagcacaggtggcrtttttgcattgtgtactagaggagcttgcaaggaattctgctagcaaaagaggaatgcaaggtccattgtgacagtcgtcaaggaggaggtgctgctgta

SEQ ID NO: 179577 - DNA, 201 bp, Homo sapiens
ggccctgttgctggctctagctcctgcctgcctgtccagctgcatcttgttttgtgtcactgccccttgcatcctatgatctggccagcctgaccttcttrccaaagacccaaatgcccacagcctgctgtctcctctctgggcctttgggcaagccgtgctttctctgcagaactttctaactccagctttttgctggtg

SEQ ID NO: 179578 - DNA, 201 bp, Homo sapiens
tgcctagctctgggctccccagttcagcccctgcccacctgctctgtgtttacagatgatcggcaccgagtgaaactgcacccgatgctgggagaccccartgccgactacattaatgccaactacatagatgtgagtgccttgccctgtcatttctgcagacctggccctgcccgctccaggcttactatccaggcaggg

SEQ ID NO: 179579 - DNA, 201 bp, Homo sapiens
ttgctgcgtgtgaagatgcctagcactgggcctgtgacatagcactcactccccaggtgctgttgtttgggaaaagctctctcaaacggtgtttttcctcygccctcccaccaccacagcagcagtcatcaacacaggaggcctctgtgaccaaatgtgtgggggcttctccccaccaccaagcaagcaattaattctgta

SEQ ID NO: 179580 - DNA, 201 bp, Homo sapiens
acagggtaggtgtcataaatattccatgagttgcaggtaattgaatttcctcatggcctagaacggtctgtggtgccatctccttttccctagatttgggytggtcactccaggccaggaatttccttcttccttcttctctcaaggattatagaagtctgtggtctttttttttttttttttttttttgagacagagttt

SEQ ID NO: 179581 - DNA, 201 bp, Homo sapiens
tcacccaggctggagtgcagtggcgcaatctcagctcactccaacctctgcctccctggttcaagtgattctcctgcttcagcctcccaagtagctgggaytacagacgtgcgccaccatgcccagctaatttttgtatttttttttagtagagatggggtttcaccatgttgaccaggccagtctcgcactcctgacctc

SEQ ID NO: 179582 - DNA, 201 bp, Homo sapiens
gagtgccaagttgctttccaaagcaactctgcctgttttctttcctagcagcagtgtgtaagactttctgttgctctacatcaagatcaaaatttgccagyctttttcacttctgccacattagtttgtataaaatggtaattctctatagtcttaatttgcatttcactgatgactaatgaagttgaacgtattttcaag

SEQ ID NO: 179583 - DNA, 201 bp, Homo sapiens
aaaatggtaattctctatagtcttaatttgcatttcactgatgactaatgaagttgaacgtattttcaagtcatcaatggccattcaggtctctttttccrtgaaatgcctgttcatgtctttcacctaattttctattgggttttctgttgctttcttagtggtttttaggagttctttatatatttaggataataatca

SEQ ID NO: 179584 - DNA, 201 bp, Homo sapiens
tgaccttgacctaatcccagcctgacattgatcctgactgtcatcctaagctccatttgaactctggatctcatcccacctctgtctggactctgacatcrcccttatcctaatctaaatctgacctcacctttaccttctttctaaccgttattctaagcctgacccttattccaaaatgtctttgaaccctggccctct

SEQ ID NO: 179585 - DNA, 201 bp, Homo sapiens
ggctctaccccctggtgtgtcctgcctcccatggtgcccagagactactggtaagccctgagactctaggttccctggctgccctgcctgtgccctatccyctagcctccaggaatccctccctgactgcctagctctgggctccccagttcagcccctgcccacctgctctgtgtttacagatgatcggcaccgagtgaa

SEQ ID NO: 179586 - DNA, 201 bp, Homo sapiens
attaatcatattctccttgtaatctctcttattaaattttcaccattttataccattttaccctgcttagtagctgtttttttttttttttttttgaaacrgggtctcactgtgtcgcccaggctggagtgcagtggtgcaatcctggctcactgcaaccctctgcctcccgggttcaagtgattctcctgcctcagcctc

SEQ ID NO: 179587 - DNA, 201 bp, Homo sapiens
tacctctctgagcctcagttttgttacccagagaagagaagtagttaatatgtcccttggggtgtttgtattcattgggattcttttggttgtgagtgatraaaatccagcttttataactgaaaagtctgaggatcgtgcagcttcagttgtagctggatccaggggctcagatgatgatgccaacaggtggtttctgtc

SEQ ID NO: 179588 - DNA, 201 bp, Homo sapiens
gtccctgaccttcactccactggaggacatgatcttcctcaagtgggaggagccccaggagcccaatggtctcatcacccagtatgaggtgggtttgggaycctattacagtgggggaccctggtggaaggtgagaggtggccctctttctctctgctgctacagtaggaggtgcatgggaggacagatgtgattgtcata

SEQ ID NO: 179589 - DNA, 201 bp, Homo sapiens
gagccaccgcacctgcctgcttagtagctgttattaacccttcagcttacaaatcaggaaacagaggcttggagaggggaagtcacttgtccaggttaaayagccagaaagtggcagagtcaggacttaaatgcaagtctttctgaattgcaaatttgtttctactgcatcatgctgcacctcgagggatgggtaggattc

SEQ ID NO: 179590 - DNA, 201 bp, Homo sapiens
gaagttggaatcctttcattcaatctctgttctacatattcattcagcttgcgtcctgaggcctcacagcctggtgggagacacacaggcactttagtaaygacccagggggcaggagagaagcccagggtgggaggcagagggagggctttggaaggggtggcctttgagggactgttgtgtgccaagctcttgactcca

SEQ ID NO: 179591 - DNA, 201 bp, Homo sapiens
tcaaatggcaggctcaggagtgggggctttttcctaggggcaccagggagttgttaaagtgttttgaccatgatcagagtggtcctttaagaataataacrcacatttatccagcacgtactgagtgccaagcactgtgctaagcactttacacccaagatctccttttctgtaatccctccacccaccctttgaggcagt

SEQ ID NO: 179592 - DNA, 201 bp, Homo sapiens
ttagcaccatgacctcactttacaggtgaggaaaccggggctcagagacgtggagcgacttgtcccaggttgcacagctagtgagtggtaaagaaaggackcaaatctcagcctgtctgtgtctctaaagcctttgctgctgtgaggctgtcctgccccctgctgcagcagcagcaggacttggatggattggagggaggg

SEQ ID NO: 179593 - DNA, 201 bp, Homo sapiens
gacactcccttggtggagcctgcaactttgtgcggcctcccggccggccgggaccgccaggtgtgtgcttgagtgtgagcgtgagtgtgagcgtgtggctycgcgcttgtctgctgtgtggtcgcgttctccgggtgtgtttcggagtctggtgtctttggtgtgcgtgcgcgtgtgtgtgtgcgcgcagctgaatgtatg

SEQ ID NO: 179594 - DNA, 201 bp, Homo sapiens
agctgctatttcctgagtgcttaagtatgctaggcgttgtgctaagtgggctactacatcaaatcctcaacaagcctatgtgcagatagggaaacagaggytcagaaagagaagccacctgcccctggtcacaaggtttggcaaattgcagtcaagatttgatcccaagtctgtgatgccaaagcccactcattgatccac

SEQ ID NO: 179595 - DNA, 201 bp, Homo sapiens
catgtctatgcagggcacacacccttcccctgagaatgcatgaagcttgaactagtaaggcttaaacttaccatcttggcattcctccatacacctatcaygtagcactgggtgccagcccagtgtaccactaaatgcactgcagtggcgcggtgtgccttgtgcagctctgggtcatgcccatgatggatgtggcacttc

SEQ ID NO: 179596 - DNA, 201 bp, Homo sapiens
aagataaatgtagagtcacatgcagttgtaaaaaaaatacagaaagattctctgtgcaagtcaccctattttctgcagtggtaacatgttgcaaaactatwgcataatatcacagtcaagatattcacattgatacaaaccacagatcttattcagacttttctggttttgcttgtacttgtttgtgtgtgtgtatatgtg

SEQ ID NO: 179597 - DNA, 201 bp, Homo sapiens
ctgggttcttgcaggggcatagtttgagaactactgactgaggggttcaagtccaatttcctggacttgcattcaagattctttgcactctgactcccacrctgcatttccagcttcatcttctcctgttggaccgtgcatagcctgtgatccagctgcatctgatacccgtcttccccagtgtgtcttgtgcctttattc

SEQ ID NO: 179598 - DNA, 201 bp, Homo sapiens
accacacggggcagctgcaccctgcggtgcgtgtcgcagaccttctgcagcacatcaaccagatgaagacggccgagggttacggcttcaagcaggagtaygaggtgcacgccggccccgggccagcaggatccctgcagaggcctcacctggctcttactctctgtggactctgaccctggcaaccctcagcctagtcct

SEQ ID NO: 179599 - DNA, 201 bp, Homo sapiens
agtcctccattcggcccttttcctctgtctggcatccagccctggcctgtgccttcccctcatactgccagtgtggcagctctactgctaactctgggatytgcagcacatattgatcagggagatggggagtgggcctggcataaggtcccctgctgtacttggtttccttccattctccgtggagatggcaagatgttg

SEQ ID NO: 179600 - DNA, 201 bp, Homo sapiens; identical to SEQ ID NO: 31989

SEQ ID NO: 179601 - DNA, 201 bp, Homo sapiens
tatcactgtgggtaactggtggcggggctggtgtgaaaaagccagctggaaccttcccaaggtgttggaatgagccctgttgtctctgaaatcctgcctgygaaaaccctcagatcctcctgggccttgtacgtctggagctattgactcctgtgggtgccagtcggtgttggccaaattgtttgtcaaataagtgccagg

SEQ ID NO: 179602 - DNA, 201 bp, Homo sapiens
atagaaaatatttttgtatagctgtactatgtgcatgtcattacaaaagtcaaaaaattcaaattaaaacatttcagtaagctaaggttaatttattattsaagaaggaaaactatttttaaataagtgtattgtagcctaagcatacagtgtttataaagctcacagtagcgtacaggaatgtcctaggccttcatattc

SEQ ID NO: 179603 - DNA, 201 bp, Homo sapiens
gcctgtctttgaatgggggtaattgctgggagttgccagtgttccaggttgttctctggaagagggggaggaagaagcagctgtcatgggctctgcggagygctgccttctgcaggtagcatggtgaagcctcgctggatagagtgaggggataatgaaatctagccaggcagggccgcaagggccctcggaggccacctg

SEQ ID NO: 179604 - DNA, 201 bp, Homo sapiens
gacatcacccttatcctaatctaaatctgacctcacctttaccttctttctaaccgttattctaagcctgacccttattccaaaatgtctttgaaccctgrccctcttttcctcttttctcatttcccttccccccacatgccttggttttgaccctggtccctggctgataaaaggacccacagtgacacagtgacttta

SEQ ID NO: 179605 - DNA, 201 bp, Homo sapiens
tcctcactgccccacgttgcacatgactcagggagtctatatctatagtacagcttgggaccactttcttgggcttcaggactggcttaggtttgcaaagscagcaccactgcacagtatctgacattgcattcgtgcactgcacaggattactgcccagggcctctaccctgcaacgaacctgttcactgttgggttgtg

SEQ ID NO: 179606 - DNA, 201 bp, Homo sapiens
ccaggtccattcaactccaagactcagattcttcaccccatagtcaatcgccttctgccccagcaattcttgacttccatttgatacacttgattcatttstatcttcaaggatactgcttcagctttaaaatagtagtagtaataataatggctattactgaataagtactgactttgtgctagacacagtggcagacat

SEQ ID NO: 179607 - DNA, 201 bp, Homo sapiens
gctttaaaatagtagtagtaataataatggctattactgaataagtactgactttgtgctagacacagtggcagacatttaacatactactttatttgctyctcacaacagccctcagaggtaaatgctgtaattattccattttatagacatgaaaatggaggcatagagaaatgaaggagtttttgctcaaaggcacac

SEQ ID NO: 179608 - DNA, 201 bp, Homo sapiens
agtcccgtcctgtggggcctctaggtgaaatgctcacggtactggccggaggactcagacacctacggggacatcaagattatgctggtgaagacagagamcctggctgagtatgtcgtgcgcacttttgccctggagcgggtgagtctccccaccgcctgttccctgcagagggtgcctgagcagggattagagcccact

SEQ ID NO: 179609 - DNA, 201 bp, Homo sapiens
gtaactcagtccaccctccttcatggggatgtgaggaggcccagcaagccctggacgtaactctctgtccccacccccgctccctgtagacgctgaactckgtcaccccgccgctggacgtggaggagtgcagcatcgccctgttgccccggaaccgcgacaagaaccgcagcatggacgtcctgccgcccgaccgctgcc

SEQ ID NO: 179610 - DNA, 201 bp, Homo sapiens
cagcacatcaaccagatgaagacggccgagggttacggcttcaagcaggagtatgaggtgcacgccggccccgggccagcaggatccctgcagaggcctcrcctggctcttactctctgtggactctgaccctggcaaccctcagcctagtcctggttggacgcctgctctgacagtttccaactcaacctttttgacctc

SEQ ID NO: 179611 - DNA, 201 bp, Homo sapiens
agcacatcaaccagatgaagacggccgagggttacggcttcaagcaggagtatgaggtgcacgccggccccgggccagcaggatccctgcagaggcctcayctggctcttactctctgtggactctgaccctggcaaccctcagcctagtcctggttggacgcctgctctgacagtttccaactcaacctttttgacctcg

SEQ ID NO: 179612 - DNA, 201 bp, Homo sapiens
cccttcttccatttaacatgatgttttcaaggtttatcctcattgtagcatgtatcaatactccattcttttttattgcttaataatattccattatacamatatatcacattttatttgtcattcatcagttgatggaaattggggttgtttacacttttcagctattatgaacagtattgctatatttgtgtacaggtt

SEQ ID NO: 179613 - DNA, 201 bp, Homo sapiens
gtatgagatcagcgtgctgctcacgcgtcccggagacggcggcactggccgccctgggccacccctcatcagccgcaccaaatgcgcaggtgggtgcagcmgctacccctggcctcagtctctggtgggcccagggctatggaggggcgcattcgagaggtagcgtggcctgtgcttgtaaacctttctaaaacattgtga

SEQ ID NO: 179614 - DNA, 201 bp, Homo sapiens
gggaatgtgttcaggaccacacagggtgggcctggctaggctgcttggctccagccaacaacccagctatgcttggcattggctgtgcctccccacccccrtagaccccagtctctccaggacccccgaggctggggcatgtgtgtcaagaacccttttgtctttctctgactgcaggagaccagcgcagcggtggggtca

SEQ ID NO: 179615 - DNA, 201 bp, Homo sapiens
tcagtgagttcaaggccacctacaaggagatgatccgcattgatcctcagagtaattcctcccagctgcgggaagagttccaggtgggggatgagtgcgtrtgtataggtgtgtgtgtgtgtgtctgtgtgtgtgttggggcatccttaatactgcaggagtcattgagggccaagaagcagggaccagcctgaggccaca

SEQ ID NO: 179616 - DNA, 201 bp, Homo sapiens
tactggttaatgcaggcagagaacatttccatcctctcagaaagttctgcagacagcactggtctagaggcatgaggcggcctgcagcaccttcagtgagkcctgggcatctctgggaggggaattggtctggatggaccatgactcagtggctcttgacaaaaggttttgttcaatccaggccccttctctgcagcctta

SEQ ID NO: 179617 - DNA, 201 bp, Homo sapiens
tctcccagggtgacagcaggggcctggagcaggcttgtggagaggagccattatagttgggccttgggggtgatgggtacagggtgctggttctgggttaygtatctgtccggctttcctgtggtgggggagaaggtgaggtcagcatgggccctgtgctataggtatctttcctgcttccagacagggaatgtggttggt

SEQ ID NO: 179618 - DNA, 201 bp, Homo sapiens
attattattgatcttaaagattttaacattttatccaagggccatgagtaatgtctgtgcccatatacttccatcctgaagccctcatctaggccccccaygctctgagtgactgaggagtaagggggaggggtactgtccattctggttatcccaagtgtgggggctaagataactgacaagctctggttatcccacgtg

SEQ ID NO: 179619 - DNA, 201 bp, Homo sapiens
tagagcttctggaaccctgggaacagggcagggccattggggactctgtctccgaacaacagcctggctgaaagcagatgcctctctccactttatgggtrgggggtccctctaggcacataaaggagtcatgtcctccctggggttgcacagcccaggttggattaagcccacgactctggtgtcccagctgtacttctc

SEQ ID NO: 179620 - DNA, 201 bp, Homo sapiens
caacagcctggctgaaagcagatgcctctctccactttatgggtggggggtccctctaggcacataaaggagtcatgtcctccctggggttgcacagcccrggttggattaagcccacgactctggtgtcccagctgtacttctccacttccttggggacctggggggatgcaaagtcatcctgcttaggaggtcctaggg

SEQ ID NO: 179621 - DNA, 201 bp, Homo sapiens
tttttagtttacttctgaatcttagtgccaggtacaaggcctggcccaccgggtctgaataaatatatatggcctgaaagaataaagtttaagggggccargttcagaggtggagatgccagatgggggcgcactgattccactgaaggtagagattgaagaaccaggtttccctccaggaatctggaaaattcctggagg

SEQ ID NO: 179622 - DNA, 201 bp, Homo sapiens
tggattaagcccacgactctggtgtcccagctgtacttctccacttccttggggacctggggggatgcaaagtcatcctgcttaggaggtcctagggatgygagggagcagttccctggtggggtaggggttctgctgctgggaggggagggtagaggaggtgtgggggagtgaggggctactccctggggtctaaccgtg

SEQ ID NO: 179623 - DNA, 201 bp, Homo sapiens
cagtgggccttgcctaccccttggccttcacaccttctgcagaccctgactggctcccgtgaccccagctgcccctcctctctctgctttctccctggctycacatctttctcttgcttcttaaatggggacccagtacgctgtcctggcctgccctctgtctccccctggagagcgtaacccccaacctttgtggctttg

SEQ ID NO: 179624 - DNA, 201 bp, Homo sapiens
tctcttgcttcttaaatggggacccagtacgctgtcctggcctgccctctgtctccccctggagagcgtaacccccaacctttgtggctttgtccatggcytctgtgtctcattgcggttcctctactgtgttcttatcagctccccaaatgccgcatggtagagtcgtcctccctgccctgccacctaaaccagcttctc

SEQ ID NO: 179625 - DNA, 201 bp, Homo sapiens
tttgaggcccaaagttcgagaccagcctgggcaacatagtgagacctcattgctacaaaaataaaaaaattagtgggttgtggtggcacaagcctgtagtmccagctacctgtgaggctgaggtgggaagtttgtttgagtatgggagttccaggttacagtaaactgtaattgcaccactgtactccagcctgggcaaca

SEQ ID NO: 179626 - DNA, 201 bp, Homo sapiens
ttggacttgtcataaatggaatcatacagcatgtgctctttgctgtttgtcttctttccctgagccttaggtttgtgaggctcgtccacagtggatcatcktccatcaagtgaataaatgacagtgtgtttgtccattctgccatgataggcatttgggttgtttccagtcttaagctattatgagtagtgctgctaagga

SEQ ID NO: 179627 - DNA, 201 bp, Homo sapiens
tataatggcctagagacagggagtctggctctgtgccctgtacccttctctctggacctcagtttctccatccataaaatgggattagtaactcagtccascctccttcatggggatgtgaggaggcccagcaagccctggacgtaactctctgtccccacccccgctccctgtagacgctgaactcggtcaccccgccgc

SEQ ID NO: 179628 - DNA, 201 bp, Homo sapiens
ggatgtgtaggagatttggtggttttcaggaggaaagaacattcttgaattagctcggaggatcatcattcctgttctctcctaatcttaagttgctaggytgagccagtgtcacctttgcattctccccaccctctctcctctccttccctgaggcccatcccatctctgtcctctagcacatttcactagagctcttcc

SEQ ID NO: 179629 - DNA, 201 bp, Homo sapiens
aaggcttggaggggtgaatgcaggagctggggttctgcagcacagtcatgggtgggctggctatgcctcctcctctggctctgggttgggggctgccattkcctgcagaatgactgtgggaggacccctgagggggacagctcagaagatgctgcttccagatgacgcaggaggtcttgggcagattcccaagatgcaaac

SEQ ID NO: 179630 - DNA, 201 bp, Homo sapiens; identical to SEQ ID NO: 31992

SEQ ID NO: 179631 - DNA, 201 bp, Homo sapiens
ttagttttcttgtttgtacaatgggacattaatacctacttcatcagtaaattgatcattgggattagttgagattatacaatgagatgcttactgcagtkcctggcacacagcaggtgtctaatggtgacagatgctgccagggactctgattattattcccattgtctccccagagaggctactctgcccggcacgagg

SEQ ID NO: 179632 - DNA, 201 bp, Homo sapiens
ctgacctggtctggggctgctctctctccagcgcgggcaccggccgcacaggttgctatatcgtcctggatgtgatgctggacatggcagagtgtgagggygtcgtggacatttacaactgtgtgaagactctctgctcccggcgtgtcaacatgatccagactgaggtgcggggacctggccctgtccccaccattatta

SEQ ID NO: 179633 - DNA, 201 bp, Homo sapiens
tgcttctaggacagctgctggctcctggccttgaggtccccttactccagggcctccccagccacctctgggtgctgtccagccccacacaatgcctgtgyctcccctcaacccccctctccaggaagccggtgaacatgaccaaggccaccgtcaactaccgccaggagaagacacacatgatgagcgccgtggaccgca

SEQ ID NO: 179634 - DNA, 201 bp, Homo sapiens
cccatagaccccagtctctccaggacccccgaggctggggcatgtgtgtcaagaacccttttgtctttctctgactgcaggagaccagcgcagcggtgggktcactgaggccagcagcctcctggggggctccccgaggcgtccctgtggccggaagggctccccataccacacggggcagctgcaccctgcggtgcgtgt

SEQ ID NO: 179635 - DNA, 201 bp, Homo sapiens
tgcaccttcgaggaggcaagtgacccagcagtgccctgcgagtacagccaggcccagtacgatgacttccagtgggagcaagtgcgaatccaccctggcamccgggcacctgcggacctgccccacggtaagtctactctccatcgccattaccccttcttctccttccagaggcacttctacccacctgctgtgtgacct

SEQ ID NO: 179636 - DNA, 201 bp, Homo sapiens
caaccggtcctgtagctgacatacctgggattgcatcctcagtggatgtgtgaccgtgagctgtcccccacctctcagagcactcacagagttgttatagkgggtagggatgaaataggagataaaggggcatgtccatggaggttgtttcaggtaggcttggtccagcctgtagtaacatggttggcctccacctcagga

SEQ ID NO: 179637 - DNA, 201 bp, Homo sapiens
tgcagcaaaagccagtgactggacaattgaatgtcttgaatctgcagagggtggaggtggcctgagtcagcaggagctgagaaagccttttgaagaaaaaygaaatgtatctcaacccactccctacttactcccagaagtgggaagagggaacctgtccaggaattttattttctattcttttgaaagtggaacaatgtg

SEQ ID NO: 179638 - DNA, 201 bp, Homo sapiens
gaagccagacaaagaccagggtcatgggagcttgtgccagcccctaggtcaggaggaagactgggggacaggagaagagctcggggaagggaggggggacrtggcacagggtggggcagggcaggtcaccaggggaggctgggagctagatctttaatgggagaaggccgggtgccagcccccctggcaggacgagggagc

SEQ ID NO: 179639 - DNA, 201 bp, Homo sapiens
ctcggggaggggcagtcatctctgtgtccgtgtcccctgtatggtgtagacatggccagtgccctcctctcttcttctccttagtcccgggcttcctcccyaaagctctgacctggtctggggctgctctctctccagcgcgggcaccggccgcacaggttgctatatcgtcctggatgtgatgctggacatggcagagtg

SEQ ID NO: 179640 - DNA, 201 bp, Homo sapiens
ctctgtgtccgtgtcccctgtatggtgtagacatggccagtgccctcctctcttcttctccttagtcccgggcttcctccccaaagctctgacctggtctrgggctgctctctctccagcgcgggcaccggccgcacaggttgctatatcgtcctggatgtgatgctggacatggcagagtgtgagggcgtcgtggacatt

SEQ ID NO: 179641 - DNA, 201 bp, Homo sapiens
ctcagaagtcccctccactccagggttcctgcagtggctcagcaggatggcacgtgctggggacctggcacttctcacaggaggtgcagggttcccggagragggtgtcaggctttggggatcatgatagactgtggttccctgtgagggatctccaagaacaagagaaagaaactgagagcccctgggtctggatgcgtg

SEQ ID NO: 179642 - DNA, 201 bp, Homo sapiens
caaggaacgtgaccccctctccacgtgcctggagtccgcttcttggagggtgtggggtttcaggggttgcctcagtgaaggcactggtcagctagtaaagwtcctcactgtgcccgtgtgtgccgagctcagcccagtgcttgtcatgatctcactttggcctcccagcagccccatgaagtaggcatattacttccctat

SEQ ID NO: 179643 - DNA, 201 bp, Homo sapiens
taactctctgtccccacccccgctccctgtagacgctgaactcggtcaccccgccgctggacgtggaggagtgcagcatcgccctgttgccccggaaccgygacaagaaccgcagcatggacgtcctgccgcccgaccgctgcctgcccttcctcatctccactgatggggactccaacaactacattaatgcagccctga

SEQ ID NO: 179644 - DNA, 201 bp, Homo sapiens
gggggatcatgtatcggcgatggcttcctggaggaggtagtgtctgagctgagatgtgtgggaagggcagaattaactaggtgaggaggtggaggaagagwgacccgtggagagggagcagcctgtgcagggttctgaacgcacagggttgccaggacctgaggcaaaatgaggaaggtggtgtcctcctgtcctgggctg

SEQ ID NO: 179645 - DNA, 201 bp, Homo sapiens
tgagtgccagggaacaaaaaatggatttgagagttgttgcaaagccccagacagaggctgtgatttaaagctggggtattaggtgtcaaattctgcctctrctacttgctattcatgtgatgtctggcaaatcacctcacttgtaaagttcctggccccctttgttattcttagagatgaactcagaagcccaagtagaat

SEQ ID NO: 179646 - DNA, 201 bp, Homo sapiens
gcaaaatgaggaaggtggtgtcctcctgtcctgggctgtggtcagaggggattgatgagcacggtgtctttttgggagaggatgggagtcattttaccgayggagaaactgaggccaagagaaaggaagagcctttcctgggcttcaggcagagctgagactagaaactgaggctcaggatacttagcctggaggatgtgt

SEQ ID NO: 179647 - DNA, 201 bp, Homo sapiens
tgggtgggagtgatccaggcctattcctggaagcaggcagcctcatgtaggagcgtgtgaaccggttaaggtgtagctttctagctgcacagcagtaggcrtcagtgcagtttgcaaagggttcatcttggctgatctgaacgtgtcagtgcagaacgcattggggcaggtgggccttgcagcctgtgggcaactggtggt

SEQ ID NO: 179648 - DNA, 201 bp, Homo sapiens
cgggggacagcggggtttctttaaagagggtaaccacccagggggcttccgggtgtcagctgaaggggaggggaagagctgccctagccactgatgagagrtgtgaggggcccatcagtcactgtcactcagcttggtggatggaatgtgtgtgcccacatgctcgccgggggacatctggcctgctgaggggtcaggggt

SEQ ID NO: 179649 - DNA, 201 bp, Homo sapiens
gatcttgatgtgcccccagtcaagttagggagacagccacataaacaatgaccatgtagcaggaagagtgttttattgaattaattaatttttttttttttgagacaggatcttgttctgtcatccaggctggagtgcagtggtgtggtcttggttcactgcaacctccatctcccgggttcaagcgattcttctgcctca

SEQ ID NO: 179650 - DNA, 201 bp, Homo sapiens
tcccaaagtgctgggattacaggcatgagccaccacacctggcccattttttagccttttaaaattaaaaaaactaccctaattcatctagctattctctratttgatttcttttttctttttttttgagacaggttcttgctctggagtgcaggggtgtgatcatggctcactgcagccttgaagtcctatgcacaagca

SEQ ID NO: 179651 - DNA, 201 bp, Homo sapiens
ccagctagtaaggagcagtgtgtggaagttagtccccaggagggcttgaccacaaagcccatgcctttaactgccagctggctctcccagtcctctggccrcctgtgatcccctgtacgctctcctccctgtccagtgtgtaccaggtgattgtggaggaggagcgggcgcggaggctgcggcgggagccaggtggacagg

SEQ ID NO: 179652 - DNA, 201 bp, Homo sapiens
gtgacagcgggcctctccttggtcttgccaaggtcccagttggctcctcttgggccctggcagggacatgccactccccactctgtggctcagcccagccvggcctgcccgtctccgctctgcctgccctgctcacatcgcccattctggccactcctgtgctccgtccacctccatctgcccctggcctaatatctgtct

SEQ ID NO: 179653 - DNA, 201 bp, Homo sapiens
tgtggaggtggaagacagcgatactgatgatcctgaccctgtgcaggcctaggctaatgtgtatgtgtgtgtgtgtgtgtgtgtgtgtgtgtgtgtcttartttttaacaaaaaaaatttaaaaaacgaaaaaaaattttaaatagaaaaaagtatagaataaagatagaaaatatttttgtatagctgtactatgtgcat

SEQ ID NO: 179654 - DNA, 201 bp, Homo sapiens
tggctcatgcctgtaatcccagcactttgggaggccaaggtggaggcaccacttgaggccagaagtttgagaccagcctggccagcatggtgacatccccrtctctactaaaaatacaaaaacaagctgggtatggtggcacgtgcctataattccagctactttgcaggctgaggcacgagaatagcttgaacctgggag

SEQ ID NO: 179655 - DNA, 201 bp, Homo sapiens
actacccgtaagtagctctaccttgcctgggagtccccggccctgcctagggggagatcccctgtccccgccttctctggttgggcttagtctcgctgcamccagcctggcctggtgtccacccggttctctctggtcacctcggcctctgactttctttcctctgctctgtccttcccctctgcatcttcctcctcaagt

SEQ ID NO: 179656 - DNA, 201 bp, Homo sapiens
cccctgtgttctgttgggtggggtcagacaaccggtcctgtagctgacatacctgggattgcatcctcagtggatgtgtgaccgtgagctgtcccccaccwctcagagcactcacagagttgttatagggggtagggatgaaataggagataaaggggcatgtccatggaggttgtttcaggtaggcttggtccagcctgt

SEQ ID NO: 179657 - DNA, 201 bp, Homo sapiens
  misc_feature (1)...(201): n = A,T,C or G
aaagatggtaaaaacagtaagtaatgtttcattaaaagagaaatgtgagtcatagaaatgtatcacattaatctgaaaaagaggattccagcctggccatnatcagtcagttacattttttaaatgcctaggctaaacattggagggaaatatgccaatataatagaattgattggctctgggtagtagagttgatggtat

SEQ ID NO: 179658 - DNA, 201 bp, Homo sapiens
ctgttatacccacgtatggaagatgaaagcatggatggtaaggcacagaagtgaagtagtttagtcaaggctagtgagtggcagaactaggattcacaccyactctttgtgacattgactcttaggctgtttccaccacttttccagtagaaaattgatttttgattgtaaactaatttgagttggctcgacttagtgact

SEQ ID NO: 179659 - DNA, 201 bp, Homo sapiens
  misc_feature (1)...(201): n = A,T,C or G
cttttctctcttagggaatgaggattgttagatcagaacaagaatttcaagaacagttagagtcagcacggagagaagctaagaagtctttcaatgatgaygctatgctgatcgagaagtttgtagacacaccgaggtgggttggccttatttttctgactcnnnnnnnnnnnnnnnnnnnnnnnnnnnnnnnnnnnnnnn

SEQ ID NO: 179660 - DNA, 201 bp, Homo sapiens
catggtgaaaccctgtctctactaaaaatacaaaaattagccaggcatggtgacaggtgcctgtaatcctagctgctcaggaggctgaggcaggagaatcrctggaacccaggaggtggaggttgcagtgagccaagatcatgccattgcactccagcctgggagacactgcgaggctctgtctcaaaatatatatataaa

SEQ ID NO: 179661 - DNA, 201 bp, Homo sapiens
tgttggccaggctggtcttgaattcctgacctcaggtgatccgcctgcctcggcctcccaaattgctgggattacaggcatgagccaccacacctgacccrgaattatttattaaaacgttaaaaaactggttccaagtctattgtgaacagtgctgcaataaacatacacatgcatgcgtctttatagtagagtgatttg

SEQ ID NO: 179662 - DNA, 201 bp, Homo sapiens
tttataaccacatcttccaggtatagacaaaaagataggtggaattgcttctgtaatttgtttgtttccctgcatatgctttttatttatttatttatttwtttttttgagatggagtctcactctgtcacccaggctggaatgtagtggcacgatcttggctcactgcaacctccacctcccaagttcaagtgatactcc

SEQ ID NO: 179663 - DNA, 201 bp, Homo sapiens
tggtttggcatcagaagcctaacttttggcttatctcagcttttgacattccttcctcactaaacttaatcatttctagcttttgatttaaagtgggagayatgtaactcttcatttgaccacttataggccattgtagggttattaattagtctaatttcaatattgtattgcctcagggaatagggagacccatagaga

SEQ ID NO: 179664 - DNA, 201 bp, Homo sapiens
aaaatacttagataaaaagagcagatggttttctgaacatattgttttccccactcagcaggaactgggggtttattctcttcctagattgttggactgcmcaccaacattgacttcttactcaacctgtctggccacccagagtttgaagctgggaacgtgcacactgatttcatccctcaacaccacaaacagttgttg

SEQ ID NO: 179665 - DNA, 201 bp, Homo sapiens
atatgttagtattttgggattaaaaaatagggtgagatgagctaccacatgaaatgagggaaactaactaatagacatattaaatttgtattattttgtcrtctcagactcgatgttttctttaaagagttccattgtaatttatagactgggctatatttatgtttgtcttgaatgaaataatttgtagaatttggggca

SEQ ID NO: 179666 - DNA, 201 bp, Homo sapiens
ctttctgtatggcacactgacctctcttttctcctctcagtgactgacaccattcttttcagatgtgttttttagtatgaaggaaagctcttcacttaccrtggatgcacccataaacactatttaacccattaactggagtgtaactaatcacctaacattgtagaaatggatctctttggccaggcgcggtggctcacg

SEQ ID NO: 179667 - DNA, 201 bp, Homo sapiens
ctctctggtttcccttaagcctttgactattatgactgtagttaagagaatatcttatgcttgtatttcagacccaatttggggaaattaccccctatacrgtttctaactgattgtttactcagttgggctgtgattcctttaagaataaaaacttggcaaaaagtaaaagctcaaatcagacattcacaagcccctaaa

SEQ ID NO: 179668 - DNA, 201 bp, Homo sapiens
gagtgcagtggcgcagtcttagctcactgcagcctctacctcccaggctcaagtgagcctcctgcctcagttcccaagtagctgggactataggcgcgtaycactacactgggctgatttttgtattttttgtagagatgaggtttcgctatattgcccaggctggtcttgaactcctgggctcaagccatctgcctacct

SEQ ID NO: 179669 - DNA, 201 bp, Homo sapiens
tagggtgagatgggatgtcatggtatgaggctcccaggatcttggtgctctgaggcagtaacatgtggtccacccttgttctcactgttacaagctgaaayggattcataatttgggcttaccatttgctcacaaccccaaatatacttttccgttgccaaatttcatgcagctctctatttttgactaagattcatatgc

SEQ ID NO: 179670 - DNA, 201 bp, Homo sapiens
tttttctttttatttatgttttattgtttatattcatggtttgcaacatgatgttatgagtatatatagacagtaaaatggttactataatgaagcagatkaacatatctaggacctctgtgttttcaaatattaacctgtcacactgaatctcaaggtgtttgtcaaagctggagacaaagtgaaagcgggagattccct

SEQ ID NO: 179671 - DNA, 201 bp, Homo sapiens
tttgtagagatgaggtttcgctatattgcccaggctggtcttgaactcctgggctcaagccatctgcctacctcagcctcccaaagtgctgggtttacaakcgtgagccactgggcctggccatgatgactaatatttaacaaattgctgggaaacaattattacctcaggtatattagtaaaaatatagtgataggatgt

SEQ ID NO: 179672 - DNA, 201 bp, Homo sapiens
acttgtttgaaagagactgtagtgtgcagaggcgacatcagaagatcattgaggaggccccagcggtaaggaccttggaaagaaatttgtaagcttctccrtaatgtgaatcttactctgattttcacatcagaaatctgtgaatctggtgtctctcacccctcaaactcctgctggacaactgttgcctaatagcagtgt

SEQ ID NO: 179673 - DNA, 201 bp, Homo sapiens
tgaaaaggtaatcacatgacatctgtagaatgatgttcagtaagttttaatacgtggctttgttaaacttgtcatttatgtccttttccctttctaaaccktgctcattggaaagcatccacttcacaaaaacaagaggatctattacagattcaaattgtttattacagtcctcactgaaaatacccatttacctaattt

SEQ ID NO: 179674 - DNA, 201 bp, Homo sapiens
gattcacttccccctaggcccgggcagccagcaggtgagattgtgtcacaggggcttgctcacaaccacatcacctcaaggtcaaagcctcatggtctacytaaggccacagcattctgggccaggccatcattcggtttcagatcagggcagatactaggcaagatgaaatgagctaaggcagagttgggaatgaagagc

SEQ ID NO: 179675 - DNA, 201 bp, Homo sapiens
aaagggctttaaaaagaaattcctaggagcccacaatcagggaaaaaaaagttttctttttctccatggggttagggtgagatgggatgtcatggtatgakgctcccaggatcttggtgctctgaggcagtaacatgtggtccacccttgttctcactgttacaagctgaaatggattcataatttgggcttaccatttgc

SEQ ID NO: 179676 - DNA, 201 bp, Homo sapiens
tttgcctagatccatcagaagactcacaatgtatggcagctattgccttacaaaatatatttcttaataagacttgaaagttgaaattactccttgatccrtgggctgcagaaaggatgttgtcttagcaggcatgaaaacattaatctccttgtatgtctccatcagagcccttgggtggtgactatgtgcattgtcatt

SEQ ID NO: 179677 - DNA, 201 bp, Homo sapiens
tttgaccagtatatttgggctgtaggcctctgatttgaccagtgcatttggcagatggcacaaccacatgggctctacttctgctctgtaagtttatatamcaaatctatggaccacaaaggacctctgtgttgttttttttctttttatttatgttttattgtttatattcatggtttgcaacatgatgttatgagtata

SEQ ID NO: 179678 - DNA, 201 bp, Homo sapiens
ggttataatttacaaagttctcctctaataaaaagatacttgccgattaggagagcaaaccttcctttaatgttgactttaaagaagaaacttattggccmtctagtaaaggacattgaataacacttgtatagtgatttgaaagaagttttctaaaagtctagaattgttcttaatgtggccattttgacatacttttat

SEQ ID NO: 179679 - DNA, 201 bp, Homo sapiens
ctggtggcggcggagaggaaccggtggcatcgtctcccgagcctgctcctgccgccgaggtgggtggaggggccatggctcagtgggcagaggcgggagcraggggtgcacggacccgcgtgagcggtgggaggtgcggcggaacccagggtcggtgtggggaggacggtaggaaaaccccaggcactttcggaggggttc

SEQ ID NO: 179680 - DNA, 201 bp, Homo sapiens
tttatgccactatgggattagagtttagattgcaaatattcagattcttcaatagaagctagaatttttcacatgaaatttcataagatgtaaacaaaacyatccctttaaacttaacaagaagaacaaaaaaagcacatctgagctgccagtttaggacgtgtgtttttttttttttttttttttttgagacggagtctt

SEQ ID NO: 179681 - DNA, 201 bp, Homo sapiens
ctcccaagtagctgtgatgggactgtaggcacacgtcactatgcccagctaattttttgtttgtttgtttgtttttgaaacaaagtctcactgtgtttccyaggctggtctcaaactcctgggctcaagtgatccttctctcttggcctgcctacgtgttggcgttaccgacgtgagccaccgccctggccacactcgttc

SEQ ID NO: 179682 - DNA, 201 bp, Homo sapiens
agccctgggtctcatcctcaaggagaaagccatgaccgacactttcactcttcaggcacatggtatggaaggcttttctctttcctctgcttgtcaagttytgcaaatcatcattgaacatgcttttctttctgtatggcacactgacctctcttttctcctctcagtgactgacaccattcttttcagatgtgtttttta

SEQ ID NO: 179683 - DNA, 201 bp, Homo sapiens
tatgccactatgggattagagtttagattgcaaatattcagattcttcaatagaagctagaatttttcacatgaaatttcataagatgtaaacaaaactakccctttaaacttaacaagaagaacaaaaaaagcacatctgagctgccagtttaggacgtgtgtttttttttttttttttttttttgagacggagtcttgc

SEQ ID NO: 179684 - DNA, 201 bp, Homo sapiens
ttttgtttgtttgtttgtttttgaaacaaagtctcactgtgtttcccaggctggtctcaaactcctgggctcaagtgatccttctctcttggcctgcctaygtgttggcgttaccgacgtgagccaccgccctggccacactcgttctctcgattgccagttgtcttcagtcttctctggttgggaaagaggttgtagtta

SEQ ID NO: 179685 - DNA, 201 bp, Homo sapiens
gccaaggcgggaggattgcttgagggcaggagtttgagatcagcctaggtgacatagtgagatcctgtccctatttataaaataaaaatttttaaaaaggaaaaaaaaaaaaaagataccagaagtgccaggcacggtatctcccacccgtaaccccagcactttgggaggctgaggcaggtggatcacgaggtcaggaga

SEQ ID NO: 179686 - DNA, 201 bp, Homo sapiens
gtttgtcaaagctggagacaaagtgaaagcgggagattccctcatggttatgatcgccatgaagatggaggtaaggaaatcatgagttcatttgctatgargactttgggagcaatcatacctaatggttcttttgccttattttgtaagttaataccaccttaaatatgaaaagccatgattgacgaagcattaattgta

SEQ ID NO: 179687 - DNA, 201 bp, Homo sapiens
aagttcccacagtaaaaatccaagaaaaaaaaatccctcatgttttacagcagtgggaggggaaaagtaaccaatttgaaagagatccagagcattctatyctccctaacagaagaaatcctaactccaagggagatgttgccagaaccttttttgttcagggggaaggtagttagccaaccacaaccccctttagtcttc

SEQ ID NO: 179688 - DNA, 201 bp, Homo sapiens
acccgggaggcagaggttacagtgagctgagaccatgccgttgcactccagcctgggtgacagagtgagactccgtctcaacagcaacaacaacaaaaaamaaaaaaaaaaaaacaaaagcaagcaaacaaaaaactgttgaaagcttcctaggtgcaattctcatgtgaagctcaagttgagaactgcgagctacaccag

SEQ ID NO: 179689 - DNA, 201 bp, Homo sapiens
acaacttagaaatacttcgcagcacaaacacaggaccactaaaagacttgagatttaatcacaagtttatagaatgctttccctcccccataccctaccaycatgttgcaatggtctaaatatttgtatccctccaaaatttacatgttgaaacctaacccgctatccccaagtattaagaggttggggcctttggcaggt

SEQ ID NO: 179690 - DNA, 201 bp, Homo sapiens
tttaaattttttctagatcaattctctccattttcgtctagcagtggaagaagactgaatatctcgtataccagaaacatgactcttaaagatggtaaaamcagtaagtaatgtttcattaaaagagaaatgtgagtcatagaaatgtatcacattaatctgaaaaagaggattccagcctggccatgatcagtcagttac

SEQ ID NO: 179691 - DNA, 201 bp, Homo sapiens
gtgctctatcctcattttatccttttacattgaatgaaaatgcatctaaatacgtcccatgtggtattcctgagcctgaccttaacgtttttagaatggarcgttgtcttactgtgaccttccttttgaaagtttataattggtacagatatgaggttcagaataaattgcatcagcttagctatgctgaagctcctggat

SEQ ID NO: 179692 - DNA, 201 bp, Homo sapiens
actggcaaggtctagaacagtaaggcatgaaggcatgcaatgtattcggggcacagagtggatggcctgggccactaggcagagaagggcaagcaagggaygcagctgcctagcaataaaaggccttctcttgtcccagaggacttcattctggaggcagtgaggagctgctggagattttcaaccaacttaagtttttca

SEQ ID NO: 179693 - DNA, 201 bp, Homo sapiens
aagctcttcacttaccatggatgcacccataaacactatttaacccattaactggagtgtaactaatcacctaacattgtagaaatggatctctttggccrggcgcggtggctcacgtctgtaatcccagcactttgggaggccagggcggctggatcatgatgtcaggagatcaagaccatcctggctaacacggtgaaa

SEQ ID NO: 179694 - DNA, 201 bp, Homo sapiens
atggaccacaaaggacctctgtgttgttttttttctttttatttatgttttattgtttatattcatggtttgcaacatgatgttatgagtatatatagacmgtaaaatggttactataatgaagcagattaacatatctaggacctctgtgttttcaaatattaacctgtcacactgaatctcaaggtgtttgtcaaagct

SEQ ID NO: 179695 - DNA, 201 bp, Homo sapiens
ttcaccatgttagccaggatggttttgatcccctgacctcgtgatctgcccaccttggcctcctaaagtgctgggattacaggcgtgagccacggcgcccrgcctaaatcttttaatatactgtgaggcatgtataccgttacgcctttacaatgggaaaccaaggctgagagaggtttaataatttgctcaaggtcataa

SEQ ID NO: 179696 - DNA, 201 bp, Homo sapiens
gtttcaccactttagccaggctgatctcaaactcttgacctcaggtgatccgcccacctcagcctcccaaagtgctggaattacaggcttgagccaccgcrcccggccgactttccttttcacagagcagaagttttaagttttaatgaagtccagtatataaattatttgtagatcatgcctttggtgttgtatataaaa

SEQ ID NO: 179697 - DNA, 201 bp, Homo sapiens
tttttatatttgtaagttagccatcactttgcctgcttttgccatttaaaaactccgataccccaaatgatagactgttgccaagctgcatctgttttttrattttttgttttgcccaatactcaaatgagtagacaaaataatagtttttatttggctgcattgcaaaacctaaatgtacattttacctagaaaaaaagc

SEQ ID NO: 179698 - DNA, 201 bp, Homo sapiens
tttaaagcattttggcattgctatgacatgcctactgtatttttcaaacatgtaagtttataactgttcttttactatggatagtttgagaagcactggtrtaaaccagaattccacaaaacatacttctcaaatattaataatagcttagtctgtttttgttctcataagaacaatagattttactttagccttcttttt

SEQ ID NO: 179699 - DNA, 201 bp, Homo sapiens
ttgtattttattccttcgtgttttgacttgaagaggttaccgtggttttcaatttcaggagacgaagtttccgtgcattatgaccccatgattgcgaagcyggtcgtgtgggcagcagatcgccaggcggcattgacaaaactgaggtacagccttcgtcagtacaatgtgagtgatctgagaccgtgccagtgaccttga

SEQ ID NO: 179700 - DNA, 201 bp, Homo sapiens
agatcattgaggaggccccagcggtaaggaccttggaaagaaatttgtaagcttctccgtaatgtgaatcttactctgattttcacatcagaaatctgtgratctggtgtctctcacccctcaaactcctgctggacaactgttgcctaatagcagtgtagtgaaaagacctcctgtggtattggggatgaggaggagatt

SEQ ID NO: 179701 - DNA, 201 bp, Homo sapiens
gccccatttaaagtatgaccttttgttattctttatcctcttagccagccttcattttcttcatagcatgtaacattatattcaatacctgtttacagatattgttacttgttgccctagaatgtaagcagagactgtgaaggcagggacatcatatgttttgttcctcactatgtccccagtgcctggatcagagcctgg

SEQ ID NO: 179702 - DNA, 201 bp, Homo sapiens
cacaggtgagggttgtgaagagatttgcagtgcaaaaggaatacgttttgtgcaactgatgcaaagttacttatagaaattttctatttttagcctttccyaagatctttacatttgattattggattatcattgtaaactaggcatgtcccatctcatttctcagccagtctgcctttttactggatcctgtgtacttta

SEQ ID NO: 179703 - DNA, 201 bp, Homo sapiens
gctcaccatttggtgagtcaagagtctaagctcgaggacctgcctgtgcagtcaagccttcctagaacaagggttgaatgatgactgatgtaagtgtcctrggttcaggctgcagatacagatagttaacagtgttcagggaaagctggtgaaaatgtcaaggttaggggttccggagagccagtgtcagcctgagagaac

SEQ ID NO: 179704 - DNA, 201 bp, Homo sapiens
gtgatttgttgtattggtacataataactaaaatagtaataattatagtaacaacaaacaatagtgatcaccctgtttgtaatctggtatcatgcagtacmtatcaacataacaaaattgaaaaaccatcattttcccctttctgttttgctttatcacccacttactggtgaagattacagcgtaggatgacaatgtcag

SEQ ID NO: 179705 - DNA, 201 bp, Homo sapiens
ctgagacaagagaatcgcttgaacccgggaggcggaggttgcagtgaaccgagatcgcgccactgcactccagcctggacaacagggcgagagttcatctaaaaaaaaaaaaaaaaaaaaaggaaatggatctcttttcagtcaaacacttgttctccccacatcctacactaatttcttatcacttcttttgttcgccac

SEQ ID NO: 179706 - DNA, 201 bp, Homo sapiens
gctagtaagaagttttggttttgattatattgaacaaacactgatttttatatttgtaagttagccatcactttgcctgcttttgccatttaaaaactccrataccccaaatgatagactgttgccaagctgcatctgttttttaattttttgttttgcccaatactcaaatgagtagacaaaataatagtttttatttgg

SEQ ID NO: 179707 - DNA, 201 bp, Homo sapiens
atgatgctcaaaggaaatgctcattggaacagttcagattccagatacttggatcagggatgctaagccagttaaatataatgcaaataatccaaaatccaaaaaaaaaaaaaaaaatctgaaattcaaaacacttctggtcccaagcattttgggtaagtgatactgaacccgtattattataggatcctatcattagaa

SEQ ID NO: 179708 - DNA, 201 bp, Homo sapiens
ctaaactcaatgataatagctaagatttattgagtttttggtttatgtcagatactgtattaaacactttccaaagattgtttcatttgcattttcagaamaggccaatgagattagtgttattgttagtgtgaactttataaattactaatctctgtgagccaaggtcaaggctcagagagattagtaattttccaaaag

SEQ ID NO: 179709 - DNA, 201 bp, Homo sapiens
ggaattgttatttttaaagaataacaagtatttttcaacaacggactccttttttttgaaattcagcagtacttggtcaaacctaaccaggaaatattttrtgtgtactgttcttgaccttgcctcattccaaaaatgatttaagatgactgatatctgctatgcacaaggcagactgccttcaaaggacataaagtcaag

SEQ ID NO: 179710 - DNA, 201 bp, Homo sapiens
aggaagaccccagaggacctcctcagattcagccaggcctgaggcagtggggcctgaggcagggtagagcagtaggaatggaaggaagagatgcataggayagggaagaatttggcagctttgtagtaactgtccctatttataaaataaaaatttttaaaaaggaaaaaaaaataagatgccagaagcatttatgagtct

SEQ ID NO: 179711 - DNA, 201 bp, Homo sapiens
tcgctactgaagccgggctctggtctttgattggtgttcgtggagacgccctcacattcttggatcagcccaaaggtaggctcaggctccgacggtggccsgcgggggtcacgaggcttcgtagtggaggaacgggtttggcgtgtgggacgcagctgcctctgtactggggagtcacggagtggccgggctccagggaca

SEQ ID NO: 179712 - DNA, 201 bp, Homo sapiens
ccaccacgaccggctaattttttgtatttttagtagagacaggttttcaccgtgttagccaggatggtctcaatctgctgacctcgtgatccgcccacctyggcctcccaaagtgccaaacaggcgtgagccaccgtgcctagccaatccaggctctattcttagcacctgctacttactggctgagtgatcttagccaag

SEQ ID NO: 179713 - DNA, 201 bp, Homo sapiens
gtggcggtttatagtgaggctgacagaaattccatgcatgtagatatggtatgtgttaaaaattggaagccacgtcttacgtttattcgtttactgtgtcmgtattttcgttctttatgatgacagttgatatttgctagtgttatcagggttgaagtaggtaagttcaaactgctcactgctaattcttgggaacatttt

SEQ ID NO: 179714 - DNA, 201 bp, Homo sapiens
acttctgttccttcctttcttctccttctggtattctcgttctgcgtagttaataccttttgtagttgtcttgcagtgctaggtattgttctgtttaaggttttttttctcactgtttttcagaattggaagtttctgttgtcatatcctcaagttcagaggttctttccctgccatacccaacgtactaatgagcccatc

SEQ ID NO: 179715 - DNA, 201 bp, Homo sapiens
gccctcacattcttggatcagcccaaaggtaggctcaggctccgacggtggcccgcgggggtcacgaggcttcgtagtggaggaacgggtttggcgtgtgrgacgcagctgcctctgtactggggagtcacggagtggccgggctccagggacatggcggcggcctctgcggtgtcggtgctgctggtggcggcggagagg

SEQ ID NO: 179716 - DNA, 201 bp, Homo sapiens
aaaaaatcttaacagcacagatagtttacattatttttatgttatgaatctttagtagctcacagaaaataatctctggtggcagaattatagacatgacmataagctggtatagagctaccttgaatcagggaagcagcttctttttttttttttgagacggagtctcgctctgtcgcccaggccggactgcggactgca

SEQ ID NO: 179717 - DNA, 201 bp, Homo sapiens
tctggtttttcttttcttaggcctccagggctcttcaggatagtaccatagacccatttcctgtcttccctttcaaagcttagctattgtctaaagaactrtcctcaagtatgtcactctggagagtgttagagttgttaatggcttatagaagtaaaactctttgccaggagacttggttcatgcctgtattttcagcag

SEQ ID NO: 179718 - DNA, 201 bp, Homo sapiens
ccagctaatttttatatttttttagtagagatgggtttcaccgtcttggccaggatggtcttgatctcttgaccttttgagctgcccgctgtggccaaggktactgattttattgatcttttcaaggaactggtttgggttttggtgatttttttctattgattttccattttcaatttcattaatttttgctttaatttt

SEQ ID NO: 179719 - DNA, 201 bp, Homo sapiens
ggggtttcaccatgttggccaggctggtctcgaactcctgacctcaggtaatccccccacctcagcctctcaaattgctaggattacaggcgtgagccacygcacccagcccacttatcctctttagctgaaacttaatagacgttatacttttttgttcctaaagtgaatctggcctgttttctgtcagctcttggttac

SEQ ID NO: 179720 - DNA, 201 bp, Homo sapiens
ctgcataacaccattttattcaatataacaatggttccataagattaaaatgcagctgaaaaattcctatccagtgacattgtggcaactgtaacatcatrgtacaatgcattactttctttaggtttagatatatgtagatacacaaatacttaccactgtgttacagttgcctacagtatgcagtaacatgttattatt

SEQ ID NO: 179721 - DNA, 201 bp, Homo sapiens
ttggccaggatggtcttgatctcttgaccttttgagctgcccgctgtggccaaggttactgattttattgatcttttcaaggaactggtttgggttttggkgatttttttctattgattttccattttcaatttcattaatttttgctttaatttttattatttcttctgcttactttggatttaatttgctgttctcttc

SEQ ID NO: 179722 - DNA, 201 bp, Homo sapiens
gtgtttttacattgttttggtcataattataatactcgctcacattttagaagaacaaatcccctcagggctactgatgttggagagggtgtggcttcatyactcattaaatcatccaagtcttctctgccttttgcctccttctgtttcttccctttttgctgtcagcgtgtttacttttagaaatcttgctgtccttca

SEQ ID NO: 179723 - DNA, 201 bp, Homo sapiens
gaactctgtacaacaaacccctgtgacatgtattcacctgtgtaatcttcacatgcaccccaaacctaaaataaaagttaataaaataaaattgaactttkgtttaaaagatataaaactctaaactggctgcaacatatgagtatccagcattttatctgtatctggcattgcattgtttcctgtcactaggatgtgggt

SEQ ID NO: 179724 - DNA, 201 bp, Homo sapiens
gcctgctcctgccgccgaggtgggtggaggggccatggctcagtgggcagaggcgggagcgaggggtgcacggacccgcgtgagcggtgggaggtgcggcrgaacccagggtcggtgtggggaggacggtaggaaaaccccaggcactttcggaggggttctgccggcagtcacggcgtcgggaggaagacatccccacca

SEQ ID NO: 179725 - DNA, 201 bp, Homo sapiens
ccaaagctctttcatatcacacacacaacacatataaatacacagacaaacagaagaaaaggactcattccctaagccaggaactgaatcctgaacccggkataccattgtgaaaagacaaagctaggccacatggttacaaggtcaagctcccaaggacatacaagacaagaggggaaacctcatccagttttttttttt

SEQ ID NO: 179726 - DNA, 201 bp, Homo sapiens
cactcatacatatgtcatccatcagcccctgtgacaactcttgggctccatagagccccatcgaaaaacacttttaaattaggtgcaacctttttttttttaaaaggagaaataactttattatgttgagcctatggattctattgaagaaataactttattatgaactgtcaaagaacatttatttcacgtgtgatatta

SEQ ID NO: 179727 - DNA, 201 bp, Homo sapiens
agcacttgcattttatgttttcttttgtaaggtgtaaatttcataggcttgatactcataagtttgttactgaattttaaattttttctagatcaattctytccattttcgtctagcagtggaagaagactgaatatctcgtataccagaaacatgactcttaaagatggtaaaaacagtaagtaatgtttcattaaaaga

SEQ ID NO: 179728 - DNA, 201 bp, Homo sapiens
gagctttcagaaaatgatacatagctaagtctccaaaaaatgctaataagcaatgaccacaattaaatagaatgcatgaaacaggaagcttaagagaccargctggtcacagtggctcacacctgtaatctcagcactttgggaggccaaggcgggaggattgcttgagggcaggagtttgagatcagcctaggtgacata

SEQ ID NO: 179729 - DNA, 201 bp, Homo sapiens
ctcgttacacctggtgagttttcaaagccttctgaacctcagggtcctcatgaataaatttgtgttgttatttatcatgcaggggtttatgaggattaagygtgaaatgtacataacaaaatgtcttgctcgttgtattttattccttcgtgttttgacttgaagaggttaccgtggttttcaatttcaggagacgaagtt

SEQ ID NO: 179730 - DNA, 201 bp, Homo sapiens
ttcctgagaattgtcctgttgccacatggtaccttagtaggttttttatttttcctaagagttgttcacagtagaaaatacttagataaaaagagcagatrgttttctgaacatattgttttccccactcagcaggaactgggggtttattctcttcctagattgttggactgcccaccaacattgacttcttactcaacc

SEQ ID NO: 179731 - DNA, 201 bp, Homo sapiens
gttgttggaagttggcggggcgcggtagctcacgcctgtaatcgcagcactttgggacgccgaggcgggcagatcacgaggtcaggagatcgagaccaacytggataacacggtgaaaccccgtctgtactaaaaaatacaaaaaatttagccgggcgtggtgacacgcgcctatagtcccgcctgttagtcccagctact

SEQ ID NO: 179732 - DNA, 201 bp, Homo sapiens; identical to SEQ ID NO: 32036

SEQ ID NO: 179733 - DNA, 201 bp, Homo sapiens
tcgttacacctggtgagttttcaaagccttctgaacctcagggtcctcatgaataaatttgtgttgttatttatcatgcaggggtttatgaggattaagcrtgaaatgtacataacaaaatgtcttgctcgttgtattttattccttcgtgttttgacttgaagaggttaccgtggttttcaatttcaggagacgaagttt

SEQ ID NO: 179734 - DNA, 201 bp, Homo sapiens
gagacatcaatagcttatttgagttattatgtaactccatgcctgcagcattttttgaatatgtaagttctttacttatgaaatgttagccatacattgcrtcacattataatttattcccccaatagctggaaagcccctgggaatcaaagacctggtagtatatacatttttattttttgtatatattgcctggcatac

SEQ ID NO: 179735 - DNA, 201 bp, Homo sapiens
ttttatgttttcttttgtaaggtgtaaatttcataggcttgatactcataagtttgttactgaattttaaattttttctagatcaattctctccattttcrtctagcagtggaagaagactgaatatctcgtataccagaaacatgactcttaaagatggtaaaaacagtaagtaatgtttcattaaaagagaaatgtgag

SEQ ID NO: 179736 - DNA, 201 bp, Homo sapiens; identical to SEQ ID NO: 32030

SEQ ID NO: 179737 - DNA, 201 bp, Homo sapiens
cttaccgatttcataaacagccattttttctctgtgtcctcacgtggtggaagggacaagggacctctcttcaggcctctttcataagggcactaatctcwttcatgaggccagatccctcatgacctaatcacctgctaaaggccccacctccaaataccatcatcctggaggtcaggattttaacaaatgaattctgga

SEQ ID NO: 179738 - DNA, 201 bp, Homo sapiens
ggggcaagccttcactctaaaatctggacaagcatgcaagtatagtgagtcacagccagatcagtttacctgctggagccctaacacttgcatgggaattytgaaaaatggctgaggctaagtgtgggccagtgtgcaagtgagaaactccttggggccctgtcttagagggacctcccactttcatgggttttgcctcca

SEQ ID NO: 179739 - DNA, 201 bp, Homo sapiens
taacgagtttaatgtagatgttggctcctccataattcctttgtgctttcctaagggaagaactcatatctgacacctttttatttttttaagcatacctyctagcaacccagtgagcttgtacatagtcctcaatttgtttttatttttgttttttgagacaggggttcacttatcatccaggctggagtgcagcagtga

SEQ ID NO: 179740 - DNA, 201 bp, Homo sapiens
cacacagacttgtctgtgaatgtttataacaccgttattcataataaccacaaactggaaaataattcaaatgaatgggtaaacaaaatgtggtatatccrtataacagaatccatattataaaaagaaatgagctactgacacactccacaacatgaataaaccttgaaaaattatgtgaagttaaagaagccagacaca

SEQ ID NO: 179741 - DNA, 201 bp, Homo sapiens
gaatggcgtgaacctgggaagcagaggttgcaatgagatgagatcatgccactgcactctagcctgggtgacagagcaagactgtctcaaaaaaaaaaaaagtgggcaaaggacatgaacaggcacttctcaaaagaagacatacatgtgaccaacaaacatgaaaaaaagctcaatatcactgatcattagagaaacgca

SEQ ID NO: 179742 - DNA, 201 bp, Homo sapiens
atgcagtatagccatacaatggagtattattttgccatcaaaaaggaatgaagtactgatttgtgttaaacaaaaaatggatgaaccttgaaaatattacrttcagtgacagagccagtcacaaaagactgcatgtattatatgattccatttatatgaaatgttcatataggtaaatctatagagacagtagattcacag

SEQ ID NO: 179743 - DNA, 201 bp, Homo sapiens
tttttaatctagacaaaaaaaaatccacattcctgtgccttcttataatcttttaccaaaaacgcatttcaaaaacaaaacaaaacaaaacaaaaaaaacrcatttcactttccttacacaccttacatgtagaattgtttcaatttctcaaagattacttaaatcacataaattaaaggcattatactttttacttttcc

SEQ ID NO: 179744 - DNA, 201 bp, Homo sapiens
cttttaagttgcagcttagataattgtgaaaaatggaatagatgatcagaacattgttgggatagtggattacagttaagtgggatctctgtctctttctscctctttttccctctctcccttcttctgtcttcactagaagattgcaaaagaaagctttaggtcaacagtagccttgaaaccgaatcagtcttaagctag

SEQ ID NO: 179745 - DNA, 201 bp, Homo sapiens
ttgataaaatagatatgccaagtgatgtggagaagagaaggaaatgtctttgtccctgctttttttctgttaaggaatttgccatttggaagtgtgtatgwtgagaagctggagagcatgatggtcaagagtgcgggccctggagttcctgtactttagtatttgacttttgtgaacatttttattttgataatttttctg

SEQ ID NO: 179746 - DNA, 201 bp, Homo sapiens
taggacggggaaagccagcttgtgtgccattgaatcaccacgttagggcctggtgctgttgggtggcccacctcgttacacctggtgagttttcaaagccytctgaacctcagggtcctcatgaataaatttgtgttgttatttatcatgcaggggtttatgaggattaagcgtgaaatgtacataacaaaatgtcttgct

SEQ ID NO: 179747 - DNA, 201 bp, Homo sapiens
tcagctcactacaacctttatctccctgacttaagcagttctcaggcctcagcctcccgagtagctgggattacaggtgtataccaccatgcctagctaatttttttttttttttttgtatttttagtagagacaggttttcaccatgttggctaggctggtctcaaactcctggcctcaagtgatctgcccaccttggcc

SEQ ID NO: 179748 - DNA, 201 bp, Homo sapiens
tttcataagaaacactattctattgccagattgcagcaggagagaagattcctttgagccaggaagaaataactctgcagggccatgccttcgaagctagmatatatgcagaagatcctagcaataacttcatgcctgtggcaggcccattagtgcacctctctactcctcgagcagacccttccaccaggattgaaactg

SEQ ID NO: 179749 - DNA, 201 bp, Homo sapiens
caagcgattctcctgcctcagcctcccaagtaactgggattacaggcatgcaccaccatgcccgggtaattgtgtgttttcagtaaagacagggtttcacygtgttggtcaggctggcctcgaactcccgaccccaggtgatccgcccaccttggcctcccaaagtgctgggattataggcgtgagccaccacgcctggcc

SEQ ID NO: 179750 - DNA, 201 bp, Homo sapiens
aaacagttaacactccgttccttcttcccccatcccctgagaaccacgattctactctctgtctctatgaatttgactactctaggtacctgatataagcrgaataatgtagtatttgtccttctgtaattggcttatttcacttggcacagtgtcttcaaggttcttccatggtgtagcatatgtgagaatttccttttt

SEQ ID NO: 179751 - DNA, 201 bp, Homo sapiens
ttctaactgattgtttactcagttgggctgtgattcctttaagaataaaaacttggcaaaaagtaaaagctcaaatcagacattcacaagcccctaaagtktgtgcctgtatttacagcaaaagcagcagttttcacattttttgtctcaggaactgtacactctttaaaatacccaccagagcactttggtttgtgttaa

SEQ ID NO: 179752 - DNA, 201 bp, Homo sapiens
gtatatttgggctgtaggcctctgatttgaccagtgcatttggcagatggcacaaccacatgggctctacttctgctctgtaagtttatataccaaatctrtggaccacaaaggacctctgtgttgttttttttctttttatttatgttttattgtttatattcatggtttgcaacatgatgttatgagtatatatagaca

SEQ ID NO: 179753 - DNA, 201 bp, Homo sapiens
gccaaattcctgccctctgtagtttcccattcacttctctcgttcacacagatgctcattgatagacacatacccattttcttcctgaattctgaaacaartccttccattttctttgtcagagcatatctccctgctcagtgggtggtggtatctcagggctttgatgtctgaacacttttccccacccaccatccccct

SEQ ID NO: 179754 - DNA, 201 bp, Homo sapiens
gcattttttgtctcttctatgtttgacagtttttattttaaaaaatcaacaggaaaacatatttgctgatcacttctgtattatggcgtattatggtggtraataggtgaagtgaactacagtgtgaccatatcacaaacctaccgagaagaatttcatgttcaccaaatagtccatattagccttatttccacaaaagtt

SEQ ID NO: 179755 - DNA, 201 bp, Homo sapiens
tctgaataggtaagagacactatagctcttgcatctaggtcatttaacaggtggaaggggatgctaaatttgcatctcattacctttgtctacttttagarttgtgtgcttgggccctgtggtcagttggcaggtggcaggccatggctccaaaggaatgccgtgttatttgaggggatgccaatttcacttgccacacgg

SEQ ID NO: 179756 - DNA, 201 bp, Homo sapiens
atttcacttgccacacggttctcacattacttggtcagactttttaaaaataaaacaaccaatatatggttcattatttatgctagattactgacttcacrtcaaaaatcattgtgatattgataggctgtgataaataattttaacaatttatattctgtggtacccactgtcagacttatggatagtatttcctctatt

SEQ ID NO: 179757 - DNA, 201 bp, Homo sapiens
tgaggcaggagaatcacttgaacccaggaggcagaggttgcagtgagccgtgattgtgccactgcactccagcctgggtgacagagtgagactctgtctcmaaaaaaaaaaaaaaaaaaaaaaaagaatctcttagctctagtttgttgtcttactctaagaaaaaaaggatcccttggcatactaagtttatgagtaagt

SEQ ID NO: 179758 - DNA, 201 bp, Homo sapiens
atctgtagaaatactttaggaaaagattttaaagagaggaattgagcctttcatagcatctaaaagaggcagtatggtgtattgaaaacattccagccccygaagtcaagcataggagggttcaaatcctagccttacagctttcattttgagtggcattaagtatcctctctactacctctgtcaacagaataaagataa

SEQ ID NO: 179759 - DNA, 201 bp, Homo sapiens
aaaaatacttgaggtgactggaaccctagctgaatcgtttttaatgactgatttaagtgccatattcatgccttattgtccaagtctccacttcctcattrgccatgtaaatatctctctatagagcttgatttacatatatttaactttcatctgaataatgtagtgaaaaatttcatgtgtaatagcattgattttacc

SEQ ID NO: 179760 - DNA, 201 bp, Homo sapiens
tcaattacagctgtttgtagataatcttcctctttgaggatgctattcatgcctcagctatcacctagaaaaatagatttaatagcttttccaaaaatgtkgtttcattaattatagtcatgctttccaaaacattacaaatgaggtactgaatttaatgcaaggtaaatttctcagagataagaagatagaatattgtct

SEQ ID NO: 179761 - DNA, 201 bp, Homo sapiens
tgtttttgcatatatatgtgtatagacatatatgtacatatttatttatatttgtatagataattgcacagatatatcgggggtcctgccccgataatcaygtaggttcttttctattttcctaagcgtcgactggcttgagaaataaaaggacagagtacaaaagagagaaattttaaagctgggcgtccaggggagata

SEQ ID NO: 179762 - DNA, 201 bp, Homo sapiens
tactttttagaagacttattctccttttaggttgcaataacacatgatctctatttaaacattttgttcaatatagaaaaatagaagaagaatataaaagmacttataagtccaatacatatagattgttacaattataatcttggtttattttttatatttataatagagatcttgctttatttcatttttacatcctgc

SEQ ID NO: 179763 - DNA, 201 bp, Homo sapiens
tagattttagttagaattgcattcaatctattgttaagtaaatttttaaagagctggtgtaattacaatattaactgatttcatttatgaacataatatayacagcatttcctccttattaactggggacacattccaagatccccagtggatgcctgaaactgcaaatagtactaaaccttatatatagactatggtttt

SEQ ID NO: 179764 - DNA, 201 bp, Homo sapiens
tgcctagaagtttaatgcagtttaatattaagattatatatatacacacacacatataattatatacatatgtatcatatacatataattacatacataakaatacatacatattatatacacttttttaacttttattttaggtttaggggtacatgagcaggtttgttatgtaggtaaacttgtgtcatgggggtttgt

SEQ ID NO: 179765 - DNA, 201 bp, Homo sapiens
attacctggaaactctttcttatattttctacctacccatcattactcttagttgtaaaggagactgttgcacgtagtgttgtagctgcacacacaactgytttgttggttacctagtaaggatgaagggaaagatagatatttagtaagctcttagtggtcatagtcacaaggagaggataggaattacattgaggtgat

SEQ ID NO: 179766 - DNA, 201 bp, Homo sapiens
ttcaccatataaattcttaagtaaaattcacattttatattcatccagtgtctcatttctaagctatattttataagaaatttaaaagcaagtgtagcacrtagttcctatccttgataagcttacgtagcatagtgattaggaagatatattttcccccatgacacagtttaaacacatgaattaataaattatgtgata

SEQ ID NO: 179767 - DNA, 201 bp, Homo sapiens
ttcacattttatattcatccagtgtctcatttctaagctatattttataagaaatttaaaagcaagtgtagcacatagttcctatccttgataagcttacrtagcatagtgattaggaagatatattttcccccatgacacagtttaaacacatgaattaataaattatgtgataatagtaaatgtagctaaatatcaata

SEQ ID NO: 179768 - DNA, 201 bp, Homo sapiens
agttggctgtcactctcttgagccatctccgtaccaccattttgttttgaattccctgcaattgacttttatccccacaatacagcaaaattgctattgcygaggtcactaatgattgctatggtgctatatttaacagtcaattttcagttctcatattgacttgccagcataatttgacatggttgattatgatctcct

SEQ ID NO: 179769 - DNA, 201 bp, Homo sapiens
tgttttgttggttacctagtaaggatgaagggaaagatagatatttagtaagctcttagtggtcatagtcacaaggagaggataggaattacattgaggtratctgatcttttcttttctttttccttccttccttctgtccttccttcctcccttccttccttcgttccttccttccttccttccttccttttttctttt

SEQ ID NO: 179770 - DNA, 201 bp, Homo sapiens
gatgatatatattctgattgcacacagaagatgtgacaggcagaaaaacttgactttgattttgtaatcaaaagtaaacttaataggtttttagagacatrctaagatgatgaaagaggtatagatctgtattgggatgagttagtgtttttttaatctatttttttcccagcaggacagtttagcctggagcagaataag

SEQ ID NO: 179771 - DNA, 201 bp, Homo sapiens
ataccctttatttctttctcttgcctgtcaatcatgatttttttcaaattgtggtacactattaataggagacaacgcttttctaaagcagaaatcactamgcatctcagatacctcaagttgcatgtgattttaatttaaataatataaaaaagaataatgttctagggtccaagtatatgttttcaatatattaaaatt

SEQ ID NO: 179772 - DNA, 201 bp, Homo sapiens
attcccttacttcattgaactgttcttcaaatttcttatcttctcccacataaattagagatgtatgatagattcactgttacaatatcagtactgctatmtttccaatggcttcttttagaatttgggggtaacttatcattggctagcctcacttttcgtacttgctaaaattccaggaaggtgaatttttcttatctc

SEQ ID NO: 179773 - DNA, 201 bp, Homo sapiens
agctaaaagttagcttgttattatgtcatggatttgggcagaatggacttctgtattagagcaaaggacattttttactcatggcacaggaagtacatgarccatcaaatgtcacgtgtcaatgcagtttgtcacatattggtcttttaacacatgcttgcatatacggatatccattctatgaagatgctatgactataa

SEQ ID NO: 179774 - DNA, 201 bp, Homo sapiens
agttttactctttcttctgcttcctacttgagtttcttgagagggtaaaagacactgaaatatgcatgcgataaggaggaaatggtcaggatactaagatkataaatgtgagcataaatctgtgaaatgctgcagtgttcttggttcaacaactgtattcccattgtctaataaatgcattctatattattaatgaatatt

SEQ ID NO: 179775 - DNA, 201 bp, Homo sapiens
aatatgtttttcttggagaaattttcttatgaagttgtattattcagttaacaatagatagtaacatgagaaggatttgatgacttaaataactgtctgayttatgttttatccccccccttttgtgtgtttcctttagataagaaatgttgaaaccaatcagtgtttagacaacatgggccgcaaggaaaatgaaaaagt

SEQ ID NO: 179776 - DNA, 201 bp, Homo sapiens
ttgtctgtttgactgactgtggcagttgtgctgattggagcagttttctatttggcctacagtagcgaggatggctgtgtgtcctttcatattctttagcrtaatcagaatcatatctgtacagtaacaagcccgaagctatcttaggacagggatagtgaatatagatgaacaccctaagaaataagttaataacaatgg

SEQ ID NO: 179777 - DNA, 201 bp, Homo sapiens
atccccatgacccaaacatctcccattaggcctacctccaaccttggaaatcaaatctcaacatgagttttggaggggaggggtcaaacaaaccatatccrcactatagcaacaaatatctgagtattttagcctactcaagttgatacataaaattagccatcacatttgggaaataggctctgaggtataagtagtctc

SEQ ID NO: 179778 - DNA, 201 bp, Homo sapiens
ttttggaggggaggggtcaaacaaaccatatccacactatagcaacaaatatctgagtattttagcctactcaagttgatacataaaattagccatcacakttgggaaataggctctgaggtataagtagtctcattatggctgattttaagctatcaacttcacgtcactggatgtaaactacagaagaattatatgaac

SEQ ID NO: 179779 - DNA, 201 bp, Homo sapiens
aaatatccagtgccaataataaaaagaaagaaatgattgatttttaaacaaatgaataatactctggaacaacttgggtagtttgctggagaagctttcartgcagaagtcttgggtcaaacccaaaatcttataagcagtagttgtttttgggtaatttgcttaaactttctcagccttgggtctctcaattattgggtt

SEQ ID NO: 179780 - DNA, 201 bp, Homo sapiens
ctaactatctttgccaaataaatatttttgagggtgaatttcaaatgaccatgtctaataaaaatattattttaaaacttatttttattttttacagatgmataatagatgtacatagtttgagggtacatgtgataatttaatacattcataaaatttgtaaagatcaatccatcaccttttatgtttgtcttttctttg

SEQ ID NO: 179781 - DNA, 201 bp, Homo sapiens
aaggaaggaagatctgaaggaaacaagagcagggagccatgaacctatgactgggcagagaaagcacaatcgcacatgccctgaggcaagctagtaattcrtatatttaaggaacagccaggagacctaagtcactgatgtgaacatggtaggaaatgagatcagaaaggcatgaagtagaagctctcttatctggtgaac

SEQ ID NO: 179782 - DNA, 201 bp, Homo sapiens
taatcaaaagttgatgatatcagggaatcatatgatacctatttacctttaaaagggaggtacaatttacattgagtgaaatgcactgatcttaagtgcayagttcaatgagttttcactattgtaaaaccttgtgtgactcataccacattagaaactacatctaaaatagttctgctttgtggtacttttgttatccaa

SEQ ID NO: 179783 - DNA, 201 bp, Homo sapiens
cctgcctcagcctcccaaattgctgggattacaggtgtgagccaccgtgcccggccaatttcttatctttattcatacaaagatctgttttcctatcagtyagacctgaagctaatttatggtattttttcagggcttactcactacgtttatcagcccataaaccaaactgcaaaattatttggtcattagttcacagaa

SEQ ID NO: 179784 - DNA, 201 bp, Homo sapiens
tgcaacctccacccccaacctcagcctcagtggctggactactggtgcatgccacaacaccccgctaatttttgtatcttttgtagatatggggttttgcyatgttgcccaggctggtcttgaactcctgggctcaagcagtatgcttgccccagcctcccaaattgctgggattacaagtatgagccactctgcccagcc

SEQ ID NO: 179785 - DNA, 201 bp, Homo sapiens
tgtatgcttttgaagcagctttaagttttaaaagggaaaggcttccatctactggatactttgagtaataaagactatgagaatccacatgacagatttcyttttgtgccggcaatgcataacctggcatgttcacttagaggttttgtaattcttttaaaatacattttgttggaagaacgtagttgttactgaatacgt

SEQ ID NO: 179786 - DNA, 201 bp, Homo sapiens
gcatgcctgtaattccagctacttgggaggctgagtcaggataatcgattgaacccgggaggcagattttgcagtgagccaagattgcaccattgcactcyagcctgggcaacaagagcgaaactccatctccaaaaaaaaaaaaaaaaaaaaaaaaagaaaagaaaagaaaagaaagaaaaaggtacagtaaaaatgcag

SEQ ID NO: 179787 - DNA, 201 bp, Homo sapiens
cctaaattacttgtcatgttttgtgataagaacatttcaaatttaatctcctagaaattctaaaatataccttatttaactatagtcaccatgctgtgcarcagatctcacaaaaactatccctcctgtctaattgcaactttgtagcatttgtctaacatgtccccttttccaccacctctcagcctctggaaaccactg

SEQ ID NO: 179788 - DNA, 201 bp, Homo sapiens
accctggaatctgatatctgaagcactgccttgtcttattttaatcacgttttgcgtgtctgtgtgtgtgtgtgtgtgtgtgtgtgtgtgtgtgtgtgtgtagctaattgaacttttatgcctagaacagtgctggtctaacattagataaggatcatatacttttattacctcaaatgcccataagtatcatatttttat

SEQ ID NO: 179789 - DNA, 201 bp, Homo sapiens
gaccctggaatctgatatctgaagcactgccttgtcttattttaatcacgttttgcgtgtctgtgtgtgtgtgtgtgtgtgtgtgtgtgtgtgtgtgtgtgtagctaattgaacttttatgcctagaacagtgctggtctaacattagataaggatcatatacttttattacctcaaatgcccataagtatcatattttta

SEQ ID NO: 179790 - DNA, 201 bp, Homo sapiens
ggcaggagttcgagaccagcctgaccaacttagggaaaccctgtctctactaaaaatacaaaaacattagccgggtgtggtggtgggtgcctgtaatcccrgctactcaggaggctgaggcaggagaattgcttgaaccttgcagtgagccgagattgccccactgcattccagcctgggtgacagagggagactctgtct

SEQ ID NO: 179791 - DNA, 201 bp, Homo sapiens
gtgggagtgcagtggtgcgatctcggctcactgcaagcttcacctcccgggttcactccattctcccgcctcagcctcctaagtagctgggattacaggcrcccgccaccacgcccggctaatttttctattttttttatagtagagacggggtttcaccatattagccaggatggtctcgacctcctgaccttgtgatcc

SEQ ID NO: 179792 - DNA, 201 bp, Homo sapiens
atgctgctgataaagacatacccaagactggacaacttacaaaagaaagaggtttgttggacttacatttccatatggctggggaggcctcacaatcatgraggaaggcaaggaggagcaagtcacatcttatgcagatgctggcaggcaaagagagagctctttcaggggaactcccatttttaaaaccatcagatctcg

SEQ ID NO: 179793 - DNA, 201 bp, Homo sapiens
aattagctaggcaataacttaacatgaattatatattgaaatgttaataatttgggtatattgtcacatagacactgtattagttcattttcatgctgctrataaagacatacccaagactggacaacttacaaaagaaagaggtttgttggacttacatttccatatggctggggaggcctcacaatcatggaggaaggc

SEQ ID NO: 179794 - DNA, 201 bp, Homo sapiens
actacaggcgcccgccaccacgcctggctaattttttgtatttttagtagagacggggtttcaccgtgctagccaggatggtctcgatctcctgacctcaygatctgcctgccttggcctcccaaagtgctgggattacaggcttgagccaccacacccggcctagaacatataatttaattaataaatattcattttaag

SEQ ID NO: 179795 - DNA, 201 bp, Homo sapiens
cccagcagtgctagtaacttgagaaatagagtttcaagcccagggtgtctgactcccaaagatatgttaatcatttgactactaaacttgtaacaagacartgtttcatttcttcaatgcatttccagttgcgcatactgaaaagcataaattgctgttttttgtgtgcgcatttggtaaaagtacttctacatatttgaa

SEQ ID NO: 179796 - DNA, 201 bp, Homo sapiens
taagagtaggcctggcacagtgactcatgactaatcacagcactttggaaggcccaaagctagaggatcacctgagcctaagatttcaataccagactgcrccatttgtttctcagggacaaatcccacttgatcattgtgtatggtcttcttaatgtgctgttgaatccagtttgctggcatttttttcagaatatttgc

SEQ ID NO: 179797 - DNA, 201 bp, Homo sapiens
atctattttttatatacatatacctgcctcttctcactttttgtaactcatagaatatgctgttttaccctttgctttcaacctttgtgtgtacttaagartaaaatgagtctcctggatactgtttttaatccattcagtgactctctgtgttttgattgaataatttaacttctttatacttgaagtaattattgattg

SEQ ID NO: 179798 - DNA, 201 bp, Homo sapiens
gattccctaagtaataacttcctaattaaaaaagaacaacaaataaaaaaccaaagcaaaaacaaaagcttttttcttcttaatttaacaacatagttacmaaaccctaaactttatctagattttatttcttatatttaacatcaaaattttttttgagatggagtttctctcttgttgcccatgctggagtacagtggc

SEQ ID NO: 179799 - DNA, 201 bp, Homo sapiens
caatcttgctgataccattacttaatgtttttgaaacaattaggaaaagggtaatagtattggatagaaaagtctgtagttcatgcaagttgctcatgcaytacactggtttggcaagccagggatattgaagaacttggattttctgactgagaaacagaacagtatttgcaaataagtaggggtttcctggaatagaaa

SEQ ID NO: 179800 - DNA, 201 bp, Homo sapiens
aaagggtaatagtattggatagaaaagtctgtagttcatgcaagttgctcatgcactacactggtttggcaagccagggatattgaagaacttggattttytgactgagaaacagaacagtatttgcaaataagtaggggtttcctggaatagaaacataatacagatgctgattctcttaaataaacctgggccaccaac

SEQ ID NO: 179801 - DNA, 201 bp, Homo sapiens
tctttgctcattgggcgcttgcttccaaggaacgataatggacggaaagagatgtaaccactagcctgggaaatttatcactgaaaaagggcaacaagaasgtggacactaatgcaggaagacaaacaaacccacgcagccaccaagagactagcttcaagaatcaatttattcttcccattctcattcacctcatggggg

SEQ ID NO: 179802 - DNA, 201 bp, Homo sapiens
gtcagagagattaagcaacttgcctaaagctgcaaagtttataagtagtgtagccaggatatcagcctggactctagagctgtatttttttttttttttttactttaagttctgagattcatgtacagaacgtacaggtttgttacatagatatacatatgccatggtggtttgctgcacccatcaacccatcatctaggt

SEQ ID NO: 179803 - DNA, 201 bp, Homo sapiens
ggatagcattaggagatatacctaatgttaaatgacgagttaatgggtgcagtacaccaacatgcacatgtgtatatatatgtaacaaacctgcacgttgygcacatgtaccctaaaacttaaagtataattaaaaataataataataatgtcttcctctcgctcaatctgcacacggagttggtcacaaagtccttaatt

SEQ ID NO: 179804 - DNA, 201 bp, Homo sapiens
acacatggacacgggaaggggaacatcacacaccggggactgttgtggggtggggggagggggagggatagcattaggagatatacctaatgttaaatgaygagttaatgggtgcagtacaccaacatgcacatgtgtatatatatgtaacaaacctgcacgttgtgcacatgtaccctaaaacttaaagtataattaaaa

SEQ ID NO: 179805 - DNA, 201 bp, Homo sapiens
aatgttatctaaaacatgggaactgctaagggaattgaacaatgagaacacatggacacgggaaggggaacatcacacaccggggactgttgtggggtggrgggagggggagggatagcattaggagatatacctaatgttaaatgacgagttaatgggtgcagtacaccaacatgcacatgtgtatatatatgtaacaaa

SEQ ID NO: 179806 - DNA, 201 bp, Homo sapiens
aaatgttatctaaaacatgggaactgctaagggaattgaacaatgagaacacatggacacgggaaggggaacatcacacaccggggactgttgtggggtgrggggagggggagggatagcattaggagatatacctaatgttaaatgacgagttaatgggtgcagtacaccaacatgcacatgtgtatatatatgtaacaa

SEQ ID NO: 179807 - DNA, 201 bp, Homo sapiens
ttagtagagacggggtttcaccgtgctagccaggatggtctcgatctcctgacctcacgatctgcctgccttggcctcccaaagtgctgggattacaggcrtgagccaccacacccggcctagaacatataatttaattaataaatattcattttaagaattcctgatatcaaaagaataacaagacagctatttggttta

SEQ ID NO: 179808 - DNA, 201 bp, Homo sapiens
aacatatatattatttatttatttatttatttatttatttatttatttatttatttatttatgggatggagtctcgctgtgtcacccaggctggagtgcartggcgcgatcttggctcactgcaacctccgcctcctgggttctcctgagtagctgggactacaggcgcccgccaccacgcctggctaattttttgtattt

SEQ ID NO: 179809 - DNA, 201 bp, Homo sapiens
tgtcactcaaaaaattatagaaatggaacaataatggaaaaatatcttcattaaacatgttatggggccaggcatggtggctcacgcctgtaatcccagcmctttgggaggctgaggtgggcgaatcacttgagttcagaactgcgagaccagcctggccaacatgacgaaaccctgtctctactaaaaatacaaaaatta

SEQ ID NO: 179810 - DNA, 201 bp, Homo sapiens
agtcagcatgatgcagagtatgtttgtttaaggtctagtagaacatatatattatttatttatttatttatttatttatttatttatttatttatttatttatgggatggagtctcgctgtgtcacccaggctggagtgcagtggcgcgatcttggctcactgcaacctccgcctcctgggttctcctgagtagctgggac

SEQ ID NO: 179811 - DNA, 201 bp, Homo sapiens
tctctgtcttttacttcctagctactcattaatttggggactgcatatattaagttgtgtttagtctatccttaatgagtagggttttttttgttttttttctttattttaaacatatatatgcataaatatacttgatgaacgatattatgaaatattaactctctttgaggcaaactatagccatgtctatatgacaac

SEQ ID NO: 179812 - DNA, 201 bp, Homo sapiens
ggaggctgaggcaggcagatcacaaggtcaggagttcaagaccagcctggccaacatagtgaaacctcatctctactataaaaaaaaaaaaaaaaaaaaaagtagccaagcatggtggtgggtgcctgtaatcccagatactcaggaggctgaggcaggagaatcacttgaacccgggaggtggaggttgcagtgagtgag

SEQ ID NO: 179813 - DNA, 201 bp, Homo sapiens
aaaataattgctgtaaagatactagctattcctaattaacgtgagcatatgggtagttcccacaaaaaaatttactaacctgccggttgttgctgtgtatrtgttcatgctttagcattcttaactatgaacatgaatcagcaaactaaaaaataatcatagttagctttctatggatagaaatggagagagagacagaga

SEQ ID NO: 179814 - DNA, 201 bp, Homo sapiens
gagcccaggagttcaaggccagcctgggcaatatagtgagaccctttctctaaaacaaaacaaaagtagactaattaggcatttgcaacaaaaacagatawaactaagggttgatatacctaataaagagcatatcaacccttaattactatactttttgaaagggaaatagtataccacatatagaaatgtgcaaggact

SEQ ID NO: 179815 - DNA, 201 bp, Homo sapiens
gggaggctgaggcaggcagatcacaaggtcaggagttcaagaccagcctggccaacatagtgaaacctcatctctactataaaaaaaaaaaaaaaaaaaaaagtagccaagcatggtggtgggtgcctgtaatcccagatactcaggaggctgaggcaggagaatcacttgaacccgggaggtggaggttgcagtgagtga

SEQ ID NO: 179816 - DNA, 201 bp, Homo sapiens
atggagataatagtcatagtagataacatgaatacaacccaggtctcttactgggcaagaaggtctcttttaagtgctttacataacattaactcatttarttcttacagcactatgagctagatattctcatccaccttataattgtaatgacatgagagttgaggtgacaatgcatgaaatgtactgattgttgtgctt

SEQ ID NO: 179817 - DNA, 201 bp, Homo sapiens
agcagagcttttcttttcccttccagtaggtctcaggagtgagatctggtcactggcatttattctctgacccttaactgtggttccccttgaaatggagytaatcaaggtgttgttccacttatttattgatgctcatgaagcattcattgttggtacatataattttgcctattcctatacttgaataaattctttctt

SEQ ID NO: 179818 - DNA, 201 bp, Homo sapiens
actgttagcaatttggtgtatattttggtttacattttctgtcagctagtagcaatgctattgaatactaaggaattttaagtaaaaagtgaaaaaaaaaataggtagcttcacataggtagataaataaatgatttctataaatttactcttttggatgactagtagttatctgttgcagtatttcagagcactataata

SEQ ID NO: 179819 - DNA, 201 bp, Homo sapiens
ggcgcccaccaccacaccctgctaattttttgtatttttagtagagacggggtttcaccgtgttagccaggatggtctcaatctcctgacctcgtgatccrtgcgcctgggcctcccaaactgctgggattaaggcataataatcaacaaggtccataaaatggagcatagacatcatcacctgtatcattatcaccgtct

SEQ ID NO: 179820 - DNA, 201 bp, Homo sapiens
gtgaatgtaacaaatgtgatgacaagaaggagagatctctgctgcctgcattgaggggtaagtgcttatgaagcaaatactgtctttatagagatgagaaragtggtgccttgacaaaatgagaaacttcagaatcagaagagttttgccttagtgagttagaagagcattttggcagcactattaatgcatgtttaacca

SEQ ID NO: 179821 - DNA, 201 bp, Homo sapiens
tgcctttgctttcttactttgtaacgtgtactgctggaacaaggtttcattagcacaggctcatgctagagatttgagaaaacgtttgtttgtagtttttstaaagggtcatgaaaaaagagtattttaaaagaagtaactgtacatatattaggattttaaacataatacaactgggaaaaaaaatgtggacacctagtc

SEQ ID NO: 179822 - DNA, 201 bp, Homo sapiens
tttatctgttgtgatgatctatgatcagtgattttttttttttttttttatttgagatggagtctcgctctgtcgcccaggctggagtgcagtggcgcgayctctgctcactgcaagctccgcctcccgggttcatgccattctcctgcctcagcctcccacgggcgcctgccaccactaactattgttaattgttttgtg

SEQ ID NO: 179823 - DNA, 201 bp, Homo sapiens
tttgtgtcaaactttggtaattctcccaatatgttaaactttttcatcattattttatctgttgtgatgatctatgatcagtgattttttttttttttttttatttgagatggagtctcgctctgtcgcccaggctggagtgcagtggcgcgatctctgctcactgcaagctccgcctcccgggttcatgccattctcctg

SEQ ID NO: 179824 - DNA, 201 bp, Homo sapiens
agtatctagataacagaaacacaaatggtcaacaaatatatgaaaagaagcttaacttcattgaaatcacagaaatgcaactaaaaaccgtaataaacccmattttatattcatcagattcacacaaattaaaaaagaaaaaaatagcaagtgttggcaaggatgcaaatcaatagatattcccagacataacattgaaga

SEQ ID NO: 179825 - DNA, 201 bp, Homo sapiens
gcaatcatggcaagaagacattagtaacgatgacacacatgcatagcatcaccttcttactttatttaaagtgtcatgcgattgggccccttagataactrtttcaaacaggtttagacaattttgcagtttaaacatacagaggctaccaaaaccactgaccataaaatgttgttctttagatcacattttttaaaaagt

SEQ ID NO: 179826 - DNA, 201 bp, Homo sapiens
atatttcaagtgtctttgtatttaatactgttcaccccaattagctctgtcaaaacttcatcacttatcttattcacatcaataagcttacattttactcratattatttaaaatgtaacaaatgatatcagaatatgttttgtctgatttacttactttatagataaaagttggttaaccaggtagttaaacaaatgtag

SEQ ID NO: 179827 - DNA, 201 bp, Homo sapiens
taatgcagtggaatgtatcctgctttcatcttggagttcacctgtgtggcttggatttatcacagtagcatttgtcttcaatctgtgtgttaactagaaaycaaggaaagacatgaggagatttgtctactgcaaggtggttctagccacttcgctgatgtgggttcttgttgatgtcttcttactgctgtacttcagtga

SEQ ID NO: 179828 - DNA, 201 bp, Homo sapiens
tttagacatgttgagtttgctttagattgcaaatcaaagattactttagacatgttgagtttgctttagattacagaaatactcttgttcatttagagaarttctgaatcttctgaatcgcttccttgtcttttaaaatggaacttgcattttagattttgactaatacaaataatttaaaaaaatttgcaagtgactgat

SEQ ID NO: 179829 - DNA, 201 bp, Homo sapiens
atagtgatgatagataaaagaagatggaatcaagatatatttagggagtagatttgatagttgggaggtggacgcaatgttagaaatgactcttaggtgtstagcttaaataatttaatgaatgtatgtattattattagagatgttgaaaatacgaagagaggcaggattggtagttcaattttggatatgttaactttg

SEQ ID NO: 179830 - DNA, 201 bp, Homo sapiens
gggataaacacagtgcctcactgtgacctgacagataccttcatgatctaacctttgacctacctttccaactttgtctcttggcactctccctccaccamatttgtccactcattcttctaagtattcttatatttaatttgctctgcctgaaatgtctttcttttccagccaataggtagtaactatttgctctccttt

SEQ ID NO: 179831 - DNA, 201 bp, Homo sapiens
tccctccaccaaatttgtccactcattcttctaagtattcttatatttaatttgctctgcctgaaatgtctttcttttccagccaataggtagtaactatytgctctcctttactcatcaggttttatgtttaaaacccttcttcgtatccggtagctcttggtacattcctttatgagaccccataggatttatttctct

SEQ ID NO: 179832 - DNA, 201 bp, Homo sapiens
gttgttgttgttttcaggattatacttaatttagtcaagacagatttcttgtgatgtaggttccgtgtcttgaataaataagtacaattctggaaaaaaaatgtttcaaataatggtaatattagggagacatataaaaaatttagggagccctaaaaagcctgagatagaattggtttcagatgacactaagtatctcgt

SEQ ID NO: 179833 - DNA, 201 bp, Homo sapiens
tgggaggctgaggcaggcagatcacaaggtcaggagttcaagaccagcctggccaacatagtgaaacctcatctctactataaaaaaaaaaaaaaaaaaaaaagtagccaagcatggtggtgggtgcctgtaatcccagatactcaggaggctgaggcaggagaatcacttgaacccgggaggtggaggttgcagtgagtg

SEQ ID NO: 179834 - DNA, 201 bp, Homo sapiens
caccatacctggctaatttttgtatatttagtagagacggggttttgccatgttggctaagctggtcttgaactcctgacctcaagtgattcgcccgcctyggccttccaaaagtgctgggattacaggcgtaagccacttcaccaaagagttatccttcactttttatgtacatttgcattcttgtactttttgcaaaaa

SEQ ID NO: 179835 - DNA, 201 bp, Homo sapiens
ttgggaggctgaggcaggcagatcacaaggtcaggagttcaagaccagcctggccaacatagtgaaacctcatctctactataaaaaaaaaaaaaaaaaaaaaagtagccaagcatggtggtgggtgcctgtaatcccagatactcaggaggctgaggcaggagaatcacttgaacccgggaggtggaggttgcagtgagt

SEQ ID NO: 179836 - DNA, 201 bp, Homo sapiens
tgttgctacaaaggaaaacttgagactaggtaatttgtaaggaaagagatttggccgggtgtagtggctcacacctgtaatcccagcactttgggaggctkaggcaggcagatcacaaggtcaggagttcaagaccagcctggccaacatagtgaaacctcatctctactataaaaaaaaaaaaaaaaaaaaaagtagcca

SEQ ID NO: 179837 - DNA, 201 bp, Homo sapiens
tattgagtattgttatccttcacttttgttgttttgttttgttttgttttgttttgttttgttttgttttgttttgagacggagtctcactctctctcccrggctggaatgcgatggcgcgatcttggctcaccgcaactccacctcccgagttcaagcgattcccttgcctcagcctcccaagtagctggaattacaagc

SEQ ID NO: 179838 - DNA, 201 bp, Homo sapiens
gtgggaattgaacaatgagaacacatggacacaggaaggggaacatcacacaccggggcctgttgtggggtggggggagtggggagggatagcattaggaratatacctaatgtaaatgatgagttaatgggtgcagcacaccaacatggcacatgtatacatatgtaacaaacctgcaagttgtgcacgtgtattgtaga

SEQ ID NO: 179839 - DNA, 201 bp, Homo sapiens
aaccaaacaccgcatgttctcactcataggtgggaattgaacaatgagaacacatggacacaggaaggggaacatcacacaccggggcctgttgtggggtrgggggagtggggagggatagcattaggagatatacctaatgtaaatgatgagttaatgggtgcagcacaccaacatggcacatgtatacatatgtaacaa

SEQ ID NO: 179840 - DNA, 201 bp, Homo sapiens
ggcacatatacaccatggaatattatgcagccataaaaaaggatgagttcatgtcctttgtagggacatagatgaagctggaaaccatcattctgagcaamctatcgcaaggacagaaaaccaaacaccgcatgttctcactcataggtgggaattgaacaatgagaacacatggacacaggaaggggaacatcacacacc

SEQ ID NO: 179841 - DNA, 201 bp, Homo sapiens
ttgtctagaggaactcaattcagtcattaaataaaaattgttggctgggcactgtggttcatgcctgtaatcttagcactttgggaggctgaggcgggtgratcacctgagttcgggagtttgagaccagcctgtccaacatggtgaaaccccatctctactaaaaatgcaaaaattagctcagtgtggtggcatgtgcct

SEQ ID NO: 179842 - DNA, 201 bp, Homo sapiens
gtctttgtgtcaaactttggtaattctcccaatatgttaaactttttcatcattattttatctgttgtgatgatctatgatcagtgatttttttttttttwttttatttgagatggagtctcgctctgtcgcccaggctggagtgcagtggcgcgatctctgctcactgcaagctccgcctcccgggttcatgccattctc

SEQ ID NO: 179843 - DNA, 201 bp, Homo sapiens
cattctcctgcctcagccacccgagtagctgggactacaggtgcccgccaccacacccagctaatttttttgtatttttagtagagatggggtttcactgygttagccaggatggtcttgatctcctgaccttgtgatccgcccgtctcggcctcccaaagtggtgggattacaggcttgagccaccgtgccaggcacaag

SEQ ID NO: 179844 - DNA, 201 bp, Homo sapiens
tgctttattgtgcttcacggatattgcactttttaacaaattgaatgtttgtgacaaccctacatggagcatgtctattggcttcatttttccaacagcaygtgcccactttatgtctttgtgtcaaactttggtaattctcccaatatgttaaactttttcatcattattttatctgttgtgatgatctatgatcagtga

SEQ ID NO: 179845 - DNA, 201 bp, Homo sapiens
tatattagacaatgatgacttcataacagtcaaagttgtataataattaatccagggacacctgtgcacagttccttttacaaagctatcacagtgtattrtactataaaaatcataaaggattttttaaagaacagattttatctgatgtgctagcaaagctaaagatgaaataagctgcactgattattggttatcttt

SEQ ID NO: 179846 - DNA, 201 bp, Homo sapiens
taacatgtactgattaattacattgtgccagttcctctgattgtcatttcatatataatctttaccagaattctataagtagatataattcttattgctakgttataaacacgggaacaactggagttaactgggcaaattaacctcttcagtatcttcaaactgaatgtgtataggggttggacttgaatcaacattgtc

SEQ ID NO: 179847 - DNA, 201 bp, Homo sapiens
ctcagctcactgcaagctccacctcccgggttcacaccattctcctgcctcagccacccgagtagctgggactacaggtgcccgccaccacacccagctawtttttttgtatttttagtagagatggggtttcactgtgttagccaggatggtcttgatctcctgaccttgtgatccgcccgtctcggcctcccaaagtgg

SEQ ID NO: 179848 - DNA, 201 bp, Homo sapiens
ttagatccttgaggaatcaccacactgtcttctacaatgactgaactagtttacagtcccaccaacagtgtaaaagcattcctatttctccacatcctctycgagctggacttattttttaaatgtatgaatcttaatgtggtgttacttataaatctaacataaatacatagcccccaatttcttactgaagctttaaga

SEQ ID NO: 179849 - DNA, 201 bp, Homo sapiens
ctggaagacaacctaggaaataccgtgctggacctagaaactggcaaagattttataacaaagatcccaaaaccactgcaacaaaaataaaaattgacaartgggacctaattaaactaaagaacttctgcaaaccaaaggaaactatcaacagaacaaacagacaatctacagaatatgagaaaatatttgcaagctatg

SEQ ID NO: 179850 - DNA, 201 bp, Homo sapiens
tggagcgatctcagctcactgcaagctccacctcccgggttcacaccattctcctgcctcagccacccgagtagctgggactacaggtgcccgccaccacrcccagctaatttttttgtatttttagtagagatggggtttcactgtgttagccaggatggtcttgatctcctgaccttgtgatccgcccgtctcggcctc

SEQ ID NO: 179851 - DNA, 201 bp, Homo sapiens
ataaacatacgtgtgcatgtgtctttatagtagcatgatttgtaatcctttgggtgtatacccagtaatgggattgctgggtcaaatggtatttctagttytagatccttgaggaatcaccacactgtcttctacaatgactgaactagtttacagtcccaccaacagtgtaaaagcattcctatttctccacatcctctc

SEQ ID NO: 179852 - DNA, 201 bp, Homo sapiens
ccccaaggcaaaattattctattttctgtgttcccatagaaccttgttcctattgctgttgctaactttcaacctgttatcatagtggtgccctcacatgyctcccattttagatgagaagctttttcacaatggagacatcacatttctcattgttcctctgagacctaccaaagtccataatacaaccattcattctat

SEQ ID NO: 179853 - DNA, 201 bp, Homo sapiens
tctgtcttgtgatagtttgctgagaatgatggtttccagcttcatccatgtccctgcaaaggacatgaactcatccttttttatggctgcatgctattccrtggtgtatatgtgccacattttcttaatccagtctatcattgatggacatttgggttggttccaagtctttgctattgtgaatagtgccacaataaacat

SEQ ID NO: 179854 - DNA, 201 bp, Homo sapiens
cacattcgtcaaaaaatcatgttttcttaacttttggaaaattgattttgtttcttacttatgttgcaactttgtactattttccagctcttttaatgttkaagttctgcctaacttatagctgtgtaattagttcttacctatgcactttgttgcttttgttcactttcagcttttaagctagtatttttttggattata

SEQ ID NO: 179855 - DNA, 201 bp, Homo sapiens
gtgtttggttttctgtcttgtgatagtttgctgagaatgatggtttccagcttcatccatgtccctgcaaaggacatgaactcatccttttttatggctgsatgctattccgtggtgtatatgtgccacattttcttaatccagtctatcattgatggacatttgggttggttccaagtctttgctattgtgaatagtgcc

SEQ ID NO: 179856 - DNA, 201 bp, Homo sapiens
gaaaattacttacatttttacaccatttagacgtaacaatgttaacatttcactgtatagtgaattgttatactgaatttatatacatatataggcacatrtatttacatatatgtaaattatgtcattatttacaaaacaactttattctccatattattttagaaattattgatattgttttgaagattagattttgga

SEQ ID NO: 179857 - DNA, 201 bp, Homo sapiens
gatgttccctgccctgtgtccaagtgttctcattgttcatttctcacctatgagtgagaacatgcggtgtttggttttctgtcttgtgatagtttgctgaraatgatggtttccagcttcatccatgtccctgcaaaggacatgaactcatccttttttatggctgcatgctattccgtggtgtatatgtgccacattttc

SEQ ID NO: 179858 - DNA, 201 bp, Homo sapiens
tttattattattatactttaagttctagggtacatgtgcacaatgtgcaggtttattatataagtatgcatgtgctatgttggtttgctgcgcccattaaytcatcatttacattaggtatttctcctaatgttatccctcacccctccccccaccccacaacaggccctggtgtgtgatgttccctgccctgtgtccaag

SEQ ID NO: 179859 - DNA, 201 bp, Homo sapiens
  misc_feature (1)...(201): n = A,T,C or G
tatttatttatttatttatttttttgaggcggagtcttgctctgttgcccaggctggagtgcagtgacacaattttggctcactgcaacctccacctcccnggttcaagtgattctcctacctcagcccccccgagtagctgggattacaggaacccgcaaccatacctggctaatttttgtatttttagtagagacaggg

SEQ ID NO: 179860 - DNA, 201 bp, Homo sapiens
ttgttgtttttcttatagctttgccttttcttaaacccatttgccatgaccttgccatgcttttatttatttatttatttatttatttatttatttttttraggcggagtcttgctctgttgcccaggctggagtgcagtgacacaattttggctcactgcaacctccacctcccgggttcaagtgattctcctacctcag

SEQ ID NO: 179861 - DNA, 201 bp, Homo sapiens
gaaagcattgggtattttgtctacagatcctatgtaagaagtcttactgaaatcaaataatctagataaaatttaaattcctaaaagaaagttataatatmttccacaattaataatacaaattattagccaatgaggcagatctttgaaatgtttccctacttttcctcatgagtactattttattttcattgaaactat

SEQ ID NO: 179862 - DNA, 201 bp, Homo sapiens
attataacagatttaaatcacaaatgaaattgtcagtttatttttgagttaccaaattccttacacagcttttaaagtttcattgtacactgttttgctttctcatttactttaacccagaaatactttctaagcttaagtacattcaaaacttgtttttttctcacctgattctactgatctctgggatttgttattttc

SEQ ID NO: 179863 - DNA, 201 bp, Homo sapiens
aaaagccaaaaaagactaattatgaatatgggaattaggatgttgtctgtcatgtgtacgggaaattggggtgtgagatgggggtgaaaattttgactgamtgtagggtattattacagtcctagatttgatttggatatgggtttgatgtgtctttttctctatgtggataactaaataagtgaataagatacactgaat

SEQ ID NO: 179864 - DNA, 201 bp, Homo sapiens
gctctgggggccctaccaagggacacgatggacccaaagcaggcagcacactaccgtagcattggtacaggacaaaataagagcttggccattgacactgycttcagcacaccctggcaaaaaaggtgggctacaaaacaaaacccaaaatccataggccaaagggaatggagttgggcaagcacctgccagcctcaaaac

SEQ ID NO: 179865 - DNA, 201 bp, Homo sapiens
ttttattcttccctttcagcatatttgagttttcacagtgtgcatacattgcttctatatttgaaaaaaaatcattccttttacacataaacctaaatcaygaaaattgtataaactccatttactttttgcccttttcaatatgataattttaaaataagttaaaagataaactcagttttttatttaatcattaatact

SEQ ID NO: 179866 - DNA, 201 bp, Homo sapiens
gagtacagtggagcgatctcagctcactgcaagctccacctcccgggttcacaccattctcctgcctcagccacccgagtagctgggactacaggtgcccrccaccacacccagctaatttttttgtatttttagtagagatggggtttcactgtgttagccaggatggtcttgatctcctgaccttgtgatccgcccgtc

SEQ ID NO: 179867 - DNA, 201 bp, Homo sapiens
ggatattagaaatataataaggataaacataatttaaatacgttaaaatacatctataattttaaaaatatgaggagtggaataaccaggaattaaaatgrcatatagaaaaaaatccatgtatcggttagtgggttttattaatttagattgctgtctttgtacatatctttcccagaaatgtgaagcaaaaaggaaaat

SEQ ID NO: 179868 - DNA, 201 bp, Homo sapiens
atttttcaatgtttttgttataacctcttataaacaagaggattagtttataggaaaagacaaggctgagcaacataacaaaatcaagtgtattttttttktttgttttcagacggtctcgctctgttgcccaggctagagtacagtggagcgatctcagctcactgcaagctccacctcccgggttcacaccattctcct

SEQ ID NO: 179869 - DNA, 201 bp, Homo sapiens
catactctccaatgcggcatgcatttatattttcattttttgtgagaagcattttggagactactttactgtaaaattcccagcagaccaatgactcccayctgatttctttcagtctctctcagttcctgcttcagacagaacaccacgcaagaacttgcttctgaggctctcttaccttatcagacagccctatagagg

SEQ ID NO: 179870 - DNA, 201 bp, Homo sapiens
tgcctcagcatcccaagtagctgggattacaggcacatgccaccatgccaggctaatttttgtatttttagtagagatgaggtttcaccatgttggccagrctggtctcgaactcctgacctcaagtgatccacccacctcagcctcctaaagtgctgggattacaggcatgagacaccgtgcctggccaattgcagaggt

SEQ ID NO: 179871 - DNA, 201 bp, Homo sapiens
ctcctgcctcagcatcccaagtagctgggattacaggcacatgccaccatgccaggctaatttttgtatttttagtagagatgaggtttcaccatgttggycaggctggtctcgaactcctgacctcaagtgatccacccacctcagcctcctaaagtgctgggattacaggcatgagacaccgtgcctggccaattgcag

SEQ ID NO: 179872 - DNA, 201 bp, Homo sapiens
gcacccactgtcctgcgtccattgtctggcactccctagtgagatgaacccggtacctcagatggaaatgcagaaatcacccatcttctgtgttgctcacrctgggagctgtagaccagagctgttcctattcggccatcttggctgcttcagtgtgttcttatatttctaatattttgttttgttccctatatttttgtt

SEQ ID NO: 179873 - DNA, 201 bp, Homo sapiens
cgcaggatgcgctgcacccactgtcctgcgtccattgtctggcactccctagtgagatgaacccggtacctcagatggaaatgcagaaatcacccatcttytgtgttgctcacgctgggagctgtagaccagagctgttcctattcggccatcttggctgcttcagtgtgttcttatatttctaatattttgttttgttcc

SEQ ID NO: 179874 - DNA, 201 bp, Homo sapiens
aaaaacaacagaaatttattgtacacagttctggaggctgagaagtccaagatcaagacaccagcagatttggtgtctgatgagggaaaagttcattgagmcttcttcttgcatgctcacatggtgaaagagaagagctagatctctgggtttctttcatgaggacactaatctcattcctcggggcagagacttcatgac

SEQ ID NO: 179875 - DNA, 201 bp, Homo sapiens
aaaagcgcagtattagggcgggagtgacccgattttccaggtgccatctgtcacccctttctttgactaggaaagggaactccctgaccccttgcgcttcmcgagtgaggcaatgccttgccctgcttcggctcacgcaggatgcgctgcacccactgtcctgcgtccattgtctggcactccctagtgagatgaacccgg

SEQ ID NO: 179876 - DNA, 201 bp, Homo sapiens
gtcatccaaaatggaaacctaacatagaaacatacttctgaagtccgattagtcaccaaatcccaacacttctatggaaaaatgtccctacatcttagtcsttttataaccaggatctctgcctttgttctagcctatatctacttttacccatatggatttaaaacctcattattttcataactcataattcatgctaca

SEQ ID NO: 179877 - DNA, 201 bp, Homo sapiens
aggcctccttgagctgtggtgggctccacccatttcgagcttcctggctgctttgtttacctaagcaagcctgggcaatggcgggcgcccctcccccagcstggctgccactttgcagtttgatctcagactgctgtgctagcaatcagcgagactccgtgggcatagaaccctccgagccaggtgcaggatataatctcc

SEQ ID NO: 179878 - DNA, 201 bp, Homo sapiens
aaatgtttttattaaataactaagagcatgaagctgagtgtgttggcaggtgcccatggtcacagctattcaagtggctgaggcagtagtatggcttgagyccaggagttcaagaccagctgagtaacatagtgagaacccatctctatttaataaaaataaaaaaagaacttgagctatgtcttagtccattagggctgc

SEQ ID NO: 179879 - DNA, 201 bp, Homo sapiens
aagctgtcagacagggacatttaagtctgcagagtttactggtgtctttttgtttgtctgtgcccagcccccagaggtggagcctacagaggcaggcaggmctccttgagctgtggtgggctccacccatttcgagcttcctggctgctttgtttacctaagcaagcctgggcaatggcgggcgcccctcccccagcctgg

SEQ ID NO: 179880 - DNA, 201 bp, Homo sapiens
cgggaggccaaggcaggcggatcatgaggccaggagatcgacaccatcctggctaacacagtgaaaccccgtctctactaaaaatacaaaaaaaaacttakccaggcgtggtggcaggcacctgtagtcccagctactcgggaggctgaggcaggagaatggtgtgcacccaggaggtggagcttgcaatgagccgagatc

SEQ ID NO: 179881 - DNA, 201 bp, Homo sapiens
gtaatcccagcacttcgggaggccaaggcaggcggatcatgaggccaggagatcgacaccatcctggctaacacagtgaaaccccgtctctactaaaaatwcaaaaaaaaacttagccaggcgtggtggcaggcacctgtagtcccagctactcgggaggctgaggcaggagaatggtgtgcacccaggaggtggagcttg

SEQ ID NO: 179882 - DNA, 201 bp, Homo sapiens
ctgtaatcccagcacttcgggaggccaaggcaggcggatcatgaggccaggagatcgacaccatcctggctaacacagtgaaaccccgtctctactaaaamtacaaaaaaaaacttagccaggcgtggtggcaggcacctgtagtcccagctactcgggaggctgaggcaggagaatggtgtgcacccaggaggtggagct

SEQ ID NO: 179883 - DNA, 201 bp, Homo sapiens
gggcgtagtggcgggcgcctgtagtcccagctacttgggaggctgaggcaggagaatggcgtgaacccgggaggcggagcttgcagtgagccgagattgcrccactgcactccagcctgggcgacagagcgagactccgtctcaaaaaaaaaaaaaaaaaaaaaaaaaaaaaaggtatgcaaatgaaactttaaattttca

SEQ ID NO: 179884 - DNA, 201 bp, Homo sapiens
aggtcaggagatcgagaccatcccggctaaaacggtgaaaccccgtctctactaaaaatacaaaaaattagccgggcgtagtggcgggcgcctgtagtccyagctacttgggaggctgaggcaggagaatggcgtgaacccgggaggcggagcttgcagtgagccgagattgcgccactgcactccagcctgggcgacaga

SEQ ID NO: 179885 - DNA, 201 bp, Homo sapiens
tttgccaaatctgaagtggacaattaatgttttctctgacctcatataaaatggtatgcaaggccgggcgcggtggctcacgcctgtaatcccagcacttygggaggccgaggcgggcggatcacgaggtcaggagatcgagaccatcccggctaaaacggtgaaaccccgtctctactaaaaatacaaaaaattagccgg

SEQ ID NO: 179886 - DNA, 201 bp, Homo sapiens
agataacatcggtctttcagtgtatgcttcatggaggataatgatggtttgcagctattatgttcaaatgggacttagaaaatagcctactaattaaatgactaaatcaaataaaactacacattttaaaatttctcctttatttaaacttagcaaattatattttttgatcttctatactgagtttctgacttactcatc

SEQ ID NO: 179887 - DNA, 201 bp, Homo sapiens
tagcattggtacaggacaaaataagagcttggccattgacactgccttcagcacaccctggcaaaaaaggtgggctacaaaacaaaacccaaaatccatakgccaaagggaatggagttgggcaagcacctgccagcctcaaaacccttctaagcaaaaaccaaaagccaaaatgaggttacacattgaggaacaccaata

SEQ ID NO: 179888 - DNA, 201 bp, Homo sapiens
tgaaagatatctatgcataacaagataaacactgggtgataactttagtgtggaatactcctttgaagaaatcaaaatatggggatatttatgtttattgkaaataaggtgaaataactttactaatatgttattttctggaaataggtgaaagtctacatcattctatggttcccttattttaacctgtaatgtcagctc

SEQ ID NO: 179889 - DNA, 201 bp, Homo sapiens
ctttgccatattctaatccatatttatttgtttctttaaattgattttcaatcttcttatacttctaactgagccttaaactataaaactatatgttgatgcatatttttcaaatgtacattaaataaatactttgctgttagcacataaattgataaccatgtactacctatagttattatgtcttccactagactagat

SEQ ID NO: 179890 - DNA, 201 bp, Homo sapiens
catctgatcagctccactgcctgccagggaaaatagtggctctggaaagagctttggtagtgacagacctcaagtgttacaactctgttttgctgcctctmcgatcctcagtctgctaatcactttttgccaccattggctctgctgatcagtgtcccatgaatcctgccaattgctgcttcactgattgctgactgctgc

SEQ ID NO: 179891 - DNA, 201 bp, Homo sapiens
ctggcaaccgtgttactacaagctaagtacagagaatcttgctgccagcagaggcatttcatgcttcatgtctggaaaaaaaaaaaaaaaaaaaaaaaaargctataatttagttgtgtacgcttgttcagatgatttcaagttggtgcttttgatagtgcaagttccagctgctcaggcctatgagtcctcttgtgaaaa

SEQ ID NO: 179892 - DNA, 201 bp, Homo sapiens
catagtgtaggcattacatagaattattctaatgtcccaacatatgagacaggaaaaaatagttaagaatagagcatggaaaaaaaaggggtgaatctagraattcacaatctttatcaggaaaaactggtaataggggtaaattaccatatagatgatcacccaaaaggtgatctttgggcaattaattgcttaaatata

SEQ ID NO: 179893 - DNA, 201 bp, Homo sapiens
tgatgaaatcagggtaatggagatatgtgtcacctcaagcatttacgatttttttgtgttaggaccatcccaattcctctcttctagttatttttaaatayacaataaattattgctaactatacttgtcctattgtactaccaaacactattcctttgatcaaaagtgtatttttgtactcattaactaatttttctttt

SEQ ID NO: 179894 - DNA, 201 bp, Homo sapiens
tgatgggtcttgactctttatccaatttgccagtctgtgtcttttaattggagcatttagcccatttacatttaaggctaatattgttatgtgtgaatttkatcctgtcattttgatgttagctggttattttgctcgttagttgatgcagtttcttcctagcctcaatggtctttacaatttggcatgtttttgcagtgg

SEQ ID NO: 179895 - DNA, 201 bp, Homo sapiens
taattgcttctccctgctatcaaaccaattatagagactaattttaagaaaggaaactttatagttgaggcaaacttaggtaggtgataatccttcccccmacccttactctccaccttcccccagtccactatcatgtttcgcacagctaacttctggtggataatatggaaagaaaaattgttttcagaaattgcttta

SEQ ID NO: 179896 - DNA, 201 bp, Homo sapiens
ccatgttcctgcacaggacatgatctcattcctttttatggctgcataatattccatggtgtatatataccacattttctttatccagtctattgttgatrgacatttagattgattccatgtcgttgctattgtgaatagttctgcaatgaacatgtgcctttatgtatctttataaaagaacagtttatattcctttgg

SEQ ID NO: 179897 - DNA, 201 bp, Homo sapiens
gtaagtcactcaggacttgctttatgaaactgggtgctcctgtattgggtgcatatatatttaggatagttagctcttcttgttgaattgaaccctttacyattatgtaatgtccttctttgtctcttttgatctttgttggtttaaagtctgttttatcagggactaggattgcaatccctgcctttttttgttttccat

SEQ ID NO: 179898 - DNA, 201 bp, Homo sapiens
tgtttttttcaggtttgtcaaagatcagatagttgtaggtgcgcagtcttatttctgggttctgcattctgttccattggtctatgtgtctgttcttgtayctgtaccatgctgttttggttactttagctgtatagtatagtttggcatcaggtagcatgaagcctcgagcttttttttttttttttgcttaggattgtc

SEQ ID NO: 179899 - DNA, 201 bp, Homo sapiens
ttttacatttgctgaggagagctttacttccaagtatgtggtcaattttggaataggtgtggtgcagtgctgaaaaaaatgtatattctgttgatttggcrtggagagttctgtagatgtctattaggtccgcttggtgcagagctgagttcaattcctgggtatccttgttaactttctgtctcgttgatctgtctaatg

SEQ ID NO: 179900 - DNA, 201 bp, Homo sapiens
tctagtttatttgcatagaggtgtttgtagtattctcagatggtagtttgtttttctgtgggatcggtggtgatatccgctttatcattttttattgcgtstatttgattcttctctcttttcttctttattagtcttgctagcggtctatcaattttggtgatcctttcaaaaaaccagctcctggattcattaattttt

SEQ ID NO: 179901 - DNA, 201 bp, Homo sapiens
gtgtctttatagcagcatgatttatagtcctttgggtatataaccagtaatgggatggctgagtcaaatggtatttctagttctagatccctgaggaatcrccacactgacttccacaatggttgaactagtttacagtcccaccaacagtgtaaaaatgttcctatttctccacatcctctccagcacctgttgtttcct

SEQ ID NO: 179902 - DNA, 201 bp, Homo sapiens
cgtcatttaacgttaggtatatctcctaatgctatccctccaccctccaccttcccccctccccacaacagtccccagagtgtgatgttcccctttctgtrtccatgtgttctcattgttcagttcccacctatgagtgagaatatgcagtgtttggttttttgttcttgtgatagtttactgagaatgatgatttccaat

SEQ ID NO: 179903 - DNA, 201 bp, Homo sapiens
aatgaatatatacatatatatgtatttgaatggaatatatatatttgaatggaatatatatatatatttgaatggaattttatatatatatatatatatawctcctagtatgtggcagtgtgaatttagaagtgccattgtatcaaggcatgatgaaggacagttttacaggaaggtgtatttggaaccaagctttgtaag

SEQ ID NO: 179904 - DNA, 201 bp, Homo sapiens
gttctgactttctaaagttggtattttcagcatttatcgggacctaattgtgtaccaatgaaaactaaaatatacggttttacattagagaatggaatgamtatatacatatatatgtatttgaatggaatatatatatttgaatggaatatatatatatatttgaatggaattttatatatatatatatatatatctcct

SEQ ID NO: 179905 - DNA, 201 bp, Homo sapiens
ctttattagcagaaatagaaatgctgtcaagataagccagcataaacaaatctcactaaataacctttattatccattagtttccctcctgcattacagagtttcccaccttagaagccccaaacccttttcctttgtcttgccacttctccacaatttatcacccttttttaaaacgtcatataaacccactgagtgtca

SEQ ID NO: 179906 - DNA, 201 bp, Homo sapiens
cctttattagcagaaatagaaatgctgtcaagataagccagcataaacaaatctcactaaataacctttattatccattagtttccctcctgcattacagagtttcccaccttagaagccccaaacccttttcctttgtcttgccacttctccacaatttatcacccttttttaaaacgtcatataaacccactgagtgtc

SEQ ID NO: 179907 - DNA, 201 bp, Homo sapiens
taacatttcactgtatagtgaattgttatactgaatttatatacatatataggcacatgtatttacatatatgtaaattatgtcattatttacaaaacaaytttattctccatattattttagaaattattgatattgttttgaagattagattttggaatataaataaatattatttgggacattatttttatgactaca

SEQ ID NO: 179908 - DNA, 201 bp, Homo sapiens
cacagacagctgagttcattatgttgaagttgtcaatcacacaggcagtcgtttatattccttttgaactctgttatgttacctcatggatgactttttttctcttctcttttatatgatgttaaaacattccattctatctcctttacaattgacattctagaaaatacccataagattttctttgccttaacagagaaa

SEQ ID NO: 179909 - DNA, 201 bp, Homo sapiens
tgttgtcatttctaccttgatccctgtctctatatcctctttaataaaataactcttagattatcccttttgaggctattgtctagattttgtgggattasttcattctttttttattttttcacccctgactgtatattttcatacagtctatcttcaagtttactaattctttgttctgcttgatcaattctgcttttg

SEQ ID NO: 179910 - DNA, 201 bp, Homo sapiens
ttgtgggattacttcattctttttttattttttcacccctgactgtatattttcatacagtctatcttcaagtttactaattctttgttctgcttgatcarttctgcttttgagagactgcggcatttttcagttcgtcacttgaattcttcatctctagaatttttgcttgatttaaaaaaattatttcaatcactttgt

SEQ ID NO: 179911 - DNA, 201 bp, Homo sapiens
tctactaaagatttttgcttttttattaccatgttgtttactagaacatcctgtacttattgcattctatttcagtctgataagaacttaaattttattgwatacaacaactctggactgttactcctcccttcacagtttatgtttttgatgccagaattggtaacatttttattatgtatcccttgataatttattttc

SEQ ID NO: 179912 - DNA, 201 bp, Homo sapiens
ttccctctcttttgtttttaaggttttttgtttgtttgtttgtttttttgtcagggatagatcttaactatttaatatagcctgtgattctggaatggcamtctggtaataaccctggcctggtagagcttgctgtcagttttccagttggcttggctgctactttagctgtgatgtcaggtggagcttctggttgggctc

SEQ ID NO: 179913 - DNA, 201 bp, Homo sapiens
  misc_feature (1)...(201): n = A,T,C or G
gcaggctgggctttgagttaggtgcagctgctacttggagggacaaataggaccagagtctatgctcattagaactggaagactgagaatagttttcctgntaggttgaagccatggggtgagcttttggctaagttgagtggctgtttgactttccaggtcaaaccagtgtagcccctttatttctctggaatgtatgga

SEQ ID NO: 179914 - DNA, 201 bp, Homo sapiens
agcctaaggacacctagaggttagaaaataaatacaagaattttcagtgattatcactgatattggagttatagttgtattcgaaactatatataaatgtrtacatatatgtaaaaaatacataaatgtttttctaagtagagacatgttttataaaagaaatatgaattattaaaatagttaaatattttattgattata

SEQ ID NO: 179915 - DNA, 201 bp, Homo sapiens
aactgtcagaatacaaataaatcagaaccatgaattaaaaaaaaaataagtcttcactgagctaatgtttaaaatattcatagccagtgatttttttttttcttttaagaatctctgccaggcacggtggctcacacctgtaatcccagcactttgggtgggaggctgaggcgggcagatcacctgaagtcacgggtttga

SEQ ID NO: 179916 - DNA, 201 bp, Homo sapiens
cagaagttggagtgagccgagattttgccattgcactccagcctgggcaacaagagcgaaactctgtctcaaaaaaaaaaaaaaaaaaaaaaaagaaaggwaaagaaaaaagaaaaccctgttgagattccagggcttgtaattgtcagaggtttatttggtatcttagcaactgctttgtgacaaccattgtatactttt

SEQ ID NO: 179917 - DNA, 201 bp, Homo sapiens
tttgtcaaagatcagatagttgtaggtgcgcagtcttatttctgggttctgcattctgttccattggtctatgtgtctgttcttgtacctgtaccatgctrttttggttactttagctgtatagtatagtttggcatcaggtagcatgaagcctcgagcttttttttttttttttgcttaggattgtcttggctatttggg

SEQ ID NO: 179918 - DNA, 201 bp, Homo sapiens
tgagaggcagaagttggagtgagccgagattttgccattgcactccagcctgggcaacaagagcgaaactctgtctcaaaaaaaaaaaaaaaaaaaaaaaagaaaggaaaagaaaaaagaaaaccctgttgagattccagggcttgtaattgtcagaggtttatttggtatcttagcaactgctttgtgacaaccattgta

SEQ ID NO: 179919 - DNA, 201 bp, Homo sapiens
tttgttacaaatagtatttaattttgatttatagtcctttaatatgcacaattattaattaaattaattagaagttttgcagaatgataggggaaatgtcrctttgtttacaggttggcttttcatgtgcttgtacacataatggtaatctctgcttacctgttatatctcgcattatatttttccttttctcctatattt

SEQ ID NO: 179920 - DNA, 201 bp, Homo sapiens
cctgaccaatatggtaaaaccccatctccactaaaaatacaaaattagccaggcgtggtgttgcatgcctgtaatcccagctactcaggaggctgaggcakgagaattgcttgaacctgagaggcagaagttggagtgagccgagattttgccattgcactccagcctgggcaacaagagcgaaactctgtctcaaaaaaa

SEQ ID NO: 179921 - DNA, 201 bp, Homo sapiens
tcatatttactaactcttatttttttctttctgaattacttcatataatatgaaaaccttggctgggcttggtggctcatgcctgtaatcctagcactttrggaggccaaggcaggcggatcaccttaggtcaggagtttgagagcagcctgaccaatatggtaaaaccccatctccactaaaaatacaaaattagccagg

SEQ ID NO: 179922 - DNA, 201 bp, Homo sapiens
gtgtagtgaatgtgaaggcttagggcattactgtacgctacttgtagactttataaacactatacacttaggttatactaaatttctttttaaaatttctktcttcagtaatgaattaaccttacattactgtgatatttttacttcataaagtcttgaatttttttcacttttaaactgtttagtattaatacttacctt

SEQ ID NO: 179923 - DNA, 201 bp, Homo sapiens
tatacttgtataggtcatgtaacatgaatggagcttgcaggactgaaagttgctctgggtgagtcagtgagtgtgtagtgaatgtgaaggcttagggcatwactgtacgctacttgtagactttataaacactatacacttaggttatactaaatttctttttaaaatttctttcttcagtaatgaattaaccttacatta

SEQ ID NO: 179924 - DNA, 201 bp, Homo sapiens
gtctaataaaaatacaaaaattagctggtgacgggcacctgtaattccagctactgaagaggctgaggcacaagaatcgcttgaacccaggaggtggaggytgcagtgagctgagatcgcaccactgcactccagcctgggtaacaaagggagactccgtctcaaaaaacaaacaaacaacaaattggcatgtacaataat

SEQ ID NO: 179925 - DNA, 201 bp, Homo sapiens
tgcttgtgcacacctgtaatcccagctacttgggagactaaggcagaagaattgcttgaaccagggaggcagagcttgcagtgggccaagatcacgccatkgcactccagcctgggtgacagggcaagactctgtctcaaaaaaaaaaaaaaaatcatgtatgcaggtaaatctttggacaaatctatatatgttttagaa

SEQ ID NO: 179926 - DNA, 201 bp, Homo sapiens
atataaaaagggagtttattaaggaatattgattcacgtgatcagaaggtgaagtcccacaataggctgtctgtaagctgaggagcaaggaagccagtccragtcccaaaacctcaaaagtagggaagccaacagtgcagccttcagtctgtggccaaaggcctgagagcctcttgcaaaccagtgatgtaagtccaagag

SEQ ID NO: 179927 - DNA, 201 bp, Homo sapiens
tttttttttttttgagacagagtctcactctcgcccaggctggagtgcagtggcgtgatctcagctcagtgcaacctccgcctcccgggttcacgccattytcctgcctcagcctccagagtagctgggactacaggcgcccgccaccatgcctggctaatttttttttttttttctatttttagtagagacagggtttca

SEQ ID NO: 179928 - DNA, 201 bp, Homo sapiens
aaaatagtttgtatgatataattatttaaataatagtctgcgagtaagaacaggatagttgtttctggaattaaggatgattttatatatatatatatatwtattttttttttttttttttttttttgagacggagtctcgctctgtcgcccaggctggagtgcagtggcgggatctcggctcactgcaagctccgcctcc

SEQ ID NO: 179929 - DNA, 201 bp, Homo sapiens
caatgaaacgaatataagtgttctcatgttcctttacctgttggccaaagctaaatatggtaagacagacagatagtaatcaccttgctccctaatttatrtacagctgatttctgttttctctcttaactgacgaggctgtgtggttaactaagagaagcttctctgattcccagcttgataatgctcctcccctgctcc

SEQ ID NO: 179930 - DNA, 201 bp, Homo sapiens
aaatgcattaggcatcacaaaggcctctagagaaaaatattaatatacacaccccataatttacctgaagttaatagtttaaaaacaaatctaattccttyaattagaaaaacttaaaaatttttttaaattaaaaattacctaaaaaaatatgtgatttactttttagaagacttattctccttttaggttgcaataaca

SEQ ID NO: 179931 - DNA, 201 bp, Homo sapiens
attctccccttattcattctgttccagtcacattggctttcttgctattcttgcaatgtggcaggtatatttctacctcagtacctttgtcttgctaactsttctgtatgtaatgttctttctccagtttacttcatgtcttaattttctacctcaccttattcaggcattatctcaaatgtcagtgactcagtatagccc

SEQ ID NO: 179932 - DNA, 201 bp, Homo sapiens
  misc_feature (1)...(201): n = A,T,C or G
caacttaaaaatttagaaaattctgtcattttagcatgatttaattatgttttcaacaaaaattttttattaaaattaaggaatatagattacaagttccnaagttttcaatttttcaaagtgaacacaaaatcaaatataactaaatataaaactagctgtctcagtccattttcttttgctgtaacacaatacccgaga

SEQ ID NO: 179933 - DNA, 201 bp, Homo sapiens
gagctactgcataacttcccaggtcaaatcagtttagcctttgtgctttttgtaaaatatacagaggtgggagtcttcctgtcttggtcaatccaagggcrtggacactagctgcctagggacccaaggtaagttaaacttcccaccatatttttgaaggcaactaggtcagttttttaagtgcactgagaagttgacttg

SEQ ID NO: 179934 - DNA, 201 bp, Homo sapiens
aacttgaattgtatctccttgaattcccatgtgttgtgggagggaccctggggaggtaattgaatcatgggggctggtctttcccatgctattctcgtgawagtgaataagcctcatgagatctgatgggtttatcaggggtttctgcttttgcttctctctcatttttctcttgccaccaccatgtaagaagtgcctttt

SEQ ID NO: 179935 - DNA, 201 bp, Homo sapiens
tggctgtgtccccacccaaatctcaacttgaattgtatctccttgaattcccatgtgttgtgggagggaccctggggaggtaattgaatcatgggggctgrtctttcccatgctattctcgtgatagtgaataagcctcatgagatctgatgggtttatcaggggtttctgcttttgcttctctctcatttttctcttgcc

SEQ ID NO: 179936 - DNA, 201 bp, Homo sapiens
ctggacaatttataaaggaaagaggtttaattgactcacagttcctcaaggctggagaaacctcaggaaactttaaagcagaaagggaagcaaacacatcyttcttcacatggcagcaggaaggggtggtgctcagcaaagggggaagccccttataaaaccatcagatcccgtgaaatcactaactcactatcagaagaa

SEQ ID NO: 179937 - DNA, 201 bp, Homo sapiens
tgcgctcgcttgcggggctgcaggtgttgcgggaggaccgcgtggcgcggaactttctgccgccgcccaccttctgctctgcttttctggctaccccggtkagttgttggtggcgggggggggggggggagcggctctggccccctctgcgttctggtgacgttcctccgcgggggtggctcggcctccaagcccagacaa

SEQ ID NO: 179938 - DNA, 201 bp, Homo sapiens
gcgacgcggcctcccgggagctccgagtgcgctcgcttgcggggctgcaggtgttgcgggaggaccgcgtggcgcggaactttctgccgccgcccaccttytgctctgcttttctggctaccccggtgagttgttggtggcgggggggggggggggagcggctctggccccctctgcgttctggtgacgttcctccgcggg

SEQ ID NO: 179939 - DNA, 201 bp, Homo sapiens
ctcactgacgacttcttcacaatatcctttgcaggttccctgtcttcaccttacctcctaaagttgaggtaggccaggaagcagaattagatttatctgtkctttttctgtacttattcctttagtgatctctttgaatatattgttcatttatatgccttatcataaatttatcacttcaaactttacatagccatgtta

SEQ ID NO: 179940 - DNA, 201 bp, Homo sapiens
ttttctacctcactgacgacttcttcacaatatcctttgcaggttccctgtcttcaccttacctcctaaagttgaggtaggccaggaagcagaattagatwtatctgttctttttctgtacttattcctttagtgatctctttgaatatattgttcatttatatgccttatcataaatttatcacttcaaactttacatag

SEQ ID NO: 179941 - DNA, 201 bp, Homo sapiens
ccctcctggttttctacctcactgacgacttcttcacaatatcctttgcaggttccctgtcttcaccttacctcctaaagttgaggtaggccaggaagcasaattagatttatctgttctttttctgtacttattcctttagtgatctctttgaatatattgttcatttatatgccttatcataaatttatcacttcaaac

SEQ ID NO: 179942 - DNA, 201 bp, Homo sapiens
ttattttacttgactgtcaataacatctgaaacagttcatcatccctgcctccttgtattgcttttgttacttgtcttagaggctgtcacaccctcctggktttctacctcactgacgacttcttcacaatatcctttgcaggttccctgtcttcaccttacctcctaaagttgaggtaggccaggaagcagaattagatt

SEQ ID NO: 179943 - DNA, 201 bp, Homo sapiens
taataggatagatgcatatataaaaagggagtttattaaggaatattgattcacgtgatcagaaggtgaagtcccacaataggctgtctgtaagctgaggrgcaaggaagccagtccaagtcccaaaacctcaaaagtagggaagccaacagtgcagccttcagtctgtggccaaaggcctgagagcctcttgcaaaccag

SEQ ID NO: 179944 - DNA, 201 bp, Homo sapiens
accataagacttgtagatattatcttataatcaatgattttaaagcaatgacaacttttctctggtcacaatgaaaaggaaaaaataagcaaaaaaaaaamccaaaaactaaaaaactctacattttcattccatccccctaactttaagacttctgttgtctctacttatatattttatattatcgatctcataacaaat

SEQ ID NO: 179945 - DNA, 201 bp, Homo sapiens
ggtgaaaccccgtctctactaaaaatacaaaaaatcagctgggcgtggtggtgggcgccggtagtcccagccaccagggaggctgaggcaggagaatggcrtgaacccgggaggcggagcttgcagtgagccgagatcgcgccattgcactccagcccggacgacagagcgagactccgtctcaaaaaaacaaaaaaaaaa

SEQ ID NO: 179946 - DNA, 201 bp, Homo sapiens
tcctgtcagaggagaatctgcgaagggacaaatgacatattctgccatttgtgattacatatatagaacaggacggtcttgttttttggttgtttcataartcctttcttttcttcttcttaatgtttttctttatggatacataattttatttggtagaaagttttaatttcttggtatttgttttttgtgtatctattt

SEQ ID NO: 179947 - DNA, 201 bp, Homo sapiens
atactggtgccaaacaattctatattcaaaacatgtttgtgcattagaaataaattaatgggccaggcgcggttgctcacgcctgtaatcccagcactttygaaggccgaggcgggcagatcacgaggtcaggggatggagaccatcctggctaacatggtgaaaccccgtctctactaaaaatacaaaaaatcagctggg

SEQ ID NO: 179948 - DNA, 201 bp, Homo sapiens
tcctattgtactaccaaacactattcctttgatcaaaagtgtatttttgtactcattaactaatttttcttttctacccctaccacattacccttcccagyttctgataaccatcattctactctctatcttcatgggatcaattttttttaactcccaaatgtgagtgagaaaatttaatacttgtttttctgtgcgtgg

SEQ ID NO: 179949 - DNA, 201 bp, Homo sapiens
aactaatgattttctcaaactacagatctaagtagtgcaagaaacactaacaggataaatactaaaagtgtacatttagtcacttcgtattcaaactgtggaaaactaaagacaaattgaaaatcttgaaggcatccaggggtggggggtaaatgaaaaggtacctcacctctacaggaacatggataagaaatacagcaa

SEQ ID NO: 179950 - DNA, 201 bp, Homo sapiens
tatccccggccttatcccagccctactgtacagaaatctgcattttattttatttttctttccaacatttattttaggtttacgggggcaggtggaggttygttacatgggtaaattacatgttgtggaggtttggtgtgcagattatttcgtcacccaggtaatgagaatagtacacaaaaggtagtttttcagtactta

SEQ ID NO: 179951 - DNA, 201 bp, Homo sapiens
agaactaatgattttctcaaactacagatctaagtagtgcaagaaacactaacaggataaatactaaaagtgtacatttagtcacttcgtattcaaactgtggaaaactaaagacaaattgaaaatcttgaaggcatccaggggtggggggtaaatgaaaaggtacctcacctctacaggaacatggataagaaatacagc

SEQ ID NO: 179952 - DNA, 201 bp, Homo sapiens
gatataactttttgatgaattgacctcttatcattatattatgtccctctttgtcttttttttttttttacaattttttacttaaagtctattttttttttaagtataactatgctgtctatcttttgagattcacttgtgtggaatatcttttatattccttcactttcagttatgtgtgccctttatagtgaagtcaat

SEQ ID NO: 179953 - DNA, 201 bp, Homo sapiens
cctctcaccctttaccctgcatctccaaagttcattgtatcattcttatgcctttgcatcttcatagcttagctccaacatatgagtgagaacatatgatrtttggttttccattcccgagctacttcactcagaataagtctccagtttcatttaggttgctgcaaatgccgttaatttgttcctttttatgactgagta

SEQ ID NO: 179954 - DNA, 201 bp, Homo sapiens
agaacagggtttatttccttagacaaaggtagaaaggctgatggcagcatgggtcggggaggggatgttgccactactagggatggggaagctgtttcttytggcaaaaaaggtgcatcagtgtttacaaagtcagcgttcccagcttcatcagggtcctcccacacatcctcattccaagttttagggtgccattctttt

SEQ ID NO: 179955 - DNA, 201 bp, Homo sapiens
gtagtggggtccttccttaaggggaccgggactccccttcattcaaggggtactgggtctgtaaactggatcaagtctggaaattgattgaggggccatgwttctctgtttttataatccaaattggtcttttgtccatttgacctagaagttttctgcttatgtaaattaaggaggaatgcaataggcttcctattaatt

SEQ ID NO: 179956 - DNA, 201 bp, Homo sapiens
ttcactttcaggtggtgcctgcatatcgtgcagaaccatctgtgaagcatgtcctagttttctctttctctgtcaactgatcttagggaacttcccataargccactggtgcaggcttggggagagaaggcagggtggccggagtacagaccatgggcatttgagccacttcctcatgtaacttccttgtgccttcaggac

SEQ ID NO: 179957 - DNA, 201 bp, Homo sapiens
atcttttttattataaataaatttaagtaatctaggataaaaaatagcttcaatttttattcaaattgggtttagattgctgttttagtaccattttgtcraggatttctgtgtctatcttcataagaggtattggtccataatttttctttttgtactattttttctggtttggtattaaggtaatgctggcatcataaa

SEQ ID NO: 179958 - DNA, 201 bp, Homo sapiens
  misc_feature (1)...(201): n = A,T,C or G
atgaatgcagtactcttttctttatgacaaaagtgagtatatttttcaaacatgatgaatccagcatgctgctcaaagcttactattttctatctgcggantaactcacaatgaatattggattatgtaaacagcttctgtaaaatggcccttgttttacttgagatgtcctcttccaaagggcttctcaaaacatctggc

SEQ ID NO: 179959 - DNA, 201 bp, Homo sapiens
attgtagacaatattaagagtttgtttttaattctaaaagcagtggagcaccactgaaggattataaacagggaaccttaaacactagggtcagatatgcrctaaaaaggattactaattgctatgtgaaaaaatacgttagagagcatgaaaagtgggtgggaaggaagacccgttaggagatattagagtagcttggaa

SEQ ID NO: 179960 - DNA, 201 bp, Homo sapiens
tgacagagacagattagtttctgcatagcatctgtcagtgtagatagctctcaccattttataggtgagaagcttaactatctttaacaggtaatataggktctattctaagatccactgtctgtttcctttaacaagcaccgtgatgaggctgtaacttctaccttgatgtttggagacatgttcaataatcttgagcaa

SEQ ID NO: 179961 - DNA, 201 bp, Homo sapiens
agatatttgtgggggtgatgatatgtacacttataatgggatccatgcacaaacacacatgcatatacaagctactttaatcatgtatgcagggctgggcrcagtagctcatgcctgtaattccagcactttgggagactgaggcaggtgggtcacctgaggtcaggagttcaagaccaagctggccaacttggtgaaaca

SEQ ID NO: 179962 - DNA, 201 bp, Homo sapiens
ccattttataggtgagaagcttaactatctttaacaggtaatatagggtctattctaagatccactgtctgtttcctttaacaagcaccgtgatgaggctrtaacttctaccttgatgtttggagacatgttcaataatcttgagcaaacataatacttcatttttatttttcaaaagatttacaaattatcaaataaatt

SEQ ID NO: 179963 - DNA, 201 bp, Homo sapiens
tcctctcttctagttatttttaaatatacaataaattattgctaactatacttgtcctattgtactaccaaacactattcctttgatcaaaagtgtatttktgtactcattaactaatttttcttttctacccctaccacattacccttcccagcttctgataaccatcattctactctctatcttcatgggatcaatttt

SEQ ID NO: 179964 - DNA, 201 bp, Homo sapiens
gcacaagaatcacttgaacccaggaaatggaggttgcagtgagccaagatcatgcaactgcactcctgcctaggctacagagcaagactctgtctcaaagyaaaaaaaagaacagcattttcatatatttctcagtactctcttgtacatttctctgttactaatatgaataatttagttatgaatattgaggtttatttt

SEQ ID NO: 179965 - DNA, 201 bp, Homo sapiens
atctcattgtgattttgacttggatttcgtgataactattgatactgagcatcaatttctctctctctctgtctctccgtctctctctctctctctctgtstgtgtgtgtgtgtgtgtgtgtgtgtgtgtgtgtgtgtgtgtgtgtgtgtggccagacttgttttatgaactatctgttcaatcttttgttcatttttaaa

SEQ ID NO: 179966 - DNA, 201 bp, Homo sapiens
tatctcattgtgattttgacttggatttcgtgataactattgatactgagcatcaatttctctctctctctgtctctccgtctctctctctctctctctgtgtgtgtgtgtgtgtgtgtgtgtgtgtgtgtgtgtgtgtgtgtgtgtgtgtggccagacttgttttatgaactatctgttcaatcttttgttcatttttaa

SEQ ID NO: 179967 - DNA, 201 bp, Homo sapiens
gtatctcattgtgattttgacttggatttcgtgataactattgatactgagcatcaatttctctctctctctgtctctccgtctctctctctctctctctstgtgtgtgtgtgtgtgtgtgtgtgtgtgtgtgtgtgtgtgtgtgtgtgtgtggccagacttgttttatgaactatctgttcaatcttttgttcattttta

SEQ ID NO: 179968 - DNA, 201 bp, Homo sapiens
tgttgctagcatctaccttccaaatccactttggaatggctttgttgcttagattttaaagaaacaaaatttaaagaaacttatagtttgaatctgggctracagtgggtgaaaggccaggactgagcatcttttgtaaggtgagtcaatcttcttaattgtgaaatgccccttttatgcagatttttctttttctttcaa

SEQ ID NO: 179969 - DNA, 201 bp, Homo sapiens
tgtttgacttatgtgtaaaaagcagctaataaatggagacaatagcaaatgaaaataataaagtaataatggaaagttttaagagtgagaaattcaatcaraaaggaaaacaactgagagtaaggtgattacattgtagaacagaactcatggtttagccaataagtaaaactccatgtaagtatagctttgggaataatt

SEQ ID NO: 179970 - DNA, 201 bp, Homo sapiens
agaaaggaaagggtaaacagcattgcccaaggggagacctcagaggccctgaattgcaggagaatttacccagtagtggagacaccaaaaacaaaaatatytggatggccacttgtctactgctgtaagtggctgtccatcaggccaggggcctaggaactcccagttcctttggccaagaggggcttaagcaaggcactt

SEQ ID NO: 179971 - DNA, 201 bp, Homo sapiens
ccactgtccttcaggaatatcctagaaagaggctgtagtgttgcagctgttcactttcaggtggtgcctgcatatcgtgcagaaccatctgtgaagcatgycctagttttctctttctctgtcaactgatcttagggaacttcccataaggccactggtgcaggcttggggagagaaggcagggtggccggagtacagacc

SEQ ID NO: 179972 - DNA, 201 bp, Homo sapiens
cttagaaactccggaggtttcttatcatcacagagggcaaaagggatatgatgttatgatatgtattactcacagagttatctagagggacagaactaatrggatagatgtatatataaaggggagtttattaaggagtattgactgacacaatcacaagatgaagtcccacaataggctatctgcaagctgaggagcaag

SEQ ID NO: 179973 - DNA, 201 bp, Homo sapiens
caccactgtccttcaggaatatcctagaaagaggctgtagtgttgcagctgttcactttcaggtggtgcctgcatatcgtgcagaaccatctgtgaagcakgtcctagttttctctttctctgtcaactgatcttagggaacttcccataaggccactggtgcaggcttggggagagaaggcagggtggccggagtacaga

SEQ ID NO: 179974 - DNA, 201 bp, Homo sapiens
gacttaaatgtcaaaaacaaaatttaaactttagcagaaaaatatttagacatctataagaccttggaataaaaaaattcttaaaacataaaaaaattacygcaaaaaaattgataaatttgactatgttaaacttgagaaagttagttcattcaaatgtaccttaaagaagataaaaagagaagttaaaaatcgtagaat

SEQ ID NO: 179975 - DNA, 201 bp, Homo sapiens
tccagggatggtagccttggcagaagcattgcatgcaggataggcaaacccatatctggagtaagcatctattctagtgaggacaaacctctgccctttcyatgatggaagaggtccaatataatcaacccaccaccaggtagctggctgatcaccccaagtaatggtgccatatggaaatctcagtgttggtctctgctg

SEQ ID NO: 179976 - DNA, 201 bp, Homo sapiens
agctcaacatgactgattattagctaattgcaaatcaaagccgcaatgagattccatctcacgccaatcagaatggctattactaaaaagtcaaaaaatarcatatgctggcaaggttgtggagaaaaaggaacacttctttcctgttggtgggagtgtaaattagttcaactattgtggaagacaatgtggtgattgatt

SEQ ID NO: 179977 - DNA, 201 bp, Homo sapiens
tgatggtggataaggcattccatgtgtccagggatggtagccttggcagaagcattgcatgcaggataggcaaacccatatctggagtaagcatctattcyagtgaggacaaacctctgccctttccatgatggaagaggtccaatataatcaacccaccaccaggtagctggctgatcaccccaagtaatggtgccatat

SEQ ID NO: 179978 - DNA, 201 bp, Homo sapiens
gggttctctagagggacagaactaataggatatatatatatatatatatatatatatatatatagagagagagagagagagagagagagagagagagagasagagagagacagagagagagagagagagagagacagagagagagaggagtttcttaagtattaactcacatggtcacaaggtcccacaataggccgtctg

SEQ ID NO: 179979 - DNA, 201 bp, Homo sapiens
tttccaaaggtttgggggagcaggtgtggactagtgagggttctctagagggacagaactaataggatatatatatatatatatatatatatatatatatagagagagagagagagagagagagagagagagagagagagagagagacagagagagagagagagagagagacagagagagagaggagtttcttaagtatta

SEQ ID NO: 179980 - DNA, 201 bp, Homo sapiens
tgtaattctcaatgtagagatatttcattgtcctgggtagctgtattgctgtattcctaagtgtgtgtgtgtgtgtgtgtgtgtgtgtgtgtgtgtgtctrttgtgaatgggattgcctctttgatttagatctcagctctgacattattggtgcataaaaatgctactgatttttgtacattgattttgtatgctgaagc

SEQ ID NO: 179981 - DNA, 201 bp, Homo sapiens
atttccaaaggtttgggggagcaggtgtggactagtgagggttctctagagggacagaactaataggatatatatatatatatatatatatatatatatatagagagagagagagagagagagagagagagagagagagagagagagacagagagagagagagagagagagacagagagagagaggagtttcttaagtatt

SEQ ID NO: 179982 - DNA, 201 bp, Homo sapiens
tatttccaaaggtttgggggagcaggtgtggactagtgagggttctctagagggacagaactaataggatatatatatatatatatatatatatatatatatagagagagagagagagagagagagagagagagagagagagagagagacagagagagagagagagagagagacagagagagagaggagtttcttaagtat

SEQ ID NO: 179983 - DNA, 201 bp, Homo sapiens
ttatttccaaaggtttgggggagcaggtgtggactagtgagggttctctagagggacagaactaataggatatatatatatatatatatatatatatatakatagagagagagagagagagagagagagagagagagagagagagagagacagagagagagagagagagagagacagagagagagaggagtttcttaagta

SEQ ID NO: 179984 - DNA, 201 bp, Homo sapiens
tagtttttatttccaaaggtttgggggagcaggtgtggactagtgagggttctctagagggacagaactaataggatatatatatatatatatatatatayatatatatagagagagagagagagagagagagagagagagagagagagagagagacagagagagagagagagagagagacagagagagagaggagtttct

SEQ ID NO: 179985 - DNA, 201 bp, Homo sapiens
gagcttgtattaacacatatcaatttatttataatgtctatacatatagtaatctcaactcaattcatctaactttttttcagtaacataacagaccattwtatatatatatatatatatatatatctgagatggggaaaacccacgttaaaaacctctattctaattacttttttatcagtcttttgataatagaactag

SEQ ID NO: 179986 - DNA, 201 bp, Homo sapiens
attgacaaagttggtagagtctatttatgtcttctaaatagatgtgtaaataaaaaatagacatactttgaaatagtgttcaagaatagatttttttttttcacatttgtttagtttgatttctggctgtcttcttaaggatgcaaatactatatagcatcaaatactatagcatcattgatttttaaagccctgtaggct

SEQ ID NO: 179987 - DNA, 201 bp, Homo sapiens
tcctttactataatacacatgcacacacaaacacacacacacacacgcgtatttatgaaaaactctaaagagtttatgagtttatattgagcttctcagarcttccttaacatggtgaaataaataatacttgttctttctagaaactcctctatatatttgttaatttttccaatatgttttgtgagatttctacttttt

SEQ ID NO: 179988 - DNA, 201 bp, Homo sapiens
tctacaaattgccttctactttaaaaaaattattcactgattgaatgcacagtggcaagtactgggatgagccaaaattgatgcacaatgcttcggggagkttcatagactaacggaggaatgaaataattatattaataaaaataacactgacaagtataacaaatagacccaaaattctaatggtttagcaaaataaag

SEQ ID NO: 179989 - DNA, 201 bp, Homo sapiens
tggaatgatgtaaaagagctataaaattatgaaagagagttatcttacctgaaagttgaaattggtcttcagagatgaacaaggattatttgagtgatcaraggttgaaggaactttctggcaaaagaaatatacagaaagtcaaagagatgagaaaaggaataattctaatacagcatggttaattttcaattcacccat

SEQ ID NO: 179990 - DNA, 201 bp, Homo sapiens
taagtacaattaagggcagatgccttatgaaatgttttaccttcttgaaggcccttcattcctgggatatttatgtagttctctctctctctctctctctmtctatctatctatctatctatctatctatatatatatatatatatatatacacacactaaaaatttacatataaatttatatataaattttatttatatg

SEQ ID NO: 179991 - DNA, 201 bp, Homo sapiens
cctccgcctcccgggttcacgccattctcctgcctcagcctccagagtagctgggactacaggcgcccgccaccatgcctggctaatttttttttttttttctatttttagtagagacagggtttcactgtgttagccaggatggtctcgatctcttgacctcgtgatccgcccacctcggcctcccaaagtgctgggatt

SEQ ID NO: 179992 - DNA, 201 bp, Homo sapiens
acttttttttttctttttccttttccttcttgccctctcctttaaaaatcataaatttattgaatgacttttaacattttatgacctaaaacttttctggyctggattttatattaaatcagttcagcctgctttattagtttatttgatttcccatatacaaaaattgaaaaaaaaattctatttgctttttattgaaaa

SEQ ID NO: 179993 - DNA, 201 bp, Homo sapiens
tgacttaagtgtactttcctgaggtcatcttacataactcatctccatacattctatgttttaatccaatgagactatttttcttgcaccttcaaatgacyccattatctccatgcatgaaacaccagttcaagtgtactctcttcctaaagtttttcttatcacctcatttagatttttttcttctcaaactgtcttaga

SEQ ID NO: 179994 - DNA, 201 bp, Homo sapiens
atcaggaaatatttgtgaaagaaaaaaatatcataaccaaggtactatgctatctgacttaagtgtactttcctgaggtcatcttacataactcatctccrtacattctatgttttaatccaatgagactatttttcttgcaccttcaaatgaccccattatctccatgcatgaaacaccagttcaagtgtactctcttcc

SEQ ID NO: 179995 - DNA, 201 bp, Homo sapiens
tatcatctcgtggatcagtggttgtcttagtggaaatcagaagataatgccaaagagacattaaatgttcagaatgtcctgcactgtagagtataacttgytaaatttcacttctgtttaaatctcaattactggaagaagcaggtggtgataattatcttactccttcttttttttttttttttttttttgagacggagt

SEQ ID NO: 179996 - DNA, 201 bp, Homo sapiens
tgcaggatattagacctttgtcagatgcatagattgcaaaaattttctcccattctgtaggttgtctgtttactctgttgttagtttcttttgctgtgcaraagcttttttgtttaattagatcccatttgtcaatttttgcttttgttgaaattgcttttggtgtcttcatcatgaaatctttttctgtgcccatgtcct

SEQ ID NO: 179997 - DNA, 201 bp, Homo sapiens
acctaacaaaccactcttttagtcctccaggaaaaagttctgggcactttaagccccatgccttgttcagaattatccttgctatatgctgtggtctaaamtgtgattctccaaaattcatttcatgaagccccaaagcatagtagcttagaatgtaaccatatttggatataagactttaaagatgtgactgctttacta

SEQ ID NO: 179998 - DNA, 201 bp, Homo sapiens
ccttcttttgaggagtgtctgttcatgtcttttgcccactttttggtggtttttttttcttgtaaatttgttttaagtcccttatagatgcaggatattaracctttgtcagatgcatagattgcaaaaattttctcccattctgtaggttgtctgtttactctgttgttagtttcttttgctgtgcagaagcttttttgt

SEQ ID NO: 179999 - DNA, 201 bp, Homo sapiens
ttttcctttagggttcaccacttgtggtgccatgttgcaaagacacagtgctatttatcatgtagctatcttacagatcttttgtctaatacctaacaaamcactcttttagtcctccaggaaaaagttctgggcactttaagccccatgccttgttcagaattatccttgctatatgctgtggtctaaactgtgattctc

SEQ ID NO: 180000 - DNA, 201 bp, Homo sapiens
gttttttttttttcatatgattgttggctgcacatatgccttcttttgaggagtgtctgttcatgtcttttgcccactttttggtggtttttttttcttgwaaatttgttttaagtcccttatagatgcaggatattagacctttgtcagatgcatagattgcaaaaattttctcccattctgtaggttgtctgtttactc

SEQ ID NO: 180001 - DNA, 201 bp, Homo sapiens
cctcactaggcagaatagttgagaaatctctctggggcatattttataagggcactaattgcattcatgaaggttccaccttcatgacttaatcaccccccaaaggccctatctcctaatatcactttgaaggttaggatttcagtatatgaattttgcagagacacaaacattcagtacattgtactactttaaagtttt

SEQ ID NO: 180002 - DNA, 201 bp, Homo sapiens
aattttggattcgaaggcttgagtactgatatatttgagaacattaaataagtcatacatttcatgttatatgttctttatccaaaaatctatgtgtacarttaatgaaattttcttctttgttttaatgcagtggaatgtatcctgctttcatcttggagttcacctgtgtggcttggatttatcacagtagcatttgtc

SEQ ID NO: 180003 - DNA, 201 bp, Homo sapiens
gagtgcaattgtgtgatctcagcttactgcaacctccacctaccaggttcaagtgattctcctgcctcagcctcctgagtagctgggattacaggcacgtrccaccatgcctggctaatttttgtatttttagtagagacgtggttttaccatgttggccagactggtctcaaactcctgacctcaggtgatccgcctgcc

SEQ ID NO: 180004 - DNA, 201 bp, Homo sapiens
tttcaatttttttggaagagtttgagaaagatagatattgtttcttctttaaatgtttcgtagaattcagcagtgaaggcatcatcaggttttctttgctrgatgaactgattcaatctcatttgttattgatatgtttgcattttgtatgtcttcatgattttgtcttttgttgttgttgttgttgttttagtttttatt

SEQ ID NO: 180005 - DNA, 201 bp, Homo sapiens
ctggagtgcaattgtgtgatctcagcttactgcaacctccacctaccaggttcaagtgattctcctgcctcagcctcctgagtagctgggattacaggcaygtgccaccatgcctggctaatttttgtatttttagtagagacgtggttttaccatgttggccagactggtctcaaactcctgacctcaggtgatccgcct

SEQ ID NO: 180006 - DNA, 201 bp, Homo sapiens
tatcttattgctctggcaagggtttagagtactttgtttaatagaggtggtaagagtgagtattattgtcttgttccagatctcagaggaaggacttcaawtattcaccattgaatataaatgttagctgtcagcttcttacatatgggcttcactgttgtgttgaaatgcatgtcttctatacctaatttagtgaggttt

SEQ ID NO: 180007 - DNA, 201 bp, Homo sapiens
tcacccagactggagtgcaattgtgtgatctcagcttactgcaacctccacctaccaggttcaagtgattctcctgcctcagcctcctgagtagctgggaytacaggcacgtgccaccatgcctggctaatttttgtatttttagtagagacgtggttttaccatgttggccagactggtctcaaactcctgacctcaggt

SEQ ID NO: 180008 - DNA, 201 bp, Homo sapiens
ttctcttatcttattgctctggcaagggtttagagtactttgtttaatagaggtggtaagagtgagtattattgtcttgttccagatctcagaggaaggayttcaattattcaccattgaatataaatgttagctgtcagcttcttacatatgggcttcactgttgtgttgaaatgcatgtcttctatacctaatttagtg

SEQ ID NO: 180009 - DNA, 201 bp, Homo sapiens
tgctgttaatttaaagagcttgtgctcatcaaattatactttgatgtttttgagacaaacgtttatgaaatatttcaagtgtctttgtatttaatactgtkcaccccaattagctctgtcaaaacttcatcacttatcttattcacatcaataagcttacattttactcgatattatttaaaatgtaacaaatgatatcag

SEQ ID NO: 180010 - DNA, 201 bp, Homo sapiens
tatttgtctatttttatttggttgcctgtgcttttggggtcaaatccaagaaaaataattggccagctctttcttatgtaattattccgtgatttttttttcttcttttagttgaacaatttctggtcttatgtttaaatcttctatccattttagggtatgagttttgtatacagtattaggtaaggatccaatttcatt

SEQ ID NO: 180011 - DNA, 201 bp, Homo sapiens
caacatacatgggggtgccgacattcctttgacaaattcaaatcttttggataaatacacagaagtgggattgcttgatcacttgtaattctattttttgkttttttttttctttttttgaggaatctctgtaaagttttccataatagctgtaataatttacattcccaccaagagcgtacaagggttcccttttctcca

SEQ ID NO: 180012 - DNA, 201 bp, Homo sapiens
gggcacagtggctcatgcctgtgatcccagcactttgggaggctgaggtgggcagatcacgaggtcagattgagaccatcctggccaacatggtgaaaccycgtctctattaaaaatacaaaaattagctgggcgtagtggcgcgtgcgtgtagtcccagctacttgggaggctgaggcaagagaatcacttgaacctagg

SEQ ID NO: 180013 - DNA, 201 bp, Homo sapiens
tttctttataacaacatgaaatagattaagacaaatatctgttaactaaaacgcatttgttatgttaaaaaattgaaatagctgggcacagtggctcatgmctgtgatcccagcactttgggaggctgaggtgggcagatcacgaggtcagattgagaccatcctggccaacatggtgaaacctcgtctctattaaaaata

SEQ ID NO: 180014 - DNA, 201 bp, Homo sapiens
tttacatagaactgcttatctttggttatcattgcaatagatgatttaatagaatctgaatttccatggagagatagtccatggctcactcagcccatatrcaaacatatagcccaaagggacataaatctgtccaatcaggattttttatttaactttatttggatcatcattacattggtctgattaagcatgtgtcat

SEQ ID NO: 180015 - DNA, 201 bp, Homo sapiens
catctggtactaaaaagcattgtattactaggatgaaggctgagaatataatcttttatatctaaaataaccttttgccaaaaatatttcattatttaatygtaagcccctctccatattctcagtcttatcttcatttactccttccttatagggttgatattaaagccatctaaaaaaatgtggctcacagctccatgg

SEQ ID NO: 180016 - DNA, 201 bp, Homo sapiens
gtgtttttaaatgaaaaataatttttgtctcaataaggacaagatttgtaatttttcttctgggctatggctttttagaagtacctggaatgaaacttctktgactattttttcatggccattcatttgataaacacctttgggacatatgttacagtcatttttttaatgaaaattctatattgtatttatgccctgggg

SEQ ID NO: 180017 - DNA, 201 bp, Homo sapiens
aacactgggtattacaattctgtatgagacttggtggggactctgaacaaaaccatatcaccagacattgccaaatgtactctgggggtaaaactaccccmagttgagaatccctaaaaaactttgattaacaaataaaatactgtttgggaaaatatatctaaaatctgcttcttacatgagctcgatttattttgactg

SEQ ID NO: 180018 - DNA, 201 bp, Homo sapiens
taaaaagacaacaaattaaacagtatttgttgtaaaaatgtatctcatatattattacatattgcacatcaagaatatttttaaataaagtgaatattatrtactcgcttttttggtaaatattgcctaagtaaaacatacaattttggcttttgctctcaaaaacaagccttgatgtgcacacagttagagctgcgactg

SEQ ID NO: 180019 - DNA, 201 bp, Homo sapiens
agaaagcagtttgcccttcggatctggagtccaagtggggtgggtatgttgtccatgcagtatctggcccaggcagggtgtggtatggagcctggccaacrtgaagtggtctggtgtatggcagggtagtgcagagcagcatgtcacagagagatttattttaaggaattggttcacatgatcatagaggccgacaactgc

SEQ ID NO: 180020 - DNA, 201 bp, Homo sapiens
ctagagttaagaaaagaatgttaggaaaatatttacaaaataaattgtataatatctataaatatcatgggggataaataaataggaactgggaatatatmtccaggtattttcacagaacagcttaatgacaaagacatttcctaaggcttaaatgtagcattattttgaattgtaaaaagacaacaaattaaacagtat

SEQ ID NO: 180021 - DNA, 201 bp, Homo sapiens
  misc_feature (1)...(201): n = A,T,C or G
tatggagcctggccaacgtgaagtggtctggtgtatggcagggtagtgcagagcagcatgtcacagagagatttattttaaggaattggttcacatgatcntagaggccgacaactgcagaatctgcagagtgtatcggcagactggagacccagggaagacatgatgcttcactttaaattcaaaggcatcctaccggca

SEQ ID NO: 180022 - DNA, 201 bp, Homo sapiens
ttttcattgtattctcatttaaacaattttgacatcaacttttccagatctctttctgaggtccacctgcctactagaatattccactaacgtcattatawaactcaccaatgatgtaatgaattattgataaattatcataattgatgataattgataaatttcacttgtgaatccactgtaagatcctttctcagtgac

SEQ ID NO: 180023 - DNA, 201 bp, Homo sapiens
ttaaaaagcaggactttatagtaccaaggaagatatccacaagaggttgacactgttttagatttcttgagttatatgctaaatgtttgtccctcatatgrtaagcaatactatttaaaggcaaagaaagcttaaatacatggaagaaacttcaaatctacaggaaaatgatgtgactgattcataagtcgagcataacaa

SEQ ID NO: 180024 - DNA, 201 bp, Homo sapiens
ttttttcctaacacatacaaatgggaggtgatttggtttaggctattgaaataagtttgattccatacaaaaacaaacatacaaactgttctatttgtatwccatgcatacaaactattgggcgctgtgctaagttctgcacatacaagcatggataaggctacctatgctgtaaagttgctcactgtctggcactggcca

SEQ ID NO: 180025 - DNA, 201 bp, Homo sapiens
gatcgaatttacttcaagtaccccaattttcttttgcttgcaaatcacagtgaaaacaatagtgtatttacctgaagaatatagctaagtgaaatgtcttytcatgtgaaatccatgtatttccaatttgtacaagcaatgaagtggaaaagaaatgagagctgacataataaatagtggaaaaatgaaaagcaggggttc

SEQ ID NO: 180026 - DNA, 201 bp, Homo sapiens
gtgcctgtagtcccagctactcacaaggctgaggcagaatatcacttgaacccagaaggcagaggttgcagtgagcagagatggcaccactgcactccagyctgggtgacagagttagactctgtctcaaaaaaataaaaaataaaaaataaaaaaatataagatttgggcttagtaaatatagaaggctttgtaggggat

SEQ ID NO: 180027 - DNA, 201 bp, Homo sapiens
ctattttcaaaaaatcagctgagacataaaacatacatgtgacaagcatcataacaaacatgtgacctacacaaatataaaaggaaatagctgagtaagakctaggcttggccaggtgcagtggcttatgcctataaccccagcacattaagaggcccaggttggtagacgggggcaaaacccagtctctacaaaaaattc

SEQ ID NO: 180028 - DNA, 201 bp, Homo sapiens
tgtatgattatggataggtttttaacctttgggtttcactgtcctcatatgtaaagtaagcaaatagtgctaatacttcttggacttgttatgagaatgartaggtaatacctacaaaatgttttgagtgttgtccttacacatagggattagacaatatccactattattttaaagttactttaatgatattgcttattt

SEQ ID NO: 180029 - DNA, 201 bp, Homo sapiens
ctctacaaattttttttaaaattagtcaggcctggtgtcatgcacctgtagtctcagccactgaggtggcaggattgcttgaacccgggaggttgatactkcagtgagccatatttgtgccacctcactacagcctgataataagaaaagaaagaaaaaatagtaagacaacccacgctcatggattgaaagaattaatat

SEQ ID NO: 180030 - DNA, 201 bp, Homo sapiens
gttgtaggatacaaaatcaacatataaaaatcattatcattcatatatatcaacaatgaattagctggaaaagaagtcaagaaagtaatcttttttataawagccacagcaaaaaattacatacctaagattacattttaccaaggaggtgaaagatctctacaattaaaagtataaaacactggtgaaagaggacataaa

SEQ ID NO: 180031 - DNA, 201 bp, Homo sapiens
ttaacttaagtttttgtctttttttttttttttttgacagagtcttgctctgttgcccaggctggggtgcaatggtacaatctcagctcactgcaacctcygccccccaggttcaagtgattttcctgcctctgcctcctgagtagttgggattacaggagtccgccaccacgcccagctaattttacatttttaatagag

SEQ ID NO: 180032 - DNA, 201 bp, Homo sapiens
aattcagtaaagttgtaggatacaaaatcaacatataaaaatcattatcattcatatatatcaacaatgaattagctggaaaagaagtcaagaaagtaatmttttttataatagccacagcaaaaaattacatacctaagattacattttaccaaggaggtgaaagatctctacaattaaaagtataaaacactggtgaaa

SEQ ID NO: 180033 - DNA, 201 bp, Homo sapiens
atgtgaacatggtaggaaatgagatcagaaaggcatgaagtagaagctctcttatctggtgaacttgtgactacaatttatttaatcaaaagttgatgatrtcagggaatcatatgatacctatttacctttaaaagggaggtacaatttacattgagtgaaatgcactgatcttaagtgcatagttcaatgagttttcac

SEQ ID NO: 180034 - DNA, 201 bp, Homo sapiens
attaaaaatttattgtatgtacattggatatctgtatttaaaaaaaatctccccaagtgatcctaatatgcagtaaaatctgaaaatccttcctctagaawacaaaaataaaagtgcctaataaacaatgattactgtgtattctgaaaccagaaacaaccattttcttaaccttttatggtttaaaaaagtatggtagga

SEQ ID NO: 180035 - DNA, 201 bp, Homo sapiens
tttgtagagacggggtttcactgtgttagccaggatggtctcaatctcctgaccttgtgttccgcccaccttggcctcccaaagtgctgggattacaggcktgagcaaccgtgcctggccattaaatttaaattttaacaggaaccacctgccttttgtgagaagactagattataatgggggtgcatttaagatgctaag

SEQ ID NO: 180036 - DNA, 201 bp, Homo sapiens
caaaaatgatagacttatatcttttagaaagagttacctggctttctattatgtactgcttttctgatgatttcattgctttagtatttttaacttgtttmtaataagagctgattggttatttctccccttagtatatataaatgtagctattctaaataatcatttattaacacaaattaaatttttatttcatttatt

SEQ ID NO: 180037 - DNA, 201 bp, Homo sapiens
tttttttttttgagacagtctcactctgtcacccaggctggagtgcagtggcatgatcttggctcactgccatctccacctcccgggttcaagtgattctyctgcctcagcctcctgagtagctgggactacaggcgtgtgccaccatgcccggctagttttttgtatttgtagagacggggtttcactgtgttagccagg

SEQ ID NO: 180038 - DNA, 201 bp, Homo sapiens
gaataacctgtagcttaattatttttatgtggtataagtatttattagaaatcaaatggacgttgaaatttagtatcatatagaactttaaattaaccccrgaagtaagttatatttcctccacactcgttaatgtcactgcaagttgtttctccatcacagaatataaatgggagtatatagcaaatgtctagcatgcta

SEQ ID NO: 180039 - DNA, 201 bp, Homo sapiens
ttttaaatgtgatagaagctgttgatcaataatgagcagaacagggaagatatctaattaaatttaattttttttttttttgagacagtctcactctgtcvcccaggctggagtgcagtggcatgatcttggctcactgccatctccacctcccgggttcaagtgattctcctgcctcagcctcctgagtagctgggacta

SEQ ID NO: 180040 - DNA, 201 bp, Homo sapiens
cttgtgtttcaggccaaggataggatttacaatttattttaaatgtgatagaagctgttgatcaataatgagcagaacagggaagatatctaattaaattwaattttttttttttttgagacagtctcactctgtcacccaggctggagtgcagtggcatgatcttggctcactgccatctccacctcccgggttcaagtg

SEQ ID NO: 180041 - DNA, 201 bp, Homo sapiens
atgtgtagatttgatcctgtcatcatgttgttagagtagcttgttatgtaaacttgatcatgtaggtgttttatagcgtcagtgggctatttatttaagtytgtttgtttgtttgtttttttggtggccagtaatggtctttcattttcatgtttagcactcccttaaagacctcttgtaaagtgggtctgtgataacaaa

SEQ ID NO: 180042 - DNA, 201 bp, Homo sapiens
acagaaattgttttttaaaaaacatatctgtctcatcctttatattatgaattgattcatttattattttgtgttggttttccactttctcttggatgtcwtgtgctttcttatagtccatgttgtcaattctttatcatttcagaatttatattttggttgggatccattgatatacagcttgcatcatcattggagata

SEQ ID NO: 180043 - DNA, 201 bp, Homo sapiens
tcttagtttcaaagaatttcttgatttctaccttaatttcattgtttgcccaaaagtcattcaggagcaggttaatttccatgtaattgtatgtttttgayagatcttctttttcttttttttctttttttctgtctttcttttttttttttttttttgagatggagtctcgctcttgttgcccagcctcgaatgcaatgg

SEQ ID NO: 180044 - DNA, 201 bp, Homo sapiens
ttttcatgtgtgctatagactttcttcttaatactgctttagctatgtcccagagattctggcatgttacttctttgtttttcttagtttcaaagaatttmttgatttctaccttaatttcattgtttgcccaaaagtcattcaggagcaggttaatttccatgtaattgtatgtttttgacagatcttctttttcttttt

SEQ ID NO: 180045 - DNA, 201 bp, Homo sapiens
cgttctttttggttgtaataattttattacaagttcaattttaatgctcattcttgctctttttaaggtttctattccttctttattctatctaggaaggyggtatgtttataagaatgtatccatttctttaagttttctagtttgtgcacatggaaatgttcatagtagtctttcatgatgttttgtatttccgtggta

SEQ ID NO: 180046 - DNA, 201 bp, Homo sapiens
agtgagggaggatttcttcctcctcaatttttgggaagagattcagtaagattggcaccagttctttatatgtctggtagaatttggctgttaatccctcwcatccagggctttatttggttggtgggttttttattacttattcagttttggaactcacccgggaatttatccatttcttctgttttctagtctgtgtta

SEQ ID NO: 180047 - DNA, 201 bp, Homo sapiens
ggttaggaattccagtactgtgttgaataggagaggtgaaagtgggcctttttgtctctttccagttcgtagggggaaagttttcaacctttccccattcrgtctgatactggctgtgggtttgtgatacatggctgctaatattttgaggtattttctttccatgcctagtttgttgagagtttttatttatgagaggat

SEQ ID NO: 180048 - DNA, 201 bp, Homo sapiens
ttatttatatatttagaggcggagttttgctcttgttgcctaggctggagtgcaatggcacgatcttggctcactgcaacctccgcctcccaggttcaagygattctcccacctcagcctcccaagtagttgggattacaggtgcctgccaccacacccagtttattttttgtatttttagtagagatggggtttccccac

SEQ ID NO: 180049 - DNA, 201 bp, Homo sapiens
tctcttagacctcagtgccagaacagtataatttcagagcaacaatactattttcttggaatataagtgggaagctcacaactattcatatttctctctttgtcaagaaaagttataaggtttaacacaattatgaaagccagaaaacaaatgtatttttgtagcacttttgtagaaactcctggctttatgttactgtct

SEQ ID NO: 180050 - DNA, 201 bp, Homo sapiens
ttctcttagacctcagtgccagaacagtataatttcagagcaacaatactattttcttggaatataagtgggaagctcacaactattcatatttctctctttgtcaagaaaagttataaggtttaacacaattatgaaagccagaaaacaaatgtatttttgtagcacttttgtagaaactcctggctttatgttactgtc

SEQ ID NO: 180051 - DNA, 201 bp, Homo sapiens
tttctcttagacctcagtgccagaacagtataatttcagagcaacaatactattttcttggaatataagtgggaagctcacaactattcatatttctctctttgtcaagaaaagttataaggtttaacacaattatgaaagccagaaaacaaatgtatttttgtagcacttttgtagaaactcctggctttatgttactgt

SEQ ID NO: 180052 - DNA, 201 bp, Homo sapiens
aaataaaacaaccaatttttaaaacaaaacacatggcggtatgcagatttaccagattgctggctgtatgttaagtgaaaaagataatttcaagtatactktaaaattactttatttcagtattttcctcttgagggaccagtttcaaagactaaatatgaatgtaaacataataatttgtatgaatggttatttatcaag

SEQ ID NO: 180053 - DNA, 201 bp, Homo sapiens
gtttctcttagacctcagtgccagaacagtataatttcagagcaacaatactattttcttggaatataagtgggaagctcacaactattcatatttctctctttgtcaagaaaagttataaggtttaacacaattatgaaagccagaaaacaaatgtatttttgtagcacttttgtagaaactcctggctttatgttactg

SEQ ID NO: 180054 - DNA, 201 bp, Homo sapiens
ttctgtattctgttccattggtctatatgtctgtttttgtaccagtgccatgctgttttggttactgtagccctgtagtatagtttggtgtcaagtagaawgatgcctctagctttgttctttttgcttaggattgctttgacttttgggctttttttggtttcatatgaattttaaaatagtcttttctatttctgtgaa

SEQ ID NO: 180055 - DNA, 201 bp, Homo sapiens
tggtctcgatctcctgacctcatgatctgcccgcctcagcctcccaaagtgctgggatttataggcgtgagccaccgcgcccagcctctgataattctctktatctacctcacccaaaatatacttgtagtgaaaatatacaatttcccttattgacatatacattgaatagaaaaataaaacaaaacatgcatattatct

SEQ ID NO: 180056 - DNA, 201 bp, Homo sapiens
atccttttctggctctggttctcaaagggaatgcttccagcttttgcccattcaatatgatgttgactatggttttgccataggtggttcttattatttcrattcatatcttttcactcagttctcccttaggagtatttgggttatccattatcttggaatataattctatatcattttcctatctgaccttcgtatatt

SEQ ID NO: 180057 - DNA, 201 bp, Homo sapiens
gatgcaatagaatacaataattgctagctggattaacaatggcttattattatattattttaaaaaggagaaaaatgcagattcttattcatgaagttcayaattacaattactgagagtaaataacaaaataaagtccactttctatttggaatttagaaaatatcacaaaaaaattattagcttaaactgtatatactg

SEQ ID NO: 180058 - DNA, 201 bp, Homo sapiens
tttcatcttgatgggacagcttaaattgactaattcccagatgcgtacaaatataagtaaggggaaaatgttacttaaatacttcgatttattttttttttgtggttaaaataaaaacaactgctgctatcaagagaagctaggtatatgtttctttaacttttgtgtgcataagaatcacctggagagatggttcgacac

SEQ ID NO: 180059 - DNA, 201 bp, Homo sapiens
caaactttataatcaactgcatagttttgactgttaaaggtaaaaaggagctttatctcaattttttattatttcatatattttaattacaatagctgtayaataaacattcatgtggcttaacatttttccatattcttacatagacataattattttaatacgagagttgtattttgtcaaccagatataactttgatt

SEQ ID NO: 180060 - DNA, 201 bp, Homo sapiens
tatgattgagaggcatcctttaaaaaaacctacttcaaggtcaatttgctaattcctttagaaaatgagtaagtatgaaaaggatcattttgaatttgggkctttcaggaacttcattactaaattaagacagaaagtacttgataagggaaaatacttgataattggacattttagaagcaaactgacattggtgggata

SEQ ID NO: 180061 - DNA, 201 bp, Homo sapiens
tcaaagccatcttaagctctgttaccagaattctccaccacttccacattaaaggaactagatcgggttcctccagattaaggccctcaaatacactagartatgttaaggtaaatgaggtgaggccttggaatggcatagatcttgctactactgctactggggtactacaatctcggaactgagttatatcatttgtac

SEQ ID NO: 180062 - DNA, 201 bp, Homo sapiens
ctttttaagttttcccttcaaattttatcaattgtcatacaagatataatttcatacattttgattttcactttatattttgttaacctcactctcctatwttatacacttgtatttgttatatttttaaaaggagcatagtatatagcacttctgtttttttattataaaaacattgatatgataaaatgcagtttaaag

SEQ ID NO: 180063 - DNA, 201 bp, Homo sapiens
attggcagggctaaacatcaaactcacatctcctgactccaagtcaggaaccttaatacgagttcaggagaccaagggcaagggtgaacttcagagaagasgattgactttctttcctaaaatggaaagaagaaactaaggatatttgagacatttcgaggtagaaatgagtagaaaatcaggtgagctctttttgatctc

SEQ ID NO: 180064 - DNA, 201 bp, Homo sapiens
gtataacaccctcaatgaatgtttgggaactgagaccagtcaaatttgcagtgccttcttccacagccagggaacgagagaaccacaaaggcaatgaaacvaatataagtgttctcatgttcctttacctgttggccaaagctaaatatggtaagacagacagatagtaatcaccttgctccctaatttatatacagctga

SEQ ID NO: 180065 - DNA, 201 bp, Homo sapiens
caacctccaactcctgagctcaagccatcttcccacctcagcctctccagtagctggcatcacaggtatatgccaccatgcccacacaatttttttttttwaaaatgtagagactgggtctcgccatgttgctcaggctggtctcaaactcttagccacaagttctaccttagccttccaaagtgctaggatgacaggtgt

SEQ ID NO: 180066 - DNA, 201 bp, Homo sapiens
ttctttgactatggttagttgaatttccaggaggagagtctgcctccccaacctttatagccagctgcagaagaacggacagtgagcaggcaaacatagaygctttggggttcagggaaactaacctcgaaagggtgggagctttcttcaggcaaaggtgttgctagcagaggagaggagctttggggactgaggtatgcc

SEQ ID NO: 180067 - DNA, 201 bp, Homo sapiens
tgctttggggttcagggaaactaacctcgaaagggtgggagctttcttcaggcaaaggtgttgctagcagaggagaggagctttggggactgaggtatgcstgccttaaactaccatgcattcattgcttaggaaagcggtttccttggagagatcgtggtcagccttccctgaaacaacataacaacatagaggttttat

SEQ ID NO: 180068 - DNA, 201 bp, Homo sapiens
caaatgcccaaggcagtctttattaaggaataaattcatttgactggtttgaataatttgaatagcaatgtgctgtctccacgtgatctatttcaggcttkaatgctgttgtactgggttgaataatttacagaaaacatttgaagctattagctctggcattcaaaataccatgcttctcatacatggatagcaatccag

SEQ ID NO: 180069 - DNA, 201 bp, Homo sapiens
cacaggggccaatttaaatttcaaatcatcaatagggctcatttcatttagaatctcctatgaagcatggaaagaaatgcaaagttactgtgttggcaaarcattttatttaaagtatggttatatttaaataatccttttataatttaattttgaattcagaaatcctggaaaatgtccattaagcaaataataaaacca

SEQ ID NO: 180070 - DNA, 201 bp, Homo sapiens
agtgactggagccctcagacattgctggagagaatgcaaatggctgtcatgacactttgggaaacggtttggtagtttcttataaagttaaacttactttrtgactcagccatcacactacaaggtatatactcaagagaaatgaaaacttaggttcacacaaaatcttatacgtaaatattatagcagctttatttataa

SEQ ID NO: 180071 - DNA, 201 bp, Homo sapiens
gtagtttacacatgcacagaattgcattttattctgcctatgtttaacaatgcagaccgcagattggttgcaacaatttgctgtcttacaaaagtatgtawcaaatgtgaatttttaagtcacagataatttttcttcgcacccattgaccaacctctcacattcctcccctcccgattctctggtatcgactcttcggct

SEQ ID NO: 180072 - DNA, 201 bp, Homo sapiens
tactcgggaggctgaggcaagagaatctcttgaacccggggggtggaggttgcagtgagctgagattgtgccattgcactccagctctggcgacagagcargactccatctcaaaaaaacaagcaaacaaacaaacaaaaaaaaccctgagtgctggggagaacctggagtgactggagccctcagacattgctggagaga

SEQ ID NO: 180073 - DNA, 201 bp, Homo sapiens
gtatgtgagtctatgttagcataaaaactaaatatttatgagggcccaaaatgtaagtctctagtggtagttactgtagaagctatattgtaacaatgatrtatggataaaaattttacagtattagatgtctctataaaaataaatgctgaatggtactcgcaagacatcctgaatgagttggaactaggatagtaaagg

SEQ ID NO: 180074 - DNA, 201 bp, Homo sapiens
accttactaaaatcacgtatttgttttaggatttgttttatagattgttggggattttctacatagaaaccattactgtatgtaaatagatattgggtgckaaagatacagtcacagaacaaacctataccattattattaattaattttcttaaaaaggtgcagaaaattcaatagagaaatgtattttcaatgaattgt

SEQ ID NO: 180075 - DNA, 201 bp, Homo sapiens
aaataatataaattctacccagtcacttcccgaaaggagaagtagcactttcgatttatctaatactgaaaccagccacagacatcaccaagaaaagaaaytgccaaccaacacaccaatacctctcatgaatatagatacaagaatcttcaataaaattttaagaaaaatcatctagtagcatattaaaaggatattata

SEQ ID NO: 180076 - DNA, 201 bp, Homo sapiens
gtgttaataattacattaaatgaaaatagtctaaacacattaatttaaaaactgaatgacagattgggtaacaagagcaagatccaaatatatactgtgtrcaagaaacccacttaatgtgtatggatatatatagaaaagtaaaagaatagagaaagacagattatggaagcatcaaccaaaaaaactagaattgctata

SEQ ID NO: 180077 - DNA, 201 bp, Homo sapiens
tgtgctgctggattcagtttgctagtatgttgcttttacctctatgaggatttttacatctatggtcatcagggatattggcctgatattttctcttttcwttgtgtttgtttttaggttttggtatgataatgatactggcctcacagaataagtgagggaggatttcttcctcctcaatttttgggaagagattcagta

SEQ ID NO: 180078 - DNA, 201 bp, Homo sapiens
ttgtttttgttgcaattgcttttggcatcttcatcatgaaatctttgctgggacctatgtccagagtggtatttcctaggttatctcctagagtttttatrgttttaggttttgcatttaagtctatagtccatcttgagttgacttttacatatggtgaaaggaatttcaattttctgcctatgactagccagttatctc

SEQ ID NO: 180079 - DNA, 201 bp, Homo sapiens
gtagggcaaccagctaacctgaaacttaggaggagacatgagcacttgttttcctggagcagatactgccagatagcagtaagaatttagctgaatttttmagtcgaattggtaaagccagttgtgcactagaaagataatatagcaaccctattgactgcagatatgaggggaatttgcactgcagtcttttctccatag

SEQ ID NO: 180080 - DNA, 201 bp, Homo sapiens
tctgaggtgagggttgtctgtttgttgtctgcttggcagaggctctttaatttaattaagtcccacttgggaatttttgtttttgttgcaattgcttttgrcatcttcatcatgaaatctttgctgggacctatgtccagagtggtatttcctaggttatctcctagagtttttatggttttaggttttgcatttaagtct

SEQ ID NO: 180081 - DNA, 201 bp, Homo sapiens
gtgatgcttatcccattccagggcttaaggtacttgcttaagtaggggcactgtgtctcggatccgctttggagaggaagaatagaaagcttttctaaagraattatagggtactgctggtatagattaattccagttcggaaagtcctgagtgggaatgtgagaatggaggctgtctcagatatgtagtccctaggacag

SEQ ID NO: 180082 - DNA, 201 bp, Homo sapiens
atcacttctagctgtagaacagcaagcaaaaaaactagaaagtttgcagattcacaacttttcatggagtcatcagagaactaaggtcgtagggcaaccarctaacctgaaacttaggaggagacatgagcacttgttttcctggagcagatactgccagatagcagtaagaatttagctgaatttttaagtcgaattggt

SEQ ID NO: 180083 - DNA, 201 bp, Homo sapiens
tgtcttttgtccactttttaatggggtttgttttttgcttgtttatttaagttccttatagattctgaatattagacctctgatggatgcatagtttgcasatacgttcttcctttctgaggtgagggttgtctgtttgttgtctgcttggcagaggctctttaatttaattaagtcccacttgggaatttttgtttttgt

SEQ ID NO: 180084 - DNA, 201 bp, Homo sapiens
ggagacttagacttacttccaaatcctttttgaggataaaaaaataatgggaaagagcatcacttctagctgtagaacagcaagcaaaaaaactagaaagwttgcagattcacaacttttcatggagtcatcagagaactaaggtcgtagggcaaccagctaacctgaaacttaggaggagacatgagcacttgttttcct

SEQ ID NO: 180085 - DNA, 201 bp, Homo sapiens
tgttttggttactttagctgtatagtatagtttggcatcaggtagcatgaagcctcgagcttttttttttttttttgcttaggattgtcttggctatttgrgctcttttttggttccatatgaattttaaaattcttttttctgattctgtgaggaatgtcaatggtagtttaatgaaaatagcattgaatctgtaaattg

SEQ ID NO: 180086 - DNA, 201 bp, Homo sapiens
agacagaaatactattcaacccagcaatcccattattgtatataccctaaggaacataaattgttctattataaagagacatccatgcatatgttcattgmaacactattcacattagcaaagacatggagtcaacctaaatgcccatcaatcataggctggataaagaaaatatggtacatatacactatggaatactat

SEQ ID NO: 180087 - DNA, 201 bp, Homo sapiens
tcttgtacctgtaccatgctgttttggttactttagctgtatagtatagtttggcatcaggtagcatgaagcctcgagcttttttttttttttttgcttargattgtcttggctatttgggctcttttttggttccatatgaattttaaaattcttttttctgattctgtgaggaatgtcaatggtagtttaatgaaaata

SEQ ID NO: 180088 - DNA, 201 bp, Homo sapiens
gtctgttcttgtacctgtaccatgctgttttggttactttagctgtatagtatagtttggcatcaggtagcatgaagcctcgagcttttttttttttttttgcttaggattgtcttggctatttgggctcttttttggttccatatgaattttaaaattcttttttctgattctgtgaggaatgtcaatggtagtttaatg

SEQ ID NO: 180089 - DNA, 201 bp, Homo sapiens
ttgtcccattctgtaggttatctgtttattttgttgataatttctttgctgtgcagaagctctttaatttaattagattccatttgtcaatttttgctttygttgcaattgctttggcatctttgtcatgacatcttggcctgtgcctatgtcctgaatggtattgcctatgttttctcctaggggttttatagttttggg

SEQ ID NO: 180090 - DNA, 201 bp, Homo sapiens
gatagagagggaggatagaagcagagagagagagaaaaaagaggcagaatgtcaattaggcagttatctgtgttaatcatgaccacagtttttttttttttctagtaaaatgcagctagcttacagcaaaattacttggatttctacttccttctctctgttttctcctgcatgtacacatgtgtgagtgcagaggtttgg

SEQ ID NO: 180091 - DNA, 201 bp, Homo sapiens
aaacacatgcacaaagaaacccttctaggaagatgttatggagccagaactaccaaatcttaacatgatgaaaaagggaggatgttgatattaaataagcyacctcaattaaatccacccacctcaaaaatgaaaacagaacagtaaaattgactattgaattaagtcctctgaagatacagtgttttgcctccccaccag

SEQ ID NO: 180092 - DNA, 201 bp, Homo sapiens
taaatccacccacctcaaaaatgaaaacagaacagtaaaattgactattgaattaagtcctctgaagatacagtgttttgcctccccaccaggcacaatgwcatctctttatatgattttgaggaaaatgtattcaattatttcaactgtaataatacttaacataatgagaaattcttctagtgatttatttttgtaaat

SEQ ID NO: 180093 - DNA, 201 bp, Homo sapiens
gggaagaaagaattgcaattttatgcatacataaagaccaggtggtctttatgtctgaagaacaagagaaaattgggggtattataaaaaagaatgttgtyggtggttggagagaaagctcatttatattagtaaagctttggggaactggcaagcttaactggtgggtgatggcagcaagcaaaattagttcctagactt

SEQ ID NO: 180094 - DNA, 201 bp, Homo sapiens
tcaataaatcaataaaaattaagtttatggtaactagatagaagttcaagaaaaagaacatatgtacagtctattacgtgaattattctatataaatttcktataaaatctacaggtggtgaataagtgactctatagggaaagtgtgaatattaacaaaaacattggcactactagaattttttattaaggagaaacaga

SEQ ID NO: 180095 - DNA, 201 bp, Homo sapiens
catggaaattactatcttgaaggaggagttttactgtactcacagattcctggaaacaggaggcatgacacaccatgcagggccacatgaggcagccccasggtcagtcaggaggcagagggaggtggtaaaatgtgggcaagagcccctattgtggtttccatgagaagaaatgagcaatgaccaggtttaggatcagct

SEQ ID NO: 180096 - DNA, 201 bp, Homo sapiens
aaatgtgggcaagagcccctattgtggtttccatgagaagaaatgagcaatgaccaggtttaggatcagctagtttgaataatttccgtaggcataaggayagttcctagttgtctggtaccagggcctgggaaatttaggtctggtggataatggcctggaatttgagagccctatagagaagggtagttaaggtgtggg

SEQ ID NO: 180097 - DNA, 201 bp, Homo sapiens
tctataatcttatcttcctcttataggctatagcctctaatggaagataatacacattcaatagcagtgagaatatcaggtatatctaccagagaacagcagttaggtcttaatgcttctgaaagctgtttcaaatatttctccctactgcattacacaacaatcactgcaataacataaatcctaacagcactgtctaaa

SEQ ID NO: 180098 - DNA, 201 bp, Homo sapiens
tgtaaaaatacatagtatcctcccttggtaatgatctaatattgaacaactaatagtttaccaaatatccttaacacgtttataagattttatccttccartaatagttaagttaggcagtcacagatatctttgttctttgtgtgtatgagtgtgtgtgtgtgtgtgtgtgtgccagtgcgctgcgcacgcctgtatgtg

SEQ ID NO: 180099 - DNA, 201 bp, Homo sapiens
gagagccatagtgaaacaggtttaaaaaaatctatgctcttgtatagagttcacattctagtggcaatgatttaaatcgctaaaatgtgcaatatacattwagtgataatgtgatggaaaaaaatgaaactgctgagatggaggtgtggaatgcagtgttaaaagatccataatcagggaaggccttgttgggaaaataat

SEQ ID NO: 180100 - DNA, 201 bp, Homo sapiens
caaaaatactcagtgaattctaataaataatagattaagttttctgtgattattttagccagttcattagggaattggggtcttgcagaagtatataaatkttttaattgtttaacttgactcacatttttattagaatttgtttatattttaatcaaggcttttcattctgctgcattttgtggggcataattatgtttt

SEQ ID NO: 180101 - DNA, 201 bp, Homo sapiens
cctgcctcaagagatgggagctatctgtttagggaaggggaacaacttagtaaatatatatatttgcttattcataaacttgttttaagaaagtggttgtwactggagataaaatggtgaatgacacattaggaaaattttcaaactggcaagcaaacaagcaacttcattatgcaagagatacaaataggatgtgatctc

SEQ ID NO: 180102 - DNA, 201 bp, Homo sapiens
acttgggggattattgtgccatcctcttctttctacttaaagatgcactttttaaaacggcaatgtatttgtccttctcttcttccaaatctcaaaaataytcagtgaattctaataaataatagattaagttttctgtgattattttagccagttcattagggaattggggtcttgcagaagtatataaattttttaatt

SEQ ID NO: 180103 - DNA, 201 bp, Homo sapiens
ggatatatgtttttccatagaattagatgattaattctatcattttaattagtaaagagaagaataaacaattagatgtaaagcccttatgttaaaaaaaatacctttgtaactatcgctagatacttattttctataaacattttatagaatttaattttttttatttttaaataggctatggatcttttcatagtgaaa

SEQ ID NO: 180104 - DNA, 201 bp, Homo sapiens
tgcaagttgattgttttcttttgttattggcttcagtatttccccaagcataaaattttagataagtattccacttgggggattattgtgccatcctcttstttctacttaaagatgcactttttaaaacggcaatgtatttgtccttctcttcttccaaatctcaaaaatactcagtgaattctaataaataatagatta

SEQ ID NO: 180105 - DNA, 201 bp, Homo sapiens
catagaagactaaaagtatcactatgataacagagatgagtcaaaaatacttcagaaaaaaaaagaagtattttggaaataattgaattaggcataaaaaatgtggtttttcattttatattaagagactggaaagaaatataagacattaaaagagagacagataagtagcaaattttcaggtctatgatgtacacactg

SEQ ID NO: 180106 - DNA, 201 bp, Homo sapiens
gcctaagtaaaacatacaattttggcttttgctctcaaaaacaagccttgatgtgcacacagttagagctgcgactgtagagcactattgccaaaggaggrtggtaaacttttcagtaatgctgaacctactagcgtgtgagggcatttagcatactgatagtgatatgaactaaaggaaatgttgacactgtcctaaata

SEQ ID NO: 180107 - DNA, 201 bp, Homo sapiens
aattcacaggaaaacatggtacataaacatggagcttgaaatcaggaaacatgtactattttaatttattttattttattattattattttttttttttttgagatggagtctcgctctgtcacccaggctggagttacagtggcgccatcttggcctaccgcaagctccgcctcccggattcacgccattcccctgcctc

SEQ ID NO: 180108 - DNA, 201 bp, Homo sapiens
aacaattatgataaaaccaaaaacgtctaaataatgctgaaaagtgcaataaactataacaatgatgttataagtaataaacttaattgcacatccactgraatgaaacagaattgcagtgtgaaaaatctcttaaaattctatccaaatctcccacctgtaagccaaaaaatagagctaccacacaggctggtgagtatt

SEQ ID NO: 180109 - DNA, 201 bp, Homo sapiens
gtctttttcctgacttgcagtggtcactttttctctgtgttctcacatgcaggagagagtgcaagttatcattctacctttctcttcttataaggtaacartcctgttggattagggccccactcttatgacctcatttaaccttaattatctcctacaaaccctagctccaaatacattcaaaatgtttagagcttcaac

SEQ ID NO: 180110 - DNA, 201 bp, Homo sapiens
ttgcataggaaatagtcaagaaatggtatatttagtttacctatcttatattagcataaattcagtttaagagaggacggtgtctataaatgactaatacagattgatagagtacaaaggcaactaaccttgtttctcttgagtagagctttaccttttagatgggattgagtctcaatttctgttctttgatgtataatt

SEQ ID NO: 180111 - DNA, 201 bp, Homo sapiens
atttattttctccattttaggatctggaagtctgagattagggtgccagcatgggcaggttctggtcagagtctttttcctgacttgcagtggtcactttytctctgtgttctcacatgcaggagagagtgcaagttatcattctacctttctcttcttataaggtaacagtcctgttggattagggccccactcttatga

SEQ ID NO: 180112 - DNA, 201 bp, Homo sapiens
attgcataggaaatagtcaagaaatggtatatttagtttacctatcttatattagcataaattcagtttaagagaggacggtgtctataaatgactaatacagattgatagagtacaaaggcaactaaccttgtttctcttgagtagagctttaccttttagatgggattgagtctcaatttctgttctttgatgtataat

SEQ ID NO: 180113 - DNA, 201 bp, Homo sapiens
attacaggtacaagtcactgtgcccagcctaggtaatccgatttttgaggcaggatggagtgagttaaaatgcacaggttctaacatcatacagaactagattctgatctcagttcagcaaatactagctgtgataccttgagcaaggtttttatttggttatacctcctcagctgtaaaagggcatgatataactgtgtt

SEQ ID NO: 180114 - DNA, 201 bp, Homo sapiens
cctatcatgttttatggtaaaacatttgtaatttactcacctggttatcttgcaatatactgtacgttgtcattgactatagtcatcctgctgtacaataratctaaaacttattcttcttgtcagaaactttgtatcctttgctcaacaacttttcattccctctcacctgctgccacctgcccagccgctagtaaccac

SEQ ID NO: 180115 - DNA, 201 bp, Homo sapiens
gattacaggtacaagtcactgtgcccagcctaggtaatccgatttttgaggcaggatggagtgagttaaaatgcacaggttctaacatcatacagaactagattctgatctcagttcagcaaatactagctgtgataccttgagcaaggtttttatttggttatacctcctcagctgtaaaagggcatgatataactgtgt

SEQ ID NO: 180116 - DNA, 201 bp, Homo sapiens
atggtaaaacatttgtaatttactcacctggttatcttgcaatatactgtacgttgtcattgactatagtcatcctgctgtacaatagatctaaaacttaytcttcttgtcagaaactttgtatcctttgctcaacaacttttcattccctctcacctgctgccacctgcccagccgctagtaaccaccattctactttct

SEQ ID NO: 180117 - DNA, 201 bp, Homo sapiens
cattgaggtgatctgatcttttcttttctttttccttccttccttctgtccttccttcctcccttccttccttcgttccttccttccttccttccttccttttttctttttctttttttttttttataaggtcttgctctgtcacccaagctggagtgcagtggcacaatcatagctcactgcagccttgacctcttgtac

SEQ ID NO: 180118 - DNA, 201 bp, Homo sapiens
acattgaggtgatctgatcttttcttttctttttccttccttccttctgtccttccttcctcccttccttccttcgttccttccttccttccttccttccttttttctttttctttttttttttttataaggtcttgctctgtcacccaagctggagtgcagtggcacaatcatagctcactgcagccttgacctcttgta

SEQ ID NO: 180119 - DNA, 201 bp, Homo sapiens
tgtcaaaaacaaaatttaaactttagcagaaaaatatttagacatctataagaccttggaataaaaaaattcttaaaacataaaaaaattactgcaaaaawattgataaatttgactatgttaaacttgagaaagttagttcattcaaatgtaccttaaagaagataaaaagagaagttaaaaatcgtagaatatatataa

SEQ ID NO: 180120 - DNA, 201 bp, Homo sapiens
tacattgaggtgatctgatcttttcttttctttttccttccttccttctgtccttccttcctcccttccttccttcgttccttccttccttccttccttccttttttctttttctttttttttttttataaggtcttgctctgtcacccaagctggagtgcagtggcacaatcatagctcactgcagccttgacctcttgt

SEQ ID NO: 180121 - DNA, 201 bp, Homo sapiens
aaatttgactatgttaaacttgagaaagttagttcattcaaatgtaccttaaagaagataaaaagagaagttaaaaatcgtagaatatatataaagcaaaygcaactgaccaattattaagtacgtataagtaacttgattgttatatatatcaagtatatataaaattttttctataattaataaaaaagcccaaataac

SEQ ID NO: 180122 - DNA, 201 bp, Homo sapiens
ttacattgaggtgatctgatcttttcttttctttttccttccttccttctgtccttccttcctcccttccttccttcgttccttccttccttccttccttccttttttctttttctttttttttttttataaggtcttgctctgtcacccaagctggagtgcagtggcacaatcatagctcactgcagccttgacctcttg

SEQ ID NO: 180123 - DNA, 201 bp, Homo sapiens
ggaattacattgaggtgatctgatcttttcttttctttttccttccttccttctgtccttccttcctcccttccttccttcgttccttccttccttccttycttccttttttctttttctttttttttttttataaggtcttgctctgtcacccaagctggagtgcagtggcacaatcatagctcactgcagccttgacct

SEQ ID NO: 180124 - DNA, 201 bp, Homo sapiens
tttatttctttctctggccaaattgctgtggctaagactcccaatagtatgttaaccaaaagtggtgaaagtgggcacctttgtcttgttccagatcttaraggaaaaactataaacttttccctattcagtatgttattagctgtgggtttatcatataaggcccttatgttttgaagtatggtatttctatgcctaatt

SEQ ID NO: 180125 - DNA, 201 bp, Homo sapiens
aataacatgacacatctacaaccatatgaacttcctttttttttttttttccaatttgaatgtcatttatttctttctctggccaaattgctgtggctaaractcccaatagtatgttaaccaaaagtggtgaaagtgggcacctttgtcttgttccagatcttagaggaaaaactataaacttttccctattcagtatgt

SEQ ID NO: 180126 - DNA, 201 bp, Homo sapiens
ggaaatgacttatcttagacatttcaatatttaattaatactgagtgatttcagattttctattataataatattcttcatcttttcttgaacgatttttwaaattctttatcttgattaagcctcacaatattttgtgagattgatggggcaggaaatatgttataaacaaatgaagcactgagaagcaagatacctacc

SEQ ID NO: 180127 - DNA, 201 bp, Homo sapiens
atgaagtcttcatcataaggaatcataaaaatgagcagaaattttaacattgaacaaaaaaaaaatttttttaacagttctaaagcttttggtcatttacrttcttaaaatttactgtgtaccccaaacaccttttgttcatgtgggttacaactgttattaatatttactgtatttaaattaaaactgagaactttaaaa

SEQ ID NO: 180128 - DNA, 201 bp, Homo sapiens
atttatatttaatgcagaaaatatactacagtgctttttaaaatagaatagtctttgcatgttagttattacaaatcactgaagatctctgataaaatatytaatacccttatcactttattgaaaatttgtttgaacattcatgaacctgactatatcctcagaagaaaggagtttttctgttcttcttataaaatgttt

SEQ ID NO: 180129 - DNA, 201 bp, Homo sapiens
gtggctgttgctaaaaaacaaactccacatgctttacaactttatccctaattagaaatgccttaggatccactatatggggaattgagacaacaaggacrgaaattcttaggagcagcttttgtatatctcctaaataaggctttgaaaaagaccttagataaataagtgcttcactcctaaagatattgttgattaatg

SEQ ID NO: 180130 - DNA, 201 bp, Homo sapiens
ctgactatatcctcagaagaaaggagtttttctgttcttcttataaaatgtttctgtcactgttgtcagtggacccaaatcattagtaaacatcgattccyttttctaaaaggaggaatgaccaagggctataacaggacagaaatgagcaaagaggacttttggaaatcctctggggccaccaaggtgactcctgagaaa

SEQ ID NO: 180131 - DNA, 201 bp, Homo sapiens
aaagatattgttgattaatgagtgattcatacttgccactgctattctttcttgacctcttagtagctggaaagttcataataatcctgaaacatgtagarcaaaagaccgatggtccctgagatcaagaataacctcacaaaaggattcaagctcaccaaatggttcaacagttttccatgttccccaggttgaaggttt

SEQ ID NO: 180132 - DNA, 201 bp, Homo sapiens
agattttgctttgttcagtacttgtatttcctcttctatatactctgcatccttgctattgcccgtttatttgtcaggaccttagtatattgattatcaaytcatgggagcacatactgcataaaagatgatgataccacttgatctttcatatttgttataatattttattcccaatgcctttttaaagcttttaacata

SEQ ID NO: 180133 - DNA, 201 bp, Homo sapiens
caatttactatgatatcattcaaattgggaaaggccctagaaatggatgtaaatccaaaccctaggttgacacaggtgcagagagagaagccaggaagggrggagatggacatatccagaatcagatgctgggatgatgtccaagccagtaaacagacttaataacctaaatctctggacactgataaataagtgccattc

SEQ ID NO: 180134 - DNA, 201 bp, Homo sapiens
taaatcttgaggcaaattttataaaacattatactattgggtagtaattaagggttttggcaagcttgtttaagaagtaccaaccaaggaaacacttattrtagaggcttcactgcaaaatacgttatataataccctccaatgcacactaagtttctgagttggttttgcttctttgctatattctgtaagtgaaactta

SEQ ID NO: 180135 - DNA, 201 bp, Homo sapiens
attgggtccagtgttaagtaactcaatgttcttgcacatgtttgccaagcatggcaatgctggatggaaagcagaagtaggaccatattagaggagtccartggaagtatcaggaatctagccattagactgtgcagttcaaaaacagatgtcagttctaagtgttgctaacagcaaggtaggattttggtaacctaaagt

SEQ ID NO: 180136 - DNA, 201 bp, Homo sapiens
attgaaaatatgacatttgagcaaacacatgaagtttgtcctgtggatatttgggaagttcgcattctaggcagtgagaacagccagggtcctggccctarggtggcatcatgtctgctgtgtttgaagagttgcaaggggccagtttggctggaggagagggatactggaaattaattagcaggcaataagtttggagat

SEQ ID NO: 180137 - DNA, 201 bp, Homo sapiens
acagatgtcagttctaagtgttgctaacagcaaggtaggattttggtaacctaaagtctatgggattcaaggacaaaagaaaaaaccagaagaaatttttmtcaaaaatagaacgttagttcagagtgagaatagtagtgtctagtttattcatttgtgcattcaacaaacatccattaactcctgtgatggttaacattg

SEQ ID NO: 180138 - DNA, 201 bp, Homo sapiens
tgagaatagagagaaagagaaacaagggattttaaaggataatagtaataagcctttgtataatttttttcatacatgactttttaaaatttcataatagwgaggtgatgtggatgtaccttctaacatcatcacattttgacagtgaggaaagtgagactatgcatgggaaaaagtgaggcttagtaagtgaagcaataa

SEQ ID NO: 180139 - DNA, 201 bp, Homo sapiens
aacgagagagagagattgactgtagtaaagagatgtatgaagagcagaatcaagacattaggtgtcttcagagaaacagaaagaagctgaagcttcatgcytctttttattccttgatgctagtgccagaatcttgacttcactctctgctcttggtttccttgagttccacccatattgtttatttattttgcatcactc

SEQ ID NO: 180140 - DNA, 201 bp, Homo sapiens
tagagaaatgagacacatcacagtcaagtacatgtggatgtatattatctttataaattaagatattacgtggaacttactatggttcaagaactcagtargaattttttaaaaaaataagtatgcttgcataaattccaaagtataatgacatcttgtctctgtcatccctttgtagtccatcaaaatgattaatgcctg

SEQ ID NO: 180141 - DNA, 201 bp, Homo sapiens
aagtaagcttgtcaggtgtgattcctagctctttttatatttaggaattcaatggcagtagcaacttgagaactgtcttttcagaaatctcagtacattcrcaactgcaatctcatacactcagtaaatatatgaacggaaacattttttacatttccatttgttttgttactattccaattgctatttattgtcagggtt

SEQ ID NO: 180142 - DNA, 201 bp, Homo sapiens
gttactctgaaatatcaacattttcaaaatctcttctgtcaacactactataaggacttttatatatatatatatatatatatatatatatatatatatayacacacatgtatacataaaaacatgtattgcaaatagaaataaggtctctatttaaaaatctaacagttatttgctaatcacttatttttatacatatag

SEQ ID NO: 180143 - DNA, 201 bp, Homo sapiens
tagctttggagccataatgtcctcattatttgaaaaaactgtcaaaatccactctcttcctaaataattggttaatatgatattaaaatgtaaaatgaagmctactctttgaaaattacacgataagtacaccactttagtacttacttaaaattttgttctttatagattactagggtgttattcataagtgcaacattg

SEQ ID NO: 180144 - DNA, 201 bp, Homo sapiens
atattagtagttgatatcggaaagcaaaatgtatacaggagaaacagtgtaaataaagcaaaagagtaaaaaaaagttagggatgcatacagtgtttgtcytttgacataactgggttactctgaaatatcaacattttcaaaatctcttctgtcaacactactataaggacttttatatatatatatatatatatatata

SEQ ID NO: 180145 - DNA, 201 bp, Homo sapiens
tttttgtgtgctgttgtctgagagagtagttgctatgatttcagttcttttgcatttgctgattgttttatgtcctattgtgtggttgattttagtgtatktgccatgtggcaatgagaataatgtatattctgttgtttttggatggagagtcctataggtatctatcaggtccatttggtccttttgagttcaagtcct

SEQ ID NO: 180146 - DNA, 201 bp, Homo sapiens
gacaaaagaaaaccaatgaggaacccacaatcttgggaagaacagataacagagtatccacagggagctgtatcccagaaagggcacgagatgagaaatgsagacttcattttttcatctataaaatgagaatttttcattctctttagtctgactaatatgactttcatggagatattttaaaattgtaaatgatatgaa

SEQ ID NO: 180147 - DNA, 201 bp, Homo sapiens
atttctgtcttaatttcattatttaccccaaatcattctgaagcaggttaatttccatgtaattgtatggttttgagtgattttcttgaattctctttttytgtgtgctgttgtctgagagagtagttgctatgatttcagttcttttgcatttgctgattgttttatgtcctattgtgtggttgattttagtgtatttgc

SEQ ID NO: 180148 - DNA, 201 bp, Homo sapiens
atttagcttctcagtgtcatgattttgtactctcctgcctaaaaagaaaatctacgttctttctttaaattttaaaattatatttatcctaatattttacrtaactaagaacacatgactgtaatcacttgaaaggtattgtgaaaatacgaatgttttaggtacaaactcagaggtgccagacaaaatgaaattaatcag

SEQ ID NO: 180149 - DNA, 201 bp, Homo sapiens
acttggttctcagcttggctgtcattgccatataggatttttaatgtgatttttgtacattttttgctagtttgtacagattttgctagtaatttttgtamattgactttttatcctgaaactttgctgaggtttatcagtttaaggagctttcaagctgagattgtggggttttctagatacagaaacacatcatctgca

SEQ ID NO: 180150 - DNA, 201 bp, Homo sapiens
actgtcacatattttgaatgttcctagttgcaattagttttcacccccaatatttagcttctcagtgtcatgattttgtactctcctgcctaaaaagaaaatctacgttctttctttaaattttaaaattatatttatcctaatattttacataactaagaacacatgactgtaatcacttgaaaggtattgtgaaaatac

SEQ ID NO: 180151 - DNA, 201 bp, Homo sapiens
ttttttttttttttacattgtccttgtggcatgcaaccttactaaaatcacgtatttgttttaggatttgttttatagattgttggggattttctacataraaaccattactgtatgtaaatagatattgggtgcgaaagatacagtcacagaacaaacctataccattattattaattaattttcttaaaaaggtgcaga

SEQ ID NO: 180152 - DNA, 201 bp, Homo sapiens
tttgcccagtttttgatggggttgtttgtttttttcttgtaaatttgtttgagttcattgtagattctggatattagccctttgtcagatgagtaggttgygaaaattttctcccattttgtaggttgccttttcactctgatggtagtttcttttgctgtgcagaagggttttttgtttagaggtcttatgtattttggt

SEQ ID NO: 180153 - DNA, 201 bp, Homo sapiens
tacatatgtatacatgtgccatgttggtgtgctgcacctattaactcatcatttagcattaggtatatctcctaatgctatccctcccccctccccccacyccacaacagtccccagagtgtgatgttccccttcctgtgtccatgtgttctcattattcaattcccacctatgagtgagaacatgcagtgtttggttttt

SEQ ID NO: 180154 - DNA, 201 bp, Homo sapiens
cgctgtgcggtgggctgcccacacatcagcgagggcgcagtgctggcaggggtgggcaaggcagcagagtgtgctcatgacagcagcggtggggcagtggrgtgcacactcacatgcctgctgtaggaagagggttggcgaggtcggtcggcccttgcgcacacactgccaaagcagtgaggggaggctgcagtgagaaga

SEQ ID NO: 180155 - DNA, 201 bp, Homo sapiens
gcaggtttgttacatatgtatacatgtgccatgttggtgtgctgcacctattaactcatcatttagcattaggtatatctcctaatgctatccctcccccstccccccactccacaacagtccccagagtgtgatgttccccttcctgtgtccatgtgttctcattattcaattcccacctatgagtgagaacatgcagtg

SEQ ID NO: 180156 - DNA, 201 bp, Homo sapiens
tttattgatgcttatagaagtaaactaatattcattttatttggacatcttatatctaatacccaattttctttcatcattaaaactttaaaatcctacaratatttactttaatagaaaatatactgtgaaattagacatgatagactctggggaagcatttatttgattaggaaaggttagttcaagctgttctttatg

SEQ ID NO: 180157 - DNA, 201 bp, Homo sapiens
catgagatcattatgaagtagtatttacaataagaaaatatgcaagggagttagtggccttgaaggtcaaattaaaagagagagagagatgggggtgacasggagggaggaaaagagggaggacatactagggatgacttttgaagttatagattaatcagtttgctttgatatttatgaaaataataagacaaaatgatg

SEQ ID NO: 180158 - DNA, 201 bp, Homo sapiens
gtaacaatgttaacatttcactgtatagtgaattgttatactgaatttatatacatatataggcacatgtatttacatatatgtaaattatgtcattatttacaaaacaactttattctccatattattttagaaattattgatattgttttgaagattagattttggaatataaataaatattatttgggacattatttt

SEQ ID NO: 180159 - DNA, 201 bp, Homo sapiens
tgagtgagttctcatgacatctggcttttaaaatttgtagcactcccaccttcacttgccctctctcctgctcttctgtggaaagatgtaccttgtttccycttcaccttctgccatgattataagtttcctgaggcctcctagtcatgcttcctgtcaagcctgtggaactgtgtgtcaattaaccctcttttcttcata

SEQ ID NO: 180160 - DNA, 201 bp, Homo sapiens
cgtaacaatgttaacatttcactgtatagtgaattgttatactgaatttatatacatatataggcacatgtatttacatatatgtaaattatgtcattatttacaaaacaactttattctccatattattttagaaattattgatattgttttgaagattagattttggaatataaataaatattatttgggacattattt

SEQ ID NO: 180161 - DNA, 201 bp, Homo sapiens
aaatctcacatcaaattgtaattgccacatgtcaggggagggacctggttggcagttattggatcatgggtgcagatttcccccttgctgttctcatgatrgtgagtgagttctcatgacatctggcttttaaaatttgtagcactcccaccttcacttgccctctctcctgctcttctgtggaaagatgtaccttgtttc

SEQ ID NO: 180162 - DNA, 201 bp, Homo sapiens
tgaaatcaaagatacactgtttcctagcacagggcagagttgatgcaaactacctgtgtgtgtgcttttctgcaaagcgctcctatggaaagttgatttttcatttttctaagtttcctggcagtttttaagtgtggtcctccacgatcttggccttggacaccactaaaactaagtataaattattgatcttatttcata

SEQ ID NO: 180163 - DNA, 201 bp, Homo sapiens
cctggcaagaatagtagcctaccagtagttacacttattatatctaccatttattgatttcctatgccaacagttattctaggtgctttagatgaattacrtagaaattagaacaactttcatgacttggattttattatcgcagggttaataaggaaactgacacacagaaagtttatgtgcttggcctataggtcacac

SEQ ID NO: 180164 - DNA, 201 bp, Homo sapiens
aactagaaggagaaatagatgattttattatattttaatcattcaaaatgtttttattaaataactaagagcatgaagctgagtgtgttggcaggtgcccrtggtcacagctattcaagtggctgaggcagtagtatggcttgagtccaggagttcaagaccagctgagtaacatagtgagaacccatctctatttaataa

SEQ ID NO: 180165 - DNA, 201 bp, Homo sapiens
ataatagaatctctctatattcatggaacccctgtatagttagcactcaatgaacctgccttgttacaactttaaaaaaattatattcacttaaaaaaatkgggtataactgaggtttacatatgaagttatgggatacatatagatagtaaaatggttattacagtgaagcagactaacatatccatcacctcacatagt

SEQ ID NO: 180166 - DNA, 201 bp, Homo sapiens
accttagattgggtaatttataaataatataaatttatttgtcatagttctggagattaggaagtccaagatcaaggtgccaaccgatttagtgtctgatwaaggcttctaggatggcatgttgtcactaagtcctcatatggaaaaagaggcaaatgatatatcctcacatggacaaaggggcaggacagctcccttcaa

SEQ ID NO: 180167 - DNA, 201 bp, Homo sapiens
gtggcggatggcaagatatcctttattcttgctgaataatattccattgtgtaggatgggtatatatatgccacatttcctttatccagttgactttggtygtttccatatcttggctattgtgaacaatgctgcagtgaacatgggaatgaagatatctttacaaggtggtgatttcatctccttcagatatatatcaag

SEQ ID NO: 180168 - DNA, 201 bp, Homo sapiens
catttaagtcctttgttcattttgagttattctttctggatggtgtgaaatggtggttcaatctcactttctttttttttttgaatgtggaaactcacttytgcaagcaccgtttatggaagagaccacccttttccccattgtgttctcttggtgcccttgttgaaaattagctgatcataaatgtttggatttatttct

SEQ ID NO: 180169 - DNA, 201 bp, Homo sapiens
cattttgagttattctttctggatggtgtgaaatggtggttcaatctcactttctttttttttttgaatgtggaaactcacttttgcaagcaccgtttatsgaagagaccacccttttccccattgtgttctcttggtgcccttgttgaaaattagctgatcataaatgtttggatttatttctaggttctcttctattcc

SEQ ID NO: 180170 - DNA, 201 bp, Homo sapiens
aggttctcttctattccaccggtcgatgtttctgtttatctgccagacatcatacttcgtgattttaaattataatttgtaaccttagtttctcacagcarttctctctactgcttcttcatgtcagggttcttctactcgaatgccagtgtttctatacatagaatttcccattgttttctctgacactaactttctacc

SEQ ID NO: 180171 - DNA, 201 bp, Homo sapiens
aaaacttaaagtgggaaagttacttgaagtgagaaatctactggaagagtccacataggaaatgagatctaatattacactactagaggagagagattaasttatggctatattgagaagatagtttatgatatttgacaactagttggctgtcagaaggtgaagggtaaggagagactcaaattgctctcagtcttctgg

SEQ ID NO: 180172 - DNA, 201 bp, Homo sapiens
atccatttaatttttaccttttcttttgtggactgattttggccttacaaatgaccttaagcttttcagaccccactcaactgccattagaatactacacrgcagctttgtccccacgcccagccacatgtttttcttcttcccaagctcaggttgtatagcctgtagatattcatacctgaccaagtacttttggatgtg

SEQ ID NO: 180173 - DNA, 201 bp, Homo sapiens
caggggcgggcacaccggtgtacactgtgctcacttgcgccagagaagaagcggcacagcaggggtgggctgctggtggacacgaggttctggaatctgtkcacgcagttgcacccaccgctgtgcggtgggctgcccacacatcagcgagggcgcagtgctggcaggggtgggcaaggcagcagagtgtgctcatgacag

SEQ ID NO: 180174 - DNA, 201 bp, Homo sapiens
atattcatacctgaccaagtacttttggatgtgccatctcatttaatttttgcagtaattctgttgaagcactgtaaaaggtcacatgagataacggagayttgccttttaaaaatatttagttaaaccacatgacatggctgatatttggatatctttgacctacaaaaacaatttcttaggattcaatctaatccttcc

SEQ ID NO: 180175 - DNA, 201 bp, Homo sapiens
tgtatttactattgtgaatagtgctgagatgaatatacgagtgtatgtgtttttatggtagaacaattattttgggggagtatatactcaacaatgggatygctaggttaaatggttgttctattttaagttctttgataaattgccaaactgatttcaagaatggctgaactaatttatattatgaccaactgtgtatat

SEQ ID NO: 180176 - DNA, 201 bp, Homo sapiens
aggaggcagtctgcccattctcagatctcaagctgcatgctgggagaactactactttcttccaagctcagttggaaatgcagaaatcacccgtcttctgygtcactcacgctgggtgctgtagactggagctgttcctatttggccatcttggctcctccccccatgtttaaatgtttatcaaaaaataaataaagttta

SEQ ID NO: 180177 - DNA, 201 bp, Homo sapiens
gataatggcctctagttccatccatgttgctgcaaaggacttgatctccttcttttttatggctacatagaattccatggtatatatatgtatctatatamctcattttatttatccagtctaccgtttatgggcatttaggttgattacatgtatttactattgtgaatagtgctgagatgaatatacgagtgtatgtgt

SEQ ID NO: 180178 - DNA, 201 bp, Homo sapiens
ggtaaattgtgtgttatggagggttggtaatacagattatttaatcacccaggtaataagcatagtaccccatttgtagttttttgatccccaccttcctyccaccctccctgctcaactaggccctagtgtctatctttcccttctttgagtccatatgtacttaatgtttatctcccatttataagtgagaacctgtgg

SEQ ID NO: 180179 - DNA, 201 bp, Homo sapiens
ttccagcttttgcccattcaatatgatgttgactatggttttgccataggtggttcttattatttcgattcatatcttttcactcagttctcccttaggartatttgggttatccattatcttggaatataattctatatcattttcctatctgaccttcgtatattaccacttgtgctaacaatttctctctggggttac

SEQ ID NO: 180180 - DNA, 201 bp, Homo sapiens
tggaaaccatcattctcagcaaactatagcaaagacaaaaaaccaaacactgcatgttctcactcataggtgggaattgaacaatgagaacacatggacamaggaagaggcactttttaaagctgtgaatatctgttttctcttgatagtttgtgattaccgtctctcttggtcccctcattttaccattttctgggtgat

SEQ ID NO: 180181 - DNA, 201 bp, Homo sapiens
atggatgaagctggaaaccatcattctcagcaaactatagcaaagacaaaaaaccaaacactgcatgttctcactcataggtgggaattgaacaatgagawcacatggacaaaggaagaggcactttttaaagctgtgaatatctgttttctcttgatagtttgtgattaccgtctctcttggtcccctcattttaccatt

SEQ ID NO: 180182 - DNA, 201 bp, Homo sapiens
gttttatgaatgtgtgtaaccagatcctaaatagaattgttttaatagaacttttttcattcttcaaggccttattttcccacagcttaatgtttttttttgctgatgtaaaaatgcacattacaagatgattgtttaaaagatcgtatctccatttcacctgttttcctaaacactttcaaagcactgaggaataatttg

SEQ ID NO: 180183 - DNA, 201 bp, Homo sapiens
aggctgaaggaagagaatcattttaacccaggaggtaaaggttgcagtgagccgagattgcaccattgcactccagcctggcaacaagagcaaaactttgwctcaaaagataaaataaagtaaaataaataaaataaaataaaataaaaataaatcaactgatattaaaaagtccccagtaccactttgtagtctaatgtt

SEQ ID NO: 180184 - DNA, 201 bp, Homo sapiens
tacgaatatatatatatatatatatgtgtgtgtatatatatatatgtgtgtgtgtgtgtatatatatgtgtgtgtgtgtgtgtatatatgtatatacacayacacacacacacacacacacacattttttagccgagcgtcgtggcacgcacttctagtcccagctactcaggaggctgaaggaagagaatcattttaacc

SEQ ID NO: 180185 - DNA, 201 bp, Homo sapiens
taaaaatacgaatatatatatatatatatatgtgtgtgtatatatatatatgtgtgtgtgtgtgtatatatatgtgtgtgtgtgtgtgtatatatgtatayacacacacacacacacacacacacacacattttttagccgagcgtcgtggcacgcacttctagtcccagctactcaggaggctgaaggaagagaatcatt

SEQ ID NO: 180186 - DNA, 201 bp, Homo sapiens
ccagtctgtactaaaaatacgaatatatatatatatatatatgtgtgtgtatatatatatatgtgtgtgtgtgtgtatatatatgtgtgtgtgtgtgtgtrtatatgtatatacacacacacacacacacacacacacacattttttagccgagcgtcgtggcacgcacttctagtcccagctactcaggaggctgaagga

SEQ ID NO: 180187 - DNA, 201 bp, Homo sapiens
tgtttagtttgatttctggctgtcttcttaaggatgcaaatactatatagcatcaaatactatagcatcattgatttttaaagccctgtaggctgttaaascctatggcagttttcacaagtaattgagctgtttcagcttgaaccaatctgattgtcctagcaaatcctttgaagtgaagttatgtaagcaaaaactgct

SEQ ID NO: 180188 - DNA, 201 bp, Homo sapiens
tcaggagttcaagaccagcctggccaacatggtgaaacccagtctgtactaaaaatacgaatatatatatatatatatatgtgtgtgtatatatatatatrtgtgtgtgtgtgtatatatatgtgtgtgtgtgtgtgtatatatgtatatacacacacacacacacacacacacacacattttttagccgagcgtcgtggc

SEQ ID NO: 180189 - DNA, 201 bp, Homo sapiens
tgaatgtcagtttcctcatctttaaagcaacaggtgctgggtttgtaatcccagcacttttggaggctgaggtgggcggatcatctgaggtcaggagttcragaccagcctggccaacatggtgaaacccagtctgtactaaaaatacgaatatatatatatatatatatgtgtgtgtatatatatatatgtgtgtgtgtg

SEQ ID NO: 180190 - DNA, 201 bp, Homo sapiens
ataaagtagtagtagtatttagaataatatactgaattaaaaaatgatttcttccaacattcatagtagaaagcattattaatatgataaatttggccggrcacagtggctcacacctgtaatcccagcactttgggaagccgaggcgggcagatcacgaggtcaggagatcgagaccatcctggctaacatggtgaaacc

SEQ ID NO: 180191 - DNA, 201 bp, Homo sapiens
atacgtaactaagatttacatctttatactaaataagaaacaatttattttcctgtaatgctcctcataagatctttaagttacattaggaaatattcatrtttatggaaggattggggaaattctacctaaatttatggattttttctcaataatttttgtaagctttgtataagatggaatatttgtaatttataatca

SEQ ID NO: 180192 - DNA, 201 bp, Homo sapiens
catagattctggatactagctttttttcagatgagtagattgcaaaaattttctcccattctgtaggttgcctgttcactccgatggtagtttcttttgcygtgcagaagctttttagtttagttagatcctataactaaactattttagagttgatcaacaatttctgtatatgcaaataatttaagtgtctatactaat

SEQ ID NO: 180193 - DNA, 201 bp, Homo sapiens
ataaataatataaatttatttgtcatagttctggagattaggaagtccaagatcaaggtgccaaccgatttagtgtctgataaaggcttctaggatggcaygttgtcactaagtcctcatatggaaaaagaggcaaatgatatatcctcacatggacaaaggggcaggacagctcccttcaacctcttttataagggcact

SEQ ID NO: 180194 - DNA, 201 bp, Homo sapiens
atataaatttatttgtcatagttctggagattaggaagtccaagatcaaggtgccaaccgatttagtgtctgataaaggcttctaggatggcatgttgtcrctaagtcctcatatggaaaaagaggcaaatgatatatcctcacatggacaaaggggcaggacagctcccttcaacctcttttataagggcactaatccca

SEQ ID NO: 180195 - DNA, 201 bp, Homo sapiens
ttccaaaggtttgggggagcaggtgtggactagtgagggttctctagagggacagaactaataggatatatatatatatatatatatatatatatatatakagagagagagagagagagagagagagagagagagagagagagagacagagagagagagagagagagagacagagagagagaggagtttcttaagtattaa

SEQ ID NO: 180196 - DNA, 201 bp, Homo sapiens
ggagattaggaagtccaagatcaaggtgccaaccgatttagtgtctgataaaggcttctaggatggcatgttgtcactaagtcctcatatggaaaaagagrcaaatgatatatcctcacatggacaaaggggcaggacagctcccttcaacctcttttataagggcactaatcccattcataaggatgaagccctcatgac

SEQ ID NO: 180197 - DNA, 201 bp, Homo sapiens
gtatttgcctttccgtacctggcttatttcacttgacattttatcctctagatttatctgtgttgccacaaatgacaggatttccttctggttttaatagycgaatagcattccagtgtgtaaataccacattttctttatccattcattggttgatggatgcttaaattgcttccatctcttgactgttgtgaccagtgc

SEQ ID NO: 180198 - DNA, 201 bp, Homo sapiens
ccactatacttcctgtacagcctgtagaaccctgagccaattaaacttttctttataaattacccagtctcagataattttttatagcaatgaaaaaacasactaatacatacctttaatttttctaattaaaggactaatactaatacctttcattagacctttaatgaattatagactaattctaattatagactaatt

SEQ ID NO: 180199 - DNA, 201 bp, Homo sapiens
ctccttctgtgaccatgtaagatgtgcctgcttcctcttcaccttccaccattattgtaagtttcctgaggcctccccagaagcagaaaccactatacttyctgtacagcctgtagaaccctgagccaattaaacttttctttataaattacccagtctcagataattttttatagcaatgaaaaaacagactaatacata

SEQ ID NO: 180200 - DNA, 201 bp, Homo sapiens
ttttaataatattaagtcttccaatctataaatatgtaatatctttttatttgtgtctgcttcattttttcattagcattttttcattactgttttatagwttttgttgtagtgatcctttacccccttgattgactttattcttagggggatatttttggctattataaatggggtaactttcttgatttcttttttaca

SEQ ID NO: 180201 - DNA, 201 bp, Homo sapiens
atggacattttaataatattaagtcttccaatctataaatatgtaatatctttttatttgtgtctgcttcattttttcattagcattttttcattactgtkttatagtttttgttgtagtgatcctttacccccttgattgactttattcttagggggatatttttggctattataaatggggtaactttcttgatttctt

SEQ ID NO: 180202 - DNA, 201 bp, Homo sapiens
catatatatactcatatttattctgacaacctatttaatgacatttctaacagcaacccccccacactacacacacacacacacacacacacacacacacmtacacacacagtggctaagcatatgtttgaaaacgtaaatcacatttaaagatctggcactgtctgctttgataaaccatttattattttatcagattag

SEQ ID NO: 180203 - DNA, 201 bp, Homo sapiens
tattttgaaatcaggtaattggatacctccatccttgtttttttgctcaagattcctttgactattctgggtcttttgtggttccatacaactttaggatwgctttttctattttttgaatgaatgccattggtgttttgataaagattgcattgaaattatatatcaccttggataatatggacattttaataatattaa

SEQ ID NO: 180204 - DNA, 201 bp, Homo sapiens
agcttaaaatacttgggggctatatattgatctgtaagctggatcacttaccctaaataatttatggattcccctactgcttcatatatatatatatatawgagatgtgcgatactgcatgaatgtgagaatttcctaaagtacctggaaacataatgcctcctaattcaaagtaataatagaaatccatgggcagcaata

SEQ ID NO: 180205 - DNA, 201 bp, Homo sapiens
agatatatcagcttaaaatacttgggggctatatattgatctgtaagctggatcacttaccctaaataatttatggattcccctactgcttcatatatatrtatatatatgagatgtgcgatactgcatgaatgtgagaatttcctaaagtacctggaaacataatgcctcctaattcaaagtaataatagaaatccatgg

SEQ ID NO: 180206 - DNA, 201 bp, Homo sapiens
tatggttagttgaatttccaggaggagagtctgcctccccaacctttatagccagctgcagaagaacggacagtgagcaggcaaacatagatgctttgggsttcagggaaactaacctcgaaagggtgggagctttcttcaggcaaaggtgttgctagcagaggagaggagctttggggactgaggtatgcctgccttaaa

SEQ ID NO: 180207 - DNA, 201 bp, Homo sapiens
acactctggggactgttgtggggtggggggaggggggagggatagcattgggagatatacctaatgctagatgacgagttagtgggtgcagcgcaccagcrcggcacatgtatacatatgtaactaacctgcacaatgtgcacatgcaccctaaaacttaaagtataataaaaaaaaataaatggttggatttatttatcc

SEQ ID NO: 180208 - DNA, 201 bp, Homo sapiens
gatttagtgtctgataaaggcttctaggatggcatgttgtcactaagtcctcatatggaaaaagaggcaaatgatatatcctcacatggacaaaggggcargacagctcccttcaacctcttttataagggcactaatcccattcataaggatgaagccctcatgacttacacacttcctaaaagtctccacctcttgaat

SEQ ID NO: 180209 - DNA, 201 bp, Homo sapiens
tgacaatattttttatcttattgagaaatatatatcaccattttattaaagatttaagctttcttagatgatttcatctaagaaataatacaactaagaaacaattaattagattagatctcatctaatatcgtttagttataaacatttgcatatctatattaaatactttccgtgttttcagcttttttgtatttaatg

SEQ ID NO: 180210 - DNA, 201 bp, Homo sapiens
cattcagaccatatcaaactaaaccttttgttatatgttgaaaatacaaagtcaaataaggaaagacctttactcttaagcctttctaccaaaatagggakgcagaggtgggtagggcaagagagaatcaaacaagtaaagaaattcagtagaagtaaaagatgccctgcatgggttatatggtataacggctgtttaaaa

SEQ ID NO: 180211 - DNA, 201 bp, Homo sapiens
aatttaagatggacattttgataatgagttagagttgaactgttaatgaacaacagtcattttctaaagctttttccttcttactgcctgttattaacctytattggaaaaatgtaaaaaggtaatctttccttatgtataaggcactttctcttaaataattagagtcccaaagcaatatcaggtgttcaagctacttgc

SEQ ID NO: 180212 - DNA, 201 bp, Homo sapiens
tgacattaatgttttttaaccctcattattaaccctgtgatggcatctcttggccttcttatcatgccttcaaatgtgtgattattcattcctaacaatgrttacatgtcacatttacctggaggatttgaaaacatgctttttcttagataccattcacccctgctccttttttactggtgctttaccaaatttctcagt

SEQ ID NO: 180213 - DNA, 201 bp, Homo sapiens
agggaatggagttgggcaagcacctgccagcctcaaaacccttctaagcaaaaaccaaaagccaaaatgaggttacacattgaggaacaccaatagcatakaactaagttatgttgggagaaaacactgttcccacagacctctaagacaaaatactttagcattaggcacaacagcagtcataatcagaggagaaaaact

SEQ ID NO: 180214 - DNA, 201 bp, Homo sapiens
atatcaccattttattaaagatttaagctttcttagatgatttcatctaagaaataatacaactaagaaacaattaattagattagatctcatctaatatmgtttagttataaacatttgcatatctatattaaatactttccgtgttttcagcttttttgtatttaatgtaaaacccacatattgataacttgtttaaaa

SEQ ID NO: 180215 - DNA, 201 bp, Homo sapiens
catctaagaaataatacaactaagaaacaattaattagattagatctcatctaatatcgtttagttataaacatttgcatatctatattaaatactttccrtgttttcagcttttttgtatttaatgtaaaacccacatattgataacttgtttaaaatgcataaaatcaacgcctttgatttgcctatttaataaataaa

SEQ ID NO: 180216 - DNA, 201 bp, Homo sapiens
aagagatagcagaagaaagtgaagtaccaggagaagcatcttgcctttcccaaaatatggatatgagaaatcagtgaattagttgataggagcagaatcastcataaaagggtttctagattttaagttgaacatcaggagaaagattttaaagggctgagtgctggggaaaggaattttaaccttgttctttacgaaaag

SEQ ID NO: 180217 - DNA, 201 bp, Homo sapiens
catattcataatataatatctaattgcttatccttgtaattgaatgaaactaagcacatgttagtaataaatgcacttctttggtcaactttgatttcaartgtagtttctcacacccctaactaaatagtccttaaataaccacgaattcaattcactgtcatcttatatgtggcctaacctgtttgaattgagggcatc

SEQ ID NO: 180218 - DNA, 201 bp, Homo sapiens
ttgcaaatatatttaaaggcatgaatcgttaatatttttcttatgtatttttacatgttacgattaaaatattctacattgcaggcaataccaaggctttrcattctagaggagaacaataaagtaatactatattataaacaaaactcaatactatcttagggtttagatgatcctatttttagtcaatattttaaataa

SEQ ID NO: 180219 - DNA, 201 bp, Homo sapiens
ttataaacaaaactcaatactatcttagggtttagatgatcctatttttagtcaatattttaaataaagctataggaaaatatatttggcagtaagttgcrtgtcagcctggatgtcacattgtcttcaaagttgagttaatatagctggatgtagtggcatgggcctgtagtaccagctacttggcaagctgagatggga

SEQ ID NO: 180220 - DNA, 201 bp, Homo sapiens
acattgtcttcaaagttgagttaatatagctggatgtagtggcatgggcctgtagtaccagctacttggcaagctgagatgggaggattgctagagcccargagttcaaggccagcctgggcaatatagtgagaccctttctctaaaacaaaacaaaagtagactaattaggcatttgcaacaaaaacagatataactaag

SEQ ID NO: 180221 - DNA, 201 bp, Homo sapiens
ttcttctatattacaaacataattaacatcatttacactaatatctttgttgttaaagtggcattttccaagaaaagttcacttcaaggagaaatatcacygagagtagaggatgatctagcctagcagttttgaacagtatgggtggaaaattcatgtttggtttaaaaacaaaaatataaactagtcttcttaaaaaat

SEQ ID NO: 180222 - DNA, 201 bp, Homo sapiens
gtaaaacatttgtaatttactcacctggttatcttgcaatatactgtacgttgtcattgactatagtcatcctgctgtacaatagatctaaaacttattcytcttgtcagaaactttgtatcctttgctcaacaacttttcattccctctcacctgctgccacctgcccagccgctagtaaccaccattctactttctact

SEQ ID NO: 180223 - DNA, 201 bp, Homo sapiens
agctacttgccatcaaaacaagaacaatatttctttgcagtatattcatttgtacttctcactgaatttgaaatgaaattgggtggctttaacaatttatrtatttttaacttcaatatttttcaaactctatttgatattgctgtgtattggtgaatataaatgtttccttgtcaatttccttttataactttccttgct

SEQ ID NO: 180224 - DNA, 201 bp, Homo sapiens
ttgctgtgtattggtgaatataaatgtttccttgtcaatttccttttataactttccttgctgtattggaatatatagaggcaaatatggtattcagtttytctattatataccatcaccaaagtcaatagttattgatatcagatatctgtatcttaatttattttatgtttgcatcttactcaagtaattgaaatatta

SEQ ID NO: 180225 - DNA, 201 bp, Homo sapiens
actcagtaagcagatcataatggaataaggaagttgagctctttgcagcattaaattctctcttaactagccctgaagcttatgtagatttaacatgctcrgttctgatcttgtaaatttaagtgtaagattgaaagaaatggcattctaaaatagaatgtctcagcccaaatttttgggttatgacaggctttctgaaaa

SEQ ID NO: 180226 - DNA, 201 bp, Homo sapiens
gaagggaagagatagcagaagaaagtgaagtaccaggagaagcatcttgcctttcccaaaatatggatatgagaaatcagtgaattagttgataggagcasaatcagtcataaaagggtttctagattttaagttgaacatcaggagaaagattttaaagggctgagtgctggggaaaggaattttaaccttgttctttac

SEQ ID NO: 180227 - DNA, 201 bp, Homo sapiens
acttgaataagagttaagaggccttgaaatatgggagttttatggacatgtgaaaattggaagggaagagatagcagaagaaagtgaagtaccaggagaarcatcttgcctttcccaaaatatggatatgagaaatcagtgaattagttgataggagcagaatcagtcataaaagggtttctagattttaagttgaacatc

SEQ ID NO: 180228 - DNA, 201 bp, Homo sapiens
aaataaacttgaataagagttaagaggccttgaaatatgggagttttatggacatgtgaaaattggaagggaagagatagcagaagaaagtgaagtaccasgagaagcatcttgcctttcccaaaatatggatatgagaaatcagtgaattagttgataggagcagaatcagtcataaaagggtttctagattttaagttg

SEQ ID NO: 180229 - DNA, 201 bp, Homo sapiens
ttcagtagaggtactggagatttgatgtgctcataaataataaattacaaaacagaaagtggtacctgctgtaagagaagcaccaaataaacttgaataakagttaagaggccttgaaatatgggagttttatggacatgtgaaaattggaagggaagagatagcagaagaaagtgaagtaccaggagaagcatcttgcct

SEQ ID NO: 180230 - DNA, 201 bp, Homo sapiens
gatttgcatttctctgatgaccagtgataatgagctttttttcatatgtttgttgacagcataaaggtcttcttttgagaagtgtctgttcatatccttcrcccacttttttgatagaattgtttgttttattcttgtaaatttgtttaagatctttatagattatggagattagccctttgccagatggatagattgcaa

SEQ ID NO: 180231 - DNA, 201 bp, Homo sapiens
gaatggtattgcctagggtttcttctagggtttttatggttttaggtcttatgtttaagtctgtactccatcttgagttaattttttataaggtgtgaggraagggtccagtttcagttttctgcatatggttagccagttttcccaacaccatttattaaatagggaacccttaacacagacaaatggaaaatcattcca

SEQ ID NO: 180232 - DNA, 201 bp, Homo sapiens
agctactgaattttgtctgtgtgctagaatctctgcaaagtatttcacatataatgttttcagtatacccaaagtgaattccatgaacctttcacagtagyaaacatgaaaaaaattttaataatgacaattatgggttaaaaagctaatggatataaatgataaataattgagatcaaacctaataatttccagataaaa

SEQ ID NO: 180233 - DNA, 201 bp, Homo sapiens
aaccacaaatgaatctaaattagaaattgaggatcaagggatatatggtagactgctctctgaaaggttcaacaggtactgtttccaaactatcttaagasactggagaagaatacactgtataaaaacggcctgagccattagaaaattaaggctgaaatggatgttatgatgtttccttttacactggcatttgtacac

SEQ ID NO: 180234 - DNA, 201 bp, Homo sapiens
aatctcaaaatgtgaaatttaacaatgcaaggcaaaaataacttttccttgtacttaaattgtaaaattaaactattgttctctttgttgataagacttgytattttacttcattcaggttgttaaaaaaatatagacttggtggctaacaaggaacagacatttatttcttacaattttggaggctggggattccaagat

SEQ ID NO: 180235 - DNA, 201 bp, Homo sapiens
cattgattttgccgcttcctctcaccacttcttgtggttttcatagaagttctgagtagcaatgctgcagaggcaactcttccaagactaactcgttcagyttacggagctccagagtttatgttatttgtaaagctgacttcctcagatttcatcagatatctttgagaaacaaaaagaccctgacatgacctttctcat

SEQ ID NO: 180236 - DNA, 201 bp, Homo sapiens
gacctttctcattatgtattctgttgacattgcaaggagaaagaaaaacccacagaatactgaacaatgcttatcgtagttaaaagaagaaaacacattcyataattatgtgcttaataaccctcatgaggctgggcatggcggctcacacctgtaatcccagcactttgggaggccgaggcaggtggatcatgaggtcgg

SEQ ID NO: 180237 - DNA, 201 bp, Homo sapiens
catatatatatccctcatatatcatgagtcctaattttgagtaacttatgtaataacagactattatttctatggatactgtggatctgactcttaaaaartggacatttttaagggtagctatttaccaagatgaggtttttctctgccaaatgattaagtgtacaatcagaacatatttatcctttaaagttaaagtta

SEQ ID NO: 180238 - DNA, 201 bp, Homo sapiens
gacaataaaatcagttttgtgtatgacaacttgttatctccatgtacatgccaaacataaattaggcaagaggtaagctaagcctatctgagaggtttgtrtgaagatgtgcatacaggataatattgacaatatgtccatattttcaaattttaaattttacaatactaatcactgacatttatgttcctcaactggaag

SEQ ID NO: 180239 - DNA, 201 bp, Homo sapiens
acatttgtacagattgagaagataagaaaatagatacaattttaaattctagatcaataagctttccagaaaatgttgtatttggaattgatttttagtgmagtaagctacaaattgagtaatatctagaaatattcaaaggctagatgttaatcttttagcgatgttctagtgagaattgaataagaagctggatttgat

SEQ ID NO: 180240 - DNA, 201 bp, Homo sapiens
ggatttgaaactggttgtgcagggttaattttgggcctaacactcatacagtgttaccaggatcttaggacacaaaatcatcttctgggccataattgagrgcaaacactgagaattcttcctatgttgtaccagtgtgattaagatgctactgccttcgctatatcttactcaccttgtctgaccaccaatttttttctc

SEQ ID NO: 180241 - DNA, 201 bp, Homo sapiens
gtgaaacaatatttttttaagttgtatcttttatctctcacttttatgatttgtgactatcttttcagcaagcaataaaatgaatcattacacaggtcaartcaacaaactgatatggaattcttgtaaagagtgcaaataagaacatgtcctagcttttagttttaaagagtgtattatccaataattaaaggattttac

SEQ ID NO: 180242 - DNA, 201 bp, Homo sapiens
acatgtggaacacaacccaggttagccttgtaaaaacataagtgggagcaatttgagtaccatactgttcaaagtaaagccttaaagctaaattatcctcygaatttgtccctgatatttatttaattttagggtgaaagaatgaggaggccaagggccatagctggactaatcaactattttgaatatccactcgcaaat

SEQ ID NO: 180243 - DNA, 201 bp, Homo sapiens
gagataggaacttacgatgcaggaatggatatctggggtggagagaatcttgaaatgtcttttagggtaattgcattttattttattttttgatgctgaayatacaatgctgtagcatgcacataccagtcccagtaatttactgtcaaatcatttttgctgagtgatgcaaattactgatcaattggttatcttaattca

SEQ ID NO: 180244 - DNA, 201 bp, Homo sapiens
tctccatggagttaactctctgtcttttacttcctagctactcattaatttggggactgcatatattaagttgtgtttagtctatccttaatgagtagggktttttttgttttttttctttattttaaacatatatatgcataaatatacttgatgaacgatattatgaaatattaactctctttgaggcaaactatagcc

SEQ ID NO: 180245 - DNA, 201 bp, Homo sapiens
aaatattaactctctttgaggcaaactatagccatgtctatatgacaacaggttctgcgtcatcagatctgaaaaaaatcgattaaaaaactaacagggcyaaagaaagtattgtttctaagacactggaatcatttatttttgtttctttttattcagatactttggttaaatgcaaatatggcatatcctttctaaagt

SEQ ID NO: 180246 - DNA, 201 bp, Homo sapiens
cttgtaaatttaagtgtaagattgaaagaaatggcattctaaaatagaatgtctcagcccaaatttttgggttatgacaggctttctgaaaaaaaaatacwttgtgaactaaaattgaacacaatctgagggcaaatgaaggagatgaggatttcaggagccaagtgacaactcttggtgcttaaaatttgcatttgcatg

SEQ ID NO: 180247 - DNA, 201 bp, Homo sapiens
cagtgatgaggtacggaaatatcgggcatgagactatctgactctggcagtaaaaagactgtaactctgtgactttgcctccttttcaaatcagtacctcrtatttactttatatgctaaagagctggcttcaaaccgtcaaatggtacatgcattaacatggagaaggtttattttggaagaatctcatgtagaaaaggc

SEQ ID NO: 180248 - DNA, 201 bp, Homo sapiens
gaagatgtttcgacattagcatatgcattttgtattgtgtacttaacctcggggtttctttttcctcttgtatcctttagccatagtaagtagttaaagtwcttgcctatattggtattgtatgccttaaatattgctgaagagcaaatttacataatggaaaatagacatccatgaagctgctaggctgcagagattaag

SEQ ID NO: 180249 - DNA, 201 bp, Homo sapiens
tgcattttgtattgtgtacttaacctcggggtttctttttcctcttgtatcctttagccatagtaagtagttaaagttcttgcctatattggtattgtatkccttaaatattgctgaagagcaaatttacataatggaaaatagacatccatgaagctgctaggctgcagagattaagggtaaaatcagttactgccaaat

SEQ ID NO: 180250 - DNA, 201 bp, Homo sapiens
tggcttagaaagtcttctattcttaggaggtgtacagacccagacgtgtctgtctatgaaggccagattttagccactataatatattgtatcccaggatratttctatttcagaattattggctagtcagaagtactgaattagagtaaagtcagaattgcactatttgacaacctggagctataaagaatatcatgata

SEQ ID NO: 180251 - DNA, 201 bp, Homo sapiens
ttagaggctgtgtaattattgatcgtgtcttgcaattgctctacttaagaatatgagaacaattttttctgttttatgtatttattttattttatttttaygtatgtatgtattttttttttttgagacagagttttgctcttgtcacccagactggagtgcaattgtgtgatctcagcttactgcaacctccacctacca

SEQ ID NO: 180252 - DNA, 201 bp, Homo sapiens
attacatataatatttgcacactgaattaagatatattctaagcactcagggacactgataaaatgtatcaaaccggatcacaaggtcaggagttccagaycagactgaccaacatggtcaaaccctatctccactaaaaatacaaaaattagctgggcgtggtggcacaagcctgtaatcccagctactcagaaggctga

SEQ ID NO: 180253 - DNA, 201 bp, Homo sapiens
actaattgtatattaattgcctaaaaatgtttatgttttaattacaggaaacattcaccaaaattaaatgattgttatattttacaaattgatttaactgkagtttcaaaataatgaaagacttattgttggttacttcagttcagcaagtgaattgtaaattacatataatatttgcacactgaattaagatatattcta

SEQ ID NO: 180254 - DNA, 201 bp, Homo sapiens
agcctgaattcttggcaatgcttgataaatgtcagtcagtttctttagccatctgcaaataaaggtatattagacaatgatgacttcataacagtcaaagwtgtataataattaatccagggacacctgtgcacagttccttttacaaagctatcacagtgtattatactataaaaatcataaaggattttttaaagaaca

SEQ ID NO: 180255 - DNA, 201 bp, Homo sapiens
ccagcatgttcagagatcttgtagggaaagaaaggaagcaagagtgagggagatgggaagtgccagtttccttttaacaactagctctcagggaaactaaytgagtgagaactcagtcattactgcaaggatggcaccaagccattcatgagggacataccttccttcacttcccattaggcccctacttccaacattggg

SEQ ID NO: 180256 - DNA, 201 bp, Homo sapiens
ttttgttttttttgagacggagtcttgctctgtctccaggctggagtgcagtggtgtgatctcagctcactgcaacctccacctcccaggttcaagcgatyctcctgcctaaacctcccaagtagctgggactacaggcatgcatcgccacgcccagctaatttttgtatttttagtagagagggggtttcaccatgttag

SEQ ID NO: 180257 - DNA, 201 bp, Homo sapiens
acagggccacatattaaattacttctgaatggtgaattcatcttacaaaatgttccaagttttggacaaggaaaaacattacattggatattgaattcatrgagcctttacagaagcatcacatttaaaccaatgtgaattcaaaaaagagaaggaaactttttaaattcaatttagagtacataaaaaaagaaatccgcg

SEQ ID NO: 180258 - DNA, 201 bp, Homo sapiens
caggctgtacaagaagcatggcatcagaatctgcctggcttctgataaggggctcaggctgcttccactcacggtggaaggtaaaggggagccagcatgtkcagagatcttgtagggaaagaaaggaagcaagagtgagggagatgggaagtgccagtttccttttaacaactagctctcagggaaactaattgagtgaga

SEQ ID NO: 180259 - DNA, 201 bp, Homo sapiens
tattaaacttttctattggtgagaaacataattttggcacagttatgtttcaaatatatgttattgattgcaaagagaatgaatctttacacaatgctaarcaaacaaatacacataccaggtagatagtgactcagtgatatcagcattttacatactaaattattgcttgtagtctcagaaaatagtatttaatcccta

SEQ ID NO: 180260 - DNA, 201 bp, Homo sapiens
ctataaaggaatacctgatgatgagtaatttaaaaagaaaaaaggtttatttggctcacagctctgcaggctgtacaagaagcatggcatcagaatctgcytggcttctgataaggggctcaggctgcttccactcacggtggaaggtaaaggggagccagcatgttcagagatcttgtagggaaagaaaggaagcaagag

SEQ ID NO: 180261 - DNA, 201 bp, Homo sapiens
agtaattacactaaatttcaattctaatttcttaacaaaattgaagagatcactctgacacttagtagcagtcatttatataatgttattggtgtaggtgkttacacattgcagatttcttatctctcatactctcagctaagtcccccaaattagatactctggtggattgcatttgtttggatttatactcattgtctt

SEQ ID NO: 180262 - DNA, 201 bp, Homo sapiens
tataaatacatatatttagatggagtctcactctgacgccaggctggagagcagtggtgtgatctcggctcactacaacctccacctcccgggttcaagcrattctcctgcctcagcctcccaagtagctgggactataggcatgcatcaccatgcccagctaatttttgtatttttagtagagatggagtttcaccatgt

SEQ ID NO: 180263 - DNA, 201 bp, Homo sapiens
tgaaagccagaaaacaaatgtatttttgtagcacttttgtagaaactcctggctttatgttactgtctctcactttccaataatgctttttttaaataatrgaatttgttatgtgtttctgcaaattgcatgatatcctttgtgaatgaagtagatactaattaactatttctaaacagaccgctacaatacagtgtgaaa

SEQ ID NO: 180264 - DNA, 201 bp, Homo sapiens
agtgtgaaaagttttaccataactgaaaatgtgttaataaagaagtggctacaggctgtgtctcatacactgtaattcttttcagtagccttgcatctctmattgattttgcagtactaaggccttcatttcttctgttacattccaatattcttttctcttgttttatctttagcattaatagatatgaagaaaaaaact

SEQ ID NO: 180265 - DNA, 201 bp, Homo sapiens
tttaatacctttataaagaaaattatttctaagcatttctttgtggttgcctaagtgaaacaatatttttttaagttgtatcttttatctctcacttttaygatttgtgactatcttttcagcaagcaataaaatgaatcattacacaggtcaagtcaacaaactgatatggaattcttgtaaagagtgcaaataagaaca

SEQ ID NO: 180266 - DNA, 201 bp, Homo sapiens
cccattcgttttcttggcttgccatacctggagtagagctttcaccatagaagtggggggtcagacaaaggaataaagcctagacctctcagccattgttkcctggaagagattctgaaacagagatttgggaatgggggctgagaaacactggtgctctgcccttgaagagaagataccacctctcttgactaggaatgg

SEQ ID NO: 180267 - DNA, 201 bp, Homo sapiens
tttgtcccagaccttacaatgagaacacaaggaagattggggcatttttctggttcagatgaaccacttaaagattgttagtggaggaaacaattgagctyagaagtcttggaacaaggctagaaatgaaattatggatgaggggacaacatatggggtactattttacttagaactatattcaagccaaagacattccaa

SEQ ID NO: 180268 - DNA, 201 bp, Homo sapiens
atgaattaatcagcttttattttataatagtaagaaaatatatagattttaaacattgttctaatagaaattgctatttttaacaacttaaaatttatttyataaatgtaagcccaaaatatcagcacaaaagaaatgtcaaacttgatttacccattccattctttggaaaacctagattttctatcctacagaatgtac

SEQ ID NO: 180269 - DNA, 201 bp, Homo sapiens
caatgacatatttgatatatgaaaaatcatactttttttaaaaagggatctaatagaagtatgcaatggtaagtgatatttttgaaagagaatatatacayaaaagaccacaggtacgtaacaaaaatgaaacaattttgttgatttttaactagaactgtctagaaaaaatacatattgtttttgttatgcatctttatt

SEQ ID NO: 180270 - DNA, 201 bp, Homo sapiens
atatttgtgtgatttaagatattaaaaatctaaaatacaacatttaaaaaaccgaatctacagtattgggtaatatttttggttatagaaagcaatcacaraattttcacattggactcttttgcatgaggatttagggttcttaatttgataagccagacaaattattatcaatattatttacaaagatgaaaaaaaaac

SEQ ID NO: 180271 - DNA, 201 bp, Homo sapiens
atcaatattatttacaaagatgaaaaaaaaacctcaggaaggcccaattgtttgcagtagctataaaaatggcctaaattatcttaaactgcataaacagkttataatattgtgataatatgcagtaactgactctttgtgtattttactactagggctatatttgaagtctagtgctcagatatttgatgaaggctctta

SEQ ID NO: 180272 - DNA, 201 bp, Homo sapiens
aacctattctccattccatcatttcttacaacagtgcagtccacgatgttttcagtcctaatctaagcaaactacaatcgtctggctgctgttcctctacsatttttatggcccaccccttacatttactttcatcccattttcaatgtagtatcatgagccaaaaaaaaaaaaaaaaaaaaaaatttctttgcctttaat

SEQ ID NO: 180273 - DNA, 201 bp, Homo sapiens
gctggattatgttatgttgtaaaattttatttttaatgtgtataaatttatgtacttgtatagccatataaggaaattttatttatatttaatttttaackttctgttcttactactgacttgaatgaagacaaagagcatttttattatgtgtgtaaaacatggtccattttgaaaggatattgattatgatggctaaaa

SEQ ID NO: 180274 - DNA, 201 bp, Homo sapiens
gtatctagagtgctattttcaagatatatttgcaaatcatctctcatacattcaaatacttcgcttctggttggagaggttttcatataatatgatcctargtattgcccatgaaatagcagaaatatatataattagtatgtataaatcatgttgatttaaaatgtatatctgaaaagtccaaaaatgtgatttccaatg

SEQ ID NO: 180275 - DNA, 201 bp, Homo sapiens
taaatcacttatttaattcatttataaaaatgttagtaaactgcttattcagaatcagtcatttctgttagaagataaaagtaatggttaaactgaaaggycttttatttttttccactatattgaggtaattttaactattcattgagataagagatattaactaatgactttgatgaaatgaaacaaatgactagttaa

SEQ ID NO: 180276 - DNA, 201 bp, Homo sapiens
cagttccttttacaaagctatcacagtgtattatactataaaaatcataaaggattttttaaagaacagattttatctgatgtgctagcaaagctaaagaygaaataagctgcactgattattggttatcttttacagagactcacgttgcgacatgttaacagtaaccaatgtctcgatgaaccttctgaagaagacaaa

SEQ ID NO: 180277 - DNA, 201 bp, Homo sapiens
agctaagtacagagaatcttgctgccagcagaggcatttcatgcttcatgtctggaaaaaaaaaaaaaaaaaaaaaaaaaagctataatttagttgtgtaygcttgttcagatgatttcaagttggtgcttttgatagtgcaagttccagctgctcaggcctatgagtcctcttgtgaaaaattatgaaatcccagccaag

SEQ ID NO: 180278 - DNA, 201 bp, Homo sapiens; identical to SEQ ID NO: 32041

SEQ ID NO: 180279 - DNA, 201 bp, Homo sapiens
cagtttcagggtattctgtatttttttgtgaacttacttttgccagtgagttttatactttcatatcatgttgtattgcccattagtattcttttgtttcrgattgaagaacctattttaacatgtcttctaagaagggttgatgttgaaattctccctcttttctttgtctgggaaagtcttcatttctcctaactgttc

SEQ ID NO: 180280 - DNA, 201 bp, Homo sapiens
aatgaggtcaggataacacccaattttctaatagatactcatgagaaattgtttcaggccaattggataatagtagctgaaaatgggagaagtactttgcwggtgagaaaaaaaactcctctctaatatctgaagggtctgaacagtctgcagtctgtgaattcttgaaactcactagctgaagctccttctcagaagaca

SEQ ID NO: 180281 - DNA, 201 bp, Homo sapiens
agaggaaaagtgtaatctaatatttcaaaagatgctaaaataaatgctctaaatgatagaatatagaaaagaacaacataaatttagaaaaactgaaatgygcaagtataatgcaggaaagaattagaaatcaaagactaaatcatttcagaaatgaaggccaaacttgtaagaacacatgagtgaataataccgagagca

SEQ ID NO: 180282 - DNA, 201 bp, Homo sapiens
aatagtttgtatgatataattatttaaataatagtctgcgagtaagaacaggatagttgtttctggaattaaggatgattttatatatatatatatatatwttttttttttttttttttttttttgagacggagtctcgctctgtcgcccaggctggagtgcagtggcgggatctcggctcactgcaagctccgcctcccg

SEQ ID NO: 180283 - DNA, 201 bp, Homo sapiens
cattggctctgctgatcagtgtcccatgaatcctgccaattgctgcttcactgattgctgactgctgcctcattaatcacccactgccatcttctgtcttygccccatgttgggtgccaagctgatgcagggcaggagagccccagagttgagcttaatccatgaggattcttggctttgcccaggaaacaattcaagggc

SEQ ID NO: 180284 - DNA, 201 bp, Homo sapiens
tatataaaggggagtttattaaggagtattgactgacacaatcacaagatgaagtcccacaataggctatctgcaagctgaggagcaagaaagccagtccgagtcccaaaacctcaaaaggaaagctgacagtgcagccttcaatctgtggttgaagttacaacagcccctggcaaaccactggtgtaagtccaaaagtcc

SEQ ID NO: 180285 - DNA, 201 bp, Homo sapiens
cattttcctagattcctccttctcgcccacagtcttcaaatgaatctccaactcctttcttttccaccttctaattgctctcaaatccattcatttgtctycatttccagattcaccttcatccagacaacctactgattatcctaatggggctctgtcctagtctgttttgtgttgctataacagaatatatgatgctgg

SEQ ID NO: 180286 - DNA, 201 bp, Homo sapiens
gcctatgtcctgaatggtattgcctatgttttctcctaggggttttatagttttgggtatgtattcacatatttaatccatcttgagttgatttttgtatrtggtataaggaaggggtccagtttcaattttctgcatatggctagccagttgtcccagcactatttattaaatagggaatgctttccccattgcttgttt

SEQ ID NO: 180287 - DNA, 201 bp, Homo sapiens
tgaactatctacatgagcacatgtaattagtttaaatgaaaaataagattaaatgcttaatacatgggaaacacattttcaagaattaatatgattcttakgtgaactgcttacattttcctagattcctccttctcgcccacagtcttcaaatgaatctccaactcctttcttttccaccttctaattgctctcaaatcc

SEQ ID NO: 180288 - DNA, 201 bp, Homo sapiens
ggaatatgatgctgaggtatagtattttcttaatttacttattatttgatgcttaagctcagttatatatttcaacattcaacatttaaatcttaagctgktttttatctacattggcagaattagattttcaagcatgcaggctcatatccggtaacattaggatggcatatcatataaacaggtttcaccaaattggtc

SEQ ID NO: 180289 - DNA, 201 bp, Homo sapiens
tcctaacagtcttggcctatgctcattagccgtttggtaatattgacaaagttggtagagtctatttatgtcttctaaatagatgtgtaaataaaaaataracatactttgaaatagtgttcaagaatagatttttttttttcacatttgtttagtttgatttctggctgtcttcttaaggatgcaaatactatatagcat

SEQ ID NO: 180290 - DNA, 201 bp, Homo sapiens
tgattataggggattctcttttactttcttcttctatgattactttttgtaatatctataactagaatgccaatgattgctgagtgttaaaagaaattcaracatatgattaatgtttggagtaaagagtaattaatgcccataagcattttttcaattttaaattttagctaagtacagttcaacaatatttatgtagca

SEQ ID NO: 180291 - DNA, 201 bp, Homo sapiens
aggtcctatgaaactaggccactaggcagtttccagggtagcaaagtatagttcctttccaatgagtaaagcaataggtgcagatcgtgaaaggaaatatytgggccatgtcctgttcacctctcaggttgcttgctcagctgtaagctttggtgcaatgctatacagattcaacatatattctcgtctatcctttattac

SEQ ID NO: 180292 - DNA, 201 bp, Homo sapiens
attctcgtctatcctttattactccaaactcttatggttactaaggcactcattttataacacaatgggatataaaataaataagaattatttgccagaartaattcctgccttaaattggacaactcagatgaattctaaatgcttatttttgtgagaaaatagtatttgtccaaataaaaaattaagatttaccattta

SEQ ID NO: 180293 - DNA, 201 bp, Homo sapiens
gttaattggtgtcctgacacatagcttctgcataattccttcaggtgttagttcattgtccagatgatttaatatctttgagtatcattcggtctcatccytactttaaaataactggaattattagatctgctactagatgatgctataggagatatttacatagaataatatatgttactgtatcacaaatttgtgttt

SEQ ID NO: 180294 - DNA, 201 bp, Homo sapiens
tttttgcaaccctacacattttcactggaatgcccaagggatctatggaacaaagaaaggtcaagaacccctattttaaaattgccaataacaagctaacrttcacacatcacccccaattcattcttatccttaactatttttttaattatgcttaatgcctatggtttccctacagaagagaaacagaaaacaacagtt

SEQ ID NO: 180295 - DNA, 201 bp, Homo sapiens
ataaaccacaaaatacatagattaaagtaatctctggataccacatctataaaacatggtcttgtggtcttattagcaaagtgctagacaaagtagcgatwtgaagtttctttcgactctgagaacaggtattatattctatataatgccaacatatatgtatgtataataaggatgaatatttatatttattcttaatat

SEQ ID NO: 180296 - DNA, 201 bp, Homo sapiens
caactccattactggtatttggtattaggtacatatccactcctcttctggcttctggctctgggacatacccagctggcataattggtagtgtggagaarggagacaaatagtcttcctacaaaccagaagaggttcttaagaggcattccacctttccaaccactgtgacattgagatggcttacagtaatctcatgct

SEQ ID NO: 180297 - DNA, 201 bp, Homo sapiens
agaatcttctcaactgatattcttgctttttgatttctatcagaaacaaccatttcccttgctattattgattagttataaaatgccatcctttcaccatrtagtccagatactattaataacttcttgttggctccaggacaaattcaacattagtagcatagttatcaaatccttggtagtaatgactatgaagagcac

SEQ ID NO: 180298 - DNA, 201 bp, Homo sapiens
catcacattctgaatttactgccaattttaagaagtctttatttttatagaggatttgccataaatacatacaatttttcctttaaattaatgctaaactrttgtttcaatgaagtgttattgagtgcttactatgttcaaagcattagcctaggttttaatggagaaacaaagaccaggaacatctctgtcctcgcttaa

SEQ ID NO: 180299 - DNA, 201 bp, Homo sapiens
taatgagtaatgtcaagatacattgtaggaaatctcccaaacttaaaagataaaaaaatcagtttggcttcgagggaaatagatacttgtaagaattaagrgggggaaaatcccagattgtcatcagagttttcaaaggaatcctttactctggaagtaaatggagtaacatttaaaaggtagtcaagtttggtgagtcat

SEQ ID NO: 180300 - DNA, 201 bp, Homo sapiens
tttctgtctttatgtttatgtgtacccattgtttagcttcacttataggtgagatcatgtggtatttgattttgcgtttgagatattccacttaggataaygactttcatttccatccatgttgctgcaaaggacatgattttcttttttatttctgtgtagtgttccatggggtatatataccacattttcttcatccag

SEQ ID NO: 180301 - DNA, 201 bp, Homo sapiens
tcatggattttagatctatcaaagtgattttcaagtatagcagccacagatatatttatcaacatgcaagaactcaagactattgttcctggtaaatagaratagcatttgcccactcgttcaggcccaaagcttggcatgtttcttgatgtctttatttgtcttataactcacattcgattcaatggaaagttccagtgg

SEQ ID NO: 180302 - DNA, 201 bp, Homo sapiens
tttaaaaatgagattttcatcatgcattccattggtgtgaaaacgaaagtaagctgctgcttggttccagttgtgctgaaatttctgctaaaaatagcacragggggaaaaaagaacttgatgattacatgtctttttttgttttttttttttgtatttcagctttttttgttttgttttgttttgttgttgttgttgttg

SEQ ID NO: 180303 - DNA, 201 bp, Homo sapiens
gaccttccacccccattgttattctgttaatcaccatcatctcttgctggcatgactacagtggccttcttccttgtttctctgcttccagtctttcctcyctctaatctgctctttgcacagcagccacaataagctactattataccatgcctatgctaaaactctcatgattccttacattacttagtctgggatacc

SEQ ID NO: 180304 - DNA, 201 bp, Homo sapiens
tgcggacccttgcagtgagtgttacagttcttaaagatggtgtgtctggagtttattccttctgatgttcggacgtgtctagagtttcctccttctggtgsgttcatggtctcactggcttcaggagtgaagctgcaaccttcacagtgagtgttacagctcttaaaggtggcgcgtctggagttgtttgctctttccgtc

SEQ ID NO: 180305 - DNA, 201 bp, Homo sapiens
tactggcttgttaaaaggccagaaccacaggaagctgataggaaagcctgagaccaaatttgggggaatttagaagctgggccaatcctcagtgctatagytgctaggagggctcatgttgtgtccagaattggtggattcttggtctcactgacttcaaaaatgaagctgcggacccttgcagtgagtgttacagttctt

SEQ ID NO: 180306 - DNA, 201 bp, Homo sapiens
gcctcacaatcatggtggaaggcaaaggaggaggaaagtgacatcttacatggaggcaggaaagagcgcttgtgtaggataatgcccctttataaaacatyggatctcatgagacttactatcacaagaacagcagcatgggggtaaccacccccatgattcaagtacctcccaccagattcctcccacaacatgtgggaa

SEQ ID NO: 180307 - DNA, 201 bp, Homo sapiens
tgttgcctatacttttggagtcctagccaagatatcattgcccagactaatatcatggagttttttccccatgttttatttgagtaactttacagtttcargtcttatatttaagtctatattttatccaatttgagttgatgtttgtatatggtgtgaaatagtacagttttattcttttgcatgtggatatcaagtttt

SEQ ID NO: 180308 - DNA, 201 bp, Homo sapiens
ccagtctaactgaagttttttgtcctttgaccaacatcttctctttccccatctctccccgattccctgtaatctactttctctttctatgagattgactsttctagattcctcatgtaagtgaatttataaaatattaatctttctgtgcctggcttatttcacttagcataatgtgctccagttccatccatattatca

SEQ ID NO: 180309 - DNA, 201 bp, Homo sapiens
catatttgagggggaaaaacacatttattgcctcataataagttttatagtctcagctcctttattctttctcttgttcatagaatcatatttttattatrttcttttaatacaactaaagtaaaataagcttgcctaagtaggaaaagttttatttaaatttcggagggttatatcattcccatctaaaaatatgatctc

SEQ ID NO: 180310 - DNA, 201 bp, Homo sapiens
tgtgataaacaaattagtgcaggtgtctttatgtatataatgattttttttttcctttgggtagatacacagtagtggagttgctgagtcaaatggaagtyctctttttagttctttgagaaatctccatgccgtttcccatagaggttatgccaatttacattcccacctacaatgaaaagtatcccattttctctgcat

SEQ ID NO: 180311 - DNA, 201 bp, Homo sapiens
tttgggtagatacacagtagtggagttgctgagtcaaatggaagttctctttttagttctttgagaaatctccatgccgtttcccatagaggttatgccartttacattcccacctacaatgaaaagtatcccattttctctgcattcataccaacatctgttgttttttgactttttaataatagctgttctgactggtg

SEQ ID NO: 180312 - DNA, 201 bp, Homo sapiens
ttaataatagctgttctgactggtgtaatatgtattttattgtggttttaatttgcatttgtctaacaattagtgatgttgagcattttctcatttttatyggctgcttgcatgtcttactttgagaaatgttggtttatgttctttgcctacttgttaacgggattatttgttttttcttgttgagttattttagttgct

SEQ ID NO: 180313 - DNA, 201 bp, Homo sapiens
aaagttcaagaccagctcaggaaacacagtgaaaccctctctctacaaaaaattttaagaaattaggcaagcatgatgattcatgcctgtggtcccagctrcaaggggagctgagactagagaatcacttgagcctggtaggttgaggctgcagtgagctgtgttttccactgcactccagcctgggcaacagagtgagac

SEQ ID NO: 180314 - DNA, 201 bp, Homo sapiens
atgaatgccttttatttctttctcttacctgattgctctggttaggaattccagtactgtgttgaataggagaggtgaaagtgggcctttttgtctctttycagttcgtagggggaaagttttcaacctttccccattcggtctgatactggctgtgggtttgtgatacatggctgctaatattttgaggtattttctttc

SEQ ID NO: 180315 - DNA, 201 bp, Homo sapiens
ccttttatttctttctcttacctgattgctctggttaggaattccagtactgtgttgaataggagaggtgaaagtgggcctttttgtctctttccagttcktagggggaaagttttcaacctttccccattcggtctgatactggctgtgggtttgtgatacatggctgctaatattttgaggtattttctttccatgcct

SEQ ID NO: 180316 - DNA, 201 bp, Homo sapiens
aactcagaagagaacaaccctgctccaaagaaggagaaaacaatagctaattccactgccagtaacaccctggctaaccagaggtcctgagtctgactacrtgacaactttagtgctagcataattagcatttaagaaaaccagtgcactaaacatgaggacacaaaggcatgagaatagtataatggactctggagactt

SEQ ID NO: 180317 - DNA, 201 bp, Homo sapiens
ttatttcttctgccttttctaatctattgtgaaagctttgaactgtattttgaaattcctatagtgaattttccatttacagaaattgttttttaaaaaayatatctgtctcatcctttatattatgaattgattcatttattattttgtgttggttttccactttctcttggatgtcttgtgctttcttatagtccatgt

SEQ ID NO: 180318 - DNA, 201 bp, Homo sapiens
ctgcatcatacagttataggaacagggcctgggacagaggaaactctcggtaaatgttggctattgtaattattaccttagtatgacatcctcccgaattyttcataactttttggtaactggtaagagatgttgaggggtaacaagatcctgctggggtaccattctccttgacttccttcaaaggtcagattttgctgg

SEQ ID NO: 180319 - DNA, 201 bp, Homo sapiens
acactgcctcagttcaggctgcctcagttcaggcttgtgcagagtataaccacacgtgtgcaagcaggccatctggtgctctgcccccaagaagttctcaractgccacagtgttgcccagacttgtgagggcagaggggctctctgacaatttggtactcagtaggctgttgcagggtgaaggggccaaagaattacttc

SEQ ID NO: 180320 - DNA, 201 bp, Homo sapiens
agatgcttcttgtgggttttccaactggttttggcactctgccctcagctttccagtagggccgtgattgttcacctatgatctcgtatctgatggaggakaacttgtatctgatctctgtagctagtgattttgaataaaaactacttttgaaaatagtcatgtaccacataaggacatttcagtcaagaatgggctgat

SEQ ID NO: 180321 - DNA, 201 bp, Homo sapiens
catctttagttttatgaatgtgtgtaaccagatcctaaatagaattgttttaatagaacttttttcattcttcaaggccttattttcccacagcttaatgkttttttttgctgatgtaaaaatgcacattacaagatgattgtttaaaagatcgtatctccatttcacctgttttcctaaacactttcaaagcactgagga

SEQ ID NO: 180322 - DNA, 201 bp, Homo sapiens
agatccttatttgaatcattctgaagaacattattactatcatgattatggtgacatgcaatagtgtaataattttgttggctcttgggtttttttcattwagactttttaaagtatagcttcttcgttttcaatagatgagtatccattttaagaggaaggaataagaactatttttatctaaactatctcctgaaaact

SEQ ID NO: 180323 - DNA, 201 bp, Homo sapiens
agtaaagtacaggctggtagtctagttgcgacaggttataccatatagccatgatgtgtagtagtctatcccacctagatttatgtaagtacactctatgmtgttcctagaatgataaaattgcctaatgacacatttgtcagaatgcatactcattgttaagtgatgcatgactgtatttataataaactttgacaaaaa

SEQ ID NO: 180324 - DNA, 201 bp, Homo sapiens
gttgattattatagatttatagattattacagatttattatagattattatagatttatagattattatgattattatagaagtcaggtagtgtgagtctyactttttttctttaatgttgtgttcctttttgtgggcctttccatgtaatcatttttaaatttccagatgttttactgtaaattgataatttataattat

SEQ ID NO: 180325 - DNA, 201 bp, Homo sapiens
gtttgtttttttgtcagggatagatcttaactatttaatatagcctgtgattctggaatggcactctggtaataaccctggcctggtagagcttgctgtcrgttttccagttggcttggctgctactttagctgtgatgtcaggtggagcttctggttgggctctactatcaggcatagcttctgtctcaggactgcagtg

SEQ ID NO: 180326 - DNA, 201 bp, Homo sapiens
tcaggtggagcttctggttgggctctactatcaggcatagcttctgtctcaggactgcagtgtcctctggtcaggctggtcacagcatatattacctggcwgggcaattctgctctttgcaatctgcagttgggcagggctgcaggctgggctttgagttaggtgcagctgctacttggagggacaaataggaccagagtc

SEQ ID NO: 180327 - DNA, 201 bp, Homo sapiens
gctgagtggagctactgcataacttcccaggtcaaatcagtttagcctttgtgctttttgtaaaatatacagaggtgggagtcttcctgtcttggtcaatycaagggcatggacactagctgcctagggacccaaggtaagttaaacttcccaccatatttttgaaggcaactaggtcagttttttaagtgcactgagaag

SEQ ID NO: 180328 - DNA, 201 bp, Homo sapiens
agctactaaatattttccttttctgtaaattgtaatgaatttcctgtgaggaacttatatcctagaacaaatcgtattcctttataggtgctcctctgccygcttctcatcttatgtccattaagaaactgtctcttcatggaactctgatcctttctttttcattccccaacatctactgactccactttgtacctgtca

SEQ ID NO: 180329 - DNA, 201 bp, Homo sapiens
gaggagcaaggaagccagtccaagtcccaaaacctcaaaagtagggaagccaacagtgcagccttcagtctgtggccaaaggcctgagagcctcttgcaarccagtgatgtaagtccaagagcccaaaagctgaagagcttggagtaccatgttcgagggcagaaagcatccagtacaggagaaagatgaaggctagaaga

SEQ ID NO: 180330 - DNA, 201 bp, Homo sapiens
gttcgagggcagaaagcatccagtacaggagaaagatgaaggctagaagactcagccagtatagtccttccacatttctctgcctgcttttacctaaccaygctggcagctgattaaattgtgcccacccagattgagggtgggtctgcctttcccagtccacggattcaaaggttaatctcctttggccacaccctcaca

SEQ ID NO: 180331 - DNA, 201 bp, Homo sapiens
gttttgtttttcatgtaaattttgcaatggatatttctcatgagcaaatggctctcttccaagcagtgattcagacatctaggttactgttggtagtgtcractgctgttttccacacatggcttccaaagttgctacagcaggggaaagtacatggagaaccacacacgggaagtttttatgagcctggcttgaattggc

SEQ ID NO: 180332 - DNA, 201 bp, Homo sapiens
agagtggagggcaccgcagcaggctccccttgccgggtccgagggcgctgcgctgctgcgaacctgagcgcactgaggctgctactctggacagcgaaagstgcgcaagcccctcccgcatacccgattctttgactatggttagttgaatttccaggaggagagtctgcctccccaacctttatagccagctgcagaaga

SEQ ID NO: 180333 - DNA, 201 bp, Homo sapiens
tagagtggagggcaccgcagcaggctccccttgccgggtccgagggcgctgcgctgctgcgaacctgagcgcactgaggctgctactctggacagcgaaasctgcgcaagcccctcccgcatacccgattctttgactatggttagttgaatttccaggaggagagtctgcctccccaacctttatagccagctgcagaag

SEQ ID NO: 180334 - DNA, 201 bp, Homo sapiens
aacaaggattatttgagtgatcagaggttgaaggaactttctggcaaaagaaatatacagaaagtcaaagagatgagaaaaggaataattctaatacagcwtggttaattttcaattcacccattaaatttccactactttttcagaaggtattttcaggcaaatttacaaagatgtatacataaggaagaatattaattg

SEQ ID NO: 180335 - DNA, 201 bp, Homo sapiens
tgaattgctacttgtcatacattaaatagaataaatttagttgtttaatttataggttaactatcatattgatatgtgaagtctatttttgtttctaagakaaatgggccaaagcaagtatatactgaatccccttattttattaagaattaaccctgagccacgtgtgatggtgggttcttgtagtgtcagctactcaag

SEQ ID NO: 180336 - DNA, 201 bp, Homo sapiens
tcatattgatatgtgaagtctatttttgtttctaagagaaatgggccaaagcaagtatatactgaatccccttattttattaagaattaaccctgagccaygtgtgatggtgggttcttgtagtgtcagctactcaaggaggctaaggagggaggatcccttgagcccagaagttcaaggttgtagtgagctgtgaccgtg

SEQ ID NO: 180337 - DNA, 201 bp, Homo sapiens
cattacatttgcctattagagtagataaatagcacacatatttagatgacaagtgtttttttttttcctctgactatggggaagcatgatattttgtgagkacatgagtctctttgtgtgtgtgctatgtaaaggaaatcaacaggtgagaaaaatgtatagaaactgatatttaaaggtgcttaagaccagtgataagtc

SEQ ID NO: 180338 - DNA, 201 bp, Homo sapiens
ttctgcctaaaagaaggtcacaaagtttcccatgatacaaatccccccaccccttcccactgtattagaaagcaaaaattgttctcgtcaccagaagttakgagtcaacactggaatggacctatgcaaacaagcttactaaaataaccctaatctcctcatagttttccccatacatttcctagttacaaacccacaatt

SEQ ID NO: 180339 - DNA, 201 bp, Homo sapiens
ggggaatagttcaacatttaatattaaatttgtgcattgcaaattattatgtaaaaataattttacatgtagtcctgtgcatatgtgtgtgtgtgtgtgtrtatatatatatatatttgtttgtatatagatacatttaaaagtacatacaataagcatatacaaaaaatatatacaataaacagtcttcgaagcaatttt

SEQ ID NO: 180340 - DNA, 201 bp, Homo sapiens
catttattactttgttttatatgctgtagtatgctgtagtgcaatggtccccaaccttttggcactggggaccagttttgtggaagacaatttttttacasatttggaggtggtggattgggggttgggggtgatttcaagacgaaactgttctaactcagttgatcaggcattagattctcataaggagcacacagccta

SEQ ID NO: 180341 - DNA, 201 bp, Homo sapiens
actagctattttgaaatctactatacattattttaaactattatttccctactaatgtatctaacattgggtgttattccttctatcatactgctttttgkacccattaatcaacttttctttatcctccctccccactaccctttctggcctctggtaaccaccaatcttttctgtcttcatgacgtccatacttttagc

SEQ ID NO: 180342 - DNA, 201 bp, Homo sapiens
atctctttctgctaggttatccaatttgtttgagtataactgttcatagtagtttcttatgatcctttatacttgtggactctctttcatttataattgtrtttatttgagtcctctctctttctctgttgtttagtctatctaaaaggttgcagactgagtatggtggctcacgcctgtaatcccagcactttgggaggc

SEQ ID NO: 180343 - DNA, 201 bp, Homo sapiens
aataggacctggcaaatggtaagcaaccaatagataccagttattattaccatcgtaagataagtgtatttttgcagcagtggctctagactgcacagcasaatcacccaatgaaaattttaaaaatcaagctacttgtgtcccagcctaaacttactgaattagaacctcaagaggtaagtctcatcatgtgtttttttt

SEQ ID NO: 180344 - DNA, 201 bp, Homo sapiens
ataggacctggcaaatggtaagcaaccaatagataccagttattattaccatcgtaagataagtgtatttttgcagcagtggctctagactgcacagcagmatcacccaatgaaaattttaaaaatcaagctacttgtgtcccagcctaaacttactgaattagaacctcaagaggtaagtctcatcatgtgttttttttc

SEQ ID NO: 180345 - DNA, 201 bp, Homo sapiens
aataaacaattacatgttaatgtaagtaacatatttttgaaaagttaatatattttttccaagcaaaatcaagtaatgataagagagtaccattgattgtwtttttgtaaattgcattaatgtctggcttaatagaagatagctggattgtcatatgtgcttcggtattccatctattgctgcaatacaaggcagtctatt

SEQ ID NO: 180346 - DNA, 201 bp, Homo sapiens
aagtcttactgctgcaagaagatattataattctaattggtgtccagtttttattaattacaagttaatcatatactaacactgaccattctgtgctttaytgactctagaccattattcagtgtcattattaatgtagatatctcaaatgagaggttgagaccaatttttttcctatgccatttacatgccatttttaaa

SEQ ID NO: 180347 - DNA, 201 bp, Homo sapiens
attatcttcaatatcttctcaggataaattcccccaacatccttaagttatttgattttttaaaaagtgccaggcagaggttgcggtgagccgagatcacrtcattgcactccagcctgggcaacaagagtgaaactccatctcaaaagaaaaagaaaaaagaaagaaagaaatgtctcttaagacattttctttaagcca

SEQ ID NO: 180348 - DNA, 201 bp, Homo sapiens
ctggcaggcaaagagagagctctttcaggggaactcccatttttaaaaccatcagatctcgtgagactcattcactatcatgagaacagcacagtaaagamcctccctataattcagtcacctccctctggattccaaaagataatttatttttaattttggaataggtccaaactttagtatcagaaaaaaaattctcta

SEQ ID NO: 180349 - DNA, 201 bp, Homo sapiens
ggctttatcaacctagatgttcatttccctatttgtatttgaaacgttttttgtcatgaattatttaaataagctttctacacctttctctttctctatcycttccgagattctcatagtatacatattaattcacttgatagtgtaccataagccctataggttttcttcacttttttattgtttttactttttgtttct

SEQ ID NO: 180350 - DNA, 201 bp, Homo sapiens
ctttaacatttataaaagtagattgtgcataatgacagattttaaatactgtaagcattattagatgatataattgttcttttgctgtaaatttaaatatktatacatttttgtagagttaaaatatgccaatttagttttcctttggtatatattgcctttttggaaaataaatggttaacatttcaaatagataaacaa

SEQ ID NO: 180351 - DNA, 201 bp, Homo sapiens
acgatctgcctgccttggcctcccaaagtgctgggattacaggcttgagccaccacacccggcctagaacatataatttaattaataaatattcattttamgaattcctgatatcaaaagaataacaagacagctatttggtttatggtacatatttattatggataatggtatgaatgatgttacataaaaccaggaaga

SEQ ID NO: 180352 - DNA, 201 bp, Homo sapiens
tctttgggcacaaggtgtttattatttaaagctctgtgtaagaagtttgggtgtcatgatctgtgtctggtacactggtcagtttttcttaaggtctcacrtgtctaaacaaaataactttttatttgttccaaaaaacttgtctagaggaactcaattcagtcattaaataaaaattgttggctgggcactgtggttcat

SEQ ID NO: 180353 - DNA, 201 bp, Homo sapiens
atattttaagtacaattaagggcagatgccttatgaaatgttttaccttcttgaaggcccttcattcctgggatatttatgtagttctctctctctctctmtctctctctatctatctatctatctatctatctatatatatatatatatatatatacacacactaaaaatttacatataaatttatatataaattttatt

SEQ ID NO: 180354 - DNA, 201 bp, Homo sapiens
actcatctggtactaaaaagcattgtattactaggatgaaggctgagaatataatcttttatatctaaaataaccttttgccaaaaatatttcattatttwatcgtaagcccctctccatattctcagtcttatcttcatttactccttccttatagggttgatattaaagccatctaaaaaaatgtggctcacagctcca

SEQ ID NO: 180355 - DNA, 201 bp, Homo sapiens
aaaatgtttttattaaataactaagagcatgaagctgagtgtgttggcaggtgcccatggtcacagctattcaagtggctgaggcagtagtatggcttgartccaggagttcaagaccagctgagtaacatagtgagaacccatctctatttaataaaaataaaaaaagaacttgagctatgtcttagtccattagggctg

SEQ ID NO: 180356 - DNA, 201 bp, Homo sapiens
cagagtttataaagtacctttaaaacatggtttatgcagataagttgttattactgtttttcccaggccgatttcttatgtttaatactcagtgtagttgrgcagctcattaaagccaactggacaaggtcctatgaaactaggccactaggcagtttccagggtagcaaagtatagttcctttccaatgagtaaagcaat

SEQ ID NO: 180357 - DNA, 201 bp, Homo sapiens
tcataactcgaatttattgacaaatgagcagaactatctaattttcttccagctcaggactttcaactccttagccctatccaagtatctaaaataatgtmattattacaaaggcattgcagttcttttatattgttccaaatgtgttttctccccttttcagggggtggggaattttctgctttctggacaaataaaatc

SEQ ID NO: 180358 - DNA, 201 bp, Homo sapiens
tttttttttttttgagacagtctcactctgtcacccaggctggagtgcagtggcatgatcttggctcactgccatctccacctcccgggttcaagtgattytcctgcctcagcctcctgagtagctgggactacaggcgtgtgccaccatgcccggctagttttttgtatttgtagagacggggtttcactgtgttagcca

SEQ ID NO: 180359 - DNA, 201 bp, Homo sapiens
tcacttcagtttctatctttgtgcatctttaaaggtgaagtagatttcttgcaggcatcatttatttgcacctttttaaaaaatgttatatagtcactctrtcttttaattggacaatttaattcatttatattcaaagttattgttgataggtaagggtttattactgatatatttttactcattttctgttgttctttt

SEQ ID NO: 180360 - DNA, 201 bp, Homo sapiens
ttatccattcattggttgatggatgcttaaattgcttccatctcttgactgttgtgaccagtgctgcaataaacatgagaatgcagttatctcttcagcakactgatttcattttctttggataaatacccagtaatgaaattgctgaatcatatagtagttccatgtttaattttttgaggaacttctatactatttttc

SEQ ID NO: 180361 - DNA, 201 bp, Homo sapiens
gctcatctcgtctcttatggtatgtgcgtttgtatgtttgtgtgatgcttttattagtaagcattttacattaaaatattatttgccatataaatgaatgmgaataacctgtagcttaattatttttatgtggtataagtatttattagaaatcaaatggacgttgaaatttagtatcatatagaactttaaattaacccc

SEQ ID NO: 180362 - DNA, 201 bp, Homo sapiens
tagaccaatgcactttaataaatattaaaatattactgttatgatattcttttatcaatgaggccaactaatactttgaagccgatttttcataaacttaytgctatctatatagctatatctatatacaagagtaatataaaatatatatctgaataagtccaaatcactttttagtaagtgtaggtagtaattctaaga

SEQ ID NO: 180363 - DNA, 201 bp, Homo sapiens
ttaaattacagaagatactatgataattcctctttgataaggacctaaatcttttcattcagtgatatcttttctgggttgtctgggttctgttcattgtcttttttgtgaccaagcttttttacacatttatggcccatgctgattgacaatggaaatgtttatttcatttttgcaactgaaaatttcttggcatttaca

SEQ ID NO: 180364 - DNA, 201 bp, Homo sapiens
aatttatatagaagtcaaaattaatatcaaaattgtactgaatatcttttataccaaagaaaacaagcaaattacaggttaatagtgtcaacttttaactrtgagaatattatggcaaaaaggacaaaactgaaaaatcatgagaatttttttaattcaaactcattaatatgtaggacagtattattcgtggattttcca

SEQ ID NO: 180365 - DNA, 201 bp, Homo sapiens
atggggtgtttcagtcacctcactttttttcttttctaaaaattgtattacttttaatgagcaaatctcatcttcattagagtctgcctattttgagttcmgctacttctatttaatgacacatatttttgctaatatattgcattatatagtcagataagaacacgggtcttttcctgggcatattttgtagatgggata

SEQ ID NO: 180366 - DNA, 201 bp, Homo sapiens
gactacaggcgcccgccaccaagcccagctaattttttatattttttagtagagacagggtttcaccatgttagccaggatgatctcgatctactgaccttgtgatccgcccacctctgcctcccaaagtgctgagatcacaggcttgagccaccgcatccagccagaaaaaaattcttaagactagtaagaagacagaga

SEQ ID NO: 180367 - DNA, 201 bp, Homo sapiens
tttcgttttaaccactggaggaactcaacttgcttggtttgcacctatactctgatcctgagtagggaaaggtagaaaacaaggccttaagcttttttttktgtgtgtgtgctttaattaaatcttaatttcccatagaaacattagtcttggagtcatgatcaggaggtaagtcaacatacacataaaaatactcaccta

SEQ ID NO: 180368 - DNA, 201 bp, Homo sapiens
ttttcgttttaaccactggaggaactcaacttgcttggtttgcacctatactctgatcctgagtagggaaaggtagaaaacaaggccttaagctttttttkgtgtgtgtgtgctttaattaaatcttaatttcccatagaaacattagtcttggagtcatgatcaggaggtaagtcaacatacacataaaaatactcacct

SEQ ID NO: 180369 - DNA, 201 bp, Homo sapiens
tcaatgttgtgaatcactattatagacaaatgtttctagaagtttttgagtgtgtgtgacagcagaggggtgaccatgtggcaagaaaagtatatgttgttattactgtagttttgattgtatttttaatagaaaatacaagaggatattatgaattcatgaggaaaatcctatataaagggagagaaactgatgattcag

SEQ ID NO: 180370 - DNA, 201 bp, Homo sapiens
gttcattttatttccaaaattcttggggactcagtagctaatttttatcccagggtttctgaatatgtgtatgtgtaaggagaatatgtcaccctttattkgatggctaccttaaagtatgttgggctaggcaactcacctgtgaacaaagtgagctatttttattacttgaaaatattgtatttttttaacttcatattt

SEQ ID NO: 180371 - DNA, 201 bp, Homo sapiens
ttgcccatgaaatagcagaaatatatataattagtatgtataaatcatgttgatttaaaatgtatatctgaaaagtccaaaaatgtgatttccaatgtacrtaaaaatgccaaagagaagatatataatgactggttaacatacaattattggaatttatgaagaaactaaaatataaatataatgtttaaaaatatgtga

SEQ ID NO: 180372 - DNA, 201 bp, Homo sapiens
caggaagttcttgagcttgcaacccatgcaatcacacagatccctacaatcttggaattcttggtaattttataaaaataagttctgcattttcattttgyactgggacctgcaaattatgcaggatgccagttggagagcttggtatatgcttctggtacttgagaatatggcaggctgtggcctgactcacacatgata

SEQ ID NO: 180373 - DNA, 201 bp, Homo sapiens
gtcaatgttgtgaatcactattatagacaaatgtttctagaagtttttgagtgtgtgtgacagcagaggggtgaccatgtggcaagaaaagtatatgttgttattactgtagttttgattgtatttttaatagaaaatacaagaggatattatgaattcatgaggaaaatcctatataaagggagagaaactgatgattca

SEQ ID NO: 180374 - DNA, 201 bp, Homo sapiens
actcacaagtagctgcttctcacagttcatttaccaagatattggggagacatttagaagtgccagccataatctgtttgaacaacttatggcaaaaaaaatcagctaattatctgctccataatttcatacagaatttaaagaaacactacttatgaaatctctctcattctattgcttatgaaaataagaaaggtaccc

SEQ ID NO: 180375 - DNA, 201 bp, Homo sapiens
tgtcaatgttgtgaatcactattatagacaaatgtttctagaagtttttgagtgtgtgtgacagcagaggggtgaccatgtggcaagaaaagtatatgttgttattactgtagttttgattgtatttttaatagaaaatacaagaggatattatgaattcatgaggaaaatcctatataaagggagagaaactgatgattc

SEQ ID NO: 180376 - DNA, 201 bp, Homo sapiens
aggtcaggatttcgagaccagcctgaccaatatgatgtaaccccatctcttctaaaaaaaaaaaaaaaaaaatttgaccaggtgtgatggtgggcacctgyaatcccagctacttgggaagctgaggcagagaattgccaccactgcactccagcctgggcgacagagtgagactgtatctcgaaaaataaaataatgact

SEQ ID NO: 180377 - DNA, 201 bp, Homo sapiens
aaaccacaagtcatcagtaaatgtaccattgtgttccggaattgtaaagtatctagtggaggctttaagaagacaccgagttgttgttgttgttgttgttkttttcaggattatacttaatttagtcaagacagatttcttgtgatgtaggttccgtgtcttgaataaataagtacaattctggaaaaaaaatgtttcaaa

SEQ ID NO: 180378 - DNA, 201 bp, Homo sapiens
ctctttgttagcaagaatatttttaacctaactgtataaagcattaacacattgtgtaatatcacttatcctgtaggaaatcatcaaaatctgatgattayggaagactggctttacaagttcaagggagaatatctcgactccagtaaattccatcaagactgagaaaagtgtgatcacgggcagttagaaagtatagca

SEQ ID NO: 180379 - DNA, 201 bp, Homo sapiens
gcaattttgttgcaatcactgttctgcacactctgacccattatggtgatgaaagaaaattaaaccacattctaaaatatgaaaaaaagcaaagaacagtrtgatgaaatgaaatggttatgtctatatgctgaaatgtaaatgtgggcaaattctttttctgtagggagtttttatgtgaagctcttttggaataaatat

SEQ ID NO: 180380 - DNA, 201 bp, Homo sapiens
aaaagaattggcattaagaattggaatggtccttggaagtttctattctaacacatattttcagagtgtaaaaaatgatcacaaattctacccccaccccmaccccaccccacatcaagaagtgagtctatctagtttctcgcttcttgagtctggactagtcttattacttgcttttctgacatacatgacatagaataa

SEQ ID NO: 180381 - DNA, 201 bp, Homo sapiens
acccattgattagtgcatgttgatactgaagatgcattgatttgtacaagcctagcttgaaatggagcagatgggtatgtaaaggtttactcaaaatcaawgtgaattagattgctgctcctcagtaaaatgaattataagttagaatggctattttctttaacttaatgtaatagaatgctgtctaaggcaatctgttaa

SEQ ID NO: 180382 - DNA, 201 bp, Homo sapiens
gtttttatttccaaaggtttgggggagcaggtgtggactagtgagggttctctagagggacagaactaataggatatatatatatatatatatatatatakatatatagagagagagagagagagagagagagagagagagagagagagagagacagagagagagagagagagagagacagagagagagaggagtttctta

SEQ ID NO: 180383 - DNA, 201 bp, Homo sapiens
gtgaaccctggaggcggagtttgcagtgagctgagatggcgccactgcagtccagcctgggcgacaaagcgagactccgtctcaaaaaaaaaaaaaaaaaraaaaaaaaaaaaaaaaaaaagccagagctctattttatgagatcactctgtcacttgtatacaataaattttgtataagaccatatcgatctatgtatct

SEQ ID NO: 180384 - DNA, 201 bp, Homo sapiens
ggctgaggcaggagaatggcgtgaaccctggaggcggagtttgcagtgagctgagatggcgccactgcagtccagcctgggcgacaaagcgagactccgtytcaaaaaaaaaaaaaaaaaaaaaaaaaaaaaaaaaaaaaagccagagctctattttatgagatcactctgtcacttgtatacaataaattttgtataaga

SEQ ID NO: 180385 - DNA, 201 bp, Homo sapiens
cagaaaatttataagaattgtgtttaagaataccttttgttcagattcaacagttgtttacaattttgcctcttttgcttcatttctgtctgtgctttctstctatgtgctcatgtgtgcatgcacacgtgtagacacaccacattttttttcctgaatcatttgagaatcagttgcagacatcatgcttccttaactgaa

SEQ ID NO: 180386 - DNA, 201 bp, Homo sapiens
ctactctggaggctgaggcaggagaatggcgtgaaccctggaggcggagtttgcagtgagctgagatggcgccactgcagtccagcctgggcgacaaagcragactccgtctcaaaaaaaaaaaaaaaaaaaaaaaaaaaaaaaaaaaaaagccagagctctattttatgagatcactctgtcacttgtatacaataaatt

SEQ ID NO: 180387 - DNA, 201 bp, Homo sapiens
atttataagaattgtgtttaagaataccttttgttcagattcaacagttgtttacaattttgcctcttttgcttcatttctgtctgtgctttctctctatrtgctcatgtgtgcatgcacacgtgtagacacaccacattttttttcctgaatcatttgagaatcagttgcagacatcatgcttccttaactgaagtgttt

SEQ ID NO: 180388 - DNA, 201 bp, Homo sapiens
gggcatggtggcgggcacctgtagtcccagctactctggaggctgaggcaggagaatggcgtgaaccctggaggcggagtttgcagtgagctgagatggcrccactgcagtccagcctgggcgacaaagcgagactccgtctcaaaaaaaaaaaaaaaaaaaaaaaaaaaaaaaaaaaaaagccagagctctattttatga

SEQ ID NO: 180389 - DNA, 201 bp, Homo sapiens
ccatgttctaatatgccagaatagtttttcagaattttcataggttgagtggattttttgtgagtgattttcatgtcactgttaggaattctggtatcctwtacctttttcacagtttttctggaccccatatatctctgtatatagtgggagcttgaaagatagctctgttagaaattggtgtctaattttctgtttaca

SEQ ID NO: 180390 - DNA, 201 bp, Homo sapiens
agaccatcctggctaacacggtgaaaccccgtctctactaaaaatacaaaaaattagccgggcatggtggcgggcacctgtagtcccagctactctggagkctgaggcaggagaatggcgtgaaccctggaggcggagtttgcagtgagctgagatggcgccactgcagtccagcctgggcgacaaagcgagactccgtct

SEQ ID NO: 180391 - DNA, 201 bp, Homo sapiens
tcttgttgatgtttgccgttgtgagcttcaagaactgaattgaaaaaaaaatgcaatagaccagagctctggccgggcaaggtggctcacgcctgtaatcycagcactttgggaggccgagacaggcggatcacgaggtcaggagattgagaccatcctggctaacacggtgaaaccccgtctctactaaaaatacaaaaa

SEQ ID NO: 180392 - DNA, 201 bp, Homo sapiens
tcttcttgcatcttgttgatgtttgccgttgtgagcttcaagaactgaattgaaaaaaaaatgcaatagaccagagctctggccgggcaaggtggctcacrcctgtaatcccagcactttgggaggccgagacaggcggatcacgaggtcaggagattgagaccatcctggctaacacggtgaaaccccgtctctactaaa

SEQ ID NO: 180393 - DNA, 201 bp, Homo sapiens
atctttctcccatgctggatgcttcctgccctccaatgttggactccaagttcttcagcttttgtattcttggacttacaccagtggtttgccaggggctytcgggctttcagccacagattgaaggctgcactgtcagcttccctacttttgaggtttggggacttggactggcttagttgatccacagcttgcagacag

SEQ ID NO: 180394 - DNA, 201 bp, Homo sapiens
cattaactcctgtgatggttaacattgagtgtcaacttgattggattgaagggtgcaaagtattgttcctggttatgtctgtgagggtgttgccaaaggasattaacatttgagtcagtggactgggcgaggcagacccatcctcaatatgagtgagcaccatttaaatcagctgccagcacagctagaataaagcaggca

SEQ ID NO: 180395 - DNA, 201 bp, Homo sapiens
taaagttatatcctgatacagtttggctgtgtccctacccaagtctcatcttgaattgtggctcccataattctcacatgttgtgggagggagccagtggragataattgaatcgtgggcgtggtttccccatactgttctcatggtagtgaataagtctcacgagatctgatgattttataaggagtttcctcttttgct

SEQ ID NO: 180396 - DNA, 201 bp, Homo sapiens
cttatgaacatctcatatttttgaattacttttatgccattctgccaatattctggggggcactgtgtttcttgcatataatatgaagctagtatgcagamttctcttacctctttcttcaaagtgttctccttgactgatgttttggaatatttgcatatagttgggaatacttctgttcatcagcccattatactttgg

SEQ ID NO: 180397 - DNA, 201 bp, Homo sapiens
ctctttcttcaaagtgttctccttgactgatgttttggaatatttgcatatagttgggaatacttctgttcatcagcccattatactttggtagatatatrgtctacattttgtaaaacctatttaagcacgttaaagtatatagtgtttaagtgtgtgttggtctgtattagtttttctgtgatcttgacaaattgttta

SEQ ID NO: 180398 - DNA, 201 bp, Homo sapiens
gtcatagacttttgaactgacccaagaaggcacacatataaagtaacatatcaagggctagaactcaacatttgtgtatcttgatttaaagtctgcactakctttttttcctttctaataaaatatacaggcatgtacaaaggaaaaaaataaagatcacccacaatgcctgtatgaaaaggtgttcacttacccagcaaa

SEQ ID NO: 180399 - DNA, 201 bp, Homo sapiens
gggcgcgggcggacctggcgacgcggcctcccgggagctccgagtgcgctcgcttgcggggctgcaggtgttgcgggaggaccgcgtggcgcggaactttytgccgccgcccaccttctgctctgcttttctggctaccccggtgagttgttggtggcgggggggggggggggagcggctctggccccctctgcgttctgg

SEQ ID NO: 180400 - DNA, 201 bp, Homo sapiens
tttttggtttatgaattataaaatagtttttcctaattatatgaacaatatcgtttgcagtttgataggaatagtattgaatctgtaaattgctttggacrtcatgaccattttatcaatcttgattcttcctgtccatgagcatgggatgtttttctatttgtgtcatgtctaatttctttgaccagtgttttgtagaga

SEQ ID NO: 180401 - DNA, 201 bp, Homo sapiens
acacgtttataagattttatccttccaataatagttaagttaggcagtcacagatatctttgttctttgtgtgtatgagtgtgtgtgtgtgtgtgtgtgtgccagtgcgctgcgcacgcctgtatgtgtgtgtagtatgtgcatgtatgtgtacatttatgcatatattcatatataatacatagatattttattcataaa

SEQ ID NO: 180402 - DNA, 201 bp, Homo sapiens
aacacgtttataagattttatccttccaataatagttaagttaggcagtcacagatatctttgttctttgtgtgtatgagtgtgtgtgtgtgtgtgtgtgtgccagtgcgctgcgcacgcctgtatgtgtgtgtagtatgtgcatgtatgtgtacatttatgcatatattcatatataatacatagatattttattcataa

SEQ ID NO: 180403 - DNA, 201 bp, Homo sapiens
aactataggatgcaatagcattcgacaccctgtaaattcattataaattcacatagcattcaccaagataactcatttatatctatgaaatcaatagacagcctttaaactaaactggaactgaaagtattatcaatactacagaaatttttaagctgtaaatatgatggagagagcaatgttgaatagctgatgtgggtt

SEQ ID NO: 180404 - DNA, 201 bp, Homo sapiens
aaactataggatgcaatagcattcgacaccctgtaaattcattataaattcacatagcattcaccaagataactcatttatatctatgaaatcaatagacagcctttaaactaaactggaactgaaagtattatcaatactacagaaatttttaagctgtaaatatgatggagagagcaatgttgaatagctgatgtgggt

SEQ ID NO: 180405 - DNA, 201 bp, Homo sapiens
aaaactataggatgcaatagcattcgacaccctgtaaattcattataaattcacatagcattcaccaagataactcatttatatctatgaaatcaatagacagcctttaaactaaactggaactgaaagtattatcaatactacagaaatttttaagctgtaaatatgatggagagagcaatgttgaatagctgatgtggg

SEQ ID NO: 180406 - DNA, 201 bp, Homo sapiens
aaaaactataggatgcaatagcattcgacaccctgtaaattcattataaattcacatagcattcaccaagataactcatttatatctatgaaatcaatagacagcctttaaactaaactggaactgaaagtattatcaatactacagaaatttttaagctgtaaatatgatggagagagcaatgttgaatagctgatgtgg

SEQ ID NO: 180407 - DNA, 201 bp, Homo sapiens
gctcagaatgcctacggaaatgagtcatattgggtgtaacaaagtggatgaaggggagaattataagagagaactatgaaaagctgggcaaaaggctgctygtgcaggatcttctatgtcctggtaaaacttgtatttcatctgaagtacagtgggaagccactaaaaaatattaacgatagaggaagggaatgagaagaa

SEQ ID NO: 180408 - DNA, 201 bp, Homo sapiens
ccgggcatagtggcgggcgcctgtagtctcagctactcgggaggctgaggcaggagaatgtgtgaacttgggaggcgaagcttgcattgagccgagatcgygccactgcacttcagcctgggcgacagagcaagactccatctcaaaaaaaaaaaaaaaaaaagataaattaagctaaattcttcttgacatattagatga

SEQ ID NO: 180409 - DNA, 201 bp, Homo sapiens
agtggcgggcgcctgtagtctcagctactcgggaggctgaggcaggagaatgtgtgaacttgggaggcgaagcttgcattgagccgagatcgcgccactgyacttcagcctgggcgacagagcaagactccatctcaaaaaaaaaaaaaaaaaaagataaattaagctaaattcttcttgacatattagatgatttgcaaa

SEQ ID NO: 180410 - DNA, 201 bp, Homo sapiens
aaaagaccagcctgggcaacgtggtgaaaccccatctctactaaacataaaaaattagctgggcatggtggtatgtgcctgtaatcccagctacttgggargctgaggcaggagaatcgcttgaacccaggaggcagaagtcgcagtgagccgagatcacaccactgcactccagcctgggtgacaaagcaagactctgaa

SEQ ID NO: 180411 - DNA, 201 bp, Homo sapiens
gcttgaacccaggaggcagaggttgaagtgagccaagattgcaccattccactccagcctggatgacagaatgaaactccatttcaaaaaaaaaaaaaaaatcgttagattaaaatatgatctgaaaaacagaaaacggccaagattagttgtttcagttattcatggaatcacccaatggttaaacatggttgtacatgc

SEQ ID NO: 180412 - DNA, 201 bp, Homo sapiens
ttgtgcaggattcactgagtaccagggttgttttaaatgttaatgactaatgtcatccccattttgtgcaagaggaaactgagagaggcatcatttaagcmaattgtcccaggtcacaaaagtaaaacataccatgcctgacatttggggccatttagtcaagctccagagtcattgcagtttaccagtgtaccatcattt

SEQ ID NO: 180413 - DNA, 201 bp, Homo sapiens
gggccaggtgcggtggctgatgcctgtaatcccagcactttgggaggccaaggcaggcagatcacttgaggtcaggaattcaagagcagcctggccaacakggtgaaaccccgactctactaaaaatacaaaagttagctgggcgtggtggtatgcacctgtagtcccagctactcaggaggctgaggcaggagaatctct

SEQ ID NO: 180414 - DNA, 201 bp, Homo sapiens
tgtcatgtagcttaatagccatgaacatattattgtctataaatttcctgttcatatgtgtatttttctattgtgttgatttttaaaattgttaatattcrcaagttagttacactagattaagagcctcccatcagttaaatatgctgcaaagttctccttttctatgatttggtttttcaatttcttaatgaggttttt

SEQ ID NO: 180415 - DNA, 201 bp, Homo sapiens
cctatgttatataaacaacagtgaaaggaatggagctttgacttgaaaatacaggtgggccaggtgcggtggctgatgcctgtaatcccagcactttgggwggccaaggcaggcagatcacttgaggtcaggaattcaagagcagcctggccaacatggtgaaaccccgactctactaaaaatacaaaagttagctgggcg

SEQ ID NO: 180416 - DNA, 201 bp, Homo sapiens
acaatttatgtttagagattgcagtaaagacaggcataagaaattacaaaagtattaatttggggaactaataaatgtccataaaatcttcgcaatccacrttcttctgccatggcttcagccggtccctccgtttggggtccctgacttcccgcaacacagataatctgttttttttccccaattgctggtagcaatgaa

SEQ ID NO: 180417 - DNA, 201 bp, Homo sapiens
ttggggaagtgataagtgtccatgaaatctttacaatttatgtttagagattgcagtaaagacaggcataagaaattacaaaagtattaatttggggaacyaataaatgtccataaaatcttcgcaatccacattcttctgccatggcttcagccggtccctccgtttggggtccctgacttcccgcaacacagataatct

SEQ ID NO: 180418 - DNA, 201 bp, Homo sapiens
aacaattgctgttatcctgttcttttttcagggtgcccacatttcatattgctcaaacacacatgctgtacaatttgtgtagttaacgcaattattacagsgtcctgagacgatatacatccttctcggctgacaggattaagagattaaagcaaagacaggcataggaaatcacaagggtattgattggggaagtgataa

SEQ ID NO: 180419 - DNA, 201 bp, Homo sapiens
aattatgtgtgttggttatagtaccttctttttcatctctgattttatttagttgagtttttactctttgtttttagtctagctaaaattgtatctgttcrtattttcaaaaaataacactgttcatcggtctcttatacgtttttatttctatctcatttatttctgctctgatatttgttatttcttcccttctactaa

SEQ ID NO: 180420 - DNA, 201 bp, Homo sapiens
ctttttcatctctgattttatttagttgagtttttactctttgtttttagtctagctaaaattgtatctgttcatattttcaaaaaataacactgttcatyggtctcttatacgtttttatttctatctcatttatttctgctctgatatttgttatttcttcccttctactaattttgggcgtactttgttctttttcct

SEQ ID NO: 180421 - DNA, 201 bp, Homo sapiens
tttaacatttataaaagtagattgtgcataatgacagattttaaatactgtaagcattattagatgatataattgttcttttgctgtaaatttaaatatgyatacatttttgtagagttaaaatatgccaatttagttttcctttggtatatattgcctttttggaaaataaatggttaacatttcaaatagataaacaac

SEQ ID NO: 180422 - DNA, 201 bp, Homo sapiens
cttaaataatctttctaggctgtttttttcttttgtctccttcagtaatagaaaggtttattccctttatggtgtttcataatgcttgtaggcctttttcmctctttcttggtctttcttttcctcttctcattggataaatttgtgtgttctgtcttcaagctcactgattctcttctcttttggtcaagtctgctgttg

SEQ ID NO: 180423 - DNA, 201 bp, Homo sapiens
tgaccaagggctataacaggacagaaatgagcaaagaggacttttggaaatcctctggggccaccaaggtgactcctgagaaagactcagggctctgtaamagaattagatgtttagttccaagttaaaaatccaattttatgctgtcctgcactatatcaaggaaacctaattcactttctaaaatgtaaaaataaaata

SEQ ID NO: 180424 - DNA, 201 bp, Homo sapiens
gagatcaacttttagaaatttcatctattagtgaaatcttgcagtatttgcctttccgtacctggcttatttcacttgacattttatcctctagatttatstgtgttgccacaaatgacaggatttccttctggttttaatagccgaatagcattccagtgtgtaaataccacattttctttatccattcattggttgatg

SEQ ID NO: 180425 - DNA, 201 bp, Homo sapiens
ccacttctatgagatcaacttttagaaatttcatctattagtgaaatcttgcagtatttgcctttccgtacctggcttatttcacttgacattttatcctmtagatttatctgtgttgccacaaatgacaggatttccttctggttttaatagccgaatagcattccagtgtgtaaataccacattttctttatccattca

SEQ ID NO: 180426 - DNA, 201 bp, Homo sapiens
cagcctctacctaaacactattcaactctccacttctatgagatcaacttttagaaatttcatctattagtgaaatcttgcagtatttgcctttccgtacstggcttatttcacttgacattttatcctctagatttatctgtgttgccacaaatgacaggatttccttctggttttaatagccgaatagcattccagtgt

SEQ ID NO: 180427 - DNA, 201 bp, Homo sapiens
gcggtcagagtttaaggttatctctcttattccctgaacaattgctgttatcctgttcttttttcagggtgcccacatttcatattgctcaaacacacatsctgtacaatttgtgtagttaacgcaattattacagggtcctgagacgatatacatccttctcggctgacaggattaagagattaaagcaaagacaggcat

SEQ ID NO: 180428 - DNA, 201 bp, Homo sapiens
atgctgagaaaaggaattcagcgatatttctcccatttgattttgaaagaagagaaatatggctctgttctgccgggctcaccaggcggtcagagtttaargttatctctcttattccctgaacaattgctgttatcctgttcttttttcagggtgcccacatttcatattgctcaaacacacatgctgtacaatttgtgt

SEQ ID NO: 180429 - DNA, 201 bp, Homo sapiens
gacgttccatgctgagaaaaggaattcagcgatatttctcccatttgattttgaaagaagagaaatatggctctgttctgccgggctcaccaggcggtcaragtttaaggttatctctcttattccctgaacaattgctgttatcctgttcttttttcagggtgcccacatttcatattgctcaaacacacatgctgtaca

SEQ ID NO: 180430 - DNA, 201 bp, Homo sapiens
cagggacgttccatgctgagaaaaggaattcagcgatatttctcccatttgattttgaaagaagagaaatatggctctgttctgccgggctcaccaggcgrtcagagtttaaggttatctctcttattccctgaacaattgctgttatcctgttcttttttcagggtgcccacatttcatattgctcaaacacacatgctg

SEQ ID NO: 180431 - DNA, 201 bp, Homo sapiens
aggcgggaatttcctcttcctaataagcctgggagcgctatgggagactggagtttatttcacctctgcaatctcgaccataagagacaggtacgccctgsgggggccagttcagagacctacccctaggtgcgcattctctttctcagggacgttccatgctgagaaaaggaattcagcgatatttctcccatttgattt

SEQ ID NO: 180432 - DNA, 201 bp, Homo sapiens
tcctaaccatgctggcagcggattagatggtgcccactcagattgagggtgggtctgcgtctctcagtccactgactcaaatgttagtctcttttggcaayacacacacacatacacccaggatcaataccttgcttccttcaatccaatcaagttgacactcaatattaactgtcacatgatattctagaagggaaggaa

SEQ ID NO: 180433 - DNA, 201 bp, Homo sapiens
gaataggtgtgggtgacagacatcaagtacttaacagggtaatagaatatcacaaggcaagtggagacagggcgagatcacaggaccacaggaccaaagtraaattaaaattgctaatgaagttttggcaccattgtcattgataacatcttatcaggacacagggttttgagatcaaccagtctgaccaaagtttattag

SEQ ID NO: 180434 - DNA, 201 bp, Homo sapiens
cttttttaacttttattttaggtttaggggtacatgagcaggtttgttatgtaggtaaacttgtgtcatgggggtttgttgtacagattattttgtcactsgaatactaagcctcgtacctaatggttatttttttctgttcctctacctcctgccaccctctatcctaaggtagagttcattgtctgtttttcccttctt

SEQ ID NO: 180435 - DNA, 201 bp, Homo sapiens
cgtgatgccccacaagccacaaaaaccagcaagtttttattagggagtttcaaaaggggagggagtatacgaataggtgtgggtgacagacatcaagtacytaacagggtaatagaatatcacaaggcaagtggagacagggcgagatcacaggaccacaggaccaaagtgaaattaaaattgctaatgaagttttggcac

SEQ ID NO: 180436 - DNA, 201 bp, Homo sapiens
tcctgccccgataatcacgtaggttcttttctattttcctaagcgtcgactggcttgagaaataaaaggacagagtacaaaagagagaaattttaaagctwggcgtccaggggagatatcacacataggtaggatccgtgatgccccacaagccacaaaaaccagcaagtttttattagggagtttcaaaaggggagggag

SEQ ID NO: 180437 - DNA, 201 bp, Homo sapiens
cacttaagacaatgtctggcaagtatcaaacaattagctgttattattattcatatatattcatagaatattctaagaatatatattcatagaatattctrtgaatatatatgaatgacaacacaaagtttacttaaatttattagatcaatggatatgtagatttatattttggtagatattgtcaaaaattcttaactt

SEQ ID NO: 180438 - DNA, 201 bp, Homo sapiens
atgaatatgagtcagcctttcttactacatattgtagattgatctcttagtgttttgatcgacagctagtatctcagtcgtaccatagatcagttctcatytctgatgccactagtgtcacaaaaattgatttgccattactctgttacctctgatctttgaagtggtagggtattaaacttttctattggtgagaaacat

SEQ ID NO: 180439 - DNA, 201 bp, Homo sapiens
ttatgttcctactgagtcatggtagtcctccttccccacacttacctgcccatgatatcgaaatatataattatatgttatacatattatatagcaattawaggcatcacacaattttctttatatatcaccaattctatttatattatatttacattatgtaaatatatagagtatatttatatgtaaatatatagaata

SEQ ID NO: 180440 - DNA, 201 bp, Homo sapiens
aacccaattctacacaactgatctatatttatgttcctactgagtcatggtagtcctccttccccacacttacctgcccatgatatcgaaatatataattatatgttatacatattatatagcaattataggcatcacacaattttctttatatatcaccaattctatttatattatatttacattatgtaaatatataga

SEQ ID NO: 180441 - DNA, 201 bp, Homo sapiens
gaacccaattctacacaactgatctatatttatgttcctactgagtcatggtagtcctccttccccacacttacctgcccatgatatcgaaatatataattatatgttatacatattatatagcaattataggcatcacacaattttctttatatatcaccaattctatttatattatatttacattatgtaaatatatag

SEQ ID NO: 180442 - DNA, 201 bp, Homo sapiens
agaacccaattctacacaactgatctatatttatgttcctactgagtcatggtagtcctccttccccacacttacctgcccatgatatcgaaatatataattatatgttatacatattatatagcaattataggcatcacacaattttctttatatatcaccaattctatttatattatatttacattatgtaaatatata

SEQ ID NO: 180443 - DNA, 201 bp, Homo sapiens
gagaacccaattctacacaactgatctatatttatgttcctactgagtcatggtagtcctccttccccacacttacctgcccatgatatcgaaatatataattatatgttatacatattatatagcaattataggcatcacacaattttctttatatatcaccaattctatttatattatatttacattatgtaaatatat

SEQ ID NO: 180444 - DNA, 201 bp, Homo sapiens
tgggaggccaaggtgggaagatggcttaaggccagtttttcaggaccttcttggacaacagagtggggctccatctctacagaaaaaattaaaataaaaaataaacgtaaaaaaataaagtatgttgtaatttggcctgtttaatttgacaatgccattagtagtatacactggaaagctgttatactatggttgttgccc

SEQ ID NO: 180445 - DNA, 201 bp, Homo sapiens
tagcagcagttgtattttagttcctgctgaagtgaagaaagtgaagttttaaagaaagtaatggtttgtgaattgggatgatatgacagactttagtaatragagtagtttgcctgtgttggagaatcctagaaaatgagtaacaactgtcatgaagaatgattcaaacgtgatgttttcattgataggaagagagaatga

SEQ ID NO: 180446 - DNA, 201 bp, Homo sapiens
gtggcttgatgcggatggcattgaatctataaattactttgggcagcatggccattttcatgctattgattcttcctatccatgagcatggaatgttttttcatttgtttgggtcctctattatttccttgagcagtggtttgcagttctccttgaagaggtccttcacatcccttgtaaggtgtattcctaggtagttta

SEQ ID NO: 180447 - DNA, 201 bp, Homo sapiens
agagaatctggtgtgtgtgttcaggaaggaggggtgggagctacatgcattcacatccacagttagaactatatcctttactataatacacatgcacacamaaacacacacacacacacgcgtatttatgaaaaactctaaagagtttatgagtttatattgagcttctcagaacttccttaacatggtgaaataaataat

SEQ ID NO: 180448 - DNA, 201 bp, Homo sapiens
gttgcctgttcactctggtgatagtttcttttgctgtgcagaagctctttagtttaattagatcccatttgtcagttgtggcttttgttgccattgcttttagtgttttagtcatgaagtctttgcacatgcctttgtccggaatggtattacctaggttttcttctaaggtttttgtggttttaggtcttacatttaggc

SEQ ID NO: 180449 - DNA, 201 bp, Homo sapiens
gtggcgtgatctcagctcagtgcaacctccgcctcccgggttcacgccattctcctgcctcagcctccagagtagctgggactacaggcgcccgccaccaygcctggctaatttttttttttttttctatttttagtagagacagggtttcactgtgttagccaggatggtctcgatctcttgacctcgtgatccgcccac

SEQ ID NO: 180450 - DNA, 201 bp, Homo sapiens
tgcaaaaatttcctcctattctgtaggttgcctgttcactctggtgatagtttcttttgctgtgcagaagctctttagtttaattagatcccatttgtcarttgtggcttttgttgccattgcttttagtgttttagtcatgaagtctttgcacatgcctttgtccggaatggtattacctaggttttcttctaaggtttt

SEQ ID NO: 180451 - DNA, 201 bp, Homo sapiens
cagtggcgtgatctcagctcagtgcaacctccgcctcccgggttcacgccattctcctgcctcagcctccagagtagctgggactacaggcgcccgccacyatgcctggctaatttttttttttttttctatttttagtagagacagggtttcactgtgttagccaggatggtctcgatctcttgacctcgtgatccgccc

SEQ ID NO: 180452 - DNA, 201 bp, Homo sapiens
tggtgcgtttacaaaacctttagctagacacagagtgctgattggtgtgtttacaaaacctctagctagacacagagtgctgattggtgcatttacaatcytttagctagacagaaaagttctccaggtccccaccctacccagaagcccagctggcttcacctctcaatggcactcgctgggggactttgcggcacctag

SEQ ID NO: 180453 - DNA, 201 bp, Homo sapiens
acccttgcagtgagtgttacagttcttaaagatggtgtgtctggagtttattccttctgatgttcggacgtgtctagagtttcctccttctggtgggttcrtggtctcactggcttcaggagtgaagctgcaaccttcacagtgagtgttacagctcttaaaggtggcgcgtctggagttgtttgctctttccgtccagag

SEQ ID NO: 180454 - DNA, 201 bp, Homo sapiens
tgtgtccagaattggtggattcttggtctcactgacttcaaaaatgaagctgcggacccttgcagtgagtgttacagttcttaaagatggtgtgtctggartttattccttctgatgttcggacgtgtctagagtttcctccttctggtgggttcatggtctcactggcttcaggagtgaagctgcaaccttcacagtgag

SEQ ID NO: 180455 - DNA, 201 bp, Homo sapiens
gtaaccctagtgtttttatgttttccatttgcttggtagacatttccccatcccttaattttgagcctgtgagtgtcattgtatgtgtgataggtctcttraagacagcataccactgagtcttgcttctttattcaccttgccactctgtgtcttttacttggagcatttagcttcttatattcaatgttagcattgata

SEQ ID NO: 180456 - DNA, 201 bp, Homo sapiens
aggagggctcatgttgtgtccagaattggtggattcttggtctcactgacttcaaaaatgaagctgcggacccttgcagtgagtgttacagttcttaaagrtggtgtgtctggagtttattccttctgatgttcggacgtgtctagagtttcctccttctggtgggttcatggtctcactggcttcaggagtgaagctgca

SEQ ID NO: 180457 - DNA, 201 bp, Homo sapiens
catgtaacttccttgtgccttcaggacctgttcaagcctgatcacatatataccacttctatttaatgatggaatgctgctgcacacaacccactttatgrctagatgggtcagaaagcacccagttcatgataggcagtacaggtggcatggtgccttgatgacccgtaggcaaacattcagtttccaccaaagcccagt

SEQ ID NO: 180458 - DNA, 201 bp, Homo sapiens
gtgcaggagcatgttcaaagcaatttttctttaaaaatattatttataaatcacttgatactgtacccaatttttatatttaaaaatagcaaagacataawgaaggtggaaaatctgatattgtttgagagaccttctatttgttttacaggtttaacttatgcatctaactttttaacttactgggcagtcatttcagtt

SEQ ID NO: 180459 - DNA, 201 bp, Homo sapiens
aagaagaccacaaaaccactataaaagaaatggcaaaatggtgggattacatccttacttatcaatggtaacattaaatgtaaatggactaaactctccawtcaaaaggcatagagtggctgaatggattttaaaaaatgacccaacaatctgttgcctacaagaaacagacttcacctataaagacacatagactgaaaa

SEQ ID NO: 180460 - DNA, 201 bp, Homo sapiens
taacttactgggcagtcatttcagtttaaacagttatgtcagagtgaactatgttgttatcatgccaagttgatttctagaaatagtagttgtaacaggarcattttcatgtaatagagcttgtacagcttataaagacttcgggattttaggaaaggggtgagataagaagtaacagtaacaaatgggtatttttattct

SEQ ID NO: 180461 - DNA, 201 bp, Homo sapiens
tgctcatgaagcattcattgttggtacatataattttgcctattcctatacttgaataaattctttcttctacctaaactatggatgtatgtctacatctmtttgctatttgtagattagaaaatccagaaaggcagtctaacagaattctttttgtgctgtacctagcaaaatgctctacacaattaagtccttactgca

SEQ ID NO: 180462 - DNA, 201 bp, Homo sapiens
catcttgatgggacagcttaaattgactaattcccagatgcgtacaaatataagtaaggggaaaatgttacttaaatacttcgatttattttttttttgtsgttaaaataaaaacaactgctgctatcaagagaagctaggtatatgtttctttaacttttgtgtgcataagaatcacctggagagatggttcgacacaga

SEQ ID NO: 180463 - DNA, 201 bp, Homo sapiens
atcatgccaagttgatttctagaaatagtagttgtaacaggaacattttcatgtaatagagcttgtacagcttataaagacttcgggattttaggaaaggsgtgagataagaagtaacagtaacaaatgggtatttttattctttatgaatgggcagatgaagagaatcctggtgtttctgaataataacagtcgagaaaa

SEQ ID NO: 180464 - DNA, 201 bp, Homo sapiens
aacataatctcttgcaatgataatctctacaagtttataaaaatcatgggtccaagattatgctaaaaataaaacccatttcttccatcccatgtttatarcacacttctagttggaccgttatttgaaaggccccagatttaaagttaggtttaaagatgttctaaaatgtcttcacttaaaaaacaaaaagacaaaatt

SEQ ID NO: 180465 - DNA, 201 bp, Homo sapiens
agtgggatgtgtcaagttaaaatcttctgcacagcaaagaagataatcaacaaagtgggaagacaacccacagaatgggaggagtatttccaaactgttcrtctgacaagggattataaaccagagtatataaggagcacaaacaactacataggaaaaaatctaataatccatttaaaaaatgggccaaagatctgaatt

SEQ ID NO: 180466 - DNA, 201 bp, Homo sapiens
tgagtggcctttagactttgtgagcagctgtcaactgacagccaacaagaaaacagggacttcattcctacacctgaaaggattgaatttgtcaccaatcrtgtgagctcaaaagataattctaaactccagaaaggagcaaggcctggccaacaccttgattttggttttgtgagcccctgagctgatggcattgataaa

SEQ ID NO: 180467 - DNA, 201 bp, Homo sapiens
ttttaggtttaggggtatatgtacatgtttgttatataggtaaattgtgtgttatggagggttggtaatacagattatttaatcacccaggtaataagcayagtaccccatttgtagttttttgatccccaccttcctcccaccctccctgctcaactaggccctagtgtctatctttcccttctttgagtccatatgtac

SEQ ID NO: 180468 - DNA, 201 bp, Homo sapiens
gtgtagtataagctctcctggtactgttaaagctatttctttacttataattttaaaaataacttttcacattactaaaaacaaactactaaacatttttyaatgaaatataaatttctttatttgggtcatttttaatgtatcctaattttccaactgttaattctttccatttctgtcctctgtcttcattttaaatat

SEQ ID NO: 180469 - DNA, 201 bp, Homo sapiens
tgtgggacaaacgaaatgtatcagtaagccagatgtggttttcatgcccccagttttcaatctctgctctggatgcaacctagaaactagcagatattgcrgtaagatgaaacccaggtcagaaaagctggttttgagcccaggcttgcctcctattggctgtgtcagattgagcaagtgatgtaattagtgttcacctca

SEQ ID NO: 180470 - DNA, 201 bp, Homo sapiens
cattccagtgtgtaaataccacattttctttatccattcattggttgatggatgcttaaattgcttccatctcttgactgttgtgaccagtgctgcaatamacatgagaatgcagttatctcttcagcatactgatttcattttctttggataaatacccagtaatgaaattgctgaatcatatagtagttccatgtttaa

SEQ ID NO: 180471 - DNA, 201 bp, Homo sapiens
agtttaccagtgtaccatcatttatctaaaaaaataactgaagcttccaggattactgagctggaaaatgatgttgccaataatcagagaaacatattttrtttacagagtttaccctttctttagataggtttttggatagccagaaaaatcttgacctttagggagaaatgtaccttatggttagtgataaatctcttg

SEQ ID NO: 180472 - DNA, 201 bp, Homo sapiens
aatttgtttaagttctttgtagattctggatactagccctttgttagatggatagattgcaaaaatttcctcctattctgtaggttgcctgttcactctgrtgatagtttcttttgctgtgcagaagctctttagtttaattagatcccatttgtcagttgtggcttttgttgccattgcttttagtgttttagtcatgaa

SEQ ID NO: 180473 - DNA, 201 bp, Homo sapiens
ctcaggggcaacttaaagatattctcagttatttcataactatcatttaaattttctttttaaaagtttttgtttatatttggcacataattttacatgtwtatagggtacagtgtgttgtttcaatacatgtatacattgcatgatgatcaaatcagtgtagttttgatctatccctcaatgtctatccctcaatccttg

SEQ ID NO: 180474 - DNA, 201 bp, Homo sapiens
ttacttactttatagataaaagttggttaaccaggtagttaaacaaatgtagtagtataaataaaatgctcaatgtagtataaataaaacaaataagtgtraggtattcattctacacttaccttgaaaaatgtctcttaataattatgtacatatctttgttatagcctttaaattcttgctctgattattttaaatcat

SEQ ID NO: 180475 - DNA, 201 bp, Homo sapiens
tcttcactgaaaggaacaaatgataaatatttcatcgaatgaatacgtactattgttgttgagctttctgagttggagaaagagcagactttcttgaggargtggtttcgaatcagaactagaaagatgagaaagacatcttccttccattttccatggccacctctgcttcagactcaccttttttctgttcatatcctt

SEQ ID NO: 180476 - DNA, 201 bp, Homo sapiens
tagattccctaggtacataaccctatatccaaaggttacagtgtaaatataaagagaactttatcaatggttttatgatgtgtatttttaaaggaattttmtcctttgttttttaaaacaatgtaacctatatgaattttgttttcatcttaaaccaaatgaaactgaagtaatatatcttacctagggtcagaaaacaaa

SEQ ID NO: 180477 - DNA, 201 bp, Homo sapiens
gtaaataaagggagtacaaagtcaagtagcaataagaaaaacttgaaatgcacgagggcaggaaattgctctgtaaatatgattaaattctagacccaacrttcagtggaaacaagttttagaatttttccattagagatcattaaaaacattatttctctcaaacaaggtgacaagtggaagagcgtgcacttgatttct

SEQ ID NO: 180478 - DNA, 201 bp, Homo sapiens
aaacagattgtaatgacagatgatagctatagatagatagatagagtaaacatgtaagctactacaaggatccaattagagtgaatttaggttggaagaargttctttcttcatctttctttatctctgaataatttcaaagttgacagaccatggttgctgacatctttattgagaaaacaagagttttgcccacgctta

SEQ ID NO: 180479 - DNA, 201 bp, Homo sapiens
ttaatattaatctagtctaatatttattgtcagttccctactggggtaaatacttttgttttatttttgtttgtttttatctctagtatcactaactaactttgcattgtttcatgtgatcataggctatttgctttgtaaaagttattcactattgaaatggtatgtgtcagtcattgctctaagtgttttatatatata

SEQ ID NO: 180480 - DNA, 201 bp, Homo sapiens
agattttagggagtcaaggcttagctcaggactcccggactgtgttttctaattctgggtgactcttattgggcactggctttgttttctggcccctcatrgttaggaacctgttgcacaggataggctgaaatgttcctgaactgctggtcacaatacttgtatgcatggtgccagccaaagctctttgtagggcagtgg

SEQ ID NO: 180481 - DNA, 201 bp, Homo sapiens
ttctgatttttttactatatataaattatacttcgagatcgcaccactgcactccagcctgggcgacagagcgagactccgtctcaaaaaaaaaaaaaaaattatacttcagtttcataatgtagaaacgtgatgctttttcttaaagagataacatgagtggggctataaggctaatatatacaaaatacacacacacat

SEQ ID NO: 180482 - DNA, 201 bp, Homo sapiens
gttaatattaatctagtctaatatttattgtcagttccctactggggtaaatacttttgttttatttttgtttgtttttatctctagtatcactaactaactttgcattgtttcatgtgatcataggctatttgctttgtaaaagttattcactattgaaatggtatgtgtcagtcattgctctaagtgttttatatatat

SEQ ID NO: 180483 - DNA, 201 bp, Homo sapiens
ttcttgctgctaccatgtgaagaaggatgtgtttgcttccccttccaccatgagtgtacatttcctaaggccttcccagccatgctgaactgtgagtcaaytaaacctctttcctttataaattacccagtcttgggcatgtctttattagcagcatgggaacagactaatacactcctactttgttctttgaggcatatc

SEQ ID NO: 180484 - DNA, 201 bp, Homo sapiens
tgttaatattaatctagtctaatatttattgtcagttccctactggggtaaatacttttgttttatttttgtttgtttttatctctagtatcactaactaactttgcattgtttcatgtgatcataggctatttgctttgtaaaagttattcactattgaaatggtatgtgtcagtcattgctctaagtgttttatatata

SEQ ID NO: 180485 - DNA, 201 bp, Homo sapiens
ctcatgatggtgagtgattctcacaagatctgatggttttacaaagggcttttcccccttttgctgggtgcttcttgctgctaccatgtgaagaaggatgygtttgcttccccttccaccatgagtgtacatttcctaaggccttcccagccatgctgaactgtgagtcaattaaacctctttcctttataaattacccag

SEQ ID NO: 180486 - DNA, 201 bp, Homo sapiens
ctgttaatattaatctagtctaatatttattgtcagttccctactggggtaaatacttttgttttatttttgtttgtttttatctctagtatcactaactaactttgcattgtttcatgtgatcataggctatttgctttgtaaaagttattcactattgaaatggtatgtgtcagtcattgctctaagtgttttatatat

SEQ ID NO: 180487 - DNA, 201 bp, Homo sapiens
taagccgcagaccatttaagaagaagcagagcctaaaagtttggaaaatttgcagcctgttgatgcaatagaaaagaaaaacccattttctgtggagaaaytcaagcctgttgcagaaatttgcataagtaacaaggagccaaatattaaccaccaagacaatggggaaaaggtttccagggcatgtcagagaccttcaca

SEQ ID NO: 180488 - DNA, 201 bp, Homo sapiens
catggaaaaaacacatatggatgaaatattatggagctggtgtcttttagtgaagaacagaagagatcatgaaaaaagaaataaacaaaatatgttaaaaktcaccaaaaagaaaaataataaaatgatctactatcttctcctcttttatattgtgataaacagagattcaagtttttaaaaagaaaaattgggccaggt

SEQ ID NO: 180489 - DNA, 201 bp, Homo sapiens
atttagggtatctggcagaagaaatttctaagccgcagaccatttaagaagaagcagagcctaaaagtttggaaaatttgcagcctgttgatgcaatagamaagaaaaacccattttctgtggagaaattcaagcctgttgcagaaatttgcataagtaacaaggagccaaatattaaccaccaagacaatggggaaaagg

SEQ ID NO: 180490 - DNA, 201 bp, Homo sapiens
tataagtttcctgaagccttacaagccatgctgaacagtgagtcaactaaacctctttctttataaattacccagtcttgggtatgtctttattagcagcmtgagaatggactaatacagtaaattggtactgggggtaccaaaaagatacccaaaaatgtagaagtgactttggaactgggtaacaggcagaggttagaa

SEQ ID NO: 180491 - DNA, 201 bp, Homo sapiens
cacagaataaaaaatatttctagataagaggcaatgagacagtgctactaaagattgtcatatatatatttatatatatgtgtatatatatatatatatatttctaaagcacagggtgagtaggtgtcacagaataatatttcattatggttcctaatagaattctgtttatccaaaacaaatgtgttagaattttatttt

SEQ ID NO: 180492 - DNA, 201 bp, Homo sapiens
ccacagaataaaaaatatttctagataagaggcaatgagacagtgctactaaagattgtcatatatatatttatatatatgtgtatatatatatatatatatttctaaagcacagggtgagtaggtgtcacagaataatatttcattatggttcctaatagaattctgtttatccaaaacaaatgtgttagaattttattt

SEQ ID NO: 180493 - DNA, 201 bp, Homo sapiens
ggctttttaaatttaaaccacagaataaaaaatatttctagataagaggcaatgagacagtgctactaaagattgtcatatatatatttatatatatgtgkatatatatatatatatatttctaaagcacagggtgagtaggtgtcacagaataatatttcattatggttcctaatagaattctgtttatccaaaacaaat

SEQ ID NO: 180494 - DNA, 201 bp, Homo sapiens
tgggcgtggtcgtgggcgcctgtaatcccacctacttgggaggctgaggcaggagaatcacttcaacctgggaggcggagcttgcagtgagccgagatagygccactgcactccagcctgagcaacaaagtgagacttcgtctcaaaaacaaacaaacaaacaaaaaaacttgtgcttttcaaagccactattaagagaaa

SEQ ID NO: 180495 - DNA, 201 bp, Homo sapiens
ccagtcactgtggccttgcagtggagtgcttttgtgtcagtggggtggtgcactagtatgggtgaggtgctgacaggggcgggcacaccggtgtacactgwgctcacttgcgccagagaagaagcggcacagcaggggtgggctgctggtggacacgaggttctggaatctgtgcacgcagttgcacccaccgctgtgcgg

SEQ ID NO: 180496 - DNA, 201 bp, Homo sapiens
tttttaaatgattatataacagtagaagatttatttctcaggcataaaacttaaagtgggaaagttacttgaagtgagaaatctactggaagagtccacayaggaaatgagatctaatattacactactagaggagagagattaagttatggctatattgagaagatagtttatgatatttgacaactagttggctgtcag

SEQ ID NO: 180497 - DNA, 201 bp, Homo sapiens
aaagacatattatgtacagtggacttgttatcagaaacaaggcaagtcagaagacaaaagggtgacatcttgaaagtgatgaaagaaaacaactctcaacyccgaattttataaccactgaaagttatcatgatgaaggagaaatgaagatgttgtttgacatataaaaatggggagaatttattgtcagcagagcttcta

SEQ ID NO: 180498 - DNA, 201 bp, Homo sapiens
gttatcactgcagagattgatgggatctaaaatttaaattgttaagttaaagttgggagacatgcttttcctttaagggctcaacttcattcaatgtccaygtaattagagtcctcatgaactgtcaggctctctcttaatgtgtacactaccataattacctacccttcagaaatgaactcaaacacaattcaaaatatc

SEQ ID NO: 180499 - DNA, 201 bp, Homo sapiens
taaaaaaatgacattccatgcaaagtaaaactaaaaaagagcaggagtagctatacttacatcagacaaaggagatttcaagacaaaactataagaagagacaaagaagtttattatttaatgataaatgggtcaatttagccagaggatataacatttgtaaatatgtatgcaaccaacactggcacagccagatatata

SEQ ID NO: 180500 - DNA, 201 bp, Homo sapiens
ataaaaaaatgacattccatgcaaagtaaaactaaaaaagagcaggagtagctatacttacatcagacaaaggagatttcaagacaaaactataagaagagacaaagaagtttattatttaatgataaatgggtcaatttagccagaggatataacatttgtaaatatgtatgcaaccaacactggcacagccagatatat

SEQ ID NO: 180501 - DNA, 201 bp, Homo sapiens
ggatacaatgtagagaatggattagagaagagctattctttccaggaggtctgggtaggagtctgtggcagtattccatgtattctgtgtaggaaatgatrtctgcttagagcaaaatagtgcaaaatgaggtgtaagaggagtaggtaaaaccaagaggcatttaagatatgatattaagagagctggattgcttgcttg

SEQ ID NO: 180502 - DNA, 201 bp, Homo sapiens
gggtttggggtccccctaatgcagatatggctgcagtgaccaaaacttagatcataacacacaagtccattcaaaatcataggaagtcttccctaaaaggrcaggtatgaacaagcccagactgtgaaggctacaattaattctgaattctgtaatgcccagacactgacaaatatccacaagaatcaagaccatccagga

SEQ ID NO: 180503 - DNA, 201 bp, Homo sapiens
aaagtgcactaaagatatttctgactcctaaatggtatggaatactaagtgctgctactcctaatttggcagagttagaataggtatttgagagaataggyatttaaaaagcccaatgatgccacagtgcacctgcaaacactttgtggaaatttgagggcatgtggtaggtttgcatgggcgttatgacatagtggatcc

SEQ ID NO: 180504 - DNA, 201 bp, Homo sapiens
gggtgaaacaccaatcaggatcttgtagtcctcaattctaggctttggctcttggatggcatttctggacgtgccttgagccacaggggagcccactgccmtgaagggtgagtcctaagcctggcattcaacacaagctgactgaagatcccttgggctttcagtgaacattgctggtagcctggcacaactctttgtggg

SEQ ID NO: 180505 - DNA, 201 bp, Homo sapiens
ttgcatcttaggtacccgctcagctgcactggggtgaaacaccaatcaggatcttgtagtcctcaattctaggctttggctcttggatggcatttctggaygtgccttgagccacaggggagcccactgccctgaagggtgagtcctaagcctggcattcaacacaagctgactgaagatcccttgggctttcagtgaaca

SEQ ID NO: 180506 - DNA, 201 bp, Homo sapiens
ttgttcactttactacagaattgacttttttttttttttttttttgagacggagtctcgctgtcttgcccaggctggagtgcagtggcacgatcttggctyactgcaagctccgcctcccgggttctcgccattcttctgcctcagcctccctagtagctgggactacaggcgcccgccaccatgcccggctaattttttt

SEQ ID NO: 180507 - DNA, 201 bp, Homo sapiens
ttatgccagtgttggtgttagcatggtggtgggggtgctggtgggcgcaggactgtgcatgccctctatgcatgttcacactggtggtggtggctgcctargttgtgggcaagctgtctgttttccctgcctagtttcactttggcagcagtgtcagtgcaagtggtgggtgctgctggcagcagggcaggcggctttcat

SEQ ID NO: 180508 - DNA, 201 bp, Homo sapiens
aattagctgggcgtggtcgtgggcgcctgtaatcccacctacttgggaggctgaggcaggagaatcacttcaacctgggaggcggagcttgcagtgagcckagatagtgccactgcactccagcctgagcaacaaagtgagacttcgtctcaaaaacaaacaaacaaacaaaaaaacttgtgcttttcaaagccactatta

SEQ ID NO: 180509 - DNA, 201 bp, Homo sapiens
cttctttgttcactttactacagaattgacttttttttttttttttttttgagacggagtctcgctgtcttgcccaggctggagtgcagtggcacgatctyggctcactgcaagctccgcctcccgggttctcgccattcttctgcctcagcctccctagtagctgggactacaggcgcccgccaccatgcccggctaatt

SEQ ID NO: 180510 - DNA, 201 bp, Homo sapiens
atctctttgcctggtgacccctgccctctgcatagaggaagcctgatcattatcatcatgggctgaaattatagctcctagatcattaggaatctagtctycttttgtagttcttttcccagtcttagctacataacttcatccacaagagttttccagtagtttgagatgacttctgcagcctagccatcacatttgtgt

SEQ ID NO: 180511 - DNA, 201 bp, Homo sapiens
ctttgggaggccaaggtgggcagatcacttaaggtcaggagtttgagagtagcctggccaacatggtgcaaccccatctctactaaaaatacaaaaattakctgggcgtggtcgtgggcgcctgtaatcccacctacttgggaggctgaggcaggagaatcacttcaacctgggaggcggagcttgcagtgagccgagata

SEQ ID NO: 180512 - DNA, 201 bp, Homo sapiens
ttttttttttttttttttgagacggagtctcgctctgtcgcccaggccggactgcggactgcagtggcgcaatctcggctccctgcaagctccgcttcccrggttcacgccattctcctgcctcagcctcccgagtagctgggactacaggcgcccgccaccgcgcccggctaattttttgtatttttagtagagacgggg

SEQ ID NO: 180513 - DNA, 201 bp, Homo sapiens
aaagtatgagtcataagagaatggattggtaaattagatatcattaaaatttaaaaacttgtgcttttcaggccgggcatggtggctcacgcctgtaatcycagcactttgggaggccaaggtgggcagatcacttaaggtcaggagtttgagagtagcctggccaacatggtgcaaccccatctctactaaaaatacaaa

SEQ ID NO: 180514 - DNA, 201 bp, Homo sapiens
atactattcattgtgatatatatatataatggtatatatatatttcactgtgatatgaaatatatataaatatattttaaatattatatatatatatatawgtatcactacagtgttaaagtcaagaagcatgggaagcaaacagatccagaattcagggaatacaccacatataataaatgatatctagctctctttctc

SEQ ID NO: 180515 - DNA, 201 bp, Homo sapiens
tattttgttaggtagaaattgacaagttgattctatccatatagatatacaagggatgtataatagctaaaaatgcattaataaagaaaaaagttagagaattaacaaagtaggatttaaaatgtattataaagctataataatcaagactgtgtgttattaacataaagacagacaaaggaacagaactgaaaatctgga

SEQ ID NO: 180516 - DNA, 201 bp, Homo sapiens
tatactattcattgtgatatatatatataatggtatatatatatttcactgtgatatgaaatatatataaatatattttaaatattatatatatatatatatgtatcactacagtgttaaagtcaagaagcatgggaagcaaacagatccagaattcagggaatacaccacatataataaatgatatctagctctctttct

SEQ ID NO: 180517 - DNA, 201 bp, Homo sapiens
cttattttgttaggtagaaattgacaagttgattctatccatatagatatacaagggatgtataatagctaaaaatgcattaataaagaaaaaagttagagaattaacaaagtaggatttaaaatgtattataaagctataataatcaagactgtgtgttattaacataaagacagacaaaggaacagaactgaaaatctg

SEQ ID NO: 180518 - DNA, 201 bp, Homo sapiens
aaaacttattttgttaggtagaaattgacaagttgattctatccatatagatatacaagggatgtataatagctaaaaatgcattaataaagaaaaaagttagagaattaacaaagtaggatttaaaatgtattataaagctataataatcaagactgtgtgttattaacataaagacagacaaaggaacagaactgaaaa

SEQ ID NO: 180519 - DNA, 201 bp, Homo sapiens
taaaacttattttgttaggtagaaattgacaagttgattctatccatatagatatacaagggatgtataatagctaaaaatgcattaataaagaaaaaagttagagaattaacaaagtaggatttaaaatgtattataaagctataataatcaagactgtgtgttattaacataaagacagacaaaggaacagaactgaaa

SEQ ID NO: 180520 - DNA, 201 bp, Homo sapiens
cacctcagcctcccttgtggctgggactagaggtgtgcaacactactcctagctatttttttttctattttttgtagagacagggttttgccatgttgccyagggtggtctcaaattcctgagctcaagcaatccacccccctctgcctcccaaagagttgcgattacaggcatgagccaccacacccagcttcagtgtaa

SEQ ID NO: 180521 - DNA, 201 bp, Homo sapiens
atcctcccacctcagcctcccttgtggctgggactagaggtgtgcaacactactcctagctatttttttttctattttttgtagagacagggttttgccaygttgcccagggtggtctcaaattcctgagctcaagcaatccacccccctctgcctcccaaagagttgcgattacaggcatgagccaccacacccagcttc

SEQ ID NO: 180522 - DNA, 201 bp, Homo sapiens
agttattaaaaattgttccaggttaatggttaatcctctcaagatagtttgagagggatgtagggagaagaatgactattattaccatagatatgaacatrtttgttatcatcttgtagactatgtgagaaaattaaatacaatgtccataataaatacttagatttctttcatattttttaaagatatgctcattgttaa

SEQ ID NO: 180523 - DNA, 201 bp, Homo sapiens
ggtgaaccttccttctgttctacttttaaagaatcccctagtctattggatttgatagatttattgtgaaagagtataaaaaagtaaaagattaaggcatrtagaaggtacaaggccagggaagggggccgtatattctaatatgggattagggaaaagtagagaaattccttggcttcctgttcctattttgtccagcac

SEQ ID NO: 180524 - DNA, 201 bp, Homo sapiens
ttttcactgactgataatttaaaaaaatcaagtggtaaactttatgtgattattttcttttgtatagtaagaatgattgaaaaagtctacttctatcatcwcaattttataaaagtggatattttaacaccaaataacatggaagaactgaatctcaaaataaataatagttatttaaagagaataaattaagctccctgt

SEQ ID NO: 180525 - DNA, 201 bp, Homo sapiens
ttcaaaaaagtactatttatttttcctaataaaattaatattcattgtagaaaaaaataaaattaaaataaagaagaaaattaaatttgaattccacctakatgttgccctcacggtaaaatgaaatttactttttaaattaatatattatgggcattttgtctttcataagatatcctttaaaaatatggttttaatggc

SEQ ID NO: 180526 - DNA, 201 bp, Homo sapiens
atatgggaatctctaatgtctttcaaaattaccatgatgttgaagacaatgtttatagtgatctcatatacaagtatagattttactgctctagtgatatmatttacaagtatagattttactgctctttcttctttgtttctgtgcaatctgttacaccaaccaaaaataagattgaaccgagatatgatttttagtaaa

SEQ ID NO: 180527 - DNA, 201 bp, Homo sapiens
aaaccagtatggattaactgtaatgggtgagcacttggtagagtgggagagatataactgaaatgctggacacagaacttgtaagtcactgtgctggtccrtattagtagttgatatcggaaagcaaaatgtatacaggagaaacagtgtaaataaagcaaaagagtaaaaaaaagttagggatgcatacagtgtttgtcc

SEQ ID NO: 180528 - DNA, 201 bp, Homo sapiens
taaaacattggacctccatgatccagtcacctcccacggggtttaggtgggggcccacctccaacactgggtattacaattctgtatgagacttggtgggractctgaacaaaaccatatcaccagacattgccaaatgtactctgggggtaaaactacccccagttgagaatccctaaaaaactttgattaacaaataaa

SEQ ID NO: 180529 - DNA, 201 bp, Homo sapiens
ggaggctgaggcaggagaatcacttgaacccaggaggcagaggttgcagtgagccgtgattgtgccactgcactccagcctgggtgacagagtgagactchgtctcaaaaaaaaaaaaaaaaaaaaaaaaagaatctcttagctctagtttgttgtcttactctaagaaaaaaaggatcccttggcatactaagtttatga

SEQ ID NO: 180530 - DNA, 201 bp, Homo sapiens
atataatttaaagaatatatatcactatataatgatatataaagatatatgaatatatggatataatggtatatatactattcattgtgatatatatatawaatggtatatatatatttcactgtgatatgaaatatatataaatatattttaaatattatatatatatatatatgtatcactacagtgttaaagtcaaga

SEQ ID NO: 180531 - DNA, 201 bp, Homo sapiens
tgaaatatcaacattttcaaaatctcttctgtcaacactactataaggacttttatatatatatatatatatatatatatatatatatatatatacacacmtgtatacataaaaacatgtattgcaaatagaaataaggtctctatttaaaaatctaacagttatttgctaatcacttatttttatacatataggcattag

SEQ ID NO: 180532 - DNA, 201 bp, Homo sapiens
aaagtacacaaataaatataatactatatacaataagaattggccagttccttgagatacacagtgataagggcttatagaagaaggtggaaggggaagartatgtcttgattgagggagcagggggacggggcagtggtgttgaaggcaggctgcctagagtgtataacatttgtattagactaagaataatcaaatttg

SEQ ID NO: 180533 - DNA, 201 bp, Homo sapiens
gggttactctgaaatatcaacattttcaaaatctcttctgtcaacactactataaggacttttatatatatatatatatatatatatatatatatatatayatacacacatgtatacataaaaacatgtattgcaaatagaaataaggtctctatttaaaaatctaacagttatttgctaatcacttatttttatacatat

SEQ ID NO: 180534 - DNA, 201 bp, Homo sapiens
tttgacataactgggttactctgaaatatcaacattttcaaaatctcttctgtcaacactactataaggacttttatatatatatatatatatatatatayatatatatatatatacacacatgtatacataaaaacatgtattgcaaatagaaataaggtctctatttaaaaatctaacagttatttgctaatcacttat

SEQ ID NO: 180535 - DNA, 201 bp, Homo sapiens
aaactgggctatggaaagattatttaaattccccaaggttacaaacctctgcaaggactcacagctggtttgtcagacttttgagcccatatgttgaaacrgtagactgtgttgtgcccctgacccaggcatgcctagactcctttttgccaaagtaatcataacatttatatactatgtatgaactatttatacaaacac

SEQ ID NO: 180536 - DNA, 201 bp, Homo sapiens
cctttgacataactgggttactctgaaatatcaacattttcaaaatctcttctgtcaacactactataaggacttttatatatatatatatatatatatayatatatatatatatatacacacatgtatacataaaaacatgtattgcaaatagaaataaggtctctatttaaaaatctaacagttatttgctaatcactt

SEQ ID NO: 180537 - DNA, 201 bp, Homo sapiens
gattaatttagattgcagtttttctcagcagtgagttttggggtcaacctaacaagtcttagaaaaaatagttaaaaattgaaagcaatagtgaaacaccwgtttttccccaaagcttaataaaaatatttgataccattcattcattcagtagaggtactggagatttgatgtgctcataaataataaattacaaaacag

SEQ ID NO: 180538 - DNA, 201 bp, Homo sapiens
ttagggatgcatacagtgtttgtcctttgacataactgggttactctgaaatatcaacattttcaaaatctcttctgtcaacactactataaggacttttatatatatatatatatatatatatatatatatatatatatacacacatgtatacataaaaacatgtattgcaaatagaaataaggtctctatttaaaaatc

SEQ ID NO: 180539 - DNA, 201 bp, Homo sapiens
gggtttgaatccaatctagctatgaagtccagacttctaacaactaaatttggctgcctcttggggtctcattacctctatacagggtgattatcacagcrtgaaatacaggatatattgtcttcttggtgaaaatacagacattacattttagcattactgaataattaaatgtattctgtcacaatttctgttgattta

SEQ ID NO: 180540 - DNA, 201 bp, Homo sapiens
aaagttagggatgcatacagtgtttgtcctttgacataactgggttactctgaaatatcaacattttcaaaatctcttctgtcaacactactataaggacktttatatatatatatatatatatatatatatatatatatatatacacacatgtatacataaaaacatgtattgcaaatagaaataaggtctctatttaaa

SEQ ID NO: 180541 - DNA, 201 bp, Homo sapiens
gagttacagtggcgccatcttggcctaccgcaagctccgcctcccggattcacgccattcccctgcctcagcctcccaagtagctgggactacaggtgccygccaccatgcccggctaattttttgtatttttaatagagactgggtttcaccgtgttagccaggatggtctcgttctcctgacctcgtgatccgcctgcc

SEQ ID NO: 180542 - DNA, 201 bp, Homo sapiens
ttaaatgaatcaggcacaaaaagataagtactgcatgttctcactcaagtggaagctaaaaaaacaaaaatgagtttatagaaatagagagtagaattacrgttgttagaagctgggatgggtagcagggaggagaggagagggagaagttacctaatggatgcagaattacaactagatgggaggaaaaagttctagtgt

SEQ ID NO: 180543 - DNA, 201 bp, Homo sapiens
ttctgcagcctagccatcacatttgtgttctatgcagcaagaatgaaaaaaaaatgcaatgacaaatgaggcatgcagccaggtgatttacccctcatcaragagattacctggaaactctttcttatattttctacctacccatcattactcttagttgtaaaggagactgttgcacgtagtgttgtagctgcacacaca

SEQ ID NO: 180544 - DNA, 201 bp, Homo sapiens
gctggagttacagtggcgccatcttggcctaccgcaagctccgcctcccggattcacgccattcccctgcctcagcctcccaagtagctgggactacaggygcccgccaccatgcccggctaattttttgtatttttaatagagactgggtttcaccgtgttagccaggatggtctcgttctcctgacctcgtgatccgcc

SEQ ID NO: 180545 - DNA, 201 bp, Homo sapiens
tagtaagacaacccacgctcatggattgaaagaattaatattgttacaatgaccatactacccaaagcaatctcaggttcagtgcaatccctattaaaatwtcaatgacatttttcacagaattagaaaaaatattaacatttgaattgaaccacaaaacactttgaatggccaatgccaagcaaaaataacaaagtcaga

SEQ ID NO: 180546 - DNA, 201 bp, Homo sapiens
acaggaaaacatggtacataaacatggagcttgaaatcaggaaacatgtactattttaatttattttattttattattattattttttttttttttgagayggagtctcgctctgtcacccaggctggagttacagtggcgccatcttggcctaccgcaagctccgcctcccggattcacgccattcccctgcctcagcct

SEQ ID NO: 180547 - DNA, 201 bp, Homo sapiens
ggttggatcatgaggtcaggagttggagaccagcctggccaatatagtgaaaccccatctctactaaaaatacaaaaaattagccaggcatggtggcaggygcctgtaatcccagctactcgggaggctgaggcaagagaatctcttgaacccggggggtggaggttgcagtgagctgagattgtgccattgcactccagc

SEQ ID NO: 180548 - DNA, 201 bp, Homo sapiens
gccagggcggtcttgggaaatccaacatttgggcaggaaatgcctgtcctcacccagggtctgtaggggtggagccctagccagggaccacgccctcttcwacccagcacttcccttcccttcttccctgtcatttaaagggaccacgctcttaccttcccagcacttccatatcagtgactgtgcacattacagtttgag

SEQ ID NO: 180549 - DNA, 201 bp, Homo sapiens
tctttcctcaccaatagtgttgaattcactgggccatatgctattaggttggtgcaaaagtaatcgcagtttttgccattactttcaatggcaaaaactgygattacttttgcaccaacctaatatctaacctattttgtttggttttatttttgtatagatttttaaaaattcaaataagaaaattatggctatatacaa

SEQ ID NO: 180550 - DNA, 201 bp, Homo sapiens
ttaacattgttctcaaacagtttgctggctgaagattcatttgatgaatccaatttttctgaaatagatgattcttatgattcagatgattctgatgttakttctgtttagaaataactccaagaacagtttttatatttcattttcccattaaaaatcagtcagatttgcctcagcctcaaagagcgtgtttatgtaaaa

SEQ ID NO: 180551 - DNA, 201 bp, Homo sapiens
aaaaccctccaacacaataatgaatgaaagactagaaaggacattcacaacacacatggagagatagatagatagatagatagatagatagatagatagayagatagatagatagatagatgatagatagatagatagatagatagatagatagatacagagactgagagactgagagaaaattgacgtttcacacattca

SEQ ID NO: 180552 - DNA, 201 bp, Homo sapiens
aatttcaaatgatttctctttgatcactattctattggtgagataaacttctcagaagtggcttaaaatctgtttgctttgttttttgacaaagttatctrcagatttgcccattagctttttcctattaatcaagttaatttaaatctaactgctaagtaggttttccttagaactctttttaaaaaaactgttgaagaa

SEQ ID NO: 180553 - DNA, 201 bp, Homo sapiens
gacaagcaaataaacaaaaaccctccaacacaataatgaatgaaagactagaaaggacattcacaacacacatggagagatagatagatagatagatagakagatagatagatagatagatagatagatagatagatgatagatagatagatagatagatagatagatagatacagagactgagagactgagagaaaattg

SEQ ID NO: 180554 - DNA, 201 bp, Homo sapiens
aggaaacttcatcactggcacatctttttgtaaataactacctttcctcaattttatatgtccaatatattctactttaggtcagtttttcccaaacctcygccattaatttacttacctttttattacctttgccatattctaatccatatttatttgtttctttaaattgattttcaatcttcttatacttctaactga

SEQ ID NO: 180555 - DNA, 201 bp, Homo sapiens
acccccaacctcagcctcagtggctggactactggtgcatgccacaacaccccgctaatttttgtatcttttgtagatatggggttttgctatgttgcccrggctggtcttgaactcctgggctcaagcagtatgcttgccccagcctcccaaattgctgggattacaagtatgagccactctgcccagcccagttttctt

SEQ ID NO: 180556 - DNA, 201 bp, Homo sapiens
gaaatgaaataaaactgtgggaacttagtgtataaaaaagaacattatatttggtattacatgaactagaagatctatcttctaattgcttttgtacctcytgcttgcaatatagttttggggacgtacatttccaaggtcaaaccagttgctgcatctacacattaaagacatagaatcattaaaataatctctaagatc

SEQ ID NO: 180557 - DNA, 201 bp, Homo sapiens
tactgaaggatatgggtcaagggatgactggtcattcactgggatagtcatgatactcatttatatcccagtatcagtcacatttgacattcagctggagygatggcagatgtagataacatcggtctttcagtgtatgcttcatggaggataatgatggtttgcagctattatgttcaaatgggacttagaaaatagcct

SEQ ID NO: 180558 - DNA, 201 bp, Homo sapiens
gccactagggaaaactgagattcaaacactaggaaaccaaatatatactccaagttcaaatgacaagagaaatttaaagtgaagtttcagagccaagagtsagcaggtgggcagagaccagatcagctctggagctgatcataatccagtagggagaattgctgcctgtagcgatggttcctggaactaccattcacctac

SEQ ID NO: 180559 - DNA, 201 bp, Homo sapiens
gattggggaaattctacctaaatttatggattttttctcaataatttttgtaagctttgtataagatggaatatttgtaatttataatcacttgtgaaaastgatgtattgatctttaacaaagtacattttctcctttctgttatttaatatttttgtttaatacactaaaataatcttgtaaaatggcttttctttggt

SEQ ID NO: 180560 - DNA, 201 bp, Homo sapiens
aatgtttgacaataaacttgttttcttttaaaaaataataatcatgttctttcgagttatacagtattacactgactgctttttttccttgattgtttgtraatattcacatatacatatgttacagtggtttaatcactgtactgctcacagtgcagcagtgctgatggatagcttttgttaaagaaatatcattaacat

SEQ ID NO: 180561 - DNA, 201 bp, Homo sapiens
aaataatcttgtaaaatggcttttctttggtgttttttaaaatgaattttattttagaccgatgtttgattaaattatgtaaattatttgaattctaaacycccaataatgagtcattccacttgtgtggtttaaaaaagagttaaaaatcggcatttagaaacaatgtgatttccaattcagtaaatgatttaagggttt

SEQ ID NO: 180562 - DNA, 201 bp, Homo sapiens
ttaaaatgattcattttccctactttaaaattattttaaaaggcaaacacttcatttactttcatttctctctctctttttttttttttttttttttttttgagacagggtctttctctgttacccaggcacaagtgcagtggcatgattatagctcattgcctcaaaatcctgggcacagcctcccaggtaactaggact

SEQ ID NO: 180563 - DNA, 201 bp, Homo sapiens
taaaatgaattttattttagaccgatgtttgattaaattatgtaaattatttgaattctaaacccccaataatgagtcattccacttgtgtggtttaaaawagagttaaaaatcggcatttagaaacaatgtgatttccaattcagtaaatgatttaagggtttatggggttactgactattctactttcaagactcacta

SEQ ID NO: 180564 - DNA, 201 bp, Homo sapiens
atttttaatataccacttctatatgttgaccttccaatctagtttttactgccaccagacaaatatttctaacatagaaacctggttatcaaacccctcttgctttatttgcataatagagcccttgggataaacacagtgcctcactgtgacctgacagataccttcatgatctaacctttgacctacctttccaacttt

SEQ ID NO: 180565 - DNA, 201 bp, Homo sapiens
tgtaataaaagtacttattaagagagtggctaaagtaatggtattcacatacttttacctaaagaagcattatctttgtcttaaaaagttttttatttctgtgtgttttccacctgtgttctctaactgtggaactagtagccactagttattcgagggtactgagcaattgaaatgttgctagtccaagccaaagtgtgc

SEQ ID NO: 180566 - DNA, 201 bp, Homo sapiens
tacccccttgattgactttattcttagggggatatttttggctattataaatggggtaactttcttgatttcttttttacatagtttgctattgccttagraaaaatgcttctagattttctgtgtttattttgtaccctgcaactttactgatttcacttactagttctaacagttttgtggtggtatttttagtatttt

SEQ ID NO: 180567 - DNA, 201 bp, Homo sapiens
ctgtttgaccaataccagcaagtccttccaaaatcacaatatagctaaacatatcttcctttctcaattgtattaaatgtttattatattattaattgggygaatttttgtattaatatgttatttaaaatacaccatttaaaattagattcaatatttatgtcagttttactttctttctctttgtcctgattgttttat

SEQ ID NO: 180568 - DNA, 201 bp, Homo sapiens
tgttcaaacttacaaaaaagtggccaaataagaatattacaaagaatatccctatcccctttaaccagattcacctattgttagcattttactccatataytttattatatgctctgtgtctctttttatcttagtaatatattttatgttatttttctattataaaagcattgtcagttgaggcgttgggctgagtcctt

SEQ ID NO: 180569 - DNA, 201 bp, Homo sapiens
agactggataattgactcacagttctgcagcctctacaggaagcatggctgggaggcctctagaaacttacaatcatgtggaaggcaaaggggaagtaaayacctctcaccatgcaggaaacagagagagaaggaagtgggaagtgctacacactttgaaacagccagatctcatgagagctcactcactatcatgagaac

SEQ ID NO: 180570 - DNA, 201 bp, Homo sapiens
aagtctgaatgtaaagcaacatgtaaaacttttgaagaaatacaatatttgtaacttggagttcaacaaattcttagatatgataccaaagtcatcatccrtaaaagaaaatataaatatatttaactttaagaatataaatttttgctcttgagaagacattattaagacaatgggaagcaaaccacagactgggagaac

SEQ ID NO: 180571 - DNA, 201 bp, Homo sapiens
tagggatatggaatgtaataccagagttaaacttggttattgatatggtttggttctgtgtccccaccgaaatctcacatcaaattgtaattgccacatgycaggggagggacctggttggcagttattggatcatgggtgcagatttcccccttgctgttctcatgatagtgagtgagttctcatgacatctggctttta

SEQ ID NO: 180572 - DNA, 201 bp, Homo sapiens
tgcactgcagtcttttctccatagacttcaatgtatactcaatatctataatatttatagatattatacaatttattttgtaaatcaaaaaaaaaaaaaaaagatcgtctacagccctctgaaagcatctcttctgatacaggcatagcataagaagtacaggaatcactccgagaaaggcaggaatcatcacctggatcc

SEQ ID NO: 180573 - DNA, 201 bp, Homo sapiens
aagggtcaagaactgaagcatttatgttgttctcaggagaagagaagatagcaaaaaagactgaaaaggtagggtgaaggagctggaggacaagcaggaakcaggatgcctctgcatgtaaggaagcagataattttatctagagtggaagattcaaaagtattaaatgatatgtagaatatcatattctttttacctatc

SEQ ID NO: 180574 - DNA, 201 bp, Homo sapiens
cgttcctctggaagttttggctcagaggagtacccagccgtgtaagttgtcagtccgcccctactggggggtgcctcccagttaggctactcgggggtcakggacccacttgaggaggcagtctgcccattctcagatctcaagctgcatgctgggagaactactactttcttccaagctcagttggaaatgcagaaatca

SEQ ID NO: 180575 - DNA, 201 bp, Homo sapiens
gaaatctccatgccgtttcccatagaggttatgccaatttacattcccacctacaatgaaaagtatcccattttctctgcattcataccaacatctgttgytttttgactttttaataatagctgttctgactggtgtaatatgtattttattgtggttttaatttgcatttgtctaacaattagtgatgttgagcatttt

SEQ ID NO: 180576 - DNA, 201 bp, Homo sapiens
taccctttcttccagttcattgcatcggctcctgaggcgtctgcattcgtcacgtagctctcgtgccttggttttcagatccatcaggtcctttaaggacktctctgcgttggttattctagttatccatttgtctaatttttttttcaaagcttttaacttctttgccattggtttgaatttcctcctgtagctcggagt

SEQ ID NO: 180577 - DNA, 201 bp, Homo sapiens
agaagctttcaaaagaagtagatcacaggattgaaaataaaaatttctggtaatttagcaaatcaataccttaagaaaatttggttcagatatagagaccrttttctaaaaagcctgttatagacagtttccttttaatacttccatacattctcctttactaacttttcaagacttatgcagatcatctataacatgcta

SEQ ID NO: 180578 - DNA, 201 bp, Homo sapiens
ttccaacttggttgcatttctccccgtcactttcaggtacaccaatcagacatagatttggtcttttcacatagtcccatatttcttggaggctttgttcrtttcttttcttttttctctaaacttcccttctcgcttcatttcatttatttcgtcttccatcactgataccctttcttccagttcattgcatcggctcct

SEQ ID NO: 180579 - DNA, 201 bp, Homo sapiens
aggtttgaaaacaggaagaggcagggaaagggatccaatagcatcaaattagaaagggaggtagcaaacagcattgctcaaggggagaccctggagacccygaactaccaaagagcgcaaccagcagtggagtcactgaagaaaaatgttcaggcagctgcttgtctgccactgtgggaagccatctgcagggacaatggt

SEQ ID NO: 180580 - DNA, 201 bp, Homo sapiens
tgtgggcatttagtgctataaatttccctctacacactgctttgaatgtgtcctggagattctggtgtgttgtgtctttgttctcattggtttcaaagaayatctttatttctgccttcatttcattatttacccagttgtcattcaggagcaggtcgttcagattctatgtagttgagcggttttgagtgagtttcttaa

SEQ ID NO: 180581 - DNA, 201 bp, Homo sapiens
ttgtctactgctgtaagtggctgtccatcaggccaggggcctaggaactcccagttcctttggccaagaggggcttaagcaaggcacttgttagaaagcasacaggaagggacttgcagctggctgttgggaaaataatacttctaactctaagggcagaaaaaggcaagaccaatattcccctagggggaggggctataa

SEQ ID NO: 180582 - DNA, 201 bp, Homo sapiens
gccttctcctagcttctgaatgtgtttgctcttgcttttctagttcttttaattgtgatgttagggtgtcaatttgggatctttcctgctttctcttgtgsgcatttagtgctataaatttccctctacacactgctttgaatgtgtcctggagattctggtgtgttgtgtctttgttctcattggtttcaaagaacatct

SEQ ID NO: 180583 - DNA, 201 bp, Homo sapiens
ctgacggtagtttgtatttctgtgggatcagtggtgatatcccctttatcattttttattgcgtctatctgattcttctctcttttcttctttattagtcwtgctagcggtctatcaattttgttgatctgttcaaaaaaccagctcctggattcattaattttttggagggctttttgtgtctctatttccttcagttct

SEQ ID NO: 180584 - DNA, 201 bp, Homo sapiens
ataatatattcaaagggttcattgcataggaaatagtcaagaaatggtatatttagtttacctatcttatattagcataaattcagtttaagagaggacgrtgtctataaatgactaatacagattgatagagtacaaaggcaactaaccttgtttctcttgagtagagctttaccttttagatgggattgagtctcaatt

SEQ ID NO: 180585 - DNA, 201 bp, Homo sapiens
ctttttttttttttgaggcggagtctcactctgttgcccaagtgcagtggcatgatctcggctgactgcaacccctgcctcctgggttcaaccagttatcytatctcaccctcccaagtagctgggactacatgtgccaccaccatgactgcctaatttttatagttttagtagagagggggtttcaccatattcatcagg

SEQ ID NO: 180586 - DNA, 201 bp, Homo sapiens
gcttgtgcctgtttttagagtgatacaaatttgcaacgtgtacctatgtgtggatggatgtctcataagtctattgtcataaatgtgactattcagtatawctttattgagcacgtatgttgtaccaagtaacatactgtgtactagaaatttaaagaaatagaaagcagagctcctgctttcaaggaactcagtttgatg

SEQ ID NO: 180587 - DNA, 201 bp, Homo sapiens
attcaaggctgaatatttggaatcagactgtcctggattgaaatcctagctctcctgcttgccagttgtgtaaactttatcattttgctgtaatacagtgyattctctaatcctcaaatccctcttatataaaactaaaaatagtgtctatctcataggattgcctttagatttagtgtaaagtgcttagcccatttctgt

SEQ ID NO: 180588 - DNA, 201 bp, Homo sapiens
ctcagaagagaacataagctttgaagtaaaagactgatattttaaattaatttaaaattaagcacatctattcattggacagcatccagttaaaaaaaaaataaaaagaacactagccataaataagcagaagatatgtgtagcatatataactgatgacagattaatccagaacatacaaagtctagtaagtaattctta

SEQ ID NO: 180589 - DNA, 201 bp, Homo sapiens
tgttcagttgcatctccagaattaggtcatctctccttggggggcagtagatggcctccctcagaactaaccagtctgcagttttgtttcctgaagaaccrtgaccatgacgaaacatcacttgaatgttgaaagtttttatttctctgtaacttttctccagcagcctgattacctccagattcctggcctgatcagtga

SEQ ID NO: 180590 - DNA, 201 bp, Homo sapiens
ttggtctgatggggctagtggccttatgagaagaggcaccacagtgcttgttcactttctctcttctcacgtgcacaccaaaaaaaaaaaaaaaaaaaaaaggcgtgtgagcatgcagcaacaaggaagagagtcctcacgtccgcacctgagcagccatgctggcaccctgatcttggatttccagtttccagaactgtg

SEQ ID NO: 180591 - DNA, 201 bp, Homo sapiens
tctacccccacccccaccccaccccacatcaagaagtgagtctatctagtttctcgcttcttgagtctggactagtcttattacttgcttttctgacatayatgacatagaataaaatagagtaggttttgattctcagactaaagatttgtatatttcatctctctctctcccccacctctcctttcatcttttcctctc

SEQ ID NO: 180592 - DNA, 201 bp, Homo sapiens
gtggactagtgagggttctctagagggacagaactaataggatatatatatatatatatatatatatatatatatagagagagagagagagagagagagaragagagagagagagagagagacagagagagagagagagagagagacagagagagagaggagtttcttaagtattaactcacatggtcacaaggtcccaca

SEQ ID NO: 180593 - DNA, 201 bp, Homo sapiens
aaaatgaattttattttagaccgatgtttgattaaattatgtaaattatttgaattctaaacccccaataatgagtcattccacttgtgtggtttaaaaamgagttaaaaatcggcatttagaaacaatgtgatttccaattcagtaaatgatttaagggtttatggggttactgactattctactttcaagactcactac

SEQ ID NO: 180594 - DNA, 201 bp, Homo sapiens
tttcatctctctctctcccccacctctcctttcatcttttcctctctctctttctctttttctctcggagaatgtttagcatatgagcaagccagtttaamctattggtgggtgagagaccatgtgtagagaggtcccattcatcccagtctttctagtcaaagtcatcttaaactagccaacccccacccaacccaaaag

SEQ ID NO: 180595 - DNA, 201 bp, Homo sapiens
aaaggaatgccgtgttatttgaggggatgccaatttcacttgccacacggttctcacattacttggtcagactttttaaaaataaaacaaccaatatatgkttcattatttatgctagattactgacttcacatcaaaaatcattgtgatattgataggctgtgataaataattttaacaatttatattctgtggtaccca

SEQ ID NO: 180596 - DNA, 201 bp, Homo sapiens
acactctgacccattatggtgatgaaagaaaattaaaccacattctaaaatatgaaaaaaagcaaagaacagtatgatgaaatgaaatggttatgtctatrtgctgaaatgtaaatgtgggcaaattctttttctgtagggagtttttatgtgaagctcttttggaataaatataaaagataaagactggagttaaataga

SEQ ID NO: 180597 - DNA, 201 bp, Homo sapiens
acttccacaaatgtaaaatatttgcaaatatctcaaataattttgaacttcaattaatctttttttgcaaatgttaatcagttttctcattttccacaaamagaacaggatataaggcatttcaaacatgaaatcagtagtatcaattttaccctgtgtcccttaaggtctgtgcagatgggcaattcacatttatctcaa

SEQ ID NO: 180598 - DNA, 201 bp, Homo sapiens
ctggtttctggatggcatttctggacctactcagggcctggggaactctccatcctggagggaaggacacaagcctggctggctttgctgtctgctgattrtagatcctttggaccttgagcaaacataggtggtaaccaggtagttgttacagtggagcttgactgagatccagtgctgtcctgacttcaagtctgaccc

SEQ ID NO: 180599 - DNA, 201 bp, Homo sapiens
gttgttacagtggagcttgactgagatccagtgctgtcctgacttcaagtctgacccaatacattgccagtggtggtacctgccacccctcacccagctcyaggcagcttagcacagagaaagattccatttgcttggtagaaagtaatggaagagaacaagcatctctgcctggtaatccagagaattcttttggatctt

SEQ ID NO: 180600 - DNA, 201 bp, Homo sapiens
gcccacttgatcatggtgaataagctttttgatgtgctgctggattcggtttgccagtattttattgaggatttttgcatcgatgttcatcaaggatattsgtctaaaattctctttattgattgtgtctctgcccagctttggtatcaggatgatgctggcctcataaaatgagttagggaggattctctctttttctat

SEQ ID NO: 180601 - DNA, 201 bp, Homo sapiens
gtttagtttgatttctggctgtcttcttaaggatgcaaatactatatagcatcaaatactatagcatcattgatttttaaagccctgtaggctgttaaagsctatggcagttttcacaagtaattgagctgtttcagcttgaaccaatctgattgtcctagcaaatcctttgaagtgaagttatgtaagcaaaaactgctc

SEQ ID NO: 180602 - DNA, 201 bp, Homo sapiens
atgttgaataggagtggtgagagagggcatccctgtcttgtgcccgttttcaaagggaatgcttccagtttttgcccattcagtatgatattggctgtggrtttgtcatagatagctcttattattttgagatacatcccatcaatacctaatttattgagagtttttagcatgaagggttgttgaattttgtcaaaggcc

SEQ ID NO: 180603 - DNA, 201 bp, Homo sapiens
atggtggctcacgcctgtaatcccagcactttgggaggccaaggtgggcagatcacttaaggtcaggagtttgagagtagcctggccaacatggtgcaacyccatctctactaaaaatacaaaaattagctgggcgtggtcgtgggcgcctgtaatcccacctacttgggaggctgaggcaggagaatcacttcaacctgg

SEQ ID NO: 180604 - DNA, 201 bp, Homo sapiens
gtattgcctaggttttcttctagggtttttatggttttaagtctaacatttaagtctttaatccatcttgaattaatttttgtataaggtgtaaggaagaratccagtttcagctttctacatatggctagccagttttcccagcaccatttattaaatagggaatcctttccccattgcttgtttttgtgaggtttgtca

SEQ ID NO: 180605 - DNA, 201 bp, Homo sapiens
tcagccctttgtcagatgagtaggttgtgaaaattttctcccattttgtaggttgcctgttcactctgatggtagtttcttttgctgtgcagaagctctthagtttaattagatcccatttgtcaattttggcttttgttgccattgcttttggtgttttagacatgaagtccttgcccatgcctatgtcctgaatggtat

SEQ ID NO: 180606 - DNA, 201 bp, Homo sapiens
gggttgtttgtttttttcttgtaaatttgtttgagttcattgtagattctggatatcagccctttgtcagatgagtaggttgtgaaaattttctcccattytgtaggttgcctgttcactctgatggtagtttcttttgctgtgcagaagctctttagtttaattagatcccatttgtcaattttggcttttgttgccatt

SEQ ID NO: 180607 - DNA, 201 bp, Homo sapiens
ggggttgtttgtttttttcttgtaaatttgtttgagttcattgtagattctggatatcagccctttgtcagatgagtaggttgtgaaaattttctcccatkttgtaggttgcctgttcactctgatggtagtttcttttgctgtgcagaagctctttagtttaattagatcccatttgtcaattttggcttttgttgccat

SEQ ID NO: 180608 - DNA, 201 bp, Homo sapiens
gatggggttgtttgtttttttcttgtaaatttgtttgagttcattgtagattctggatatcagccctttgtcagatgagtaggttgtgaaaattttctccmattttgtaggttgcctgttcactctgatggtagtttcttttgctgtgcagaagctctttagtttaattagatcccatttgtcaattttggcttttgttgc

SEQ ID NO: 180609 - DNA, 201 bp, Homo sapiens
acatgtggtgtttggttttttgtccttgcaatagtttgctgagaatgatggtttccattttcatccatgtctctacaaaggacatgaactcatcatttttyatggctgcatagtattccatggtatatatgtgccacattttcttactagtctgtcgttgttgcacatttaggttggttccaagtctttgctattgtgaat

SEQ ID NO: 180610 - DNA, 201 bp, Homo sapiens
taatacataataataaaggtaacagtctatcaagaagacagaacaattttagacatgtatatacaacaccctttatataaaattaggaaaaattagaattrcaatgaaaaaattagcagacccaacttcatagttgagtatttagcaaaatgctttcaaaaattaataatctttaaaaaatggaaataaaagctatagaaa

SEQ ID NO: 180611 - DNA, 201 bp, Homo sapiens
cagtccccagagtgtgatgttccccttcctgtgtccatgtgttctcattgttcagttcccacctatgagtgagaacatgtggtgtttggttttttgtcctygcaatagtttgctgagaatgatggtttccattttcatccatgtctctacaaaggacatgaactcatcattttttatggctgcatagtattccatggtata

SEQ ID NO: 180612 - DNA, 201 bp, Homo sapiens
cttgaagatcaaattttcaattccacaaatacttgattgattagagagtgggtaacaaaactgtttaccaaattgtccaccaataaaatgggaatggacarattttatctctactcagtagaaattattgtaattaaagggccatgttgtacagagacaactggctataatagaattttgtccacttctatcttcatcacc

SEQ ID NO: 180613 - DNA, 201 bp, Homo sapiens
aagcaagaaaaatgcacatgtttaaatgattttttgttttttttgtttttttcattttattatactttaagttttagagtacatgtgcacaacgtacaggyttgttacatatgtatacatgtgccatgttggtgtgctgcacccattaactcgttatctagcattaggtatatctcctaatgctatccctccccccttccc

SEQ ID NO: 180614 - DNA, 201 bp, Homo sapiens
ttagaaagccaagaccaaggtgcaagcaggattgttttctggttccaagttggtgctttgttggtttgttctccaaagaggaggagcattgttgtctttaygtgccactataaatcctattagtagtggcattaattctattaattaggacagaggtctcactatctaaacacctaaaagtcttcacctccctatacctcc

SEQ ID NO: 180615 - DNA, 201 bp, Homo sapiens
ggtctatgatagcagcactttatgtaatgtcaaaccaagaaatagataagaatttaaaggtttctctttaacctttgccattggtaagttatgaaactgaygaaagaaattatacacctctgggcctcagtttattcagctgacaagtcacttagttgatgagatgacctctaccacctatttaacagctttaaaacaccg

SEQ ID NO: 180616 - DNA, 201 bp, Homo sapiens
taagaatttaaaggtttctctttaacctttgccattggtaagttatgaaactgacgaaagaaattatacacctctgggcctcagtttattcagctgacaartcacttagttgatgagatgacctctaccacctatttaacagctttaaaacaccgtaattctgtgcattttttttttgcctaacacagattcttttgccaa

SEQ ID NO: 180617 - DNA, 201 bp, Homo sapiens
ccctcatctttacctcttctgatattcagtccctatactcacctgtcttctaggcagctctgcttgtatatcccatatgaaattcaaaaattattaaaatmtaccagcagatttgtgaataccactattttttctgttataaataattaaaatatatgtgatattgatatatataaacaacaaaatgaaaataataaaatt

SEQ ID NO: 180618 - DNA, 201 bp, Homo sapiens
tgtatattacaaatttaaggatgtatatgtcactcgctatatatgtaattaacatatttaatcatgagcactatgccttgcatatgtagcacagcctcagmcataagtcatacctagagaggagtgtgatggaaacaaccagaacctcgtaacaagattgagtaaaccaactgacatcttttagactgagatatcaagtac

SEQ ID NO: 180619 - DNA, 201 bp, Homo sapiens
gaatactctcccttagaccaggttggacactgtgaaatgaatgggtttcattgttgctactttttatgttcattattttagttaaataaactccttttttwaaaaaaaattgaaattatataacagagtaaaaatagaattcactttatacagtgtagagagtttctggttataaaacagctgagatgtaaaccataaatg

SEQ ID NO: 180620 - DNA, 201 bp, Homo sapiens
tcattgttgctactttttatgttcattattttagttaaataaactccttttttaaaaaaaaattgaaattatataacagagtaaaaatagaattcactttwtacagtgtagagagtttctggttataaaacagctgagatgtaaaccataaatgaggagatgaaacataagtgattcgaacataagcaagatcattctaaa

SEQ ID NO: 180621 - DNA, 201 bp, Homo sapiens
ttactgggtttggggtccccctaatgcagatatggctgcagtgaccaaaacttagatcataacacacaagtccattcaaaatcataggaagtcttccctaraaggacaggtatgaacaagcccagactgtgaaggctacaattaattctgaattctgtaatgcccagacactgacaaatatccacaagaatcaagaccatc

SEQ ID NO: 180622 - DNA, 201 bp, Homo sapiens
aactcattaagtcaagcattaaatggagggattaaaagttataaaactattacaaattgtagagagtaaaggaaggcaaaggaaactgcctagaatgtagkggggggtcgaggcagggggaggtgggttggtggcttgaagttgaggagattcactctgcccatattaagcccccaaaggcctgaggctcaataatgctga

SEQ ID NO: 180623 - DNA, 201 bp, Homo sapiens
taggggggggtcgaggcagggggaggtgggttggtggcttgaagttgaggagattcactctgcccatattaagcccccaaaggcctgaggctcaataatgytgaaaaaagtaaagaacagaaatgagagtctggggctaaaacaaaataatttatcaaacatgtatagatgaaatagccttgtattcacaactctattttc

SEQ ID NO: 180624 - DNA, 201 bp, Homo sapiens
aggctggaatacagtggcatgatcatagctcactacatgtaacctcaaactcctgggctaaagcaatcctcctgccttagcctcccaaggaagcagggctrcagaaatgtctcaccacacccagctaacttttataattttgtagaaatgggggatcttgctatgctacccaggctggtattccttcattcttaactacat

SEQ ID NO: 180625 - DNA, 201 bp, Homo sapiens
atgatgaaatagacaagaagcacaagaagactatgatgtgccttacaatgagaaaatatgagtgttagacaagctttgtttagcgtgaattatagtgcttytggctgtgagttcaatgttaatgaatcaacaatacgaatatccagaaaaaggaagaggaaatttgctgagctgtatatgaagttgcttcgtaaagtgcaa

SEQ ID NO: 180626 - DNA, 201 bp, Homo sapiens
tttatgatggaacacatttatgtttagcttatagtttgtttttttatgatcaaagagactggagctaattgcatcttactctcttttcattatagtgtatdtaagatttggctcaaaacatcaatgtaaccctctagctcataactattactggttttccagactccagactaatacctccctgtttcatgctgtctcctt

SEQ ID NO: 180627 - DNA, 201 bp, Homo sapiens
tcctttttttctatctttctgaactaaaatatatatgtaaaaactcaataaatgatagagaattaattactgaacatatgtttgtattcacacagaaaggyggtaaatatagaagttgataggcagcttctagagccagatcacttgtgtttaaatcccagcattgctatgtggcttcaagaaagttactcaatttctctg

SEQ ID NO: 180628 - DNA, 201 bp, Homo sapiens
agccatttaatatcttgttttgctatagaaatcattaattctttagcatatttgaaaaatacatacatggccaggcacagtggctcacacttgtaatcccrgcactttgggaggccaaggcaggtgaatcatgaggtcaagagatcaagaccatcctggccaacatggtgaaaccccatttctactaaaaatgcaaaaaat

SEQ ID NO: 180629 - DNA, 201 bp, Homo sapiens
tttttcttactttttgtctttctgataattctcctttttttttttttttgagacggagtcttgtgctttctcccaggctggagtgcagtggcgcaatctcrgctcactgcaagctccgcctcctgggttcacgccattctcctgcctcagcctccccagtagctgggactacaggcgcccaccaccactcccagctaattt

SEQ ID NO: 180630 - DNA, 201 bp, Homo sapiens
ttctggctttgattatggaagattccagggggccgggaagccccagctgtgtcttctggccccttgaggttatgaccctgacggctagaagtgctgaagcrttcctcataagctggccccaaaactttaaggagaatgctggctgaagcgcttcgtagggttgttggcagtggtatcagtgctcacctgtgcttgccagtc

SEQ ID NO: 180631 - DNA, 201 bp, Homo sapiens
cagtacatttcatgtgcagatgagaagaatgtatattctgttgtttttggggtgaagagttctgtagattatctgttaggtccatttggtcaagtgttgtrttcagttcctggatatttttgttagttttctcccttgatgatctaatattggcagtggggtgttgaagtctctgactgttattgtgtggttatctaagtc

SEQ ID NO: 180632 - DNA, 201 bp, Homo sapiens
cctcctgggttcaaccagttatcctatctcaccctcccaagtagctgggactacatgtgccaccaccatgactgcctaatttttatagttttagtagagarggggtttcaccatattcatcaggctggtctcgaactcctgacctcaggtgatccacccgcctcggcctcccaaggtatgaccattttaacaatattgatt

SEQ ID NO: 180633 - DNA, 201 bp, Homo sapiens
ttgttattactttgctatagaatatccagataaagtgtttaatttcctttaatttttttttgttttttttgagacggagtcttgctctgtctccaggctgkagtgcagtggtgtgatctcagctcactgcaacctccacctcccaggttcaagcgatcctcctgcctaaacctcccaagtagctgggactacaggcatgca

SEQ ID NO: 180634 - DNA, 201 bp, Homo sapiens
tttttctccatagaattattactaattgttattactttgctatagaatatccagataaagtgtttaatttcctttaatttttttttgttttttttgagacrgagtcttgctctgtctccaggctggagtgcagtggtgtgatctcagctcactgcaacctccacctcccaggttcaagcgatcctcctgcctaaacctccc

SEQ ID NO: 180635 - DNA, 201 bp, Homo sapiens
taatacatttaatttttctccatagaattattactaattgttattactttgctatagaatatccagataaagtgtttaatttcctttaatttttttttgtkttttttgagacggagtcttgctctgtctccaggctggagtgcagtggtgtgatctcagctcactgcaacctccacctcccaggttcaagcgatcctcctg

SEQ ID NO: 180636 - DNA, 201 bp, Homo sapiens
aactataaacttttccctattcagtatgttattagctgtgggtttatcatataaggcccttatgttttgaagtatggtatttctatgcctaattcattgaraatttttattatgaggggatgttgaattttgatgtttgatttttctgaatgtattgtaacacatgtatgattcttctgtccttgattttgttaatgtgat

SEQ ID NO: 180637 - DNA, 201 bp, Homo sapiens
gccacttctgtgggatgaaggccttttttaatggagaatatctagtcaaatgtctccgtaatattaccttcattgttcgtagagtaaaatgtaaagggttktaacttcagaggaactgtgcacaggcagggaggtgggtgaagttgacctaatgcagagatggggagccacagctcagggtcaggtttgtcatctcttaat

SEQ ID NO: 180638 - DNA, 201 bp, Homo sapiens
aaagagcacaaactttgtaaacagactggactaagtcctgctcacttacatgtaacctggggtaagattcatttatagaagcttcaattttcttgactgaygtaatacatatgtgcctgatttctgtgaaaattaagaaatgaatgtacaataccaaaataatacttcagtgtcagctctcaggaaaggaaaatcaaagac

SEQ ID NO: 180639 - DNA, 201 bp, Homo sapiens
ctgcccagtctcttgaaagatcaccttggctttcatctcataattctcacctgatccatactgttcagaagtcttaacatacataatccattttagaaatkatgtggccatgaatcctattggattggagccctgccctgagatttcattttttaaattttcctctgaaagactctattttcaaatataatcatattgggg

SEQ ID NO: 180640 - DNA, 201 bp, Homo sapiens
gggagtttattaaggaatattgattcacgtgatcagaaggtgaagtcccacaataggctgtctgtaagctgaggagcaaggaagccagtccaagtcccaamacctcaaaagtagggaagccaacagtgcagccttcagtctgtggccaaaggcctgagagcctcttgcaaaccagtgatgtaagtccaagagcccaaaagc

SEQ ID NO: 180641 - DNA, 201 bp, Homo sapiens
tgggctaaagcaatcctcctgccttagcctcccaaggaagcagggctacagaaatgtctcaccacacccagctaacttttataattttgtagaaatggggkatcttgctatgctacccaggctggtattccttcattcttaactacataaaacagcaatcaaggatcacagacatttaagatataatgtaggaacaaaaat

SEQ ID NO: 180642 - DNA, 201 bp, Homo sapiens
attaatttgattattgattctgttgattaaggttgttgcacataaacgtgcctaaaattccttagtgctcctactttctgagttagctggaatgcttgtgytttgggcataccttatgtgcaactctattgtgatgaatattatgaaatgtaactgtttcttcactgaaaggaacaaatgataaatatttcatcgaatgaa

SEQ ID NO: 180643 - DNA, 201 bp, Homo sapiens
gggctacagaaatgtctcaccacacccagctaacttttataattttgtagaaatgggggatcttgctatgctacccaggctggtattccttcattcttaamtacataaaacagcaatcaaggatcacagacatttaagatataatgtaggaacaaaaattttagaacgtctgcaacatgaaaaataaagagaccaagttaa

SEQ ID NO: 180644 - DNA, 201 bp, Homo sapiens
tatcctctcttaatctcacttccaaaatctctattattattcagagtgccttcaagtttaaccttccccacactttattccaaacaagtgagttcctttcrggagagctttggagctctgttcttatggactgcctactccatgggcaaaattcctgtgtctccctgctctgtagttggctcctggacagtggtctacttc

SEQ ID NO: 180645 - DNA, 201 bp, Homo sapiens
acagttagagcaacattaatgaattgaggataattatcaaatttctgaggaaaggtgatttacaactcagcataccatacccagtcaaaatatcccgtgtyagggtagaattaagacattttaagacatatgaagacaaacgttatcttctttaaatataacctttcttgaaaagttactccaggttgaacctcagcaaac

SEQ ID NO: 180646 - DNA, 201 bp, Homo sapiens
agatgactttgtcatgagtgtgccttgcgagaagcacaagtttaaactggaaaaatgtaaacaatattatcatttgtgtaaaatacaaaatgatgtgagtrcataatatcattgtgaaagatatctatgcataacaagataaacactgggtgataactttagtgtggaatactcctttgaagaaatcaaaatatggggata

SEQ ID NO: 180647 - DNA, 201 bp, Homo sapiens
gatcgtgtgtaataagcatcatgaaaatacttggactgcacttttgttattaaaaatgacactgtgaattcagccaaatatgaaaagggcttcttattcaygttatttagtgttgaagtctaatttcacagcaagcaggggcagactgtagaaactttttcaattcatttcttttattctgctatcaaaggatttgatcca

SEQ ID NO: 180648 - DNA, 201 bp, Homo sapiens
tccttgttcaagtaaccttccggccaacattttatcatatttaatacttttttaattaaatgatttgaatgcatgagtctactatatgtgaagaatattarggtctttcgaaatactcttctattccccatcacccttagactagctgtatgcctatttttcatcaaggacataattattttcaccataaccattttaagc

SEQ ID NO: 180649 - DNA, 201 bp, Homo sapiens
tgatatacaaaacccctcataattgtatccccatctggttttccagcctgatctaccttgatgtcccatcggtctcctgtgctctagacatacgtctcatratttctcattccttgaatgctttcagtgttttcctatcctagcagttcacttacactgttctctgaaattgagctgttggctacactctgctccactaaa

SEQ ID NO: 180650 - DNA, 201 bp, Homo sapiens
actgaaaaatgtgtattgtttggggttgatttattttggattagcatgaatggcattgagttatgtatcttactactcttctttttatcatacaactttaygtggttaaaattaattccttgtttctaagtgtgcatctttgtgttgcaaagtcctcagtagtgggaatccactgcattttaactattcacccttccagtg

SEQ ID NO: 180651 - DNA, 201 bp, Homo sapiens
acaagaccattttctcccacttgatcatgctggtatgagtgggatgatttagcagcactcactaaagaggtgcatcttcctctgactctggccttttaaaytgggacatggcactaggagcaagagccaaaagtagaaaagacaagaggcttgctcacagagactaaaaggacaattgaataaggatgtaactgtaaacta

SEQ ID NO: 180652 - DNA, 201 bp, Homo sapiens
ataaacccacaacctatgggaggaccaagaagcaacagagtggaaataaagagccctgtgcatctaactcacacaaccatagtgctaatccatatttataraaaggcaaatggagagtcatgaggacaactgtcagtcagtagtttatattaaacagggcttagtctgaatttagtggagtacagatttaaaatgactttt

SEQ ID NO: 180653 - DNA, 201 bp, Homo sapiens
ttttaggaaaagtaagtcagagaatttctttatggctatacttcagggtagaaaggtgggagaaggtcagaatggcctcctggctacggcagttttttcarttgccaacttgacatattttggagtattatgttcagagccctgatattggcagagaaccaataaacccacaacctatgggaggaccaagaagcaacagag

SEQ ID NO: 180654 - DNA, 201 bp, Homo sapiens
atagtgtaaaagtgttcctatttctccacatcctttctagcatctgttgtttcctgacctttaatgatcaccattctaactggcatgagatggtatcttaytgtggttttgatttgcatttctctgatgaccagtgataatgagctttttttcatatgtttgttgacagcataaaggtcttcttttgagaagtgtctgttc

SEQ ID NO: 180655 - DNA, 201 bp, Homo sapiens
gatagtgaatatagatgaacaccctaagaaataagttaataacaatgggaagttagtagaaatggtggagtttaagtaggagcacatagaaatatctgtcrtaaactgggttttaaaaaaagtggacaagaattcaggataacatttctaaaaatagcttctctgtcataagctgttttcctcagttctcactctgtattt

SEQ ID NO: 180656 - DNA, 201 bp, Homo sapiens
gggattgctgggtcaaatggtatttttggttccagatccttgaggaatcgccacactgtcttccacaatggttgaagtaatttacagtcccaccaatagtrtaaaagtgttcctatttctccacatcctttctagcatctgttgtttcctgacctttaatgatcaccattctaactggcatgagatggtatcttattgtgg

SEQ ID NO: 180657 - DNA, 201 bp, Homo sapiens
taatagtcgatgagcaagggcctgaaagagtagttaggagtctgttgaggccacaagcatgaatgctagaccacaatgagaggaaaggagctattcttttytatgagacaagaggagagaggaggccatgaggaagacacatttttaaacatgttgagctagagattgaaggagtttagatttcatgattgagataattta

SEQ ID NO: 180658 - DNA, 201 bp, Homo sapiens
taatgggattgctgggtcaaatggtatttttggttccagatccttgaggaatcgccacactgtcttccacaatggttgaagtaatttacagtcccaccaayagtgtaaaagtgttcctatttctccacatcctttctagcatctgttgtttcctgacctttaatgatcaccattctaactggcatgagatggtatcttatt

SEQ ID NO: 180659 - DNA, 201 bp, Homo sapiens
aaaagatggattgctgaaggtgagagattgttcttaaggaaactggcactcttgttgaatttgaaggtttatgtgcattattataaacatattcaccattrttagagctaccacttattaggtgtttactacgtagcatgccatgaattcaaagcacaagtgctgtatcacttagttttcaaacatcgctatggagaagtt

SEQ ID NO: 180660 - DNA, 201 bp, Homo sapiens
gtgccacattttctttatcaggtctatcattgatgggcatttgggttggttctaagtctttgctattgtgaacagtgtctcaataaacatatgtgtgcatrtgtctttatagtagaatgatttataatcttttgggtatatatctagtaatgggattgctgggtcaaatggtatttttggttccagatccttgaggaatcg

SEQ ID NO: 180661 - DNA, 201 bp, Homo sapiens
ttggttttcttttcttgtgttagtttgctgagaatgatggtttccagcttcatccatgtccctgcaaagggcatgaactcatccttttttatgtctgcatrgtattccatggtgtatatgtgccacattttctttatcaggtctatcattgatgggcatttgggttggttctaagtctttgctattgtgaacagtgtctca

SEQ ID NO: 180662 - DNA, 201 bp, Homo sapiens
ttgataaatgtctattcatgccctttgcccatttttggatgggatttcttttttgctattgaattgtgtgagttcttcatatattctggatgttaaccccytgtcagatgcatagtttgcaaatattgtctctcattatgtaggctgtaacttcagtatgttgactgtttgctttgcagaagtttcttagttttacataat

SEQ ID NO: 180663 - DNA, 201 bp, Homo sapiens
tcttctttctccacacccttgccaacatttgttattttttgtatttttgataatagctattctaactgggataaggtgatatcttattatggtttttattygcatttcttttgatgatgagtgttgttaagcgtttttatcctatatctactggtcatttgcatgtcttcttttgataaatgtctattcatgccctttgcc

SEQ ID NO: 180664 - DNA, 201 bp, Homo sapiens
attggattggagccctgccctgagatttcattttttaaattttcctctgaaagactctattttcaaatataatcatattgggggttagtgtttcaacataygaagtttaggtgggggatacaagtcagtctcactgaagataataaggcataattactgagggggatttatatataggtagaaaagtagagtgggaacaga

SEQ ID NO: 180665 - DNA, 201 bp, Homo sapiens
tcactattatagacaaatgtttctagaagtttttgagtgtgtgtgacagcagaggggtgaccatgtggcaagaaaagtatatgttgttattactgtagttktgattgtatttttaatagaaaatacaagaggatattatgaattcatgaggaaaatcctatataaagggagagaaactgatgattcaggattaagaggaaa

SEQ ID NO: 180666 - DNA, 201 bp, Homo sapiens
ttagaaatcacatctgatggtaacaagggtaggcattttcgttttaaccactggaggaactcaacttgcttggtttgcacctatactctgatcctgagtasggaaaggtagaaaacaaggccttaagcttttttttgtgtgtgtgtgctttaattaaatcttaatttcccatagaaacattagtcttggagtcatgatcag

SEQ ID NO: 180667 - DNA, 201 bp, Homo sapiens
ttacatttgttttgatgattatttttgcatctgtattcttcaagtatattagcctctaatttgtgcacatgtgtgtctgttttgtccttgttctggctttrgtagcagacagttcttgcctcttaaaaagagtttggatgtgttcatttcttttcaatttttttggaagagtttgagaaagatagatattgtttcttcttt

SEQ ID NO: 180668 - DNA, 201 bp, Homo sapiens
aattatcaaatttctgaggaaaggtgatttacaactcagcataccatacccagtcaaaatatcccgtgtcagggtagaattaagacattttaagacatatraagacaaacgttatcttctttaaatataacctttcttgaaaagttactccaggttgaacctcagcaaactatggttaagaaaaacagaaagacatggcat

SEQ ID NO: 180669 - DNA, 201 bp, Homo sapiens
catgggttatatggtataacggctgtttaaaaaacctgatacatttaacagataaattaagttctgtgctttctggagtattaatgtactgtagttttccrctttaaaactagccttaaagaaatgcaatccagcatctgtttccatggaaacagaaggacaaattcaccaagcactacctcccaattcaattttgcatgg

SEQ ID NO: 180670 - DNA, 201 bp, Homo sapiens
ttcttctttctccacacccttgccaacatttgttattttttgtatttttgataatagctattctaactgggataaggtgatatcttattatggtttttatktgcatttcttttgatgatgagtgttgttaagcgtttttatcctatatctactggtcatttgcatgtcttcttttgataaatgtctattcatgccctttgc

SEQ ID NO: 180671 - DNA, 201 bp, Homo sapiens
tctatactatttttctataatggatgtactattttatattctaactaacagtgtataagagttcttctttctccacacccttgccaacatttgttattttktgtatttttgataatagctattctaactgggataaggtgatatcttattatggtttttatttgcatttcttttgatgatgagtgttgttaagcgttttta

SEQ ID NO: 180672 - DNA, 201 bp, Homo sapiens
acttctatactatttttctataatggatgtactattttatattctaactaacagtgtataagagttcttctttctccacacccttgccaacatttgttatyttttgtatttttgataatagctattctaactgggataaggtgatatcttattatggtttttatttgcatttcttttgatgatgagtgttgttaagcgttt

SEQ ID NO: 180673 - DNA, 201 bp, Homo sapiens
ttgaggaacttctatactatttttctataatggatgtactattttatattctaactaacagtgtataagagttcttctttctccacacccttgccaacatktgttattttttgtatttttgataatagctattctaactgggataaggtgatatcttattatggtttttatttgcatttcttttgatgatgagtgttgtta

SEQ ID NO: 180674 - DNA, 201 bp, Homo sapiens
attttttgaggaacttctatactatttttctataatggatgtactattttatattctaactaacagtgtataagagttcttctttctccacacccttgccmacatttgttattttttgtatttttgataatagctattctaactgggataaggtgatatcttattatggtttttatttgcatttcttttgatgatgagtgt

SEQ ID NO: 180675 - DNA, 201 bp, Homo sapiens
gtaatgaaattgctgaatcatatagtagttccatgtttaattttttgaggaacttctatactatttttctataatggatgtactattttatattctaactmacagtgtataagagttcttctttctccacacccttgccaacatttgttattttttgtatttttgataatagctattctaactgggataaggtgatatctt

SEQ ID NO: 180676 - DNA, 201 bp, Homo sapiens
agccttataataaaatctggatgtcttctgttcctaaattttcttccaagccaattaggtattagtttatcagaataacatttgttttatttcagttaaartagtaaaataattttgctctaaagaacaagctatattggaatcatgggttgagtgaataaaacatttggaaccaataataaatggttgaggtaatagctc

SEQ ID NO: 180677 - DNA, 201 bp, Homo sapiens
ttccatctcttgactgttgtgaccagtgctgcaataaacatgagaatgcagttatctcttcagcatactgatttcattttctttggataaatacccagtartgaaattgctgaatcatatagtagttccatgtttaattttttgaggaacttctatactatttttctataatggatgtactattttatattctaactaaca

SEQ ID NO: 180678 - DNA, 201 bp, Homo sapiens
atttttgtaacaattggcaaaaaattaatatggaaacatgaaaaattattgatatgggtatgcatttaaaataaacttgagcttagttaggaaataataaytgaaataattccatctacacattttttaagcacttgcactatacctcctctaataatagagggcatactagtcataattgaactgataaatcattttatc

SEQ ID NO: 180679 - DNA, 201 bp, Homo sapiens
tcctaatgctatctctccccactcaccccaccccatgacaggccccagtgtgtgatgttccccttcctgtgtccaagtgttctcattgttcaattctcacytatgagtgagaacatgcagtgtttggtttttttgtccttgcgatagtttgctgagaatgatggtttccagcttcatctaagtccctatgaaggatatgaa

SEQ ID NO: 180680 - DNA, 201 bp, Homo sapiens
gtgaacttgggaggcgaagcttgcattgagccgagatcgcgccactgcacttcagcctgggcgacagagcaagactccatctcaaaaaaaaaaaaaaaaaaagataaattaagctaaattcttcttgacatattagatgatttgcaaaaggatgccaaattttggtggtaatgacttttattcttttacttttcaaaaaat

SEQ ID NO: 180681 - DNA, 201 bp, Homo sapiens
gtagtctcagctactcgggaggctgaggcaggagaatgtgtgaacttgggaggcgaagcttgcattgagccgagatcgcgccactgcacttcagcctgggmgacagagcaagactccatctcaaaaaaaaaaaaaaaaaaagataaattaagctaaattcttcttgacatattagatgatttgcaaaaggatgccaaattt

SEQ ID NO: 180682 - DNA, 201 bp, Homo sapiens
agtttatttattcagttcattatctgtgtgtttgtatgtatgtctgtatctctgtatgtcttacagctgttatttcaagaaaccaagaagggccaggagawatgggaaaagctgtgttgattcctaaagatgaccaggagaaaatgaaagagctgtttaaaatcaatcagtttaaccttatggccagtgatttgattgccc

SEQ ID NO: 180683 - DNA, 201 bp, Homo sapiens
gccaacttggagttttgactttactcatgtttccctgtggtccgggactcagtcactgtaaataagtctaagaggatatcaataggttttattctataaagccaaactgtggtagtctaagaacagtgtattatccagcacaactgacacaagggagtttacatagaactgcttatctttggttatcattgcaatagatga

SEQ ID NO: 180684 - DNA, 201 bp, Homo sapiens
ttctcatttattctgttttgtgaataacccttgacagtcctttgggtctgttggtctatatttgcacggttttcatgactgtatgcgtgccatgtactcaygtacacatcggcacaaatatcagatgagtcagaaatttagtccgtatcactattattggtgattttcttattactttaaaataaaacatatatcttcctc

SEQ ID NO: 180685 - DNA, 201 bp, Homo sapiens
gagatgctctcatcaagaatgggaaataaaggttacttttcagtcaatagtacagaaagctttgaagattctaaagcttaatgtcttcataaaaaattagycttttctcagattgtaaagaagttacctggatttgtaaagaaaagaagtggtttaattcaacctccagaatccaccaaattgagtgagattttattgtca

SEQ ID NO: 180686 - DNA, 201 bp, Homo sapiens
attttgaaattcgtctagttcaagagaagaatagaatttgctcagggttgtaatccaaagaagtcaagacctcagcatatggaagaatcctctaatccccmgatgtactgattgatttgtgcggctgcaaatttttcctaacaactagaggcaatagaaaatagatttctggtccctggagccctattaagaaataagttt

SEQ ID NO: 180687 - DNA, 201 bp, Homo sapiens
acatgaactgacagttttcaaaagaagacatgtatgtgaccaacaagcatgtgaaaacatgctcaacatcactgatcatttgagaaatgcagatcaaaacyaccatgagataccatcttacagcagtcagaatggctattattaaaaagtcaaaaaatagcagatgctggaaggttgtggagaaaagggaacgcttataca

SEQ ID NO: 180688 - DNA, 201 bp, Homo sapiens
aatatttgcaagctatgcatcgaacaaaggtcaaatatccagaatctttgaggaacttaagtgtataaacaaaaaaacaacccattaaaaagtgggcaaaygacatgaactgacagttttcaaaagaagacatgtatgtgaccaacaagcatgtgaaaacatgctcaacatcactgatcatttgagaaatgcagatcaaaa

SEQ ID NO: 180689 - DNA, 201 bp, Homo sapiens
gtaaccaaattaagtataagaaatgttataacaaaactgagattgtattacatatatgtacttgtcatttaaattgaggcttgaatcataatggcaccagrattttctgtttccttcatctttgattctgactgtccatgtcttgatcattcaaaaccttgaagataattttaaattcaaattcaaaaccttgagagctga

SEQ ID NO: 180690 - DNA, 201 bp, Homo sapiens
cccttgaaggacaggttgattccatgactttggtgttgtgagtagcgctgtgataaacaaattagtgcaggtgtctttatgtatataatgattttttttttcctttgggtagatacacagtagtggagttgctgagtcaaatggaagttctctttttagttctttgagaaatctccatgccgtttcccatagaggttatgc

SEQ ID NO: 180691 - DNA, 201 bp, Homo sapiens
gcagctttaagttttaaaagggaaaggcttccatctactggatactttgagtaataaagactatgagaatccacatgacagatttccttttgtgccggcartgcataacctggcatgttcacttagaggttttgtaattcttttaaaatacattttgttggaagaacgtagttgttactgaatacgttcagcttttacaaa

SEQ ID NO: 180692 - DNA, 201 bp, Homo sapiens
ggcgcctgtagtctcagctactcgggaggctgaggcaggagaatgtgtgaacttgggaggcgaagcttgcattgagccgagatcgcgccactgcacttcakcctgggcgacagagcaagactccatctcaaaaaaaaaaaaaaaaaaagataaattaagctaaattcttcttgacatattagatgatttgcaaaaggatgc

SEQ ID NO: 180693 - DNA, 201 bp, Homo sapiens
gcacagtggctcacacctgtaatcccagcactttgggaagccgaggcgggcagatcacgaggtcaggagatcgagaccatcctggctaacatggtgaaacsctgtctgtactaaaaatacaaaaaaaattagccgggcatagtggcgggcgcctgtagtctcagctactcgggaggctgaggcaggagaatgtgtgaactt

SEQ ID NO: 180694 - DNA, 201 bp, Homo sapiens
atgataaatttggccgggcacagtggctcacacctgtaatcccagcactttgggaagccgaggcgggcagatcacgaggtcaggagatcgagaccatcctrgctaacatggtgaaaccctgtctgtactaaaaatacaaaaaaaattagccgggcatagtggcgggcgcctgtagtctcagctactcgggaggctgaggca

SEQ ID NO: 180695 - DNA, 201 bp, Homo sapiens
agatacgttttttcctaagcaggtcacaatcaattgttggatataaatgattttcatacaactaattcccaagcatacccttcaatttaaaccagagcaayacagctacccaccctcaaagacaaaaggaaaaatatatttgtgctctatttataaattgccaatattttaaaaagagaatgaaaaactttgaccttatgc

SEQ ID NO: 180696 - DNA, 201 bp, Homo sapiens
atatttactataaattaaatatcaagttcattctgaatagatgtgtacaaataaagtgattgtaaatttattgaataaagtggaataaagtagtagtagtatttagaataatatactgaattaaaaaatgatttcttccaacattcatagtagaaagcattattaatatgataaatttggccgggcacagtggctcacacc

SEQ ID NO: 180697 - DNA, 201 bp, Homo sapiens
gaaagactaagatagtagcataaggacagaaaattgaagaggtttcctacattttcattatgactgaaaccttgaatcatcatctctacttgcattcagcstgggtatgaatttttgctttcctctttgttttgcgtgacctttgtcaagtatcatagttttctatgtctgatatggtttggctgtgtccccacccaaatc

SEQ ID NO: 180698 - DNA, 201 bp, Homo sapiens
gatatttactataaattaaatatcaagttcattctgaatagatgtgtacaaataaagtgattgtaaatttattgaataaagtggaataaagtagtagtagtatttagaataatatactgaattaaaaaatgatttcttccaacattcatagtagaaagcattattaatatgataaatttggccgggcacagtggctcacac

SEQ ID NO: 180699 - DNA, 201 bp, Homo sapiens
atgatggtttccagcttcatccatgtccctacaaaggacatgaactcatccttttttatggctgcatagtattccctgatgtatatatgccacattttctkaatccagtctatcattgatggacattcgggttgtttccaagtctttgctattgtgaatagtgctgcgatatagtttctagaaactataggcaaaagttgc

SEQ ID NO: 180700 - DNA, 201 bp, Homo sapiens
agatatttactataaattaaatatcaagttcattctgaatagatgtgtacaaataaagtgattgtaaatttattgaataaagtggaataaagtagtagtagtatttagaataatatactgaattaaaaaatgatttcttccaacattcatagtagaaagcattattaatatgataaatttggccgggcacagtggctcaca

SEQ ID NO: 180701 - DNA, 201 bp, Homo sapiens
aacagaatgttttaaaaactatttttaaattaatattgttttgacaaataattgtatacatttgagggtaggaggtgacatatatatatatatatacacayacacacacacacacacacacatatacaatttagaatgattaaatcaagttaattaacatattcattgcctcttttacctatcatgttttatggtaaaaca

SEQ ID NO: 180702 - DNA, 201 bp, Homo sapiens
atagaacagaatgttttaaaaactatttttaaattaatattgttttgacaaataattgtatacatttgagggtaggaggtgacatatatatatatatatayacacacacacacacacacacacacatatacaatttagaatgattaaatcaagttaattaacatattcattgcctcttttacctatcatgttttatggtaa

SEQ ID NO: 180703 - DNA, 201 bp, Homo sapiens
ccatagaacagaatgttttaaaaactatttttaaattaatattgttttgacaaataattgtatacatttgagggtaggaggtgacatatatatatatatayacacacacacacacacacacacacacatatacaatttagaatgattaaatcaagttaattaacatattcattgcctcttttacctatcatgttttatggt

SEQ ID NO: 180704 - DNA, 201 bp, Homo sapiens
tttctcaattcgaatttatggacttcacaattgtaaagttgctttgagtagttattttttaatcccctgccctcaaatccttttagcccaagtttatcccratcaccgtgacaagattttcatgtcacaatagaagactcttttctgtactagtgctttaactagcaaaacagcctttgtttgttgaaagcctctgaaagg

SEQ ID NO: 180705 - DNA, 201 bp, Homo sapiens
acctaattaaactaaagaacttctgcaaaccaaaggaaactatcaacagaacaaacagacaatctacagaatatgagaaaatatttgcaagctatgcatcraacaaaggtcaaatatccagaatctttgaggaacttaagtgtataaacaaaaaaacaacccattaaaaagtgggcaaacgacatgaactgacagttttca

SEQ ID NO: 180706 - DNA, 201 bp, Homo sapiens
tattattgtacttctgtctttctcctcccttgatagcattgcccaatctcatttgtgtgcttatctttcttaaaatacatattctacaagattctttatgrcaccctcattttctatcatacttagattctcactgaacaaattttatcaacttccatgtcttcaatttccattgacttgctgactccctcatctttacct

SEQ ID NO: 180707 - DNA, 201 bp, Homo sapiens
agtacttggccatgaggttctgcaccacagaaaaagtgaattgtataaaccaaattcatcctctatatgtttatgtagtaagtttcctgtcttattcattrgccaatgtgaggaaacatgtactcagagcatagataagtaaatatatgtgtccaataattctaccaactgaacagtaaaatatgcatgtctatggttcgg

SEQ ID NO: 180708 - DNA, 201 bp, Homo sapiens
acaattttgtactattgatcattcattctatttcagaatattattttttgatgaaatctatattattgtacttctgtctttctcctcccttgatagcattrcccaatctcatttgtgtgcttatctttcttaaaatacatattctacaagattctttatggcaccctcattttctatcatacttagattctcactgaacaa

SEQ ID NO: 180709 - DNA, 201 bp, Homo sapiens
  misc_feature (1)...(201): n = A,T,C or G
ttagacaacatgggccgcaaggaaaatgaaaaagtgggtatattcaactgtcatggtatgggaggaaatcaggtaaactctccctttttatcagcttcatnttttagagggaaaatattgttaaaactatcagtggagaccatggctcacatgttaataactataaactgagcttaataaataaatgtacactcaaatcta

SEQ ID NO: 180710 - DNA, 201 bp, Homo sapiens
tttctttttccttccttccttctgtccttccttcctcccttccttccttcgttccttccttccttccttccttccttttttctttttctttttttttttttataaggtcttgctctgtcacccaagctggagtgcagtggcacaatcatagctcactgcagccttgacctcttgtactcaagcaattcccttcctcggcct

SEQ ID NO: 180711 - DNA, 201 bp, Homo sapiens
ttaaggactaaagattcttacagagtgtgaacaataacaaagatactcagagctctgtgggttttgtttatgttttgctttattttatttaagatttcatrcttctgagtgccattttttggtctcaagaagtgaggctaaagttgtgttcaaaatttgctacaactcctcaaagccttttgtgagtgcctccttcagact

SEQ ID NO: 180712 - DNA, 201 bp, Homo sapiens
  misc_feature (1)...(201): n = A,T,C or G
tttttctgcatacagtagtacatgtatttccttcataattaaataagaatggggaaatttaaactattgagactagaagaacattgttgtgttgcattacnctgatctgattaattgggtaacttatggcaagttacataatatttttgagctttgatattgattgtccataaaatgaacaaaagatttcattcaaatttt

SEQ ID NO: 180713 - DNA, 201 bp, Homo sapiens
aagaccagatggttgtaggtgtgcagccttaattctgggctctctattctattccattggcctatatgtctgcctttgtaccagtaccatgccatttttttattgtagctctgtagtatagtttgaagttggtaacataatgcgtccaactttgttctttttgctgagatatcttgccttggatatttgggctcttttttg

SEQ ID NO: 180714 - DNA, 201 bp, Homo sapiens
tttgatttgcatttctctgatggccagtgatgatgagcgttttttcatgtgttttttggctgcataaatgtcttcttttgagaagtgtctgttcatatccyttgcccagtttttgatggggttgtttgtttttttcttgtaaatttgtttgagttcattgtagattctggatattagccctttgtcagatgagtaggttgt

SEQ ID NO: 180715 - DNA, 201 bp, Homo sapiens
cgtgaaaggaaatatctgggccatgtcctgttcacctctcaggttgcttgctcagctgtaagctttggtgcaatgctatacagattcaacatatattctcktctatcctttattactccaaactcttatggttactaaggcactcattttataacacaatgggatataaaataaataagaattatttgccagaagtaattc

SEQ ID NO: 180716 - DNA, 201 bp, Homo sapiens
ttcactcttgtgcagtatagaattgatgttgtgacttgggagactgaaacctccattttgcaaattggtaatatgatttaattatctatattgctgaaagscattgagatacagggtgaatttctaatattcggtaagcatcattcaaatattttatctagatctccctttgttgaagaaggaatacttattaatctggag

SEQ ID NO: 180717 - DNA, 201 bp, Homo sapiens
cattcaaatattttatctagatctccctttgttgaagaaggaatacttattaatctggagaagttgtggtagttgttgtttttcaaatcttaattaagcaytattgcctttttgtccttaaaagcatatggggagacagttaaatgagttttcaatgaaaagtgagctgatggctcttgtttagtacaaggaaaaccgatg

SEQ ID NO: 180718 - DNA, 201 bp, Homo sapiens
gagaatccacatgacagatttccttttgtgccggcaatgcataacctggcatgttcacttagaggttttgtaattcttttaaaatacattttgttggaagracgtagttgttactgaatacgttcagcttttacaaaatacaaagcccacaatatatcacaaaagagagacaaaaggaatatataatttgcccttcttttc

SEQ ID NO: 180719 - DNA, 201 bp, Homo sapiens
caaagagagtggcagcattttttgcctgccctaaagatctgtggaactttgaacttgagagagataatttagggtatctggcagaagaaatttctaagcckcagaccatttaagaagaagcagagcctaaaagtttggaaaatttgcagcctgttgatgcaatagaaaagaaaaacccattttctgtggagaaattcaagc

SEQ ID NO: 180720 - DNA, 201 bp, Homo sapiens
gcaaagagagtggcagcattttttgcctgccctaaagatctgtggaactttgaacttgagagagataatttagggtatctggcagaagaaatttctaagcygcagaccatttaagaagaagcagagcctaaaagtttggaaaatttgcagcctgttgatgcaatagaaaagaaaaacccattttctgtggagaaattcaag

SEQ ID NO: 180721 - DNA, 201 bp, Homo sapiens
tgccttgtgaaagtttctaggccttagtgataaaagggctagatactgacagactccatgacttgaggagatgaagctgagtgtttggggagaccaagccygctggaatttggtgaacagagtaatggagtcctgggcagagcattgaagagatatacagaggtttctgtgggagtattcagctgtgtcttcacaagtgtg

SEQ ID NO: 180722 - DNA, 201 bp, Homo sapiens
aaataatgatttagtgacatctgccgtgtgcttgttcactcgttgatctttaagagtgaaattttccaaaagagactgatcattaggggtttctgtagatyttaagtatgatgctttttaaaaccttttatcagaaacacgcttctttgattaacatgaatataatatagtgatgtagttaagagtatatggtctggagtt

SEQ ID NO: 180723 - DNA, 201 bp, Homo sapiens
tcagtgtaaactatttgtgagtgttttttgttattgttgttgttgttttttgagacagaatttccatcacccaggctggagtggtacagtggtgcaatttyagggctcactgcagcctagacctccagggctcgggtgatcctcccacctcagcctcccttgtggctgggactagaggtgtgcaacactactcctagctat

SEQ ID NO: 180724 - DNA, 201 bp, Homo sapiens
gtttaataataatttaaataatattttgttatattcaaaaaatttaaaaatgaacacataagttttctttcatgctaagaaattgataagcactaacatartggttttgtttttcaaatcactgcttttttttctacctaaaattcagtgtaaactatttgtgagtgttttttgttattgttgttgttgttttttgagaca

SEQ ID NO: 180725 - DNA, 201 bp, Homo sapiens
atttatgtaatctgaatttgcaactactgcctcaggttgttctcagaaaactttaagaatgaactgtggtcaaatgaatttggataattctgcaagtagtrtgaccattttcactaacattattgttggataagtcagtttgaataaagcaacttcatttaataaatggccttccatgtaaataaaaattgaggaataagt

SEQ ID NO: 180726 - DNA, 201 bp, Homo sapiens
aaggcatttattcctagaaaaaagttttagaatcccttcgaagtgtcctttcaaacctctgaataacagaaatcccataaatcctatgggatatatgtttktccatagaattagatgattaattctatcattttaattagtaaagagaagaataaacaattagatgtaaagcccttatgttaaaaaaaatacctttgtaac

SEQ ID NO: 180727 - DNA, 201 bp, Homo sapiens
aacggccaagattagttgtttcagttattcatggaatcacccaatggttaaacatggttgtacatgcctctacattttgtctgtattttaagtatacacaygcgcgcgcacacacacgcacacacatatatatacaaatatatatacacacatatgtatacagagagcatatgataatcatccaatgaactggtaagtaaa

SEQ ID NO: 180728 - DNA, 201 bp, Homo sapiens
ctcgtatttccaaggtactttgggagaggcagcatggcactatagaaagagcacaaactttgtaaacagactggactaagtcctgctcacttacatgtaasctggggtaagattcatttatagaagcttcaattttcttgactgacgtaatacatatgtgcctgatttctgtgaaaattaagaaatgaatgtacaatacca

SEQ ID NO: 180729 - DNA, 201 bp, Homo sapiens
ttttggaaatgtatttgctctcattttcttattaatttgtgtgattgattatccctggctttatgataataagaagtcaagttctaaatggaatactaatrtttctaagtttaaagtttgtgatacctcaaagtatctgcaaacatttctacaggaatttaaatattccaaaacgccttaaaaaacttaatgaatattaca

SEQ ID NO: 180730 - DNA, 201 bp, Homo sapiens
atgaagtttcattccaaagcatcttctcttggttgataggcttctcgctgtgtgctcacatgaattctttacaatgtgtgtgtagagggggagaaagatayttaaatttctgcccagtctcttgaaagatcaccttggctttcatctcataattctcacctgatccatactgttcagaagtcttaacatacataatccatt

SEQ ID NO: 180731 - DNA, 201 bp, Homo sapiens
tccaaagcatcttctcttggttgataggcttctcgctgtgtgctcacatgaattctttacaatgtgtgtgtagagggggagaaagatatttaaatttctgmccagtctcttgaaagatcaccttggctttcatctcataattctcacctgatccatactgttcagaagtcttaacatacataatccattttagaaatgatg

SEQ ID NO: 180732 - DNA, 201 bp, Homo sapiens
tttaaattttcctctgaaagactctattttcaaatataatcatattgggggttagtgtttcaacatatgaagtttaggtgggggatacaagtcagtctcaytgaagataataaggcataattactgagggggatttatatataggtagaaaagtagagtgggaacagatcttgaaggtcttctagactagtctaaggggtt

SEQ ID NO: 180733 - DNA, 201 bp, Homo sapiens
taggaagttttggtattttctctgccgtggtgctgaggatatttaagttaccgggtatatttaaggtgctgagaatttttgttagaatttgaagagaaaarcacagaaggactaaattttcttaatgtattgaaacaagaactatttttatctggagataaattagacaataataacaattttataaagttaatttatcag

SEQ ID NO: 180734 - DNA, 201 bp, Homo sapiens
gatgccctcctctcaccccaagtccaggaatttactgatctatttttaataattatagcttattgttctacatattcctgatgcttctctttactatttgktttatatttcctctcttttttttcattttggatagttttcaacactatcaggttcactgatcttatcttctgcagtattaaatctgctgtgaattgtatc

SEQ ID NO: 180735 - DNA, 201 bp, Homo sapiens
taaccactggaggaactcaacttgcttggtttgcacctatactctgatcctgagtagggaaaggtagaaaacaaggccttaagcttttttttgtgtgtgtrtgctttaattaaatcttaatttcccatagaaacattagtcttggagtcatgatcaggaggtaagtcaacatacacataaaaatactcacctatcctttat

SEQ ID NO: 180736 - DNA, 201 bp, Homo sapiens
aatgcccattcttagaaaaactaaatatgcctattatttgtaattctcagctaagcgcatcacgttcctaagaaaaagacccttacatcctacttaactcstcttccctccaaaatgtaaatgtccatttctcctgaagtccatttggctgcatcctgcccagactcttatcttcactgtaatacatagaacatacctttt

SEQ ID NO: 180737 - DNA, 201 bp, Homo sapiens
tccattaatctatttaatacagaactttccaaagtttaagtacacaagtttaaccacttatacctgacatagacaaatatataaataaaatgaaaattcaytgcctaaactgatattcaatgagttattacaacatattaggaagagatgctctcatcaagaatgggaaataaaggttacttttcagtcaatagtacagaa

SEQ ID NO: 180738 - DNA, 201 bp, Homo sapiens
ctcaagaagtgaggctaaagttgtgttcaaaatttgctacaactcctcaaagccttttgtgagtgcctccttcagacttgtcaactgagacagttcaccarttataacatgaagtactgtctttactcccagccttcttcctttcccggctttcttccttcttcactcttgtgcagtatagaattgatgttgtgacttggg

SEQ ID NO: 180739 - DNA, 201 bp, Homo sapiens
ccttcagacttgtcaactgagacagttcaccaattataacatgaagtactgtctttactcccagccttcttcctttcccggctttcttccttcttcactcytgtgcagtatagaattgatgttgtgacttgggagactgaaacctccattttgcaaattggtaatatgatttaattatctatattgctgaaagccattgag

SEQ ID NO: 180740 - DNA, 201 bp, Homo sapiens
ataattattttactaaagttgctttgtttccatgcctttccgtataaacaatttttcatttcagtgttacctttttgtgtaatcttttagaagacattttraaaggtaattaaactcaacatgtagaatacctagagtgcatacaactgaaatgaaggcatgaccatatgcagaactagggtcaagttggggcatcagcag

SEQ ID NO: 180741 - DNA, 201 bp, Homo sapiens
tgttggaagagttagaagccattaccagagataaggctctaaattaaagctgaactataaacttcaaaattgagtaaggaaaaaaaggatgggagaaccaytacctatctaattatgatgcaattcagtggcaagtatgtaaagtttatttcaagtactctaaccataccagcagaagttgtcattgcacataattgtttc

SEQ ID NO: 180742 - DNA, 201 bp, Homo sapiens
gacgtaacaatgttaacatttcactgtatagtgaattgttatactgaatttatatacatatataggcacatgtatttacatatatgtaaattatgtcattatttacaaaacaactttattctccatattattttagaaattattgatattgttttgaagattagattttggaatataaataaatattatttgggacattat

SEQ ID NO: 180743 - DNA, 201 bp, Homo sapiens
caaaattgagtaaggaaaaaaaggatgggagaaccactacctatctaattatgatgcaattcagtggcaagtatgtaaagtttatttcaagtactctaacyataccagcagaagttgtcattgcacataattgtttcattagttatgacttgtaaacacatggaaacatgattcaactgccccttttgcagtcaaagaaaa

SEQ ID NO: 180744 - DNA, 201 bp, Homo sapiens
gcttctctctcttgcttttacacaaaaatcataacaaatgttaaaatccttttttaacttagttacatttctaaaaaaaggtattttttttttgtttgtcracaattataccttaaccatttctccttgcataggagttttgatagtttaggggttttttaaggccttggaaacatcaggaagaaacttacttttcagtag

SEQ ID NO: 180745 - DNA, 201 bp, Homo sapiens
gctttgaaaaaacatttatatcatcataaaggcataatatcaaaattggtactcagatcatagtcttattaggaatatgttatatctactcaaactgataytaatttttatttaaaatttacataaaatagctgggcatggtggcatgcatctgtagtaccatctattcagaaggctaaggcaggaagatctcttgcacat

SEQ ID NO: 180746 - DNA, 201 bp, Homo sapiens
cttataaagacttcgggattttaggaaaggggtgagataagaagtaacagtaacaaatgggtatttttattctttatgaatgggcagatgaagagaatcctggtgtttctgaataataacagtcgagaaaatgcttgagaataaagtaggaatagaattaagccttactgtctaaaataaattataatgctacatatctct

SEQ ID NO: 180747 - DNA, 201 bp, Homo sapiens
tgctcttgctaagatttagcagaatttctaaaataaatgtttcttcctttactgtctgctcttaggacaatttccagatattaccctttttttttttttttggtataaccttcaccacttatggttgttttgctgtggagaaggtccacagattctagattctgccatcattctagaaaccatctctttgctgcctacatt

SEQ ID NO: 180748 - DNA, 201 bp, Homo sapiens
ttctattaaattttttttttaaatttcacatatgagtgagattaaccctgatttgatcattatacaacatatatagtattaaaacatcaaatcgtaccccrtaagtatttacaattacaatgtgtcaatggaaataatataaatatttttaaagatacttttccttgaatgaacaattgatctgcaacattttgtcatgat

SEQ ID NO: 180749 - DNA, 201 bp, Homo sapiens
taatcttactacagactatctttaatagtagatatcatggttatgaagctgtgaatgaaaattaagatattgcttaagtgcaaataattttaaagtaattmatttttggtctattaacattgtctaatagtctcctacatattcaattccttagaaggctgtttgattctcatgtatttaaaacaaactttaaaagtaaat

SEQ ID NO: 180750 - DNA, 201 bp, Homo sapiens
tcaaaagaagaaaggcatttctaacaatgttacgtataacatatttttgttcttctgaaaacttgtgtttcattttcttttaggaaaaaaaaaagatcagrctcttaggccaatttttcagactcttctgtagattacttgagcagatatgaaatcaataagaccttaggtaaacagtatggtacatattttttttaagtc

SEQ ID NO: 180751 - DNA, 201 bp, Homo sapiens
tttaagtctacttggaaacatattttatactgtaaaactgcttactacaatactaatgctttcacttgcctctattacaaatgctgaaaaactcatattaraacaaatctatctttcatgccaactataatacagatattgtgtcttagttaaaataatagggaagcgtgttagtgcccaggtaagatttcatgctaacag

SEQ ID NO: 180752 - DNA, 201 bp, Homo sapiens
tttattagtggaaagctcagtgcttttccactaagatcagaaacaaggtatatgaacctacatttcctttttttttttttttttttttacattgtccttgkggcatgcaaccttactaaaatcacgtatttgttttaggatttgttttatagattgttggggattttctacatagaaaccattactgtatgtaaatagata

SEQ ID NO: 180753 - DNA, 201 bp, Homo sapiens
atcatatttattagtggaaagctcagtgcttttccactaagatcagaaacaaggtatatgaacctacatttcctttttttttttttttttttttacattgkccttgtggcatgcaaccttactaaaatcacgtatttgttttaggatttgttttatagattgttggggattttctacatagaaaccattactgtatgtaaa

SEQ ID NO: 180754 - DNA, 201 bp, Homo sapiens
taagacaaagtttcttatatttagtagtaacaaataatttacttcttaatttttatcagattgtattagacttttctcaatccaaccataatatacgtttrgattgcaggaaagaaacagaaatagatatcaccaaagcctttaaaacacttctataaaataaaagatatgaaaacaacagcacagggaaaggtcaacgtt

SEQ ID NO: 180755 - DNA, 201 bp, Homo sapiens
tcagtatattttgtttcctgcagtaacggcacatcattttattttctaacatgctgaggaagctgaagtgagagaaacagagaaacctcagtctttgctgragtttctagatttttgtggcaaaaggttaattaattcatgggttcggttgtaacagcctgcaggtaattttcatcagcatagctgtaatgtgaacgttcc

SEQ ID NO: 180756 - DNA, 201 bp, Homo sapiens
tttaactggaaactgaatttccgctggtatcctgttccccaaagagaaatggacaggaggaaaggagacagaacattacctgtcaggtatgtagatcatayctcttgaagattatgtatatccccctaaaaattaaggaatattatagatttctgttctaatgtttaattatttaattgtatccttattattcaatataca

SEQ ID NO: 180757 - DNA, 201 bp, Homo sapiens
cactgtatttgcatatgatgaaccctattgtcttgacctgattataaagtttaaaactaccctaaatagacagtctgttcaagatttttagacctaatttsttctcctcacaagttaaatcattaaatctaataaaggaagtgagaaaaatgttgatttttctggggtccagagtcaccaagaaggttttccaaggctaga

SEQ ID NO: 180758 - DNA, 201 bp, Homo sapiens
  misc_feature (1)...(201): n = A,T,C or G
ctgaattttcccattaaaacagaaaacgactagaacagcaaaacttaaaagaatgataaacaattttgacaacaaatttaggtggcaaagtgttctcacanattctcaaatatgagctgacattgtcatgacccagatgatactacaatttttgtaggagacaacagaggaaagcaatgaggtatttgatggaaatgaggt

SEQ ID NO: 180759 - DNA, 201 bp, Homo sapiens
acatacttctgaagtccgattagtcaccaaatcccaacacttctatggaaaaatgtccctacatcttagtccttttataaccaggatctctgcctttgttytagcctatatctacttttacccatatggatttaaaacctcattattttcataactcataattcatgctacattagtttaacatctcattaaatattcagc

SEQ ID NO: 180760 - DNA, 201 bp, Homo sapiens
gtagctgggactacaggcgcccgccaccaagcccagctaattttttatattttttagtagagacagggtttcaccatgttagccaggatgatctcgatctmctgaccttgtgatccgcccacctctgcctcccaaagtgctgagatcacaggcttgagccaccgcatccagccagaaaaaaattcttaagactagtaagaa

SEQ ID NO: 180761 - DNA, 201 bp, Homo sapiens
  misc_feature (1)...(201): n = A,T,C or G
ttttcttacaagttttatttctggatttttgttgacacacttttcgaattgactgcgttccaaatacctaaagagatctcccagaggatgcaaaggtccanaatgactaaataatgggtgtgtaaagagaagtttaagcccgtggacaaatagtggcaaatagcagagcttcaggttcagagagacctccgtcactaagca

SEQ ID NO: 180762 - DNA, 201 bp, Homo sapiens
aaagagattaaaatgtaataaagatacaaattgtctagatatttttggttatgctatttgttatctgtgcaacgcatagaataattggccattactggctrcaatgaaatatctatgctagcttgtaacagctgtcttggaactaaacaaactaaaaattttggagaagttaaatatgagctttgttaggcaatttcatga

SEQ ID NO: 180763 - DNA, 201 bp, Homo sapiens
tcattagcaaaattgtggggtacctacgtggtctggaagcttaaataaattgcacaaacccttctgtgccatgaaatgcctattgccaggattaaatgaaragaaaaaaattcatctcactgagacattttaaaaattatttttataaagttctgtcatccattaattctattgttttcaggtgttcttatattctgtttg

SEQ ID NO: 180764 - DNA, 201 bp, Homo sapiens
gacaacttgactttaataatgcgattttcaaaccacttacaaatcacgcaaactgtggtctttctgatacgctcttaggagagggactgtttttttgcacsgagggattagcaaatccgactgcatgtatgcttttgaagcagctttaagttttaaaagggaaaggcttccatctactggatactttgagtaataaagact

SEQ ID NO: 180765 - DNA, 201 bp, Homo sapiens
agactatgagaatccacatgacagatttccttttgtgccggcaatgcataacctggcatgttcacttagaggttttgtaattcttttaaaatacattttgktggaagaacgtagttgttactgaatacgttcagcttttacaaaatacaaagcccacaatatatcacaaaagagagacaaaaggaatatataatttgccct

SEQ ID NO: 180766 - DNA, 201 bp, Homo sapiens
gagttcagctacttctatttaatgacacatatttttgctaatatattgcattatatagtcagataagaacacgggtcttttcctgggcatattttgtagaygggatacatttgagctaaatcatgtaatctttgttcaagtcagcacataaagataaaaaatcttttttccagcagatagattttttaaaagaatgtaaga

SEQ ID NO: 180767 - DNA, 201 bp, Homo sapiens
gataaaggagtaggaagaatcaggatgagagccggatctctggcctaagcaaatgtttaaatgctgatttcatttaaataaaatcgggcaagtctgtgggwagaagaattggctgggagtaaaaagagatagggttcttgtgaaactcaagttcgttgttgtctgttggatttgagagcctcataattcatctaggtggtt

SEQ ID NO: 180768 - DNA, 201 bp, Homo sapiens
ataattcctctttgataaggacctaaatcttttcattcagtgatatcttttctgggttgtctgggttctgttcattgtcttttttgtgaccaagctttttyacacatttatggcccatgctgattgacaatggaaatgtttatttcatttttgcaactgaaaatttcttggcatttacagaagaaagaaaagaaagaggat

SEQ ID NO: 180769 - DNA, 201 bp, Homo sapiens
tcatttttgcaactgaaaatttcttggcatttacagaagaaagaaaagaaagaggatggaaagaaggcaggcaggtaggaagggagggagggaggaattarccttttctttgcacttgctcctctaactaaatcaagcccagaacttctaaatataacaataaaggaagaaccgctcataggctttagtccatacattcac

SEQ ID NO: 180770 - DNA, 201 bp, Homo sapiens
catcctttccttttcctcaaagaatgacttttgcattacattactaatctttctttccccccgcacccccctcccgcaatctctgttttttttttttttttctttccccacgtctcctgcagaataagaaccttcatattgaaaccctgttcgtttgatttgggaattggataggtctggagaatttgcgtagcctaaggc

SEQ ID NO: 180771 - DNA, 201 bp, Homo sapiens
tatggccagtgatttgattgcccttaatagaagtctgccagatgtaagattagaagggtaagtttgcatttgttatataatcttttatattcataatcacyatatttcagaatctcagaacttgagctaactcagattatatcaattctagcaatgtgtggttctgagtacctatcacatagcaggaatttattgtgcatg

SEQ ID NO: 180772 - DNA, 201 bp, Homo sapiens
ttaatgctgttaaaatttacaatgaattctgcaacactgccttgctgagtaactcttaactcagtaaatactgaatcctgggcaggaaaacaattgcaaarttaagtatgcatttaaaaagattaaaggaattaagattactgaaccccatgaaaatattaataaaacacttatcttaatgactgttaagtgaagtagcaa

SEQ ID NO: 180773 - DNA, 201 bp, Homo sapiens
aaatgtgtggatttggggctttggtaactgaaaaatgaatatcaaaagatacccatgttctaacccctggagcctgtgttttaccttatgtggcaaaaaakattttgtagacatgattttgttaaagatcttgagatatggagataatcttgtgttatctagatagccgcgctaccacatgtatccttataaaagggaagc

SEQ ID NO: 180774 - DNA, 201 bp, Homo sapiens
caggtattctcttagccttctaccttctgttgccgttccaaggctattactgtttagagcttaacttcttgtaataacttgcatcactccccttgtgtcckcttaacaaacaatcacatcactgctcactcatcatttccctcaatgtgacagtatgaagaattcaatttaatccttgctatatgggagtgacagtagaaa

SEQ ID NO: 180775 - DNA, 201 bp, Homo sapiens
agcctgtagaccatactctatgtaaatctctggttcatttctcgttgctaatctccaccctcgtacccttcccttgactttgtcacttgtatttttctttkaaaccctttccatatttaaaacaccacaatattgacatgtgagccatcttctcgagagagaatcaggtattctcttagccttctaccttctgttgccgtt

SEQ ID NO: 180776 - DNA, 201 bp, Homo sapiens
attactgaaccccatgaaaatattaataaaacacttatcttaatgactgttaagtgaagtagcaaatatcttaatctatgactaaaatcactgaaaattgytttcaaatttttttatctagcagaagaaataaaattaaacttaaatatttctatttatgtctaaaaattcaaaaagtggaataaataagacagtaacctg

SEQ ID NO: 180777 - DNA, 201 bp, Homo sapiens
tgtctaaaaattcaaaaagtggaataaataagacagtaacctgttattagattatgaaatactttaaagtttttataactgaacaaaaggtatttatcagktttttgacacgagttaacattctttaactctcactgtgccaaatactttgtatatatcattctatttatttcctcatgataatcccatgaagtattaaaa

SEQ ID NO: 180778 - DNA, 201 bp, Homo sapiens
gtatgctgctcattgaaaagacatctgagccagagtaagtggttgatttcccacttcgttcatctggtatacaacagaagtacacaatcccagaaaatagsctagcctactcttctgttaggagatgatgtacctcctgaggtgcatatacacaagaaaacaacagacataatgggtaacatttagtgagtatttactatg

SEQ ID NO: 180779 - DNA, 201 bp, Homo sapiens
cagataaaaaaatgacattccatgcaaagtaaaactaaaaaagagcaggagtagctatacttacatcagacaaaggagatttcaagacaaaactataagaagagacaaagaagtttattatttaatgataaatgggtcaatttagccagaggatataacatttgtaaatatgtatgcaaccaacactggcacagccagata

SEQ ID NO: 180780 - DNA, 201 bp, Homo sapiens
caacatggctgcacagaagcctccactgattttccttcctgcagggacaccaaatttaacaactatctacacaaaaaagcagcaccttcataagaaccacmagtcaggtaagccatgatagtacctgatattaacttcatgccattgaaagaggcacagaagagggtaggaaagaaagtcttgaattgtggacatcactct

SEQ ID NO: 180781 - DNA, 201 bp, Homo sapiens
tgtctgcctgggttatgactgaacctcttaggacagttccagatgtccatcagaatttctcttccaagttgctatttttagaaggtttattttatagcttktcttaaaagcacgttttcccacttgcttgataaataagactgctgtattcatgctggacatagatagttgattaagaaatagtgaaataattcaaataat

SEQ ID NO: 180782 - DNA, 201 bp, Homo sapiens
tccaactcaattgattatattattgagcattctcatatgattttatggatacttgacattaattaactaatgaaatctctattattttatatctaaggcartaaatactgataggaattggccaccatttctgtgtgttgaatttccatcttggtagtatctctgctatttcttaaaacagtttcaaaaatttttcttata

SEQ ID NO: 180783 - DNA, 201 bp, Homo sapiens
catctgcctgttaaatttgggatcaccacctacagcactacacatatcattgatccaagtgtaccttgattgattgcttgaaaagaaaaatctggacttayttggatttataagcaaagtcaaaaacatttttcaaaatgttaagttctaaaagtagtaataatgatggtgtagccccttactaatcagtgtgctctgggg

SEQ ID NO: 180784 - DNA, 201 bp, Homo sapiens
ttcatatagccattgcttcatctagattatgtgtactctttgtactgcatgtattgagtttaattgtcattcactattttttcaaaaatattacattattkttcaatattagaacaaaaagttattgtctgaagagaacaagatatgaaagaacagcaagaattaaattttatatgattaaacaaagatttgttattgggg

SEQ ID NO: 180785 - DNA, 201 bp, Homo sapiens
aatgtcttttagggtaattgcattttattttattttttgatgctgaacatacaatgctgtagcatgcacataccagtcccagtaatttactgtcaaatcayttttgctgagtgatgcaaattactgatcaattggttatcttaattcacattttgatttgacagagtcctattgcatgcaatattttcttctaaatgggaa

SEQ ID NO: 180786 - DNA, 201 bp, Homo sapiens
attttcacctgtagacacagtcagacactttaatcagaatttctgtgacagaagctctcacacctatagttttttgagctcatgagataattccaatgtcmagccaagattaagagccacagatatattatcatagaattaaaaaaataaactttcacttccttgcaagtattacaaattcagcatgtcaatatagtgtta

SEQ ID NO: 180787 - DNA, 201 bp, Homo sapiens
tgtagaaatcatgctgctttgttccctgcaggagttaaaataaaaatattagtaattatgcatatttaattttcagaatgccaactgattactcacagcasttataaaagggaaatgattttagatattcataaaacatttccttagtaaggggctttcaagtctgaagttgtgttattatggatatttctttttaaaata

SEQ ID NO: 180788 - DNA, 201 bp, Homo sapiens
ttacaaaaataagtcgggagtggtggcatgtgcctgtagtcccagctacttaggtggctgagtagaaggatgcttgagcccaggaggcggaggtggcagtraatcaatatcttgccactgcactgcagcatgggtgacagagtgaccctgtctcaaaaaaaaaaaaaaaaaaaagaaaaagaaaagaaaaaaagtacaaat

SEQ ID NO: 180789 - DNA, 201 bp, Homo sapiens
gccttgatggacgttactgctttagactttaaaatcatcatcactctaataatcactgtagacttctttatatctaagtcctatttatttccattaaagtrtactgcaacaaaaataacgtaccatctttatttaccatgtggcttagttaagatggtgatataactaccattgttatcagaaacactatctgaactagta

SEQ ID NO: 180790 - DNA, 201 bp, Homo sapiens
atttgtttcataaaaggtgaactgtgtagaacctttgcattttatgggtacatttcccctacagtagctcctagacaccctgaagaggcaaggtcagtgaytggagaattcagagacttgaattctggtcaaagcacagcctctagctatttataatacttttgtcacattattttccctgtttgtgatgcactttcccca

SEQ ID NO: 180791 - DNA, 201 bp, Homo sapiens
cattcatcatttattatctaatatgtcccaggcattcctctaggtcctagggatctagaagtacatgaaacagacaaaatattttttcttcattgtacttmccttctagtatgaagacagacaataaataagattatgatagtagctgaggaaattaatagatcatgaacaggaactgggtgaagaagcaaagtcatttta

SEQ ID NO: 180792 - DNA, 201 bp, Homo sapiens
taggtcctagggatctagaagtacatgaaacagacaaaatattttttcttcattgtacttcccttctagtatgaagacagacaataaataagattatgatrgtagctgaggaaattaatagatcatgaacaggaactgggtgaagaagcaaagtcattttagatagggtagtcagagaaggcttcacagaaagagtttagt

SEQ ID NO: 180793 - DNA, 201 bp, Homo sapiens
ttttaccttcttgaaggcccttcattcctgggatatttatgtagttctctctctctctctctctctctctatctatctatctatctatctatctatatatmtatatatatatatatacacacactaaaaatttacatataaatttatatataaattttatttatatgtataaataaaattttagacagctgtaaccagccc

SEQ ID NO: 180794 - DNA, 201 bp, Homo sapiens
gaaggactcacttccacacctcctgctattaggaaacgcttgagctctaggaaatatatttcaaaaccattatccatcttctctgttgtaggcaactaatktaatgtagtttacacatgcacagaattgcattttattctgcctatgtttaacaatgcagaccgcagattggttgcaacaatttgctgtcttacaaaagta

SEQ ID NO: 180795 - DNA, 201 bp, Homo sapiens
atgtttaacaatgcagaccgcagattggttgcaacaatttgctgtcttacaaaagtatgtaacaaatgtgaatttttaagtcacagataatttttcttcgyacccattgaccaacctctcacattcctcccctcccgattctctggtatcgactcttcggctctgcttctattaaattttttttttaaatttcacatatga

SEQ ID NO: 180796 - DNA, 201 bp, Homo sapiens
cttgaatgaacaattgatctgcaacattttgtcatgatgcctctactttggcttggattgtcaagactcttctctcttcatttaaaatttgataaactgtractttaaaatgtttcaggcccagtctcaaggaaatttcctgttacagtacgtaaaatgaaaccataataacggcagtaatttcagaggacatagaatatg

SEQ ID NO: 180797 - DNA, 201 bp, Homo sapiens
caagagtctagggatggcctagctggggcctctgcttcagggtctctcacatgcctgcaattaatgtgttgatgggggctgcaatctcatctcatggctcwactggggaagaatctgcttccaattttacatgtcagaatttagttccttggagattgtcaggctgaaacctttagtttcttgtctgtttgccagcatttt

SEQ ID NO: 180798 - DNA, 201 bp, Homo sapiens
gggatggcctagctggggcctctgcttcagggtctctcacatgcctgcaattaatgtgttgatgggggctgcaatctcatctcatggctcaactggggaakaatctgcttccaattttacatgtcagaatttagttccttggagattgtcaggctgaaacctttagtttcttgtctgtttgccagcattttcttatgtggc

SEQ ID NO: 180799 - DNA, 201 bp, Homo sapiens
acatattcttcaagtcttctctcactcttccagttccattgtcctcatcatttgctgcctgagggtttgcaatagcttcttaatttatctccctgttgccrgcatcatggtcaatgtcctttcccattcagccagctccagtttctttcatgagtctgccagaattgtcttctaaatgcaaatagtaatcatgtggctccc

SEQ ID NO: 180800 - DNA, 201 bp, Homo sapiens
actttctgtaatgctcacccactcttctctatctcatttcccctacctttatatctcagctcaaagatcactttcctcagagaagacttccctgaccaccycttcctgaccaccagtgaatcagttgcctattctttgcatttattctctgtacatctctcaaatacacttgtaatctcacatttgttaatttttgtgtgg

SEQ ID NO: 180801 - DNA, 201 bp, Homo sapiens
acctaaaagtagggcatacatttgacttataaaagcatcccccactctcataccaggaggagaagagcaacctttattagcagaaatagaaatgctgtcargataagccagcataaacaaatctcactaaataacctttattatccattagtttccctcctgcattacagagtttcccaccttagaagccccaaacccttt

SEQ ID NO: 180802 - DNA, 201 bp, Homo sapiens
tgtatccccatcacctaggacagtgtgtaacataagatgcacaacaaaacgtgagggaaggaacagaggttaaggacactaacctggaagtcaggaaaccyagtttccaatgtgggttctttcacttactagctgttctgtttcacccaagtccaatcatatttccaagcctcaggttattcatgtgtgaaaggtcatttt

SEQ ID NO: 180803 - DNA, 201 bp, Homo sapiens
ctagatagccgcgctaccacatgtatccttataaaagggaagcagagggagaagaaaaggtgatgtgaccatagtggcagagcttggagtaaagcggccartaagccagggaatggttgtagtcacaagaacctggaagaagcaagggctagattttcccccagaccctctggagggaaagaggccctgctgatacctgat

SEQ ID NO: 180804 - DNA, 201 bp, Homo sapiens
gcatgggaaacccaggagcagtatgttactctaccattccctgaagtcatatgtcaaactcatggttattgaaattttcctcatagattgttccacagttracagtgcacagtgtcctgcgggtaactaatgattctcctgtagccttttccagcttactcatttatagtagtttaggacagaaggggaaaattggttgac

SEQ ID NO: 180805 - DNA, 201 bp, Homo sapiens
aaattatttctaatttttttccaaattaatctattcttaacattaaaagctatctttatattgaaatatgtctaatacttttttctttgcacaagaaataygttttctaggattttattgcattctacactaatttgaagcatgtgttagcagtatgaaatgggttttttcttttaattacatcatatataattatacatg

SEQ ID NO: 180806 - DNA, 201 bp, Homo sapiens
ttgaactgcacatgcaggccattctccaagaagctcttatcaagtttcttatgatccaggctatctaattacgggccctagcaacttgaggctacactacytggctacttctgatgggtgtagtgatcgatatgttatggcatatctataaactatttgtggtgcatgagttgaaaagctcaactcttagcctatttcaat

SEQ ID NO: 180807 - DNA, 201 bp, Homo sapiens
cctgttccccaaagagaaatggacaggaggaaaggagacagaacattacctgtcaggtatgtagatcatatctcttgaagattatgtatatccccctaaarattaaggaatattatagatttctgttctaatgtttaattatttaattgtatccttattattcaatatacatatacattatgacctttacataatcatata

SEQ ID NO: 180808 - DNA, 201 bp, Homo sapiens
catcaattataaagttagcaatatttgtcagatataggaagtcagttgctaaggaaaaacacagcttttcctgcttctgagtccacaaaagaaattactcytgagatttctaataaaaacaaaatgcaaaacaatagcaacaacatgtatgataagatagtcaaaggcctcagcataacacaaaatgctggtacaataaca

SEQ ID NO: 180809 - DNA, 201 bp, Homo sapiens
cactatttttttttgtactgactctcaatatcttaccaagacaccagaaattcagtcttaggtcctgctggttgctgcacagaaattcaatcaccaagacratgagtattgccagggaagaagacttgaaatcagtgatgcagctgaggagatgggagatagtctcaaattcatctcctcaactgactaaaattaggggtt

SEQ ID NO: 180810 - DNA, 201 bp, Homo sapiens
ccatgtgtgggaaaacagaataagggaggagtaaagaagtggagttgatccaaaggaagcaggtggtaagtaaggcaatcatgatgggtcagtggtctgtmatctcattgtccatatgtggtgatctggtaagtttcagttccttgatactatctgggtggcctgatggttggtttcctgagaaagtactcagataagaca

SEQ ID NO: 180811 - DNA, 201 bp, Homo sapiens
gtattttcttaatttacttattatttgatgcttaagctcagttatatatttcaacattcaacatttaaatcttaagctggtttttatctacattggcagarttagattttcaagcatgcaggctcatatccggtaacattaggatggcatatcatataaacaggtttcaccaaattggtccattaatataaaatatgaatg

SEQ ID NO: 180812 - DNA, 201 bp, Homo sapiens
cacagtgtcctgcgggtaactaatgattctcctgtagccttttccagcttactcatttatagtagtttaggacagaaggggaaaattggttgacagttgargccatgaatactttttacaattgttctttcaatccacaaataacatgttctcttaaaacgtttttttttttttaaatataagtttctactgttcttagta

SEQ ID NO: 180813 - DNA, 201 bp, Homo sapiens
cctctaagagtgcgattctgagacacactggaggtgaggtatagtatgctgctcattgaaaagacatctgagccagagtaagtggttgatttcccacttcrttcatctggtatacaacagaagtacacaatcccagaaaataggctagcctactcttctgttaggagatgatgtacctcctgaggtgcatatacacaagaa

SEQ ID NO: 180814 - DNA, 201 bp, Homo sapiens
tagcctactcttctgttaggagatgatgtacctcctgaggtgcatatacacaagaaaacaacagacataatgggtaacatttagtgagtatttactatgcrtgatgcactgtttgagtgttttatatgttaactcatttcataatcatagtagcactcagtaaaaggtgctattattagcactgctgtataaatagaaatc

SEQ ID NO: 180815 - DNA, 201 bp, Homo sapiens
cattaattaactaatgaaatctctattattttatatctaaggcaataaatactgataggaattggccaccatttctgtgtgttgaatttccatcttggtartatctctgctatttcttaaaacagtttcaaaaatttttcttataaattcttatacatgttacagattttctcaagttgacattagagaattacgtgaaaa

SEQ ID NO: 180816 - DNA, 201 bp, Homo sapiens
tgctagtgactaatatttttggttaaatatagaaaatacaacaaagctgtgtttctcaaaatattttcagtggagcactgttgtctcaaattctggaaagyggaaaatgaatctagaaaatgtgaatgcctttggttattcatgatgcactttaccataataaataaagacacctatttaactttgttttacccattcttt

SEQ ID NO: 180817 - DNA, 201 bp, Homo sapiens
gcacactgaaatcttctggcttgtatttaattgtcagatcaataaagtaactcattatatatgaattcaagtttgggatcttggatcaatcacactgatgytaggtcagggagaatttgcaacgtgagtcctatcattcaagggatgataattaccatgttctgtacccaggaaaatatttccctttataggtttttcaaa

SEQ ID NO: 180818 - DNA, 201 bp, Homo sapiens
ctttataggtttttcaaacttcctccagtttcatgacccattctagtagagtgaacaagagcatggattttgatattagataaaagtgaacaacatttgaycctacttctgctattttctaagtatacttaataaagttatttaaccattcaaagtcttaattctttcatccttaaaacaagtaacaataataatagataa

SEQ ID NO: 180819 - DNA, 201 bp, Homo sapiens
tcactatgtattattagttggaatagtcaatcagccagttaatgtagttctgtccactgacatgctaatgagaacttatgagcctgggtaatttgtatggrcatagggaatagataaaaaggtagattaagggaatagttttaaatttaaaaacaacaatgataattccaagaaatcgcctaaacctctgaaacaatacag

SEQ ID NO: 180820 - DNA, 201 bp, Homo sapiens
gtgcctggtttatttcacttagcataatgtccttcagcttcattcatgttgtcaaaatgatgggattttcttcctttttaaggctaaatagtgcttcattkcatagaatacaacactctctttatctgttcatctgttgatatacatttaggttgatcccatttcttggctattgtgaataatgctgcagtgaacaagcga

SEQ ID NO: 180821 - DNA, 201 bp, Homo sapiens
tgcctggtttatttcacttagcataatgtccttcagcttcattcatgttgtcaaaatgatgggattttcttcctttttaaggctaaatagtgcttcattgyatagaatacaacactctctttatctgttcatctgttgatatacatttaggttgatcccatttcttggctattgtgaataatgctgcagtgaacaagcgag

SEQ ID NO: 180822 - DNA, 201 bp, Homo sapiens
cagatatccctttgacatattgatttcatttcctttatataaactcagaagaggaattacagtgtcatgtggtagttctatttttagttttacaaggaagstccataccacttttataatggctgtactaatttatatttccatcaacaatatctaagaattcccatttctccacatcctctccaacatgtgtcttttata

SEQ ID NO: 180823 - DNA, 201 bp, Homo sapiens
ttttaaatgtatgaatcttaatgtggtgttacttataaatctaacataaatacatagcccccaatttcttactgaagctttaagagacaagttaaaattgwtctctgggatcccttgtacagaagaatttcatataagttttgtagcttactccaggaggtataacataaccttcccccttccctggcatgtgtgctgtgt

SEQ ID NO: 180824 - DNA, 201 bp, Homo sapiens
attggcaaatactaccttgagtatgtaatcaagattctataatgtgagtcatagtgataccgtgcacccttgaagtgatgggaatgacactgtacctttgwggtcttccacccccaaccctagacccctaatccagccatgagataaacattagaaaaattcaaactgagagatattctataaagtgcctgataagtattt

SEQ ID NO: 180825 - DNA, 201 bp, Homo sapiens
gcaaacggagtgactttgtagaacttctttaacctttgcaaacctcataatcctaatttgcaaaaaaagaataatactgtatgtgctatatcatatttaawatacagtatattttaaatgaccactgtctttcgtaacacacaacagttgctcccaaaatgttgtttctccccttgcttccagcccaacatcaaaaggcta

SEQ ID NO: 180826 - DNA, 201 bp, Homo sapiens
ctagagggacagaactaataggatatatatatatatatatatatatatatatatatagagagagagagagagagagagagagagagagagagagagagagrgacagagagagagagagagagagagacagagagagagaggagtttcttaagtattaactcacatggtcacaaggtcccacaataggccgtctgcaagctg

SEQ ID NO: 180827 - DNA, 201 bp, Homo sapiens
cagcttaaaagataatttttaattactatttttacgtctctggactataaaatttaaaaaaaagtttcatattagtttagtgatgcaaggagaaaatattmaccgaaaatttaacaatataatgatatatattagagttttccctccccagtagcatgaataaagagccactaagcataaattgcaatggtacctaatggg

SEQ ID NO: 180828 - DNA, 201 bp, Homo sapiens
cccaagtagctgggattacaggcacccaccacaactggccagctaattttttggtgtttttagtagagacagggtatcaccatcttggccacgctggtgtygaactcctggcctcaagtgatctgcccacctcggcctccaaaattgctgggattataggcatgagccacagtggccacttaagcattgtttattgaataa

SEQ ID NO: 180829 - DNA, 201 bp, Homo sapiens
agggtatcaccatcttggccacgctggtgttgaactcctggcctcaagtgatctgcccacctcggcctccaaaattgctgggattataggcatgagccacmgtggccacttaagcattgtttattgaataaaaataatttcccttttaagttatgctgcaatatgtattcttgtgcatgaaattgtaagctttggcatgca

SEQ ID NO: 180830 - DNA, 201 bp, Homo sapiens
ctatcatgctcctgtataagggcttgccatcttccattcacagagacactgtcctttatcttcagggcatgatgcaactgagttccatgggggtggggggwtggtggggaggggtgtggcggggaacctatctggcagcagtaaaatggccaggggaagaacctcttcagtcagtccaaaacagatagatttgcagctggt

SEQ ID NO: 180831 - DNA, 201 bp, Homo sapiens
gagccacagtggccacttaagcattgtttattgaataaaaataatttcccttttaagttatgctgcaatatgtattcttgtgcatgaaattgtaagctttrgcatgcattagggtattctttcttcaggtactttgattttagagagacagaactattagacttactagacatctattaggggaagaatttaactgaaata

SEQ ID NO: 180832 - DNA, 201 bp, Homo sapiens
cttgtgcatgaaattgtaagctttggcatgcattagggtattctttcttcaggtactttgattttagagagacagaactattagacttactagacatctaytaggggaagaatttaactgaaataattattatcattgaaatgccaggggtttggtctaaggcccattgcttgcctcacagaagtccaatccctgagacaa

SEQ ID NO: 180833 - DNA, 201 bp, Homo sapiens
tggtctaaggcccattgcttgcctcacagaagtccaatccctgagacaatgagtattgccagggaagaaggctttaactgggtgctgcaaccagggagacragagagcagtctcaaatccatatcctcaattgactaaaattagaggtttatatagcagcaaaaaaaatgtaattatgtgtagggaaaacaggaattagtg

SEQ ID NO: 180834 - DNA, 201 bp, Homo sapiens
ttccatggtgtatatataccacatttgctttatctagtctatcattgatggacatttagctggattccatgaaaagacagcttatttaaaaaaaataggarcccataaattttatcatttacctattaatgaaacctgcaaacctggaattaattaaaatactcttttgttggtactcattatgcatctttatttcattgt

SEQ ID NO: 180835 - DNA, 201 bp, Homo sapiens
actgacagatgctataagtaaataagatttctttaaacttgaagccatctagaaaactttggtattatttgcacccaatgcaagcattgtggtaataattscaaggtaaattttgaatattgtgtccggtgaagagtactctccctttacagatagagagttgtaaacaatacataagtatatcattgtgccatttaggat

SEQ ID NO: 180836 - DNA, 201 bp, Homo sapiens
tggtgtatatataccacatttgctttatctagtctatcattgatggacatttagctggattccatgaaaagacagcttatttaaaaaaaataggagcccawaaattttatcatttacctattaatgaaacctgcaaacctggaattaattaaaatactcttttgttggtactcattatgcatctttatttcattgtcaaag

SEQ ID NO: 180837 - DNA, 201 bp, Homo sapiens
atactcttttgttggtactcattatgcatctttatttcattgtcaaagcctttacatggcttttgcaagttccattgaaagacttgccttaaaaacttatraatttttgccacagcgtgtgtcaccttctaatgtatttactgtttatttaggtctttctccagtagaatataaactccatggaggaagataattttgttt

SEQ ID NO: 180838 - DNA, 201 bp, Homo sapiens
actcattatgcatctttatttcattgtcaaagcctttacatggcttttgcaagttccattgaaagacttgccttaaaaacttataaatttttgccacagcrtgtgtcaccttctaatgtatttactgtttatttaggtctttctccagtagaatataaactccatggaggaagataattttgttttgttcacagatatatc

SEQ ID NO: 180839 - DNA, 201 bp, Homo sapiens
cagaataaacctgaagaagtaaattttcagcaaagacttggaccaagtaaagaacaactcatgaaagttgcagggtaacaccattacagacagaaaaaaakaagtataaagccttgaattgttgaattatgaatgaacgtgggatgtttgaagaaatgtaaagaatgaaaaaaagtggggctagaatgaagatgttactga

SEQ ID NO: 180840 - DNA, 201 bp, Homo sapiens
tgccatttaggatattataatttggcttttcagaatctttatatatgtaacaattttatctaattacatgcctgaatatatctggtatagtatataccagrgttttaggaagtgtctaaagatacaagtgaaaacttttaaaattgtatgaaatgttacaaaaacacctgtaaaagacattcagatgggatagcaaaaagt

SEQ ID NO: 180841 - DNA, 201 bp, Homo sapiens
atcattatttttcagctattgaaacaaacactaaaatacaatagtttatctaggtgtcatgtgaatgatatatttattgttgttatgtctgttttacattyacatgcttagatcagtaagaacctcaaagatcaggtatcttgctgcataatggtaccaactaatgagactggcataaagggaaactatgtatgcatgtat

SEQ ID NO: 180842 - DNA, 201 bp, Homo sapiens
tattagttttctattgtttcataacaaattactacaaatttagtggcttaaaacaacacaaaattattatttcacagtttgtaagaggaattcaggcacartgtggctgggttctctgctcagggtctcacacagctgaaatataggtgttggccagagctgtgatctcaactcagcctcaggggattcctcttccaacct

SEQ ID NO: 180843 - DNA, 201 bp, Homo sapiens
tgttaacttctagtttaatggaatcattgtgcttcctggtggcagcattcctccctctggaactaagacctctaggccagcaaaacgtaaggtcacgggarcaggaagcaaaaattttgctagtagatcactagaggtgatggtcagtggtcccacttccacttccaccccttgattcctggaccgatgaatcctggcttt

SEQ ID NO: 180844 - DNA, 201 bp, Homo sapiens
tgtttgctatttttatttcttttttgtgagatgtcaattcaactttcttgcccatttttttgtttttgtgctgttgagttctttcaatttcttacatattktagatattaaatccttctcagatgtgtgccttgcacaaattaacagtgtgattttcacactgttaattgtcttctatgctgttcagtagcttttaaatgt

SEQ ID NO: 180845 - DNA, 201 bp, Homo sapiens
tagatggatagattgcaaaaatttcctcctattctgtaggttgcctgttcactctggtgatagtttcttttgctgtgcagaagctctttagtttaattagwtcccatttgtcagttgtggcttttgttgccattgcttttagtgttttagtcatgaagtctttgcacatgcctttgtccggaatggtattacctaggtttt

SEQ ID NO: 180846 - DNA, 201 bp, Homo sapiens
ataggttgctgcagccaaggagatgggaaatcagtctcaaattcatctcttcaactgaccaaaattaggggttgatgtagcagggaagaaatgtaaccatrtatgggaaactaggaattagggataaggaagaggaattgatcaacaagaaacaggtggttaggcaatcatgacaggtgagggggtctggtgtctcactgt

SEQ ID NO: 180847 - DNA, 201 bp, Homo sapiens
aaatgaattcaaaaagccagccaagagctattttctaaaggatcttcaggcaatggttaagacagattcaattattcttagtgttatggaaaatcacggtmcacttttggtcaggggagtaacatgatttgatttgtattttaaatatattgactaaggaacaggcaatagtgaataaaatataggtagaggaatgtaaaa

SEQ ID NO: 180848 - DNA, 201 bp, Homo sapiens
cagttagatgtccttacctaactgcagggacctgagaaatgtggaggagtacatggagtgtttgtgaggactgttgtctcttaatatgtctcacttctaasaagaaaaacatggattcagagagaaaaagccattctcaccaaaatgttaagatagcccaccatatttttttgtacatttctaaaggtaatttagcataat

SEQ ID NO: 180849 - DNA, 201 bp, Homo sapiens
gaaaatctgaagtgtaagcccttttcttggtacctagaaaacatctatccggactcccagatcccaagacgttattactcacttggtgaggtatgaattayttattttggttaagttataaatatattttgcaaatggagcaatttctaaggagctcagtattttttatgttatgaaaatgctgtaagggatttttaatta

SEQ ID NO: 180850 - DNA, 201 bp, Homo sapiens
tctattacaatagcctctagaaaactcttatacactcaggagaatgtgaaagtgaaaactgcaagtaatatcttggtactataacaaaagtggtattgacrttgtagacactctgagaaccattgatctgcaccattcttttctacatatctattttatcttgaaatacaaaaatgacttcattataactatacaaactgt

SEQ ID NO: 180851 - DNA, 201 bp, Homo sapiens
aagggctataacaggacagaaatgagcaaagaggacttttggaaatcctctggggccaccaaggtgactcctgagaaagactcagggctctgtaacagaaytagatgtttagttccaagttaaaaatccaattttatgctgtcctgcactatatcaaggaaacctaattcactttctaaaatgtaaaaataaaatatagtg

SEQ ID NO: 180852 - DNA, 201 bp, Homo sapiens
tcaggaaatcacctagtcacattataaaacacctttatgaagatacagctataatataaaagtattttgaaaatggttgattttatactattggaaagtakaactggatgttaaaatttcagcccagataccaagatacaataaatgtgaaatgtaaaatcagatttccctatgcaaaatttgcaatgacaatctaaaatc

SEQ ID NO: 180853 - DNA, 201 bp, Homo sapiens
aagtgtgatcacgggcagttagaaagtatagcaaattcatatccttaggctgctttctaaggatatcagtgaaaatgaaatcagacctttcttaaaatgckgttatctaacacagtattttagaattaaacttttaatctgttttcttatatgactattgagtattgttatccttcacttttgttgttttgttttgttttg

SEQ ID NO: 180854 - DNA, 201 bp, Homo sapiens
ctctactacctctgtcaacagaataaagataataatactgggttatagtgatgactgaagacataaaacatctagcccaatgcctggcaagaatagtagcmtaccagtagttacacttattatatctaccatttattgatttcctatgccaacagttattctaggtgctttagatgaattacgtagaaattagaacaactt

SEQ ID NO: 180855 - DNA, 201 bp, Homo sapiens
gaagctgagtgtgttggcaggtgcccatggtcacagctattcaagtggctgaggcagtagtatggcttgagtccaggagttcaagaccagctgagtaacawagtgagaacccatctctatttaataaaaataaaaaaagaacttgagctatgtcttagtccattagggctgctataccaaaataccttagattgggtaatt

SEQ ID NO: 180856 - DNA, 201 bp, Homo sapiens
aatatgtcaccctttattggatggctaccttaaagtatgttgggctaggcaactcacctgtgaacaaagtgagctatttttattacttgaaaatattgtayttttttaacttcatatttctaataaactaaaattcattctaattttattacttaaatgtgtattggcagaaacagctgcaacaaactatatgccagtttg

SEQ ID NO: 180857 - DNA, 201 bp, Homo sapiens
tgggctaggcaactcacctgtgaacaaagtgagctatttttattacttgaaaatattgtatttttttaacttcatatttctaataaactaaaattcattcyaattttattacttaaatgtgtattggcagaaacagctgcaacaaactatatgccagtttggcatttattcaattctctcaggattttggttgtcactgtt

SEQ ID NO: 180858 - DNA, 201 bp, Homo sapiens
tgagctatttttattacttgaaaatattgtatttttttaacttcatatttctaataaactaaaattcattctaattttattacttaaatgtgtattggcasaaacagctgcaacaaactatatgccagtttggcatttattcaattctctcaggattttggttgtcactgtttttgttatccaccaaataaattaaattgt

SEQ ID NO: 180859 - DNA, 201 bp, Homo sapiens
ctatgttctttacttttggggggaagggatttcagatatcagataacaataatttttgaatctcacagtcattaatcaaggaccttctaaatccagttctscataagtgaagtcaacttgaattgtttcagtatacagattttgttctcatctttctgatttattcacaattagattaaacagaaaatatgctttaaatgc

SEQ ID NO: 180860 - DNA, 201 bp, Homo sapiens
atccagttctccataagtgaagtcaacttgaattgtttcagtatacagattttgttctcatctttctgatttattcacaattagattaaacagaaaatatrctttaaatgcatatccacaagagcaatcatattatggaaatattaacattaagctctggaattcactgcaaatgtgcttatttctgtctttacaaagaaa

SEQ ID NO: 180861 - DNA, 201 bp, Homo sapiens
tctccataagtgtgcacattttttggtactggtggttagtacttcaatatatcatctggggagccacagttcaacccataatggaaagtatcagaatatgragaagattacaagattttgcctggagagattagttgccctccctctagaggagatgggctgggattctagcttccagtaagaggaggattcaaggccagg

SEQ ID NO: 180862 - DNA, 201 bp, Homo sapiens
caaatgtgcttatttctgtctttacaaagaaaagagaaaacaaatgaggttgacatttgtaaaataatgataaaaaataatatgcaattgaaggataaacrtatgttgggataattaaagtaaaataatgctagtttaagtttagactgtcttatctttagaatggattttctatgagtttttaaaacggaaagattggtg

SEQ ID NO: 180863 - DNA, 201 bp, Homo sapiens
gtgaacaaattatataagtgatacgaacactaccaatgatgctgcaatgcacagaaacatttagaaaaagtcttgctgatttcaaacatcaaaacacaagkgggaaaaatgccctcaagtttgtgtcattaagaattgttttcaagcaataaaagattatgtgtaaacatagaaatctcaaagcagacagccaattaaagt

SEQ ID NO: 180864 - DNA, 201 bp, Homo sapiens
actttctccctgtttcctcttttataatggaaggaaaggcacagaaattgattgtttttccctgcttctagtcagcttaatcaaagtgattagactttgarccaattaattgtcattaaagtcaggctgccactggaacaaatggaaacatatgctaaatctatggttcatgtaacacagttctgctttactaactattgg

SEQ ID NO: 180865 - DNA, 201 bp, Homo sapiens
ggaaaaatgccctcaagtttgtgtcattaagaattgttttcaagcaataaaagattatgtgtaaacatagaaatctcaaagcagacagccaattaaagttraaactatcttggccttgtgccatatattcaaacatatgtaacatatgaatgagtcaaaaaagtttaccagatcttagagctaccagtgtgcgctactatt

SEQ ID NO: 180866 - DNA, 201 bp, Homo sapiens
ttttcaagtacaaaggccaaaaaaaatttagcagacatataatttatatacacatataagtgcagaaactgttctacagatatatctttcttaaatgtacrttacttataactgtaacaaccacaaatgaatctaaattagaaattgaggatcaagggatatatggtagactgctctctgaaaggttcaacaggtactgtt

SEQ ID NO: 180867 - DNA, 201 bp, Homo sapiens
gtgtaccaccatgcttggataattttctttttattatcgtttgtagagctgacatctctgtatgtttccctggctggtctcaaactcctgggctcaagcartcctctcgccttagcctcccaaagtgttgggattacaggcatgagccaccgaaccaccgacccagccccccataatttccttttaagcggttggcagaag

SEQ ID NO: 180868 - DNA, 201 bp, Homo sapiens
tgtagagctgacatctctgtatgtttccctggctggtctcaaactcctgggctcaagcagtcctctcgccttagcctcccaaagtgttgggattacaggcrtgagccaccgaaccaccgacccagccccccataatttccttttaagcggttggcagaagagggtatttgtgttctgtcattgattttgccgcttcctctc

SEQ ID NO: 180869 - DNA, 201 bp, Homo sapiens
ttgttattttcagaatccattgtttgttttgctaactttttctcgcactgtattacctttcttggcttaaaaacccaataggcttggtaagccagatgtaygcctgtccaaccagctcaccccagtttgaatcactactctttcatcttctctgccttcccagtatggcttagatattctcaagccttggcttgcttccag

SEQ ID NO: 180870 - DNA, 201 bp, Homo sapiens
aaagtaatcacgtgagttttcattataacagatttaaatcacaaatgaaattgtcagtttatttttgagttaccaaattccttacacagcttttaaagttkcattgtacactgttttgctttctcatttactttaacccagaaatactttctaagcttaagtacattcaaaacttgtttttttctcacctgattctactga

SEQ ID NO: 180871 - DNA, 201 bp, Homo sapiens
cactaaagacttactgaattgtaaataatatattaaaaatatctggagaaaataaggaagcactggctaaggatcaaatatttgatatatgtgtgtatatygtattatgtttaaaagccattatttaaaatgtcattaagtaacatatatgttacatttttgtgcataataaaatgacacattcatttatataagcatata

SEQ ID NO: 180872 - DNA, 201 bp, Homo sapiens
cctttcaaaccctttaaagtattaaagtaatcacgtgagttttcattataacagatttaaatcacaaatgaaattgtcagtttatttttgagttaccaaawtccttacacagcttttaaagtttcattgtacactgttttgctttctcatttactttaacccagaaatactttctaagcttaagtacattcaaaacttgtt

SEQ ID NO: 180873 - DNA, 201 bp, Homo sapiens
tcagtcatagcctgagtatggtagatgtagtctaggagaacttggctgggaacacaacaccatgtcttcatattcatttcgaatgagatgggggtagacaragatagggtcttcctaaagaagtatattagtttgtttttatatatgcattatttgtgtcttataaagaacagtgttagataaagagacagagttaaatac

SEQ ID NO: 180874 - DNA, 201 bp, Homo sapiens
taggccattctttgtccaacttcttaaatagatctttgagtttcggaaaaactatgggggagagaaatgtgtcaaaggaagtaccacagactgttttatcycagtatagggtgctgctttcgcagaaaagcgaaaaacattcccaaataagagtatatttttgttttgctactggaattattcctcagatggcttgtgcct

SEQ ID NO: 180875 - DNA, 201 bp, Homo sapiens
gtttactcaaaatcaatgtgaattagattgctgctcctcagtaaaatgaattataagttagaatggctattttctttaacttaatgtaatagaatgctgtmtaaggcaatctgttaaggtagacttactgaaaatgtagcctttgatctcaaaaataagcattcccaaaacaacatgatttaatgagcaaagacaatatta

SEQ ID NO: 180876 - DNA, 201 bp, Homo sapiens
atccatgggttttatttgcttttttgattttttttcttttcaggattacaaacaataagtcttactgtttttcaaattatatccttatttgctaatttgayttacaaatgcacatgatctttgagcacattttctttgcatcattccaatgtttacgctgctaacttaactacttagatacttgccacgtacagtctctag

SEQ ID NO: 180877 - DNA, 201 bp, Homo sapiens
agtatcagtcacatttgacattcagctggagtgatggcagatgtagataacatcggtctttcagtgtatgcttcatggaggataatgatggtttgcagctrttatgttcaaatgggacttagaaaatagcctactaattaaatgactaaatcaaataaaactacacattttaaaatttctcctttatttaaacttagcaaa

SEQ ID NO: 180878 - DNA, 201 bp, Homo sapiens
ttaattcatttattgtatctataatataaaatttctattttttattgcttttgtcaaatttctgcttttattcctaggttgtttttcttaattttctatamatattttcttgtgattctctgcatttctttgagtattattctgaattctttgttagatatgttatagatctttaattcttctggctccattactggagct

SEQ ID NO: 180879 - DNA, 201 bp, Homo sapiens
tttatagagaaagcatgaagttttccaatataggttttccaacaactgaaagcttcacaaaatttgcttttatgatgtaattttatagtgctgataaaaakgcatgcattcttataacctgtaaatcttttcatattttatgcaaattgataaaatatatcataaccattataataggttgaatagtgtcccagaaaaaaa

SEQ ID NO: 180880 - DNA, 201 bp, Homo sapiens
atttcctgacactctgtcctccacactgcttatctctcaggtcaccctggacatagatagaaattatttgcctgacctcagctcatcaggatggcactaarcataaagaatactttgtttttcggctttttgacctggtcccccaggcctaataccaggttgcctttatgtatcttttttcatgtgtcttcacctgttgtc

SEQ ID NO: 180881 - DNA, 201 bp, Homo sapiens
tttttacacattgtaatgctttcaagctcaaggtgaatgatacaagtattcttaaattgtaatttttgtttaaaatcttgaatttttattatttttaaaartctactactgtcagctgtttacatgaatagcagcattattttgttaattttgaagaaaatattaggcaaattcccaattgttaaatgacagtttgtctgt

SEQ ID NO: 180882 - DNA, 201 bp, Homo sapiens
  misc_feature (1)...(201): n = A,T,C or G
acactgcttatctctcaggtcaccctggacatagatagaaattatttgcctgacctcagctcatcaggatggcactaagcataaagaatactttgtttttnggctttttgacctggtcccccaggcctaataccaggttgcctttatgtatcttttttcatgtgtcttcacctgttgtctagataacctctggttagctct

SEQ ID NO: 180883 - DNA, 201 bp, Homo sapiens
atgaatggtccagattaaaatgggtgaggtaaatggggtcaggaggtctcaagaaatagaagggtaatttttttttttaacacttcaaaaactacagaaaraggtgttccatatttgtgaaaatagaaatggtcttttgatcaatcatttccccttaaaagactaggaaaattgatcttatgcaaaaaaggaaagaaggaa

SEQ ID NO: 180884 - DNA, 201 bp, Homo sapiens
aagaattttagaaaagaaaaaggagcaactaaaaatataaaaattggaaactaaattgttcaattgaaagtgacacatatagaagataagcaacaagaccmaaaatattaggatttcctaaagagaaaaaccaatgaaataaaatgaacattaataactataggcagggtgcagtggctcacacctgtaatcccagcacct

SEQ ID NO: 180885 - DNA, 201 bp, Homo sapiens
tcaaagtgattttcaagtatagcagccacagatatatttatcaacatgcaagaactcaagactattgttcctggtaaatagaaatagcatttgcccactcrttcaggcccaaagcttggcatgtttcttgatgtctttatttgtcttataactcacattcgattcaatggaaagttccagtggctctaccttcaaaatata

SEQ ID NO: 180886 - DNA, 201 bp, Homo sapiens
tctgttaatcaccatcatctcttgctggcatgactacagtggccttcttccttgtttctctgcttccagtctttcctccctctaatctgctctttgcacarcagccacaataagctactattataccatgcctatgctaaaactctcatgattccttacattacttagtctgggatacctctctaacctgccccttgctca

SEQ ID NO: 180887 - DNA, 201 bp, Homo sapiens
atgcctatgctaaaactctcatgattccttacattacttagtctgggatacctctctaacctgccccttgctcactgcagtggtggtacaaggctagtccrttatttcactcagtactgtccaactacagggagcatccatttgctgttcccctgcccaaaatgtccttccatagatgaaaatatggttgctctcctcttc

SEQ ID NO: 180888 - DNA, 201 bp, Homo sapiens
gtgttacatactaaaacattaaagtgttatcttttgtagaaaatagatcaataataggttgttactgaaggcaaaatattttggagccattcttaaaggtwtttcttaatttgtcaaagagtaagagggcatgcatctccgataagtccctttccagtaccactgtcagagtatgtactaggctgaatatggctttgaatt

SEQ ID NO: 180889 - DNA, 201 bp, Homo sapiens
agagagataagtgtagagcctacctttaataagatctctagagaagatacttctacaaccttcagaagctcactgacagtatttaataaaacttacacgaygtacttatgttatcagaagaaagatttaaacttctatatgaaaaaatgacattgtagaattggagaactggtcatacaatagtaggaacagggactgcct

SEQ ID NO: 180890 - DNA, 201 bp, Homo sapiens
ttttttctgttcatatcctttgcccactttttgatgggtttgtttgtttgtttcttgaaaatttgtttaagttctttgtagattctggatactagcccttkgttagatggatagattgcaaaaatttcctcctattctgtaggttgcctgttcactctggtgatagtttcttttgctgtgcagaagctctttagtttaatt

SEQ ID NO: 180891 - DNA, 201 bp, Homo sapiens
catctaaaaatgaattcgtcattttgtgagatatgtatttctctaagtataatggcattatactgtcctacactcttttaggaactaaatagcaataatgyataatcttattttcaagaaatcttccttttatgaaaagtcaataaaatctgatgtaagggatttaaaaataattcaacttatataatttgatcagactat

SEQ ID NO: 180892 - DNA, 201 bp, Homo sapiens
tatgaaaaaatgacattgtagaattggagaactggtcatacaatagtaggaacagggactgccttcactgagctccatgcagtttgtaaactttattttayttaacctattgtgagctttataatgcaagtatcatgaaagaactacagtgccagcaaataatgggtatttaaaggtttgttttgttaaactgaggcctca

SEQ ID NO: 180893 - DNA, 201 bp, Homo sapiens
acattgtagaattggagaactggtcatacaatagtaggaacagggactgccttcactgagctccatgcagtttgtaaactttattttacttaacctattgwgagctttataatgcaagtatcatgaaagaactacagtgccagcaaataatgggtatttaaaggtttgttttgttaaactgaggcctcaccaaaacatcat

SEQ ID NO: 180894 - DNA, 201 bp, Homo sapiens
ctttctcttcattgccttgtttgtagttttttttccctgcagaatgttttgtatgctacctttctctttactttttccagaatactttctaaacaagcagwttgtgaatttcaaataattcatttttatttttatgttatgaattgacattcttttcctctgctattattcagatgaggaagaaagataaaagtgataaaa

SEQ ID NO: 180895 - DNA, 201 bp, Homo sapiens
catagatcaagtgctttttatagtactttggaaacccttgagtttttttattctttcttggacttgaattaattttcagtctttcttcttactgtacttaragtttttgacagtagagccatcattaaatgaatgggagtttgacctaaacttatagctgatattgataacaactgcttaaattttagtgaaacagtgaaa

SEQ ID NO: 180896 - DNA, 201 bp, Homo sapiens
tagctgggactacaggagtgtgccaccacacctggctaattttttgtatttttagtagagacggggtttcaccatgttagccaggatggtcttgatctacygaccttgttatctgcctgcctcggccccccaaagtggtgggcttataggtgcgagccaccacgcccggccctaaaccttttattttaaaacaattttaga

SEQ ID NO: 180897 - DNA, 201 bp, Homo sapiens
aattttttgtatttttagtagagacggggtttcaccatgttagccaggatggtcttgatctactgaccttgttatctgcctgcctcggccccccaaagtgktgggcttataggtgcgagccaccacgcccggccctaaaccttttattttaaaacaattttagattggcaatatgagtataaccattcaaagaagcaaaaa

SEQ ID NO: 180898 - DNA, 201 bp, Homo sapiens
cctgacttgtatctttcctatgacattaggcaagcttatcaaatattctgatcctccatgttgtcacctgaaacaaagcttcattactgaaggatatgggycaagggatgactggtcattcactgggatagtcatgatactcatttatatcccagtatcagtcacatttgacattcagctggagtgatggcagatgtagat

SEQ ID NO: 180899 - DNA, 201 bp, Homo sapiens
catgcagtttgtaaactttattttacttaacctattgtgagctttataatgcaagtatcatgaaagaactacagtgccagcaaataatgggtatttaaagrtttgttttgttaaactgaggcctcaccaaaacatcataaaacagatgactttgtccctattttgcagttgaggaaaaagactcaaagagatgaattagct

SEQ ID NO: 180900 - DNA, 201 bp, Homo sapiens
agataccataggtatctgtttaggaaaagcttttggttgtcttatatgatctatataaatatagatatttgataatacctgtttttattaacctgaagatwgattgaaatgaaataaaactgtgggaacttagtgtataaaaaagaacattatatttggtattacatgaactagaagatctatcttctaattgcttttgta

SEQ ID NO: 180901 - DNA, 201 bp, Homo sapiens
agccttaaactataaaactatatgttgatgcatatttttcaaatgtacattaaataaatactttgctgttagcacataaattgataaccatgtactacctrtagttattatgtcttccactagactagataccataggtatctgtttaggaaaagcttttggttgtcttatatgatctatataaatatagatatttgataa

SEQ ID NO: 180902 - DNA, 201 bp, Homo sapiens
ttttgcagtaattctgttgaagcactgtaaaaggtcacatgagataacggagacttgccttttaaaaatatttagttaaaccacatgacatggctgatatytggatatctttgacctacaaaaacaatttcttaggattcaatctaatccttccttgaatatgcaagatatgagttcttaaatagttttagttcacgaagt

SEQ ID NO: 180903 - DNA, 201 bp, Homo sapiens
gattttttctgcaagtttgacctttttattttaatttcacatgtaattgagatcatgcaacattttttctttcagtgtctggcttatttcacttagcatamtgccctctgggtccatccatgttgtggcggatggcaagatatcctttattcttgctgaataatattccattgtgtaggatgggtatatatatgccacatt

SEQ ID NO: 180904 - DNA, 201 bp, Homo sapiens
tttgacctctttgagcctcagtttatcatctatataatggatattaaaatatatacatcattaggctttttgtcaatttaaattaaataatagaatctctstatattcatggaacccctgtatagttagcactcaatgaacctgccttgttacaactttaaaaaaattatattcacttaaaaaaattgggtataactgagg

SEQ ID NO: 180905 - DNA, 201 bp, Homo sapiens
tattttgtggctgttacttgcctgctcagtgtccttcaataatttccaactaacggcagctctaagtcataactccttactttggcaccagaaactgtctrtggtctggctagacatagtcttagcttcaaatactttcctaaatatttgctgtatagtggttaacaatcgtacttttgtatgagacagatttgtatttta

SEQ ID NO: 180906 - DNA, 201 bp, Homo sapiens
tatgggaaacgcagtggagctggtggcagggtagttggggacacaggatttgcagctgcaaagacaggaaacttagaggtctgtgaaggttcacgtgtgcsatgtaagagcctgagtctgcatcaggaagcacttgaggaggccctgaaggacttgcaacaacaaagaatgactttgcgctttggctgtgattcagtcaaa

SEQ ID NO: 180907 - DNA, 201 bp, Homo sapiens
acagatgaattggggatgatgtcataatatgtgcatgtaactctatattaggtacttgctgtacctaatataaaatagtgtattcatattaatataaggaratttattgcttcagcttgtgatgcagatacttccctcacctaacatagagttatatgcccatattatgacatatatgtcaaggtatttcttcctttaatg

SEQ ID NO: 180908 - DNA, 201 bp, Homo sapiens
agattcataacaaagccatggcatctattttatgtttggggctggcccatctctcatgtgctatcacttgcttcccaaaggtgcatcccagcaggggaatstatttgaggaagtcccaatgtcattttatactagatggtaggaaaaccttcacaaagccctctttgtcactgttattctacaaggtcctggaaatacact

SEQ ID NO: 180909 - DNA, 201 bp, Homo sapiens
tgctagttatttttttctccattattattattaatttactatatatattatcatgtctattactataatgtcagttgtggcattagtgagtagtcttgtcmtttttcttgctatgaagggcaaataattaccacacaaagaatgcccctctgctagaaactgaaaggtaatttcagctttctgatgctctttcaaactgac

SEQ ID NO: 180910 - DNA, 201 bp, Homo sapiens
aatagctgagggtataacatcaagagcagttggtcttattgtgataatccaggtgagagattatgataatagtaacagatgtcatgaaatgattgtattcragatatatttcccaaagatagagccaagagtgtttgcaggttgaacagatatgtgttgtaaaacaaaacatttaaatatgactcaaagttttgagcctga

SEQ ID NO: 180911 - DNA, 201 bp, Homo sapiens
aagccagaggtggaagaaaacagttttattgaacagtgttacagctctggtggggttacagctctgtgactggcaaggagtgcttgccaacctccactctyatctggccgagaacatccagctgactacaattcccctgacttgaagtcctctggctctgggggccctaccaagggacacgatggacccaaagcaggcagc

SEQ ID NO: 180912 - DNA, 201 bp, Homo sapiens
tatttatttttcctaataaaattaatattcattgtagaaaaaaataaaattaaaataaagaagaaaattaaatttgaattccacctagatgttgccctcayggtaaaatgaaatttactttttaaattaatatattatgggcattttgtctttcataagatatcctttaaaaatatggttttaatggccacacaatatttt

SEQ ID NO: 180913 - DNA, 201 bp, Homo sapiens
aaaaaagtactatttatttttcctaataaaattaatattcattgtagaaaaaaataaaattaaaataaagaagaaaattaaatttgaattccacctagatrttgccctcacggtaaaatgaaatttactttttaaattaatatattatgggcattttgtctttcataagatatcctttaaaaatatggttttaatggccac

SEQ ID NO: 180914 - DNA, 201 bp, Homo sapiens
gctgcaggtcctgaaaggtcttttgcctataggttcaatcccttctagtgtctggaccacctgaaatcagattgagaatatatttcagccctatatgaacwggtacgggttttgcttctagaagcccgtgccctttccttgtaatattcagtgtgtgttttgtcttttttaatgggttgctgctcagatttttttatgaaa

SEQ ID NO: 180915 - DNA, 201 bp, Homo sapiens
gtttatgtagtaagtttcctgtcttattcattagccaatgtgaggaaacatgtactcagagcatagataagtaaatatatgtgtccaataattctaccaastgaacagtaaaatatgcatgtctatggttcggagatacaaacttttcaaaagcagagtggacaagcataaatacatacttggggttgagactaagtaaaa

SEQ ID NO: 180916 - DNA, 201 bp, Homo sapiens
agtggaatatgaaaagtgtgtcctaattttcagaggatttggggaagaattcctaattcataatatgcagctgcttccttcttctatgatactatgctatraacagggaatgtttcttgattagatgccaatgccaattctgttcaaaaacttcaggaggagtttagaaatgtatacaggttaagaatggacactgaaaaa

SEQ ID NO: 180917 - DNA, 201 bp, Homo sapiens
taagatttgaggtatgagacaaatataggaatcaaggatgactccaggatttggaacctaagcaactgaaaaactgcggttaccgcaaactgaatgaaggmaaatatttgtctccgttcgcctaacctgctgttattcatcactggtagaattcaggtggctttggttgtagaatataaacagaatattttgagaaaaatg

SEQ ID NO: 180918 - DNA, 201 bp, Homo sapiens
cgttaatgtctgcagacatctcaaacccacctgtttccaaactgaactcatttcctttcctttcacagagtcatccaaaatggaaacctaacatagaaacwtacttctgaagtccgattagtcaccaaatcccaacacttctatggaaaaatgtccctacatcttagtccttttataaccaggatctctgcctttgttcta

SEQ ID NO: 180919 - DNA, 201 bp, Homo sapiens
taatatttaccaaggtgtgggcacggttaagagaagtcagcaagggatggtgaagcttggggagctggtagggactgaatttttgtgtcctccaaaattcrtatgttgaaatcctaatccctactgtgatggtatttggagatgggggttttggaaggtaattacttttagatgaaataataaaggtagggcccctgtagt

SEQ ID NO: 180920 - DNA, 201 bp, Homo sapiens
tagaagccatttcaatactaatttggtccctttttagtagcttgcacagtggaattaaaacttaccagggatttcacagagtaaatttgcaagttaaatasaatggcctatgaggaaagaaggaaaatctaccattcattaaatgtttaaatgagttggatacatgcaagctagaagaaagcagggttaccacaacttcta

SEQ ID NO: 180921 - DNA, 201 bp, Homo sapiens
  misc_feature (1)...(201): n = A,T,C or G
ctcagttatatatttcaacattcaacatttaaatcttaagctggtttttatctacattggcagaattagattttcaagcatgcaggctcatatccggtaanattaggatggcatatcatataaacaggtttcaccaaattggtccattaatataaaatatgaatgaggacaataaaatcagttttgtgtatgacaacttgt

SEQ ID NO: 180922 - DNA, 201 bp, Homo sapiens
ccacaaaattactgttggaaatttatctccaggcagtgtgtaaaaaccagatcagccatcagatggagctaataaaaaagaaatattttcctttgcataasgaagcttactcttgaaaacagcttcatttctttcagttttcttttttgattaacaaaatgaattggttgtctgtgttacatttcccacattattaagtgg

SEQ ID NO: 180923 - DNA, 201 bp, Homo sapiens
ctggggagcatgtgatctaatgagacactagccagggtggcctagggaatgcttgcaccactcctttcataactccaggcagcacagctcacagctctgayggcttatttcttctgcttaaggagaggagagggaagagtaaagagtactttgtcttggaacttggataccagctcagccagagtaggctacagcactggg

SEQ ID NO: 180924 - DNA, 201 bp, Homo sapiens
agctacatgtggtgtatacagaaatgatacctttccattaaaggaaaaaaagcttcagtaggtaaccatggaaacagcctagtgtccattccaatttcgartagaaaatcttagtcttctaatgaaaacctaccagatagacatacttctactccagctctctagttctaactctctaaaaaggtttggaatattcatttt

SEQ ID NO: 180925 - DNA, 201 bp, Homo sapiens
cctttggaccttgagcaaacataggtggtaaccaggtagttgttacagtggagcttgactgagatccagtgctgtcctgacttcaagtctgacccaatacrttgccagtggtggtacctgccacccctcacccagctccaggcagcttagcacagagaaagattccatttgcttggtagaaagtaatggaagagaacaagc

SEQ ID NO: 180926 - DNA, 201 bp, Homo sapiens
acaacaactttccaagacatagccagtataataagatataaagagaaataataaaaagttaaaaaggttggagacaaagttaaagtacagtgtttttattwgttattgcttttcctgtttgtttgcttgtttttgttaatgtaataagtgtcaagttgtcatcagtttaaaataatgggttataagatattacttgcaagc

SEQ ID NO: 180927 - DNA, 201 bp, Homo sapiens
aattgatatttctgaaaagaagacatacaaatggcaaacaagtacatgaaaagctggaaaacatcactgatcatcagagaaatacaaatcacaatagcaawgagatgtcatctcatctcagttaaaattacttctatctaaaagacaggcaatagtaaattctggggaggatgaggacaaaagggagccctcataccctgt

SEQ ID NO: 180928 - DNA, 201 bp, Homo sapiens
tgacatgagaatagagcaattgtaggaataatacattgcctttctggaaatttcagctttgatgtgcgattatatttttgagaaggtcgttaaaaaggatkttttttaaacaaaattgaaatataacatttattactatgcttttcagttttacatttagggtttctttagttcacagaatggttccaccccttgctaccc

SEQ ID NO: 180929 - DNA, 201 bp, Homo sapiens
gcactattaataacagcaataagactgatcctgcaagttttcttcttgaggattgaagaaatataaatgaatgctcatcctactgatggttgatatgtggycctagatttaaatttaaggggatttacaactgacctccagtctaggaattcatagtcactcatttattgagcctatcacaaagtagagttctttatttgg

SEQ ID NO: 180930 - DNA, 201 bp, Homo sapiens
ttcagctttgatgtgcgattatatttttgagaaggtcgttaaaaaggattttttttaaacaaaattgaaatataacatttattactatgcttttcagtttyacatttagggtttctttagttcacagaatggttccaccccttgctacccacagggtgattccaggagtagtagcatcacctgggaacttgttagaaatgc

SEQ ID NO: 180931 - DNA, 201 bp, Homo sapiens
aggaattcatagtcactcatttattgagcctatcacaaagtagagttctttatttggtgttgaaggggccagggaaagaaagaaatggaaaagtggtgttycatgttgcttccttgttactaaacatgagaaactgcattatgtaaagtgatttctaaaatttctatagttccacatattatcagtatcaacatatcatac

SEQ ID NO: 180932 - DNA, 201 bp, Homo sapiens
ttcaaggcagaataaaaattgttggagttcatagaattacagaactgaaatgtaccttaaagttctctcctttaagcctttatcaggaggaactaaagcayaaagattacaccgctagcagcagagctaggattcaggtcctaataaagtattccaagcaagctagctatcagtacaattgtgaatctcaccatgtgaaca

SEQ ID NO: 180933 - DNA, 201 bp, Homo sapiens
ctcatttattgagcctatcacaaagtagagttctttatttggtgttgaaggggccagggaaagaaagaaatggaaaagtggtgtttcatgttgcttccttrttactaaacatgagaaactgcattatgtaaagtgatttctaaaatttctatagttccacatattatcagtatcaacatatcatactgtcatatggttcca

SEQ ID NO: 180934 - DNA, 201 bp, Homo sapiens
gttttacaaagagttttaatattgaattgtgctcagttcacacacggaaatgggtgtctactttagtgacaatggatagtaaatgattaggtttttttcarttatttaaattctgatttccaaggaatcatttgaacagcttttagtagtaaaaaactttattttgataatcaattttggttcctgagctttctctctctg

SEQ ID NO: 180935 - DNA, 201 bp, Homo sapiens
tttgcccattcttaacatgtaaattactagaagttaaactgctggaataagtaacaaatataaccaaaagaagcaagtttcctcttgatttggcaactttrtctcttatatttccactaagtctaaatttatgtattttttttagtgtttacaccttaggtatttacttggtactttgttagaaatcttttaggaattcaa

SEQ ID NO: 180936 - DNA, 201 bp, Homo sapiens
gactaggcttttgtttttaacaaatgaaaataatccagtgtctttgcttggatactaatcgtggaagataatgtcaaactggcctatttctacaattgtcktaacttgcaaagcttcacagacagctgagttcattatgttgaagttgtcaatcacacaggcagtcgtttatattccttttgaactctgttatgttacctc

SEQ ID NO: 180937 - DNA, 201 bp, Homo sapiens
aagtgttctcatgttcctttacctgttggccaaagctaaatatggtaagacagacagatagtaatcaccttgctccctaatttatatacagctgatttctsttttctctcttaactgacgaggctgtgtggttaactaagagaagcttctctgattcccagcttgataatgctcctcccctgctccttctgattatccagg

SEQ ID NO: 180938 - DNA, 201 bp, Homo sapiens
ctgctcacaatttcgttcatgttttatttgtattttatcttttccttattgaccttaaggtattctatatactttgtactactactttgttggcttatagrtgttgaaagtgtttttacccagtttgtggtttgcaatttggttccttttttctttttgttgagatgaatctagctctgtcacccaggctagagtgcaatg

SEQ ID NO: 180939 - DNA, 201 bp, Homo sapiens
taaaaatgtttgtatcaattctgtctgtaaatgcaattgatgtgcttctgtgcagccatcttgttcatgacattaagcatcaattatttttcagaccatcratatttcttcctcttaaaagactgctcacaatttcgttcatgttttatttgtattttatcttttccttattgaccttaaggtattctatatactttgtac

SEQ ID NO: 180940 - DNA, 201 bp, Homo sapiens
atcttaattgtatcatgttgatcatcctgctgctagggttaagtgctatcttgaagattgtaataaactttcttttgctttctttccttattgagtttatsacacatatgtttgcttgcttttgatcttttatataactggactttatattgcactgagatttattttttgctcaacattgtttttgatactcatccacac

SEQ ID NO: 180941 - DNA, 201 bp, Homo sapiens
caaggaaagtaggttgcagagaaaatagggagaaccagtgagccagtcttgcctctaaatcagaaaagtggaaatagaaagagtggtcctggtgcacagarcaaaagatgaggtcactgattataactgagagcctccaggaccagatgctcaccggcaggagtgtggttgcttggcaccagccagtgagtctatttataa

SEQ ID NO: 180942 - DNA, 201 bp, Homo sapiens
ttgaaagtgatgaaagaaaacaactctcaaccccgaattttataaccactgaaagttatcatgatgaaggagaaatgaagatgttgtttgacatataaaartggggagaatttattgtcagcagagcttctatataagaaatattaaaggaggttctttagggatatggaatgtaataccagagttaaacttggttattga

SEQ ID NO: 180943 - DNA, 201 bp, Homo sapiens
tatgaaatgttacaaaaacacctgtaaaagacattcagatgggatagcaaaaagtcttttatcattatttttcagctattgaaacaaacactaaaatacartagtttatctaggtgtcatgtgaatgatatatttattgttgttatgtctgttttacattcacatgcttagatcagtaagaacctcaaagatcaggtatct

SEQ ID NO: 180944 - DNA, 201 bp, Homo sapiens
tcattatgacaagtttattttcttacaagttttatttctggatttttgttgacacacttttcgaattgactgcgttccaaatacctaaagagatctcccasaggatgcaaaggtccaaaatgactaaataatgggtgtgtaaagagaagtttaagcccgtggacaaatagtggcaaatagcagagcttcaggttcagagag

SEQ ID NO: 180945 - DNA, 201 bp, Homo sapiens
tggcatctgtgtgttcaagtgaaaggaaagtcacatgtttctcactttaaatcaaaagctataaaagattaagcttagtgaggaaggtatgtcaagagccracacaggccaaaaagtaggcatcttgcaccaaacagctggaaaaatagtgaagggaaaggaaaaattcttgaaggaaattgaaagtgttactctagtaaa

SEQ ID NO: 180946 - DNA, 201 bp, Homo sapiens
gagattaatgttttcatgtctgctaacacaatattcattctgcagaccatagatcaaggagcaagttcaattttcaagtcttactatttaagaaatacgtyttctaaagttctcactgccatagtgattcctgtaatagatctgggcaaagtaaattgaaaactttatggaaagtattcacaattctagataccgtaaata

SEQ ID NO: 180947 - DNA, 201 bp, Homo sapiens
attgaaaactttatggaaagtattcacaattctagataccgtaaataacatttgtgattcatgggaggaggtcaaaatatcaacaatatcaggagtttggraaaagttaatcccaaccctcttagatgactttgaggggttcaagacatcagtggaggaaataatttcagataaggtggaaatagcaggagaactagaatt

SEQ ID NO: 180948 - DNA, 201 bp, Homo sapiens
ttaatcccagcactttgggaggccgaggcaggcagatcacttgaggtcaggagttcaagaccagcctggacaacatggtgaaaccccatctctactgacartacaaaattagctgggtgtggtggtaggggcctataatcccagctccttgggaggctgaggcaggagaattgcttgaacccaggagacaggttgcagtga

SEQ ID NO: 180949 - DNA, 201 bp, Homo sapiens
aggtttcattagcacaggctcatgctagagatttgagaaaacgtttgtttgtagtttttgtaaagggtcatgaaaaaagagtattttaaaagaagtaactrtacatatattaggattttaaacataatacaactgggaaaaaaaatgtggacacctagtctttcattatataaaattaatttaacagaatattttagatcc

SEQ ID NO: 180950 - DNA, 201 bp, Homo sapiens
tcattatttatggatttcatatttgtgaattttactactcactatgaaatatgttgataatccccaggccaatactcatggtgtgtttgctgtaattcacrgacatgtacagaacattgaaaaatgtgaattgttcaaaccacatattccagtcatgtgagaagaaggcaaaacagcagtctgccttcttgtttcagctct

SEQ ID NO: 180951 - DNA, 201 bp, Homo sapiens
tgtctttggacattctccctaaaaagaaaaatccagaacaaaccatacatgtacgtgaaaaagaaagaatgcttaccatctgatatgatttggctgtgtcyccaccaaaatctcatcttgaattgtagctcccataatccccacgtgtcatgagagggacctggtgggagataattgaatcatgggggcaggtttttccca

SEQ ID NO: 180952 - DNA, 201 bp, Homo sapiens
tgtaataatttcctgcatacctcagggagatagggatatgaaaacattttcatgacttcaggatattaatgtggcctatgtcagcgattctcaaattgtgwtgtatcccttaaaccctttctgaaggtctaataggtcaaaactttttaaaaataataatagtatgatggttttgtcttgttcactttgttgacatgtgca

SEQ ID NO: 180953 - DNA, 201 bp, Homo sapiens
aattgtgagcctccccagctatgtggaactgtgagtccattaaacctctttcctttataaattacccagtcttaggtatgtccttatagcagtgtgagaayggactaaaacatcatctatgaaaagaaaaatacagagattaaaaggaattgagatttgaattggctttatatgtagtatcatccattatagatagtactc

SEQ ID NO: 180954 - DNA, 201 bp, Homo sapiens
tcaggatattaatgtggcctatgtcagcgattctcaaattgtgatgtatcccttaaaccctttctgaaggtctaataggtcaaaactttttaaaaataatmatagtatgatggttttgtcttgttcactttgttgacatgtgcactgattgagacaggaagtagtggttaaaatttctgatgtctacatttgaaggaagac

SEQ ID NO: 180955 - DNA, 201 bp, Homo sapiens
aactgtaaggaactattacttgctgagttttgatgtagtatcaaagcaggatatctcaattatctgaaaaatctgccagaatactattccaatttctaacrgaatatatgtgtgaaacaaaataacataacaaaaacaacatactatagcaaattgaattcaaaggcagatttgagaatctggctagtttctaataaggca

SEQ ID NO: 180956 - DNA, 201 bp, Homo sapiens
ttgaagaacatagcccactgaattttggtaactttactgcacacagaaggagagatttgagaataagataagggacacctccctgactaattcattctatkaggccagcattctcttgataccaaaatctggtagagatacaacaaaaacagaaaacttcaggccaatatccttgatgaacataaatgtaaaaatcctcag

SEQ ID NO: 180957 - DNA, 201 bp, Homo sapiens
tgaagaacatagcccactgaattttggtaactttactgcacacagaaggagagatttgagaataagataagggacacctccctgactaattcattctatgwggccagcattctcttgataccaaaatctggtagagatacaacaaaaacagaaaacttcaggccaatatccttgatgaacataaatgtaaaaatcctcagt

SEQ ID NO: 180958 - DNA, 201 bp, Homo sapiens
tcaacatagtactggagatcctagccacaacaatcaggcaagagaaagaactaaagtgtaaacaaataggaagagaggaagacaagctatctctcttcatsgatgaaatgagaggtgagaggatcaaaaaactaccttttgggtactatgcttattacttgagtgacaaaataatctgtactgaacccatgtgacatgcaa

SEQ ID NO: 180959 - DNA, 201 bp, Homo sapiens
agagtttaaaaaaagatactgtcaaaacaacacagttctttctatttctgttgtaccactttgtaatatcaaagggtcctttcttttcctctttaggtttygagataacatccataccatacataaaaccaagtatagttgatttttatactactttttcattataaaattaatgcatgtaaaaaagtatcattaaatatt

SEQ ID NO: 180960 - DNA, 201 bp, Homo sapiens
gttgccaccacttctttgtatctatcctcaatatatttaagaaatgcctttatctgtgagaatcaaagtcagacaggttttccttgtcttacaaatatcartgcttgcagcattatacctgtatatgtacataaaaatgtcattacatgtcaggagaataacataaaatctgaactttcgtatatccttatctttgccaat

SEQ ID NO: 180961 - DNA, 201 bp, Homo sapiens
acagctgtaaaattagaaacaatagtagcactggaactgacattgcaaagtggagcttatgaagtttatgaactttaattaaaatgtcactgatgtgggtrccaaaaatcatgaaaaggataaagtatgttcgttaattgtctcctagcaggggaaatagagtagataatcaaatgagcaatgggcattttacattttgat

SEQ ID NO: 180962 - DNA, 201 bp, Homo sapiens
gttgatcaaatatattttcaacattttgttatcgtaaatgatgtagcaatgtacactcttcaattataattttgaatatatccgtaattccttcacaacaygattaaaactagaactattaaaatgtacctctagattgtactgcagaaatattgttgctgttaatattaatctagtctaatatttattgtcagttcccta

SEQ ID NO: 180963 - DNA, 201 bp, Homo sapiens
tataaatgcggctgagtatacaaactataaaatctctaattttaacattgcttgtttatatattaggaacttttaggggagttttgatttgcaagtttttrtaggtttaccagactcattaattgcctgggaagaactttacaggatttcctttggtttatgtctaatctttgaaattggaaaacttaaaagtgaaatata

SEQ ID NO: 180964 - DNA, 201 bp, Homo sapiens
gaaattcttatggggtacacaaaacaatatgaagataaatatttgtgaactggaaaaagctggcctttcaatctagacaggatatattatgcaagtagtcwcttaattgagcctttcctttttctgacttagataattgataaaaaatatatatatttttatttcagagcaggatggaagtttatttaacagctttataac

SEQ ID NO: 180965 - DNA, 201 bp, Homo sapiens
cctcaaattttatatgctggactacttctttcatcttgtacccctttccctttattcgtccctcatgatgagtcacccacatgcatggtgccctccttatrctccagagatgagcatgcagagtgtgattacgaagttgcttgcatacttacctcaggcttttttccatgatacaaaggatatttttgaaatacaaaaaat

SEQ ID NO: 180966 - DNA, 201 bp, Homo sapiens
acgaagttgcttgcatacttacctcaggcttttttccatgatacaaaggatatttttgaaatacaaaaaataaccttttaagtaatttgccaatgtaaggmattatgattactacttttcttattaataatcatcatcgaacatagaaaattaaagcaaagtaaaattaaattactttgcccctccattggagaaggaata

SEQ ID NO: 180967 - DNA, 201 bp, Homo sapiens
atgatacaaaggatatttttgaaatacaaaaaataaccttttaagtaatttgccaatgtaaggcattatgattactacttttcttattaataatcatcatygaacatagaaaattaaagcaaagtaaaattaaattactttgcccctccattggagaaggaatattaaggaaaatttacattacattttattcttttgttt

SEQ ID NO: 180968 - DNA, 201 bp, Homo sapiens
  misc_feature (1)...(201): n = A,T,C or G
cagtggaaacaagttttagaatttttccattagagatcattaaaaacattatttctctcaaacaaggtgacaagtggaagagcgtgcacttgatttctaanttgccaccctccttagattcttctgacatactagcagtggccaaattccaatatacattcatagttcaatgcaccttttcatactgtggaggcacctgca

SEQ ID NO: 180969 - DNA, 201 bp, Homo sapiens
ggcctgcaaatatagggcagaacccctgtgaaactagagtcttatgatcttcttttaggaaaagtaagtcagagaatttctttatggctatacttcagggyagaaaggtgggagaaggtcagaatggcctcctggctacggcagttttttcagttgccaacttgacatattttggagtattatgttcagagccctgatatt

SEQ ID NO: 180970 - DNA, 201 bp, Homo sapiens
ggggctagattggggtattcaggaaaacccctgtaaggtaatatttgatctagattttgaaagatatatgtattttaattacatatagtaagtactgtatrttccctgatgaagttctatttttcagggaatgctgctgcacttagcgtccttgagatcacacttctacttttggattagtagaaacatgaatggaggtag

SEQ ID NO: 180971 - DNA, 201 bp, Homo sapiens
ggaactaagacctctaggccagcaaaacgtaaggtcacgggagcaggaagcaaaaattttgctagtagatcactagaggtgatggtcagtggtcccacttycacttccaccccttgattcctggaccgatgaatcctggctttgggagaaagagcaccatatattggacgctgattcagagtatacacagccttctggaga

SEQ ID NO: 180972 - DNA, 201 bp, Homo sapiens
cctgggtcttgggtgtcttcctcgacggttgccttcgtatagtgccccctttgcctcgctttttcagagtcctcttgcctctcattctcgccgtgtgtgtytctgcctctgtttctctttctgagccttggtcccctcagtccacactctccggccatgtatctgtttttttctcttattctgtttccctctttctttctt

SEQ ID NO: 180973 - DNA, 201 bp, Homo sapiens
ctctgtttctctttctgagccttggtcccctcagtccacactctccggccatgtatctgtttttttctcttattctgtttccctctttctttcttgggatrtctgtgtccctgttaatctgtctttccttttgtctctccgttttgcaacatttgttctctttctgtgtctgcttctcgcagcttatctctgtctccctct

SEQ ID NO: 180974 - DNA, 201 bp, Homo sapiens
gggtatctccaggtgcagagattttcctgcggggtcagtggggacgcggaggagacagcctgcccttgtccaggctgtcgtggacctgaaggaggggcgcmaggggttagagtggagggcaccgcagcaggctccccttgccgggtccgagggcgctgcgctgctgcgaacctgagcgcactgaggctgctactctggaca

SEQ ID NO: 180975 - DNA, 201 bp, Homo sapiens
aggacaggatgagaatactgaacataagatgcatacccacatcctgtttttagttgtagaattttagagcattaaagctgtaaaaaataagtgatatcatstagatgtgtaagagtaagttaagagtgtacagctagatgctacttactcctcctgaccctcctctgaacaaaccgctgagctaacagcctatagatgaaa

SEQ ID NO: 180976 - DNA, 201 bp, Homo sapiens
aaggaagttgagctctttgcagcattaaattctctcttaactagccctgaagcttatgtagatttaacatgctcggttctgatcttgtaaatttaagtgtragattgaaagaaatggcattctaaaatagaatgtctcagcccaaatttttgggttatgacaggctttctgaaaaaaaaatacattgtgaactaaaattga

SEQ ID NO: 180977 - DNA, 201 bp, Homo sapiens
ctctcttttaatataaagaacagatatatcagcttaaaatacttgggggctatatattgatctgtaagctggatcacttaccctaaataatttatggattyccctactgcttcatatatatatatatatatgagatgtgcgatactgcatgaatgtgagaatttcctaaagtacctggaaacataatgcctcctaattcaa

SEQ ID NO: 180978 - DNA, 201 bp, Homo sapiens
cataatgcctcctaattcaaagtaataatagaaatccatgggcagcaatactactttcttgatgatatgctagtcacctcttaaaatagttgctaatttaycatgagtatggtgcaggagcatgttcaaagcaatttttctttaaaaatattatttataaatcacttgatactgtacccaatttttatatttaaaaatagc

SEQ ID NO: 180979 - DNA, 201 bp, Homo sapiens
tactgtggtaagtaaacatctggcaggtcttaacatgttttatctttataacaacaatatgagtaatagtatgttactgttgccattgtataaatgaggcmtcacctcagaatcacacagctaatatgtgtgagcatcaaggatgacaccagtttattctgccttgaagccaataatctaatagttctcagtctgacattt

SEQ ID NO: 180980 - DNA, 201 bp, Homo sapiens
tctttaacaaagtacattttctcctttctgttatttaatatttttgtttaatacactaaaataatcttgtaaaatggcttttctttggtgttttttaaaawgaattttattttagaccgatgtttgattaaattatgtaaattatttgaattctaaacccccaataatgagtcattccacttgtgtggtttaaaaaagagt

SEQ ID NO: 180981 - DNA, 201 bp, Homo sapiens; identical to SEQ ID NO: 32048

SEQ ID NO: 180982 - DNA, 201 bp, Homo sapiens
cacgacagcaccttatcctgcattaatattgcattgcaactagaaagaaaaccagtggaggtacgcctatctccttagttggcaaaaaaaaaaaaaaaaaagcaatttttaacattttctcgtttattcccctctctaaaaggcgggcaaggcccccgatcacgtgataccgccccccaactccgggcggaagaggccagc

SEQ ID NO: 180983 - DNA, 201 bp, Homo sapiens; identical to SEQ ID NO: 32045

SEQ ID NO: 180984 - DNA, 201 bp, Homo sapiens
gtttttcaaattaacttttaaatggacacgacagcaccttatcctgcattaatattgcattgcaactagaaagaaaaccagtggaggtacgcctatctccytagttggcaaaaaaaaaaaaaaaaaagcaatttttaacattttctcgtttattcccctctctaaaaggcgggcaaggcccccgatcacgtgataccgccc

SEQ ID NO: 180985 - DNA, 201 bp, Homo sapiens; identical to SEQ ID NO: 32050

SEQ ID NO: 180986 - DNA, 201 bp, Homo sapiens; identical to SEQ ID NO: 32046

SEQ ID NO: 180987 - DNA, 201 bp, Homo sapiens; identical to SEQ ID NO: 32052

SEQ ID NO: 180988 - DNA, 201 bp, Homo sapiens; identical to SEQ ID NO: 32043

SEQ ID NO: 180989 - DNA, 201 bp, Homo sapiens
aagttgtgatggaatatacatgactactcttgctttcttctttcttcttcctgtatttattctacaactctgacttccctggaagaattaggtgttacttyccctgtgttttgtgacactttgcgtgtactacttcttttttttttttttttttttgagacagagtctcgtgctgttgcccaggctggagtgcagtggtgc

SEQ ID NO: 180990 - DNA, 201 bp, Homo sapiens
caaatgatttaaaaaaatttatattagattcagcttttttataatccagatgttatcccttcatggattcaagtcttttttgttagatgtaccagaaaacktaaactcccctggtttgcccttctatggggagtaaatgacttcaggaataaatttgatgtttacgtggcacatttaacttctttagtgattttataattt

SEQ ID NO: 180991 - DNA, 201 bp, Homo sapiens
gacaaatgatttaaaaaaatttatattagattcagcttttttataatccagatgttatcccttcatggattcaagtcttttttgttagatgtaccagaaawcttaaactcccctggtttgcccttctatggggagtaaatgacttcaggaataaatttgatgtttacgtggcacatttaacttctttagtgattttataat

SEQ ID NO: 180992 - DNA, 201 bp, Homo sapiens
aaacatctattatcttacaatatctgtgagccatgaatctggaaacaatttaactgggtgtttccggctgaagatctctcatgaggctgcagtgaaggtgytggccatggcttgactggggaaggttaacttccaaactcctctcatatggctgttggctgaagagcctctgagttcactcatgtgggcctctccacaggt

SEQ ID NO: 180993 - DNA, 201 bp, Homo sapiens
aaaagttatgtataaaagagtatcaggaaggaaattgggattaatagtggtggtagaagaaaaatgatattagaataacatcataaagagaaaatgtgcakattacgtctgcaactgaatgttacaagtttttttgttttgttttgtttttttggtcatttcagaataaaatctgttaccccttggaaaaaaaaaacagat

SEQ ID NO: 180994 - DNA, 201 bp, Homo sapiens
tttgtcatttacacaaaggcactgtataagttagctgtggccctgtgaggcccccttatgcttctcaaagcatattttcttgatggttttatgagaccggmaagttgcataatatgccataataaaaagttatgtataaaagagtatcaggaaggaaattgggattaatagtggtggtagaagaaaaatgatattagaata

SEQ ID NO: 180995 - DNA, 201 bp, Homo sapiens
acaatagatactttttctatatttagaatgccattctctcctagttcttccactatctttttttcttcttttactatcttttttttcttcttctaccactragaaagtatgggcgtgtctatattggaaatgcaaatagagtcttcaccaaaacccaatgtctatgaattcccaaatcaaccttgctttctaaataaatac

SEQ ID NO: 180996 - DNA, 201 bp, Homo sapiens
cactagcggtatgatcttgggcaagttacttagtttctctgaatatctatctgtttccttgtgtgtaaaatggaaataataatgttaccttataatatggyattttcataagggtaatgagataatatatgtaaagtactcatgtatgtcttgcacagagtatgtgtacaataaactttagttattatggttagtaaaagt

SEQ ID NO: 180997 - DNA, 201 bp, Homo sapiens
tttgcaaggtgaaaaaggtctggattttttttttataacaaaatgaatttaacacgactgaactgtacatttaaaaatagttaagatggtaaatgttttayctgttttttactacaattttaaaaaagaatgaggttgaacatcttatgtatgtttcttggccattagtatttttctctgaactttctaaatatgattttt

SEQ ID NO: 180998 - DNA, 201 bp, Homo sapiens
gtttgcagtgagccgagatcgtgccactgcactctagcctgggtgacagagcaagactctgcctcaaaaaataaaataaaataaaaacagaaaataatgcrtataggtgaggatgtggagaaactgcaaccctgtgcctgattggtaggattgtaaaatggtgttaacagccatggaaaacagtatggcagtccctcaaaa

SEQ ID NO: 180999 - DNA, 201 bp, Homo sapiens
ccctatcaaaatcgcaatggcattttttttgtagaaatagaaaaaattatccaaaatttatagagaatctcaaggcatcttgaataggtaaaattttgatratgaagaataaaccaggaggcctcacctctcctaatttcaaaacacattacacatctgtagcaatcaaaatgatgtggcactgccataaagacagacaaa

SEQ ID NO: 181000 - DNA, 201 bp, Homo sapiens
catcagtgtgcttttgatgttaatgtttaatttatagaaaaaccctgaactaattttataactcaaaatcagcccttacaagctcacgtgctcaccttttstgcaatagttcctgggcgtagagggattgaatggttttaatttctagccctatgtctcatgaaagcagttcattttgattgtcaccttctcctgagtctg

SEQ ID NO: 181001 - DNA, 201 bp, Homo sapiens
agttttctgtattccagtggcacagtctccaaagttatcagaaatctgcattcaagactccttttcatgaagtcccctaaataaacaagctctggactatrtctgattataagtcactttttgaaaagaatcaatgcaaaacaacaattgcaatgacaaaagtcttaggagagccataaagacacagttgacaaggaaatt

SEQ ID NO: 181002 - DNA, 201 bp, Homo sapiens
atcctttatgagtatgtgggcaatgtcatcaaaatgatccaaaccagaggtaagagaagctttgaggccattcctacatggattctgttttgactgatttwtaagtgtatgtgtcattctggcctttctctttactgagccatggttgagtatgtgaccaatggcacagtgcactttggtatcattggcccttaaggtggc

SEQ ID NO: 181003 - DNA, 201 bp, Homo sapiens
cgtatctgtgcctgtttcttgctatatatgttgtactcaaattacatttgcggtctttctttttgcattagattctgcatatacagactcatgaaaaattmatcagagatagtcaagaaaaaccaaaacctgtccctgataaggaaaataaaaaactgctctgcagaaagtgcaaagccttggcatgttacacagctgacg

SEQ ID NO: 181004 - DNA, 201 bp, Homo sapiens
tatgaggtgcccagtgtcctcacttgcaaccccaccctgcctgtagaggggagtcaggtgcatggatcctctggactttgggtgaatctattttttttttycctccaattgtaaaataagtgagacccacctgttctttgcctcagattattgtggggttttcttttttttttttttaaatcacaattatgtactggttct

SEQ ID NO: 181005 - DNA, 201 bp, Homo sapiens
tgcatggatcctctggactttgggtgaatctatttttttttttcctccaattgtaaaataagtgagacccacctgttctttgcctcagattattgtggggytttcttttttttttttttaaatcacaattatgtactggttctaacgttctcttttgtgtgttattccatcccttcatctgtaggaatgccattacactgt

SEQ ID NO: 181006 - DNA, 201 bp, Homo sapiens
ggatcctctggactttgggtgaatctatttttttttttcctccaattgtaaaataagtgagacccacctgttctttgcctcagattattgtggggttttcttttttttttttttaaatcacaattatgtactggttctaacgttctcttttgtgtgttattccatcccttcatctgtaggaatgccattacactgtgcttg

SEQ ID NO: 181007 - DNA, 201 bp, Homo sapiens
tagtattggaagtcctagctggagcagttaggcaagaaaaagaaagacaaggtatccaaattggaaaggaagaaggaaaataatctgtttgcagatggcaraattatttatttatttatttatttattcattcattttttgagacggagtctcgctctgtcgcccaggctggatggagtgcagtggcgcaatctcggctca

SEQ ID NO: 181008 - DNA, 201 bp, Homo sapiens
ggcgtgagccactgtgccgggctgtgacaactatactttatcagtgaggattcagtcagggaccagagacactaatgagtgttatggctggatataaaacytttgactcatatttttttgccatccgtggaaagcaaagggagcttatccacattccccccgtgcccacatccagcatctcgtttactctaaccctctctg

SEQ ID NO: 181009 - DNA, 201 bp, Homo sapiens
gaccagagacactaatgagtgttatggctggatataaaacttttgactcatatttttttgccatccgtggaaagcaaagggagcttatccacattcccccygtgcccacatccagcatctcgtttactctaaccctctctgcaatcagatattgtgattattgacgctagtaacgtcttggaaaaggagcactgaagccat

SEQ ID NO: 181010 - DNA, 201 bp, Homo sapiens
aagccccagaagtgtaagttggatccaataacaagcctttgagattctgttactctctactacctctagttcagagccatctagacgaatactgaactttsaccctctctctgtttagtagaaaatatttaaccttgaacttgagtaacagtcacattttttagcctctctaactgagctctcatcccaagcaatggatga

SEQ ID NO: 181011 - DNA, 201 bp, Homo sapiens
agtatcaggaaggaaattgggattaatagtggtggtagaagaaaaatgatattagaataacatcataaagagaaaatgtgcagattacgtctgcaactgamtgttacaagtttttttgttttgttttgtttttttggtcatttcagaataaaatctgttaccccttggaaaaaaaaaacagatacatgaatatgagttgct

SEQ ID NO: 181012 - DNA, 201 bp, Homo sapiens
atatatgtaaagtactcatgtatgtcttgcacagagtatgtgtacaataaactttagttattatggttagtaaaagtcatacaaattcctcaaccctgaaraaaaatttgttaatattttgttatctgtttccaaatattgctatatgccaatatacccatattgggaatggttgtcaaatgattattttcttaatattgc

SEQ ID NO: 181013 - DNA, 201 bp, Homo sapiens
aaaggacttgaatagacatttatccaaatatgatatacaaatggctaatgagcatatggaaagatattcaacatcagtaatcatcagagaaattcaaagcyataatgcaatatcacctcacccccattacaatggcttctataaaaacaaaaacaaagctgggcacagtggctcatgcctgtaatcccagcactttggaag

SEQ ID NO: 181014 - DNA, 201 bp, Homo sapiens
cctatgctggagtgcagtggcgcaatctcagctcactgcaatctccacctcccaggtttaagtgattttcctacctcagcctcctgagtagctgggattaygggtgcaagccaccacgcctggctaatttttctatttttagaagagatgggggtttcaccatgttggccaggatggtcttgaactcctgacctcaagtga

SEQ ID NO: 181015 - DNA, 201 bp, Homo sapiens
aggttgattctacaatgtatatggaagaattacgacccaacaatagtcaagacacccctaaagaagacaaatttagtagattggggcttttctttctacaygttagcatttattagaaagctacaggcattgagacagtgaaatgttggttttggcattgacaaactgaccattgaaacagaatagagaccctctaattag

SEQ ID NO: 181016 - DNA, 201 bp, Homo sapiens
gatgaagcagacctgattatggtgaataagctttttgatatgctgctggattcagtttgccagtattttattgaggatttttgcatcaatgttcatcaggratattggcctgaaattttcttttttggttttgcctctgccaggttttggtatcagggtgatgttggcctcataaaatgagttagggaggagtccctcttt

SEQ ID NO: 181017 - DNA, 201 bp, Homo sapiens
ggtagcatttttattactactccctgggcatgaaattagtgtacaaagttagaatgaccaccagcaggttggtagataattttctcccaaaaggaccatgraagtatcccttacttccttccttctcctttctttgtcctatttcaagacaagttttcactctgttgtccaggctggagtgcagtgatgccaccatagctt

SEQ ID NO: 181018 - DNA, 201 bp, Homo sapiens
tgtgtccatgtgttcttactgttcaactcccacttatgagtgagaacatacggtgttaggttttctgttcctgtgttagtttgctgagaatgatggtttcyagcttcatccatgaccctgcaaaggacatgaactcattcttttttatggctgcgtagtattccatggtgtatatgtgccatattttctttatccagttta

SEQ ID NO: 181019 - DNA, 201 bp, Homo sapiens
gataggttgctgttatgggttgaattgtgtccccctacccaaaatatatgttaaagtcctaaaccccagtacttcagaatgtgatttattgggagactgtktctttacagaggtaattagttacgatgaggtcatactagagtagggcaggcccctagttcaatatgactggtgtccctctaagaaaacagccatgtgaag

SEQ ID NO: 181020 - DNA, 201 bp, Homo sapiens; identical to SEQ ID NO: 32054

SEQ ID NO: 181021 - DNA, 201 bp, Homo sapiens
ttagtcagttgggctggtttaacctgcaaatggaagctccttttaaaattttcaaattgagcagatcttgctgtctgggccaagaaaggacactcacttayccagatgccagtgtcacatttcaaaggctgttcttcctagcaatcaggaactcagctggggctggcagcagcagggccagagagaccaaaactcacttcc

SEQ ID NO: 181022 - DNA, 201 bp, Homo sapiens; identical to SEQ ID NO: 32056

SEQ ID NO: 181023 - DNA, 201 bp, Homo sapiens
tgtttgctccaatcggtaatccaatgaaggctgtgaaccagaattttgggtaaagcagtttccatggcagtttgatttttagaagctagattccaaagaamcctggggccaaacagcactacagaagaacgtcatgtggaaactactcaccaggcccaaccctgcttaaaacagcggcataaaagccagaatacatgggac

SEQ ID NO: 181024 - DNA, 201 bp, Homo sapiens
tgacacatacaatcaccaaaacacaatccgactgctgaagcaatagacaagcccgaacagtgtccaaactgaaacagtcgaggtgcttttctctctcaatygggctttattaacctgcaaacagaaatttcttaggaattttccaaattgagagaagccgatcccactgtctggtacccaaaaaagacactaacttggcca

SEQ ID NO: 181025 - DNA, 201 bp, Homo sapiens
ggtaatccaatgaaggctgtgaaccagaattttgggtaaagcagtttccatggcagtttgatttttagaagctagattccaaagaaccctggggccaaacrgcactacagaagaacgtcatgtggaaactactcaccaggcccaaccctgcttaaaacagcggcataaaagccagaatacatgggactccacctggctttc

SEQ ID NO: 181026 - DNA, 201 bp, Homo sapiens
ttaatcaatgcagatagcctgccagactccccaggtttgtggtaagatctccgcagcattttaggctagaggttgccagagtttgaggagccctcggaggyctaggtggggaaactgagttccagcgaggtgaagtgacttgcttaagggtgctcatctatttaggttcaaagctggggaagaaattttctgtttcattta

SEQ ID NO: 181027 - DNA, 201 bp, Homo sapiens
ttgctggcaaggagttgtgatcctttggaggagaagaggatcacattttttttctgcctttttgcactggcgtttcctcatcttcatggatttatctgccyttggtctttgatgttggtgaccttcagatgagttatctgtgtggatgtccttttcgttgatattgatgatattcctgtttgttagttttccttctaacag

SEQ ID NO: 181028 - DNA, 201 bp, Homo sapiens
tagtcagtagtcaataaagagctttagtcagtaaggagactgagaaagcagagaagggatcaagaaattctaccttgagaagctgaggtttgacatcacartgggccccaggacagcaaaggcagtgggaaatactgtcaaagatgaagttttgtctgcattgttggtgcttttgaggaaattgtcactactctgtagcag

SEQ ID NO: 181029 - DNA, 201 bp, Homo sapiens
atgtgtgtactcaagagaaatgaatatatacatcgtcacataaaattgctcatgaatgttcatagcatgtctatttgtaataaccaaaatgtggacacaamtcaaatgcccactgatgagtggataaacaaaatgtggtgtatccatacagtgggatattatttggcaataaaaaggaatgaataataacgtgctacaaca

SEQ ID NO: 181030 - DNA, 201 bp, Homo sapiens
atgtcaatattatacaaacattttattcaaaagagaacatcaaattttacctttgtatggtatatttttaatgttaaagctaattttaataaaaccttatraaccgaattttaatcagtttgactataagataggatttctgtgaagtttttttttttttttttttttttttttttttttgagatggtgtctggctctgtt

SEQ ID NO: 181031 - DNA, 201 bp, Homo sapiens
tactcaaattacatttgcggtctttctttttgcattagattctgcatatacagactcatgaaaaattcatcagagatagtcaagaaaaaccaaaacctgtmcctgataaggaaaataaaaaactgctctgcagaaagtgcaaagccttggcatgttacacagctgacgtaagagtgatagaggtaagctgcctttttacaa

SEQ ID NO: 181032 - DNA, 201 bp, Homo sapiens
acacacaccatctatgatatgcttagactttctgatttgtcctggattttcgttctttttcttcttctttttttttttttaaacagtcattttactttagracaaaaaaaataccattataagatgctttgtcatacaaaattattttctttataaccttccttaccaaaaatacatctttatactcataactttctccac

SEQ ID NO: 181033 - DNA, 201 bp, Homo sapiens
tcagctcactgcaaccttgggttcaagtgattctcctgcctcagtctcccaagtagctgggaccacaggcatgtgccaccacatctggttaatttttgtawtttttttggagaggtggggatttcagcatgtcggccaggctgttcttgaactcctgacctcaagtgatccatccacctcagcctcccaagtgctgggatt

SEQ ID NO: 181034 - DNA, 201 bp, Homo sapiens; identical to SEQ ID NO: 32062

SEQ ID NO: 181035 - DNA, 201 bp, Homo sapiens
cagaaagccaaacagggagacaacaagtattgccagggaagaagcctttaattgggagctgtagccaagaagatgagagattagtctcaactccatctccstgacccactaaaattaggggtttatatagcagggaagaaatgtaactgtgtgggaaaacaggaactcaggaagcaatcatgatgaatgaggggcctggcc

SEQ ID NO: 181036 - DNA, 201 bp, Homo sapiens
ccaactccagattccaaagaatattggggcaaacgtagtacaaaagaatatttgtttgttgaattctaatttcccattactatattgacacatacaatcamcaaaacacaatccgactgctgaagcaatagacaagcccgaacagtgtccaaactgaaacagtcgaggtgcttttctctctcaattgggctttattaacct

SEQ ID NO: 181037 - DNA, 201 bp, Homo sapiens; identical to SEQ ID NO: 32066

SEQ ID NO: 181038 - DNA, 201 bp, Homo sapiens
tagtgttacccagagccaaaaaaacacatgatgaatattttgttcctgatgcacaatttaatgtctttaagttcaccaataccactatatattttgtgcarttaagaaattcactttaggctgggcgtggtggctcaggcctgtaatctcagcactttgggaggccaagatgggtgaatcacttgaggccaggagtttgag

SEQ ID NO: 181039 - DNA, 201 bp, Homo sapiens
tcaatataatttccttaaagacaaagccaatttttttctgaatattaagactttgtacccatatagcagttttgcctcattaaaggaaaagatctgaaacygctattgtttattgaattgaattaccttggaaataaacaccacttaaacatttctctcacctacttttccaaataaccaataataatgtactatttctgt

SEQ ID NO: 181040 - DNA, 201 bp, Homo sapiens
aattatgaggcaggttgatgtggaagttgatttactttccttatttttaaattttgatatgtgtttttcgtgcagtttttcttttctaaggtaaaattcartaatccaaagtgatgataattaatgttactagctaattgagttttcttttaacagtatttggttcaaagattttgttacataactgttagaggccattca

SEQ ID NO: 181041 - DNA, 201 bp, Homo sapiens
tgaatgcaggtaacaaaatagtaaataataaagtgcagcagtgctttgatggaaaaaagctgggatgtctactagagtccaaagggcacagccaaagcttyccagatatttggcatttgaactgaggtctaaagaaagaggaaaaattagctggaaggagacaataaattgcagttagagggctccttatgtgcaaaggtc

SEQ ID NO: 181042 - DNA, 201 bp, Homo sapiens
cccttaaggtggctacagttttgttcactaacataaactctactttgattcttacaatgatgctgctcacttgcctggcattgactgatatatttatggargaataattccaacttggattgaagctttgccagtcaacatgtaaacctttcatggtggtgctggtgggctgaagggccccctgtattcaagaagggatac

SEQ ID NO: 181043 - DNA, 201 bp, Homo sapiens
aggaatgggcttaggaacagaatgaactgactcaatggaatacggtaggattgtgggtccagggaagctgggataggtgacaagataggttgctgttatgrgttgaattgtgtccccctacccaaaatatatgttaaagtcctaaaccccagtacttcagaatgtgatttattgggagactgtgtctttacagaggtaatt

SEQ ID NO: 181044 - DNA, 201 bp, Homo sapiens
tggggactataggtttgtaaacatgtcaattctccctatgctaatttatagagtacaatcacaataaaaataccggaaagtaagttaaaagaaaaagcacsctgaagaacttcttaatttttaatgtgaaagatacccttgaggtcttcttttgattccctctgcagaggcaaccattgttatgaagttgatttacatttt

SEQ ID NO: 181045 - DNA, 201 bp, Homo sapiens
aaatgctgaaatgatatgaagaaaactatgaagtccctgaagagaaatctgtctctgatttgagtgaggaagagacagcctatgtttgtgcctggggactrtaggtttgtaaacatgtcaattctccctatgctaatttatagagtacaatcacaataaaaataccggaaagtaagttaaaagaaaaagcacgctgaagaa

SEQ ID NO: 181046 - DNA, 201 bp, Homo sapiens
catttaacaaaaaaaatgctgaaatgatatgaagaaaactatgaagtccctgaagagaaatctgtctctgatttgagtgaggaagagacagcctatgtttstgcctggggactataggtttgtaaacatgtcaattctccctatgctaatttatagagtacaatcacaataaaaataccggaaagtaagttaaaagaaaaa

SEQ ID NO: 181047 - DNA, 201 bp, Homo sapiens
atatgtaaaataaaataaaaacggaggccacgcatttttatctactggaaaacaagtgagattatactggaaaaacagtattttcatatactggaaaaacraaccagattatataacatttccctaaatgcataaaagattcttacaaatccaatttagaaaaaaatatgaatgacctctcaaaactagctgtgagacatg

SEQ ID NO: 181048 - DNA, 201 bp, Homo sapiens
aactccaaagaaagcaaactggccaaaataaagaacaaaaacaaaattcccccaaattactggaactaacagagttcattcagtcttgttgcaatagataygtaaaataaaataaaaacggaggccacgcatttttatctactggaaaacaagtgagattatactggaaaaacagtattttcatatactggaaaaacgaac

SEQ ID NO: 181049 - DNA, 201 bp, Homo sapiens
gtattaaattactgttagctattattctatatcccagaaattaatcataggtttaaaaaaattttcacagaatttcaaaatagcatccttttgagtaactyctagcagaatgagaaaatctaaacaagtatagctactttcaaaagtaagcacggcaatcagccaacatattatatattttaagatgtaataagcttttaa

SEQ ID NO: 181050 - DNA, 201 bp, Homo sapiens
tgagccccgaaaattgagcctatggtgagctatgatcatgctactgtacttctgcttgggcaatggaacaagaccctgtctcataaataataaataaataraaaagagataaagaagggacaaatatatattaaataaatgcatacgtaaagaaagcaagaattatacttaaattgcactagtggaaagtattaagataaa

SEQ ID NO: 181051 - DNA, 201 bp, Homo sapiens
aaaacgccctaccccagcaggaaagagttatatgaggggttgtggaaacattgtaccatttctcagacatctaatgattttgaatgctccttacaggtcaytgggctgactgcctcggttggtgttggggatgccaaaaacacagatgaagccttggattatatctgcaagctgtgtgcttctcttgatgcgtcagtgata

SEQ ID NO: 181052 - DNA, 201 bp, Homo sapiens
ggacttccattagtcctgtagaatgctgaaaggagagtggccagaaatgagaagcaaaagcaagcagaggccagagcatggggaggagcgtgtgagctggkgcaggattttggctgcaggaacccactaaaggcttttaagcagtggggtgggatgatttctcatctgcaattttgcaaactccctctaaccactgggtag

SEQ ID NO: 181053 - DNA, 201 bp, Homo sapiens
agtggtctgatctcggctcactgcaacatccacttctgggttcaagtgagatggggtttcaccatgttggtcaggctggtctcgaactcctggccttgtgrtccgcacgccttggcctctcaaagtgctaggattacaggcgtgagccaccatgcctggccacaaataagattactcaggtttcctctaacggaatcaaca

SEQ ID NO: 181054 - DNA, 201 bp, Homo sapiens
gtattggaagtcctagctggagcagttaggcaagaaaaagaaagacaaggtatccaaattggaaaggaagaaggaaaataatctgtttgcagatggcagawttatttatttatttatttatttattcattcattttttgagacggagtctcgctctgtcgcccaggctggatggagtgcagtggcgcaatctcggctcact

SEQ ID NO: 181055 - DNA, 201 bp, Homo sapiens
caaaacagcctccgcgaaccccgcccgccgctagttgcactttcgattttccctttagttattaaagttcctatgcagctccgcctcgcgtccggcctcakttcctcggaaaatccctgctttccccgctcgccacgccctcctgctacccggctttaaagctagtgaggcacagcctgcggggaacgtagctagctgcaa

SEQ ID NO: 181056 - DNA, 201 bp, Homo sapiens
caccatgcccagctaattcttaaattttttgtagagatgggttctccctgtgttaaccaggctgatttcaaactcctaggctcaagtgattcacctgcctyggcctcctaaagtgttatgactataggcgtgaaccaccatgcctggcacgaccctcgtttgttaaggggaatcagagcacttaccctttgacctataggg

SEQ ID NO: 181057 - DNA, 201 bp, Homo sapiens
tattggaagtcctagctggagcagttaggcaagaaaaagaaagacaaggtatccaaattggaaaggaagaaggaaaataatctgtttgcagatggcagaattatttatttatttatttatttattcattcattttttgagacggagtctcgctctgtcgcccaggctggatggagtgcagtggcgcaatctcggctcactg

SEQ ID NO: 181058 - DNA, 201 bp, Homo sapiens
cagttaggcaagaaaaagaaagacaaggtatccaaattggaaaggaagaaggaaaataatctgtttgcagatggcagaattatttatttatttatttattyattcattcattttttgagacggagtctcgctctgtcgcccaggctggatggagtgcagtggcgcaatctcggctcactgcaagctccgcctcctgggttc

SEQ ID NO: 181059 - DNA, 201 bp, Homo sapiens
ttataacctgctgccaaactctgatacctcaaattatctagctgagacaaatataaagccgagacaaaaatgtatgctgacaattctgaagacatttctayttttattttaccaataattttaaagacagcttgtttattaaagatttactgaagtcatgtgaacttgaaaaacactttggacttaatttatgagcactct

SEQ ID NO: 181060 - DNA, 201 bp, Homo sapiens
gtcagttcattgctttctctaccttctaaatcagctttccctcctgactttcctgttcacctgaatgaaaccaccattcctctactggctcagatttatayctagggacaatcacccagcacatttcccagcattaaaggagtgcgactagagatgggccaggggaagacagtgaagggcctggatttgaattttatccta

SEQ ID NO: 181061 - DNA, 201 bp, Homo sapiens
tgcttgtgacttttgttgtactgtgctcttcatgaggagccctggcgaactgataccagagtaactcacagactcagctgcttgagaacacagccatagtytcctcatcttatccccagcaccctacacagagcctggaccacagcagatgccccagctttgaaccaagcaactgaggcttatcctaggagatgcacacag

SEQ ID NO: 181062 - DNA, 201 bp, Homo sapiens
gcaccctacacagagcctggaccacagcagatgccccagctttgaaccaagcaactgaggcttatcctaggagatgcacacagacagatgcatgtgtgatwagtgtcttttgagggccgattctatgcttggccctgagaatgctgctctggagaacaggaggcccaagttcacagcaaagcagaacatagggtgaactga

SEQ ID NO: 181063 - DNA, 201 bp, Homo sapiens
gccacgccctcctgctacccggctttaaagctagtgaggcacagcctgcggggaacgtagctagctgcaagcagaggccggcatgaccaccgagcagcgaygcagcctgcaagccttccaggattatatccggaagaccctggaccctacctacatcctgagctacatggccccctggtttagggagggtgagtgtctcca

SEQ ID NO: 181064 - DNA, 201 bp, Homo sapiens
gacttgtttttctcttgcttcgttcccttcttttaatcaatgcagatagcctgccagactccccaggtttgtggtaagatctccgcagcattttaggctasaggttgccagagtttgaggagccctcggaggcctaggtggggaaactgagttccagcgaggtgaagtgacttgcttaagggtgctcatctatttaggttc

SEQ ID NO: 181065 - DNA, 201 bp, Homo sapiens
atccccattcatgaattaaagacttaagttgcctatactaccaaaagcgaactgcagattcaatgcaatccctatcaaaatcgcaatggcattttttttgyagaaatagaaaaaattatccaaaatttatagagaatctcaaggcatcttgaataggtaaaattttgataatgaagaataaaccaggaggcctcacctctc

SEQ ID NO: 181066 - DNA, 201 bp, Homo sapiens
ataggatatatttatgtgtgtgtacatatgatgggatatgtatacacattgttacttacatgtatgtgtatatatatttttggaattggctcacatgattrtggaggctgagatgtcccatgatctgctgtccacaatctggagaatcagaagagcagttggtgtaattcagagtctgaaggcctgagaaccaggacctct

SEQ ID NO: 181067 - DNA, 201 bp, Homo sapiens
ctaatcaccctgcattgttgagaccctgagaaagccagcctaaggtgggctcctagtttttccacatatttaacatgcaggtgcacacctgcatttgagtctttttttttttttttttttttttttttgagataggtcttgctctgtcacccaggctagagtgcagtggtgtaatcctagctcactgcagcttcaaactcc

SEQ ID NO: 181068 - DNA, 201 bp, Homo sapiens
tgactgcctcggttggtgttggggatgccaaaaacacagatgaagccttggattatatctgcaagctgtgtgcttctcttgatgcgtcagtgatagcaacrgtcaaacacaatctggaggaactggagcaagttgtttataagccccagaagtgtaagttggatccaataacaagcctttgagattctgttactctctact

SEQ ID NO: 181069 - DNA, 201 bp, Homo sapiens
ccctgcattgttgagaccctgagaaagccagcctaaggtgggctcctagtttttccacatatttaacatgcaggtgcacacctgcatttgagtctttttttttttttttttttttttttttgagataggtcttgctctgtcacccaggctagagtgcagtggtgtaatcctagctcactgcagcttcaaactcctgggttc

SEQ ID NO: 181070 - DNA, 201 bp, Homo sapiens
aacctttcaagtccataattattaataaactttagataacttctgagttagataaaatttttttctgaataaaaacacattgtcttttgcacattttatayatagaattacatatgaactagaattcttatccttagtaacaaccttaaatttcagtaaaaacctaggaagcaagaaatcttgagctgcctagcagatatt

SEQ ID NO: 181071 - DNA, 201 bp, Homo sapiens
ctgtgggcatttagtgctataaatttccatctacacactgctttaaatgtgtcccagagattctggtacgttgtgtctttgttctcattggtttcaaagawcttatttatttctgccttcatttcatatttaccctgtagtcattcaggagcaggttgttcagtttccatgtagttgtgcagttttgagtgagtttcttaa

SEQ ID NO: 181072 - DNA, 201 bp, Homo sapiens
agctgagttcaagtcctgaatattcttgttaattttctgttttgttgatctattattgacagtggggtgttaaagtctcccactattattgtgtgggagtstaagtctctttgtaggtctgtaagaacttgctttatgaatctgggtattcctgtattgggtgcatatgtatttagcatagttagctcttcttgttgcatt

SEQ ID NO: 181073 - DNA, 201 bp, Homo sapiens
agagatttatgctgaatagggtgaccaaatattcagtaagctacaggaggagtcatgaaagtagaagcatgcacctgggcaggtgagcttcatgcctttcyatgggacccatgttcaaaaactggcagtgttagcaagatccaagggtggagtttttggccctctgatgtcagaaggtgaagcagaggacatgaaaactct

SEQ ID NO: 181074 - DNA, 201 bp, Homo sapiens
ggcagagaaaggttttagagatacctactttgaactacaatctgtccttcctgaaaatatactcactctttttttctttttcttttttttttgacgtctcyagttttcaggaaagtggaatcacggattagcgacaaatttaaatacatcatagctcagctgatgagggacacagagagtctggcaaagagaatctgcaaa

SEQ ID NO: 181075 - DNA, 201 bp, Homo sapiens
attgcaacccctgctttttttttttctttccatttgcttggtaaatcttcctccatccctgtattttgagcctatgtgtgtctttacatgtgagatgggtytcctgaatacagcacaccaatgggtcttgactctttatccaatttgccagtctgtgtcttttaattggggcatttagcccattcacacttaaggttaata

SEQ ID NO: 181076 - DNA, 201 bp, Homo sapiens
ggagttgtgatcctttggaggagaagaggatcacattttttttctgcctttttgcactggcgtttcctcatcttcatggatttatctgcctttggtctttsatgttggtgaccttcagatgagttatctgtgtggatgtccttttcgttgatattgatgatattcctgtttgttagttttccttctaacaggcccctcagc

SEQ ID NO: 181077 - DNA, 201 bp, Homo sapiens; identical to SEQ ID NO: 32057

SEQ ID NO: 181078 - DNA, 201 bp, Homo sapiens
attttacctcttcccctgcctccatatcacctgaccctaatcctcccagctggcaaaaatctctcttttgaacatataaagcctataaccttttatatctrtctttgtaatagcacttaaaattttccacctatgttttgctggttatgaagagatcttatttcctcattgtctagaaggttcttgaaggagggcctgttt

SEQ ID NO: 181079 - DNA, 201 bp, Homo sapiens
aaaagaacaaataaacatgtacaaagaaaaaatgatgaatgactctattttacgccttcagacatgggacgaagcagtatttagggaaaaggtaagtctaygttattcttccagcatctgaccataaataactatcagggaatgtgaggaggatggttggtatcttttatcatattgcttagagtgttatattacaacaaa

SEQ ID NO: 181080 - DNA, 201 bp, Homo sapiens
aaattatttagttcctcccttagttttactggggatgggattctctattctctcttcactgagccacctttccattttgtaaaatatattgccaatacacrttttaaaaccacgagttttaatagccatggcataatttttatctcttctcctaggtgacaagctacttagactcatgtgacagaagcaacagagtaaaag

SEQ ID NO: 181081 - DNA, 201 bp, Homo sapiens
agattaagttatctagaaccacctcttccacattttcagtgagaagaattgcagggaaattatttagttcctcccttagttttactggggatgggattctytattctctcttcactgagccacctttccattttgtaaaatatattgccaatacacgttttaaaaccacgagttttaatagccatggcataatttttatct

SEQ ID NO: 181082 - DNA, 201 bp, Homo sapiens
tgaggataaatgagatgtatgcattgcatctcttagcgcctggcataaaatacgtgcccaagaaatgagagctgttactggacagaagtgtgagacatagwttaacttcatgaagatgaaccttacagtttaatagaccaactccatagtgtctataattttaaaaagtcataatctctgtgctccaaaaagtattgacca

SEQ ID NO: 181083 - DNA, 201 bp, Homo sapiens
tgcagagattttcatctcagaatctctggaagcatgatcactgcagggctaggggagagctttaacactagaatccatggttcaaatcccagttctatcasttgcaagatgtgtgacctcaggcagttgctctgtcttttaaataatcaatctcctcatgtaaaaagtggggaaaataatagtatttaactcccagggtgg

SEQ ID NO: 181084 - DNA, 201 bp, Homo sapiens
tattcagatcaacctcttagtgtaatgaccttcatttcattgtaatttccgtaacacagaaacatgaaatcagattggagaaagtcaagaaacacataccyatactttctccagacccattgcagagattttcatctcagaatctctggaagcatgatcactgcagggctaggggagagctttaacactagaatccatggt

SEQ ID NO: 181085 - DNA, 201 bp, Homo sapiens
gtttagggagggtgagtgtctccagcggcgccttctcggcggaaaacaattgaggacttgtttttctcttgcttcgttcccttcttttaatcaatgcagakagcctgccagactccccaggtttgtggtaagatctccgcagcattttaggctagaggttgccagagtttgaggagccctcggaggcctaggtggggaaac

SEQ ID NO: 181086 - DNA, 201 bp, Homo sapiens
tgggatggggccaagaagtggggaaggggaaattatatttggtttttaattttttaattatttcttatttatttttttgagacagagcccaggctggagtrcagtggtgtgatattggctcactgcaatctcagcctcccaagcagctaggactacaggtgtgtgccaccacgcatcactaatttttgtagttttagtaga

SEQ ID NO: 181087 - DNA, 201 bp, Homo sapiens
cccaaagtgctgggattacaggcgtgagctactgtgcccagccagtatatttgtttttttaaatcaaaacattctaggtctagctgggcatgatggctcamgcctattgcgccagctacatgggaggatcatttaagcccaagagttcaagtccagccagggcaacatagtaggaatctatctcaaaaagggggagtgggg

SEQ ID NO: 181088 - DNA, 201 bp, Homo sapiens
gtcaatattatacaaacattttattcaaaagagaacatcaaattttacctttgtatggtatatttttaatgttaaagctaattttaataaaaccttataarccgaattttaatcagtttgactataagataggatttctgtgaagtttttttttttttttttttttttttttttttttgagatggtgtctggctctgttgc

SEQ ID NO: 181089 - DNA, 201 bp, Homo sapiens
tgtctgcccaaatggccacccagatttgtgcttgaaacccagatccctggtggcataggcaccggagggaatctcctggtctgctggttgcgaagacttgsggggaaaagcatagtatctgggccagggtgcactgttcctcatggcacagtccctcatggcttcccttggctaggggagggagttcccagaccccttgtg

SEQ ID NO: 181090 - DNA, 201 bp, Homo sapiens
aatataatgatgccctcattatcagtgagcatgcacgaatgaaagatgctctggattacttgaaagacttcttcagcaatgtccgagcagcaggattcgawgagattgagcaagatcttactcagagatttgaaggtgagtggtgttttcagaggaggaagccacagtagcattcttggtgactggaatggcaaaacaaac

SEQ ID NO: 181091 - DNA, 201 bp, Homo sapiens
ggttacagataatgataccatttaaatgaggttttatatgttttgttgttcttgagaggagaaaagaaactagtaatttaagctaaccagaaaatataggraagggaaatataaacaagataacacaaggaaaactagttatatcagctatggccatgtaattaggtcaaacatcttttaaataggtgtgaatgagtcaga

SEQ ID NO: 181092 - DNA, 201 bp, Homo sapiens
taatgataccatttaaatgaggttttatatgttttgttgttcttgagaggagaaaagaaactagtaatttaagctaaccagaaaatataggaaagggaaawataaacaagataacacaaggaaaactagttatatcagctatggccatgtaattaggtcaaacatcttttaaataggtgtgaatgagtcagaaagcagaat

SEQ ID NO: 181093 - DNA, 201 bp, Homo sapiens
agtctacgttattcttccagcatctgaccataaataactatcagggaatgtgaggaggatggttggtatcttttatcatattgcttagagtgttatattayaacaaaaagtttatacttagtgaatattaaattcattctgtttttaaatgtcaatgaggttaaattatatttaatagtgctaataactgaagttatgttt

SEQ ID NO: 181094 - DNA, 201 bp, Homo sapiens
aacggaaggaaggaactctgcagaacagagggcaaaagcttggagctctttagggcaatctgcaagaacaggaaagggagagggatgagcagagtactggsagactgctttcttccccagcgccccagctgtactgtccattgtctgtgtgtggcctgctgtcactagagcactccccatcccccgccccagaattctctg

SEQ ID NO: 181095 - DNA, 201 bp, Homo sapiens
aaggtaagtctacgttattcttccagcatctgaccataaataactatcagggaatgtgaggaggatggttggtatcttttatcatattgcttagagtgttrtattacaacaaaaagtttatacttagtgaatattaaattcattctgtttttaaatgtcaatgaggttaaattatatttaatagtgctaataactgaagtt

SEQ ID NO: 181096 - DNA, 201 bp, Homo sapiens
aaaatccaacacctatttcattccaactttatttcccattcttcccttttgtgcattatccacttccgccaacctgacttcctcacttattgcttgttgayggaactgctcagatactgctactcttcattttacctcttcccctgcctccatatcacctgaccctaatcctcccagctggcaaaaatctctcttttgaac

SEQ ID NO: 181097 - DNA, 201 bp, Homo sapiens
tccacatcctctccagcatctgttgtttcctgactttttaatgattgccattataactggcatgagatggtatctcattgtggttttgatttgcatttctstaatgaccagtgatgatgagcattttttcatatgtttgttcgtggtataaatgtcttcatttgagaaatgtctgctcatatcctgcacccactttttgat

SEQ ID NO: 181098 - DNA, 201 bp, Homo sapiens
tggaaatatattaggaaaaaattggaacttttatttattttattttatttttgagacagagtcttgctctgttttccaggctagagtgcagtggcacgaamtcagctcactgcaaccttccagtttcaagtgattctcatgcctcagcctcccaagtagctgggattacaggtgcacaccaccatgcccagctaatttttg

SEQ ID NO: 181099 - DNA, 201 bp, Homo sapiens
gagcagtacctagatgaattactgggaactgttgtttggcctagccaagttaatgcatcaaaaagccatcacaatgctcaaatgccaaaaaccactccagkctctttccttgtagacattgcctcctctcatatgtcctgcagacaaagccagggttgttttttaagtcatgcttgcacgcattatcatcctgctcaaatt

SEQ ID NO: 181100 - DNA, 201 bp, Homo sapiens
aaagaacaaataaacatgtacaaagaaaaaatgatgaatgactctattttacgccttcagacatgggacgaagcagtatttagggaaaaggtaagtctacrttattcttccagcatctgaccataaataactatcagggaatgtgaggaggatggttggtatcttttatcatattgcttagagtgttatattacaacaaaa

SEQ ID NO: 181101 - DNA, 201 bp, Homo sapiens
gggggaaataattataacatgggaaggtcttctgttttctatactgttttagacctgagaaagatcattgaaacccacaaaagtactcatagaatagtacttttttttttttgagacggagtctcgctctgtcgcccaggctggagtgcaatggtgtgatctcggctcattgcaacctccgcctcctgagttcaaccaatt

SEQ ID NO: 181102 - DNA, 201 bp, Homo sapiens
aaaaatctgctgggattttattgaatctgaacacaaaactgaggctgggcatggtggctcacacctgtaatcccagcactttgggaggctgaggcgggcgratcacttgaagtcaggagtttgacatcagcctggccaacatggtgaaaccctgtctctactaaaaatacaaaaattagcctagcgtggtggcttgcacct

SEQ ID NO: 181103 - DNA, 201 bp, Homo sapiens
gcctgtggtggtattatctctaaaaatcctttgcttacctaaggtcacaaggattttcactatgttatcatctagaagcgttacagctttacattttacayttaggtctacagtcaattttaaattaattttgtataaggcgtgaggtattggttgagatgctttcttttttttttctttttgtgtatggacattcagttg

SEQ ID NO: 181104 - DNA, 201 bp, Homo sapiens
aaccaatcttttgaaaagattggtatatcatctgattgagtttttgagaattctttttatagtctgacaaaaaagtcctctgtcagaaatgtgatttgcakatattttcttctggtctgtggcttgtctgcttattctcttgacagtatcttttgcagatggaaagttttaagttttgacaaagttcagtatatcagtttt

SEQ ID NO: 181105 - DNA, 201 bp, Homo sapiens
atattatccagcagcacagtggtgttatctcaatgggggaaggagcagaaggatggagagatggtgatggagtcacatgagtttctattttcttactcctyccacctcaggtaccctgcttccaccttttcaccagtctgaatccagttaaatagttttaactagatgacttaagactatttcaggaggaatatcctgttt

SEQ ID NO: 181106 - DNA, 201 bp, Homo sapiens
tgggaagtgggattcagtgaaccaaagttgaattttaggagtacctctatttgtttacctatttgcagattatatcagagctttaagtcaaaaacaccaamtaaaatatttattttctaataggcagaggaagagcaagaggtagcaagtgcttccttctgactagtaatgctggtgtaattgaaaaagaacaaataaaca

SEQ ID NO: 181107 - DNA, 201 bp, Homo sapiens; identical to SEQ ID NO: 32068

SEQ ID NO: 181108 - DNA, 201 bp, Homo sapiens
cttctttcttcttcctgtatttattctacaactctgacttccctggaagaattaggtgttactttccctgtgttttgtgacactttgcgtgtactacttcttttttttttttttttttttgagacagagtctcgtgctgttgcccaggctggagtgcagtggtgcgatctcggctcactgcaaacctccacctcctgggtt

SEQ ID NO: 181109 - DNA, 201 bp, Homo sapiens
attccaaaaaacaaaaattctccagactttttcaaacaaaaccataaaaaattatttcagtcccacattagttcagtccatgcaatcaactcctgctgtgyttcatattgggttagtaatctttataaacatgtcagccttttaattaagagggactctaattaagagtcctagaagttttctgtattccagtggcacagt

SEQ ID NO: 181110 - DNA, 201 bp, Homo sapiens
tgagacacaatcactatcataagaatagcacaggaaagactggccccccatgattcaattacctccccctgggtccctcccataacacgtgggaattctgttaagatacaattcaagttgagatttgggtgaggacacagccaaaccatatcaggggctcttctgcctgttgtatcactcactgagtttgtgcctgcaaat

SEQ ID NO: 181111 - DNA, 201 bp, Homo sapiens; identical to SEQ ID NO: 32060

SEQ ID NO: 181112 - DNA, 201 bp, Homo sapiens
atgtgagtttattgagaagggaatacattagtaggattttcatatttctcagatgaagaaataatcatgtaaacattcaggaaaaacaaacatgtgtggcttttttttttttttttttgagacagagtcctgctctgtcacccaggctggagtgcagtggtctgatctcggctcactgcaacatccacttctgggttcaag

SEQ ID NO: 181113 - DNA, 201 bp, Homo sapiens
gacagatgcatgtgtgataagtgtcttttgagggccgattctatgcttggccctgagaatgctgctctggagaacaggaggcccaagttcacagcaaagcrgaacatagggtgaactgagtcctaaatctcctccttgattttttttttttttaagagtctcactctgtcgccaggctggagtacagtgacgtgatctcgg

SEQ ID NO: 181114 - DNA, 201 bp, Homo sapiens
aattttgcaaactccctctaaccactgggtagagtatgggttagagggaacaaggcaagaggaagggagaccagtttggagattgtcatattatccagcarcacactgatgtggtttgaattggggaagtagcagaaggatggagagacggtgatggagtcacgtgagtttctattttcttactcctcccacctcccgtac

SEQ ID NO: 181115 - DNA, 201 bp, Homo sapiens
ctgaggcaaagaattgcttgaacctgggaggcggaggttgcagtgagcgaagatcgtgccactgcactccagcctaggcggtagaccaagactccatctcaaaaaaaaaaaaaaaaaaaagtcttagagattaaaccatatcaggttacagagatctatgccattttagttaattattacatagagttcaattccaaaatg

SEQ ID NO: 181116 - DNA, 201 bp, Homo sapiens
aatttactcagcacctattacctaatagtgtcattgaaagttgaggaagcaatgatgagcacagtagaaactgtccctgccctaatagtgattagtgtgtstatgtgaatgcaggtaacaaaatagtaaataataaagtgcagcagtgctttgatggaaaaaagctgggatgtctactagagtccaaagggcacagccaaa

SEQ ID NO: 181117 - DNA, 201 bp, Homo sapiens
aggttgtcttccttgattataggttatttaggagccttatatgtcctcctctattctttctttcttcctttttttccttttaaatccaaagtaagttcatmcagacacatgcacctgaaaaataaccatacttaagtcagttcattgctttctctaccttctaaatcagctttccctcctgactttcctgttcacctgaat

SEQ ID NO: 181118 - DNA, 201 bp, Homo sapiens; identical to SEQ ID NO: 32061

SEQ ID NO: 181119 - DNA, 201 bp, Homo sapiens
tggcaaaacaaatcagaacacaggtatttatatatagtgaattagatttagtggattatgcatttaagaatatgtgtgtgtgtgtatgtatatgtgtgtgygtatatatataatatatatttcaaattctgttttaatatatatttcaagttctgttttaatgcttctatcagtcaaggtttaaccacagaagcaaaagca

SEQ ID NO: 181120 - DNA, 201 bp, Homo sapiens
attctttttgtttaacgttcttttttagtaattttataaagctttaaaaaatatgaaaaagtgttttaacgatattaaaaaaaccataatttatgtatactttttttttttttttgagatggagtcttgctttgtcgcccagggtcaagtgcagtggctcaatcatggctcactgcaacctctgcctcccggattcaggca

SEQ ID NO: 181121 - DNA, 201 bp, Homo sapiens; identical to SEQ ID NO: 32063

SEQ ID NO: 181122 - DNA, 201 bp, Homo sapiens
ttgtcagtctgaaaactgtacgtgtactaactttaaatttttttctttttgcatgtatttcaatattgaattaatacaaatgatttataaggagtgtccarttgataattgcttttcattttcaggctttaaaaaattggattgaaggaaatcctaaactcagttttctaaaacctggcatattgactggacgtggcaaaa

SEQ ID NO: 181123 - DNA, 201 bp, Homo sapiens
tggaccctacctacatcctgagctacatggccccctggtttagggagggtgagtgtctccagcggcgccttctcggcggaaaacaattgaggacttgtttktctcttgcttcgttcccttcttttaatcaatgcagatagcctgccagactccccaggtttgtggtaagatctccgcagcattttaggctagaggttgcca

SEQ ID NO: 181124 - DNA, 201 bp, Homo sapiens
cccgtacaatatgatcatgtttaattatctagatcagaaacttggaggatcttcaggcccactgccccaggtatctccaaagtcagacgaatgcttcagargagctataatcttcctaactcctattttcttactcttatggccacactgaagatgtccttctcaggtcccaagtccatattgtacaactcattatgaatt

SEQ ID NO: 181125 - DNA, 201 bp, Homo sapiens
taaggacttgcctacagctattcttcttttggactcagggagaatttaatcagttgatgttctgatctagcatttcatctttgtggttccttatccacatsgtggttagtaatatggaatttctgtcatttcccaggtatagagttacaggcatttctggagcaacagctgagaatgtcccagtggaacagattgttgaga

SEQ ID NO: 181126 - DNA, 201 bp, Homo sapiens
atgacttcaggaataaatttgatgtttacgtggcacatttaacttctttagtgattttataatttatttgatattattcttttacgtactcttttctctcytagtgacttaaaataatatatagtactataaattacaactagcttggatttattgatctcttactatgtgtcaggctctgtgctaaggacttgcctacag

SEQ ID NO: 181127 - DNA, 201 bp, Homo sapiens
agacggggtttcaccatgttggccaggctggtctccaactcgtggcctcagctgatccgcctgcctcggcctcccaaagtgctgggattacaggcgtgaghcaccacacccggcctgagtcaccacacccagccatctttttataacgttttacgatttcctattaaagagtagagtaatgctccaagaaaaccctgttat

SEQ ID NO: 181128 - DNA, 201 bp, Homo sapiens
ggtttcaccatgttggccaggctggtctccaactcgtggcctcagctgatccgcctgcctcggcctcccaaagtgctgggattacaggcgtgagccaccasacccggcctgagtcaccacacccagccatctttttataacgttttacgatttcctattaaagagtagagtaatgctccaagaaaaccctgttatgacaca

SEQ ID NO: 181129 - DNA, 201 bp, Homo sapiens
tggccaggctggtctccaactcgtggcctcagctgatccgcctgcctcggcctcccaaagtgctgggattacaggcgtgagccaccacacccggcctgagycaccacacccagccatctttttataacgttttacgatttcctattaaagagtagagtaatgctccaagaaaaccctgttatgacacaggggcccagacat

SEQ ID NO: 181130 - DNA, 201 bp, Homo sapiens
ttagaatctagaatatattaaaaaaagtcttaaaatcaactggaaaaagaaagaaaacatacatagagcaaaaaatttggacaaacatttcaatgaatacraagaatgaaaagtgaataaatgtaaaagattctcagcccaattaggaatttgggaattgtaaattaggaacacagtgagataacattttataactactga

SEQ ID NO: 181131 - DNA, 201 bp, Homo sapiens
aggtggtccacatggagctcagagacttgaccaggattgacagacaactggaggctcgagctctggggccatgattctggcccacacttcctcctccaccsctaatcttctgtgattcgggttttatgagagctagaaggacagagtgacaaagttggccttgaggttttgaggtgggactgggaaagaggagagtagtga

SEQ ID NO: 181132 - DNA, 201 bp, Homo sapiens
agagttacttccttactgtcccacctcgaccccagttgatctgcgtgcaagaatatcctagacaaggacagggaggtgtgtgaggctgtttccatcttgcyggcttcacctgttacaggtgttaacgctccttatctcctgtggaggacgggagaacgccctggctttcccccaggcctggccttcctccctggcctcagc

SEQ ID NO: 181133 - DNA, 201 bp, Homo sapiens
cagacagcagactcaagttccaactcaggccctcgcttctgctctcagacccctaaagagttacttccttactgtcccacctcgaccccagttgatctgcrtgcaagaatatcctagacaaggacagggaggtgtgtgaggctgtttccatcttgccggcttcacctgttacaggtgttaacgctccttatctcctgtgga

SEQ ID NO: 181134 - DNA, 201 bp, Homo sapiens
gcagtggagtggggggtgcctctcatacttgtgactgagatgacagggtctcctgccctgtgctgtgtgaccttgggcaagttacttaacctctctgtgcrtctctcttcttctaagtggggatgatgagagtacatttccttatggtgtcaactcacagggttgtttgaagattaaatgaggtaatatttggaaagtgcc

SEQ ID NO: 181135 - DNA, 201 bp, Homo sapiens
agggagctggactcagggctgttggcctctggccccccgcccatgccactgtgtgcctgcaaggcccgctgcccagaaacacctctgagggctgctgtgtmggctgatgcagtgtggacatcacccactgccctgagagaggggcccttttggtgcactcctagaggactcgacttttgtggcctcaactagctccagact

SEQ ID NO: 181136 - DNA, 201 bp, Homo sapiens
gggggcaggtaggagcttctcttctaaattcctgtgaccttctggtgagcagctctgcagtaggcgtctcatgccctcccctcagaatcagctcttaccartgtgtgacaatggcccttctgagtcagctctgtgagccttcagggggcattcatgtctgctctgcccactggcccctcgtctgcctacaggcacgcgtgc

SEQ ID NO: 181137 - DNA, 201 bp, Homo sapiens
caaagacctctaaggcagtgggtatgcagacagggaagagtagagagggcagagatcctggggctcccctccatgaagagcttccctcttttttgtctggmcagcctgcttgtctaactctcattttgtggtgtccaggggactcagcccaagatggtgatggagtactggacggggtggtttgactcgtggggaggccct

SEQ ID NO: 181138 - DNA, 201 bp, Homo sapiens
gcaggtcactatttggggcagcactgtgggcttgagatgggctgagtggtacacccaaaaagtccccaggaaaaggtatgcgaaggaggctgagggtttgytattgtttggtgggacagaggtgaggtggcagggagctgacctagctgggaagacgcctgagcttctttgaggtgaggtaactgtgtccccacctaggtg

SEQ ID NO: 181139 - DNA, 201 bp, Homo sapiens
ttttttgtctggacagcctgcttgtctaactctcattttgtggtgtccaggggactcagcccaagatggtgatggagtactggacggggtggtttgactcrtggggaggccctcacaatatcttggattcttctggtgagtgcttgcggtgactacatccagaatgtgtgctacttaagaagtgaggatgagtttcagtca

SEQ ID NO: 181140 - DNA, 201 bp, Homo sapiens
ccagagcacagagaaaacacttagctgtttaccacgcaggcagttctctctgtatctctgccgacagctctatacgcacacacagatagagacagatgccrtcacactccgctgcatgtcacctgcttgtgccagttaatgcacatacggacagctttctgtatgaccaaatacagatttacatgactgttttaaagaatg

SEQ ID NO: 181141 - DNA, 201 bp, Homo sapiens
ctgtcttttctccgcagtacaagcgtgggggacctatcattgccgtgcaggtggagaatgaatatggttcctataataaagaccccgcatacatgccctaygtcaagaaggtaagaatcctcttagtgcgtttctttagattccttcctctggagtgtgctataggctgtggtgtgacatgtgggtctaatatttttctca

SEQ ID NO: 181142 - DNA, 201 bp, Homo sapiens
ggcaaatttgacttctctgggaacctggacctggagtatgtggtgttgctgcttctgtgaactggccaggggcagggcacagaggtggctactggggtggrttagcaaccaaagagaaccagggagggacgtgggtctggagtcctgttctaggactgtgagaggccctgcacccaggacccagacgctccccagtcgtga

SEQ ID NO: 181143 - DNA, 201 bp, Homo sapiens
caatcaagtctgaaaagcccatcaacatggagaacctgccagtcaatgggggaaatggacagtccttcgggtacattctctatgagaccagcatcacctcrtctggcatcctcagtggccacgtgcatgatcgggggcaggtaggagcttctcttctaaattcctgtgaccttctggtgagcagctctgcagtaggcgtct

SEQ ID NO: 181144 - DNA, 201 bp, Homo sapiens
ctgttttaaagaatgtgaagagccccattctaaaccacactttgtggacacagtctcccgggttgtttctggtggttctgttaagcgcacgccatcccggygagcatcccggtgagcatcccggagcctgcgctctgcgcacccggctttccctgggatgagcggcacaggggctcctcggcaccgtgtagatgtgcatgc

SEQ ID NO: 181145 - DNA, 201 bp, Homo sapiens
  misc_feature (1)...(201): n = A,T,C or G
agacagggagtgtggggggaggcaggccagtgcctggtggctctggggtctgctctccggccttggagctcagagggaagaggacagactcatgctggagngtgaagtgggagaaacagaggtccctgaggaacagcggctggccccgtgggcctttccttcctccagcctcagagaggagagtgaggggcagaggaacag

SEQ ID NO: 181146 - DNA, 201 bp, Homo sapiens
ctaactggaggtgggaaacggtgtcagggccgcttactttattgtgctggtggattgagaagggtctggggtcacctagaaggtccctggctttgagacartgctttgtctctctctctcctcttccctttaacagtcttggccaccatcaacttgcagtcaacacacgagctgcagctactgaccacctttctcttcaac

SEQ ID NO: 181147 - DNA, 201 bp, Homo sapiens
atcttggtctgtcttcctctaggtcgtggatcatccttggttagttctcagaccaagggtcctccagtgttttgaacacacgagcaggctcttcctcaccrtccgagactcgtaactgaggggcttgcaagagttgtctttggaaagatctgtgcatttcagtgttgtctcacttgggtgcgttactgaaaggacagacag

SEQ ID NO: 181148 - DNA, 201 bp, Homo sapiens
tggggtgaccgcactaggagtcagtcttgggccattggagcaggtggaatggcaacagagaataaagagctgcaaccaaattctgtgaaaacagtttggcmtgcctgggaaggatgtttttcttgcctctccatccttctagcaggtagaacagaagctcaaggagctctgaaccaagttcagggccgtgtcttcagatcc

SEQ ID NO: 181149 - DNA, 201 bp, Homo sapiens
ctggcggcggccctgggctggctgtgcacgctcccgctgtgggactgcgacccaagtaggagtttctctggtgcctgttattctcccgtgcatatggcackgggctgcagacacccttgggttccatgagtggggagggtctgtgtgagagattgtggtgcgtggctggctgggtggctgttctcctgccctgctgggcac

SEQ ID NO: 181150 - DNA, 201 bp, Homo sapiens
tgtgagcctgtagccaaagcaaagcgcctggtgagcagagcagggggcaccaaaagaaggcccggacggtggcccagaggggccgaggccttgtcttagcrctccagggcttcatctgcaaggatgtgggccagcagagtttctgggagagggcagatcgcacatattttcagctttgcaggccacgcagtctatcgcaag

SEQ ID NO: 181151 - DNA, 201 bp, Homo sapiens
ggatcttttcatgggttttccccccaaattgccaactgatacttgacgctaagtctatgaaataaagggggtgatcaggctggattattccatgtttaggsaaaaatatgtgattacaaatcaaggagatggcttttcatgggtggtttatgaactgattttgaagacagttccttaaagagttacagaaacctgccgagc

SEQ ID NO: 181152 - DNA, 201 bp, Homo sapiens
catcacctcgtctggcatcctcagtggccacgtgcatgatcgggggcaggtaggagcttctcttctaaattcctgtgaccttctggtgagcagctctgcartaggcgtctcatgccctcccctcagaatcagctcttaccagtgtgtgacaatggcccttctgagtcagctctgtgagccttcagggggcattcatgtctg

SEQ ID NO: 181153 - DNA, 201 bp, Homo sapiens
ttgcattgtctccccacttctgggctcagtggggtggaggagggcacaggtcattctggagcactggggggcctctcccttctcacgcatcaacagcctgytcacagcaaacccactgtgacactaacatccttcctttcccccgtttacacttcaagctggctactccaagaccctggcatgaggctgaggacaacttac

SEQ ID NO: 181154 - DNA, 201 bp, Homo sapiens
caccgtgcccaaatttagcccttcctttttaaaaaaaatctagctaaatgtgggtggtttcaggtaagttataaaaaaagaactcagaacaaaatgaatgmgactgtggtgagcagcaccggtgacctcccagctctctcacggtgtctgcgtttgtgacggaggaaacttgaagagctcttattggtccacatttcctcc

SEQ ID NO: 181155 - DNA, 201 bp, Homo sapiens
agggagggtgccatctgctcacagtccaaacactcctaatgcacagctttaatcctaggtggcagagatgattctggctgagttattaggtctgtgtagcwtgggccccactgaaactggccctgcagctaggccagaaccctctcggtcatctggaacttccttcagagagaggccagaggttgttctcgccctgtaaca

SEQ ID NO: 181156 - DNA, 201 bp, Homo sapiens
agaaagaggcaaatttgacttctctgggaacctggacctggagtatgtggtgttgctgcttctgtgaactggccaggggcagggcacagaggtggctactkgggtggattagcaaccaaagagaaccagggagggacgtgggtctggagtcctgttctaggactgtgagaggccctgcacccaggacccagacgctcccca

SEQ ID NO: 181157 - DNA, 201 bp, Homo sapiens
ctgtaacacctcagctctatatccttcccatggcaaatcttagggtcttcctccttcccgtcccccacagaattgctagggagctttgcttgcaagcgaayggcttcccagggagcgtacacttcagtacccctcaccccagcttctcagggagcgtacacttcagcacccctcaccccagcttcccagggcttcccctcg

SEQ ID NO: 181158 - DNA, 201 bp, Homo sapiens
gtcattctggagcactggggggcctctcccttctcacgcatcaacagcctgctcacagcaaacccactgtgacactaacatccttcctttcccccgtttayacttcaagctggctactccaagaccctggcatgaggctgaggacaacttacaagggcttcaccgaagcagtggacctttattttgaccacctgatgtcca

SEQ ID NO: 181159 - DNA, 201 bp, Homo sapiens
aagctggaaaggggcaaggtccattctgatggccatgcccagccacggcctggagtagggcactccttcagcttcctacagaaagatcccatcccagcacrggacttgaagcgtctcctgcgataccccattcccgcagactgtctcttggccctggggcctctcagcggttgttgactcagttactcagctgcagagaag

SEQ ID NO: 181160 - DNA, 201 bp, Homo sapiens
gggagaattcaccagcctctctctgaggctgctgggagagtggtgtgagagaacaggtgcctgctcccagcctagctctgcagatctctggtgctcaggcrggagcaattatcccctctggggtggagtcggtaaatgaatgcccaggaaatgttaagtgtgtgtgtatgtggtagggacctaagtaaatgcttgctaaat

SEQ ID NO: 181161 - DNA, 201 bp, Homo sapiens
ctggagtatgtggtgttgctgcttctgtgaactggccaggggcagggcacagaggtggctactggggtggattagcaaccaaagagaaccagggagggacstgggtctggagtcctgttctaggactgtgagaggccctgcacccaggacccagacgctccccagtcgtgacctgtcacccagagggactgggcctgcagc

SEQ ID NO: 181162 - DNA, 201 bp, Homo sapiens
gccctgggtgtcacccttcctcctcaggcccccgatggggctgtgcagaggctctgaggctgggagcagctcaggccaccgacctggtgtgggagtccccrcgctttgggggtggggccgagccgtcccttcgccccaccaggcagctcctccaccctgtgatgcgtgtggcccccacccggcctcatcctgggccgtcgt

SEQ ID NO: 181163 - DNA, 201 bp, Homo sapiens; identical to SEQ ID NO: 135248

SEQ ID NO: 181164 - DNA, 201 bp, Homo sapiens
cccgggttcaagcgattctcctgcctcagcctcccgagtagctagggttacaggtgtgtgccaccacgcgcagctaatttttgtatttttagtaaagacarggtttcaccatgttggctaggctggtctggaactcctgaccttgtgatctgcccacctcggcctcccaaagtgctgggattacaggcatgagccaccgcg

SEQ ID NO: 181165 - DNA, 201 bp, Homo sapiens
aactcactctgcacatcccctttctccctcctccggcagaggttttgaaaaccgtgtctgccattgtggacgccggctcctccatcaacctctacatgttycacggaggcaccaactttggcttcatgaatggagccatgcacttccatgactacaagtcagatgtcaccagctatggcaagtattcatcagcactgctct

SEQ ID NO: 181166 - DNA, 201 bp, Homo sapiens
ctacagttcccctgcacactcagctcctggttttctgtcttttctccgcagtacaagcgtgggggacctatcattgccgtgcaggtggagaatgaatatgrttcctataataaagaccccgcatacatgccctacgtcaagaaggtaagaatcctcttagtgcgtttctttagattccttcctctggagtgtgctataggc

SEQ ID NO: 181167 - DNA, 201 bp, Homo sapiens
ggtgtgaacgcctccaggggccagatcggctggccgaggtgaggggtggcacccgcactagaagccgcatttgcagactaggaattcccagcatcctaccktgctgccattctgtgtcctggttaagaggcggggggccttggatggggaaacggtgtcagggccttttattttgctttattgtgctggtggattgagaag

SEQ ID NO: 181168 - DNA, 201 bp, Homo sapiens
tcatgggcgccaagggacatgaaatggatgtgaggtctagaggaaccgcagtagcaatgtcgcacaaaagagtatagggaaggcggtgagtgcagattgargaggtgattcagtgctagcgaatctttttgtgttacaagcagtcttcccacttccagtttatacagccagtgaacggagtcttcttcaggagagctgcct

SEQ ID NO: 181169 - DNA, 201 bp, Homo sapiens
aatgcctgtcagcgtgctcagcttccccagcgcagggagctggactcagggctgttggcctctggccccccgcccatgccactgtgtgcctgcaaggcccrctgcccagaaacacctctgagggctgctgtgtaggctgatgcagtgtggacatcacccactgccctgagagaggggcccttttggtgcactcctagagga

SEQ ID NO: 181170 - DNA, 201 bp, Homo sapiens
atctctatctgaatgattcacccctgaaaaacttcagaatctatagcctggatatgaagaagagcttctttcagaggtgggtccctgcccagcaccagccyttgcactcacaggtatagtgctgtgtggtggggcccaggggtccctggtgcaccgtggcctggcccgcacccaggtgtgaacgcctccaggggccagatc

SEQ ID NO: 181171 - DNA, 201 bp, Homo sapiens
tgtgaccccactcctcctgagcctgcccacccctccatctcttctgtacgcagccaatcaagtctgaaaagcccatcaacatggagaacctgccagtcaaygggggaaatggacagtccttcgggtacattctctatgagaccagcatcacctcgtctggcatcctcagtggccacgtgcatgatcgggggcaggtaggag

SEQ ID NO: 181172 - DNA, 201 bp, Homo sapiens
gagccagaaagaggcaaatttgacttctctgggaacctggacctggagtatgtggtgttgctgcttctgtgaactggccaggggcagggcacagaggtggytactggggtggattagcaaccaaagagaaccagggagggacgtgggtctggagtcctgttctaggactgtgagaggccctgcacccaggacccagacgct

SEQ ID NO: 181173 - DNA, 201 bp, Homo sapiens
  misc_feature (1)...(201): n = A,T,C or G
gcagtacaagcgtgggggacctatcattgccgtgcaggtggagaatgaatatggttcctataataaagaccccgcatacatgccctacgtcaagaaggtangaatcctcttagtgcgtttctttagattccttcctctggagtgtgctataggctgtggtgtgacatgtgggtctaatatttttctcatattaatacatcc

SEQ ID NO: 181174 - DNA, 201 bp, Homo sapiens
tgggtcccagaatgtgtcaaaagaagagtggccatgctggacacacaggtggctattgcttctctatgctagcaggccaccaggccatggaggcctcttgyagggaggtggaggctgggttgtcccatacatgaggccagttctgagtgggccagagaaactccgctgggctgtggcccctgtcctgttagcactgcacgc

SEQ ID NO: 181175 - DNA, 201 bp, Homo sapiens
ctgccacctctcagcacctcccctggctccaggacagacgtcagctgccctcccagccgggccctctctccacaggtcatcgtttttgaggagacgatggmgggccctgcattacagttcacggaaaccccccacctgggcaggaaccagtacattaagtgagcggtggcaccccctcctgctggtgccagtgggagactg

SEQ ID NO: 181176 - DNA, 201 bp, Homo sapiens
ttaatcccacctgggctcatggattgaactctgcagctctcctgtgcctgagaccagagccccctctgctctttccttccccgcgtgtgggactggacacragccttattcgcccagcagatgatctcgctgtctatccacttccaaaagatttcagcggaaataaacagtcttggcataatatctgcagggaagattacg

SEQ ID NO: 181177 - DNA, 201 bp, Homo sapiens
  misc_feature (1)...(201): n = A,T,C or G
acgagcttggcgagagtcgttggtggcttctgtgcccagagggtctgagagggccgctggggcctccctgggccagaggagtgggttcccagcagaagaancacctcatgcactagggggacaggaaatagagcatcccacctgcccaccctcatggctgtccagacacagctcgctttggtctcctggacctgagagaag

SEQ ID NO: 181178 - DNA, 201 bp, Homo sapiens
agcaggtgctgagagctagcctgttgttcctcttggtgctgggacgcaggagcacatcgggtctgtggatgggagccgggtggggaggacgagcaggcagygacatttgggtccgttgggggtgaccctgttttctgtgttgcaggcatccctctccctcccccacctgaccttcttcccaagatgccgtatgagccctta

SEQ ID NO: 181179 - DNA, 201 bp, Homo sapiens
tcaattctctttcctcccctcaactcccctggtgccgctttctcttttaaacaaatgctttgccagagatgtcgcagatgcctgtcgatggtgttcctcargtcctgtgcctgtccggttctgcctgggtctgatccggctcgtgtggaggcctcgctctcattgttctggcctgcatggtggggggtctgctgcttggct

SEQ ID NO: 181180 - DNA, 201 bp, Homo sapiens
atccactatttccgtgtgcccagggagtactggagggaccgcctgctgaagatgaaggcctgtggcttgaacaccctcaccacgtaggtgctgcccctgtccccccggagcctggttcctaagcagggcgcctggtgtctgcatgcgaaaaaatataagaggaaccggcccaggtcctctgcccagggcgagagagccagg

SEQ ID NO: 181181 - DNA, 201 bp, Homo sapiens
cttcaaagggcttctggcttgaggggaggggtctgggtggagggtcccacccagtgggctgctggagggcagggacagggcagagctatggtatggtgtcrgggagacccaggtgtgcagtcccgctctgccgctacctgaggccaattattgtgacctagaggcaagttatttcacttccccggagccccagctgtcgct

SEQ ID NO: 181182 - DNA, 201 bp, Homo sapiens
gctggattattccatgtttaggcaaaaatatgtgattacaaatcaaggagatggcttttcatgggtggtttatgaactgattttgaagacagttccttaargagttacagaaacctgccgagccttgacaacttccccgaaaggactcctgaaggctgtgggagtgctgcaggctcagcactctgactcgcagaagcagca

SEQ ID NO: 181183 - DNA, 201 bp, Homo sapiens
tgaagggctttatgtgcgcagtccagagatgtctgttttcctgaaggaaggggacttggacacctccctgtttaaatcaagggctctctgaatgcacagcrcaggcctccaggtgtgctccatgtggcgatgtccgatagcacctcactcgtcctctgtgtccatgacccgtgatggacagaactatgcaagtgtttcttg

SEQ ID NO: 181184 - DNA, 201 bp, Homo sapiens
gccaggctggtctcgaactcctggcctcaagtgatccacctgccttagcctcccaaagtgttggggttacaggtgtgagccaccgcgcctgactgtggctsacttctaactggaggtgggaaacggtgtcagggccgcttactttattgtgctggtggattgagaagggtctggggtcacctagaaggtccctggctttga

SEQ ID NO: 181185 - DNA, 201 bp, Homo sapiens
tgccaggaacagtgtgctaagggtgttatgtgcactctcccgtttaattctcccaatagtcatatgagccagtgaaggagacagctatagagtgtataagrcaccctgtaagtagtggcttggggactgcagaacagtctcactacagagctccagctcttagccagttgtgcagtgcagtggcctggcccatgggtggac

SEQ ID NO: 181186 - DNA, 201 bp, Homo sapiens
tgtcttgcctccccaatggctgagatgaagacctgtggcccttccaagcttctccctgttcttcgtgctacatgtgctgtgctggggacaggaatgaccaygacagggcccggtgtcttgcagactatgatgctgtgctgacagaagccggcgattacacggccaagtacatgaagcttcgagacttcttcggctccatct

SEQ ID NO: 181187 - DNA, 201 bp, Homo sapiens
cagggaagctgcggcccgccctgctcagcggcctatgggaattctgaatgcctgtcagcgtgctcagcttccccagcgcagggagctggactcagggctgwtggcctctggccccccgcccatgccactgtgtgcctgcaaggcccgctgcccagaaacacctctgagggctgctgtgtaggctgatgcagtgtggacatc

SEQ ID NO: 181188 - DNA, 201 bp, Homo sapiens
atgtctgttttcctgaaggaaggggacttggacacctccctgtttaaatcaagggctctctgaatgcacagcgcaggcctccaggtgtgctccatgtggcratgtccgatagcacctcactcgtcctctgtgtccatgacccgtgatggacagaactatgcaagtgtttcttgagcacctcctacctgccaggaacagtgt

SEQ ID NO: 181189 - DNA, 201 bp, Homo sapiens
cctcctgccttggcctcccaaagtgctgggattacaggtgcgagctgctgcacaagcgatcctcttgccttggcctcccaaagtgctgggattacaggtgygagctgctgcacaagcgatcctcttgccttggcctcccaaagtgctgggattacaggtgtgagccactgcacaagcgatcctcctgccttggcctcccaa

SEQ ID NO: 181190 - DNA, 201 bp, Homo sapiens
gtgacacctttctgaagctggaggttggtaacgcccttttccctgccagtttctcccacctgcctcccgccttggagggctctgagccaaagccacgagcytggcgagagtcgttggtggcttctgtgcccagagggtctgagagggccgctggggcctccctgggccagaggagtgggttcccagcagaagaaacacctc

SEQ ID NO: 181191 - DNA, 201 bp, Homo sapiens
tgtgttctgtccttaggttcggcctggacaaatggagttccctcccagaaacacccacattacctgctttcttcttgggtagcttgtccatcagctccacsccttgtgacacctttctgaagctggaggttggtaacgcccttttccctgccagtttctcccacctgcctcccgccttggagggctctgagccaaagccac

SEQ ID NO: 181192 - DNA, 201 bp, Homo sapiens
ctcagagacttgaccaggattgacagacaactggaggctcgagctctggggccatgattctggcccacacttcctcctccacccctaatcttctgtgattsgggttttatgagagctagaaggacagagtgacaaagttggccttgaggttttgaggtgggactgggaaagaggagagtagtgaagggaccccggctcatc

SEQ ID NO: 181193 - DNA, 201 bp, Homo sapiens
gggaagctgcggcccgccctgctcagcggcctatgggaattctgaatgcctgtcagcgtgctcagcttccccagcgcagggagctggactcagggctgttrgcctctggccccccgcccatgccactgtgtgcctgcaaggcccgctgcccagaaacacctctgagggctgctgtgtaggctgatgcagtgtggacatcac

SEQ ID NO: 181194 - DNA, 201 bp, Homo sapiens
gtcttcctctaggtcgtggatcatccttggttagttctcagaccaagggtcctccagtgttttgaacacacgagcaggctcttcctcaccgtccgagactygtaactgaggggcttgcaagagttgtctttggaaagatctgtgcatttcagtgttgtctcacttgggtgcgttactgaaaggacagacagatgtaagggc

SEQ ID NO: 181195 - DNA, 201 bp, Homo sapiens
ctgtgtccatgacccgtgatggacagaactatgcaagtgtttcttgagcacctcctacctgccaggaacagtgtgctaagggtgttatgtgcactctcccrtttaattctcccaatagtcatatgagccagtgaaggagacagctatagagtgtataaggcaccctgtaagtagtggcttggggactgcagaacagtctca

SEQ ID NO: 181196 - DNA, 201 bp, Homo sapiens
gctatgttccgtggaacctgcatgagccagaaagaggcaaatttgacttctctgggaacctggacctggagtatgtggtgttgctgcttctgtgaactggycaggggcagggcacagaggtggctactggggtggattagcaaccaaagagaaccagggagggacgtgggtctggagtcctgttctaggactgtgagaggc

SEQ ID NO: 181197 - DNA, 201 bp, Homo sapiens
tttgatgtggcttctcctggagttcagctgccagagtaggcgaggaggctcccaggaggaggtgggagggctggccccgctcccaggcaggctcctgtgasgcagatcaggcgcgatccagctgggtctctgccttcctttcttggcatttcctgagtgcctgcccatgtgtgcagtggagtggggggtgcctctcatact

SEQ ID NO: 181198 - DNA, 201 bp, Homo sapiens
  misc_feature (1)...(201): n = A,T,C or G
ctcatgcactagggggacaggaaatagagcatcccacctgcccaccctcatggctgtccagacacagctcgctttggtctcctggacctgagagaagcacncatgcatgtctccctccacttttgctgtggctctcgtggtagatgaacacccttcccctctgtttcaagggctgggagaagggggttgtattcatcaatg

SEQ ID NO: 181199 - DNA, 201 bp, Homo sapiens
tgactcagttactcagctgcagagaaggagagccccacgagaggagagtgcagctccctcagggacgtcctgctccactcatgcttccctggtgtcggggyggaggcgcccatgtgtgactcaggtgggcaaagagaagcagcagcgtccagcctctgtggtccggaagctcttgggagaattcaccagcctctctctgag

SEQ ID NO: 181200 - DNA, 201 bp, Homo sapiens
  misc_feature (1)...(201): n = A,T,C or G
gaaccttggacgttactggaacattggaccccagaagacgctttacctcccaggtccctggttgagcagcggaatcaaccaggtgggagcttccagccccntcctgttccccatgacgccctgcccacctgccgtcccagggagccttcggtcagggtggaggggcgtgtcagcgggttcttcctccctcctcctcgctgc

SEQ ID NO: 181201 - DNA, 201 bp, Homo sapiens
cccagctcagtggcccccgccccccaccccccacgcccgaacagcaggggcagagcagccctccttcgaagtgtgtccaagtccgcatttgagccttgttytggggcccagcccaacacctggcttgggctcactgtcctgagttgcagtaaagctataaccttgaatcacaccccctctggtgatagtctctggtcatgt

SEQ ID NO: 181202 - DNA, 201 bp, Homo sapiens
gggacaggaatgaccatgacagggcccggtgtcttgcagactatgatgctgtgctgacagaagccggcgattacacggccaagtacatgaagcttcgagayttcttcggctccatctcaggtacccagcagacagcagactcaagttccaactcaggccctcgcttctgctctcagacccctaaagagttacttccttact

SEQ ID NO: 181203 - DNA, 201 bp, Homo sapiens
tgacaaagttggccttgaggttttgaggtgggactgggaaagaggagagtagtgaagggaccccggctcatctcagactttaactcactctgcacatcccytttctccctcctccggcagaggttttgaaaaccgtgtctgccattgtggacgccggctcctccatcaacctctacatgttccacggaggcaccaactttg

SEQ ID NO: 181204 - DNA, 201 bp, Homo sapiens
gacccacccggcagcaccgagtcactgggacccggctgaggggctccctggggccgaccccgagagatgccgagaggcgctttctcgcggaccggagcctycgacggccttcccgtgggggactctgctctagctgggtcacctcgtggggggtgcgcggtcttcagaaaataatgaagacctggaatcgggtggatgggt

SEQ ID NO: 181205 - DNA, 201 bp, Homo sapiens
gcagttgggagaggcattagactcgttttatagaggaagaagctcctgcccacagaactggtgtcactaacccaaggcgacagttctaccaagctgggggycaggattcacatccggatcttcctattccagctagcgtttttgctgtcactgtctcatacagtcctttggaagaactgtgtcctaaaatgtcatttgcaa

SEQ ID NO: 181206 - DNA, 201 bp, Homo sapiens
tctcttcaacgtccaggtaagtccagccccagggaagctgcggcccgccctgctcagcggcctatgggaattctgaatgcctgtcagcgtgctcagcttcsccagcgcagggagctggactcagggctgttggcctctggccccccgcccatgccactgtgtgcctgcaaggcccgctgcccagaaacacctctgagggct

SEQ ID NO: 181207 - DNA, 201 bp, Homo sapiens
tctgcccagctgggatgtacactcccatccccagagcgtagggaagaactggggtccacaagcaaattctgaggggcagctgtggccttctgacagtcatygttagccccgtgttcccggcagggttacaccgtgctgaggatcttggtggagaatcgtgggcgagtcaactatggggagaatattgatgaccagcgcaaa

SEQ ID NO: 181208 - DNA, 201 bp, Homo sapiens
agaggaaccgcagtagcaatgtcgcacaaaagagtatagggaaggcggtgagtgcagattgaggaggtgattcagtgctagcgaatctttttgtgttacawgcagtcttcccacttccagtttatacagccagtgaacggagtcttcttcaggagagctgcctgagaggctctctggccccagttttcagcactcctcttg

SEQ ID NO: 181209 - DNA, 201 bp, Homo sapiens
ccgcgcttagagaacacgcgatgaccacgtggagcctccggcggaggccggcccgcacgctgggactcctgctgctggtcgtcttgggcttcctggtgctycgcaggtgagagagagcttcgcgcagcacctgccggaccccacattccccagccctccgcacctcgggttctctcctcccgcgacccgcgaatcccgagt

SEQ ID NO: 181210 - DNA, 201 bp, Homo sapiens
atgatgcttcgttgtttatgaagctgtaactcgcatggtctcatttactagcagtgaattccttggagaaacccaacacgtatcatcctcattttcttggkgaatccatcccttttaataaggtattgacaacttctctagtaacctaccagaaaattcccatgaagaaacagttgaattcaccagaatttggaattggat

SEQ ID NO: 181211 - DNA, 201 bp, Homo sapiens
gagcagagcagacctgggcactgagcactgagttcagggtttgctgtccggactcttctaaggtggaaaaatcgctttggataaatgaagccgagatacayaggcaacaggaatcctagcagaaagtgttaacataagctccagttcaaaagaaggcaggtgttcctggtttcatcagataaaggtccatcgtggatgaac

SEQ ID NO: 181212 - DNA, 201 bp, Homo sapiens
aagtagaattgctgaccgtaggatagattcattttaaatcttgatagacatttccaaatagtacattttatttctgttggatcaatgtaaaggagattccragcccaactcaatagggccaagtcgattcttgagtcttgtaagagccagtgcatctcttgtatatcttcatagataagtcctatgtggtggattaaaaaa

SEQ ID NO: 181213 - DNA, 201 bp, Homo sapiens
gacagttccttaaagagttacagaaacctgccgagccttgacaacttccccgaaaggactcctgaaggctgtgggagtgctgcaggctcagcactctgacycgcagaagcagcaccgacgacacttgctgaaaggcagagctcgtgtgtctgggttggaagccaggcaggctctcctccttcatctgagaatattctttgt

SEQ ID NO: 181214 - DNA, 201 bp, Homo sapiens
aattactcagagcagcggcagcagatcctcctgcatacagcagggtagcaaggcgtgcaagctgccaagagaaaggctagcggctgcaggcctgttgttgrtcagggatacaggagtccgtgcaggggacccaggcaggtcactatttggggcagcactgtgggcttgagatgggctgagtggtacacccaaaaagtcccc

SEQ ID NO: 181215 - DNA, 201 bp, Homo sapiens
tgttgcccgttttggaattccggggcttcagtaaatataggatgatcaccgagctttccccttactccttgtagctgtttttttgataaagttacattttmttctccaatggggcgtgggcatggtaagctaactggggtcagagcgcctgaccttttactcagccggtcttatgcttcatccaaatcttgttgatgcaga

SEQ ID NO: 181216 - DNA, 201 bp, Homo sapiens
gatgctcagctttcctccctgtgcaaggcttacgcaaaccccagaagaattactcagagcagcggcagcagatcctcctgcatacagcagggtagcaaggygtgcaagctgccaagagaaaggctagcggctgcaggcctgttgttggtcagggatacaggagtccgtgcaggggacccaggcaggtcactatttggggca

SEQ ID NO: 181217 - DNA, 201 bp, Homo sapiens
cttggccaccatcaacttgcagtcaacacacgagctgcagctactgaccacctttctcttcaacgtccaggtaagtccagccccagggaagctgcggcccrccctgctcagcggcctatgggaattctgaatgcctgtcagcgtgctcagcttccccagcgcagggagctggactcagggctgttggcctctggccccccg

SEQ ID NO: 181218 - DNA, 201 bp, Homo sapiens
ctgtcaatgggatgttgaagtcacccactcccatggtgtggctaagtatttttgtaggtctagcagtacttgttttatgaatctaggtgctccaattttakttgcatatatattcaggatagttaagccatgtggttggatcaaaccctttatcattgcatagagcccttctttatccttttttgactactgttgttttaa

SEQ ID NO: 181219 - DNA, 201 bp, Homo sapiens; identical to SEQ ID NO: 32081

SEQ ID NO: 181220 - DNA, 201 bp, Homo sapiens
ttgggaggctgaggcgggcagatcacctgaggccaaaagttcgaggccagcctggccaacatgacgaaagcccatctctactaaagatacgaaaattagcygggcatggtggtgcatgcctgtaatctcagctactcgggaggctgaggcaggggaatcgctttaacctgggaggtggaggttgcggtgagctaagatcgt

SEQ ID NO: 181221 - DNA, 201 bp, Homo sapiens
cttgaacccaggaggcagaggttgcagtaagcagagatcacaccactgcactccagcctgggcgacagagcaaagctccatctcaaaaatacaagaccgascgcggtggctcatgcctgtaataccagcactttgggaggcggccaaggtgggaggatcacgaggtcaggagttcgggaccagcctggacaacatggtgaa

SEQ ID NO: 181222 - DNA, 201 bp, Homo sapiens
tgggaggctgaagcgggcagatcacttgaggtcagtttgagaccagcctggccaacatggtgaaaccccgtctctactaaaaatacaaaaattagcagggygtggtggcacttgcctgtaatcccagctactcaggaggccgaggcagaattgcttgaacccaggaggcagaggttgcagtaagcagagatcacaccactg

SEQ ID NO: 181223 - DNA, 201 bp, Homo sapiens
cagatactgtcagagggagtttactttgctatgactatgcagctggatcttttcccccaagctgggaaagccctgattatccaggttcctagctgagagcyaatgatggcccaagcattttgcgagatacctcactacaaaccctgcagatagccctataaaactacaaaccctgcagatagccctataaagtaaaacacc

SEQ ID NO: 181224 - DNA, 201 bp, Homo sapiens
ctgacccaagttctgtttcccagggcttcctgctgctcctggccagccccagtgcctgctataaactgttccgagagaaacagaaggaaggctatggcgaygctcttctgtttgatgagcttagagcagatcagctcctgtctaatggtaagggaactccctttccacagaacagaactggggtcttcctttttccagggg

SEQ ID NO: 181225 - DNA, 201 bp, Homo sapiens
acacagcacgatgtacctttatgcttggaagagggctggaagtgggtaacacagctttctatggtgtcagatggctgaggacccagggtgggacaggggcrgggaggagcgccatggcatgtcgggaccgttgacagatattacttgcagatactgtcagagggagtttactttgctatgactatgcagctggatcttttc

SEQ ID NO: 181226 - DNA, 201 bp, Homo sapiens
cctggatactcagcctttggggttggggcccgggaactcctggtcatagaagcaccatggaaggtgacatctgctgagcatgaaccacatgacaaagactrtcacctcagagctggcaaataaattgggcatccctgtcccaaagatcaggcaattgaggaacaaaggtaatgtaacctggagagggtcacaggcagaaag

SEQ ID NO: 181227 - DNA, 201 bp, Homo sapiens
aagatgtgctccaacaggccccagtccccatccctccccactgtgttcccctgcaaaggtcagtggtcatttggcgccatgcttgcactactgctgtaggraaggagaggaaatgctccctgtactggccaaaggcaagaaaacaaggtaagtgggctctgtgcctcagtttcctcaccagcgcaagtgggtaagagttgt

SEQ ID NO: 181228 - DNA, 201 bp, Homo sapiens
tgcctaagggtcctgcaggaaatcttggcagcttgacacccttctctcctgttacctcccaggcagcaccatcctgatagcacctggagaagcaccccccsagccctggctgttagcagacacctgcagcagagagctgggtgtacttggcttgcacagtgttataaacgtctctaagttaggcactgacaatttactcaa

SEQ ID NO: 181229 - DNA, 201 bp, Homo sapiens
tgcaaaagtgttcagccaagtgacgtttactaaatagccaataaagggctggtgggtgtgaatgcatcttggcagtgacctccttgtttggggaggggatragtgacaactgaggacaaggctgagctgagatacctatggccatgctggcctgcttgtgtggggggagagacttggctacatcagttgctgtccttcccc

SEQ ID NO: 181230 - DNA, 201 bp, Homo sapiens
gtccttgatcctcgacacacctcaggccgccgatctcgatgagttccccatgaagtactcactggtgtggaacttggtttggctaatctgagctcagtccmatctctcaggcctggggcctgcctagaaataatggggcaccaagtggggagagggcccaggtggcctctgaggggggaggggacgtggaagtctacctga

SEQ ID NO: 181231 - DNA, 201 bp, Homo sapiens
acaatctgtcttcctctccattccaggatgagatggccttctgctacacccaggctccccacaagacaacgtccttgatcctcgacacacctcaggccgcygatctcgatgagttccccatgaagtactcactggtgtggaacttggtttggctaatctgagctcagtcccatctctcaggcctggggcctgcctagaaat

SEQ ID NO: 181232 - DNA, 201 bp, Homo sapiens; identical to SEQ ID NO: 32089

SEQ ID NO: 181233 - DNA, 201 bp, Homo sapiens
cttggtttggctaatctgagctcagtcccatctctcaggcctggggcctgcctagaaataatggggcaccaagtggggagagggcccaggtggcctctgaggggggaggggacgtggaagtctacctgagagcctggatttagggataagactggggcctaaagccatcccctactaacaccccttccctggctcggtctc

SEQ ID NO: 181234 - DNA, 201 bp, Homo sapiens
atggtcgttcccctggccccgcctgcttcccatagcacctcagcaggtcacacacactggaccatttcttaaactgaagacatttgagcttttgattcacrtgggagactaaagatgagaataaaccatttattctttgattccagggtttaaactgaaacaagtgaaatttggtccaccaggatgtcatttccaagagat

SEQ ID NO: 181235 - DNA, 201 bp, Homo sapiens; identical to SEQ ID NO: 32091

SEQ ID NO: 181236 - DNA, 201 bp, Homo sapiens
tgagtcctcccagtctggagagtgggctccattgctattgtctggtgtgaacaccagctaagctggatcctgagaccctccagcttggccatcccgcgtgrcgcttccgcaggtccccgcccttcaatgtggggctggggcaggtgttcggggcaaagcagggctgggtaggaaccggcaagtccccttccccattcgcca

SEQ ID NO: 181237 - DNA, 201 bp, Homo sapiens
tccccagctgttctgcttggagaagctgactaacatcccctctgaccagcagcccaagaggtcctttgcgaggccatacttccctgacctggtgaggggcractgcgcatccctgggtgggggagggcctgtccaggcaacactggctgccacctcactgtgctggactgcagatatggtggacagcagataacggtacct

SEQ ID NO: 181238 - DNA, 201 bp, Homo sapiens
cacctgtagttctagtacgttgggaggctgaggtgggaagatcacttgaactcaggagttggagagcagctagggcaacatagtgagaccctgcaactttaaaaaaaagaaaaaaaaaatgctggggccagggtgcagtggctcatgcccgtaatctcagcactttgggaggctgaggtgggtggatcacttgaagtctga

SEQ ID NO: 181239 - DNA, 201 bp, Homo sapiens
gaggcaggacaatttcttgagccccggaggtggaggctacaatgagccactgcactctagcctgggtaacaaaccaagaccttgtctgataaaccaaaccaaaaaaaaaaaaaaacattctggggctgggcgtggtgtcttacacctgtaatcccagcactttgggaggcccaggcaggcagatcacttgaggtcaggact

SEQ ID NO: 181240 - DNA, 201 bp, Homo sapiens
ccaagccttttgggccccaaatcaaggggacctgctgcctggaagaaaagatttgctgcttgctggagcccctgggcttcaagtgcaccttcatcaatgaytttgactgttacctgacagaggtcggagacatctgtgcctgtgccaacatccgccgggtgccctttgccttcaaatggtggaagatggtaccttagaccc

SEQ ID NO: 181241 - DNA, 201 bp, Homo sapiens
aaaactacaaaccctgcagatagccctataaagtaaaacacctcttacatatgagggtagtgaggcacacagtaaaaccgctagcccaggacaatcatttgggaaaatgagtctgaactcccaagttcatgtgttgctcattatactcaagctgcctggggtccatttcccggaaaatgacatagctccgcagcctccttg

SEQ ID NO: 181242 - DNA, 201 bp, Homo sapiens
ggcatggtggtgcatgcctgtaatctcagctactcgggaggctgaggcaggggaatcgctttaacctgggaggtggaggttgcggtgagctaagatcgtgycattgcactccagcctgggccacagagcaagactccatctcaaaaaataataaaggctgtaggaacccagaaaggggctgggggtattaggtttttctag

SEQ ID NO: 181243 - DNA, 201 bp, Homo sapiens
gcagacacggggccaggcgcagtggctcatgcctgcaatcccagcactttgggaggctgaggcaggtggatcatttgaggccagggcttcaaggccagccwggccaacatggggaaaccccgtctctactaaaaatgcaaaaattagtcggggcattgtggcatgcacctgtaatcccagctacttgggaggctgagtggc

SEQ ID NO: 181244 - DNA, 201 bp, Homo sapiens
aggacaatagcaggaggcagcagctttgcaggtgagaaaaccccagagccaaaggccgggcacggtggctcatgcctgtaatcctagcacttcgggaggcygaggtagtgggaggaatcacctgagttcaagagttcaagaccagtctggtcaacatggtgaaacctcatctctactaaaaatacaaagaaattagccggg

SEQ ID NO: 181245 - DNA, 201 bp, Homo sapiens
ctgggttgagaagtgccagacgctgtctagccatgggatcctggactaaagactaggccattcctgagcccctacttccccatgtgaaaagggaactgccyatttcgtaaggctggtatgaagtgtgaggctcctggcacacagcaagtgatggggatggtagtggtgtcaggccatcacctaccttcagtatggaaggaa

SEQ ID NO: 181246 - DNA, 201 bp, Homo sapiens
ctacccgccccactgtgtccctcagccaaagccattttctctctgcaccccacttccctctataacacaggaataaaaaacagccttcccttcaagactgyctgtgtggccgggcgtggtggctcacgcctgtaatcccagcactttgggaggctgaagcgggcagatcacttgaggtcagtttgagaccagcctggccaa

SEQ ID NO: 181247 - DNA, 201 bp, Homo sapiens
caagattgcaccactggactccagcctgggcaacagcaagactgtctcccaaaaaaacaaacaaaacaaaacaaaaaatgctgggtgtggtgccacatgcytgtagtctcagccactcaggaggctgaggcaggacaatttcttgagccccggaggtggaggctacaatgagccactgcactctagcctgggtaacaaacc

SEQ ID NO: 181248 - DNA, 201 bp, Homo sapiens
ctctctgcaccccacttccctctataacacaggaataaaaaacagccttcccttcaagactgtctgtgtggccgggcgtggtggctcacgcctgtaatccyagcactttgggaggctgaagcgggcagatcacttgaggtcagtttgagaccagcctggccaacatggtgaaaccccgtctctactaaaaatacaaaaatt

SEQ ID NO: 181249 - DNA, 201 bp, Homo sapiens
acaaaaattagcagggcgtggtggcacttgcctgtaatcccagctactcaggaggccgaggcagaattgcttgaacccaggaggcagaggttgcagtaagmagagatcacaccactgcactccagcctgggcgacagagcaaagctccatctcaaaaatacaagaccgagcgcggtggctcatgcctgtaataccagcact

SEQ ID NO: 181250 - DNA, 201 bp, Homo sapiens
ggaggctggagagtccaggcaacagaaccctttcttccctgtctgccccgaccgaccctcggacccagtaggatggcaaatgccgccagcttgaacccctrtggggaaaagatgcaaaagtgttcagccaagtgacgtttactaaatagccaataaagggctggtgggtgtgaatgcatcttggcagtgacctccttgttt

SEQ ID NO: 181251 - DNA, 201 bp, Homo sapiens
gatggcccactgtcaccatgcaacagcatgattctttgcccagtagaggaggctggagagtccaggcaacagaaccctttcttccctgtctgccccgaccraccctcggacccagtaggatggcaaatgccgccagcttgaacccctatggggaaaagatgcaaaagtgttcagccaagtgacgtttactaaatagccaat

SEQ ID NO: 181252 - DNA, 201 bp, Homo sapiens
tgtgggtgccagggcttaggaggtacacatataaggagttaagaaaaacagagctccgttccaaccgaaaaagaaatgcaaaatccaagacagtagacaakgttgtttatttaaaatgtttactccaagaaatatatatataaaaaaaataataagacaattacagcactaaaccaggcaccttcgaccaaatcacaacct

SEQ ID NO: 181253 - DNA, 201 bp, Homo sapiens
gacatctgtgcctgtgccaacatccgccgggtgccctttgccttcaaatggtggaagatggtaccttagacccaggccctggagctgccagctctgccccwgcgtggatggcccactgtcaccatgcaacagcatgattctttgcccagtagaggaggctggagagtccaggcaacagaaccctttcttccctgtctgccc

SEQ ID NO: 181254 - DNA, 201 bp, Homo sapiens
agaatgtaagccagtaaggcttgttaattgattctttacaaaagaagaaaggaagaatctggatgctcaagtctttttcgcccagactggagtgcagtggygcgatctcagctccactgcagcctctgcctcctcctgagtagctgggattacaggcatgagccaccatgcctggctaactttttggttttgttttaagta

SEQ ID NO: 181255 - DNA, 201 bp, Homo sapiens
agctgttctgcttggagaagctgactaacatcccctctgaccagcagcccaagaggtcctttgcgaggccatacttccctgacctggtgaggggcgactgsgcatccctgggtgggggagggcctgtccaggcaacactggctgccacctcactgtgctggactgcagatatggtggacagcagataacggtacctatgag

SEQ ID NO: 181256 - DNA, 201 bp, Homo sapiens
cacagtggcatagggtggagacacggtggcttccttagtggcaccagcgcagagctgactcagaatgtaagccagtaaggcttgttaattgattctttacraaagaagaaaggaagaatctggatgctcaagtctttttcgcccagactggagtgcagtggtgcgatctcagctccactgcagcctctgcctcctcctgag

SEQ ID NO: 181257 - DNA, 201 bp, Homo sapiens
gggcctgaaggcttggaggttccccaggcagttactatgggccaggccctgggccaggtgctttaggagcctcagtgagctgcgcccccagtctaaaaggrtgaacctgtgaggcccacttcggatggggtgctatgcaacccagagtcgaggttgccgcgcatctgccagcagcgaggccttgagcaacctacctcaggg

SEQ ID NO: 181258 - DNA, 201 bp, Homo sapiens
tacaacacaagtagaccagatgttctgggatggcctggaggctgtttggatgtatttgaagggggactcacttagtacataggtggccccaagtggggggmaaatgggtgttaacaatgctagtgcctggatttattcagggcatgttggattaagtatctagggactgggactttgtgggtctcctggttacattaagga

SEQ ID NO: 181259 - DNA, 201 bp, Homo sapiens
ctggaaggcatcacagtggcatagggtggagacacggtggcttccttagtggcaccagcgcagagctgactcagaatgtaagccagtaaggcttgttaatkgattctttacaaaagaagaaaggaagaatctggatgctcaagtctttttcgcccagactggagtgcagtggtgcgatctcagctccactgcagcctctgc

SEQ ID NO: 181260 - DNA, 201 bp, Homo sapiens
ccagagagcaagtgtacagggcctgaaggcttggaggttccccaggcagttactatgggccaggccctgggccaggtgctttaggagcctcagtgagctgygcccccagtctaaaagggtgaacctgtgaggcccacttcggatggggtgctatgcaacccagagtcgaggttgccgcgcatctgccagcagcgaggcctt

SEQ ID NO: 181261 - DNA, 201 bp, Homo sapiens
tgaggcacacagtaaaaccgctagcccaggacaatcatttgggaaaatgagtctgaactcccaagttcatgtgttgctcattatactcaagctgcctgggktccatttcccggaaaatgacatagctccgcagcctccttgaagaagccggctcctcacttccgagaagctgagtatcagactcaaatagacgagggacta

SEQ ID NO: 181262 - DNA, 201 bp, Homo sapiens
gaagatattggacctgagggtgtgatccctggagataggccagtcctctcgccatggtcactggcccaggaatgcacccaggtggctgggcctggcccgartgtgcccagctctgggcagtgctgccattccctgaccagcaggcctgctgcccgcttcttcctacaggaagggaagccaaaaccatcgaccaacttctgg

SEQ ID NO: 181263 - DNA, 201 bp, Homo sapiens
tgagctgcgcccccagtctaaaagggtgaacctgtgaggcccacttcggatggggtgctatgcaacccagagtcgaggttgccgcgcatctgccagcagcraggccttgagcaacctacctcagggtgggtcttcctgtccgctatctccagggtccagggcagcagtgtctgatacatagaggtacatcagcccttaaaa

SEQ ID NO: 181264 - DNA, 201 bp, Homo sapiens
gagtttactttgctatgactatgcagctggatcttttcccccaagctgggaaagccctgattatccaggttcctagctgagagccaatgatggcccaagcrttttgcgagatacctcactacaaaccctgcagatagccctataaaactacaaaccctgcagatagccctataaagtaaaacacctcttacatatgagggt

SEQ ID NO: 181265 - DNA, 201 bp, Homo sapiens; identical to SEQ ID NO: 32087

SEQ ID NO: 181266 - DNA, 201 bp, Homo sapiens
acattaaaaaaaaaaacctccagagccgcccgtggggagcctgccttctctgccccccgacttcaggaggcttctcccatcccccagccacaggcctggcrggccccggctgctctgtattggccacctacactgcccctggaagggcaggtgaaggtctcctggatgttctcgaagctctcaagacagcccctccagggt

SEQ ID NO: 181267 - DNA, 201 bp, Homo sapiens
cccgcctgactctggcacagcaccaagtctagagccccggtcagccttcggttctagagctctgtcctctgcagatgagtgatcatcacatgctaggcacrccatcctgagcaccagagataaactggaacatatgctgtcccatgttagcaaggatagaacttttaagtgctatgaaatttagacaatgagatgatacag

SEQ ID NO: 181268 - DNA, 201 bp, Homo sapiens; identical to SEQ ID NO: 32090

SEQ ID NO: 181269 - DNA, 201 bp, Homo sapiens
ctgactctgtcccactcccctagcatttcatggggcagagttgggggatccactcacttcaaccagtgcagtttaaacctggaagctcctctggggccacmtgtctcctggcaccaccttctgtgggtgccagggcttaggaggtacacatataaggagttaagaaaaacagagctccgttccaaccgaaaaagaaatgca

SEQ ID NO: 181270 - DNA, 201 bp, Homo sapiens; identical to SEQ ID NO: 32092

SEQ ID NO: 181271 - DNA, 201 bp, Homo sapiens
gggtgtcttctaacttgatcagctcagtgtggtccggcaggggtgagtaacggtaagaagctgctttgaggaggagttgagatacaaaagatgcgcagcastcaactgacaaagcgggggtggggagagtgtttcagtggaggcagcagccatgtgttgtatccaggtgacaagaggccagaataatcgaaacgtagaaac

SEQ ID NO: 181272 - DNA, 201 bp, Homo sapiens
tgagtggctgagttgagagaatcacttgaacccaggaggcagaggctccaagatcatgccaccgcactccagcctgggcaacagagtgagacttcgtctcaaaaaaaaaaagaacaaaaatcacaggaaatgctggcggggtggggggtgggtgggagagtgctggggacccagtgtgggggcagctgagggttttggaga

SEQ ID NO: 181273 - DNA, 201 bp, Homo sapiens
catccctgcctactgagtcctcccagtctggagagtgggctccattgctattgtctggtgtgaacaccagctaagctggatcctgagaccctccagcttgrccatcccgcgtggcgcttccgcaggtccccgcccttcaatgtggggctggggcaggtgttcggggcaaagcagggctgggtaggaaccggcaagtcccct

SEQ ID NO: 181274 - DNA, 201 bp, Homo sapiens
ccgggcacggtggctcatgcctgtaatcctagcacttcgggaggccgaggtagtgggaggaatcacctgagttcaagagttcaagaccagtctggtcaacmtggtgaaacctcatctctactaaaaatacaaagaaattagccgggtgtggtggcctgtgcctgtaatcttagctattcaggaggctgaggcaggagaatt

SEQ ID NO: 181275 - DNA, 201 bp, Homo sapiens
acacaagtagaccagatgttctgggatggcctggaggctgtttggatgtatttgaagggggactcacttagtacataggtggccccaagtggggggcaaaygggtgttaacaatgctagtgcctggatttattcagggcatgttggattaagtatctagggactgggactttgtgggtctcctggttacattaaggaaaca

SEQ ID NO: 181276 - DNA, 201 bp, Homo sapiens
gttttggggtgatttggacaaattaggttagtttagcaaagctctgaagtagcagaagcttctcccctggactactgattgaacacagaacaagagatgcrcgtggcgtcagactaagtcttagagagatgcaggccagtctcctcccacagggccttgggactggcaggacagacactgctacatgccctccaagggcag

SEQ ID NO: 181277 - DNA, 201 bp, Homo sapiens; identical to SEQ ID NO: 32093

SEQ ID NO: 181278 - DNA, 201 bp, Homo sapiens
ggctggagtgcagtggcgtgatctccgctcactgcaaccactgcctcccggactcaagcaattctcctgcctcagcctcctgagtagctggaattacagamacatgccaccacacctggctcatttttgtatttttagtagagatggaatttcaccatgttggccaggctggtctcgaacttctgacctcagaggatctgc

SEQ ID NO: 181279 - DNA, 201 bp, Homo sapiens
gcagtaagcagagatcacaccactgcactccagcctgggcgacagagcaaagctccatctcaaaaatacaagaccgagcgcggtggctcatgcctgtaatmccagcactttgggaggcggccaaggtgggaggatcacgaggtcaggagttcgggaccagcctggacaacatggtgaaaccccatctctactaaaaataca

SEQ ID NO: 181280 - DNA, 201 bp, Homo sapiens
aggccctgagcgcagccgaggccccagcccagacagtatgtatgtgtgtttgcagaccagcggccagtgacgaggagctcaccaggctgaagagcaagcgkgcccgggtggcccagatgaagaggacctgggcagggcagggggcttctctgaagctcggcgacctcatggtgctgctgggtttgtgccctgcccgttgga

SEQ ID NO: 181281 - DNA, 201 bp, Homo sapiens
gcagagcccagttcctgacccgttcagggccctctctcccttttgctgggcctgagctgcctcaagcgtggggcctcccagctgtggctccagagctcctstcagagcactgccaccaccacctccatctccagggtgaagcaactgcaggagaaccggctgagctgccccatcactgcgctgggccggacaatggccaca

SEQ ID NO: 181282 - DNA, 201 bp, Homo sapiens
cccaagaaccaggagcatcgagggcagggaagacccagctcacgcagtcagcagagcccgaagtcacacctcctctgcctacttgggccctcagtggatcrgatgtggcccacacccacattgggggagggcagtagctttatgccagtcaccaattcaaagaaacacccagaaataaggcttaattagctatctgggcat

SEQ ID NO: 181283 - DNA, 201 bp, Homo sapiens
gagtacagtggcaccatctggctcaccccaacctttgcctcctgggttcaagtgattctcctgcctcagcctcccgagtagctgggactacagatgcacgycaccgtgcctggctaatttttgtatttttagtagagatgggggtttccccatgttggccaggctggtcttgaactcctgacctcaagtgatccacccacc

SEQ ID NO: 181284 - DNA, 201 bp, Homo sapiens
agcccagttcctgacccgttcagggccctctctcccttttgctgggcctgagctgcctcaagcgtggggcctcccagctgtggctccagagctcctctcasagcactgccaccaccacctccatctccagggtgaagcaactgcaggagaaccggctgagctgccccatcactgcgctgggccggacaatggccacattcc

SEQ ID NO: 181285 - DNA, 201 bp, Homo sapiens
agtctcgctatgtcacccaggctggagtgcagtggtgcaatctcagctcactgcaacctctgcctcctgggttcaagcagttctcctgcctcagcctcccragtagctggaatgataggcatgcaccaccatgtgcatataatttgtttgtttgtttgtttgttttgtttttgagactgagtctcactgttgtcggcctgg

SEQ ID NO: 181286 - DNA, 201 bp, Homo sapiens
ctgtggcctggacccctcttccctcccacatgtcccccagacccttctcatgcagaaggatgaggccttgccctggactctacctcagctcagcagcacaratacttcctgccaccaacacccagggaagcttgagaggaaggaaatgtcctccaacatatggcaggaggacaatgcgtagagagggcagcgtggacactg

SEQ ID NO: 181287 - DNA, 201 bp, Homo sapiens
tcccggagctctgagaggggctccccagggcctctttctccatctccctgccccagcctgacacgggcctgctgagttggtgggtgccaccctggggcgcrgcttcatgcagtaggcctgtctcaccctcccggcggggagaggggcctgcgctccacatgtgccatgagcctggccacattcaaggccctgaaaatcaac

SEQ ID NO: 181288 - DNA, 201 bp, Homo sapiens
tgcgtttggtgaggggcagcaccagactcggagtggggtaccagcctcaggctgagggaaaggggaggggccgctggggcttgcccttgagcgtcttcacrgtccctggcctcagaagctgcgtcccaagaactttccatttgtaaatcggaaccccagctgctgcctccctagtcagcccacttgggccttggggaagca

SEQ ID NO: 181289 - DNA, 201 bp, Homo sapiens
tccctggaaccttgcctctcagagcatggcttggcaggtgcttttgctaagcaaatgtttgtgagtgactgatggataacagaggggcccattctttccayaggtggcatcctggtgttcctgacggggcaggctgaggtgcatgcgctgtgccgcaggctcaggaaggctttcccaccctccagagcccggccacaaggt

SEQ ID NO: 181290 - DNA, 201 bp, Homo sapiens
cccagtacgggctcagcctgaccccaccacaatgctgccaggacacgaggagtggagtcaggctcccgggatccatgccaggggtttggaggaggagattrtgcagcacaggggttcagatccggttcagggcagcagagacaagagagcccctgggaacctctcagcagttcccccaggcttggcctggctggtcccaag

SEQ ID NO: 181291 - DNA, 201 bp, Homo sapiens
aagccgggggcagtggagggaggacacagggctagtgagggcttcacccgaaaagtgacctctgagctcaagtggaaggctgaatgagggagggagtgagyggcgtgcattgcagagcgaggagaagtctgactggaggagagcaatgcaaaggtcctgaggcgggcgtctgcctggtgccttttttcttttggtaacaag

SEQ ID NO: 181292 - DNA, 201 bp, Homo sapiens
gtgaggtggggtccggaaggcacgggggtgaggcagacagggacggtcactgtggggcaagagaggggcctgtgctgggtgtcctgcctcccacagaggtkctttggccactccttagcttctgggtttggggtttcgtagcagcaaaggcagcaagagcttgaagcagagctcaccatgaggccattaggcattgctgag

SEQ ID NO: 181293 - DNA, 201 bp, Homo sapiens
cagctcctgcctctgagcttctctctggaagcatcagcacctttgccatcccccacctcacccccgaataaatggccaccactgagtggccatgccttgarcaacaaagggcagtgtgctggcgaccacgccggccacagacgcctttctccccaacctgcccctctcccagaaaaggacgacgatcagaaagactcggtg

SEQ ID NO: 181294 - DNA, 201 bp, Homo sapiens
ggccacgctgcgggtggaggacttcacccagaacccacggctcttcgccaagccgccgccggtcatcaaggtaacacagggtcccatgtcctctgtgagcytggatggcacaaggacgccctggtgtcgggagccccctgagagacctcacttggtcacaggggggattgacagcagcttggagggggtgttagaaacctt

SEQ ID NO: 181295 - DNA, 201 bp, Homo sapiens
ttctggcaggaagagagaattatgtggcctgccccgggttgcatggcccatgggtgtggaccggggcttccatgcgagggcacctgtcttcctgcacgtgmcacgtcctcacacccaggatccctgcagcccaggtgtctatgtcttgttcgccgtaggtgctgccccagatcaacttggatcattactcggtgttaccgg

SEQ ID NO: 181296 - DNA, 201 bp, Homo sapiens
cagcagagagtaccccagtacgggctcagcctgaccccaccacaatgctgccaggacacgaggagtggagtcaggctcccgggatccatgccaggggtttrgaggaggagattgtgcagcacaggggttcagatccggttcagggcagcagagacaagagagcccctgggaacctctcagcagttcccccaggcttggcct

SEQ ID NO: 181297 - DNA, 201 bp, Homo sapiens
ctcccgagtagctgggactacagatgcacgccaccgtgcctggctaatttttgtatttttagtagagatgggggtttccccatgttggccaggctggtctygaactcctgacctcaagtgatccacccaccccagccttccaaagtgctgagattacaggtgtgtgccgccacacccagccagtggaataatagctaatta

SEQ ID NO: 181298 - DNA, 201 bp, Homo sapiens
gtgattctcctgcctcagcctcccgagtagctgggactacagatgcacgccaccgtgcctggctaatttttgtatttttagtagagatgggggtttccccrtgttggccaggctggtcttgaactcctgacctcaagtgatccacccaccccagccttccaaagtgctgagattacaggtgtgtgccgccacacccagcca

SEQ ID NO: 181299 - DNA, 201 bp, Homo sapiens
tgcaccatcccctgttttaagtactctacatggaataataccttttcttttggttttgagacggagtctcgctctgtcgcccaggctggagtacagtggcrccatctggctcaccccaacctttgcctcctgggttcaagtgattctcctgcctcagcctcccgagtagctgggactacagatgcacgccaccgtgcctgg

SEQ ID NO: 181300 - DNA, 201 bp, Homo sapiens
cccagatgggatggcttgtccttgctacgtctccagcacaccagcctggctggctttgtccttgagcctccattccacgatttcttttctgattctggtgktttcctgccatcccttccccgaatcctaggtctttaagcctccaccggaggggactcggttgtgtgttgtggccaccaatgtggccgagacgtcgcttac

SEQ ID NO: 181301 - DNA, 201 bp, Homo sapiens
aaggacaccagtcattgtattcagggcccaccctactccaggatgacctctccttaactcatgacatttgcagtgaccctctttccatataaggtcacacrctgatgttctgggtggacatgaatctgggataggggagacactgggcagctcccacagagccgccaggtgtcagtgggaggcatcctgccctcctggccc

SEQ ID NO: 181302 - DNA, 201 bp, Homo sapiens; identical to SEQ ID NO: 32124

SEQ ID NO: 181303 - DNA, 201 bp, Homo sapiens
cctccagagcccggccacaaggtaaagaggacgccccgaccagcactctgccctgagcagctgggcttggcctcgcgctccctggctggggtgcagctccygcctctgagcttctctctggaagcatcagcacctttgccatcccccacctcacccccgaataaatggccaccactgagtggccatgccttgaacaacaaa

SEQ ID NO: 181304 - DNA, 201 bp, Homo sapiens
atgtggggctttgtcccaagggagaaggagggaatgggggggtggctgcaatcctgcctgctgggggctttgggtcctgctggtggcctctggggaggggytgagacaagcaggtggctgaggctagagcactgagcatggttgggactttctaggaggtcagggcagagctggctccgggccttgccaccaccgacctca

SEQ ID NO: 181305 - DNA, 201 bp, Homo sapiens
ggacgccccgaccagcactctgccctgagcagctgggcttggcctcgcgctccctggctggggtgcagctcctgcctctgagcttctctctggaagcatcrgcacctttgccatcccccacctcacccccgaataaatggccaccactgagtggccatgccttgaacaacaaagggcagtgtgctggcgaccacgccggcc

SEQ ID NO: 181306 - DNA, 201 bp, Homo sapiens
cagctgggcttggcctcgcgctccctggctggggtgcagctcctgcctctgagcttctctctggaagcatcagcacctttgccatcccccacctcaccccsgaataaatggccaccactgagtggccatgccttgaacaacaaagggcagtgtgctggcgaccacgccggccacagacgcctttctccccaacctgcccct

SEQ ID NO: 181307 - DNA, 201 bp, Homo sapiens
tcctcctccagctgcagccccaccactgcccagggccctggctaagcccgccgtcttcatccccgtgaaccgctccccggaaatgcaggttcgccaccccrtgtttgtgattaagaatctaggttagcgggcaaggggcgcacagagggcgtcctggtgaagtggggcaagggcatcccttctctgtgcctccatgtcccc

SEQ ID NO: 181308 - DNA, 201 bp, Homo sapiens
cctctgagcttctctctggaagcatcagcacctttgccatcccccacctcacccccgaataaatggccaccactgagtggccatgccttgaacaacaaagrgcagtgtgctggcgaccacgccggccacagacgcctttctccccaacctgcccctctcccagaaaaggacgacgatcagaaagactcggtggaggaaatg

SEQ ID NO: 181309 - DNA, 201 bp, Homo sapiens
gactgttcctcctcctccagctgcagccccaccactgcccagggccctggctaagcccgccgtcttcatccccgtgaaccgctccccggaaatgcaggttygccaccccgtgtttgtgattaagaatctaggttagcgggcaaggggcgcacagagggcgtcctggtgaagtggggcaagggcatcccttctctgtgcctc

SEQ ID NO: 181310 - DNA, 201 bp, Homo sapiens
gccttcctgggcgtcccacaggtggaatccaggcagttcccagtgactgtgcatttcaacaagcggacaccgctggaagactacagtggcgagtgcttccrgaaggtctgcaagatccaccggatgctgcccgcaggtgaggccctggccaggtcaggggaaagaagcctcccttcctaaaccctcgctgaaagcacgagt

SEQ ID NO: 181311 - DNA, 201 bp, Homo sapiens
gcctcccaagtagctgggattacaggcatgcaccaccaagcccggctaattttgtatttttagtagagacggggtttctccatgttggtcaggctggtctygaactcccaaccttgggtgatctgcccgcctcggcctcccaaagtgctgggattacaggcgtgagccaccgcgcccgactggtttgtgtcgttttttaag

SEQ ID NO: 181312 - DNA, 201 bp, Homo sapiens
tggcacaaggacgccctggtgtcgggagccccctgagagacctcacttggtcacaggggggattgacagcagcttggagggggtgttagaaaccttgattyggaataatggggaaagggaaggcagccctgggccgaagctcttgccccccccactccccatgccttcctgggcgtcccacaggtggaatccaggcagttc

SEQ ID NO: 181313 - DNA, 201 bp, Homo sapiens
cccacatctcatgtccatttcccacctgccctcccactctgcgggcatctgagttgagcagctcacctctgatgaagagcagctgcccttcctctaacacwgtctcctcaagtgggagttctgggacgtgaagcggcccttgggtcttaggctggaagggtgggcctcaccccggacctccccccaggacttcctgctgct

SEQ ID NO: 181314 - DNA, 201 bp, Homo sapiens
agaaacgctactacgaccgcgtcactggcgtatcctccttccgtgtcacctgggtctcccaggcatcagctgaccagcgagcgggcagagcaggacggacrgagcccggccactgctacaggtgggtcacccaggctcctcctcagggacgttggtgccgccttgcaatagccactgaggaacaagggaaggatgctgacc

SEQ ID NO: 181315 - DNA, 201 bp, Homo sapiens
tggtttggtttgtgtcgtgtttttttttgttttttttttttgagacagagtcttgctttgtcacccaggctggagtgcaatggcgtgatctcagcttaccrcaacctccacctcccaggttcaagcgattctcctgcctcagcctcccaagtagctgggattacaggcatgcaccaccaagcccggctaattttgtatttt

SEQ ID NO: 181316 - DNA, 201 bp, Homo sapiens
tccccagcccttttgctggctttcagatactcacactatttttttttttttttttttttttgagatggagtttcactcttgtcacccaggctggaatgcartggcgtgatctcgactcactgcaacctccacctcctacgttgaagcaattctcctgccttagcctcccaaatagctgggattactggtgtgcgccaccac

SEQ ID NO: 181317 - DNA, 201 bp, Homo sapiens
cccaggatacggaggttgcagtgagccaagatcgcaccactgtactctagcctgggtgagagagcgagactccatctcaaaaaaaaaaaaaaaaaaaaaaagttccacagacaggctgggagttgaggcagatcccctaacatctctgtgccttcgttttcacatctgcagaatgggaccagtagcacacgttgagcagcc

SEQ ID NO: 181318 - DNA, 201 bp, Homo sapiens
cgacgcccccctccgtggaagcccttcttgccgccgaggagctgttgatcgcactgggtgccctgcaaccgccccagaaagcagaaaggtaaggccaagaratgcagagcccagttcctgacccgttcagggccctctctcccttttgctgggcctgagctgcctcaagcgtggggcctcccagctgtggctccagagctc

SEQ ID NO: 181319 - DNA, 201 bp, Homo sapiens
gagacatagcagaaagggagatttttagaaaatccctgagtttacctgctgtataggaggagacaggcaaagaataaacatatagaaatttatgtggctayagtgagcagataaaacagaagaggccattgggtgggttgcagcatcccatagagttgctggagaagacatcactctgttagagtcaagatctgaaggaga

SEQ ID NO: 181320 - DNA, 201 bp, Homo sapiens
tcccaagctcaggcaactcccaaactcaggcaatctgcccactttggcctcctaaagtgctgggattacaggcatgagcacatgactagccttcactgctkttttaaacgttcttgtccctctcctatgagcgcatgtgcagaagtttctcttgggcagtgtttgcaaatgacgtgatagccatctttgggtcatgaattg

SEQ ID NO: 181321 - DNA, 201 bp, Homo sapiens; identical to SEQ ID NO: 32110

SEQ ID NO: 181322 - DNA, 201 bp, Homo sapiens; identical to SEQ ID NO: 32113

SEQ ID NO: 181323 - DNA, 201 bp, Homo sapiens; identical to SEQ ID NO: 32115

SEQ ID NO: 181324 - DNA, 201 bp, Homo sapiens; identical to SEQ ID NO: 32117

SEQ ID NO: 181325 - DNA, 201 bp, Homo sapiens
agtttgtttgtttttgagacaagttcttgccctgttgcccaggctggagtgcagtggtgcagtcatggttcactgcagcctccaactcccaggctcaaggratcctcctacttcagccccctgagtaactggggctacaggtgcatgtcaccatgcccagccagctcttcaccctcctgggtggggctggtggggtggtga

SEQ ID NO: 181326 - DNA, 201 bp, Homo sapiens
tcgtggccagcatgacggtgcgggagctgtttgaggagctggacaggtgcgaggttggcggctgggcactcagggccaagctcagttccgacgggggctcygggctgagagtcccagctactcaggaggctgaggtagaagaatcatttgaacccaggaggtagaggttgcagtgagctgagattgtgcaactgcactcta

SEQ ID NO: 181327 - DNA, 201 bp, Homo sapiens
acgctcagccagtttgtttgtttttgagacaagttcttgccctgttgcccaggctggagtgcagtggtgcagtcatggttcactgcagcctccaactcccrggctcaagggatcctcctacttcagccccctgagtaactggggctacaggtgcatgtcaccatgcccagccagctcttcaccctcctgggtggggctggt

SEQ ID NO: 181328 - DNA, 201 bp, Homo sapiens; identical to SEQ ID NO: 32095

SEQ ID NO: 181329 - DNA, 201 bp, Homo sapiens
gggtggacatgaatctgggataggggagacactgggcagctcccacagagccgccaggtgtcagtgggaggcatcctgccctcctggccctggggacttcyagctaagcagacccctgccccatcccgcccaccacctctgcttcagggctcacccttgccctctgcctcctgcttctgctctcctcctgcctgtggtcca

SEQ ID NO: 181330 - DNA, 201 bp, Homo sapiens
cccaggcttggcctggctggtcccaaggggagcctctgcagcagggcaaagaaaggagctctggtggagcagcctgggggtgcagggccgctgtggccagytcctgcctgtgggcatctgtcccggcctgggtgccagtgacctctgctttccctccaggtgagcagccggatgcctccctcccgctccacgtgctcccgc

SEQ ID NO: 181331 - DNA, 201 bp, Homo sapiens
caggcacccagcgagggccagccccgtcagcagcctttcgagggagagcagctgcaggtctgtggtgttaatgttcccacagagctgggaccagccacccrtcggcttggcgggttcctgtgtctggaggagcttgtgcttgactggggcaaacagagctcccagcctggttcccccaggccccgttccttctagcggctg

SEQ ID NO: 181332 - DNA, 201 bp, Homo sapiens; identical to SEQ ID NO: 32120

SEQ ID NO: 181333 - DNA, 201 bp, Homo sapiens
cagcttccagagtcccctcccggtggactcacacaggacgcactggattctccagtagccacctgtggccacacaggaactatcctccaccagggaagctwgttagagattcagggtccacggctgttactggggtcgcctaagcccaccctgcctggcaggaacgaaatcctagacgcctaaaaggaaagcaggtgtccg

SEQ ID NO: 181334 - DNA, 201 bp, Homo sapiens
ctgcccgttggagggtggcgggagggtcacccaggtctgggatgggtcagagagagagcatgccccctcttcgttccccaggcgccgtgggagcctgtgartatgccagctgcacaccccagttttgcgaagccaacgggctgcggtacaaagccatgatggagatccggcgcctgcggggccagctgaccaccgcaggta

SEQ ID NO: 181335 - DNA, 201 bp, Homo sapiens
ggagagtggactggggagatgtctgggacttgtttcaggttgccagcgggccctgccctcaagccgcctgcctgctccacggcctgccttgtagtggcccygtggcgacagccccagccaggcacggctctgccctaacccgaactctgcccatacagggtcgtctcctaccagatccggtatgaaggaaacgtgacagag

SEQ ID NO: 181336 - DNA, 201 bp, Homo sapiens
cctcccaagtagctgagattacaggtgcccaccaccacgcccagctaatttttgtatttttagtagagatgggggttcaccatgttgaccgggctggtctygaactcctgacctcaggtgatccacctgcctcagcctcccaaagtgctgggattgcaggcattagccacggcgcccggccaatttttagatttttagtag

SEQ ID NO: 181337 - DNA, 201 bp, Homo sapiens
atggtctaaaatccagaaggcacaaaagagcacagagtgagagcctgcctcatctgcccactcagcagatgttactaggcagcatctagtgtgccaggccygtcctgggctctcaggacgtggtggtggaccagacagagccaccggccccccgggtcagcatgccagttgggggacttgttgtctttgtacgttaggctc

SEQ ID NO: 181338 - DNA, 201 bp, Homo sapiens
ggtaaagcaccgtgcctgctgtcaggtgaagatccagtcccagtggcatgactgagttttgtttgttgtcccggtttctgtctgcccaggctgtattcatstgtggtttttggtgtgagttttgtgtttgttgtcccggtttctctccgtccaggctgtattcatctgcggtttttggtgacttcgagcagtttcctcctc

SEQ ID NO: 181339 - DNA, 201 bp, Homo sapiens
tggtctaaaatccagaaggcacaaaagagcacagagtgagagcctgcctcatctgcccactcagcagatgttactaggcagcatctagtgtgccaggcctrtcctgggctctcaggacgtggtggtggaccagacagagccaccggccccccgggtcagcatgccagttgggggacttgttgtctttgtacgttaggctca

SEQ ID NO: 181340 - DNA, 201 bp, Homo sapiens
tgaccgggctggtcttgaactcctgacctcaggtgatccacctgcctcagcctcccaaagtgctgggattgcaggcattagccacggcgcccggccaattyttagatttttagtagagacggggtttcaccatgttggccaggctggtcttgaacacctgcctcagcctcccaaagtgctgggattataggcatgaaccac

SEQ ID NO: 181341 - DNA, 201 bp, Homo sapiens
gtcctgggctctcaggacgtggtggtggaccagacagagccaccggccccccgggtcagcatgccagttgggggacttgttgtctttgtacgttaggctcrgaggacgctaaggcagggatggagtactgggggccccttctcacccaatgccctgcctcctctccaggagcagccaccactgaccatctcctgcacgtcc

SEQ ID NO: 181342 - DNA, 201 bp, Homo sapiens
agcaccaacacttatttttaatatttttgttttgctggggttttttttgagagacaaagtctcactctgttgctcaggctggagttcagtggcccaagtakagctcactgcagcctccgcctcctgggctcaagcagtcttcgtgcctcagcctcccaagtagctgggagtagaggcacgtggcactgtgcctggcttcag

SEQ ID NO: 181343 - DNA, 201 bp, Homo sapiens
cttcaggtgttttttttgttttgttttaatgtgtgactatttcctgtcacacacagccctgccctggtcctgagaacaggtgcccttacctcacccacccycactttttttttaatatgaaagcttcagtatttttgagcctagctctcctagtggatgtgaagtggtatcatattgtggattcggtttatgtttccctaa

SEQ ID NO: 181344 - DNA, 201 bp, Homo sapiens
ttctcacccaatgccctgcctcctctccaggagcagccaccactgaccatctcctgcacgtcctcctggacaattctgtgcatagttggcatgcgtctagraaaagctgcctcattctcttttaacttgttaaatattataaaaatttggggactgggtggccgggtgcggtggctcacgcctgtaatcccagcactttgg

SEQ ID NO: 181345 - DNA, 201 bp, Homo sapiens
tggcctgcggcagctgcttacacaacagtgcatcagcaggtgctcccagggcttctgggctcctgtgaccgctgcctccccagtgctgcatcgcccgtggrcacccaggggatggctgtctggaatagaggcagcagggtcctgcacgctgttcatgtactatccgtccgtggggcgtgcagaacgtgctgccggctcttc

SEQ ID NO: 181346 - DNA, 201 bp, Homo sapiens
tcagcctcccgagtagctgggattacaggcatgcaccaccacgtccggctaactttgttatttttaatagagacagggtttctccatgttggtcaggctgrtcttgaactcccaacctgaagtgacccacctgcctcggcctccccgagtgcagggattataggcgtgagccactgcgcccagccttaaaattttatttta

SEQ ID NO: 181347 - DNA, 201 bp, Homo sapiens
tgtgtgtgcgtgcgtgcacgcgtgtaagtgtgtgcgtgcgtgcacgcgtgtatgtgtgtgtgcgtgcgtgtgcgtgcgtgcacacgtgtatgtgtgtgtgygtgcgtgcgcgcatgcgcgcgtgtatgtaagtgtgtgtgcgtgcgtgcacgcgtgtatgtaataaatagctttattgctgttccttttgtcagggctaca

SEQ ID NO: 181348 - DNA, 201 bp, Homo sapiens
ctgccccatttgacatgcctaccaacagtgaatgagggtttcagtttcttcacgtcctcaccagcactttttaatttttttttttttgagatggagtctcrctatgtcacccaggctggagtgcagtggtgcaatctcagctcactgcaacctctgcctcctgggttcaagcagttctcctgcctcagcctcccgagtagc

SEQ ID NO: 181349 - DNA, 201 bp, Homo sapiens
aaaaagaaaaagaaaagtgacactaagactgtgaaagtatgttgaaagtatgtttagtgcattgtgtatttaacaaaatttacttatagattatgactacrtgctaattcttagaatgaacaattatttaataatttcctggcatcctattgcgtagatctgcctttggcagcttaatgataaaaggggtcatttctgcag

SEQ ID NO: 181350 - DNA, 201 bp, Homo sapiens
acctcccgggttcacgccattctcttgcctcagcctcccgagtagctgggactacaggcacctgccaccacgcccggctaatttttttttttttttttgtrtttttagtagagatgggttttcaccgtgttagccaggatggtctcgatctcctgacctcgtgatccacccgcctcggcctcccaaagtgttgggatcaca

SEQ ID NO: 181351 - DNA, 201 bp, Homo sapiens
tcgctctgtcgcccaggctggagtgcagtggcgtgatcttggctcactggaagctccacctcccgggttcacgccattctcttgcctcagcctcccgagtrgctgggactacaggcacctgccaccacgcccggctaatttttttttttttttttgtatttttagtagagatgggttttcaccgtgttagccaggatggtc

SEQ ID NO: 181352 - DNA, 201 bp, Homo sapiens
cagactggtctcgaactcctgacttcaggtgagccaccatgcctggcctactcgcactgtttctttttttttttttttttttttttttgagacgagtctcrctctgtcgcccaggctggagtgcagtggcgtgatcttggctcactggaagctccacctcccgggttcacgccattctcttgcctcagcctcccgagtagc

SEQ ID NO: 181353 - DNA, 201 bp, Homo sapiens
gacccgaaatcaagtgctgattcccctgctctccagctcacttcccgcgcatctgtaaaatgggaatattccggctactgaaggggctccccctctctgtkcctgtttccttcctggtacaatgagtgtctcactgggttgtgatgacaatgaaaggatttggggcatggaaagcccacagcccacgtaggaactctggat

SEQ ID NO: 181354 - DNA, 201 bp, Homo sapiens; identical to SEQ ID NO: 32094

SEQ ID NO: 181355 - DNA, 201 bp, Homo sapiens
ttattttaatttttgtatttttagtagagacggggtttcagcatgttggccagactggtctcgaactcctgacttcaggtgagccaccatgcctggcctaytcgcactgtttctttttttttttttttttttttttttgagacgagtctcgctctgtcgcccaggctggagtgcagtggcgtgatcttggctcactggaag

SEQ ID NO: 181356 - DNA, 201 bp, Homo sapiens
agattgtgcaactgcactctagcctgggcaacagagtgagacccttctctaaaaaaagaaaaagaaaagtgacactaagactgtgaaagtatgttgaaagyatgtttagtgcattgtgtatttaacaaaatttacttatagattatgactacatgctaattcttagaatgaacaattatttaataatttcctggcatccta

SEQ ID NO: 181357 - DNA, 201 bp, Homo sapiens
ggtgaattcatgttcccacctagtctcgactagttggacgatccggccacaccagcagtgtccccaccaagctgctgacccttaaatggcctgtgtgcccytcccacccagtcccaccccactctgtggtctcctcagcctgtgctgctcatttacatgaggcctgactggtgcctgtgagcactgtcagttagtgactgt

SEQ ID NO: 181358 - DNA, 201 bp, Homo sapiens
caccccaggcaggaccaaggagtcgggaggcccctgccttctgtcctccatggtgagggcacagatgtctccccagagcccagcgctggcagaatggattytgctcctggctttgcttctgcggcttcggtggagacagttatggaataaaatgttccttgcacccagattgtgttgtggaatgcacttggggaaggacac

SEQ ID NO: 181359 - DNA, 201 bp, Homo sapiens
atttacatgaggcctgactggtgcctgtgagcactgtcagttagtgactgtttatcgagtgcagagactgtcccaggctctctgctaggccctggggatasagcagtgcacagaaataaagtcctttctcttaaggagcttcccagtgtcatggcgggagatgtaatcgtgggaagtcatcaggcgagtgcatctgtgtcc

SEQ ID NO: 181360 - DNA, 201 bp, Homo sapiens
gtattcatctgcggtttttggtgacttcgagcagtttcctcctccagaaatcacccggaggcctgttgaagacttaatccttcaaatgaaggcgctcaacrttgaaaaggtcagttgctgcccccagccccgctctcagccaccccagtggaccacctccctttccctgaggcagggagcccagagctgggtctgctggtg

SEQ ID NO: 181361 - DNA, 201 bp, Homo sapiens
gagtggggtaccagcctcaggctgagggaaaggggaggggccgctggggcttgcccttgagcgtcttcacagtccctggcctcagaagctgcgtcccaagractttccatttgtaaatcggaaccccagctgctgcctccctagtcagcccacttgggccttggggaagcaccccatgcttcctagggagccggccattcg

SEQ ID NO: 181362 - DNA, 201 bp, Homo sapiens
ctctccaggagcagccaccactgaccatctcctgcacgtcctcctggacaattctgtgcatagttggcatgcgtctagaaaaagctgcctcattctcttttaacttgttaaatattataaaaatttggggactgggtggccgggtgcggtggctcacgcctgtaatcccagcactttgggaggccgaggcaggtggatcat

SEQ ID NO: 181363 - DNA, 201 bp, Homo sapiens
aggcttgttccttctcagctgtgggtccccactgaggaacaagtggggcttgcagtagaatcacatcttccttggttagtttctcccaacttttttttttwaataacagtttagtggagataaaattcacacagcatttaaactcttttggggttttttgtgttttctagaaacaaggtctcgctctgttgcccaggatag

SEQ ID NO: 181364 - DNA, 201 bp, Homo sapiens
ctacaaggtgcggcccccaccgcctccctgcccgggtagcttggggcacctggcgaggggcaggcgggctgggccctcagggtctggggaggcttgttccytctcagctgtgggtccccactgaggaacaagtggggcttgcagtagaatcacatcttccttggttagtttctcccaacttttttttttaaataacagttt

SEQ ID NO: 181365 - DNA, 201 bp, Homo sapiens
ttggagggtggcgggagggtcacccaggtctgggatgggtcagagagagagcatgccccctcttcgttccccaggcgccgtgggagcctgtgagtatgccrgctgcacaccccagttttgcgaagccaacgggctgcggtacaaagccatgatggagatccggcgcctgcggggccagctgaccaccgcaggtacggcccc

SEQ ID NO: 181366 - DNA, 201 bp, Homo sapiens
cgcagggtccagagcgaggagatgctggaggacaagtggaggaacgcctacaaggtgcggcccccaccgcctccctgcccgggtagcttggggcacctggygaggggcaggcgggctgggccctcagggtctggggaggcttgttccttctcagctgtgggtccccactgaggaacaagtggggcttgcagtagaatcaca

SEQ ID NO: 181367 - DNA, 201 bp, Homo sapiens
tacagtggcttggtgacattagacctttattgttgcaaggaagagaagtcacttgagtcagcagcccagggcatttctctgctgccatcctcctgccattygctgtgccttccatcctaaggtcacctcttgggctgaggaggtagttggaggcttagtcacctctgccttccaggcaagagaagggaaggatgaggccag

SEQ ID NO: 181368 - DNA, 201 bp, Homo sapiens
ttgcagtcagcctccagacagtgctggttacagtggcttggtgacattagacctttattgttgcaaggaagagaagtcacttgagtcagcagcccagggcrtttctctgctgccatcctcctgccatttgctgtgccttccatcctaaggtcacctcttgggctgaggaggtagttggaggcttagtcacctctgccttcc

SEQ ID NO: 181369 - DNA, 201 bp, Homo sapiens
cagtcaatgccgtgtgccccgaggctgagctcttcgtggatcccaagatgcagccgcccaccgagagccaggtgacctacctgcgacagatcgtgacggcrggcctgggggaccacttggcccgcagggtccagagcgaggagatgctggaggacaagtggaggaacgcctacaaggtgcggcccccaccgcctccctgcc

SEQ ID NO: 181370 - DNA, 201 bp, Homo sapiens
ccacctgggtgttaggggagggctgtctcctcgaagaatgctctgctgcccaggcaggatgtggggctttgtcccaagggagaaggagggaatgggggggyggctgcaatcctgcctgctgggggctttgggtcctgctggtggcctctggggaggggctgagacaagcaggtggctgaggctagagcactgagcatggtt

SEQ ID NO: 181371 - DNA, 201 bp, Homo sapiens
tcaccatgctctgtgtccttctggctgtggctttccagagcagccccattccaggtgcagcagcttagaattgcagtcagcctccagacagtgctggttayagtggcttggtgacattagacctttattgttgcaaggaagagaagtcacttgagtcagcagcccagggcatttctctgctgccatcctcctgccatttgc

SEQ ID NO: 181372 - DNA, 201 bp, Homo sapiens
ctgaggccacctgggtgttaggggagggctgtctcctcgaagaatgctctgctgcccaggcaggatgtggggctttgtcccaagggagaaggagggaatgsgggggtggctgcaatcctgcctgctgggggctttgggtcctgctggtggcctctggggaggggctgagacaagcaggtggctgaggctagagcactgagc

SEQ ID NO: 181373 - DNA, 201 bp, Homo sapiens
ctagaaacaaggtctcgctctgttgcccaggatagagtgcagtggcacaatcatagctcactgcagcctcgaattcccaggcacaaataaccttctcgccrcagcctcctgagtagttgggactgcagggggcacaccaccacctccgactaattttgttgttgttgttttcttttttgagacagagcctcactctgttgc

SEQ ID NO: 181374 - DNA, 201 bp, Homo sapiens
atgcggaagtttaagaagtcaagggccagggccaagaaggcgcgggctgaggtacgtggggggctggcagggactcctggagagtaaggctgcgttgtccrggatggcagctaccagccccatgtggctgcttaggtttaagtgtaattggaataaaatgaagttaaaaatccagttcctggtcaggcacagtggctcatg

SEQ ID NO: 181375 - DNA, 201 bp, Homo sapiens
ttttaatgtgtgactatttcctgtcacacacagccctgccctggtcctgagaacaggtgcccttacctcacccacccccactttttttttaatatgaaagyttcagtatttttgagcctagctctcctagtggatgtgaagtggtatcatattgtggattcggtttatgtttccctaatgactaatgaaggcctcttttca

SEQ ID NO: 181376 - DNA, 201 bp, Homo sapiens
tagttgggactgcagggggcacaccaccacctccgactaattttgttgttgttgttttcttttttgagacagagcctcactctgttgcccagattagagtrtagtggtgcgaactcagctcactgcaacctccacctcctgggttccagcaattttcctgcctcagcctcccaaatagctaggattacaggtgtgtgccac

SEQ ID NO: 181377 - DNA, 201 bp, Homo sapiens
cagcacttgtcgttttccatttctgttattctagacatccctgtgggtggacagtgacacctcactgtggccttggtttatgtctttgggggccatcaggragtctagagtggccaagcagagagggtgaggtggggtccggaaggcacgggggtgaggcagacagggacggtcactgtggggcaagagaggggcctgtgc

SEQ ID NO: 181378 - DNA, 201 bp, Homo sapiens
agaacaggtgcccttacctcacccacccccactttttttttaatatgaaagcttcagtatttttgagcctagctctcctagtggatgtgaagtggtatcayattgtggattcggtttatgtttccctaatgactaatgaaggcctcttttcatgtacttattggccctttatgcatctttctagggaactgcctattcaga

SEQ ID NO: 181379 - DNA, 201 bp, Homo sapiens
atccagaaaggggcagagggtgggggctggaaacggggtgggcagcagggcacccccatgccgatttcccaggcttcagacccacctgcggtcctggggcmacggtcactgagcctgtccttttgcagaggaacctgccactcaagctgctcatcatgtcggccacgctgcgggtggaggacttcacccagaacccacggc

SEQ ID NO: 181380 - DNA, 201 bp, Homo sapiens
tatgaaagcttcagtatttttgagcctagctctcctagtggatgtgaagtggtatcatattgtggattcggtttatgtttccctaatgactaatgaaggcytcttttcatgtacttattggccctttatgcatctttctagggaactgcctattcagatcttttgctcattttttaattaggttatttgtccttttattat

SEQ ID NO: 181381 - DNA, 201 bp, Homo sapiens
ccagaaaggggcagagggtgggggctggaaacggggtgggcagcagggcacccccatgccgatttcccaggcttcagacccacctgcggtcctggggccayggtcactgagcctgtccttttgcagaggaacctgccactcaagctgctcatcatgtcggccacgctgcgggtggaggacttcacccagaacccacggctc

SEQ ID NO: 181382 - DNA, 201 bp, Homo sapiens
ggctcactgcaacctccacctcccgggttcaagtgattctcctgcctcagcctcccaagtagctgggattacaggtcccacactggtcgcacactgccacrcctggctaattttttgtattttagtagagatggggtttcatcatgttggccgggctggtctcgaactcctgacctcaggtgagctgcctgcctcagcctc

SEQ ID NO: 181383 - DNA, 201 bp, Homo sapiens
gggctggtctcgaactcctgacctcaggtgagctgcctgcctcagcctcccaaagtgctggaattacaagtgtgagccactgcacccagcctagccagagactcttgtgtgccgaatttgggcccaaggctggctttcttcatgttagggaggcaaggagccatgggggtgcttcccaacaagcttgacctcgtccttcaa

SEQ ID NO: 181384 - DNA, 201 bp, Homo sapiens
aaagtgctggaattacaagtgtgagccactgcacccagcctagccagagactcttgtgtgccgaatttgggcccaaggctggctttcttcatgttagggasgcaaggagccatgggggtgcttcccaacaagcttgacctcgtccttcaaggaagccgaggttgctgcttcgtgatgctctgtccttgctctgcttatggc

SEQ ID NO: 181385 - DNA, 201 bp, Homo sapiens
cccaaggctggctttcttcatgttagggaggcaaggagccatgggggtgcttcccaacaagcttgacctcgtccttcaaggaagccgaggttgctgcttcrtgatgctctgtccttgctctgcttatggcctttcggggctcccatccattctctgggagactggggctggcaggaggtgaggctggagcttgggcagtga

SEQ ID NO: 181386 - DNA, 201 bp, Homo sapiens
tcggggctcccatccattctctgggagactggggctggcaggaggtgaggctggagcttgggcagtgagccttcctgcagcctcaggtctcagggcagccrcggcgctgtcactgtcgtgagtgtggtgtgcagggttccgtgtgagcacgcttctcagggcttttgggtctgttcctgggagtgatgctgctgggctgtg

SEQ ID NO: 181387 - DNA, 201 bp, Homo sapiens
tctgcccactcagcagatgttactaggcagcatctagtgtgccaggcctgtcctgggctctcaggacgtggtggtggaccagacagagccaccggccccccgggtcagcatgccagttgggggacttgttgtctttgtacgttaggctcagaggacgctaaggcagggatggagtactgggggccccttctcacccaatgc

SEQ ID NO: 181388 - DNA, 201 bp, Homo sapiens
ttaccattttcactgtgtagcctgctattggcacttttgacccatgtgtgttggggtccccaagaccatgctcaggttcggtgattgaccggggactcccrggactcagcatgttatcctgcacatggctatggtatattacagcgaaggacgcgatcagcagagggcagtggtacctggggtgttctggggaaacccagc

SEQ ID NO: 181389 - DNA, 201 bp, Homo sapiens
ttcaccatgttagccgggatggtctcgatctcctgacctcgtgatccgcctgcctcggcctcccaaagtgctgggattacaggcatgagccactgcacccrgccaagagacagagtttcaccgtgttggtcaggctggtcttgaactcctgacctcatgtgatccacccacctcgacctcccaaagtgctgggattacagg

SEQ ID NO: 181390 - DNA, 201 bp, Homo sapiens
cctctgctttccctccaggtgagcagccggatgcctccctcccgctccacgtgctcccgctgtactctctgctggccccagagaagcaagcacaggtaacygtgctgggccggtgcccagcttttggggcacttttaagggcattacagtggggttggtcaagcccttggtggtcctctccatctgctgtttgatcagcat

SEQ ID NO: 181391 - DNA, 201 bp, Homo sapiens
gtccgtcttgcctctgtcggcctcctgggcttgtggccacatcactccagtctctgcctccatcttcacgtggccatctctctgtgtgtctttagtctccytccctgtgttctccttataaggacaccagtcattgtattcagggcccaccctactccaggatgacctctccttaactcatgacatttgcagtgaccctct

SEQ ID NO: 181392 - DNA, 201 bp, Homo sapiens
gcccttcttgccgccgaggagctgttgatcgcactgggtgccctgcaaccgccccagaaagcagaaaggtaaggccaagagatgcagagcccagttcctgmcccgttcagggccctctctcccttttgctgggcctgagctgcctcaagcgtggggcctcccagctgtggctccagagctcctctcagagcactgccacca

SEQ ID NO: 181393 - DNA, 201 bp, Homo sapiens
aagaagtcaagggccagggccaagaaggcgcgggctgaggtacgtggggggctggcagggactcctggagagtaaggctgcgttgtccaggatggcagctrccagccccatgtggctgcttaggtttaagtgtaattggaataaaatgaagttaaaaatccagttcctggtcaggcacagtggctcatgcctgtaattcca

SEQ ID NO: 181394 - DNA, 201 bp, Homo sapiens
taatgataaaaggggtcatttctgcagagatttctggaagcaacttgagtttctcaagggcttggtaagtcttcagcgttcacatcattcctcctgaaacygcctttcacgccatcagttttgaccatctctccctcagctgtgagccaggcttctgctgccaccatctctcgtccactgtgaatggtacaggcaggccca

SEQ ID NO: 181395 - DNA, 201 bp, Homo sapiens
ctgcttaggtttaagtgtaattggaataaaatgaagttaaaaatccagttcctggtcaggcacagtggctcatgcctgtaattccagcactttgggaggcyaaggtgggaggatcgcttgaggcctagagtttgagaccagcttgggcaacatggtgagaccatgtctctacaaaaaattttttagattaatccagtgcag

SEQ ID NO: 181396 - DNA, 201 bp, Homo sapiens
tgccaccatctctcgtccactgtgaatggtacaggcaggcccacaatgtcacttcatcgactctgtgagcctctgcatcttgtgcaaagcctgctgcttcycttagggtcaatctgcctgtgtttggaccatcttgtcagatgacagagcagacactagttgggaaggcagttaggtggacactggggaatctgttgagat

SEQ ID NO: 181397 - DNA, 201 bp, Homo sapiens
attttttagattaatccagtgcagtggcgcatgcctgtggtcccagctgctcagaggctgaggtgggagaaccatctgagcccaggaggtcaaggctgcartgagctgtgatggtcccactgcactctagcctgggcaacagagtgagactctgtctcagaaatggaaaagaaggccaggcgtggtggctacgcctgtaat

SEQ ID NO: 181398 - DNA, 201 bp, Homo sapiens
agagcagacactagttgggaaggcagttaggtggacactggggaatctgttgagatctggatggtttttctttgtttatcctccaccacctcccctccccrgtcccacccaccctaaccaggaactttgctttaggccacatcactgcatgggccattccataccgcagccactaaccacacgtggcctcagcctgtgaaa

SEQ ID NO: 181399 - DNA, 201 bp, Homo sapiens
actgagccgacaacacggctgcctgccctatgccatcaccatcgtggccagcatgacggtgcgggagctgtttgaggagctggacaggtgcgaggttggcrgctgggcactcagggccaagctcagttccgacgggggctctgggctgagagtcccagctactcaggaggctgaggtagaagaatcatttgaacccaggag

SEQ ID NO: 181400 - DNA, 201 bp, Homo sapiens
cccagccaggggctgagtggggcagcagagagtaccccagtacgggctcagcctgaccccaccacaatgctgccaggacacgaggagtggagtcaggctcscgggatccatgccaggggtttggaggaggagattgtgcagcacaggggttcagatccggttcagggcagcagagacaagagagcccctgggaacctctca

SEQ ID NO: 181401 - DNA, 201 bp, Homo sapiens
gccgagcaccccatcgtcatcgtgtgtggtgagaccggcagcgggaagaccacacaggtgcctcagtttctctatgaagcaggcttcagcaggtaggggcyggacacagggttctctctgggtccctcagtgacactggagatgccctgaaaggtcgataagagcctgggctccccaggatccaatcctggatctgccctg

SEQ ID NO: 181402 - DNA, 201 bp, Homo sapiens
tggccaccaatgtggccgagacgtcgcttaccatccctggcatcaagtacgtggtggactgtgggaaggtcaagaaacgctactacgaccgcgtcactggygtatcctccttccgtgtcacctgggtctcccaggcatcagctgaccagcgagcgggcagagcaggacggacggagcccggccactgctacaggtgggtca

SEQ ID NO: 181403 - DNA, 201 bp, Homo sapiens
ctgcactccgtcctgggcgacaaggtgaattcatgttcccacctagtctcgactagttggacgatccggccacaccagcagtgtccccaccaagctgctgrcccttaaatggcctgtgtgcccctcccacccagtcccaccccactctgtggtctcctcagcctgtgctgctcatttacatgaggcctgactggtgcctgt

SEQ ID NO: 181404 - DNA, 201 bp, Homo sapiens
ttgcaccactgcactccgtcctgggcgacaaggtgaattcatgttcccacctagtctcgactagttggacgatccggccacaccagcagtgtccccaccargctgctgacccttaaatggcctgtgtgcccctcccacccagtcccaccccactctgtggtctcctcagcctgtgctgctcatttacatgaggcctgactg

SEQ ID NO: 181405 - DNA, 201 bp, Homo sapiens
gtcttgctgctccctaagtgctgacttcctctccttccaggaggaacggctgaagctcccaattctctccgaagaacaagtaatcatggaggctgtggccragcaccccatcgtcatcgtgtgtggtgagaccggcagcgggaagaccacacaggtgcctcagtttctctatgaagcaggcttcagcaggtaggggctgga

SEQ ID NO: 181406 - DNA, 201 bp, Homo sapiens
gcactgggaaccgcatgtatcacaccaaagagtgagttggccagtcctttgctaaccctgccctccctccagggccccctagggagggcgcacaggttatrgggtcctctgggggtggaacatttgagaaaatacctttatggtggcctgagtggctgaaaattcattgtcatcctaaatgcctctagtgggtaaaggcca

SEQ ID NO: 181407 - DNA, 201 bp, Homo sapiens
tcaggtcttccgcaagctggcctcataccagagctgtctgctgtccagccccggcaccatgctgaagacgtgggccaggtactgccttcggtgggagcctygcagtgggcaggaggggtccgaggcctgaatgacctccccggggctgccaggacaaagcaccacacacagggagccttaaaacatcagaagtctgtgctc

SEQ ID NO: 181408 - DNA, 201 bp, Homo sapiens
cctttgagagtgccccaggcccccgtgtccccactggcatgagctgagcccggagagaggggttggagggagtgcctgccacagacggagcaggagcaccrgacttgttcttggcattcaccctgtccctgccacgtctccttgtgtcccaggtcatcaacttccccttcccgacgcccccctccgtggaagcccttcttg

SEQ ID NO: 181409 - DNA, 201 bp, Homo sapiens
tcagaaatggaaaagaaggccaggcgtggtggctacgcctgtaatcccagcactttgggagactgaggcaggtggatcacctgaggtcaggagttcaagtmcaacctgaccaacatggcgaaaccctgtctctactaaaaatacaaaattagccaggcatggtggtgtgcacctgtactcccagctactctgggatggctg

SEQ ID NO: 181410 - DNA, 201 bp, Homo sapiens
gggaatctgttgagatctggatggtttttctttgtttatcctccaccacctcccctccccggtcccacccaccctaaccaggaactttgctttaggccacrtcactgcatgggccattccataccgcagccactaaccacacgtggcctcagcctgtgaaatgtggcagttacggcaacaaactgacttaaaaccttactt

SEQ ID NO: 181411 - DNA, 201 bp, Homo sapiens
tggtttttctttgtttatcctccaccacctcccctccccggtcccacccaccctaaccaggaactttgctttaggccacatcactgcatgggccattccayaccgcagccactaaccacacgtggcctcagcctgtgaaatgtggcagttacggcaacaaactgacttaaaaccttacttatttttaatagtttaaattta

SEQ ID NO: 181412 - DNA, 201 bp, Homo sapiens
tccaccacctcccctccccggtcccacccaccctaaccaggaactttgctttaggccacatcactgcatgggccattccataccgcagccactaaccacaygtggcctcagcctgtgaaatgtggcagttacggcaacaaactgacttaaaaccttacttatttttaatagtttaaatttaaacagccacatgtggctagt

SEQ ID NO: 181413 - DNA, 201 bp, Homo sapiens
cactgcatgggccattccataccgcagccactaaccacacgtggcctcagcctgtgaaatgtggcagttacggcaacaaactgacttaaaaccttacttayttttaatagtttaaatttaaacagccacatgtggctagtggccactgtattggccagtgcagttccagacgtttccctgtgctctgcacggacagagttt

SEQ ID NO: 181414 - DNA, 201 bp, Homo sapiens
gggatggcgggcaagatggaggtgtggcccgagcaccgattcctgctcatgttcattatctctgccctgaggatgtgcccagagcccttgtgggccccccrggggccggggttctagcagctttgtccccgatgcttcctgagttcttgaaactgcctggcacgaggaggcctcaaacatttgccatgttgaatgtaatgg

SEQ ID NO: 181415 - DNA, 201 bp, Homo sapiens
gcactaacagattcgagctgccagcctgcaccctcccccaccaggtcgtcgctcggtttcaccttttccctggcgataccccctgccattttccatcaccrctgtggcctggacccctcttccctcccacatgtcccccagacccttctcatgcagaaggatgaggccttgccctggactctacctcagctcagcagcaca

SEQ ID NO: 181416 - DNA, 201 bp, Homo sapiens
ttcttgaaactgcctggcacgaggaggcctcaaacatttgccatgttgaatgtaatgggggctgccaaccccttgctgagggacgcaggccttcagagccygggggtgttgcccagctccgtgtgctcgcaggggccccctgaatgcaggcagacccagtgccctgctgtgcccagccaggggctgagtggggcagcagag

SEQ ID NO: 181417 - DNA, 201 bp, Homo sapiens
gtgttcaattcagtgggttttagtattttcacagagttttgcaaccattatcatagttaactttagaacatttttattacccaacaaagaaaccccacatmtgtaagctgtgagtccccagttccccgtcacccccgttttcatgatcctgctttccatctgtggatctgcctgttctggacatttggcatgagtggaatc

SEQ ID NO: 181418 - DNA, 201 bp, Homo sapiens
tcttgaaactgcctggcacgaggaggcctcaaacatttgccatgttgaatgtaatgggggctgccaaccccttgctgagggacgcaggccttcagagcccrggggtgttgcccagctccgtgtgctcgcaggggccccctgaatgcaggcagacccagtgccctgctgtgcccagccaggggctgagtggggcagcagaga

SEQ ID NO: 181419 - DNA, 201 bp, Homo sapiens
ctcagagcactgccaccaccacctccatctccagggtgaagcaactgcaggagaaccggctgagctgccccatcactgcgctgggccggacaatggccacrttccccgtggcaccccgctacgctaagatgctggcactgagccgacaacacggctgcctgccctatgccatcaccatcgtggccagcatgacggtgcggg

SEQ ID NO: 181420 - DNA, 201 bp, Homo sapiens
agcgggcccgggtggcccagatgaagaggacctgggcagggcagggggcttctctgaagctcggcgacctcatggtgctgctgggtttgtgccctgcccgktggagggtggcgggagggtcacccaggtctgggatgggtcagagagagagcatgccccctcttcgttccccaggcgccgtgggagcctgtgagtatgcca

SEQ ID NO: 181421 - DNA, 201 bp, Homo sapiens
caatggtgaattttgagctggaccttaataccttaattacattcatcagtgaccccacaaggcctctgagcctgtcccgatgaataaaggagttccccccrctgaggccctgagcgcagccgaggccccagcccagacagtatgtatgtgtgtttgcagaccagcggccagtgacgaggagctcaccaggctgaagagcaa

SEQ ID NO: 181422 - DNA, 201 bp, Homo sapiens
ggctccgggccttgccaccaccgacctcactcttggttctcccctcagtcaatgccgtgtgccccgaggctgagctcttcgtggatcccaagatgcagcckcccaccgagagccaggtgacctacctgcgacagatcgtgacggcgggcctgggggaccacttggcccgcagggtccagagcgaggagatgctggaggaca

SEQ ID NO: 181423 - DNA, 201 bp, Homo sapiens
tttgtggtctaccaggaaatcgtggagaccactaagatgtacatgaaaggtgccgaggcctgcggacagccccttgtcccccgatggtgacgctaatgggrgtgtggctgggaccctggggcagaggcatggcagcccctcccacggagggtgccgctgtaaccccagcttcctcccccggcccccaggcgtctctagcgt

SEQ ID NO: 181424 - DNA, 201 bp, Homo sapiens
tcacttggtcacaggggggattgacagcagcttggagggggtgttagaaaccttgattcggaataatggggaaagggaaggcagccctgggccgaagctcktgccccccccactccccatgccttcctgggcgtcccacaggtggaatccaggcagttcccagtgactgtgcatttcaacaagcggacaccgctggaagac

SEQ ID NO: 181425 - DNA, 201 bp, Homo sapiens
ctggactctacctcagctcagcagcacagatacttcctgccaccaacacccagggaagcttgagaggaaggaaatgtcctccaacatatggcaggaggacratgcgtagagagggcagcgtggacactgggtctcttctgggcaggccacgttcttgcacccaaggctagtggagaatttgccttccatttaagcagatcc

SEQ ID NO: 181426 - DNA, 201 bp, Homo sapiens
cttggtcacaggggggattgacagcagcttggagggggtgttagaaaccttgattcggaataatggggaaagggaaggcagccctgggccgaagctcttgycccccccactccccatgccttcctgggcgtcccacaggtggaatccaggcagttcccagtgactgtgcatttcaacaagcggacaccgctggaagactac

SEQ ID NO: 181427 - DNA, 201 bp, Homo sapiens
gagctgtttgaggagctggacaggtgcgaggttggcggctgggcactcagggccaagctcagttccgacgggggctctgggctgagagtcccagctactcrggaggctgaggtagaagaatcatttgaacccaggaggtagaggttgcagtgagctgagattgtgcaactgcactctagcctgggcaacagagtgagaccc

SEQ ID NO: 181428 - DNA, 201 bp, Homo sapiens
gaggggctgagacaagcaggtggctgaggctagagcactgagcatggttgggactttctaggaggtcagggcagagctggctccgggccttgccaccaccracctcactcttggttctcccctcagtcaatgccgtgtgccccgaggctgagctcttcgtggatcccaagatgcagccgcccaccgagagccaggtgacct

SEQ ID NO: 181429 - DNA, 201 bp, Homo sapiens
accgggccagcgtgttctgtgagttggggcagtgtcctgggcaacctgagcctcctgcagccgtgggcttctcggacacacggtcctgtcccctgcccccdgacgtgtgtgtctcgggtggggcagggatgggactcgggagggcagctgcaggagggtccctgtctcactggctcccaccttctagatcgcgtgggctgg

SEQ ID NO: 181430 - DNA, 201 bp, Homo sapiens
ccttgccctggactctacctcagctcagcagcacagatacttcctgccaccaacacccagggaagcttgagaggaaggaaatgtcctccaacatatggcargaggacaatgcgtagagagggcagcgtggacactgggtctcttctgggcaggccacgttcttgcacccaaggctagtggagaatttgccttccatttaag

SEQ ID NO: 181431 - DNA, 201 bp, Homo sapiens
gcatctgagttgagcagctcacctctgatgaagagcagctgcccttcctctaacactgtctcctcaagtgggagttctgggacgtgaagcggcccttgggkcttaggctggaagggtgggcctcaccccggacctccccccaggacttcctgctgctgcggtacaaggtggtgatcatcgacgaggcccacgagaggagcg

SEQ ID NO: 181432 - DNA, 201 bp, Homo sapiens
ttttcaccaattccttacgaggcagctgcaatttgagctgcatttcacaggtgaggagaatgaggcaggaagcggtaaagcaccgtgcctgctgtcaggtsaagatccagtcccagtggcatgactgagttttgtttgttgtcccggtttctgtctgcccaggctgtattcatctgtggtttttggtgtgagttttgtgtt

SEQ ID NO: 181433 - DNA, 201 bp, Homo sapiens
cctcatggtgctgctgggtttgtgccctgcccgttggagggtggcgggagggtcacccaggtctgggatgggtcagagagagagcatgccccctcttcgtyccccaggcgccgtgggagcctgtgagtatgccagctgcacaccccagttttgcgaagccaacgggctgcggtacaaagccatgatggagatccggcgcct

SEQ ID NO: 181434 - DNA, 201 bp, Homo sapiens
ctgcacaccccagttttgcgaagccaacgggctgcggtacaaagccatgatggagatccggcgcctgcggggccagctgaccaccgcaggtacggccccgygccggcacgccgctgcacccggcgggcaacctgacctgggcacttgaaatgtttaaaaaagtgatccatagagtccacgtttgcaaacttgctacgcacc

SEQ ID NO: 181435 - DNA, 201 bp, Homo sapiens
ccaccaccacctccatctccagggtgaagcaactgcaggagaaccggctgagctgccccatcactgcgctgggccggacaatggccacattccccgtggcrccccgctacgctaagatgctggcactgagccgacaacacggctgcctgccctatgccatcaccatcgtggccagcatgacggtgcgggagctgtttgagg

SEQ ID NO: 181436 - DNA, 201 bp, Homo sapiens
ctgccctcaagccgcctgcctgctccacggcctgccttgtagtggccccgtggcgacagccccagccaggcacggctctgccctaacccgaactctgcccrtacagggtcgtctcctaccagatccggtatgaaggaaacgtgacagaggagaccagaatcaagttcatgacggatggtgtgctgcttaaagaaatccaga

SEQ ID NO: 181437 - DNA, 201 bp, Homo sapiens
tggtgtgcacctgtactcccagctactctgggatggctgggctggcaggggctttcctctagcctctgcgtgaaggcaccgtgggtcttgtgctccgtgayggtagcgtaagcactcagccgtctctgacttgcctgttgcactaccgatgtgtcaggcagcgatccaggttcctcacgtgtgttcacacaaccctcccac

SEQ ID NO: 181438 - DNA, 201 bp, Homo sapiens
atggtggtgtgcacctgtactcccagctactctgggatggctgggctggcaggggctttcctctagcctctgcgtgaaggcaccgtgggtcttgtgctccrtgacggtagcgtaagcactcagccgtctctgacttgcctgttgcactaccgatgtgtcaggcagcgatccaggttcctcacgtgtgttcacacaaccctc

SEQ ID NO: 181439 - DNA, 201 bp, Homo sapiens
tgactgagttttgtttgttgtcccggtttctgtctgcccaggctgtattcatctgtggtttttggtgtgagttttgtgtttgttgtcccggtttctctccrtccaggctgtattcatctgcggtttttggtgacttcgagcagtttcctcctccagaaatcacccggaggcctgttgaagacttaatccttcaaatgaagg

SEQ ID NO: 181440 - DNA, 201 bp, Homo sapiens
tgctggtggcctctggggaggggctgagacaagcaggtggctgaggctagagcactgagcatggttgggactttctaggaggtcagggcagagctggctcygggccttgccaccaccgacctcactcttggttctcccctcagtcaatgccgtgtgccccgaggctgagctcttcgtggatcccaagatgcagccgcccac

SEQ ID NO: 181441 - DNA, 201 bp, Homo sapiens
ctgctggtggcctctggggaggggctgagacaagcaggtggctgaggctagagcactgagcatggttgggactttctaggaggtcagggcagagctggctycgggccttgccaccaccgacctcactcttggttctcccctcagtcaatgccgtgtgccccgaggctgagctcttcgtggatcccaagatgcagccgccca

SEQ ID NO: 181442 - DNA, 201 bp, Homo sapiens
atgccaggggtttggaggaggagattgtgcagcacaggggttcagatccggttcagggcagcagagacaagagagcccctgggaacctctcagcagttccyccaggcttggcctggctggtcccaaggggagcctctgcagcagggcaaagaaaggagctctggtggagcagcctgggggtgcagggccgctgtggccagc

SEQ ID NO: 181443 - DNA, 201 bp, Homo sapiens
atgccttgaacaacaaagggcagtgtgctggcgaccacgccggccacagacgcctttctccccaacctgcccctctcccagaaaaggacgacgatcagaamgactcggtggaggaaatgcggaagtttaagaagtcaagggccagggccaagaaggcgcgggctgaggtacgtggggggctggcagggactcctggagagt

SEQ ID NO: 181444 - DNA, 201 bp, Homo sapiens
gccctgagcagctgggcttggcctcgcgctccctggctggggtgcagctcctgcctctgagcttctctctggaagcatcagcacctttgccatcccccacytcacccccgaataaatggccaccactgagtggccatgccttgaacaacaaagggcagtgtgctggcgaccacgccggccacagacgcctttctccccaac

SEQ ID NO: 181445 - DNA, 201 bp, Homo sapiens
atgatgctgaaattttattagagtctcacttcccttcttaagagagggtcgtgatggcaaatgcataatacactcgtttcctttcccagcgagcagagatrctacagaagctgagtgaagtccaggcttccgaagctgagatgagactcttttataccacttccaagctaggcactgggaaccgcatgtatcacaccaaag

SEQ ID NO: 181446 - DNA, 201 bp, Homo sapiens
gttttgctcttattgcccaagccggagtgcaatggcgtgatctcagctcactgcaacctccacctcccgggttcaagcaattctcctgcctcagcctcccragtagctgggattacaggtgtgtgccaccatgcccagttaattttttgtatttttagtagaaatggggtttcaccaacatggtgaaaccagccaggctgg

SEQ ID NO: 181447 - DNA, 201 bp, Homo sapiens
tggtgaaaccagccaggctggtctcgaactcttgacctcagatgatccaccctcctcggcctcccagagtgttgggattacaggcgtgagccattgcaccyggcacttccttccttttcacggctggatcagactccagcgtgtggatgggccgcatttcccggcagatggagcactctcccacttttgcggctggagtgg

SEQ ID NO: 181448 - DNA, 201 bp, Homo sapiens
ccgcatttcccggcagatggagcactctcccacttttgcggctggagtggataatcagattcttctcctgggttgaaagtatgcggagcccctgggcatgrgttcttccctgaccacatcactctccattctctgcagacccctctcctcgacgaccctgtcttcatccaccccagctccgtccttttcaaagagctcccc

SEQ ID NO: 181449 - DNA, 201 bp, Homo sapiens
atcgcgccattgcatacaccttagggtgagccatgtttcacagaactgttccttccatatacgatacatatatgtgcctgtgtgtgtactgagtcatgatrtaaaatgtgtttctttccatgagtcacaggaaaaaatgtagaaagcccctgctctggaatatgtacctaggagaggaactgcagggccacacatcttaac

SEQ ID NO: 181450 - DNA, 201 bp, Homo sapiens
gaaaggtgccgaggcctgcggacagccccttgtcccccgatggtgacgctaatgggggtgtggctgggaccctggggcagaggcatggcagcccctcccayggagggtgccgctgtaaccccagcttcctcccccggcccccaggcgtctctagcgtggaggtccagtggatcccggccctgctgccctcttactgccagt

SEQ ID NO: 181451 - DNA, 201 bp, Homo sapiens
cctgtctcactggctcccaccttctagatcgcgtgggctggccgctccccgccatcgaggtggattttccagaggggattgaccgctacaagcactttgcycggttcctgctggaagggcaggtaggtggcacagcggctccagaccctcatctcgggtaccgtgggcagcagcagcccgggcctcaccccttcctgtggt

SEQ ID NO: 181452 - DNA, 201 bp, Homo sapiens
ggctccagaccctcatctcgggtaccgtgggcagcagcagcccgggcctcaccccttcctgtggtctctcatcaggtcttccgcaagctggcctcataccrgagctgtctgctgtccagccccggcaccatgctgaagacgtgggccaggtactgccttcggtgggagcctcgcagtgggcaggaggggtccgaggcctga

SEQ ID NO: 181453 - DNA, 201 bp, Homo sapiens
caggtactgccttcggtgggagcctcgcagtgggcaggaggggtccgaggcctgaatgacctccccggggctgccaggacaaagcaccacacacagggagscttaaaacatcagaagtctgtgctcaggtctgaaggctctgcagagccacggtctgtgcagcggctctcggggagggtccgtcttgcctctgtcggcctc

SEQ ID NO: 181454 - DNA, 201 bp, Homo sapiens; identical to SEQ ID NO: 32166

SEQ ID NO: 181455 - DNA, 201 bp, Homo sapiens; identical to SEQ ID NO: 32167

SEQ ID NO: 181456 - DNA, 201 bp, Homo sapiens
aatgtctacctggccagtttggaggctgtagccacagagaagccgcttacactgcaacgatgctctcgtgtaatgtggttgccatggctattgctggcacycttccttggtgagctggtctggtctccaaaaatgctctgggatcatctttcattgctgcaataaatgtccatggctctaacactcttcttcatgaatggc

SEQ ID NO: 181457 - DNA, 201 bp, Homo sapiens
ctacataagaaaatgtctacctggccagtttggaggctgtagccacagagaagccgcttacactgcaacgatgctctcgtgtaatgtggttgccatggctrttgctggcacccttccttggtgagctggtctggtctccaaaaatgctctgggatcatctttcattgctgcaataaatgtccatggctctaacactcttct

SEQ ID NO: 181458 - DNA, 201 bp, Homo sapiens
gtgaacccaggaggcggagcttgcagtgagccgagatcacaccactgcactccagcctgggctacagagcgagacaccgtctcaaaaaaaaaaaaaaaaaagcaaatggcaaatcctgtttgggactcctagtggtttaactgaccccatcagaatcatgtgacatcttggggctcagcctgtcctgcagtaaggcctaag

SEQ ID NO: 181459 - DNA, 201 bp, Homo sapiens
cacttgaacccgggaggcagaggttgcagtgagccgagatggtgcaactgcactccagcctggcaacagagtgagactctgtctcaaaaaaaaaaaaaaaagggcacagtggctcacacctgtaatcccagcactttggaaggctgaggtgggcggatcacgaggtcaggagatcgagaccatggggaaaccctgtctcta

SEQ ID NO: 181460 - DNA, 201 bp, Homo sapiens
gtagggtgtggtggcgtgtgcctctggtcccacctactcaggaggctgaggtgggaggatggcttgaatctaggaggtggaggttgcagtgagccatgatyacaccactgtactccaacctgggtgacagagcaagaccttgtctcgaaaaaagaaaaacttcactcatcagctatcaaagtagcaaaatacttagcgtat

SEQ ID NO: 181461 - DNA, 201 bp, Homo sapiens
aaggctgaggtgggcggatcacgaggtcaggagatcgagaccatggggaaaccctgtctctactaaaagtacaaaagattagctgggcgtggtggtgggcrcctgtagtcccagctacttgggaggctgaggcaggagaatgtcgtgaacccgggaggcagagcttgcagtaagtcgagatcacgccactgcactccagcc

SEQ ID NO: 181462 - DNA, 201 bp, Homo sapiens
gggatggctgggtcatatgggtagttctatttgtagcttttttaaggaacctctatactgttttccataatggttgtactaatttacattcccaccaacartgtgtgagttttctttttcccacatcctcaccagtaagttttttgtctttttgataatagccattctaactagggtgaaatggtatctcattgtggtttt

SEQ ID NO: 181463 - DNA, 201 bp, Homo sapiens
gcctgtagtcccatctactcaggaggctgaggcaggagaatcacttgaacccgggaggcagaggttgcagtgagccgagatggtgcaactgcactccagcstggcaacagagtgagactctgtctcaaaaaaaaaaaaaaaagggcacagtggctcacacctgtaatcccagcactttggaaggctgaggtgggcggatca

SEQ ID NO: 181464 - DNA, 201 bp, Homo sapiens
tcatttttaggtcctttttcatgatgatggtagtgtaaaaggaattgccactaacgatgtagggatacaaaaggatggtgcaccaaaggtaaacctttttmatagttacgtgcttaataaagcgacaaacaacagaaagaactgtgtgggcatcaaagtgaaaccccatctctccaaaaaaagaaaacaaaattagctggg

SEQ ID NO: 181465 - DNA, 201 bp, Homo sapiens; identical to SEQ ID NO: 32170

SEQ ID NO: 181466 - DNA, 201 bp, Homo sapiens
gccctgcagaactcacatatatgaaaaatcggtcttccatatattcgggtttcacatctggtgaatattgtattttcaatcctcatttggttaaaaataartccttgtatatgtgaacccacacagttgaaacccatcttgttcaagggtcagctctatattaaatatatattcaagagtgtttgtatcttataacattgt

SEQ ID NO: 181467 - DNA, 201 bp, Homo sapiens
tctcccattccacgggctatcttttcactttcttgatggtatcctttgatgcacaaaaggttttaattttgatgaagtgcagtttaactgtattttttgtygttgcttgtgtttttggttgttctatcaaagaaaccattgcctaaacccaagtgttgatgaaaaagccaaactccataaactatttgaagagattaattc

SEQ ID NO: 181468 - DNA, 201 bp, Homo sapiens
acaattcatagaagaacaactccaatgaccactaatcataagtaaagatacttaaatatgtttttttcagagtccagaggttaaatgtcatttcttcaaaraggactttcctgatcactcaatctagaatagctggcttctattattctcccttgtaataccctctgctctctttcatagcacttaaacaatttgtaatta

SEQ ID NO: 181469 - DNA, 201 bp, Homo sapiens; identical to SEQ ID NO: 32171

SEQ ID NO: 181470 - DNA, 201 bp, Homo sapiens
gcagaggttgcagtgagccacgatcgcaccactgcactccagcctggacgacagagtgagactccatctaaaaaaaaaaaaaagattaaaaaaaaaaaaawatatatatatatatatggtttttaactttatgctttgcatttgtaaaaacgtttacattttgtatgttgtatttatacagatctaatagcatagaagagt

SEQ ID NO: 181471 - DNA, 201 bp, Homo sapiens
agcactttgggaggctgaggcgggcatatcacttgagcccagcagttcaagaccagcctgggcaacatggcaaaaccctctttctaccaaaaacacaaaarttagtagggtgtggtggcgtgtgcctctggtcccacctactcaggaggctgaggtgggaggatggcttgaatctaggaggtggaggttgcagtgagccat

SEQ ID NO: 181472 - DNA, 201 bp, Homo sapiens
agttgcctacagtgttcagtatagtcagtcacatgctatatagctttgtagcctaggagcaatagcctataccctgttgcctaggtgtatcataggctgtwcaattagtttgtgtaagtatactctatgatgtttgcaaaagggcaaaattgcctaacgatgcatttctcagaaagcatttctgtcattaagtgacttgtg

SEQ ID NO: 181473 - DNA, 201 bp, Homo sapiens
cacataatattatctgacttagataaaatttcagatagaaattgttcagaatttaaaatttaccagtctgaaaagagggtgaacaatttatttcaattgtkgggggcagggtagagggaataaattgctttgttggagaatacatgtccattatgaagagaccttaagtgtacagctacattaatttttacatggtgaaca

SEQ ID NO: 181474 - DNA, 201 bp, Homo sapiens
aaggtaagtaataatttgtgtacaattcctgagacttttctggatactttgttttcattttgtggaggagagtattaatatttttcataatttaaaaacayctaataatattttgtggctttaccaagtcacatgctgcataatgacccttcagtcaacaacacgacaattataatggtaatcccttgacattataatgga

SEQ ID NO: 181475 - DNA, 201 bp, Homo sapiens
tgctacaaagagtctgttctgtcagtcttaggatttcaatattaatgttaatgctggtcagttatgtctaaactccaaaagggagagggtataatgaggcmtgtctgaccctctacttaccatcatggcatgaactacttttttgggtttctttggaatccccctggccaagaagagagtccattcagtggttgggggcct

SEQ ID NO: 181476 - DNA, 201 bp, Homo sapiens
cctgaggtttcaggcgtctactggggatcttggaacttgtcccctgtgaatgagaggatgactgtgaataagggaggacttcgaggttgtgtggaactcaracactcagtgtcgagtacccttgatagtgagacaactcagctgaataccgctgtacctccttttattatgtacatgtaatttacactcacatcaatagca

SEQ ID NO: 181477 - DNA, 201 bp, Homo sapiens
actaattttaaggaagataataattttcgtaatttttgtgcagcatatcagtgctttcatgccttaaaaattaagaaaaattatctacctctatgtgctayaagatggtcttcaacttctactgtgcctcgaattactacccattatactatttatccccgggataaggacaagagatgggaaggtaagtaataatttgtg

SEQ ID NO: 181478 - DNA, 201 bp, Homo sapiens
agaagttatggccagagtgtggcaagtgcttccttaagatggaaaaggcatcacatttgtgggtgaaatacatgaacagaaacgtgttctgactgacaatstaagttgagtactacctgaggtttcaggcgtctactggggatcttggaacttgtcccctgtgaatgagaggatgactgtgaataagggaggacttcgagg

SEQ ID NO: 181479 - DNA, 201 bp, Homo sapiens
ccacaccaattaatgcacaacacacagcacacacccagttccccctgcatggccttttctagcgcattttccaccttttggtacattatattacttacttrtttatcaacttttgtcttctgccacttggatgaaaactccgagactagaggtattgcttagtgtgaatcctacatacctggcacacggtagcgactccat

SEQ ID NO: 181480 - DNA, 201 bp, Homo sapiens
tgctatccttttctttaccttttcttttccaaacagattttatacaatttttaatttacatttggattactgcacatagtgctccaaatacttttgagtamaagaaatttaacctacatgttttctgataaacattgcttacattttagcttgatttaatttgaaataaaaatgtctaattaaatataagtgtaaattttt

SEQ ID NO: 181481 - DNA, 201 bp, Homo sapiens
aaaaggcagaattagctacctattctttagcaagctttgtaagtataggcctatgactcttctgctgtggtggagagaaacagccagcacttatacctccrtaaagctttaatctaaaaagaccctttaccaactccagccacactggcttctttacagttcccagaacatgccaagcactcccacctcatggtctttgct

SEQ ID NO: 181482 - DNA, 201 bp, Homo sapiens
acacttaaccttaagggatgacagtatacctgtaaatagaaatctgtcgatatatgatgggcccgagcagcgattctgtcctgcaggtaataatttccatytattcctaaatatttgctttaaacattttaggaatgtgattttgttcttttaaaaaatgatttctgtatctccttccattccttagaaattgtaaatgac

SEQ ID NO: 181483 - DNA, 201 bp, Homo sapiens
ccaagtataccaaaattcatgcatactcaagtcccaaagttagccctgcagaactcacatatatgaaaaatcggtcttccatatattcgggtttcacatcyggtgaatattgtattttcaatcctcatttggttaaaaataaatccttgtatatgtgaacccacacagttgaaacccatcttgttcaagggtcagctctat

SEQ ID NO: 181484 - DNA, 201 bp, Homo sapiens
gtaataggagaagaagcatagagatttatttaacatgcataagcacaagagaatgatgacccgataacccagtgaggtccaaatgcttatctacctttcakcagaagggaaggggaaattgggtgtttagcaatcttgaaaggaagtgaatgatttttagggaaaatgaatgcacccaagacacagaaattaacttgtaaa

SEQ ID NO: 181485 - DNA, 201 bp, Homo sapiens
caggagttcgagaccagcctggccaacatggtaaaaccccctctctactaaaaatacaaaaattagcccagcatggtggcaggtgcctataagcccagccmcttgggaggctgaggcaggagaaacacttgaacccaggaggcagaggctacagtgagctgagattgcaccactgcactccagcctgggtgacagaaagag

SEQ ID NO: 181486 - DNA, 201 bp, Homo sapiens
atttggttaaaaataaatccttgtatatgtgaacccacacagttgaaacccatcttgttcaagggtcagctctatattaaatatatattcaagagtgtttrtatcttataacattgtttatgttcatgcgtaagctggaaacagtgaatggctattatccattggcagaggagctggataatctatcctgtctctctacat

SEQ ID NO: 181487 - DNA, 201 bp, Homo sapiens
gtattcactctactagccaccctaactggaccctccacagttctctgggaacaccatgtacacatttcacctttctagcattttctacatggccctaagastcttagtttttcatcatctttgtcccaaaccacaatatgagacctcagcacctagatcttagcacatggtagatggaaatctatgcaggcaatcattagt

SEQ ID NO: 181488 - DNA, 201 bp, Homo sapiens
cctaagagtcttagtttttcatcatctttgtcccaaaccacaatatgagacctcagcacctagatcttagcacatggtagatggaaatctatgcaggcaawcattagttctattgtttctgaaatgtttgttaaaatgcatgaatgaatgcttgaatgaagcctagaaagaactgcaaatgctcaggcagtgaagtcttga

SEQ ID NO: 181489 - DNA, 201 bp, Homo sapiens
tctgctcttccaggagctagataagggcctggttccacttctcagtattcagggaatggattccctgcttactcccttccttcctttggatgccacaaaatgagcacttgactgaaaatatgcttatacgcgtttttacagactacgccaagccacaggtatgtctagatgaaaaatgtgttgtgccattgctacagactc

SEQ ID NO: 181490 - DNA, 201 bp, Homo sapiens
caactacctctaagagaaaagccattagaaagacaactgccattaaatctcccagctttcttagatccggtagtgagctggggctagctcagccctgctcrcaagagcatattgtgcacatctcttcccagcttcacatccattccatcacattcagagcttgaaactggccaagatggaagtatttacaacacagaaatt

SEQ ID NO: 181491 - DNA, 201 bp, Homo sapiens
ccttggagggaaaggcgaaaaagaactgaagaggaggccttaagaaattttcatgtttagaggtaaagttttggttagcaagctggtcttttcttcctatktattgttggtagagcccatagagaaacaactattattgccaaatcagctctttccttctcatttcaaatttttccaccatcttagagcatgtaaaaattg

SEQ ID NO: 181492 - DNA, 201 bp, Homo sapiens
tgaattccttcccagatttctgggacactgcttctgtgcactgtcaccaaataaatcctggaggagtggcgccttaagaaatagggtaagctcatccgctyctgggagattgtcatcataggcagcaatcttaatgctctgagatgcttcagagggaaagaaggggaaaagtataaaagaacaatccccacattatcggtt

SEQ ID NO: 181493 - DNA, 201 bp, Homo sapiens
cagaggcccccagcagagtccttgacaaatgggcatttagtaaatagaggaatagcaggaggcagtggagcatcctgagaaaggttagggctgatggaacyggagggaatggattactgtcaattgtattactgcctagtaatatggcatactggagcaagttactttacctatctaggacttattttcctcatcagtaaa

SEQ ID NO: 181494 - DNA, 201 bp, Homo sapiens
gagcacccagattcataaagcaagtgcttagagacctacaaagagatttagactcccacacaataataatgtgagactttaacaccccactgtcaatattmcacagatcaacaagacagaagcttaacaaggatacccaggacttgaattcagctctgcaccaggcagacctaatagacatctacagaactctccacccct

SEQ ID NO: 181495 - DNA, 201 bp, Homo sapiens
tgggccagccccatggggaatctgtcttgtcatcggggctggctggagtagagacaagtctggatgctggctggccaggtctgtgtaagccagggtattgmatagatttttcatttcctatttatttctttgtttcttcctaagcgtttatagtagtcttgcaaaagtcttgccaagggcaaagagttgttagcatgctag

SEQ ID NO: 181496 - DNA, 201 bp, Homo sapiens
taatatgaatgaataatacctgtgagatttccaatgaaaagaagcaaagttttatacatcaaatttgcttccaaatgctaatatactaaaatcagtgctarttatgtttaatataggttgctgagaaaaatagttatcttttatggtttttaaaaagtgtatgttaatttatttttatcgtttatttcttactgacaaatg

SEQ ID NO: 181497 - DNA, 201 bp, Homo sapiens
gggggtagggggaaaggggaagggagagcattaggacaaatgcctaatgcatgcagggcttaaagcctagatgacgggttgataggtgcagcaaaccaccrtggcacatgtatacttatgtaacaaacctgcacgttctgcacacgtatcccagaacttaaagtaaaataataaataagcattctcatcttatttctaatc

SEQ ID NO: 181498 - DNA, 201 bp, Homo sapiens
atttcctccatccctatgagactgtactttgggtgtcagatgacaaaaacacagtcacttggcacattttagatactgatgaaatattcattgaatgagtwaatatatgtttgaattaaggatttgattttttttaagtcccttgttggcttcaattgtttctttcttgttttttttgttttgttttgttttgtttttttt

SEQ ID NO: 181499 - DNA, 201 bp, Homo sapiens
agtagcattgtgcttattcatccatataactggatgaaaaaggcagatatggaccctgctgtgggaggttgtggcctgaccttatatactgaaatttccaraaggccagatagagcatcaagaaataaaataaaataataacattcttttatgataatgagatagatccttcagtgcctcctggtcttccccactcataca

SEQ ID NO: 181500 - DNA, 201 bp, Homo sapiens
tcaaagttttgcttttctgttctcaaagttgttgaggaaactggcttagttaaagctaagtgtttagaaaccaagtgtgttttggatggtaaggtggagtyagcattatatatattaatacatttttggtaccagaaacagcaacaatcccttagtctggtgtgtgcagatgtaatatgtttcatgatatttcagcctgta

SEQ ID NO: 181501 - DNA, 201 bp, Homo sapiens
acaaaaaatcagccaggtgtggtcgcgggcgcctgtagtcccagctacttgggaggctgaggcaggagaatggcgtgaacatgggaggcggagcttgcagygagccaagattgcaccactgcactccagtctgctccactgagcaagactctgtctttaaaaaaaaaaaaaaaaaaaaaggatcttgactaatgaactaat

SEQ ID NO: 181502 - DNA, 201 bp, Homo sapiens
ttctcaaagttgttgaggaaactggcttagttaaagctaagtgtttagaaaccaagtgtgttttggatggtaaggtggagtcagcattatatatattaatrcatttttggtaccagaaacagcaacaatcccttagtctggtgtgtgcagatgtaatatgtttcatgatatttcagcctgtattttctgtcttaataagtg

SEQ ID NO: 181503 - DNA, 201 bp, Homo sapiens
agtgtttagaaaccaagtgtgttttggatggtaaggtggagtcagcattatatatattaatacatttttggtaccagaaacagcaacaatcccttagtctkgtgtgtgcagatgtaatatgtttcatgatatttcagcctgtattttctgtcttaataagtgaaagcactgcagaattgggctgcaggccactgccccatt

SEQ ID NO: 181504 - DNA, 201 bp, Homo sapiens
ttcccttttgtaaacaaaccatagaggtttccaccaacaacatgcattatgtccagtgctggaagcctgaatccagtgatgccatccatagttgtgggtgktgtaaaatccttttagagcaattaatattcaatgttctgaatttttccagtaaaagtggacatgtttacaaggattcatgtcttcattctttatagtgtg

SEQ ID NO: 181505 - DNA, 201 bp, Homo sapiens
agatgggtaatgtaaatgagtaataggccaggtttgagaaaaaccactgcacctgtgtgaagataaatttcaactgatatttaaccttgtaatgagcagaygacattagggagcagtggaggctgcattgcactggaaattgcatgctccatctgaagggaagggccagctctaggcattgtcagtcagctgttgccaaga

SEQ ID NO: 181506 - DNA, 201 bp, Homo sapiens
atgattagagaaatcttggaggattatcaaacggtacacagaaccctgcttaggggtcgccatgaatttattataaatctgccctgtggtgtgattttctycagcagcactcagcatctggttgtaagcacacaggaaagggttgttcttttgttttattaatcttaatgaatagcagtagtctgttctgcaagtccttga

SEQ ID NO: 181507 - DNA, 201 bp, Homo sapiens
ttatcctctgccaggaagcaactgaaagagtaagttttcttgacttaggaatatacgttcattagagagggtgtatggatgtgtgaacatgtgggtttacrtgcgtttaagtaggttagtagatctgctgtgttaggaagcccatttggaatggtttgagcatttaaaccttgtatttaagaggctactgtgtttatattc

SEQ ID NO: 181508 - DNA, 201 bp, Homo sapiens
aattagtggcatgcaaatcagtcaatcagtcacagtaaggtggcaaagatggtcaggggaaacacttggaaatgttttgaagatacccaggggctctcatrttctgtatggtattcagattttttttttttttttttacattttttcctcccttactagtatgtgagtttctccaggataaagagtatgtcgtatgcaaat

SEQ ID NO: 181509 - DNA, 201 bp, Homo sapiens
tttgtagtaaagacggggtttcaccatattagccaggctggtcttgaactcctgacctcatgatccacctgcctcggcctcccaaagtgctgagattacgrgcataagccaccatgcccggccacctttttgactgttttactccccttcatttgctaggcttgaggttaaccctttgggtttgctttagtggcattttga

SEQ ID NO: 181510 - DNA, 201 bp, Homo sapiens
actgatggtgtttgttttttctcatgtctacccaggaaaccaagtgctacctcctggagcttctcttggaaatgggctcacaccagaggcagcaagagacsttggccttctccctgggattgcggtcgcagcttcactcattgatgcccatgcaggaggactaggtaatctcttatttgttgcctacagccaaaaccgtat

SEQ ID NO: 181511 - DNA, 201 bp, Homo sapiens
gctcctgtggggcccgagcctccctgacgagcgccgccccctgctccacggagcctagtcccatcgaccacccaagggctgaggaatgcgggcgcacggcrcgggactggcaggcagctccacctgcagccccggtgcgggatccactgggtgaagccagctgggctcctgagtctggtggggacatggagaacctttatg

SEQ ID NO: 181512 - DNA, 201 bp, Homo sapiens
tgtgatatagtcccaccccgaggtcccccacaatttagtagtgtgggaccttgtagaagttgcttggaaaactttactctccttttctctatttgtaaatyaaagtgataataactaccttgcagtatcactgtgggaatcaaatatgataatatttgcaaagtgtcaagcacaaagcaatctcccaataatcaaggatct

SEQ ID NO: 181513 - DNA, 201 bp, Homo sapiens
agctggggaaaggtccattttttgccagtcacatttcagccttcaataaaatgagagttgtgttatttaaaaagaagaggaggaggggcactaggtaagcracctggagtcccaccttcaatgaggaagtgttttctaggtgaagagttgagtgaaggagatgctgacagaagtgacagcatgaatacagtttagtgctga

SEQ ID NO: 181514 - DNA, 201 bp, Homo sapiens
ctaatctttttgtcagtttcaaagcagatagtaagaaaactacatacataattcatattgccctggtcttgtagaaatgaccttacagaaacaatattcarccttattcacctaattctcagaacaggtttatgtggaaagtttattgtgttcattttttacagatgacaaagcagaatcaaaaaagtaaaggaatttacc

SEQ ID NO: 181515 - DNA, 201 bp, Homo sapiens
gccatccttacctcctcccagcacctggtacagtcagtagtcatttgacatatgaaggaataaatgaatgagtcaatcacagagcattctgctgccagttratagactttgcccctaaagattctgaactttatttgaactgaagccaggtggttaaagatgatttaatcaggacaaaaataaaattctactctctttaat

SEQ ID NO: 181516 - DNA, 201 bp, Homo sapiens
ctaaagattctgaactttatttgaactgaagccaggtggttaaagatgatttaatcaggacaaaaataaaattctactctctttaatggaataattgcttrttgcattttcttcttaaagttggccattcatctccttaaagttggccactgtctttcaatttatatatgttgtccatgaattattgaaagtgattattct

SEQ ID NO: 181517 - DNA, 201 bp, Homo sapiens
tacttcctatttcaaaaggtatttcatttcataagttagagtaacacccaatattagaatttcagtgtccagaaattgattaccttctcctgacttggaaytctctgctcaaaagcctttgatgactcttcgttgcctggagagtaaaaatttatttagccctagccagcgctgtccacctgcactcctaccatacacact

SEQ ID NO: 181518 - DNA, 201 bp, Homo sapiens
gaggtgatttttaggaaacaaaaattctttatagtagaacaatttatattcctttgggtatatacctactaatgggattgctgggtaaaatggttctttgrgaaagaagttctctaagttctttgagaaatcaccaaagtgctttccacaatggctgaatgaatttacattcacaccactagtgtataggcattccctttt

SEQ ID NO: 181519 - DNA, 201 bp, Homo sapiens
cctctagtgtctcctggggactggagacccattctctcccaggacccatcactgggtggccaggtaccaccagggcagggcaaggggagggaaagtggggragggttgtacccatcccatagtcccaactccagcctgataagagcccacttgaccctacctccatttatcattatcctttgctgtccctcatcccctact

SEQ ID NO: 181520 - DNA, 201 bp, Homo sapiens
tggcaggcaagacaaaaaagaacacatgataaattgcataattcttactttcaaaaagaggaaacatactagtttctggtgagagggaaaacttttcctcycaccaaattgcgaaagactttgcacacatggggctttgtggagaggttttgagtgctaaaataatacaaggtaaacaatgaatgtggtatggaagctaag

SEQ ID NO: 181521 - DNA, 201 bp, Homo sapiens
cactaattacaagatgtggccagccacagacctggccgttttgggaggctgtcagtatatcttttatgggctttatttaagtaaaggtcaggtgattgttygggatgccatagatcagatgtctcttactgttgatagtgagatttagaggcagagtgtggaggctagaaatcaccgtcccagaagttaaaagcctggaga

SEQ ID NO: 181522 - DNA, 201 bp, Homo sapiens
gaacacatgataaattgcataattcttactttcaaaaagaggaaacatactagtttctggtgagagggaaaacttttcctctcaccaaattgcgaaagacyttgcacacatggggctttgtggagaggttttgagtgctaaaataatacaaggtaaacaatgaatgtggtatggaagctaagagcatacaggctctggcat

SEQ ID NO: 181523 - DNA, 201 bp, Homo sapiens
agagcaattggcacgagtggggtggtgttgggggcagagttagagggaacttggttccataaagcacaagagccatgttagagagcctgattttgggtggractttagatactaagagtcctgtttcaaggattttgtatcatctgatctgctaaaatacatgtttacttatttatttttattctggctgtgcattagtat

SEQ ID NO: 181524 - DNA, 201 bp, Homo sapiens
ggcctagcttgtgatgggcttggtgcaataaaaatgatgggggcagaggattgggaaatgataacataggggatttcaggagacaaaaaggtaaaagctasatcagacagtcccatatgtcgtggcaagctgctcaaggactttagtaaggagaatgatagaattaaatttgtgtattagaaagatcattgtggtggaggt

SEQ ID NO: 181525 - DNA, 201 bp, Homo sapiens
gaacctgaggcataaagaagttaaataacttggcctaaatgaaacagctagtaaatgccagaatcaagaagtctggctcccacttctcaactgaacgttcaagagatatttgttcagcaaagcagcagagtccaaatgacttgcccatggtctcaagcttaggactacaagccaggtatctagtagctcaggaattagagc

SEQ ID NO: 181526 - DNA, 201 bp, Homo sapiens
taccctcaggatttgtattcacttgacttgaggtggagctagggtgtcaactttttaaaaaagttttctcagtaagtctagtatgtagagaatcactgggsacagattaacggagaattaaaatattaggaacagaacacttgaagtggaagaagacagttccttgttaaatttgcttaaatatgtaccctctttggatgc

SEQ ID NO: 181527 - DNA, 201 bp, Homo sapiens
ggaaaggcaactgatatttattgaaggcctactattatagtaaacttgactcataatttatattttcttctttaattttaaccttggcatgcaatgattaytacccaattttgtattcagtaaaattaaagcccagagaagtttagtatttttcctagagtcacatagtaaacacgtggcagcaggggtgtttggatacta

SEQ ID NO: 181528 - DNA, 201 bp, Homo sapiens
gaacaaagggtgataattggggctgggagagggagttatgacctagtctcctctgtgcaacagatacctaatgtttagatttttttgctgattcataatawtttttcccctcaagtatgcctgcaacacattctgtgaacataaacatgtattttagcaaggtattaattaagtgaatatatggatgaataatctaccctt

SEQ ID NO: 181529 - DNA, 201 bp, Homo sapiens
cataaacatgtattttagcaaggtattaattaagtgaatatatggatgaataatctacccttaggtaaagtgaggtagctcaaatgtaactttacctccarttctcttaaacgacaacatttttgtgggtctgtgttctgtttcccatgctgccttattgtatagaacctctttctcactctttcctcacctgcctagcca

SEQ ID NO: 181530 - DNA, 201 bp, Homo sapiens
gctctgctccctaaccaaggtgtggccttgtcctgcgcaggcatgcctgtggtcctgtcgcaagaggtggagtccgttcttgtgggtgctgctgttctggktgcctgtgcctcaggggatttcgcttctgtacaggtatgtgaagaccagggggtgggctgtggctcctcccctgtctgaggccatccttcctcttgacag

SEQ ID NO: 181531 - DNA, 201 bp, Homo sapiens
ttatgtgttaaagaggatttgtttttgttttcctttctcacaggagtgattggggcagatgtgagagggcacggcctcatctgtgaggggcagccagtgaygtcacggctggctgtcatctgtggaacgtcttcttgtcacatgggggtgagtccactgagcacaaaggcaaggccaccacacagcaggaggtagcctgga

SEQ ID NO: 181532 - DNA, 201 bp, Homo sapiens
agggagaatactagtaaatcctctaggtgttatttgggaccccgaaagtcagtgtaaactaaaaatagacaaactttacaaaggccaaagcctgggtttgwattaaattaacatctgattaaattcagatcatctatccctacttgagctaactgcaagaagcaaggttatatcctttctagaggtaggtaacataatcag

SEQ ID NO: 181533 - DNA, 201 bp, Homo sapiens
cagtctcaggtatttctttatagcagtgcgagaacaagctaaagcaggaagattgcttgaggccagaaattcaagaccaacctgggtaacatagtgagacrctttctctaataataattttttaaaaattgccaggcgggcgaggcgcggtggctgacacactttgggaggccgaggcaggtggatcacaaggtcaggaga

SEQ ID NO: 181534 - DNA, 201 bp, Homo sapiens
ctaatatttactgagtataccctttgcagatattgtgctacatactggagatagcacatgtgaagatactcagcccctgcctgcgagatgcctatcaactrtggagaaaacagatgattaatttattgttattactaaaagggaagtgctgagacctatgagaataaaatacttctctaggatttgtgattatgacttcaa

SEQ ID NO: 181535 - DNA, 201 bp, Homo sapiens
actgaacttccttgggcccctataggtgggttagctgcctttgtggcccctcctgtgatacactgatttccctgcactgaaatactccatttaggcttccrtctccttcccaccagactgtgagcagggacttgtcttcttcatccttgcatccccaagcatttgtactcttacttcctgtattgagctagctactgtggt

SEQ ID NO: 181536 - DNA, 201 bp, Homo sapiens
ggatggtgatatgatgatggttctttgtaagcttgtcacttgtccctcttccaaagtgagtttacccagaggagcattctgaggttgaatttgtcccataycaccccttcacctacacattgacactccccgctgtataccatggggtcagagaccttgcactacaaaggccccttgccaagcgtggtattgcttgcagcc

SEQ ID NO: 181537 - DNA, 201 bp, Homo sapiens
actttccacccccagctttgtgttgtagtcctgcaagtctgcgtgtttgtggcttccacatcacacctagtatatatcgttttgtgcatagaaggggcttrttggatatttgaacaaatgaatacaattccaggccctaaagagtctttctagctttcttgtcacatttgtaactttagttgccctgcaagtatcaaggaa

SEQ ID NO: 181538 - DNA, 201 bp, Homo sapiens
aggtgtgtgggtccagcacaagggagccagctggggatatcttaaaaggaatcccatccataaggttcaactagaggagcagaatgatcccagagcaggasttgatcacctgaaggccaggactgaaagggagttgtgggcagaccactggacggagagatagccagctttggacaggcaccacaccctgaggacataatg

SEQ ID NO: 181539 - DNA, 201 bp, Homo sapiens
gggatatcttaaaaggaatcccatccataaggttcaactagaggagcagaatgatcccagagcaggagttgatcacctgaaggccaggactgaaagggagytgtgggcagaccactggacggagagatagccagctttggacaggcaccacaccctgaggacataatgaagccagataacaacgtatatgcatcaagtgag

SEQ ID NO: 181540 - DNA, 201 bp, Homo sapiens
attttcttctttaattttaaccttggcatgcaatgattattacccaattttgtattcagtaaaattaaagcccagagaagtttagtatttttcctagagtcacatagtaaacacgtggcagcaggggtgtttggatactattgtgccaggcagcctttccgaacactccagcctatttctcaattctttcttggctccaga

SEQ ID NO: 181541 - DNA, 201 bp, Homo sapiens
ttgggagctaattagggttagatgaaatcatgagggcaggagcctagtctgatgggttatgatggtctgatgggcccttatacaaagacaccagagagctkgcttgttctctctgccatgtgaggacacagcaagaagtccatttctataggccaaaagagggctcccacgagaccctgacattgctggcaccctgatctc

SEQ ID NO: 181542 - DNA, 201 bp, Homo sapiens
gtggcagcaggggtgtttggatactattgtgccaggcagcctttccgaacactccagcctatttctcaattctttcttggctccagaggattgtgtagcargaggggaaatctgttcagagatcaggaaactggaccaattgggcaagctgccagagcttcctttactggattgtaccagcaagtttgtttttctctgtcc

SEQ ID NO: 181543 - DNA, 201 bp, Homo sapiens
tgaaatgggctggagtggaaacattaatttaggacaggcagagaagcagcaggaagagggatttttagataaaggtgctggtgagagcaaagaaacagatrcagacagaacggagatcaacgttaactcctgggaagggtcccagttcaggagtagtgaaaaagaaagttggatagataggaccacagttgattacaggta

SEQ ID NO: 181544 - DNA, 201 bp, Homo sapiens
aaatgctttcttcctccctgattcacatggtgagcaagtggcgggggcccaggactaaacctcatagcatcagactcccagtccagtgctccttccaagakgcctttcaattgttttctttctgtctacctacctcacactgtgtccttcatctctctgtctagcccccaggaaaagtgcagcaagtgcaggtatttctga

SEQ ID NO: 181545 - DNA, 201 bp, Homo sapiens
atttttcatgtgtcgatttttgatctccaccttgcactgtgagctccctgaggacagggactttgtcttggcaattatgtcttcacacttggcatacagtmagttttcaagatatgtttgttcaatgaataaatggatggtaggcaccattcagtgctgtttagggtcaaaggaaggcatgatttgtgtgggttgaagtgg

SEQ ID NO: 181546 - DNA, 201 bp, Homo sapiens
cgtagaggagggaaagggaaatgagctttccattttgggagaaaaattagagctactcttccagtgacaaaccgcattgcctggctttccttctgcaggcwctgcctcatgcctgtgttcctatagacattggagttaaagctctcattcatggtcatgattctcgcctctgtctaattcttttactttgtcgtgtaccat

SEQ ID NO: 181547 - DNA, 201 bp, Homo sapiens
cattttgggagaaaaattagagctactcttccagtgacaaaccgcattgcctggctttccttctgcaggctctgcctcatgcctgtgttcctatagacatyggagttaaagctctcattcatggtcatgattctcgcctctgtctaattcttttactttgtcgtgtaccatctctccttttcccactgttttttccagcca

SEQ ID NO: 181548 - DNA, 201 bp, Homo sapiens
cttaccctgtggtggtattggagccaaataatggaattgatttttcagtgtttattccacataattccaaggaatatgattttaagagtgttcacaattcrtatttttttttaatttttgaaattgaataagtttcaaatacgaaaatttaggaacatgatacaaaacttttctctgtgcaccactggagtactgcttttg

SEQ ID NO: 181549 - DNA, 201 bp, Homo sapiens
aaggccaggactgaaagggagttgtgggcagaccactggacggagagatagccagctttggacaggcaccacaccctgaggacataatgaagccagataayaacgtatatgcatcaagtgagaccttccccaggcaccttgacccctgtatggaggaaccccaaaacacccagctgtccagcaggaaaaagtagaaggagg

SEQ ID NO: 181550 - DNA, 201 bp, Homo sapiens
tagtagttttgtcttcctcttcctgtctcccatgatcaccgatgtttctccagcaggctttaaacttcatgaggtcagggatcagagctgtctggttgccycctctatccatattgtgtagcacaatgccttgcacacaataagtactcaataagtatttggttgcacaataaaaatgacattatctggctcaaacttccc

SEQ ID NO: 181551 - DNA, 201 bp, Homo sapiens
ctatccatattgtgtagcacaatgccttgcacacaataagtactcaataagtatttggttgcacaataaaaatgacattatctggctcaaacttcccattytgagaaagaggaaactgggatccaaagaaaggaagcaacttattcaaaacaacagagcccaggctaagattaatacagggctggagcctcctaatttcca

SEQ ID NO: 181552 - DNA, 201 bp, Homo sapiens
cataccagccttggattcactacctctggactttgtttgtatgagtaggaaatttgtttatttgtttttgctgttgtttttgctttattagaaaatcactrttttgtagatttgtagctacacttaatcataactaataaaaatggtgactcataaggtttgggaaaacaacagttaaattaaggtagtaagtttagctat

SEQ ID NO: 181553 - DNA, 201 bp, Homo sapiens
acctagtatatatcgttttgtgcatagaaggggcttattggatatttgaacaaatgaatacaattccaggccctaaagagtctttctagctttcttgtcayatttgtaactttagttgccctgcaagtatcaaggaatacgagctctatggggaagaagcctgaatttataccatttatgggaaaccctctgctatttggc

SEQ ID NO: 181554 - DNA, 201 bp, Homo sapiens
accatagaggtttccaccaacaacatgcattatgtccagtgctggaagcctgaatccagtgatgccatccatagttgtgggtgttgtaaaatccttttagrgcaattaatattcaatgttctgaatttttccagtaaaagtggacatgtttacaaggattcatgtcttcattctttatagtgtgtggcttgtttttcattt

SEQ ID NO: 181555 - DNA, 201 bp, Homo sapiens
gtatatatcgttttgtgcatagaaggggcttattggatatttgaacaaatgaatacaattccaggccctaaagagtctttctagctttcttgtcacatttrtaactttagttgccctgcaagtatcaaggaatacgagctctatggggaagaagcctgaatttataccatttatgggaaaccctctgctatttggcattct

SEQ ID NO: 181556 - DNA, 201 bp, Homo sapiens
taagaatggtgacctagggatgccagaaagattcagtcatcagaccatcctttgcttttgcttctttgggactgagatgtgatgtgttaaaccagattccwtttggctccgctccttcttagcagtgaccttgggcaagtcagttaacctctgcagaccttagtttctcctctgatgtctaacattaataatatctatgat

SEQ ID NO: 181557 - DNA, 201 bp, Homo sapiens
acccaaacctagaagtcattcttaatgcttctcttcttcctcttacaccttacatttaatccatcaacaagtactttctgctttgctccaaagtggaccckgaatgaggcattcctgcccctcttcactattagtatcgtagttcaaagtagttttatttcttgctggatttgtgtgctagcctcttaaatggtctccctg

SEQ ID NO: 181558 - DNA, 201 bp, Homo sapiens
ccaggttcttgttacctggaaatgtgtgttcatttggggtatctagatgaggcaggacttcaaggaaggggatggataatgcacttaatcttcatcttcayataaggatagctgctctttatcttctccctctggaagctgccattgtgaggcagcattaaggtgggagaggaccctctggagttcatccagaaccctctg

SEQ ID NO: 181559 - DNA, 201 bp, Homo sapiens
tttggtggagagctgcagccatcctacactttctcctagtccactgatatccctctgtgtcctccattagctgaacctggctggaggccagaggcagaagrgccctctggtgtgctccacacccatcagcatcctggcttacaaggcagggtggagaaagttagagattgaatttgaagagcacatggaagatgtctggga

SEQ ID NO: 181560 - DNA, 201 bp, Homo sapiens
aagaaaaaaacaaccccatcaacaactgggcaaaggatgtgaacaaaatcaattcttttaatacccagtattctattggagttcagagaggttaattaccrttccaatgagaaagcagccgaggtgggatttaagtccatatcttctgaccagagctttgctgttctgtacacttttagccccaacttattaatatttggc

SEQ ID NO: 181561 - DNA, 201 bp, Homo sapiens
tggcaaccggtctcccttagcagatctgacactaaagggcatggtaagtaacagctagtccttgcacatgggtgaaggcaggccaaagggctacaaagttkggaagaagcaaagtgaggaaaaaggaaaagaaaaaaataaaacaggccaacagccctctggctttgtgcagatgcattgctgttgctgctccctgggatg

SEQ ID NO: 181562 - DNA, 201 bp, Homo sapiens
catggcaaccggtctcccttagcagatctgacactaaagggcatggtaagtaacagctagtccttgcacatgggtgaaggcaggccaaagggctacaaagwttggaagaagcaaagtgaggaaaaaggaaaagaaaaaaataaaacaggccaacagccctctggctttgtgcagatgcattgctgttgctgctccctggga

SEQ ID NO: 181563 - DNA, 201 bp, Homo sapiens
tccccttcttgaagtgtgtatacgctaagcctgaaatatactgtagctgcagaagggagaattttcaattagccaaaatgggagttttaattattataatrgagtgtacatatttactgctagaagctggcctgaggacttttataattgaagagtgtaggaatacagtggatccccctgaaatttcatcccaggaatgag

SEQ ID NO: 181564 - DNA, 201 bp, Homo sapiens
agatacctaaaatttagcatgtcaaaagcctaattcctctcagcccccaggaaatctcctctcactgtctttcctagaacatgaaagaacaattctattcrtacacttgcctatgtcaaaacaccttgaaaacatccttcatccctctctttttctcatattgtgctccagtaaatgctgtcagttctactgatggaatcc

SEQ ID NO: 181565 - DNA, 201 bp, Homo sapiens
atcctactgtgtgctgaatgataagacagaggaaaatcagtgagctttgggaacatggaagagattataaacacataataaagagagtttaaaagggcacyacagtgatttgctttggacctgcattccacacctgtcactctatctgtctgacctctgctctctctatgctcctggcttctagcccttctcttactttgg

SEQ ID NO: 181566 - DNA, 201 bp, Homo sapiens
ttcctagaacatgaaagaacaattctattcatacacttgcctatgtcaaaacaccttgaaaacatccttcatccctctctttttctcatattgtgctccartaaatgctgtcagttctactgatggaatccaccaatgtggaccacctagttcaagcagttgtgctccctctcttggtttattgacacagtctcctgactg

SEQ ID NO: 181567 - DNA, 201 bp, Homo sapiens
agtctaggccagaatatctaggccccactaccaaaatggctctcgcttagaagaattggagatccaaaagcagggaacttgaaagagcatggagggatagwtggatggatagattccttgcctcttagcttcgattattcacctgcctaaacccagagcagttggcctagtgactaaccaacatcccttgcagctcaatca

SEQ ID NO: 181568 - DNA, 201 bp, Homo sapiens
ccaatacacacccctggccacatggagcttgcatgctaaagggataataaatatctaaagtttatgtagcatttactatatgctggcattgttgtgttttrcctcaaataactcacgtgcttctcatagcagtcctatgaaaggcatatttttatccccattttctgatgaggcaacaggcatgaagaaattaagtaatta

SEQ ID NO: 181569 - DNA, 201 bp, Homo sapiens
ctctgggtcccagattcctcatctacaatatgtagagagtgacagcacctgtcagagtgctgcaagaattaaatgaggtgatactaagtgctccacatgcrgtaagcacatcacaagggctcactcttaatcactaggactgttgttgttactgagcagaaagcaaacagtggctgactctgcctgggagggtgcagggtg

SEQ ID NO: 181570 - DNA, 201 bp, Homo sapiens
tattgagctgcagtctaccctgtccaattaaaagtcagtggacatttgttgaataactgctatgtgccaggtattttgaaatatttggtgttatttaatcyttatagtgaccctaaaatgcattgttatcccttagttatagatgagagaaagtacataagtggtttacccagctagtaagtagcagacctgtctttgaat

SEQ ID NO: 181571 - DNA, 201 bp, Homo sapiens
tattctgtgtcccatttcctggtttccggtgccatattcaggcaccaaggagagggctttttgaagttagctgtggctcagataaagtgtggtggcatgcrtacacacggtggactaacaatatgacttaccggctttgattttgccacactagttgtgtgaccttgggcaagtctcttcccttctttgattgtcactctt

SEQ ID NO: 181572 - DNA, 201 bp, Homo sapiens
acaggataggtgttacgagcccagttttacagatgatgagactgtgggtccaagaccataagggatttgactaaagatcaaacaactaaacaaactgttaygctggcatttgaactaggtcttcctaattctgatccagacattctttctatcagatcacactgcctcctgttggtgtgaaagcattttacaaccataaac

SEQ ID NO: 181573 - DNA, 201 bp, Homo sapiens
agaaaccctattagattgggggtattatcatcttctttgtatagctggggagactgaggcacagaaaaggttaagtaacacacctatggtcacacagctgktatgtagagaaactacactttgaacccatgcagtttggcccctgagtccatgctcttacttactgtcacattacctctcaggagaaaacaggataggtgt

SEQ ID NO: 181574 - DNA, 201 bp, Homo sapiens
gcccattatttccatgtaggcagactcatatggagacctatatctttatcaaaaatgtgcttgtcaagtagattattcagtgacttattgggagaaaaggytaggcattcatcttattgtagggatggctttatcaatggaactgcatatagctgatggccaatattcatctttatcctgaacattgcttagatgagaact

SEQ ID NO: 181575 - DNA, 201 bp, Homo sapiens
ttatataattgtttttatttaatctgttgatgtaatggattacattgactgatttttgaatgttgaaccaaccttgtacacctggagtaaatcgtatttgkttgtggtatataattccttttacacgttgttggattgatttgctaatattatattaagaatattttgcatctatattcatgagagagagtggattttggc

SEQ ID NO: 181576 - DNA, 201 bp, Homo sapiens
gcatattgttataccaggcactgtgcttagtgtggaaagacatcaggtgcctacattattacagtggtgtgggggcagggcatggtggacatacaactaamataacaataaaccacagatcagagaatagggaagttttaaagcactgaggacacatacctcatctagcccaagcaagagggaggtagaggtaaagcattg

SEQ ID NO: 181577 - DNA, 201 bp, Homo sapiens
tgccatgattgtgaggcctcccagccatatggaactgtgagtccaattaaacctctttcttttgtaaaatgcccagtttgggatatgtctttatcagcagygtgaaaatagactaatatagtaaattggcaccgggagtggggcactgctgaaacgatacccaaaaatgtggaattgactttggaacttggtaacaggcag

SEQ ID NO: 181578 - DNA, 201 bp, Homo sapiens
catacacttgcctatgtcaaaacaccttgaaaacatccttcatccctctctttttctcatattgtgctccagtaaatgctgtcagttctactgatggaatscaccaatgtggaccacctagttcaagcagttgtgctccctctcttggtttattgacacagtctcctgactgtctccctgtttttaccactgggccctgga

SEQ ID NO: 181579 - DNA, 201 bp, Homo sapiens
ctcatcattaaggtctatccagaccaccctatattaaaataacaacacttgccttcactcactgcttaacctctctatccttctttatttttctacacacrgttatcgtcctacgctccactggactgtaagttccatgaagacagaactttgttttttcaccactgaatccccagccccttcaaagtgccttgcatgtaa

SEQ ID NO: 181580 - DNA, 201 bp, Homo sapiens
ctttaccccccgccttgttacaccccagccccaagtgagcctgttagaatcctgtgcatcctctcagactccagtttcatacaacctcctctgtgacaccrcgtgagtcagatttaattcctctttccccagaactcaaagttttcagttttattttgctttaatcaagtttgtacccttaaccactacattgtgtgtctt

SEQ ID NO: 181581 - DNA, 201 bp, Homo sapiens
agtcctcacccagcctgctacactcatttcctttttcagccctacccctctgagcacttgaatttgagacttaggctgtgggaatttgttcaaggaatctrtcattacttttcctctagcaagcgcttagagaaatggaaaggcattccagatggcgaatttcttggtccagggctctcatgattccatgcctgtattctc

SEQ ID NO: 181582 - DNA, 201 bp, Homo sapiens
ggtatttgacatgaactctaacatatctgtgattaatatggtcaacaaattataggagaagatggagaattcagcagagatctgggaagtagaaaaagaartggggattctagaattgaaactaataactgagattaagaattgactaaatggagtaaagtcaacagcatacaatataattgaaaagagaattagagaact

SEQ ID NO: 181583 - DNA, 201 bp, Homo sapiens
aaaaaaaaaaaaagaaaaaccattacatacaaagaaaaaaataccattgtgaacacttaaaggaaagccctcttgaaaattatttactactgaaaccaaawgaaaatgttagagaactttgtggtatattcaatggaatatttttaatttttttttaagagacaggatcttgctctttgtcactcagactggaatgcagtg

SEQ ID NO: 181584 - DNA, 201 bp, Homo sapiens
gggcagtataccctgtattagtttaaaaaaggtctcagcttacacgggacagcatttttactttttacccttgcctttgctcattcacagggagtacttcrgaatcagcccatctaagcctcagacttcaaagggagctcattcctatttgacaacagtcatatccattttgccaactctttgacctttgaaatagcatct

SEQ ID NO: 181585 - DNA, 201 bp, Homo sapiens
taagaagtcataattttgggtgtctcacttttgcatactcctgatttttgtgacattaatgtggggactaagctctaacctcagtgaatgtttttgctaargtttctgagaaattttgaaggtttcaggtgtgtctgtagcttgacagtgtttgtttcttttgatttttttttcctgtgatagcttttaggatcaggaaat

SEQ ID NO: 181586 - DNA, 201 bp, Homo sapiens
aatataaacccttctctaaaggccagggtggaaggtacaggcattgcgtaggggagctccatgcaggaaggtggagagatctgagttcccactggcagtargagctatgggctgctgtccctgtttctgttccctggaggcagctggagcatccctctttttgtgaaattagaaagattgtctttctccatctcttccctg

SEQ ID NO: 181587 - DNA, 201 bp, Homo sapiens
gggaaaattttcaccttccgggtttctgttatgcagcacggagtaccagagagagcacaacctgctccaaacttactaatagtgcttccctagcccagtcrcccaatttccataaacctcggtttccctatctgtacaatagttgtgataataggcacttcatagagttgttgagaccagaaacaatgtgtgtaatgttat

SEQ ID NO: 181588 - DNA, 201 bp, Homo sapiens
gaacaaggattgtggaggaaactaatgtttactaggagtgtacaagaatgggcacatgaacatgtataatctcactgaattgaattcggctaacaatcctrtgagttaaatgttgctaccaatgaacaaagtgagactcatagacattaggtgactactagtcagaaataacaccactaataagtaggagaaccaacattt

SEQ ID NO: 181589 - DNA, 201 bp, Homo sapiens
atggtatcctggatgggatcctggagcagagaaagaacattaggtaaaatctaaggaaatctgaataaagtatggtcttcagttcatgataatatatcagygtcattcactgtgacatatatacttgacaagatagtaatgataggggaaatgtaactggatgtgaggtatatatgatctttacaaccatcttatattgta

SEQ ID NO: 181590 - DNA, 201 bp, Homo sapiens
tccttctcctaagtcctacttacccttcacatttagctcaggcatctaatatcctctcgctggaagctttcagactagattaggtggtgtatctatgtgcrtccatggtacatacctgtcatggtgcgtatccttctgtgtttgttgttagttaactggcttatgtcttccttgctgtgaattccttgaggacagatattg

SEQ ID NO: 181591 - DNA, 201 bp, Homo sapiens
ccccagccacgtggaaccatgagtttattaaacctctttttctttataaattacccagtctcaggtatgtctttatcagcagtgtgaaaatggactaatamattggaccttagtacttttcttccgtagtgtgggagaagtagtaccctggttgctaatagtgaggtcacatgggatctaattacttcctaaacatacttt

SEQ ID NO: 181592 - DNA, 201 bp, Homo sapiens
tgctgaagggagtctggggagttaccattccaaagaactcacaagaaaacagaactgacttggatatattccaggtttgcctagtggtacttcaaaatggyagattgaatgttattttaaaagtcattttaaaattatttcctttgaaatacagaatttaataggagaaaaatcagaaggagaatgaaaaataatatggat

SEQ ID NO: 181593 - DNA, 201 bp, Homo sapiens
tctcaggaccttgatgatcttgccattctctacctggccacagttcaagccattgctgtaagatactgtaatgccatttttaaagagacttagagccatcrgtatactctaggccactggctccccaagatacagcacatgcttttgtgacagagattcttaattaaaagattgtttgcaaaaaagagattcttgtatgtc

SEQ ID NO: 181594 - DNA, 201 bp, Homo sapiens
ttcctgcaggttctgttttcataatgccagacccatcagcagtttaactgagacataccgttgtacaatgtcattattttaggtattgtatttgcaaggcyagcggtctaagtaagagattaaactgaacagatttctgacttggtaagacagagactttctaaggggtacactgccccactttatcttaccccagtgtat

SEQ ID NO: 181595 - DNA, 201 bp, Homo sapiens
aggacttcgtctttgaaggaaactgttctggggtaagcagagctcttaacatacctctgctaagtggaatggcagcatgttcactaagatgtgtttgaccrtttggccctccacaaaatgactccagacagcccttttagtcttcctctttctccatggtttctttgtcaataatttttcttcattaaaaaaaatctcctc

SEQ ID NO: 181596 - DNA, 201 bp, Homo sapiens
tttcttcctcattcactttctctccaacatattagcttttttcttgttcctctgaaatggttagaaagtataagggaagaaaagttagtggtgtaggaaakttcttatctgatcagtactgtcataatgggcttcatgctctcttagccttataggtgtttacagctagctctgattctcataaggcacatcatagatttt

SEQ ID NO: 181597 - DNA, 201 bp, Homo sapiens
gttttttcatacattacatttttatatcttttgaaagtactcttaagagctgtcagaagtttgaggtagtttctactctttcacttaaccaatggttagarccccaggagaaataacagtgagatcaaagaactcagaagaaccaatgggaagctttttgagcaatcagcactgaaggaatgaaattgaaagtccctacgt

SEQ ID NO: 181598 - DNA, 201 bp, Homo sapiens
taaatccagcaagttttattaaggatttcaaaaggggagggggtgcaagaacagggagtaggtcacaagatcacatgcttcaaaggcaaaaaggagaacaragatcacatacttctgaggaaacagtacaagggcaaattcagaactactgataagtgtctatgttcagctgtgcatgtattgtcttgataaacatcttaa

SEQ ID NO: 181599 - DNA, 201 bp, Homo sapiens
cagagatgttttaagtaatttgtccaaggctacacagaaagggcagaagcagaattgaaatgaaggtctctctgggtctatatcttatcctgtcattcttyttctaatttgttcgatttgttttttctttaaaaatattttctggcttcttaagtgttcagtggtgtattttctgaaaagaaatgccataggtcacaaatc

SEQ ID NO: 181600 - DNA, 201 bp, Homo sapiens
attgctttctttctgtgattcatattttcaacctgaacttcaacacagtcttttctttgaacttcagggaccctggcttggtttgcagggtatctgccttyccctccttaagaaagttgagcaattcctgccagcacctcaactattccagcaagtcagatgttttatcttctcatggaccacacatctggtggttagatg

SEQ ID NO: 181601 - DNA, 201 bp, Homo sapiens
aacctatggctgacaggtgacttccaaggctttccaaattctacatggaacccctctgtgtgttgtcagcctgacactccatggcagtggtagccagctgrggtcactgccttgacccaccctgagacacagggggcccaatgtctggcctgactctttccacacctatgctcatctttatgaggagaagagcaagagcaa

SEQ ID NO: 181602 - DNA, 201 bp, Homo sapiens
ctaaccggcacattgtgcacatgtaccctagaacttcaactatagtaataataaaataagaaaaagtaaaaataaaaaaataaaagagaaatgcatttgakgcaaagcctcttttcctctgtgtagaactgatgatggggtaaaatagaagaaaccacacatatacaccctgatgctgatctagagcccagtagctccaga

SEQ ID NO: 181603 - DNA, 201 bp, Homo sapiens
tttagttggggtaagttctagaccacatttctttcaaggtcaaagcaatacttcatgaaacattgggattacctttttgacttttttttttttttttttttgagatggagtctcgctctgtggcccaggcttgaatgcagtggcgcgatctcgattcactgcatcctccacctcctgcattcaagcaattctcctgcctca

SEQ ID NO: 181604 - DNA, 201 bp, Homo sapiens
attaggcagctactctgtgtcagaaactaagccaggggctctgcacaaaaggctgtagttcatagctctgcaaccctggggggcagctattatataaactycttacaacaattaacacaaatccctcaagtgtaaacatctgatgtctctttaccttcaacccactagggacacaaattgagaacccagcaaccctcatct

SEQ ID NO: 181605 - DNA, 201 bp, Homo sapiens
caaagaaatgaaatgacttctctacaggtatcaaatcttggtgaaggtcctttgggcttaaactggagccaaatgaagtcccttggatcttaatgaaggtycttttggctttaaattctggtatatgtgtgtgtgtgtgttattctgctgtaccatgtttcttcctcatttgggttggtggattttcagctccataaaagc

SEQ ID NO: 181606 - DNA, 201 bp, Homo sapiens
cctagtcctgctttctcccaagagaaattgtacactaacatttgtttagtagtgcctatatcccaagtacaaggctcttgccttatacctaggatgagcarctattccagtttgccccaagataagctggggggtttccttgggtcctggaccttaaatagagtgtagacgaggagagttatcttttcttctgtctatcct

SEQ ID NO: 181607 - DNA, 201 bp, Homo sapiens
gcaggcgagggatagaatcaacatccaggttcagaatctatttgtcttttttggtcttattgtccgaagcttgagtcaaggataaattaatcagtctagakgtgggagagccctctaaccctccccagggaaaatcctagcctttatagaaacttggcctggttttggctctcagatttaattccaagctgtgaagaatct

SEQ ID NO: 181608 - DNA, 201 bp, Homo sapiens
cgggacactgccgcccaaatactgggcttttccaacagtcttagcaaacggcacaccaggagattatatcctgcgcctggctcggcgggtcccatgcccasggagccttgctctcactgctagcacagcagtccgagatcgaactgcaaggtggcagtgaggccaggggagaggcttccaccattgctgaggcttgagtag

SEQ ID NO: 181609 - DNA, 201 bp, Homo sapiens
aaaattgaattgctttctttctgtgattcatattttcaacctgaacttcaacacagtcttttctttgaacttcagggaccctggcttggtttgcagggtayctgcctttccctccttaagaaagttgagcaattcctgccagcacctcaactattccagcaagtcagatgttttatcttctcatggaccacacatctggtg

SEQ ID NO: 181610 - DNA, 201 bp, Homo sapiens
tgcctccagacctaatgtggaagaaggtgctgtctgcctgctatttccttgcttctccttatttcaatcttttttttttctccaaaaaaaaaaaaaagtgwcttaggaaggatatggacttgtgagtcagatttgggtctaagtcttggttctgccctatgtgtaatcccaggaaggaacttgagttgattttctgaagct

SEQ ID NO: 181611 - DNA, 201 bp, Homo sapiens
tagtccagacctggcaggaaagaggctgtgagcagttctgcctgccgcagatgtgctggcacatgtaccgccgtgtgctgccccaggtaacatatcaggcrgctagggaatgtaggctttcagaccctctctcttcagttctcttctgctgacttcctcccatccagccatcatactttcttaatcctctcatcaatcccc

SEQ ID NO: 181612 - DNA, 201 bp, Homo sapiens
aggaaacattccaggtgtgagtggctgaccctcagagtagagaaagggttttgttggtttgtgttttgtttctttggatttacctctgggtttctgagaaytgacattttcataatctgttccttctctgcattatgttaatagacttttctggggcaggaagaatttagtggatgtcatttgttagccaaggtatatgtc

SEQ ID NO: 181613 - DNA, 201 bp, Homo sapiens
ggctgtgagcagttctgcctgccgcagatgtgctggcacatgtaccgccgtgtgctgccccaggtaacatatcaggcagctagggaatgtaggctttcagrccctctctcttcagttctcttctgctgacttcctcccatccagccatcatactttcttaatcctctcatcaatcccctttgttatagagaagatggaagg

SEQ ID NO: 181614 - DNA, 201 bp, Homo sapiens
atttattccacttgatgtttaggcctctgcttgcatctctccccggaagcctttagaaaagcctttagaaaagcctccccaggtcccaaaccctttccccsctctgagccctgtctgtgattactcattagaggcagatatatggccacacacaaaatattacaataatgttatgaggctgactcatcaaaccttggtatc

SEQ ID NO: 181615 - DNA, 201 bp, Homo sapiens
cgtgctgagtctaaatatttcatctccaaaatgggcatcatcatagcagttgtaagaattaaataagttaatttacctaaaacactcaaaacagcacctgkcctgcgtaaatactacacaactactagctgctgctgatgataacagctaagccatttttgtggctgagagtcagcagccacagccagggtggaggagatc

SEQ ID NO: 181616 - DNA, 201 bp, Homo sapiens
gttctactgatggaatccaccaatgtggaccacctagttcaagcagttgtgctccctctcttggtttattgacacagtctcctgactgtctccctgttttyaccactgggccctggattctgttctcacagcagccagggtggcctcttgaaaacttgcctcagattatgtcattcctctgctcaaaacctttcaataatt

SEQ ID NO: 181617 - DNA, 201 bp, Homo sapiens
gatcagagcaatcaatattgttaaaatggccatacttcccatacagattcaatgctattcctatcaaactaccaaaatgatttttcacagaattagaaaarcctattctaaagttcatatggagccagaaaagagcctgaatagccaaagcagttctaagcaaaaagaacaaggccagaggtatcacaatacctgtcttct

SEQ ID NO: 181618 - DNA, 201 bp, Homo sapiens
cagtatgtacttacaaattcttattttattgtctggattataatccattagtatcattattttgttttgcaaatagtccttttaaccaatggggatccctwcaaattagcttttctatctttctgacatgtctccatcttttttaaggcatttttgctttctggtgccagaagataccactttgtgctttacttgctccaa

SEQ ID NO: 181619 - DNA, 201 bp, Homo sapiens
cttgtagggatgtatcctgaattcctctgagctaagcctgagaagcacaagtgggttctattgggaaacacttccaaaaggcaatgattgatgcttatgcmcagaaattctgacttttagtaaaagatgcttggatataaatcaagcaggactctccttgcctttatacaatatgcggtaaacagggtaaatcctcaattt

SEQ ID NO: 181620 - DNA, 201 bp, Homo sapiens
aaaaaaggaatatgtataagttagctaggggaaagcgagagggagtgccctctaatcagtgagacaagaatttatgaacactaagagttgagaaagaaaayggcacaaggggaatttcaggttcacttaagtctgaggcctagcttgtgatgggcttggtgcaataaaaatgatgggggcagaggattgggaaatgataac

SEQ ID NO: 181621 - DNA, 201 bp, Homo sapiens
tctttgacaaacctgagaaaaacaagcaatggggaaaggattccctatttaataaatggtgctgggaaaactggctagccatatggagaaagctgaaactrgattccttccttacaccttatacaaaaatcaattcaagatggattaaagacttaaacgttagacctaaaaccataaaaatcctagaggaaaacctaggca

SEQ ID NO: 181622 - DNA, 201 bp, Homo sapiens
gccctctaatcagtgagacaagaatttatgaacactaagagttgagaaagaaaacggcacaaggggaatttcaggttcacttaagtctgaggcctagcttrtgatgggcttggtgcaataaaaatgatgggggcagaggattgggaaatgataacataggggatttcaggagacaaaaaggtaaaagctagatcagacagt

SEQ ID NO: 181623 - DNA, 201 bp, Homo sapiens
ttactttatctagatcaattagaggaatcactatctatggcagctatatccttacaaaatgtaattcttaaataataatacttgaaagctgaaatttctcyttgatccatgggctgcagaatggatgttgtgttagcaggtatgagaacaacattcatctccttgtacatcttcatcagaactctttggtgactcggtgca

SEQ ID NO: 181624 - DNA, 201 bp, Homo sapiens
aaaccaaaagaacaaagctggaggcatcacgctacctgacttcaagctatactacaagggtacagtaaccaaaacagcatggtactggtaccaaaacagaratatagatcaatggaacagaacagagccctcagaaataacgccgcatatctacaactatctgatctttgacaaacctgagaaaaacaagcaatggggaaa

SEQ ID NO: 181625 - DNA, 201 bp, Homo sapiens
tcaaatgatccatgatggacttcaggcatctgtagacctcctgaaattatttatagtactattttgtatgtgactttttttttctggggaggtcagtaggwtttggcatattctcaagggggttcatgaccccccaaaaagcttaacaaagaacatctgggaataatcagccctagttagtatgtaggatctggccttata

SEQ ID NO: 181626 - DNA, 201 bp, Homo sapiens
agaacattccatgctcgtggataggaagaatcaatatcatgaaaatggccatactgcccaaggtaatttacagattcaatgccatccccatcaagctaccratgactttcttcacagaattggaaaaaactactttaaacttcatatggaaccaaaaagagcccgcatcaccaagtcaatcctaaaccaaaagaacaaagc

SEQ ID NO: 181627 - DNA, 201 bp, Homo sapiens
tattactacattacaatacattgtgctcatacaaggaaggtagggagcagagcattttcagttaatatctaatgtttcccacagtaggatttatcgtgacrtcaggtagtctgtattaactggatcatggagaaggcatttctaatgatcatctgaaaaggcttcacaggattaacagatttgaaacttcattctctgtgt

SEQ ID NO: 181628 - DNA, 201 bp, Homo sapiens
aaggcctgacacttcctagggacccagatgggtattgtagatgtttagggcatgccttgacctctgagtagccttcttgggcttgaggtctcatttgactrgactaccactccacagtcagccactgtggtctgttttttaaaaacgttgccatgatgagaatgtgaaggatttgggttgaagttaaggacacttcctttt

SEQ ID NO: 181629 - DNA, 201 bp, Homo sapiens
tggcaatacaaaggcctgacacttcctagggacccagatgggtattgtagatgtttagggcatgccttgacctctgagtagccttcttgggcttgaggtcwcatttgactagactaccactccacagtcagccactgtggtctgttttttaaaaacgttgccatgatgagaatgtgaaggatttgggttgaagttaaggac

SEQ ID NO: 181630 - DNA, 201 bp, Homo sapiens
ccttctggtctcagttggactcactcactggagtcttggctgactgatccacgttgatccaagacaacctgggggtatctgatccagattgagctcagctkgctattgccctgctccatgtttctcttatcctcctcatgggaccagtggactagcctagaatgatctcatggcagtgccagaggtgcaagagaacaagca

SEQ ID NO: 181631 - DNA, 201 bp, Homo sapiens
tagcctattgctgcttggctacaaacctgtagagcatgttactgtactgaatactgtaggccattgtgcacagtggtacttatttgtatatctaaacatasaaaagatatcataaaaatacaatgtaaaagataaaaagtagtatactcatatagggcacttacaatgaatgaaacttgcaggactagaagtttctctggg

SEQ ID NO: 181632 - DNA, 201 bp, Homo sapiens
agtggttataaaacttgtctgaattcataccatttacaaagtaaaagaagagtctagagcccaggtctcctgagtcctcagaatcaaccaagtcaaataarctcccctattcaaaaagaagaaccttcaagaatattaattttgtgcccatctaaaagcctcactgagctgtgctaaaggtaataggcattgaagaaaacg

SEQ ID NO: 181633 - DNA, 201 bp, Homo sapiens
ttatctacactggcttattccacttctttaatacctctgcagatacctggacgggtattttgcaaaatataaaggaagcctcactcatatggtcagttctwtctatatctcttctattttcttaggtctctctgctccctggtgtgtaagtggacatattcagcagagaaaggctgggacgacagtttctggaaaatgatt

SEQ ID NO: 181634 - DNA, 201 bp, Homo sapiens
aaacacagatgcagccaaaccaggcaccagatggcaaacaagaattggaataaaaggtaaagaaagcttttggtgtttactcaaagatggggaaaaaaacyatgatccaaaatgctgtggtttccccagaatggccacctggagtcaccagggcccaaaagtgaccaaataaaacaaaacaaaactagaataatcatgatt

SEQ ID NO: 181635 - DNA, 201 bp, Homo sapiens
taccagaccagggccaagcgtggtggctcttgcctgtaatcccagcactttgggaggccaaggtgggcagatcacttaaggccaggaattcgagaccattytgagcaacatggcaaaaccctgtctctactaaaaatacaaaaacaaattagctgggtgtggtggtgtgtgcctctaatcccagctacttgggagtctgag

SEQ ID NO: 181636 - DNA, 201 bp, Homo sapiens
caggaatgtggcaagaatccacttttgctgggcactcacatctgtccagagctttgtattcttggccttatataatcctcacaattacccattaggtattrgccaaattttataaatgaggaaattccataaatgggttgagagagattaggccccaaggtcacaccacaggaatgccatcctagctgtggccagtgcttc

SEQ ID NO: 181637 - DNA, 201 bp, Homo sapiens
aatggaccacagttcctgtgtgtggccctttccctacaattttgtgcatgatgggaacctctcctccctccctgtcctccttcaggctaagaggttgtaayggctccttactgttggtaatcattaggtacttgtttctttacctaaacctttttaaacaactcttcttgaagcttacttcagttacccaatgtgagtgtc

SEQ ID NO: 181638 - DNA, 201 bp, Homo sapiens
gcaggggacatttagtttcattgggcagtttctgagtacagcttctttccagcttatatctgctctgaaatcttatatgtccatcaccattcactgggaaratggattgcataccttacagactgtgcttttgatatggtttggctgtgtccccacccaaatttcatcttcaattgtagctcccataattctctcatgttg

SEQ ID NO: 181639 - DNA, 201 bp, Homo sapiens
acagcttctttccagcttatatctgctctgaaatcttatatgtccatcaccattcactgggaaaatggattgcataccttacagactgtgcttttgatatrgtttggctgtgtccccacccaaatttcatcttcaattgtagctcccataattctctcatgttgtgggagggacctggtgggagataattgaatcatgagg

SEQ ID NO: 181640 - DNA, 201 bp, Homo sapiens
tcactggtcactagagtagcttttacaaaattgactgccttcaagggccttccaggtaatgcacgccccaacacaagctgtatttgtcttcttgctgttcyccctcccaggacctctgcgctcgctgttcccctgcctggaacactcttcccccagatttccatgaggtccactcctcatgtctttcaggtgtatcctcaa

SEQ ID NO: 181641 - DNA, 201 bp, Homo sapiens
agctctcaatatgtaggtcttacacatctttgttggattatctgtaggtatttcctattttttgatgatattgtaaatgatattaaaattttatgtatttwaaaaatttattttccagttgttttcttgttactggtatattgattgtgtatcctgaaatcttgctcatgtgcttattatttctaagagcatttttgtaga

SEQ ID NO: 181642 - DNA, 201 bp, Homo sapiens
aggccagtattggctaggctgggcctcaggactgtctggtttaaatctaagctgcctgggagatctggagtaataagtgagtgacaacaggtgcagatttygttacacccttctgaactcagcccatagttctttctttgattcttttcacccaacacccttgcttcaattgtgtccaataaattttatagctgcatgatc

SEQ ID NO: 181643 - DNA, 201 bp, Homo sapiens
gtggggcaggaaggacaactattcttcctatttgaaatatgaggaaattgaggctctggaactaacaagtattggagacaagaccagaaccctggtgagayggctccaaatcttcctctctgtcttcctccctacattccctaaatttggcaggttttattgggctggtaagccgcacacctaagaggttttatggaaact

SEQ ID NO: 181644 - DNA, 201 bp, Homo sapiens
ggaagggtcggccttgactgcatccccaaggctgcctattaggtgtctggaacccgtgctgcttcctctccgatcagtgcccacttatctgtattcagtaytctttctctcctccccttacccttgtaggacattttcctggcatttgaggagcctttaattcacgtctggctaccgaaggcatttttaggctagtgttgc

SEQ ID NO: 181645 - DNA, 201 bp, Homo sapiens
tattgaagttgccgggttgtgtggtaagatgtggctgtattttacatttccatcagcaatgtataagggcatcactttctccacaattctctaacacttgrtattgtcagtctttgtgataatattctagtaagtgtgcagtagtatcttattgtgattttaatttgcatttccttagtgactaatgatttgagcactttt

SEQ ID NO: 181646 - DNA, 201 bp, Homo sapiens
acacttcaaattaccactgaagtgtccctaccagtttatgactccagcagctgctcctccaagtaagatctcagctgtgactgtctgggttgtcctttctyttcagatttcagggtgatagtttgtcctgtaacctcagttctcttatggatccaacaaaaatcactgatttgcagtttcttagctttttttttttttttt

SEQ ID NO: 181647 - DNA, 201 bp, Homo sapiens
ggagttagttctttcagaccttagccttatcagttaagtttatgtactattctaaattgtttgttgtcatttcaacattgttcatatcatctttatcagargtagattccatctcaagaaatcatttcctttgttcatccataagaagcagcccctcatcggttcatattctatcatgagattacagcaattcaatttcat

SEQ ID NO: 181648 - DNA, 201 bp, Homo sapiens
ttcatcccggaaccttcctcctcgcaacccccacccatggaaaaattgtcatccacaaaactgggtcctggtgcccaaaaggctggggaccgctggtataraacagagtttatttctccttatctagttgtaattgtgtatcctttaacagatctctccctatctttttacatgtcctttgataccataagctctatggac

SEQ ID NO: 181649 - DNA, 201 bp, Homo sapiens
tagcagatataatattaatgaaagtttgaaatattgttaagaattaccagaatgtgacacagacatgaggtgacatgagctattggaaaaatgacactgayagacttgctctttgcagagctgctacacaccttcaatttgtaaaaaacacaatctgcaagatgcggtaaagcaaagcacaatgataccagatatgcctga

SEQ ID NO: 181650 - DNA, 201 bp, Homo sapiens
aaaaggcattagctacatttccatggggttttgctcctggataaagcaggtcacaagggaaacctagatgtggaatctgcaaaagggcaattaaaatgttyagtctttgtccttggtcaggctgtgattttaggccagtcatcaaacctggggctagttatataggaaatacttattgaagctggcaatgtgaaagagtct

SEQ ID NO: 181651 - DNA, 201 bp, Homo sapiens
ctcctaaaactcaacaacaacaaaaaagcaaaaacaacccaattcaaaagtgggcaaaggacttgaatgaatatttccccaaagaagatttataaatgacsagtaagcacgtgatagggtattcaacagcactattaggaaaatcaaaactaccgtgaggtaccacctcacacattaggatgctactattttaaaacagaa

SEQ ID NO: 181652 - DNA, 201 bp, Homo sapiens
attatgctgggctccaggcaggtgttacaggggaataaaacacaatttaatttaggcacataagattattttagaacaacgggataagttccacaattgargtattgccaggtgacaaagttgcccaaggaagaaagagatgggagcctgtagagatgagagaatgcttttgggaggaggttatgtccaagctaactttaa

SEQ ID NO: 181653 - DNA, 201 bp, Homo sapiens
gttaccatcacaaggcagccccattttaatggcctctagccacagggtttgccattaaaaactgtaggagtagacagatgcttgatggaaacccttgaccycgggtctttgctcccttaatgaaggaatctaaggcaaagtagagattctttttttaacatttaaactttatttttaattgacagataataattgtacata

SEQ ID NO: 181654 - DNA, 201 bp, Homo sapiens
tctgctctgaaatcttatatgtccatcaccattcactgggaaaatggattgcataccttacagactgtgcttttgatatggtttggctgtgtccccacccmaatttcatcttcaattgtagctcccataattctctcatgttgtgggagggacctggtgggagataattgaatcatgagggcagttttccccatgctgttc

SEQ ID NO: 181655 - DNA, 201 bp, Homo sapiens
gaatgtgacacagacatgaggtgacatgagctattggaaaaatgacactgatagacttgctctttgcagagctgctacacaccttcaatttgtaaaaaacrcaatctgcaagatgcggtaaagcaaagcacaatgataccagatatgcctgaggcatacctcaaactgcggttttagttccagaccactgccacaaagcaa

SEQ ID NO: 181656 - DNA, 201 bp, Homo sapiens
ataacctcatatatacactagggtagaccttgcagaggaagctggcaccagggcatgggaccgtgaagcaaaggggttcagaagaactagagagtggtccrataatgagtcttcagatggccagaggcaaaggctgagatcaagcctcaggtccaagaagccagaatcataagcctgaaataattgagtgagaaacccaac

SEQ ID NO: 181657 - DNA, 201 bp, Homo sapiens
aggcttctgggctttgtcaccacagggaaactcggctgacgggcacattgccttagatgaaactaagccaatggcatgcactcatggagccagcttgagcrtagacaaaaagagaggcaggagcacatggaaagaggcttctaatcccagctccatcatttctgatctttatgatcctgggcaatttgcttaccctcttca

SEQ ID NO: 181658 - DNA, 201 bp, Homo sapiens
actcagcaggcatgtgcttttgatgtgcgccttgctctgagtaaaagcaggagaataaaaagttcttgtttgtgctgaggctacttcatggtctctggctyggattttggtgaccctttcgctttgtttctgatagagtctggaggctcctacctaactaggaaaactctgatatgtatatagagggaaataccttcagta

SEQ ID NO: 181659 - DNA, 201 bp, Homo sapiens
aatatattaaaaaccatggattttaaaaaaagatatttgtctcatttttacaattaaatgcagatcttccattacaaagcaattatttcattctaagtatrtgaatagatttgtatttttaaaaaaaatcttcatctggttatcctcagaatgaaggaaaagaaacaggacaggatcttttgatatttacttcttcttaga

SEQ ID NO: 181660 - DNA, 201 bp, Homo sapiens
gggcgtggtggcacatgcctgtagtcccatctccttgggaggctgaggcatgagaattgcttgaacctgggatgtggaagttgtagcaagccgagattgcrccactgtgctccagcctgggcaatagagtgagatttcatctcaaaaaaacccaaaaaacagatttggcagtgctggacccttctacatggagctggggac

SEQ ID NO: 181661 - DNA, 201 bp, Homo sapiens
agttagtgcaggattacctgacctagaagtggtggagttggcaccagaaggaagttctttggacaccacatcctgtgtttgtttctactcccaaactgccktgtggtatggagtttgagtcatctatattttctcacccaagtcctcttttgactaactgcagacctgtgtgagatgggcttacccaagtcagacatgcac

SEQ ID NO: 181662 - DNA, 201 bp, Homo sapiens
agaaagagagagagagagaatatgaatgagaatatacactgaaaaaattaacaccctcagtctctcaggggcatgggagacaatagccaaaggtcaattarcattgacacgatctatgtacagatgtaggtgtgtccccagcatttcacatccactaattataattacttcatggatacaaggactaactctgcaaaaaca

SEQ ID NO: 181663 - DNA, 201 bp, Homo sapiens
atacacaagtatttattaagcccaggaggtgtggtcataattgaaactttaaatgttcactgtgttttattcctatttttgtgttttattcttattaccaragaaaagtaagttgaaaaaaaagaggactaaccaaatatcttaaagggaagcaaattcaaattagaatgttttgcctgtgacaagcctcgctttggattt

SEQ ID NO: 181664 - DNA, 201 bp, Homo sapiens
ctggttatgttccctgcttctgccctgtgtccagatagtgaggaggggaaataattcttcccacttacccctggaggcagtcacagaactgctttgccttytgggttgtttatgccccagaggcctcaatacacaagtatttattaagcccaggaggtgtggtcataattgaaactttaaatgttcactgtgttttattcc

SEQ ID NO: 181665 - DNA, 201 bp, Homo sapiens
ctgtatggtattcagattttttttttttttttttacattttttcctcccttactagtatgtgagtttctccaggataaagagtatgtcgtatgcaaatctrtatccctagcagagtgtgtggtacatagtaagtgattaataaatgtgtagaataagaagttgtacacatgtgatcccagaatgactgcatccttagcaat

SEQ ID NO: 181666 - DNA, 201 bp, Homo sapiens
tgatgtcagcttaatggttcccattagagatggatgtgtgagaaagttcaagtcctttgggaatctcaaggacttgaaaacctctaggtggtctggagaartagagaatccatctaatgagcatgacctgctgtgattcatttactggctctgagatttcaggtgggctgagtcttctattactcagattgtaaatggaga

SEQ ID NO: 181667 - DNA, 201 bp, Homo sapiens
agtccaggtgtcgagacttagtagtaaacagacaagtccttgccctgtgtagcttacattccggttagggcaaggagtggagaaggcagacaacgaacacrtaaaccagtaaatatacaaagtggcagaaggaaattagtggcatgcaaatcagtcaatcagtcacagtaaggtggcaaagatggtcaggggaaacacttg

SEQ ID NO: 181668 - DNA, 201 bp, Homo sapiens
actgtggttcatctgtgttatggtaggtgagtcccagggcatgagctggggtgcttcagcaagcatagcaggagatgaggccaggtaaatagtctgagttyggcttattaagggcttatttggtgatagggattggttgatggttgttaagcaagggaggggctggcttaggtaactggcagacatgtggagattggatta

SEQ ID NO: 181669 - DNA, 201 bp, Homo sapiens
gagaaagaaaagaagtgattaaaatgctattttacaaaatattttgtttttaaaaagctttcattgtgtgggcaaaaggaaaaagaaaagtcactgtattmattgtgctgtctagactctcaaacaaagagggtagcgtgctgcaaattaagattgtccggctcctgcctgctgacaaaaagtatgaatttggaggccaac

SEQ ID NO: 181670 - DNA, 201 bp, Homo sapiens
agagagatataattcatataccctaaaattcaccattttatgtatacagtatagtatttctagtatattcacaggattatgcaaccataccccagtatccsattccaaaacattttcttcgccctcaaaagaaatctcatatccgtagcagtaagtcctcatatccctctacacctagccattggcaaccactagcctact

SEQ ID NO: 181671 - DNA, 201 bp, Homo sapiens
ttactctataaaacaagtgaaatatagctgaaccaaagtatttccaatgtgtttacctgtcatgatggcttcatgctaatattagcaacatgtaaaagtayactatatgtctatggccaggtgtgtttttaataattttaaaatgatttttgatgatttttaaatgattttgtatgtgcctatgtatcgaaatctaaggca

SEQ ID NO: 181672 - DNA, 201 bp, Homo sapiens
taaggacagggtattgagattttaacaaaattaaatgtagactatttaaatgattctcctttattctgatatcatgataaccacttttttggtattaaaawctccttttggttatgaaataatggtgagagtaaatatggagcagttgctttgtttaaagtccttatataatcaaataaaaagctgacaattatgttgtag

SEQ ID NO: 181673 - DNA, 201 bp, Homo sapiens
atacagtatagtatttctagtatattcacaggattatgcaaccataccccagtatccgattccaaaacattttcttcgccctcaaaagaaatctcatatcygtagcagtaagtcctcatatccctctacacctagccattggcaaccactagcctactttctttctctatggattttcctggacattttgtttggcttctt

SEQ ID NO: 181674 - DNA, 201 bp, Homo sapiens
ggaaaagcattctataatcttttgattatatctgtcttttagtgggactatgtccctgagctatgaccttcatagatgttcttaggcccctactcctttasgtgagacagaaggcttgcaggcactagagttgaagagatgtccttcccctgtgtgcaataggcttttgtaaagtctcttcctcttaaaaggtctttatta

SEQ ID NO: 181675 - DNA, 201 bp, Homo sapiens
agcagttggcctagtgactaaccaacatcccttgcagctcaatcattattcattatgttaatattatcacacattttgattctttgctgtcgatttggttkctgatctgctggccaaaggatcatcatgggaaggaattactattgaagcaggcagtgcaaatttcaaaagtgttcagaccctgcggcctttcatgatatt

SEQ ID NO: 181676 - DNA, 201 bp, Homo sapiens
atgaattccctcaaggaattgattctagtaatagagataaataatcaagtcataagtcatgactcaatgtgaaaagtcttgtgactaaggaatgaacagtmcaataaaggaaacatgaggaacagtgaatcgtggtaggattatggagaggaggaggaaggaatgggggagagtggggcctcagagaggtgcaccaagact

SEQ ID NO: 181677 - DNA, 201 bp, Homo sapiens
tcctgggaggtgcatcaccttgggaaggcagctctctgcaactgaggcaggccctggaacatctggcagctgtctgctgactttactccatccttaagggkgagtttgagccatggtatctcagtctctaccatgcttcctatatccacgcaaccactgtgacctgttatttcttgttccatggaatcccttctgtctgcc

SEQ ID NO: 181678 - DNA, 201 bp, Homo sapiens
atgtgcctgccagattatacattccatgagggcaggggccatgtccatctcattacctgctgtggcccagcacctgcatggtacctggcacacagtctttycaagcagttctgtcctagacattgttgtggctttcttctcacccgccttcaggaagatccacccaacttctttctcagttactcagcattaagatctgta

SEQ ID NO: 181679 - DNA, 201 bp, Homo sapiens
cagaacccaaaaggagaaatcgtgtggagaagcctgcctggagaggatctgttattttagcccaagagaagcagctggcccaggccaactctacaggaaargaggcctgaccttactcttctccttcctttgaggcttcagctagagctctccattgctcaaacccaactagaagacagaggattagagagtcttggagat

SEQ ID NO: 181680 - DNA, 201 bp, Homo sapiens
aactagaagacagaggattagagagtcttggagatccagattattgtccccaggacagatagcagggagggaaggtagagaatggatatgtagttggggargaatatacagtgacatatgtatagagtgcacttaggaaggataggaaaatcaaataaaaattgttcaggctaaatatattaccagtcccttaaccatcta

SEQ ID NO: 181681 - DNA, 201 bp, Homo sapiens
taacttcaactctgattttctgattatttttatatttttctgctcctctttcctgcctcacacatgacacatgtttaattagtatattagctctgctaacrtagcagtatctacaagaaatattcattagaagtccataatgttaatctagcagaaaatttccagagtaactttattagattttttccctgttaagttaat

SEQ ID NO: 181682 - DNA, 201 bp, Homo sapiens
actgaggaggtgagtgttttaccaagggcaaagctgagatcagaacataccaggctggcaggtccctgtgtttgttaaagacattcttagtaattttatcrttaattatggggaaattctaaaactccattgggatcagccacaggcaaatgagatgctgcaagaagctagatactgagcatgcagcctgaagtcatctga

SEQ ID NO: 181683 - DNA, 201 bp, Homo sapiens
atacaactcatgaagttgacagaaaaacccacaataatcttggccacaggttatggagcaaagcaagtactaggggtactaccaacagagcaaagtaagtrcttcaagaagccccaggagttagcccaagacaatcccatgaagcccaggccatgtgagggcagagtctgtgttgaaatagctagctgaagagttctgatt

SEQ ID NO: 181684 - DNA, 201 bp, Homo sapiens
gttatagctttattgagctcagtgtctgacatacagtatgcaaccaaagtttttattactgtttttgaagtttttataatgatatttatatcagacacaargagtacaccagatgtctaagtacagtttaaacaaaataccaaaatgaacaccagtattcccaccaccaaacctgtgaaagagaatattgccaataccttt

SEQ ID NO: 181685 - DNA, 201 bp, Homo sapiens
aaaatgaacaccagtattcccaccaccaaacctgtgaaagagaatattgccaataccttttaagtgtaagtttttaactgtgtgagtaaataaatgttacytgttttcttaattttgcttagtgttttagctctttgaggtaattttgaatcttgatttgaacatgtcccataataagctatttttccaagtgttagcatc

SEQ ID NO: 181686 - DNA, 201 bp, Homo sapiens
aatgctctccctccccttgccccgcaccccctgacaggccccagtgtgtgatgttgccctccctgtgtccatgtgttctcattgttcaactcccacttatragtgagaacatgcggtgttagaaaacctgctaggattttaatggagttgtggagaatctgtaggttaatttgaagagattaccatctgaacaatgttgaa

SEQ ID NO: 181687 - DNA, 201 bp, Homo sapiens
ggattttaatggagttgtggagaatctgtaggttaatttgaagagattaccatctgaacaatgttgaattttccattttacgagtgtgacatatttctccratttttagctcttcatagcaatgtttggtagttgtcagagtataggtcttgaacttcttgtgatatgttaattcctgaatgtatttgtcaggtttctcca

SEQ ID NO: 181688 - DNA, 201 bp, Homo sapiens
gtgtggctcagttcaagtccaaaagccttgaaaccagggaagccgacaatgcagtcctgaataagtctgagggtgaaggcctgagagccccaggcaggctkctagtgcaagacctagagtccaaaggaagatgaacctggagtctgatgtctaagggcaggaggagaaaaggtgcctcactgcaaaagggagagagggagg

SEQ ID NO: 181689 - DNA, 201 bp, Homo sapiens
aatttagaggtagagtgaagtgacacagatcatgttgcagaagtcaagagcttggagagcagttggtatgagtggggtggtgttgacgctggattaggggractaggctttctaaaactcaggagccacagtgcagagcttggtaaaggaaggatatgagattgttagctaggagtgattaaccttgaaacacacaggtgg

SEQ ID NO: 181690 - DNA, 201 bp, Homo sapiens
aagtagctttcaaatgatgtatttataagctttggaaacacatggtctctttgatatgagtttgtggatgtttttgctgttatttaacactgatttattcrgactttttttttacatatttttgcttatgaaaaatcaaatcctataacaaagcttaatatcctcagtgtctttacctggttttctgattatatatatata

SEQ ID NO: 181691 - DNA, 201 bp, Homo sapiens
tcctccatgttgtttgactattaaaaagaagatttgttaatgcttgtttttagctttctctccctctttttttatgtgttaaagaggatttgtttttgttytcctttctcacaggagtgattggggcagatgtgagagggcacggcctcatctgtgaggggcagccagtgacgtcacggctggctgtcatctgtggaacgt

SEQ ID NO: 181692 - DNA, 201 bp, Homo sapiens
agcatctgggtgtctgctagatagatgctgctgcaccacaccaatgtccgtgtgtctgggtaccgaggtggtgttcaggacaggtcttctccacgtactgscgctgagctcacatccacgctgtgcatgctgggctgagttctcttcaggctgttttcagctgacttaaatgcaacacgtgatgatgagcatatttacata

SEQ ID NO: 181693 - DNA, 201 bp, Homo sapiens
ttaaagcagatagagcacaggtagttgttgagcgtagaacagcccaatcagaatgatgcctcagaaaggcagtagttggcctcccagagtggagcatggaytgcagcagggggctgaggctggagggggagaagtgttgaactaattcaagggatgttggagggctaaaccagtgtctcttctgctaaatctgagcagaag

SEQ ID NO: 181694 - DNA, 201 bp, Homo sapiens
ttttatatttgcctactagttataagctgtctgaaacattttataacatagcatgtagaaatatgtctggaacatagtaggtactcaatagatatttggtraatgaatgaataagtaagcattagagatacagatacaatatgtttcagaggataattaaataaaagagggcaagataatgagtttgtgcctttgagatat

SEQ ID NO: 181695 - DNA, 201 bp, Homo sapiens
tttgaggcagggaaaagggagggaggaaacagagaagtaggcagggatcaaaaaatcataatgcccttctattccagctgaggaacttaaacttcatcccrtgtgttagcctctaaatgaggtcttatatgccaggtgatgtcaagcaagatggtctactgggtatagacaaaaatgttggtatttttatttatctccatt

SEQ ID NO: 181696 - DNA, 201 bp, Homo sapiens
gttatacctgctgaggagggagaggtattgaatgtgtatggacaccagctgggcagcttcctcatggtccctggatgacagctttgtcctggggcactcamtcctccagagtaccttaagaagctgtcctaatctgccatacacttgggagggttctggctgttaaccacctatgttggacacactgctgctattctcctt

SEQ ID NO: 181697 - DNA, 201 bp, Homo sapiens
gtttttgccgcagcaaaaatgaccacttatctaagaggctgcatatttatatatatataaacagtttttggacataagaatcttgactattatttcccacrgagaattacagatttatacatgtgtgtctatgtgtatatatatgtgtgtgtgtgtgtgtgtgtgtctgtgtgtgtatatatacatatgtgtgtgtgtgtc

SEQ ID NO: 181698 - DNA, 201 bp, Homo sapiens
tgaccacttatctaagaggctgcatatttatatatatataaacagtttttggacataagaatcttgactattatttcccacggagaattacagatttatayatgtgtgtctatgtgtatatatatgtgtgtgtgtgtgtgtgtgtgtctgtgtgtgtatatatacatatgtgtgtgtgtgtctgtgtgtgtatatatatat

SEQ ID NO: 181699 - DNA, 201 bp, Homo sapiens
agaattacagatttatacatgtgtgtctatgtgtatatatatgtgtgtgtgtgtgtgtgtgtgtctgtgtgtgtatatatacatatgtgtgtgtgtgtctstgtgtgtatatatatatatatatatataaacaccatattctgtgtcttttatatatagtatcacttgattattataattaccatgaagtgccattgttct

SEQ ID NO: 181700 - DNA, 201 bp, Homo sapiens
tgtctcctttttgccctcatcacattaccaagtttcggccaagagcaagctttgttccttggtttagcacaactatttgattaccaatattggattatttrgcagatgttgaactggcttaaattgctcatctgggccagatattgaattggtttaaactgctcatttcaattgcagagccaggccaaaatgaggattttg

SEQ ID NO: 181701 - DNA, 201 bp, Homo sapiens
gaaactatcacatttaaatgtctgcatttagagaactcagggtgtccgttgggtttgtagaagatggactgactctgttgattcacttgtcgggtggaccstttctccatcgtccttctctcctcagtgtgtgttcctatttaaatggagccccctgcttgggagggagactgctccaaagaggagcatggtgcttcagcc

SEQ ID NO: 181702 - DNA, 201 bp, Homo sapiens
gagatgcttcagagggaaagaaggggaaaagtataaaagaacaatccccacattatcggtttttagctcagtatttgtagcttgtacccccttcttaggaytgctaaaacccgtttgcaaaggacagccctctatttccaggtccccttttccttttttcacactgcatttgagcagtttgcacatttgttgaagaatcag

SEQ ID NO: 181703 - DNA, 201 bp, Homo sapiens
ctgtgtgagtaaataaatgttacttgttttcttaattttgcttagtgttttagctctttgaggtaattttgaatcttgatttgaacatgtcccataataarctatttttccaagtgttagcatctgaaaatataagcttttcttctgtatcatcttctactccattattaagcatattgattaaaccaagaccaaggacaa

SEQ ID NO: 181704 - DNA, 201 bp, Homo sapiens
agcttacttaatctttacaaaagtcccccagcattcatgcattcctcccattttggagttgaggaaactgaggctcagaaaggctaccttacgtaagatcrcctagctgagaattgggcagagtcaggactagaatcacgatgggcctttgtcccgacccatagtttctcttctgttgttcactggtatatcagggaacac

SEQ ID NO: 181705 - DNA, 201 bp, Homo sapiens
aatatcccttttgaaaaactgtccttatttgacaaaatttaaagttcacaatgttatgctgtttttgttttttgccttccttcccccccttcccattttgkggttggaaatcctactgatttgaggaatcacttgtttagtaaagagagaaccggggtagctgaggtcaagacaaataaggtctgtccccatgctaaaatg

SEQ ID NO: 181706 - DNA, 201 bp, Homo sapiens
ggaaggttgatcccattttattgattacagtgtagttaaatcacacctgtttttatgtgcctaactcatactaggcactgtgacaagtattgtacacattrtctctttgaaggccaacgaccctatgaagtgtttgtgtgtggtgtttattttagggtgtctgttttgtagacaagaaaacgaatgttcatagagataaaa

SEQ ID NO: 181707 - DNA, 201 bp, Homo sapiens
acaccttctcacttctgcccaggactcactatgtcctccaggaggggagactgtcaatgaccctcacctttttcctaaacagagatgttcagtggcagaarttttacccttagaagctttggcttaagccttttgttccccgtaaaatgcaaatgcttgtaagtgatatggtttggctgtgtccccattcaaatctccaca

SEQ ID NO: 181708 - DNA, 201 bp, Homo sapiens
ggtgttttggggatgtggggagatgtgatcaggaaaggcttctgatgctgcaactgagtcttcaaaatggagttggtgttccccaggattgttatgggatraggtgtattggtggaaaggatatcctaggcagagggagcaaagtaaacaaatgcttagtggcaaggaccaccaaatcacattcaggaataaggagaaaag

SEQ ID NO: 181709 - DNA, 201 bp, Homo sapiens
tgtgctagaaacattcaatatcctcctaggtatttgaaaggatatattattgttaactatagttattctacagtggtatagaatactagaacttattactsgcatctagctgtaattttgtgttttttaataaatctctccctcttcccctcttccctctaccattctctgcctctaatatcctctactttttacttctat

SEQ ID NO: 181710 - DNA, 201 bp, Homo sapiens
ctctatcgtggatggttctgagatacagttcatgtggcttggggtgtggagaggttgaggatgatcctatgggatagagaacgagtcacttctagtggggscatcttgataccacaacttcatcttgcctccccctccttattatttgttttattccctttgtctatcagtcctctccttctccctaagattgcactacct

SEQ ID NO: 181711 - DNA, 201 bp, Homo sapiens
agtattccatggtgtatatgtgccacattttcttaatcgagtctatcattgttggacatttgggttggttccaagtctttgctattgtgaatagtgccgcrataaacatatgtgtgcatgtgtctttatagcagcatgatttatagtcatttgggtatatacccagtaatgggatggctgggtcaaatggtatttctagtt

SEQ ID NO: 181712 - DNA, 201 bp, Homo sapiens
ggttgcataagattaggagtctaggacgcagcagatcatattcatgacccaggaacaaagggcatagagggggaagagcaggggacctatgatgcagaaartcctttgctggagctcacaggtcgaatttcagggaagctgcccaagggcttgaacatccctgctttcaggttccaggtatggaaataatcacagagatca

SEQ ID NO: 181713 - DNA, 201 bp, Homo sapiens
atgaatgatttgaaaactggtgctaatggtcatatggaggtccccaaggggaatgtaagcaagggagagaagttgaggttacacaccagtggaggtctgaygaagctcctatgaacggagcaaatgttacttctgcagcttctccattttatttttcacctgctcatgagccacagagccaaaagggggacaattctgttg

SEQ ID NO: 181714 - DNA, 201 bp, Homo sapiens
atatggaggtccccaaggggaatgtaagcaagggagagaagttgaggttacacaccagtggaggtctgatgaagctcctatgaacggagcaaatgttactwctgcagcttctccattttatttttcacctgctcatgagccacagagccaaaagggggacaattctgttgggaaatcattgtgattaagacagaagcaatt

SEQ ID NO: 181715 - DNA, 201 bp, Homo sapiens
atcctgaataaagatatcaccttagttttatggtacgtttgtcattccagcttgttaggcatgagtgtgttgttactgacagagcccctggaggacaggcrgacactgtggttctccatggtctctcagtaccaggcacagagcaagcacccaatacatattataggaataaatgatctcaaatcttcacagtgcctctta

SEQ ID NO: 181716 - DNA, 201 bp, Homo sapiens
gagaaatgggaataatagtacctcttgcatagatttgagtaataaatgagcttttatttgtaaagcacttagaataatgtctggccatactctgtgtgtgyttagctatgattaatgtgattgcagtaaagttacattatgaatagtagcagtgagcaagagaaaatcaaagatttattacttgatttacaggtagatgac

SEQ ID NO: 181717 - DNA, 201 bp, Homo sapiens
acttgtatgcctaactcccttttcttccctaccctctagctaaacatttctgtgaccataaatgtgacttcagcattccttactgctgaatagatgagaarcatgtaccactgcagatgaatgaacacatggtctatccccacctgttctagttcatctctttaaatgctttccttactgttgaagggactgctatggtct

SEQ ID NO: 181718 - DNA, 201 bp, Homo sapiens
ttacttttaatgaagtttttattgttttatttgttttttactggagtaaatatctaggaagcagtaactgaacatctgctggttgattttctttcagaatmtccatgtttgacttggctagggaaacattttctttctgaagttgaaggatgcagaaggttgcccaggttgaaattagactctgggtggtaaaactgcctt

SEQ ID NO: 181719 - DNA, 201 bp, Homo sapiens
agagcagccatgaaggccaaggaattcctgaatgttctctggtcagatttccttgtaactcacaaggggtctgtaaggaaaacagattgtctaactaattsctgatcttgtctcctcggggttccttcccaattcccagtcacttcatgacaaagctgcaatatatttgcctcttctccaaacctatacagaaagctttta

SEQ ID NO: 181720 - DNA, 201 bp, Homo sapiens
ggacatcacctgagacaactgaacagactcagctctgttgcacatctcctgtcacccagcagccttgtagggcatggtcttgtggccaagtttgaggagcraaagacagaacagaagcacacagcccttttgagacctaggcttggaaaactgacccagtgtcacatctgcctcattctcttggcaaaacaagtcacaaga

SEQ ID NO: 181721 - DNA, 201 bp, Homo sapiens
acccccagcagtctggcttttccatttggtctcaatgattctgactctcatcttaatgaaggccaaatgtaaattaagttctgtcaggcttgagcagctgrggtctcctatctttataaacatgaaacattgtagggttaacaaggtgcagactgaggaaggtcaagagagttgctgagctgatgtggatcctgacagctc

SEQ ID NO: 181722 - DNA, 201 bp, Homo sapiens
acccagcagccttgtagggcatggtcttgtggccaagtttgaggagcgaaagacagaacagaagcacacagcccttttgagacctaggcttggaaaactgrcccagtgtcacatctgcctcattctcttggcaaaacaagtcacaagactggcatagattgaaggggtagggagatagacccacatctcaatgtgaggagc

SEQ ID NO: 181723 - DNA, 201 bp, Homo sapiens
ttgaatccttctaaacagaggagggagatactattaatcagggctgaacgtgtgacagcactgttctttcaagccaagactatatgtatgttctttactttttttttttttttttttttttttttttttgagatggagtttcactcttgttgcccaggctggagtgcgatggcacgatcttggctcactgcaacctccgcc

SEQ ID NO: 181724 - DNA, 201 bp, Homo sapiens
aacttgcatttaaatttttctgtaccacttaccaattgtgggatcttggacaagctaaaatcaacttctctgagtctcagtgtgctgagctataaaatgargacaatagtatcagtcttgtagagttatgagttagtgaggtatttgtaaagtggcttatatagtagatactcaaatggtactttattttcattatcattg

SEQ ID NO: 181725 - DNA, 201 bp, Homo sapiens
agccaaaacacacatgaaaaaatgctcaccatcactggccatcagagaaatgcaaatcaaaaccacaatgagataccatctcacaccagttagaatggcartcattaaaaagtcaggaaacaacaggtgctggagaggatgtggagaaataggaacacttttacactgttggtgggactgtaaactagttgaaccattgtg

SEQ ID NO: 181726 - DNA, 201 bp, Homo sapiens
agcttcattgtttcatttaagaaatactgagtgtctcctgtgtgagaggcactttgctgggcgctggagatgccaaggtgaatgagtgggataagggccctggggtaggcttctgggaacttagagtctagtgtagagaggcagaaaatagacacacacaaagtaattttgttttctggaaaatgctacgaaggaaaaaca

SEQ ID NO: 181727 - DNA, 201 bp, Homo sapiens
agattatagcttttggttgaatatcaaactaacatagctacatttttccttccagccagctctcatttactgtcttacatttttactctgaaagcttttgyactatcaaaccaatcttgattataaaacaaattataccacaaacttttagtatcgtgagcttcagctgagtccctcagtgtaaatgttaggagaaagaac

SEQ ID NO: 181728 - DNA, 201 bp, Homo sapiens
gcctcctgagtagctgggattacaggcgtccaccaccatgtctggctaatttttgtatttttaagagatggggtttaaatgttcttatttctaaattggarataataaaacttcatccaggtcacatataataggtctgaaacatgctaattcattgcccaggatgctgtaagcattcagaatctaggtgtcagcatcacc

SEQ ID NO: 181729 - DNA, 201 bp, Homo sapiens
gatacctggacgggtattttgcaaaatataaaggaagcctcactcatatggtcagttctatctatatctcttctattttcttaggtctctctgctccctgrtgtgtaagtggacatattcagcagagaaaggctgggacgacagtttctggaaaatgattggtttggaagactttgttgcagataattacagcaaaatagg

SEQ ID NO: 181730 - DNA, 201 bp, Homo sapiens
taaagaataaggccagtgcacaaagttgtggcaaagttgtcagtattaacattgtaaatcaagtgtgtgtgaaggggtgctcaccttagctcccttctagmtattttgagattctaaagtcaagaaatctatctcatgtagtgaaagaattccttaccgttatattgtcacagagcatcattagtaggagcaaattgttcc

SEQ ID NO: 181731 - DNA, 201 bp, Homo sapiens
ctttaacctcatttccctggtaactcactccaacatggcctacagccctttggtagctcccaggccaggtcattacagtgagaattgggtgtttcccctgsccacatgcaggcctggctgttgccagtgctgccacaagagaagtggtgagcagtgtgtgctgattagtatctcagcctcgacacaccagggaagggtcaa

SEQ ID NO: 181732 - DNA, 201 bp, Homo sapiens
agctttctatccttccaggttggcaaagagggttttaagggaaattacgatcatttttggaaggatcaagcattgtcagtttttctttcctgtataagtaytgcttttatattattcctacccccaccaagctcctgaacagatgtttcaatgggcattgttggctatgcttttgttttgaaaaatttgaaacattattga

SEQ ID NO: 181733 - DNA, 201 bp, Homo sapiens
catgcaggcacagaaaaggatgatcctgaatggggaagtgcagggagggcacctcagagatgaagatgaggaatggcaaagtctgtctatgttgtggcaawctgagcagggtggagttcttatcactctgtcctctaccttctgctgagagaaaaggggggtcagagataccaaagcagatagaggaaaggggggcaagaa

SEQ ID NO: 181734 - DNA, 201 bp, Homo sapiens
gggcaagaaaggggaagggaaggaaggtattcaggagcttagctagttggttagttgattactttatgcagaccactgtcgcccccacctagaccactgcrgtatctcctaactggtctcatgctgccggctgctttcctgctggaaccagagacgtcacaggaacatgcaattcttgcaccctgaaatccccgcgacgag

SEQ ID NO: 181735 - DNA, 201 bp, Homo sapiens
actggagtactgcttttgaaatcaattctctctgtcctggattacccttagagctcctgtctcctgcatggaggagggtggagggcatttaacatgtccayctctcaccccattctacctgagcttccagcaccaccacctctgggcagttccgcttttagtcagcagctcccagttcccataattttgacttctgtcctt

SEQ ID NO: 181736 - DNA, 201 bp, Homo sapiens
tgtcagtcttactgattggaagttgctgtccagagtacagtatgggggatggctgggaagcccatctcagctaagtgagaaagagcagtcaactattggtrtttgccaagtgtgtgacagtggcacatctgcctgctattatgagacttgatggtcatttctgcctctgtggttttatgattccaagtgtcctgcaagtga

SEQ ID NO: 181737 - DNA, 201 bp, Homo sapiens
atacctgtgagatttccaatgaaaagaagcaaagttttatacatcaaatttgcttccaaatgctaatatactaaaatcagtgctagttatgtttaatatasgttgctgagaaaaatagttatcttttatggtttttaaaaagtgtatgttaatttatttttatcgtttatttcttactgacaaatgcaaattgtatatatt

SEQ ID NO: 181738 - DNA, 201 bp, Homo sapiens
ttcaaagcaatgggtctagtgactgctttgggggaggagttagggaagtgcttaactcatattaacactgatattataaatttacagaatgcagctcgctytggagattatatctggttatatatgtgcacatatcagtgattgctatagtcccctggtaaggggatatatatttaacttaaaatgttctgtttggagttt

SEQ ID NO: 181739 - DNA, 201 bp, Homo sapiens
ataaagctttatatatgtacccacatttaaaactttcttacaatactttttgcatttcctccatatgtctattttcccatctactctctgagctaatcaarggagaagacctagtactcacgtctatctatctgcagtgccatgctgagtgcttgcagaaatgtgtttgggaatcagtgcatctctctatgaatggctaga

SEQ ID NO: 181740 - DNA, 201 bp, Homo sapiens
aacacagctttctatccttccaggttggcaaagagggttttaagggaaattacgatcatttttggaaggatcaagcattgtcagtttttctttcctgtatragtactgcttttatattattcctacccccaccaagctcctgaacagatgtttcaatgggcattgttggctatgcttttgttttgaaaaatttgaaacatt

SEQ ID NO: 181741 - DNA, 201 bp, Homo sapiens
gttcataccaacaaataaagctttgtaatagtccagcactggaaacaaccgagatatctttcaagagtgaatagatcaactcttggtgtatcaagagaacraaatactactaagcagtaaaagggaatgaaccataatataaggtacaacatggattaatcacacaaaataattatgctgagtgacagaagccattaattc

SEQ ID NO: 181742 - DNA, 201 bp, Homo sapiens
agaacagaagcacacagcccttttgagacctaggcttggaaaactgacccagtgtcacatctgcctcattctcttggcaaaacaagtcacaagactggcayagattgaaggggtagggagatagacccacatctcaatgtgaggagctgcaaagtctcattgcaaagagtgttgacacaggaagggtggagaatggggacc

SEQ ID NO: 181743 - DNA, 201 bp, Homo sapiens
aagctggaggcatcacgctacctgacttcaagctatactacaagggtacagtaaccaaaacagcatggtactggtaccaaaacagaaatatagatcaatgkaacagaacagagccctcagaaataacgccgcatatctacaactatctgatctttgacaaacctgagaaaaacaagcaatggggaaaggattccctattta

SEQ ID NO: 181744 - DNA, 201 bp, Homo sapiens
agaacaaagctggaggcatcacgctacctgacttcaagctatactacaagggtacagtaaccaaaacagcatggtactggtaccaaaacagaaatatagaycaatggaacagaacagagccctcagaaataacgccgcatatctacaactatctgatctttgacaaacctgagaaaaacaagcaatggggaaaggattccc

SEQ ID NO: 181745 - DNA, 201 bp, Homo sapiens
aataagaatcaaatagatgcaataaaaaatgataaaggggatatcaccaccgatcccacagaaatacaaactaccatcagagaatactacaaacacctctmtgcaaataaactagaaaatctagaagaaatggataaattcctcgacacatacactttcccaagactaaaccaggaagaagttgaatctctgaatagacca

SEQ ID NO: 181746 - DNA, 201 bp, Homo sapiens
acacaaaaaacccttcaaaaaattaatgaatccaggagctggttttttgaaaggatcaacaaaattgatagacctctagcaagagtaataaggaaaaaaayaagaatcaaatagatgcaataaaaaatgataaaggggatatcaccaccgatcccacagaaatacaaactaccatcagagaatactacaaacacctctctg

SEQ ID NO: 181747 - DNA, 201 bp, Homo sapiens
gaaatcaagacacaaaaaacccttcaaaaaattaatgaatccaggagctggttttttgaaaggatcaacaaaattgatagacctctagcaagagtaataargaaaaaaataagaatcaaatagatgcaataaaaaatgataaaggggatatcaccaccgatcccacagaaatacaaactaccatcagagaatactacaaac

SEQ ID NO: 181748 - DNA, 201 bp, Homo sapiens
actgaaggaaatcaagacacaaaaaacccttcaaaaaattaatgaatccaggagctggttttttgaaaggatcaacaaaattgatagacctctagcaagastaataaggaaaaaaataagaatcaaatagatgcaataaaaaatgataaaggggatatcaccaccgatcccacagaaatacaaactaccatcagagaatac

SEQ ID NO: 181749 - DNA, 201 bp, Homo sapiens
gcgggcagaccacctgaggtctgaagctcaaggacagcctgaccaacatggtgaaacctcatctctactaaaaatacaaaaattagctgggctcgatggcrggcgcctgtaatctcagctactcagatactctcctaagacaggagaatcacttgaatctgggaggcacagattacagtgaactgagaatgcaacactgca

SEQ ID NO: 181750 - DNA, 201 bp, Homo sapiens
agatccaaaattgacaccgtaacatcacaattaaaagaactagaaaagcaagagcaaacacattcaaaagctagcagaaggcaagaaataactaaaatcasagcagaactgaaggaaatcaagacacaaaaaacccttcaaaaaattaatgaatccaggagctggttttttgaaaggatcaacaaaattgatagacctcta

SEQ ID NO: 181751 - DNA, 201 bp, Homo sapiens
accacctgaggtctgaagctcaaggacagcctgaccaacatggtgaaacctcatctctactaaaaatacaaaaattagctgggctcgatggcaggcgcctrtaatctcagctactcagatactctcctaagacaggagaatcacttgaatctgggaggcacagattacagtgaactgagaatgcaacactgcacttcagcc

SEQ ID NO: 181752 - DNA, 201 bp, Homo sapiens
aaagacacaacataccagaatctctgggatgcattcaaagcagtgtgtagagggaaatttatagcactaaatgcccacaagagaaagcaggaaagatccawaattgacaccgtaacatcacaattaaaagaactagaaaagcaagagcaaacacattcaaaagctagcagaaggcaagaaataactaaaatcacagcagaa

SEQ ID NO: 181753 - DNA, 201 bp, Homo sapiens
aatgcagaggcctaggatattactgtacacttctatagactttataaacactgtacctgtaagctacactaaatttattttaaaaatttgtttaataattrtcctttgcttactgtaacattttttacttcataaacttttaaactttttgacttttttgtaataacacttatcttaaaacacaaacacattatacagctg

SEQ ID NO: 181754 - DNA, 201 bp, Homo sapiens
agtgggtccctgacccctgaaccccgagcagcctaactgagaggcaccccccagcaggggcagactgacacctcacacagacctgcagctgagggtcctgwctgttagaaggaaaactaacaaacagaaaggacatccacaccaaaatcccatctgtacatcaccatcatcaaagaccaaaagtagataaaaccacaaaga

SEQ ID NO: 181755 - DNA, 201 bp, Homo sapiens
ccactgtcatatatgcagtctgttattgactggaatgtcattgtgtgatgtataactcgtgtgtgtgtgtgtgtgtgtgtgtgtgtgtgtgtgtgtgtgtrtattttggcctctaatattaactaggagatacatttttcaaggaagctgattcagctggatggatgtgttatgtacttgtttgctttttatgtaaatgta

SEQ ID NO: 181756 - DNA, 201 bp, Homo sapiens
ggttctcccagcacgcagctggagacctgagaacgggcagactgcctccttaagtgggtccctgacccctgaaccccgagcagcctaactgagaggcaccmcccagcaggggcagactgacacctcacacagacctgcagctgagggtcctgtctgttagaaggaaaactaacaaacagaaaggacatccacaccaaaatc

SEQ ID NO: 181757 - DNA, 201 bp, Homo sapiens
aaaacaaaacaaaactagaataatcatgattgggaagttgtaggaaaaccgctgctatcttctgtgaatggaatcccatgtcagaagaaactggttattcwgggaaatgaaataaatggttaaatcaaagtactaggaccagagagcaacaggaatgtggcaagaatccacttttgctgggcactcacatctgtccagagc

SEQ ID NO: 181758 - DNA, 201 bp, Homo sapiens
agctaaagcaggaagattgcttgaggccagaaattcaagaccaacctgggtaacatagtgagacactttctctaataataattttttaaaaattgccaggygggcgaggcgcggtggctgacacactttgggaggccgaggcaggtggatcacaaggtcaggagatcaagaccgtcctggctaacatggtgaaaccccatc

SEQ ID NO: 181759 - DNA, 201 bp, Homo sapiens
ttttcctctcaccaaattgcgaaagactttgcacacatggggctttgtggagaggttttgagtgctaaaataatacaaggtaaacaatgaatgtggtatgraagctaagagcatacaggctctggcattagaccacctgggctcaaatcctagcttgattacctaccagctcttgtggcctaaacagtcttctctgtactt

SEQ ID NO: 181760 - DNA, 201 bp, Homo sapiens
tgaacgttcaagagatatttgttcagcaaagcagcagagtccaaatgacttgcccatggtctcaagcttaggactacaagccaggtatctagtagctcagkaattagagctttgtttattgtgaacctcttatgttccagacactatgctaggtgctttttgtataatcttcctaatacctataacaatgcttcatgagcc

SEQ ID NO: 181761 - DNA, 201 bp, Homo sapiens
ttgcagaaatgtgtttgggaatcagtgcatctctctatgaatggctagagcattctaagtggttttgcttctaactgtgcaggagggcacagtttgggccyaatattggtttgcaaattcaagataagaaccaagaatttgattcttaactcaattttatgttgacttgagcaggctgaactgggttgcttatgccattat

SEQ ID NO: 181762 - DNA, 201 bp, Homo sapiens
ccttgatgaacattgatgcaaaaatcctcaataaaatactggcaaactgaatccagcaccacatcaaaaagcttatccaccatgatcaagtggccgtcatmcctgggatgtaaggctggtccaatatacgcaaatcaataaatgtaatccagcatataaacagaaccaaagacaaaaaccacatgattatctcaatagatg

SEQ ID NO: 181763 - DNA, 201 bp, Homo sapiens
caggctctgaaattgtggcaataattaatagcttaccaaccaaaaagagtccaggaccagatggattcacagccgaattctaccagaggtacaaggaggarctggtaccattccttctgaaactattccaatcaatagaaaaagagggaatcctccctaactcattttatgaggccagtatcatcctgataccaaagcctg

SEQ ID NO: 181764 - DNA, 201 bp, Homo sapiens
ttttttttcctctagtgctaactgatcatgtcactcttttgctacagcccttcaacatctatcactctactacaggcataatgataaattcagttccagamcaccataatgaggtgaatattgcaacaaagctcacatgaatttttgagtttctcagtgcatatgaaagttatgtttacattatattgcagtctattaaat

SEQ ID NO: 181765 - DNA, 201 bp, Homo sapiens
ctgagagattttgtcaccaccaggtcggacctaaaatagctcctgaaggaagcactaaacatggaaaggcacaactggtaccagccactgcaaaatcatgscaaaatgtaaagaccatcgagactaggaagaaactgcatcaactaacgagcaaaatcaccagctaacatcataatgacaggatcaaattcacacataaca

SEQ ID NO: 181766 - DNA, 201 bp, Homo sapiens
tgcactgattgactctttctttcacaaaagatttctctgtagcatgcaatgttgtttgatagcatcttatccatggcaggacttctttcaaaactggagtyagttctttcagaccttagccttatcagttaagtttatgtactattctaaattgtttgttgtcatttcaacattgttcatatcatctttatcagaagtaga

SEQ ID NO: 181767 - DNA, 201 bp, Homo sapiens
attgcctcactcgggaagtgcaaggggtcagggagttccctttcctagtcaaagaaaggggtgacagcacctggaaaatcgggtgactcccacccgaataytgcgcttttccgacgggcttaaaaaacagcacaccagattatatcccgcacctggctcggagggtcctacgcccacggagtctcactgattgctagcaca

SEQ ID NO: 181768 - DNA, 201 bp, Homo sapiens
agaaccacgtgaagaatgcagaagcctcaggagacgatgcgatcacctggaagaaagcgatggaagatgaaatgaatgaaatgaagcgagaagggaagttkagagaaaaaagaataaaaagaaacaaacaaagcctccaagaaatatgggactatgtggaaagaccaaatctacgtctgattggtgtacctgaaagtgacg

SEQ ID NO: 181769 - DNA, 201 bp, Homo sapiens
aaaggccttaggcaggaggaaggttggcatgttcagccagcagcaagatggccagtgtgttcccagcatggccagcccagtaagcagggcatgagatgagrctggagacatctgcataaactccatcctgaagttctagtccaccctatgacatttgagttttattcaaaaagcgatggaacactgttgcaaggacgtgtt

SEQ ID NO: 181770 - DNA, 201 bp, Homo sapiens
cgcgcaccatgcacgagctgaagcagggcaaggcattgcctcactcgggaagtgcaaggggtcagggagttccctttcctagtcaaagaaaggggtgacadcacctggaaaatcgggtgactcccacccgaatattgcgcttttccgacgggcttaaaaaacagcacaccagattatatcccgcacctggctcggagggtc

SEQ ID NO: 181771 - DNA, 201 bp, Homo sapiens
caaagaccaaaagtagataaaaccacaaagatggggaaaaaacagagcagaaaaactggaaactctaaaaagcagagcccctctcctcctccaaaggatcdcagttcctcaccagcaatggaacaaagctggatggagaatgactttgacgagttgagagaagaaggcttcagaagatgaaactactccgagctactggag

SEQ ID NO: 181772 - DNA, 201 bp, Homo sapiens
gtagcatttactatatgctggcattgttgtgttttacctcaaataactcacgtgcttctcatagcagtcctatgaaaggcatatttttatccccattttchgatgaggcaacaggcatgaagaaattaagtaattattccgtgattatacagctagtaaatgtaaaaatccagtttcaaattctggcagtctgttatagtc

SEQ ID NO: 181773 - DNA, 201 bp, Homo sapiens
tctaatccagaggcaaccatttagaaaataaaaattttagggaggagccaagatggccgaataggaacagctcccgtctacagctcccagcttgagcgacrcagcagacggtgatttctgcatttccgtctgaggtacggggttcatctcactagggagtgccagtcagtgggcgcaggacagtgggtgccgcgcaccatg

SEQ ID NO: 181774 - DNA, 201 bp, Homo sapiens
tgctaagtggaggcttcatctgcatattaaaaccttggtctccacaactccttatcctaacccagacattcttttctattgataataacactttcaaccarttgtcaatcagaaaatttttaaatctacctacgatctggaagcccctgctttgagttttctcacccatccggatcaaatcagtattaaccttacatgtat

SEQ ID NO: 181775 - DNA, 201 bp, Homo sapiens
actaacaaacagaaaggacatccacaccaaaaacccatctgtatatcaccatcatcaaagaccaaaagtagataaaaccacaaagatggggaaaaaacagrgcagaaaaactggaaactctaaaaagcagagcccctctcctcctccaaaggatcgcagttcctcaccagcaatggaacaaagctggatggagaatgactt

SEQ ID NO: 181776 - DNA, 201 bp, Homo sapiens
atatagaatgtcaaaagaatctatagataaaatattaaaattaataagtaatttagcaaggttgctattgcagaaagtcaatacaaaactctattttatttctctaatccagaggcaaccatttagaaaataaaaattttagggaggagccaagatggccgaataggaacagctcccgtctacagctcccagcttgagcga

SEQ ID NO: 181777 - DNA, 201 bp, Homo sapiens
tcctcccctttctctcttccttctccattttcctctcctctctttcaggttttgtttttgtttttttacccattctccccttttattgttctcatcctccraaatatggcagctacttttctttatctgggtcactgagaaaatcaccatttggcccatgattagtttgtaattcagctccattctttttcttatattaat

SEQ ID NO: 181778 - DNA, 201 bp, Homo sapiens
atttcttcccacttgccagggctacaggctggcagaccactggctgaatctggtccccaatcaggtttagtttgacctaccatgtgcttggaaaaaaaaaataaacaattttaaattagtttccaatatttaaaaattgagaaattttatctgaaaattcagattatttattttcctgaataaataatgaaagaacttggc

SEQ ID NO: 181779 - DNA, 201 bp, Homo sapiens
catatagaatgtcaaaagaatctatagataaaatattaaaattaataagtaatttagcaaggttgctattgcagaaagtcaatacaaaactctattttatttctctaatccagaggcaaccatttagaaaataaaaattttagggaggagccaagatggccgaataggaacagctcccgtctacagctcccagcttgagcg

SEQ ID NO: 181780 - DNA, 201 bp, Homo sapiens
ggcctttgggctgtttgcactgagatccatttgtcacccttgccctgctctgcaagggtgctgtgttacagggggttgacccctgccccctgacaatttgycatcagtgggagatggcaaggcaagagaaagagaagctggagtatttgtccctccctctgtctgccttgggcagcatctctggcagtggcccctctacag

SEQ ID NO: 181781 - DNA, 201 bp, Homo sapiens
tgaattcatggcttttagaaactgaagtctctttaaaataattattacgtttctgatgtgtgtggttctctgtgttttgggtttataagggatattattgkattgttattcatcttgtgggtttttaccagtctgtcaggagatgattatgttgggttattgatctgtagtcattttctaaatacaattcataggatctca

SEQ ID NO: 181782 - DNA, 201 bp, Homo sapiens
aagaaaacctaggcagtaccattcaggacataggtatgggcaaggacttcatgtctaaaacaccaaaagcaatggcaacaaaagccaaaattgacaaatgrgatctcattaaactaaagagcttctgcacagcaaaagaaactaccatcagagtgaacaggcaacctacagaatgggagaaaatttttgcaatctactcat

SEQ ID NO: 181783 - DNA, 201 bp, Homo sapiens
acatatagaatgtcaaaagaatctatagataaaatattaaaattaataagtaatttagcaaggttgctattgcagaaagtcaatacaaaactctattttatttctctaatccagaggcaaccatttagaaaataaaaattttagggaggagccaagatggccgaataggaacagctcccgtctacagctcccagcttgagc

SEQ ID NO: 181784 - DNA, 201 bp, Homo sapiens
cctgggtctcgagctttagccctgccttcttcctttgtccttttagctgatgggtggaagaagcttcctgctgatgctgatctctgagtttcttccctgtmccctgggtagagcatcagatttaaaagccaaggcaagacaaaaaatgagagaatggtagcaaagatccaacactttacaagaccgcctgagaaaagggag

SEQ ID NO: 181785 - DNA, 201 bp, Homo sapiens
taagaaattgcagtcagggagccctctgttcccagatcatttagaagattgcttttccttttgttaaatacaaaaaattgtcaacctgtattgttaaaatrtgccaaaaactgcattcaccaataaaaaatgtcagctctcattattgcccagatattattcttttcaaaagcggagcactcttgccaggctttctaaaca

SEQ ID NO: 181786 - DNA, 201 bp, Homo sapiens
ttcatctgtaactagcattccctgttagatctgcctaattccaaaacccatgagcttcccacgccagcaaacaagccaaccaaatgaggaaaaaaaaaaaacacctacataaactaattttaattaaagtgaccagaaaaagtgggaatataagcagttaaatgccattgtttagctattagatgtattataccgtcaaag

SEQ ID NO: 181787 - DNA, 201 bp, Homo sapiens
cacatatagaatgtcaaaagaatctatagataaaatattaaaattaataagtaatttagcaaggttgctattgcagaaagtcaatacaaaactctattttatttctctaatccagaggcaaccatttagaaaataaaaattttagggaggagccaagatggccgaataggaacagctcccgtctacagctcccagcttgag

SEQ ID NO: 181788 - DNA, 201 bp, Homo sapiens
gtccttattaaaaatgtattttcctcaagccatggctgcaccccctgaagtgtggattaacagaaaggccttcagagctggaagacatttttgaagaaccrctgtaccaagtggcattaaatatttattgcctactacatgtaaattgttcatcatcttgttttaactcttggaccaaaaggtttctcatctgctttctgc

SEQ ID NO: 181789 - DNA, 201 bp, Homo sapiens
aggccagtaggaaatatatatgtatatgtacatgtatgtatatgtatatattcatatatatatatttatatgtatatagtcatatatatatatatatatatgaaagaaagtttgttagggagaattggatcacatgattaaaaatgtgaagttccacaataggtcatccgtaagctagggaatgccagtagtgtggctcag

SEQ ID NO: 181790 - DNA, 201 bp, Homo sapiens
atgttccctttaaactatttctttacttgaagctgtgtttttcagactgataatgttttagacttttatgtgcccaagagtaaacttttatgtgcccaagwgttttagacttttatgtgcgcagtaaggactgaggaggtgagtgttttaccaagggcaaagctgagatcagaacataccaggctggcaggtccctgtgtt

SEQ ID NO: 181791 - DNA, 201 bp, Homo sapiens
acacatatagaatgtcaaaagaatctatagataaaatattaaaattaataagtaatttagcaaggttgctattgcagaaagtcaatacaaaactctattttatttctctaatccagaggcaaccatttagaaaataaaaattttagggaggagccaagatggccgaataggaacagctcccgtctacagctcccagcttga

SEQ ID NO: 181792 - DNA, 201 bp, Homo sapiens
gtttgttaaagacattcttagtaattttatcattaattatggggaaattctaaaactccattgggatcagccacaggcaaatgagatgctgcaagaagctrgatactgagcatgcagcctgaagtcatctgagcgttggatcataaccagcttcctctacttaccacttgactttgagacataactttgcttctctgagcc

SEQ ID NO: 181793 - DNA, 201 bp, Homo sapiens
agaagaggatataatgatcaaataggtggagatagattgggagtctgtcccatctgagtaccgttttggagtttgtgcttcctctttctccctggaggcaytggcaaatcattgaaggtgatctcaagccagagattcattttaagcatggctttatatacttttatacacaatagttgggggaaaaggcaaagaggtttc

SEQ ID NO: 181794 - DNA, 201 bp, Homo sapiens
gcttagagcaaaagcttacttaagtgaaattaagcagatatttattttgtcaggctctggggaggattccgaaattatttgctccctactagtgcctagcrctttatctttgcaaccgcacttaccctgtagagtcatagttgcacaggaaactgtattcctgcatctctaccttcagtgtttcacgatcactgtttctca

SEQ ID NO: 181795 - DNA, 201 bp, Homo sapiens
ctttcccatagtaacagagttagattactggcaaagcggactctctgaattcttgtttttggttacctacttaggttcccctgaaccacagtttcatcatytgtaatagggatgacaatagctctttgtaaggattaaatattgtacataaagtatctagcacttactgtgcattcttgacatgatatacaatgatattat

SEQ ID NO: 181796 - DNA, 201 bp, Homo sapiens
catgctaattcattgcccaggatgctgtaagcattcagaatctaggtgtcagcatcaccaccacacatatatttccattcttctaaatgtacagggaagcyctgtggcagttttgtcttgagatcattcaacatatttatatttctcccacagatactatgataagaaataccaagtattcctgaagctggttgaacacca

SEQ ID NO: 181797 - DNA, 201 bp, Homo sapiens
ggtataacaggattctacatgagttagcttttctttattgttattaggagattaataaaaattgacctcatttatttagtgcttactatgtaccagacacygtaccaagaatttattatcattcaactttcacaaccctaaaatatgtgtattttacaaatgaggagaagtaggctggcgagtagcttgcccaaagtcatt

SEQ ID NO: 181798 - DNA, 201 bp, Homo sapiens
ttggtgtgcgtcaaaatcacctggtgagggaggatggctgggctccacaccacagtttctgcttcagtaggtctagggtggggactgagaatgcacacttytaacaagttcccaaatgctgttcatgctgccatcctagcacttgagcatttttcccaatatgtgtatgatccccctcccccaccaactgggtgacgtaga

SEQ ID NO: 181799 - DNA, 201 bp, Homo sapiens
atttcaattgagggggaaaatatttggaaatgaatttattttgactctggggtaatatcttttgcttcacatttagaaatttacatactgggttacttccrtgacctaaaacaacttccaagttttcttatttcctcagtacccctagctttgttctggatgaggccagtctctgttccaacgcatgatttaaatatacac

SEQ ID NO: 181800 - DNA, 201 bp, Homo sapiens
tttaagtgtcattaagttatgtcatgttttgaatctttctctgctcgatttccacgtcaacatgagtgagggcttcagggattttactccatcattttggytaaatgccaacttggcaaattccactcctcccccggagggactgcaaatgccagtgtcctccttcattcaggagtgaggtcattgtctgtgtggttaaaa

SEQ ID NO: 181801 - DNA, 201 bp, Homo sapiens
tgactcacagttccacatggctggggaggccgcaggaaacttacaatcatggtggaaggtaaaggggaagcaggcacattcttcacaagacagcaggaaaragagtgagtgcagaggaaactgccacttttaagccatcagctggcatgagaattctctcactatcacaagaacagcatgaggaaaccacccccataatcc

SEQ ID NO: 181802 - DNA, 201 bp, Homo sapiens
tttgaatctttctctgctcgatttccacgtcaacatgagtgagggcttcagggattttactccatcattttggctaaatgccaacttggcaaattccactyctcccccggagggactgcaaatgccagtgtcctccttcattcaggagtgaggtcattgtctgtgtggttaaaagtggacactttctgctgcttctgcttt

SEQ ID NO: 181803 - DNA, 201 bp, Homo sapiens
accttttaaactaaacctgtttaagctgtttcaagtttgccaagtaagagaaagtgagatgaatatatgtgttcatacacacacatacacacacacgcgcrcgcgcatacacgtcctcactctgtattagtccattttcacactgctataaagatactacctgagactgggtagtttataaacaaaacaagtttaattgac

SEQ ID NO: 181804 - DNA, 201 bp, Homo sapiens
agtggaaggatttgtgcatttaaaattttgttagctgtggccaaaatgtcctccaaaaaagctgtcccaattcgtattcctgccaatgatgtccctgtgcytttgccaatgctggatattgtcagttgtttaatattttttgccaattttcgggcagaaaatgactgctcattgttcttttcctttgcctttccccattac

SEQ ID NO: 181805 - DNA, 201 bp, Homo sapiens
ctgtgaaatgatatatgtgagcatatgtcacagcatgtgacaagcagtagatgctcaataaatgatagttattatcagcattatattaaatattattaaagtatcttttaagactttctggagacatttcattcagacagttatttattcaacaaacatttatcgagagcctgcatttctccagatccatgctgagtgcaa

SEQ ID NO: 181806 - DNA, 201 bp, Homo sapiens
agctatagggacgcagggcaccaagtcctaggctgcacacatcatggggatcctgggcccggcccacaacatcactttttcctcttaggcctccaggcttktgatgggaggggctgccatgaagacctgtgacatgccctagagacattttcctcattgtcttggggattaatatttggctcctcgttacttatgcaaatt

SEQ ID NO: 181807 - DNA, 201 bp, Homo sapiens
tatgaccctttgacataatcccgtaattgtgtgtcttgtgaggttttaaaaaattattatattcttactttctggcactacaaggcactttaggctaattktgcatatttcctgctccagttctggaatcagccatttctccaaagagtctgattcttttttttgttttgttttgttttgtctgtgtgacggagtcttgct

SEQ ID NO: 181808 - DNA, 201 bp, Homo sapiens
tggttataatccagtactactttgttttgttactcagttgttccagttgtagccattggcaactcctcagttggctcctatgaccctttgacataatcccrtaattgtgtgtcttgtgaggttttaaaaaattattatattcttactttctggcactacaaggcactttaggctaattttgcatatttcctgctccagttc

SEQ ID NO: 181809 - DNA, 201 bp, Homo sapiens
aaggccagtaggaaatatatatgtatatgtacatgtatgtatatgtatatattcatatatatatatttatatgtatatagtcatatatatatatatatatatgaaagaaagtttgttagggagaattggatcacatgattaaaaatgtgaagttccacaataggtcatccgtaagctagggaatgccagtagtgtggctca

SEQ ID NO: 181810 - DNA, 201 bp, Homo sapiens
gatagcatatattttccaagttctttctattcaattttgtcagtttctacaaataagtagataaataaataaataaaacctgctagtttttttttttttttcactttaagttttgggatacatgtgcagaaagtgcaggtttgttacataggtatacatgtgccatggtggtttgttgcacccatcaacccatcatctagg

SEQ ID NO: 181811 - DNA, 201 bp, Homo sapiens
tagtagagatggggtttcatcgtgttggccaggctggtctcaaactcctgacctcaagtgatcttcccgtcttggcctcccaaagtgttgggattacaggygtgagccattgcacccggcccccacttgtttttcatgaaaaactaatattaaatgtttcttttggagggctttgtaaggattaaataatatgtatgtcaa

SEQ ID NO: 181812 - DNA, 201 bp, Homo sapiens
gctggccaaaagctgggggcaggagggagcttgtccaaaatgagagagaatatggatccaaagaggcagacggtctgcaagaaattgggggtgggggggggattagaaatgcagataaagtcatgccgtggaatctggaaggagaaaaccgtgccagtccctgagcagatagagcaaggacaactctgggagttcctggat

SEQ ID NO: 181813 - DNA, 201 bp, Homo sapiens
tcacttgaacccgggaggcggaggttgcaataagccgagatcgcagcactgccctccagcctgggcgacaaagcaagactccatctcaaaaaaaaaaaaaagaaaagaaaagaaatggagacctccctacttctacccactggagaaaacttgagaaaggatgtagggcaaaaagtgactcttgaactcttaagagaagac

SEQ ID NO: 181814 - DNA, 201 bp, Homo sapiens
tttcactttcttattcaggtgttcactggagtagcgcttttagttttccttacgaactttcttttgcattcacagcttgactatttggtgcaagaggcctrtctttttgccagtcttggctttccctatgcctacttgactaagcttaatcatttctagctttacatttaaagtgagagactatgactccttctttcactt

SEQ ID NO: 181815 - DNA, 201 bp, Homo sapiens
atcttgtcttcctaactaggttgggggcaaggactgcttttcacagccccacagcacccacacaaagcaagacaatcaattcttaactgaaggcctgactdcaagaattcaaggtcacttgaaaaatcagggtcactgcattgcacaactccaaagaacatcattcaaattgtattatatgattgtgcaagtggcagcctt

SEQ ID NO: 181816 - DNA, 201 bp, Homo sapiens
cgtcttatatgggtgcagtttgtggtgccccaaaacaaatgcaatagtaacatcaaatattatcatagcagatataatattaatgaaagtttgaaatattrttaagaattaccagaatgtgacacagacatgaggtgacatgagctattggaaaaatgacactgatagacttgctctttgcagagctgctacacaccttca

SEQ ID NO: 181817 - DNA, 201 bp, Homo sapiens
agctatatccttacaaaatgtaattcttaaataataatacttgaaagctgaaatttctctttgatccatgggctgcagaatggatgttgtgttagcaggtrtgagaacaacattcatctccttgtacatcttcatcagaactctttggtgactcggtgcattgtcaatgaggagtaacactttgaaaggaatctcttttct

SEQ ID NO: 181818 - DNA, 201 bp, Homo sapiens
aggactccaggaccctctctgctggtaagacatggtgccactttgtactctcccagccaatctgattggcctcttgactttggcaaaactgagctgggggytggcccccagtgccaagcacagaggaagcagggtcacatgccacccatgcccaaagctctttctgacatttccatgggcctggaaccaactctcctcctg

SEQ ID NO: 181819 - DNA, 201 bp, Homo sapiens
gagaatggcgtgaacctgggaggcggagcttgcagtgagccgagattgcgccattgcactccagcctgggagacagagtgggactccgtgtccaacaacarcaacaacaacaacaacaacaaaaacagtaagcttaaacattcctgtctcctgagtgtcttccttggtgacttctgacagtctatgcccttttttaccaac

SEQ ID NO: 181820 - DNA, 201 bp, Homo sapiens
aggtgatattgtggtcttctctgagtattgttggttcactcttatgagagcattctcagacctgtggcattttcaccattgaatccactgtgcacagaggyaaccaacatttgtgacacctgctgtttgcaaaacactgagctaagaattagtgattacttctcaacccaccatctctacaaggcagctatgactcctgtt

SEQ ID NO: 181821 - DNA, 201 bp, Homo sapiens
gtttccctgagttatgtgagctgctctagcaaattaatcaaacccaaagacagggttgtgagaaccccaacttgaagccagtagttcagaagttgtggaagttggacttgccactggtgtctggtgcgtggggttgggggcattcttggggactgagccttcaatctgtgagatctgatgcaatctccaagtagataatgt

SEQ ID NO: 181822 - DNA, 201 bp, Homo sapiens
accaggtgtggtggcgggcgcctgtagtcccagctacttgggaggctgaggcaggagaatggcgtgaacctgggaggcggagcttgcagtgagccgagatygcgccattgcactccagcctgggagacagagtgggactccgtgtccaacaacagcaacaacaacaacaacaacaaaaacagtaagcttaaacattcctgt

SEQ ID NO: 181823 - DNA, 201 bp, Homo sapiens
tgtgtaatgagatgcttgggcctgctggtggtcacctattttctaggtatacgcattggcttttgtggtgtcgccatatatatatatatatatatatataaaatatgtattatatatataatatatatacatgatatagatataattaaatgttatattcaattaaaataaatataattttaaattaaatataaggaacat

SEQ ID NO: 181824 - DNA, 201 bp, Homo sapiens
ggatcacgaggtcaggagattgagaccatcctggttaacatggtgaaaccctgtctctactaaaaatacaaaaaaaaaattaaccaggtgtggtggcgggygcctgtagtcccagctacttgggaggctgaggcaggagaatggcgtgaacctgggaggcggagcttgcagtgagccgagattgcgccattgcactccagc

SEQ ID NO: 181825 - DNA, 201 bp, Homo sapiens
tatgtgtaatgagatgcttgggcctgctggtggtcacctattttctaggtatacgcattggcttttgtggtgtcgccatatatatatatatatatatatataaaatatgtattatatatataatatatatacatgatatagatataattaaatgttatattcaattaaaataaatataattttaaattaaatataaggaac

SEQ ID NO: 181826 - DNA, 201 bp, Homo sapiens
actttgggaggccaaggcgggcggatcacgaggtcaggagattgagaccatcctggttaacatggtgaaaccctgtctctactaaaaatacaaaaaaaaaattaaccaggtgtggtggcgggcgcctgtagtcccagctacttgggaggctgaggcaggagaatggcgtgaacctgggaggcggagcttgcagtgagccga

SEQ ID NO: 181827 - DNA, 201 bp, Homo sapiens
tgcaactctgtcggcgctgctatttctgtcttcgcgttgtttcagaatactctcacactgctgccccatttttccgtacgcagtcttccaggcccttttttgcacctgatttttgccaggcagcataattagaggatgttacatttccctgaaagagcatattctcatggacaacaggacacaagggagtaagaaagcttc

SEQ ID NO: 181828 - DNA, 201 bp, Homo sapiens
gcaggactagaacaaagcagtctgactccagaggtgcgctcttttttttttttttttttaattaaaaaaagttcaatgggtttttggggaacaggtggtgwttggttacgtaagttctttagtggtgatttctgagattttggtgcactcatcacccaagcagtgtacactgtacccaatgtgtagtcttttattcctcac

SEQ ID NO: 181829 - DNA, 201 bp, Homo sapiens
tggtagaatgtttaggtttctctatatatgtgaccatgtcatctacaaacagggataatttgacttccttctttccagtttagctgttcttttttttttttcttgcctagttgctctggcttattcaaaggttgttgacacatacatagatacctattttaaaagagtggcatgtgagaaaaatacaggaaatagagccca

SEQ ID NO: 181830 - DNA, 201 bp, Homo sapiens
attgccaggtgacaaagttgcccaaggaagaaagagatgggagcctgtagagatgagagaatgcttttgggaggaggttatgtccaagctaactttaagcwcttgtaagaaattggtagacaggccaaggcaagaaagaacattcatagtagaaggaataacatgtacagttataaaagtgggagcagcatagtacattca

SEQ ID NO: 181831 - DNA, 201 bp, Homo sapiens
ataaaaatgctactgatttttcatgtcaattttgtatcctgaaaatttactgaatttgttgatcaattctaagagtttttttggtagaatgtttaggtttytctatatatgtgaccatgtcatctacaaacagggataatttgacttccttctttccagtttagctgttcttttttttttttcttgcctagttgctctggc

SEQ ID NO: 181832 - DNA, 201 bp, Homo sapiens
ggttttccttgtagagatctttactaccttggttacattattgtatttaattatttttgtagctattgtaaatgggattgccttcttgctttgtttttcakctagtttgttgttcatgtataaaaatgctactgatttttcatgtcaattttgtatcctgaaaatttactgaatttgttgatcaattctaagagttttttt

SEQ ID NO: 181833 - DNA, 201 bp, Homo sapiens
ctgctattaaagtacaagtgagtcatgcatagcagcttctccttgcccagttaatttctctgtaaaatctttactctcttttattcatgtatatatatgtrtgtgtgtgtgtgtaaatatatacatatatatgtttgtatttccctttaaggatttcaaacacaaagaccctagtcatttgattgtctctgtactgtcgaa

SEQ ID NO: 181834 - DNA, 201 bp, Homo sapiens
tttgcctacaaccctgactgtagagacacattgttacctgttttccatattctgtctagtaaatgcttggttgtcaggacaacggcatagaaggtggaagstcattgataaccacgtgaattctttaaacaaatatgatcagagcaaattccagggtatgcttgaaagtagatttaaggaagagcaaaggtttcagacata

SEQ ID NO: 181835 - DNA, 201 bp, Homo sapiens
aaaatcctgaccatgtcccattacatagtgactttgaacaaattatgtaatctttctgtgcttgtatttctacaactgtagaataataggttgcaatatcrtagactcttcatgtagagaatctaattctattactataaaatctaattctaataccattggtttggtgttagcaatgaaggtgatagcaactgaaaagta

SEQ ID NO: 181836 - DNA, 201 bp, Homo sapiens
cttgatctttctcagcctcaattagtatattatgaagattagtaagtatatcatgaggatgaaaggtaataatgcaggtaaagttcctagcatacaatagrtcttcagaaaatgaaagttcttactactataatgattgtccattcctctgaattcagatttctctctaggtgatagattatctgccaaagaccataaccc

SEQ ID NO: 181837 - DNA, 201 bp, Homo sapiens
gaaatgggtttggtcctcacactgtaagtctagatagatcagtgtggtgaaggcatctgggtattcacttggtactgtgggtcaaggtactaccagcagtyacagatgggtcagcagcaagtgttctctagatcacatgtcctttccacaggatgagtctcttgggcaacaggaaattatctgatgacagaggtgagcagt

SEQ ID NO: 181838 - DNA, 201 bp, Homo sapiens
aggctgccttttctcctctccctgaccactgattgctgaaaccacaagacatatggaaatagatttcagggactagccaaaagccattctggtagtttgaytcacatcgtctcaaaggctaccattttctgactgtggcttgttagatcctatacagagatactactagttcttagctgtgttaggaatatttagtatctt

SEQ ID NO: 181839 - DNA, 201 bp, Homo sapiens
ttctaaaacaaaattagacatgtgaagtacagtcatctgctacataacgttttggttaacgagggacttcctatatgatggtggtcctataagattatgayactgtatgtttactgtaccttttctatgtttagatatgttcagatacacaaatatttaccattgtggtacagttgcctacagtattcagtacaataccat

SEQ ID NO: 181840 - DNA, 201 bp, Homo sapiens
acctgaaatgctcaagcattgatgtggaaatatgaccacactttgggaaagagtttggcagtatcatgataggctatgattcagcagtcctattcttagayatatatccaacagaaatgtgtaccagaaaaaatacgtatatagtaatacatgtaaaaccattatttgcaataggcaaaaactgcaaacccccagttccca

SEQ ID NO: 181841 - DNA, 201 bp, Homo sapiens
actcccacttatgagtgagaacatgcggtgttagaaaacctgctaggattttaatggagttgtggagaatctgtaggttaatttgaagagattaccatctkaacaatgttgaattttccattttacgagtgtgacatatttctccaatttttagctcttcatagcaatgtttggtagttgtcagagtataggtcttgaact

SEQ ID NO: 181842 - DNA, 201 bp, Homo sapiens
aatctgttccttctctgcattatgttaatagacttttctggggcaggaagaatttagtggatgtcatttgttagccaaggtatatgtctgcttttttttttccttctcccctcctcccatcaatcaaaggatttcttagtttcttatctgtgaatcactcaggcttccacttaactgccagttcagtttcctccttgccca

SEQ ID NO: 181843 - DNA, 201 bp, Homo sapiens
caggatggtctcgatctcctgaccttgtgatccgcccgtcttggcctcccaaagtgctgggattacaggcgtgagccaccgcacctggcctaataaaaaawtttttttaaaagatgtgggtttcaagaggtgattcagtgttggaggtgaaggttgatttgaggcccacactttgagtaagaaggctgtagagtgtctttg

SEQ ID NO: 181844 - DNA, 201 bp, Homo sapiens
ttctttttttttttgagacagaatctcgctttgttgtgttgcccaggctagagtgcggtagcgcaatctcgctcactgcaagctctgcctcccaggttcaygccattctcctgtctcagcctcccgagtagctgggactatcggtgcctgccaccacactcggctaattttttgtatttttagtagagacggggtttcacc

SEQ ID NO: 181845 - DNA, 201 bp, Homo sapiens
gttccacaataggtcatccgtaagctagggaatgccagtagtgtggctcagttcaagtccaaaagccttgaaaccagggaagccgacaatgcagtcctgartaagtctgagggtgaaggcctgagagccccaggcaggctgctagtgcaagacctagagtccaaaggaagatgaacctggagtctgatgtctaagggcagg

SEQ ID NO: 181846 - DNA, 201 bp, Homo sapiens
cggaaagggaactccctgaccccttgcgcttcccaggtgaggcaatgcctcgccctgcttcggcttgcgcatggtgcttgcacccactggcctgcgcccastgtctgggactccctagtgagatgaacccggtacctcagatggaaatgcggaaatcacccgtcttctgcgttgctcacgctgggagctgtagactggagc

SEQ ID NO: 181847 - DNA, 201 bp, Homo sapiens
tgtttggttttctgttcctgtgttagtttgctgaggttgttggcttccagcttcattcatatccctgtgaaggacatgatctcattcctttttatggctgygtagtattctatggtatatatgtaccacattttctttatccagtctatcattgataagtatttgggttggttctatgactttgctattgtaaacagtgct

SEQ ID NO: 181848 - DNA, 201 bp, Homo sapiens
ctctctttctctctttttttctttcttctttcttttttgcttaatattgctttggcattgtgttttttgtggttccatacaaattttaaggcttttttctrtttctgtgaagaatgtcattggtattttgatagggattacgttgagtgtgtaggttgctttgggtagtatggtcatttaataatattaattattctgatg

SEQ ID NO: 181849 - DNA, 201 bp, Homo sapiens
ttattttcttaattttattttttatcttttagttgctattaagtagaaatccagttgatatttatatgttagtcttgcatcctctcatcttactaaaattrcttattagttctagtaatttttttagcttgtagattctttaggattttctgcatatgagatcatgtcatctgcaaagaaagacactttaacttcttttct

SEQ ID NO: 181850 - DNA, 201 bp, Homo sapiens
tcactgcaacctccacctcccaggttcaagcgattctcctgcctcagcttcccgagcagctgggattacaggcacgcaccaccacacccagctgattttgkatttttctttctttcttttttttttttttaagtagagatggggtttctccatgttggtcaggctggtcttgatctcctgaccttaggtgatctgccctcc

SEQ ID NO: 181851 - DNA, 201 bp, Homo sapiens
ttctacagtggtatagaatactagaacttattactcgcatctagctgtaattttgtgttttttaataaatctctccctcttcccctcttccctctaccatwctctgcctctaatatcctctactttttacttctatgagatcaacattttttagcttcaacatgtgggcaagaatatgcagtgtttaactttctgttcttg

SEQ ID NO: 181852 - DNA, 201 bp, Homo sapiens
ggaaagcattcatgttaccattaagtatgatgttagctgtaggtttttgtagatgctccttatcaggttgtagaagttctcttctatgtctggtttattgmatgttatatttggagggtaggggttcttttttctgcatctgttgagatgatcatttggtgtttgtactttgttctgttaatgtgcgtattccattaatta

SEQ ID NO: 181853 - DNA, 201 bp, Homo sapiens
gtgatctcggctcactgcaacctccacctcccaggttcaagcgattctcctgcctcagcttcccgagcagctgggattacaggcacgcaccaccacacccrgctgattttgtatttttctttctttcttttttttttttttaagtagagatggggtttctccatgttggtcaggctggtcttgatctcctgaccttaggtg

SEQ ID NO: 181854 - DNA, 201 bp, Homo sapiens
cacccaccttggcctcccaaagtgccaggattaaaagcatgaaccactgctcccggcccaacctcatgcttctttatggtgactgctccacctcgttaggyggccatgttggacaggatctgagaacccctggcagctctctcatacatgggccacttggggtctatgggaaacctttgtcttttggatctggacagactc

SEQ ID NO: 181855 - DNA, 201 bp, Homo sapiens
ctttgtgctagaaacattcaatatcctcctaggtatttgaaaggatatattattgttaactatagttattctacagtggtatagaatactagaacttattmctcgcatctagctgtaattttgtgttttttaataaatctctccctcttcccctcttccctctaccattctctgcctctaatatcctctactttttacttc

SEQ ID NO: 181856 - DNA, 201 bp, Homo sapiens
tttaaaagaagttttgtcatttttggttttatattaaatctgtgatcattttaaggtaatttttgtataggacatgaaatatggaatcaagttttttttttgcatatggctatccagttccagcactgtttgctgaaaagcctatcttcattgaattgcctttgcacctttgttcaaaaatcaatttaccatgtatacatt

SEQ ID NO: 181857 - DNA, 201 bp, Homo sapiens
ctgcaacctctgcctcccaggttcaagcaattcttgtgcctcaccctccccgtgggaccacaggcacatgccaccatacttggctaattttgtatttttaktagagacggggtttcactatgttggccaggctggtcttgaattcctgccctcaagtgatccacccaccttggcctcccaaagtgccaggattaaaagcat

SEQ ID NO: 181858 - DNA, 201 bp, Homo sapiens
ttcagatcaacaaacttaactgacatttcctttttgggccccattttctactctgtgaactgaggaggattgaattcagtgattctcaaaccagagcataygtcagaaccacctggggggattcttaaaacactgattcctgggcctgcttagagtttctaaatcagaaattctctggagcgattaagaactggtgtttcc

SEQ ID NO: 181859 - DNA, 201 bp, Homo sapiens
tggatcatgctttttgtgttttatctaagatatctttgcttaacctaaggtctcaaatattcttcctatttttaaaagaagttttgtcatttttggttttrtattaaatctgtgatcattttaaggtaatttttgtataggacatgaaatatggaatcaagttttttttttgcatatggctatccagttccagcactgttt

SEQ ID NO: 181860 - DNA, 201 bp, Homo sapiens
agtgctggagtgcagtggtgcaatctcgattcactgcaacctctgcctcccaggttcaagcaattcttgtgcctcaccctccccgtgggaccacaggcacrtgccaccatacttggctaattttgtatttttagtagagacggggtttcactatgttggccaggctggtcttgaattcctgccctcaagtgatccacccac

SEQ ID NO: 181861 - DNA, 201 bp, Homo sapiens
atgtgtatatatatgtgtgtgtgtgtgtgtgtgtgtctgtgtgtgtatatatacatatgtgtgtgtgtgtctgtgtgtgtatatatatatatatatatataaacaccatattctgtgtcttttatatatagtatcacttgattattataattaccatgaagtgccattgttcttctcattttataggtgaggaaactgaag

SEQ ID NO: 181862 - DNA, 201 bp, Homo sapiens
agaatagcgtgaacccaggaggcggagcttgcagtgagctgagatcgtgccactgcactccagcctgggggacagagcgtctcagaaaaaaaaaaaaaaaattgacaaggtgcaaaatggtgaatttccctcatcatgggctgttttccactaaagcacttctgtgtcttaacacaaatttcttccccgaagagtcagtca

SEQ ID NO: 181863 - DNA, 201 bp, Homo sapiens
tgtttgtttgttttggtctcttttttgtttggttttgttttgagatagagtcttgctctgtctcccaggctggagtgctggagtgcagtggtgcaatctcrattcactgcaacctctgcctcccaggttcaagcaattcttgtgcctcaccctccccgtgggaccacaggcacatgccaccatacttggctaattttgtat

SEQ ID NO: 181864 - DNA, 201 bp, Homo sapiens
tatgtgtatatatatgtgtgtgtgtgtgtgtgtgtgtctgtgtgtgtatatatacatatgtgtgtgtgtgtctgtgtgtgtatatatatatatatatatataaacaccatattctgtgtcttttatatatagtatcacttgattattataattaccatgaagtgccattgttcttctcattttataggtgaggaaactgaa

SEQ ID NO: 181865 - DNA, 201 bp, Homo sapiens
gaagaaaagttagtggtgtaggaaagttcttatctgatcagtactgtcataatgggcttcatgctctcttagccttataggtgtttacagctagctctgaytctcataaggcacatcatagatttttggggagaccccctgcctctgaaaacctctcgcctgaaatattgttgtcttggttaacacctgtctattctcata

SEQ ID NO: 181866 - DNA, 201 bp, Homo sapiens
ctatgtgtatatatatgtgtgtgtgtgtgtgtgtgtgtctgtgtgtgtatatatacatatgtgtgtgtgtgtctgtgtgtgtatatatatatatatatatataaacaccatattctgtgtcttttatatatagtatcacttgattattataattaccatgaagtgccattgttcttctcattttataggtgaggaaactga

SEQ ID NO: 181867 - DNA, 201 bp, Homo sapiens
tctatgtgtatatatatgtgtgtgtgtgtgtgtgtgtgtctgtgtgtgtatatatacatatgtgtgtgtgtgtctgtgtgtgtatatatatatatatatatataaacaccatattctgtgtcttttatatatagtatcacttgattattataattaccatgaagtgccattgttcttctcattttataggtgaggaaactg

SEQ ID NO: 181868 - DNA, 201 bp, Homo sapiens
ggagaattacagatttatacatgtgtgtctatgtgtatatatatgtgtgtgtgtgtgtgtgtgtgtctgtgtgtgtatatatacatatgtgtgtgtgtgtstgtgtgtgtatatatatatatatatatataaacaccatattctgtgtcttttatatatagtatcacttgattattataattaccatgaagtgccattgtt

SEQ ID NO: 181869 - DNA, 201 bp, Homo sapiens
ttttggacataagaatcttgactattatttcccacggagaattacagatttatacatgtgtgtctatgtgtatatatatgtgtgtgtgtgtgtgtgtgtgkctgtgtgtgtatatatacatatgtgtgtgtgtgtctgtgtgtgtatatatatatatatatatataaacaccatattctgtgtcttttatatatagtatca

SEQ ID NO: 181870 - DNA, 201 bp, Homo sapiens
ttgggcagttaagagaatattgcagattcttgtcggtaaatgacacaaaagatgatggactctaagctagctatggaagaaattagagccagacagggcayatgaattgaaagaaaatgaagtgatggagattctggaagttgctttaaagtggagaaggacatttgctaagaatgatagagtacatgagagaattggact

SEQ ID NO: 181871 - DNA, 201 bp, Homo sapiens
gtggttgggagaaactcctacacatttagtaacagaagtcaccttctatgtggatgattgctgtggtgtaagaccagaggaaaaacatgatttcagagttwttccctcaacagccttgagatactccattttaataagatagagagatgaaagtgtattactggtgggattatgttagaaaacacatttcttgtcccagta

SEQ ID NO: 181872 - DNA, 201 bp, Homo sapiens
ctttctgacatttccatgggcctggaaccaactctcctcctgggtttcatctcattatatgtgggaagacaaaagaacactgaaccttccagttaattcarcaccccgcccccacttaccccttcctggagaggataacagttctgttgaccattataatgcattttctgtctcccagcagtccacatagtcattaatttc

SEQ ID NO: 181873 - DNA, 201 bp, Homo sapiens
ttgcctttccacacaggcttgaaagtcatcttcaccttgaagactgtattcactctactagccaccctaactggaccctccacagttctctgggaacaccmtgtacacatttcacctttctagcattttctacatggccctaagagtcttagtttttcatcatctttgtcccaaaccacaatatgagacctcagcacctag

SEQ ID NO: 181874 - DNA, 201 bp, Homo sapiens
tttctctcttcctgaatgcatgtccctattcttcagcaaatactcttctcatcagaattatgacatgtgggaatcaagaggggagtaaaagggcatatttmtaaaaaacgtggaaaccaagaaatctgttttgtaaaaatgaatcacctatttagcctcagggttctgttgactctttagctgtcaacatggaagtctcta

SEQ ID NO: 181875 - DNA, 201 bp, Homo sapiens
gcaggagaatggcgtgaacccgggaggaggagcttgcagtgagttgagatcacgccactgcactccagcctgggcgacaaagcaagactccgtcttaaataaataataaataaataaataaataaataaataaataaataaataaaatactgaaagctccatgtgatacaagtgaggacctccatagtcaatgtcaaaata

SEQ ID NO: 181876 - DNA, 201 bp, Homo sapiens
caaggccagcggtctaagtaagagattaaactgaacagatttctgacttggtaagacagagactttctaaggggtacactgccccactttatcttaccccwgtgtatatgaagaaacacatgtttacccatgggaatgtgtatgtatttggatctatttcacagagtatcttataaaaaccgacatgaaaagaaagtctga

SEQ ID NO: 181877 - DNA, 201 bp, Homo sapiens
tgcctaactcatactaggcactgtgacaagtattgtacacattgtctctttgaaggccaacgaccctatgaagtgtttgtgtgtggtgtttattttagggkgtctgttttgtagacaagaaaacgaatgttcatagagataaaacaactcactcaaagtgacaaagtaaatatgtgacagaaccagaatttgaacctaaga

SEQ ID NO: 181878 - DNA, 201 bp, Homo sapiens
acagtcatctttctgggatggtttagatggtgtggggtgaggggttgggaatggcgatgttcctcagctgtggatgagcatgatcataaggcatttccttrtaaggctggggaaatagtagtggctacctagctagatcaggtttaaatgcatgccacagttactcttccagtttcttgtgagaggtctctgtttgaaaga

SEQ ID NO: 181879 - DNA, 201 bp, Homo sapiens
atctcagactgctgtgctagcaatcagcgagattctgtgggcgtaggaccctccgagccaggtgtgggatatagtctcgtggttcgccgttttttaagccrgtctgaaaagcgcaatattcgggtgggagtgacccgattttccaggtgcgtccgtcacccctttctttgactcggaaagggaactccctgaccccttgcg

SEQ ID NO: 181880 - DNA, 201 bp, Homo sapiens
caccgacagcacagcaggtgctgccaggcctgtacagagctggaaatcctggcaagatggtagctgctccatcttgtctggcctagttactgcctctggcscatgctgaagggagtctggggagttaccattccaaagaactcacaagaaaacagaactgacttggatatattccaggtttgcctagtggtacttcaaaat

SEQ ID NO: 181881 - DNA, 201 bp, Homo sapiens
atttgcgtatattgaaccagccttgatcccagggatgaagcccacttgatcatggtggataagctttttgatgtgctgctggatttggtttgccagtattrtattgaggatttttgcatcgatgttcatcagggatattggtctaaaattctcttttttttgttgtgtctctgccagggtttggtatcaggatgatgctgg

SEQ ID NO: 181882 - DNA, 201 bp, Homo sapiens
gtggccaactccttttctgtcaaggatctcagaatcaatatatttaagatcccaagattttgagatgtacagataagtgaacattggttgcctggctattsgatttttatcttagagaaaaacctgtgagtcttggtggggaagaaccagcactttggaatcagattacctgaatgtgaatcacagcccagttccttgtga

SEQ ID NO: 181883 - DNA, 201 bp, Homo sapiens
ttgtatacgatattcctattccgtgcttatctgagtggatgagccaagtcctttgaaaggaaatggaacatggtagacagggccatgtgacagatagaagstagaagcagatggcctctctattttcagtagccagaccaaaagacattcacattaaatggtgttgtcctaatagacacttgtgagtacagaaatgagctg

SEQ ID NO: 181884 - DNA, 201 bp, Homo sapiens
gtaattgtgaggagcagagagtggggtcaggaagattccagataaccctaatcatgcagataacctaaaaccaaacccataagaccagcaaaagtattgcygtctttagatgttaaccaaaaaattataaacgaataaattaagtacaatagtttaagaaaattcagcattagtctatgataaaatagtctcatttgcctt

SEQ ID NO: 181885 - DNA, 201 bp, Homo sapiens
tttttggacataagaatcttgactattatttcccacggagaattacagatttatacatgtgtgtctatgtgtatatatatgtgtgtgtgtgtgtgtgtgtgtctgtgtgtgtatatatacatatgtgtgtgtgtgtctgtgtgtgtatatatatatatatatatataaacaccatattctgtgtcttttatatatagtatc

SEQ ID NO: 181886 - DNA, 201 bp, Homo sapiens
gtctttactataggcagaagtttagcaacaggtatttttaccttaaagtagctgtagatttgttctgtacagtacttaagaaacaatactgatattgtccycttcaacactcacccacccacacatacacccacatcctgattcattgatggttgtggaataggagctggacatcagtatttttaaaagttatcaaggcga

SEQ ID NO: 181887 - DNA, 201 bp, Homo sapiens
cagcttcactcctgaagccagcgagaccacgaacccaccgggaggaacgaacaactccagacgcgccggcttaagagctgtaacactcaccgcgaaggtcygcagcttcactcctgagccagcgagaccacgaacccaccagaaggaagaaactccgaacacatctgaacatcagaaggaacaaactccggacacgccacc

SEQ ID NO: 181888 - DNA, 201 bp, Homo sapiens
cccacctgttctagttcatctctttaaatgctttccttactgttgaagggactgctatggtctgttaaaaaataataataataataaaataaaaaattttwaaaaaatggcactatcttgattactgagagcacctctcttacccacatggctttgttcaagctcctccctctacttggaacacctgtttcactttagcaa

SEQ ID NO: 181889 - DNA, 201 bp, Homo sapiens
gtggaagctttgttctttctctctttgcaataaatcttgctgctgctcactctttgggtccactttgcctttatgagctgtaacactcactgcaaaggtckgcagcttcactcctgaagccagcgagaccacgaacccaccgggaggaacgaacaactccagacgcgccggcttaagagctgtaacactcaccgcgaaggt

SEQ ID NO: 181890 - DNA, 201 bp, Homo sapiens
agtggcaacccactcgggtccccttccacactgtggaagctttgttctttctctctttgcaataaatcttgctgctgctcactctttgggtccactttgcytttatgagctgtaacactcactgcaaaggtctgcagcttcactcctgaagccagcgagaccacgaacccaccgggaggaacgaacaactccagacgcgcc

SEQ ID NO: 181891 - DNA, 201 bp, Homo sapiens
ctcagggattgtaaacgcaccaatcagcactctgtcaaaacagaccactcggctctaccaatcagcaggttgtgggtggggccagataagagaataaaagyaggctgcccgagccagcagtggcaacccactcgggtccccttccacactgtggaagctttgttctttctctctttgcaataaatcttgctgctgctcact

SEQ ID NO: 181892 - DNA, 201 bp, Homo sapiens
cctagcacattaccaagcacatagtaagggctgagtaaatatttgtgaaatatataaatgaatagattttctgcccagcctcaagacctgctggaatacarcttgtatgcctaactcccttttcttccctaccctctagctaaacatttctgtgaccataaatgtgacttcagcattccttactgctgaatagatgagaaa

SEQ ID NO: 181893 - DNA, 201 bp, Homo sapiens
ctcagggtttgtgaatgcaccaatcaacactctgtatctagctactctggtggggacttggagaacctttgtgtctagctcagggattgtaaacgcaccartcagcactctgtcaaaacagaccactcggctctaccaatcagcaggttgtgggtggggccagataagagaataaaagtaggctgcccgagccagcagtgg

SEQ ID NO: 181894 - DNA, 201 bp, Homo sapiens
attgtaaatacaccaattggcactctgtatctaggtcaaggtttgtaaacacaccaatcggcaccctgtgtctagctcagggtttgcgaatgcaccagtcsacactctgtatctagctactctggtggggacttggagaacctttgtgtggacactctgtatctagctaatctggtggggaggtggagaacttttgtgtct

SEQ ID NO: 181895 - DNA, 201 bp, Homo sapiens
cccggtgcgggatccactgggtgaagccagctgggctcctgagtctggtggggacatggagaacctttatgtctagatcagggattgtaaatacaccaatyggcactctgtatctaggtcaaggtttgtaaacacaccaatcggcaccctgtgtctagctcagggtttgcgaatgcaccagtccacactctgtatctagct

SEQ ID NO: 181896 - DNA, 201 bp, Homo sapiens
tctaaaacttatttatcaccccaaacggaagctgctactattaaataataactccccatttccctctttacctatcccctcttttttttagacagggtctygctctgtcgcccaggccggagtgcagtgtcgtaattttggctcactgcaacctctgcctccagggttcaagcgattctcctgccttagcctactgagtag

SEQ ID NO: 181897 - DNA, 201 bp, Homo sapiens
ggctcctgtggggcccgagcctccctgacgagcgccgccccctgctccacggagcctagtcccatcgaccacccaagggctgaggaatgcgggcgcacggsgcgggactggcaggcagctccacctgcagccccggtgcgggatccactgggtgaagccagctgggctcctgagtctggtggggacatggagaacctttat

SEQ ID NO: 181898 - DNA, 201 bp, Homo sapiens
gggagttcagtgttttcttcaattttggtgagaatttaaaaaaaaatttttttgcagtataatttccagaaaaatttaaacctacagaaaacttgagagartggcatattgaacacccttataccttttacctacgttaatcagttgctaacattttattacttttgtgctctttagtgcacaccttacctacctctgaca

SEQ ID NO: 181899 - DNA, 201 bp, Homo sapiens
tttctcgaggggccttagctgccttcccgcggggcagggctcggaacctgcagcccgccatgcctgagcctccccctgttccgtgggctcctgtggggccsgagcctccctgacgagcgccgccccctgctccacggagcctagtcccatcgaccacccaagggctgaggaatgcgggcgcacggcgcgggactggcaggc

SEQ ID NO: 181900 - DNA, 201 bp, Homo sapiens
caggagaatggcgtgaacccgggaggaggagcttgcagtgagttgagatcacgccactgcactccagcctgggcgacaaagcaagactccgtcttaaataaataataaataaataaataaataaataaataaataaataaataaaatactgaaagctccatgtgatacaagtgaggacctccatagtcaatgtcaaaatac

SEQ ID NO: 181901 - DNA, 201 bp, Homo sapiens
ggagaatggcgtgaacccgggaggaggagcttgcagtgagttgagatcacgccactgcactccagcctgggcgacaaagcaagactccgtcttaaataaataataaataaataaataaataaataaataaataaataaataaaatactgaaagctccatgtgatacaagtgaggacctccatagtcaatgtcaaaatactt

SEQ ID NO: 181902 - DNA, 201 bp, Homo sapiens
attattttcgctaaggacttatggctaagtgagtgattgaactgtgtaaccaacaggtagtgatggagcctgagggaactggtgattgcataactcctcgyacgcccccaaagctgacaaaggcattcaaatcaagatttaaaagaatacagtacctgccactcagaactctactgcaagctggattatgtctatgaagcc

SEQ ID NO: 181903 - DNA, 201 bp, Homo sapiens
gagaatggcgtgaacccgggaggaggagcttgcagtgagttgagatcacgccactgcactccagcctgggcgacaaagcaagactccgtcttaaataaataataaataaataaataaataaataaataaataaataaataaaatactgaaagctccatgtgatacaagtgaggacctccatagtcaatgtcaaaatacttt

SEQ ID NO: 181904 - DNA, 201 bp, Homo sapiens
aaattctttgacattcctgtggaaggtcccatgtactctgtattattttcaaagtattagtataatggtttgtggagcttttgtgggaggtgatatctttscagttaggcaactgagcccctgccttgttatgcccatgaccttatttaggtatcttcttacattggctttttttgttgtttttttttttggttttaattt

SEQ ID NO: 181905 - DNA, 201 bp, Homo sapiens
tccactcctcatgtctttcaggtgtatcctcaaatttcacttgcatcttgcataggaaccacctcctccttgcattcctaatccccctgagtaatcacttkctagtatactatatctacactatgtaatttatttgatttattgggtattgtctatccctactaaaatgtaatctccaaaagagcaaggattaaaaaaaaa

SEQ ID NO: 181906 - DNA, 201 bp, Homo sapiens
acaggccaggatttctcagagtcttcttcgatatattaaaaagtatttctggaaaaaattagtttgaaaactgctatgatgttcaagataactaggtgtcttttttttttttttttaaagagatggggtctcaatgtgttgcccaggctggactctaattctgtgcccaagaaatcctccctcctcagttttccaggtagc

SEQ ID NO: 181907 - DNA, 201 bp, Homo sapiens
tattttggccaggctgatttcgaactcctggccttatgtgatcctgcaaaagtgatatgattataggtgtgaaccactgtgcccggccatccaaaatcaawtctttttttttttttttttttttaagtatcaatttctcttttaatcttagacgtcgtggtggaaggaaaaatcagttagcaaagaagcaatctcagaaaa

SEQ ID NO: 181908 - DNA, 201 bp, Homo sapiens
tatttttaataataaatggctagattagactattggcagaggaataaataggagggctgagactgagaggctttaggaaggcaggcgtaactggacttggyaacaatggagaggaaggaggtagaggctatttgagtttcagttcttggcagaatgttggggtcactgatataaatgagagtatttggcctttatttcatc

SEQ ID NO: 181909 - DNA, 201 bp, Homo sapiens
gtaaaagttactaagtggtcattacgacctaatgagttcctactcaatgagtcaggcactgtgctaggcatcttacaaatttattgcatataatcttgacrgcaatgagcagtatcctcagtttacaaatgagaagttgaggctcatgggagataagtggtttcccaaccctgtacatgtagttagtacaaaaccaggact

SEQ ID NO: 181910 - DNA, 201 bp, Homo sapiens
cctcacctctacccccagaggtcctggagcacctctgcccagtccttgagctccatggaacaattaacaagtggcatcttagcactcaaaaattgctgatyatgcacccagattctatcttggggctcaaaggggtcttaatatatctatgagtcaactcctagcccctccctgcagtgcagaaatactatagaatccttg

SEQ ID NO: 181911 - DNA, 201 bp, Homo sapiens
acttttgccaagtttgttggttagccaggaaaattctcaacatgaatggaggaaaatgctgatgaaaatcactccttcctgtatttattaactcatttgcyagactaatatttactgagtataccctttgcagatattgtgctacatactggagatagcacatgtgaagatactcagcccctgcctgcgagatgcctatca

SEQ ID NO: 181912 - DNA, 201 bp, Homo sapiens
taggcttctgggaacttagagtctagtgtagagaggcagaaaatagacacacacaaagtaattttgttttctggaaaatgctacgaaggaaaaacacagakgaacagatttggcatagcgagtgtgggcctctcttgggagtttttgtttgacctgaatgatgagataggaaggaggagcaacagattcactgtgggggag

SEQ ID NO: 181913 - DNA, 201 bp, Homo sapiens
tctctgtgtctggcacatataggtgcttaatatttttaataataaatggctagattagactattggcagaggaataaataggagggctgagactgagaggytttaggaaggcaggcgtaactggacttggtaacaatggagaggaaggaggtagaggctatttgagtttcagttcttggcagaatgttggggtcactgata

SEQ ID NO: 181914 - DNA, 201 bp, Homo sapiens
tggccagagagctcgttgctgatcaaaccaggacaagcatccatatgaaacacgcaaatgtaaaattacatgaaaaaaaaaaccctttacctccagatgtrctgctttccagaaaagtggcgaggaaataccacaaaaatacctttacttcaaaaaatttgaaaatgttgaaggtcatgcttcatattgtgccaggcaaga

SEQ ID NO: 181915 - DNA, 201 bp, Homo sapiens
aattgctgatcatgcacccagattctatcttggggctcaaaggggtcttaatatatctatgagtcaactcctagcccctccctgcagtgcagaaatactayagaatccttgggggatgagagagggctcgggctctgtttaacacctaggagcagatggatcatttcattctattctgtcttacgtggttctctgggttct

SEQ ID NO: 181916 - DNA, 201 bp, Homo sapiens
ccctgcctgcgagatgcctatcaactatggagaaaacagatgattaatttattgttattactaaaagggaagtgctgagacctatgagaataaaatacttmtctaggatttgtgattatgacttcaaacttttcctaaacaggactattttctactgtggtcttaagtcataaattgtctattctctgtatctagttcgat

SEQ ID NO: 181917 - DNA, 201 bp, Homo sapiens
gttctctgtgtctggcacatataggtgcttaatatttttaataataaatggctagattagactattggcagaggaataaataggagggctgagactgagasgctttaggaaggcaggcgtaactggacttggtaacaatggagaggaaggaggtagaggctatttgagtttcagttcttggcagaatgttggggtcactga

SEQ ID NO: 181918 - DNA, 201 bp, Homo sapiens
tgtaaatcaccattggaggaggtggtcctggttgtattcttttgtttgtttgtaatacacataacataaaatttatcatcttaaccatttttaagtgtacrgtttggtggtattaagttcattcacattattgtgcaaccatcaccaccatccatctccggaactcttttcatcttgcaaaactgaaactttacccgttaa

SEQ ID NO: 181919 - DNA, 201 bp, Homo sapiens
atgcaggccccgaaacttctgtggctgaaagaggtgagtgcatagggtctaagagaagataccaacaatagtagaggattcctgttactgtggacctgtasgtaccaggcaccctgctaaaatcggttatgtttgatttttcccagcaactaggaggaaggttgatcccattttattgattacagtgtagttaaatcacac

SEQ ID NO: 181920 - DNA, 201 bp, Homo sapiens
catcagggtctttcattatagactacatttcccagctccctttgcagctacacatgttcatctaagttttggccaatgaggtataagcagatgtgtcctgygggattcctgagacgtctcctttaaggagatcaggcagtggccatcctctttccctcccctgggtcaggtagattggctggtcaggtaggttagcagtga

SEQ ID NO: 181921 - DNA, 201 bp, Homo sapiens
cctactatttactaggaactgttctaagatctttatttgtaatagctcacataactcattcaacagtctttctaagagacttacccccattttacagatgrtcagtcacagagaggttaaataacttgcccaagatcatacagccaagccaggagttaaaatcttcagtctatctcttaaactttctgtaaatcactgtga

SEQ ID NO: 181922 - DNA, 201 bp, Homo sapiens
aagggtgagaagccccatctttgtcctttggaggaaagggtaaaactgtgtgacctcgacgattatgatgtgcactcttcactgagaaccactagtctgamtctgttccatttctataaagctttttccccagttctctgctgtgtacgtctagatgtggattttatgtggctgaaagatgatctctagcatgactgtcat

SEQ ID NO: 181923 - DNA, 201 bp, Homo sapiens
aaaattaaccaaacagaacacagggaccaaagggtgatgcgggcttttcaaaaagtggttttcagcatgatctgaaggatcctctttcttcctgtctgctyacttctgatgtttccaatttagtagattgagacaaaattcccaggaacgttttgtgcttgatccaggttgcctctttctagatcacccaaaaagaataaa

SEQ ID NO: 181924 - DNA, 201 bp, Homo sapiens
tccttgccattgtactgacatccttttcttgagctgtcaggttgggttgtaacttggcaacttgtcttccagttagcatgtcagatggggacaggaccctrggggggtcggggtagggagaaacactgaggaggtaagatttgagcagaacaatacctgaagagagctgggaactacatctgcatcttaaatcgctcagaa

SEQ ID NO: 181925 - DNA, 201 bp, Homo sapiens
gtaatggatgggcccattttctctcctccagcgtactgaatgggactgtgtcttgtctccgtgtgcctgacaccttgcatggaatttgcacctcatagccrctcaatagattttaattaattgaaatttaaaagggaacttgtgtggttttgtttaaacaagaccataaattagaaacaactattttcatgaatttgaaat

SEQ ID NO: 181926 - DNA, 201 bp, Homo sapiens
tctgaaattcaatttcttcaactgtgaactggaaataaaatacacatatcacaggattttctaaggactaattgaaggttacagtgtttgaggatactttrcaagctataaagtactttatatggctataaagtgggagataattataacacaaatgcgagaactcaggatgtttttcttctatataaccttgtaagcttt

SEQ ID NO: 181927 - DNA, 201 bp, Homo sapiens
caccggcccagggcagtgaggggcttagcacctgggccagcagctgctgtgctcaatttctcgaggggccttagctgccttcccgcggggcagggctcggracctgcagcccgccatgcctgagcctccccctgttccgtgggctcctgtggggcccgagcctccctgacgagcgccgccccctgctccacggagcctagt

SEQ ID NO: 181928 - DNA, 201 bp, Homo sapiens
gtaggaattctaagaatcatttcaaaaagaaaaagcaaatacagtgcacagcaatgcatataattcttatagatgagtattatctatctgtcatatctctytgtaaataatgatggtgacaatgatgataggcaaagtttattgatgttttttatatgccaagcactgttctaaccactttgcatgaattaactcagtcac

SEQ ID NO: 181929 - DNA, 201 bp, Homo sapiens
tcacaattgctacaaagagaataaaatacctagaaatccaacttacaaaggatgtgaagtacctcttcaaggagaactacaaaccactgctcaatgaaatraaagaggacacaaacaaatggaagaacattgcatgctcatggataggaagaatcaatatcatgaaaattgccatactgcccaaggtaatttatagattcc

SEQ ID NO: 181930 - DNA, 201 bp, Homo sapiens
agctctcttacttcagagctcaccactagactgtgggtagttttcaatccagtcacactaaatgccagttatttccttacatgattacctctcccacaagwttcagaacttcttgaggaaaaggacatatccaactgacctttgtatctgtagagcctagctccgaggctgggcgtatccatcagttttagacattgaaat

SEQ ID NO: 181931 - DNA, 201 bp, Homo sapiens
agtgttggaagttctggccagggcagtcaggcaagagaaagaaataaagggtattcaattaggaaaagaggaagtcaaattgtccctgtttgcagatgacrtgattgtatatttagaaaactccattgtctcagaccaaaatctcctcagctaataagcaacttcagcaaagtctcaggatacaaagtcaatgtgcaaaaa

SEQ ID NO: 181932 - DNA, 201 bp, Homo sapiens
ggtgaatgacagtatgaaaaaaattgggaagtcagattctgtggttcattgtaccagtgggggctggagggaggtaagtgaatggtttgtgtggctttgtrtcatttgtatttgtgacagacattccaagcaatagcattttcaagggttcacaagtgagtgcctgcagaggcaggacacacttaacactctggcagatat

SEQ ID NO: 181933 - DNA, 201 bp, Homo sapiens
aacctgttgatgtattctgtagaaggccacatctctaagctcagaggagggtgggaaggaatcttcagaagcacttggagacattcaactgagtcacccascctggactattcagagcggtctgcagactagagggcagtctctaaatggtttgttcagatttgctatgaaacaaggaacttgcatcagaatgtaaatcaa

SEQ ID NO: 181934 - DNA, 201 bp, Homo sapiens
aacagtccataagattataaagcaatggaaaatagcatgtcctttctgttttaatttctatcttattaactcttagtgaggttgagctttttccttatatrttattcatgtatatcttcttttgtgaattgtctagatacttaaaaggctaagaatatttggaggttatttttaaaaaataattttttatttttaattgac

SEQ ID NO: 181935 - DNA, 201 bp, Homo sapiens
gccagcatcatcctgataccaatgcctggcagaagcacaacaaaaaagagaattttagatcaatatccctgatgaacatcgatgcagaaatcctcaataamgtactggcaaaccgaatccagcagcacatcaaaaagtttgtccaccatgatcaagttggtttcacccctgggatgtaaggcggttccacatatgcaaatt

SEQ ID NO: 181936 - DNA, 201 bp, Homo sapiens
ctagtatcagaaatagatgacaagaatttaaatgtatatcaaaatatccctttggtaaatgttagtgtcctcacaggtaaacagagggcaccctcaaattwgagtaatttgagagggtttaaaagagggactgtttacaaaattgcagtcatagagacatagagaaatcacagggagaatgtgaccctcgggtttgtaaca

SEQ ID NO: 181937 - DNA, 201 bp, Homo sapiens
ctctgataaaacagactttaaaccaacaaagatcaaaagagacaaagaaggccattacataatggtaaagggatcaattcaacaagaagagctaactatcstaaatacatatgtgcccaatataggagcacccagattcataaagcaagtgcttagagacctacaaagagatttagactcccacacaataataatgtgaga

SEQ ID NO: 181938 - DNA, 201 bp, Homo sapiens
cagaaataaaaataagcagggtgccctctttggcatggaaatattctaattcatttccccagagaatgaccatactcaccagtattattttgctctacttrtttgcttttaatcataatatatgcctgtttactttttgtagctataaaaaggtagataaaagaagcactttaggtagatataaaaagcactttaattaag

SEQ ID NO: 181939 - DNA, 201 bp, Homo sapiens
attggaaatcaacattcttaaagaaaagaattttcaacacagaatttcatatccagccaaactaagcttcataagtgaaggagaaataaaatcctttacasacaagcaaatgctgagagattttgtcaccaccaggcctgccttacaagagctcctgaaggaagcactacacacggaaaggaacaaccagtaccagccact

SEQ ID NO: 181940 - DNA, 201 bp, Homo sapiens
aggaaacaacaggtgctggagaggatgtggagaaataggaacacttttacactgttggtgggactgtaaactagttcaaccattgtggaagtcagtgtggygattcctcagggatctagaactagaaataccatttgacccagccatcccattactgggtatatacccaaaggactataaatcatgctgctataaagacac

SEQ ID NO: 181941 - DNA, 201 bp, Homo sapiens
taacactcagaccccccccatttgacataagttacccttccttctcattcttgggcctgttgctaacctgcttctaccagtttagccttggaaatttcatktctgtttactcttctctctaaacttctttgttttatgtatttaagaggctagcagtaggttaaatcaaagctaaatttcttttagctgaggcactcttgc

SEQ ID NO: 181942 - DNA, 201 bp, Homo sapiens
ggggcctgactttgaatttctaccaagttccctggtgatactaatgctgctgctcttctagagaccacgaatggccctgttaaaatttgagaaaataaaastttgagaaccactgtattgcatgaagaaaatagagcttttgctctattctttattaaaaaataatacaaatggcatcatactgtatcatccaagaacttg

SEQ ID NO: 181943 - DNA, 201 bp, Homo sapiens
cagacacttctcaaaagaagacatttatgcagccaaaacacacatgaaaaaatgctcatcatcacttgccatcagagaaatgcaaatcaaaaccacaatgmgataccatctcacaccagttagaatggcagtcattaaaaagtcaggaaacaacaggtgctggagaggatgtggagaaataggaacacttttacactgttg

SEQ ID NO: 181944 - DNA, 201 bp, Homo sapiens
acccacaaaatggcagaaaattttcgcaacctacttatctgacaagggctaatatccagaatctacagtgaactcaagcaaatttacaaggaaaaaacaarcaaccccatcagcaagtgggcaaaggatatgaacagacacttctcaaaagaagacatttatgcagccaaaacacacatgaaaaaatgctcatcatcactt

SEQ ID NO: 181945 - DNA, 201 bp, Homo sapiens
gctcacaaaaaggggatttgcatatgaacttgtttcggcaagaaaacacatctgaacgtatttcatgggaactatctttatccacggcagcttcttttgamcatcttcttcttttcttcccttcatgcctgcaggtcaccggattgaaactgtctcaggaccttgatgatcttgccattctctacctggccacagttcaag

SEQ ID NO: 181946 - DNA, 201 bp, Homo sapiens
acataggcatgggcaaggacttcatgtctaaaacaccaaaagcaatggcaacaaaagccaaaattgacaaatgggatctcattaaactaaagagcttctgsacagcaaaagaaactaccatcagagtgaacaggcaacccacaaaatggcagaaaattttcgcaacctacttatctgacaagggctaatatccagaatcta

SEQ ID NO: 181947 - DNA, 201 bp, Homo sapiens
gttgtgttcccgagactacaggataaaaagtaagtgtgtattttttatatgtacagtgctaaggaagtgagcacatacacacacacatgcaactatagatmtggaataaactcaggtggtcaactaatccagtcctttaatttgtggttaagaaaactaagttccagggaggtaatgtcaccttcacttacctaaggctgc

SEQ ID NO: 181948 - DNA, 201 bp, Homo sapiens
gaatagtagtggtaagagtgggcattctctcttgttcctgatcttaaaggaaaagctttcggctttttgatgttgagtatcatattggctttgggcttgtmatatatagtctgtataatgttgaggtggattccttctatatctaatttgtgatagtttttattgtgaaagtatgttgaattttgtcaaatgcttttgcag

SEQ ID NO: 181949 - DNA, 201 bp, Homo sapiens
cttggggctcaaaggggtcttaatatatctatgagtcaactcctagcccctccctgcagtgcagaaatactatagaatccttgggggatgagagagggctygggctctgtttaacacctaggagcagatggatcatttcattctattctgtcttacgtggttctctgggttcttatcttgtcttcctaactaggttggggg

SEQ ID NO: 181950 - DNA, 201 bp, Homo sapiens
aagtgacttgacaacattctaaaaacaagtaaaactggacctaaactccaacttttccctatgtaggatacctgtctcctagacttgttgctaattatgtkagttggcctctggcacatcacttagagcccctgtgcctcagacttaacactaataagaggcatgggacaatacctcaccattgtttagtatccattctga

SEQ ID NO: 181951 - DNA, 201 bp, Homo sapiens
tcttcctgacggctgtgcagggatgttggccacctctaggagtcattagtgtaaccagagaggtacgaggaaggattgtgaagttaggcttgctttatgtmcacatggtatgattctgtgtcgatcaaaaattgaacaaaattcttttctcatagtggctaaaatggaagtcacacttactggaggaaaatacgatcttta

SEQ ID NO: 181952 - DNA, 201 bp, Homo sapiens
gtattgatagattttcagatgatagtgacagaaaaagttgattgttggaaagaaaattagtgaggtctatttttcatatacttacctttagaggcaggtawgaaatctaagagtgaagggaaatggaattcacattgtttgaagggtaggaaattttaaaaatagtgctttttaatcgtccggaagacttggggagagggt

SEQ ID NO: 181953 - DNA, 201 bp, Homo sapiens
acctgagaactccggagaagatgagctttgagcactcacgtcctcactgggcagacagagcagctctcctcatttcagttgtctcaagactagacagtgtrcctgagaataaagcagtgaattaaccccacttgtccaagagggtgggactgaatactagacagggccctttccgcctctcttgggtggtggggggtggcg

SEQ ID NO: 181954 - DNA, 201 bp, Homo sapiens
cttgtagttggtaagatttggggaggtgatgggaagttaggctcttcccccttctggctttctctgccccagggctaacagggctagttcctggaacaccrtctgtgctcccctgtcttgggtcctacacacagctacctacctgtcagcttgggatgctttcccagcctttcatcctagctaccttcttatcctcctggt

SEQ ID NO: 181955 - DNA, 201 bp, Homo sapiens
tatctgtgctgttcacccaccatgtagctcaatgtttattagtatactgttatcactaaaaatgtttgttggatgaataaataacaaatggctaccggttwggtagcggtacctcttttatttctacttttgagatgttttgtgactgtctttgcagatccacttggtcttcatatggtttttacacttgcttactatagg

SEQ ID NO: 181956 - DNA, 201 bp, Homo sapiens
tttctataatgctctgggaatcagcatctcaattcccccatggcctcatggttaaacataccattcatttgacctctcaactgtgacaaagaaggaagccygggtgtagaaactgatttcagctcccctctgaagttgggcgtctctctttgctgaccacttgggaatttttttttcttgcttctgacccacctctcccct

SEQ ID NO: 181957 - DNA, 201 bp, Homo sapiens; identical to SEQ ID NO: 181956

SEQ ID NO: 181958 - DNA, 201 bp, Homo sapiens
ccatccatgtccctgcaaaggacatgatcttgttctttttttatggctgcataatagtccatggtgtacatgtaccacattttctttatccagtctaccaytgatgggcatttaggttgattccatgtctttgctattgtgaacagtgctgcagtgaacatacatgtacatgtgtctttataatagaatgatctatattct

SEQ ID NO: 181959 - DNA, 201 bp, Homo sapiens
cttaaagtaaaataataaataagcattctcatcttatttctaatcttagagggaatgtatataaaatttttccagtgagagtgatatttgctagagattayagacagacagacagacagacagacacacacacacacacacacacacacacacacacacatttccttatgaaattgagtaaatgatcttccaaagcattca

SEQ ID NO: 181960 - DNA, 201 bp, Homo sapiens
ttaaagtaaaataataaataagcattctcatcttatttctaatcttagagggaatgtatataaaatttttccagtgagagtgatatttgctagagattacmgacagacagacagacagacagacacacacacacacacacacacacacacacacacacatttccttatgaaattgagtaaatgatcttccaaagcattcag

SEQ ID NO: 181961 - DNA, 201 bp, Homo sapiens
taaagtaaaataataaataagcattctcatcttatttctaatcttagagggaatgtatataaaatttttccagtgagagtgatatttgctagagattacakacagacagacagacagacagacacacacacacacacacacacacacacacacacacatttccttatgaaattgagtaaatgatcttccaaagcattcagg

SEQ ID NO: 181962 - DNA, 201 bp, Homo sapiens
catatcttcctgtgatttgtgctattattctcatatgatttgttcatgcattggattgtataaagatttaaattcaatttttttaaagaaatttatgtctsttgtatttactcacatatttagcagttctgatactcttcattcctttgtgtgtgttcacatttccatttggtatctttaacccatgtagtttctgcatga

SEQ ID NO: 181963 - DNA, 201 bp, Homo sapiens
ggtagtaggtcaaagaagacatcagtgataactattgattcagtaaatattaaacatctactatgtgtcctccttactaggaagactaaaatgtagaatgyaccatccttgcatctagtgtgcagtgtagtatgggagagagaaataatttagcaggtgatcataatgcaataaatgctatgataggaagcaattaaggca

SEQ ID NO: 181964 - DNA, 201 bp, Homo sapiens
ccagttatttccttacatgattacctctcccacaagattcagaacttcttgaggaaaaggacatatccaactgacctttgtatctgtagagcctagctccraggctgggcgtatccatcagttttagacattgaaatcagggtttcttaaccttggcaccattgacattttgggccagataattctttgttgtggggctgt

SEQ ID NO: 181965 - DNA, 201 bp, Homo sapiens
aaaaaaactggttgcctgcaattctgtcagccagtccaggcaatgctaatacagctttgattattatgatcatgattattattttgttttgaaacctttttcagaggccaagcatgctggggacttgagggacataaaaatctttcaactgattatgccacctgcaaacaggataagcctgactttctacctcacccacct

SEQ ID NO: 181966 - DNA, 201 bp, Homo sapiens
gacacttcctagggacccagatgggtattgtagatgtttagggcatgccttgacctctgagtagccttcttgggcttgaggtctcatttgactagactaccactccacagtcagccactgtggtctgttttttaaaaacgttgccatgatgagaatgtgaaggatttgggttgaagttaaggacacttcctttttattatt

SEQ ID NO: 181967 - DNA, 201 bp, Homo sapiens
tttcatgcttatttatttagtttttaagaaattcatttaggtaccaaacataaaaaaaaacccagacttgcagctttccagatttggggccagacacatgmctgtaatcccagcactttgaggggccgaggtgtgcggattgcttgaggctaggagtttgagagcagcctgggcaacatggcaaaaccccgtctctacaaa

SEQ ID NO: 181968 - DNA, 201 bp, Homo sapiens
ggttccatggggtttccttgtggttgctacctctggatctcactctgttcccacacatgtacaacctggatagagaattaatgcctcctttctctctatcgtggatggttctgagatacagttcatgtggcttggggtgtggagaggttgaggatgatcctatgggatagagaacgagtcacttctagtggggccatcttg

SEQ ID NO: 181969 - DNA, 201 bp, Homo sapiens
tataggttgcacatgttttagccactcatggcagcatttttctccagctacagtcaattttgtctaattattgttgatcatgattttactgtaaaaaaaawtttttttttttgagacatggtttcactcagtcagtctggattgtgcagtggcacagtctcagtgcactgcaacctctgcttcccaggctcaatcgatttt

SEQ ID NO: 181970 - DNA, 201 bp, Homo sapiens
ataacagttacttaaacacataagggctcattctttcctgtgaataaatatagatatatggagtcttgggctactgtgatttccccataaagtcatcaagracactagcttttttgatgttttttagtcctgagttctattttcaagatcacctcatggtccaagatggcggttgaagtttccattatcaagtccacagtc

SEQ ID NO: 181971 - DNA, 201 bp, Homo sapiens
ccggagtgcagtgtcgtaattttggctcactgcaacctctgcctccagggttcaagcgattctcctgccttagcctactgagtagctgggactacaggtgygtgccaccacacctgactaatttttgtatttttagtagagacagggtttcaccatattggttaggcaggtcttgaactcctgaccttgtgatccgcccac

SEQ ID NO: 181972 - DNA, 201 bp, Homo sapiens
ttgaattattctgtactatttatacattcttcctgcatgtttcatatgcatagattctttgttccacctagccagtaactaacctgaggataggaagtatrttcctgcctttcatcttctatgagcatacctagcacatagttggccacaaaccaggactgacagaccatttttttgcaaagtcaagaaatattttacttg

SEQ ID NO: 181973 - DNA, 201 bp, Homo sapiens
tacaggggccgcgctttacaggggccgcgctttacaggggccgcgctttacaggggccgcgctttacaggggccgcgccggcgggggcgggatcgcgcgcraggcggggctgtagccgccccgggaccgccctgctcaggcgccgtggggttcggcgcggctacgtgcagaatccgtctagctaaaatgtaatttcagatt

SEQ ID NO: 181974 - DNA, 201 bp, Homo sapiens
tttcttttcgtacaagaagagcaaagcccttcagggggaggaaagtaggggaaagggatgcatataaatccagtttttgaaaattaaataaactatacagkggaattatttcattttacaaataaattctatgatgttaccgttaaacaagtcctcatctaatgggggtaatgcgtcttgtctattcaggtttttgtttct

SEQ ID NO: 181975 - DNA, 201 bp, Homo sapiens
gattacaggcgtgagtcaccatttgccaatatttaaatcaggttggttgtttttttcctgtaccaatggttgaattctctgtgtattctggatattaatgycttgaccaatgaatagtttgcaagtattttctcccattctataggttgaattttcactgtgttgattgtttcctttgctgtgcagaagcttgttagtttg

SEQ ID NO: 181976 - DNA, 201 bp, Homo sapiens
agggtcactgcattgcacaactccaaagaacatcattcaaattgtattatatgattgtgcaagtggcagccttgtaaaatttgcaaaggtttagactggartattttttccagctgagaaaaactttttaactaattatttgttggtacaaagtacacctttttcctcttatcctctgccaggaagcaactgaaagagtaa

SEQ ID NO: 181977 - DNA, 201 bp, Homo sapiens
tgtggctacaggctaaaagctgtcgttatataatgtctttaatgaccacacacaagatctaaagtagtttttttttttttttttttttgcctgaatttaaraagattgttgtgctttggcttgaagcactggttgttgctgcggtggtttggcggttcatatctggtcactggcctttgatttctggaacctttagaaaga

SEQ ID NO: 181978 - DNA, 201 bp, Homo sapiens
aaatagacactgagtttgaattctggctctgcaatctactggctgtgtgacaagtgcaagttccttaacctctctgtgcctgctgttcaccctttccctcsccaatcatccacttcttttattttgttttattttttttgagatggagtctcattctgtcgcccaggctggagtacagttgcatggtcttgggtcactgca

SEQ ID NO: 181979 - DNA, 201 bp, Homo sapiens
ggcagagctaggatttgaattcaagtctttgtgactcattgtcatgaggccatactgcctgtcaggaaatgggtttggtcctcacactgtaagtctagatwgatcagtgtggtgaaggcatctgggtattcacttggtactgtgggtcaaggtactaccagcagtcacagatgggtcagcagcaagtgttctctagatcac

SEQ ID NO: 181980 - DNA, 201 bp, Homo sapiens
ccattcagtatgatattggctgtgggtttgtcatagatagctcttattattttgaaatacgtcccatcaatacctaatttcttgagagtttttagcatgargggttgttgaattttgtcaaaggctttttctgcatctgttgagataatcatgtggtttttgtctttggctctgtttatatgctggattacatttattgat

SEQ ID NO: 181981 - DNA, 201 bp, Homo sapiens
aaagaactcaaacaaatttgcaagaaaaaaaccccatcaacaattgggtgaaggatatgaacagacacttctcaaaagaagacatttatgcagccaaaagrcacatgaaaaaatgctcatcatcactggccatcagaaaaatgcaaatcaaaaccacaatgagataccatctcacaccagttagaatgccaatcattaaac

SEQ ID NO: 181982 - DNA, 201 bp, Homo sapiens
tataaaatcttcatctaatgcaaggttgcaacaatgttctcctgttttcttctacacattttatatttttagtcttacatttagggatgtgatatgttttsagttaagttttgtgtatggtgtgaggtaagagtctaagttcttttttgcatatagtcatatagttctagcatcactgtcaaatagtctgtcctttccccc

SEQ ID NO: 181983 - DNA, 201 bp, Homo sapiens
ccaaaattgacaaatgggatctcattaaactaaagagcttctgcacagcaaaagaaactaccatcagggtgaacaggcaacctacagaatgggagaaaatwttcacaacctactcatctgacaaagggctaatatccagaatctacaaagaactcaaacaaatttgcaagaaaaaaaccccatcaacaattgggtgaagga

SEQ ID NO: 181984 - DNA, 201 bp, Homo sapiens
gacttaaatgttagacctgaaactataaaaatcctagaagaaaacctaggcattaccattcaggacataggcatgggcaaggacttcatgtctaaaacacmaaaagcaatggcaacaaaagccaaaattgacaaatgggatctcattaaactaaagagcttctgcacagcaaaagaaactaccatcagggtgaacaggcaa

SEQ ID NO: 181985 - DNA, 201 bp, Homo sapiens
aaatattttcttccagtctgtagcttgtcttttcgttttctaattgtttcttttgaagaaaaagatttttaaattttgatgaagtcaaaattttttctttygtgggtcttgcttgctttttataaaatcttcatctaatgcaaggttgcaacaatgttctcctgttttcttctacacattttatatttttagtcttacatt

SEQ ID NO: 181986 - DNA, 201 bp, Homo sapiens
atcccttccttacaccctatacaaaaattaattcaaaatggattaaagacttaaatgttagacctgaaactataaaaatcctagaagaaaacctaggcatyaccattcaggacataggcatgggcaaggacttcatgtctaaaacaccaaaagcaatggcaacaaaagccaaaattgacaaatgggatctcattaaactaa

SEQ ID NO: 181987 - DNA, 201 bp, Homo sapiens
tcaaccccaagccccagtcagaggcgctttctgtctttataggtgttctttttagaaattttatataaatagaatcacatagcgtgctttcttttatatcyggctcttttcacttagcataatgtttttaaggatcatccatgttgttacatatatcagtagttcctttttcttgctgagtagtattctgttatatggata

SEQ ID NO: 181988 - DNA, 201 bp, Homo sapiens
tctacaaccatctgatctttgacaaacctgacagaaacaagaaatggggaaaggattccctgtttaataaatggtgctgggaaaactggctagccatatgkagaaagctgaaactggatcccttccttacaccctatacaaaaattaattcaaaatggattaaagacttaaatgttagacctgaaactataaaaatcctag

SEQ ID NO: 181989 - DNA, 201 bp, Homo sapiens
gactttcttcacagaattggaaaaaactactttaaagctcatatggaatcaaaaaagagcccacattgccaagtcaatcctaagccaaaagaacaaagctrgaggcatcacgctacctgacttcaaactatactaccaggctacaggaaccaaaatagcatggtactggtaccaaaacagagatgcagaccaatggaacag

SEQ ID NO: 181990 - DNA, 201 bp, Homo sapiens
gcattctcatcttatttctaatcttagagggaatgtatataaaatttttccagtgagagtgatatttgctagagattacagacagacagacagacagacasacacacacacacacacacacacacacacacacacacatttccttatgaaattgagtaaatgatcttccaaagcattcagggcaaatagcagcccatgttt

SEQ ID NO: 181991 - DNA, 201 bp, Homo sapiens
aggatgtgacactgagtgagagattggaagtgttttaaaggcctaatgaattttttgaatttaaaagttgtaaacaaaaaataaaattctaaggccccccrccatctgaatggaccccttctcttggccaaaggcattccaaatttaacctgaaaaaccagttcaggccatgatgggaagggtgtgggtaagacattcccc

SEQ ID NO: 181992 - DNA, 201 bp, Homo sapiens
acatctgccctgcaggtgagagccaaattctcaaattgccaggccaatggcaaataagcccacactatgcacagagggtatcaacacaaagagggttctgygggaattcacacatcctggaagccaggctgaccctggtagacagtttcattttatcttgtctcagccacatgatgagtggagagagagaaggaaagtgca

SEQ ID NO: 181993 - DNA, 201 bp, Homo sapiens
ttttgatggagtctggctctttcacccaggctggagcgaagtggtgcaactcaaccacttcacagtgaacgggggacggttcactgcaacctccgccccccgggttcaagcaattctcctgcctcagcctcctgagtagctgggattacaggcgtccaccaccatgtctggctaatttttgtatttttaagagatggggtt

SEQ ID NO: 181994 - DNA, 201 bp, Homo sapiens
tattaaatagggaatcctttccccatttcttgtttttctcaggtttgtcaaagatcagatggttgtagatatgtggcattatttctgagggctctgttctkttccattggtctatatctctgttttggtaccagtaccatgctgttttggttactgtagccttgtaatatagtttgaagtcaggtaacgtgatgcctccag

SEQ ID NO: 181995 - DNA, 201 bp, Homo sapiens
ggttctttaggatctgacacatacctgcccttccactcagaggtctgacattttattttcacatctgctccgtggctgcctgtctttgggcaagttacatraccctgctaatcctcagttccctcatctttaaaatggggataaagatacctatctcaccggcttgtgataattataaaatgagaaagtgcaaataaatcc

SEQ ID NO: 181996 - DNA, 201 bp, Homo sapiens
tttttgatggagtctggctctttcacccaggctggagcgaagtggtgcaactcaaccacttcacagtgaacgggggacggttcactgcaacctccgccccccgggttcaagcaattctcctgcctcagcctcctgagtagctgggattacaggcgtccaccaccatgtctggctaatttttgtatttttaagagatggggt

SEQ ID NO: 181997 - DNA, 201 bp, Homo sapiens
cctagaataaaatatgctattaatatgctgttaataataaccaaaagcactcagcttaatctttacttattaaataaaactgaaatgttgctcagacaccytttgctgtttttggaatgcctttgtagacacttttgatcttgcttaaaaaacataacagcatttcaaaggcttatcttagctattcttattcatacctga

SEQ ID NO: 181998 - DNA, 201 bp, Homo sapiens
tgagatcccatttgtcaattttggcttttgttgccattgcttttggtgttttagacatgaagtccttgcccatgcctatgtcctgaatggtattgcctggstttcttctagggtttttatggttttagttctaacatgtaagtctttaatccatcttgaattaatttttgtatagggtgtaaggaaggaatccagtttcag

SEQ ID NO: 181999 - DNA, 201 bp, Homo sapiens
ggaaagaaagacttttgtattagtctggtcttacactgctaataaaaacatacccgagactgggtaatttataaaggaaagagatttaattgactcacagytcagcatggctggggaggcctcaggaaacttacaatcatggtggaaggagaagcaaacacatccttctgtatttggtggcaggagagagaagtgcagagt

SEQ ID NO: 182000 - DNA, 201 bp, Homo sapiens
tgaagtcagacagacatgagtttgaattccagctctgccagtttttatctatactactttgtatatgcctctcatttaggaatttttttttttttttttttgatggagtctggctctttcacccaggctggagcgaagtggtgcaactcaaccacttcacagtgaacgggggacggttcactgcaacctccgccccccggg

SEQ ID NO: 182001 - DNA, 201 bp, Homo sapiens
ttctttctccctcttctctagagccattataacctctgtaccctacttcagaattctaatcaagatagtgtcaagtcttttaaaaaaaagttaaacccccrcatgagctccaatccataaataagaaactcaccctggcttgtatggaggtgatgatattaacacaggctacatttctctgggtcactgaatgtacccggc

SEQ ID NO: 182002 - DNA, 201 bp, Homo sapiens
gcagcgcaccagcatgtcacatgtatacacaggtaactaacctgcacattgtgcacatgtaccctaaaacttaaagtataataataataaaaaaaaatccmcctagttttcatcaaaaaaaaaaaaaatggcagggtgtggtggcatgcacctgtgttcccagctactcgggaggctgaggcaggagaatctcttgaaccc

SEQ ID NO: 182003 - DNA, 201 bp, Homo sapiens
gttaggtagcggtacctcttttatttctacttttgagatgttttgtgactgtctttgcagatccacttggtcttcatatggtttttacacttgcttactayaggtggaggaactgcaatgtctggtggagaacagaaaccagagaggtactatgtgggtgtggacgttggaacaggcagtgtccgtgcagctctggtggac

SEQ ID NO: 182004 - DNA, 201 bp, Homo sapiens
aaagttgagcaattcctgccagcacctcaactattccagcaagtcagatgttttatcttctcatggaccacacatctggtggttagatggaggatttcacytcttatctagataggccaattttggtagactcaaccagagtcacctccttcagatgctgggaaggctgggaagaatccagaggacccagacagtagaggt

SEQ ID NO: 182005 - DNA, 201 bp, Homo sapiens
ttgaagtcagacagacatgagtttgaattccagctctgccagtttttatctatactactttgtatatgcctctcatttaggaatttttttttttttttttttgatggagtctggctctttcacccaggctggagcgaagtggtgcaactcaaccacttcacagtgaacgggggacggttcactgcaacctccgccccccgg

SEQ ID NO: 182006 - DNA, 201 bp, Homo sapiens
tgacccagccatcccattactgggtatatacccaaaggactataaatcatgctgctataaagacacatgcacacgtatgtttattgcggcactgttcacartaggaaagacttggaaccaacccaaatgtccaacaatgatagactggattaagaaaatgtggcacatatacaccatggaatactatgcagccataaaaat

SEQ ID NO: 182007 - DNA, 201 bp, Homo sapiens
gcagccagaaaccacatgaaaaaatgctcaccatcactggccatcagagaaatgcaaatcaaaaccacaatgagatatcatctcacaccagttagaatggygatctttaaaaagtcaggaaacaacaggtgctggagaggatgtggagaaataggaacacttttacactgttgttgggactgtaaactagttgaaccattg

SEQ ID NO: 182008 - DNA, 201 bp, Homo sapiens
cccacaaaatggcagaaaattttcacaacctactcatctgacaaagggctaatatccagaatctacaatgaactcaaacaaatttacaagaaaaaaacaarcaaccccatcaaaaagtgggtgcaggacatgaacagacacttctcaaaagaagacatttatgcagccagaaaccacatgaaaaaatgctcaccatcactg

SEQ ID NO: 182009 - DNA, 201 bp, Homo sapiens
agcccgcatccccaagtcaatcctaagccaaaagaacaaagctggaggcatcacgctacctgacttcaaactatactacaagtctacagtaaccaaaacakcatggtactggtaccaaaacagagatatagatcaatggaacagaacagagccctcagaaataacgccgcatatctacaactatctgatctttgacaaacc

SEQ ID NO: 182010 - DNA, 201 bp, Homo sapiens
tatgacaaacccacagctaatatcacactgaatgggcaaaaactggaagcattccatttgaaaactggcacaagacagggatgccctctctcaccactccyattcaacatagtgttggaagttctggccagggcaattaggcaggagaaggaaagaatgggtattcaattaggaaaagaggaagtcaaattgtccctgttt

SEQ ID NO: 182011 - DNA, 201 bp, Homo sapiens
agattgcagagctggcaaagacttcagagataatttactccaaccccctcattctactgataaagaaagtgagtcccagggaggggaagggtcttgctcakggtcatacagctggcagtaattttgtttgtttcaataattaatatgaacagtcattctatacatcagtgaatccaccttcctgcctttgtaagcacaata

SEQ ID NO: 182012 - DNA, 201 bp, Homo sapiens
taataatagtgcttgtattttatgcttaacagagcacttaacatgctggccactattgtgagtattttagatacattaaccccttcagtcctcccaatatycttatgttatatgtattataattatcatctgttttctacagataaagaaacagactcaaaagaggctaaggaacttgccggtggtcacacaatgattggc

SEQ ID NO: 182013 - DNA, 201 bp, Homo sapiens
cctttgtaagcacaatataatgaccataattgaatttgtctttgacagtgaagaaagcaggcttttagggctttacagggccccaaagtcatcagaagaarataaattgtcatgaactaaagctggagatctgcctgttgactgtgagcttcttaaggaatgggcctggtcttattcatgagctaaagcaagtttcaaatc

SEQ ID NO: 182014 - DNA, 201 bp, Homo sapiens
ccacatgtggaagaattcactgatcaccttattaacatttaccacgcctttaatgtgtgccaaaggctgtgtaaaatgtgttaacttgcactgtgtagttscatcttcacatgaccctataaaggtaatactgtcactacccctattttattgagggagaaatgtaggcacagaaaagttaggtaacttactcaagttcac

SEQ ID NO: 182015 - DNA, 201 bp, Homo sapiens
gaagtcaggacatgatggacaaaagcatgaacatgaaagaagatgtgaacattcgttgcctctttaggaaatggtcgacagtgtggagtggacagagcacrgacatgtagcttggggtattgtgaagggatgggtcagccgtgtatacttatctaccatggtaaaaagtgatattattagatttctgagtgcttgcctttc

SEQ ID NO: 182016 - DNA, 201 bp, Homo sapiens
tttaagaagattgttgtgctttggcttgaagcactggttgttgctgcggtggtttggcggttcatatctggtcactggcctttgatttctggaacctttaraaagaggctgccttttctcctctccctgaccactgattgctgaaaccacaagacatatggaaatagatttcagggactagccaaaagccattctggtagt

SEQ ID NO: 182017 - DNA, 201 bp, Homo sapiens
cccactgtgtcttgcgcttgcaggtttgtgtgtgccacattgcctcatctactaatttataaactctttgggcaacctgttgtttcatactcccactgcarcagcctgcagagtgctttacatatggaggacccttaacacatgcgtatttagtgaatgagtgaatgaatgaatggcattccctccatgaggaacggatat

SEQ ID NO: 182018 - DNA, 201 bp, Homo sapiens
caaataataccttttaacatctttttaaactcctctgggaaacactgatttaaggcaacatgacaattatatgttaggtgttatggcaataatgagggggkcctaactaccacaactctgggtgtgaaacaggtaagcattcaggattgccttcctggagtaggtgacccctgaattgcttccagaaggagtagagaggtt

SEQ ID NO: 182019 - DNA, 201 bp, Homo sapiens
tgacgcacgtggcccctgttgctgtgtcgttcccctattggctagggttagactgcacaggctaaactaattccaattggctaatttaaagagagtgacgrtgtgagtggtttggcgggaaaaatggttatggcagagcaggaaatcggaatgagtcagggtggagaatgagcaggtaatcggaatgagtcagtgagtctg

SEQ ID NO: 182020 - DNA, 201 bp, Homo sapiens
gaagggtatttcatagagaaagaactgccaaaacacagatatgtagacccaaacatcccacatcatcatccttggaaaatagatttacaaatttccagcakgaagaggaaaaaaagtgcttgaagtgtgctggtttctcaccttagtggaaataattgcttaaaaaaacagccagaggctggacacggtggctcatgcctg

SEQ ID NO: 182021 - DNA, 201 bp, Homo sapiens
aagagaaatttagagctcatatctaatggaaattaattactgactgaatgtagggataagaaggaatgtagtcatcagtaggtgttcttgagtgggctatwttgtagcagctttagtgaggaataactgacatccagtaaactacgtattgagagtgtctaattggagaagttttgttatatgcatatatctatgaaaacc

SEQ ID NO: 182022 - DNA, 201 bp, Homo sapiens
atgactgatgagtaaaaattgtacatgctcaaggtgtgcaacgcaatttgatatacattgtgaaatgattaccacaatcaagctaattatatccatcacctcatgtactctttcttggtgtggtgagaacacttaagatttactctcttagcacattttaagtatacagtaaattatcaactgtaatcactatgttgtaca

SEQ ID NO: 182023 - DNA, 201 bp, Homo sapiens
cctttgctgtgcagaaactttgatgtagcctcacttgtttatttttgcttttattgctcatgcttttgatgtcatatccaaaaaatcatagccaagaccamtgtcgaggagttttttgtcgttttcttctaggagttttaatgttgcaggtcttatgtttacaactgtaatccattttgagttgatttttgtgtatagtat

SEQ ID NO: 182024 - DNA, 201 bp, Homo sapiens
gcaggtcttatgtttacaactgtaatccattttgagttgatttttgtgtatagtataagggttcaatttcattctttcgcatgtgactatccagtttttcyaacaccatttattcaagagacttccttttccccattgtgtttttgttgcttttgtcaaagggtagttgattgtatatgagtagtttatttctgggttttc

SEQ ID NO: 182025 - DNA, 201 bp, Homo sapiens
agaacattccatgctcatgggtaggaagaatcaatatcatgaaaatggccatactgcccaaggtaatttatagattcaatgccatccccatcaagctaccratgactttcttcacagaattggaaaaaactactttaaagctcatatggaatcaaaaaagagcccacattgccaagtcaatcctaagccaaaagaacaaag

SEQ ID NO: 182026 - DNA, 201 bp, Homo sapiens
ggaagaggaaaaaaagtgcttgaagtgtgctggtttctcaccttagtggaaataattgcttaaaaaaacagccagaggctggacacggtggctcatgcctrtaatcccagcactttgcgaggccgaggcagcagatcagctgaggtcaggagtttgagaccagcctggccaacatggcaaaaccccatctctactaaaaaa

SEQ ID NO: 182027 - DNA, 201 bp, Homo sapiens
tttgaagtcagacagacatgagtttgaattccagctctgccagtttttatctatactactttgtatatgcctctcatttaggaatttttttttttttttttttgatggagtctggctctttcacccaggctggagcgaagtggtgcaactcaaccacttcacagtgaacgggggacggttcactgcaacctccgccccccg

SEQ ID NO: 182028 - DNA, 201 bp, Homo sapiens
ctttgaagtcagacagacatgagtttgaattccagctctgccagtttttatctatactactttgtatatgcctctcatttaggaatttttttttttttttttttgatggagtctggctctttcacccaggctggagcgaagtggtgcaactcaaccacttcacagtgaacgggggacggttcactgcaacctccgcccccc

SEQ ID NO: 182029 - DNA, 201 bp, Homo sapiens
tatacatatataactaaccggcacattgtgcacatgtaccctagaacttcaactatagtaataataaaataagaaaaagtaaaaataaaaaaataaaagakaaatgcatttgaggcaaagcctcttttcctctgtgtagaactgatgatggggtaaaatagaagaaaccacacatatacaccctgatgctgatctagagcc

SEQ ID NO: 182030 - DNA, 201 bp, Homo sapiens
aaggcctttgacaaaattcaacaacgcttcatgctaaaaactctcaataaattaggtattgatgggacgtatctcaaaataataagacctatctatgacaracccacagccaatatcatactgaatgggcaaaaactggaagcattccctttgaaaactggcacaagacaaggatgccctctctcaccactgctattcaac

SEQ ID NO: 182031 - DNA, 201 bp, Homo sapiens
gtcaatcagtcacagtaaggtggcaaagatggtcaggggaaacacttggaaatgttttgaagatacccaggggctctcatattctgtatggtattcagattttttttttttttttttacattttttcctcccttactagtatgtgagtttctccaggataaagagtatgtcgtatgcaaatctgtatccctagcagagtgt

SEQ ID NO: 182032 - DNA, 201 bp, Homo sapiens
atgtatacatatataactaaccggcacattgtgcacatgtaccctagaacttcaactatagtaataataaaataagaaaaagtaaaaataaaaaaataaaagagaaatgcatttgaggcaaagcctcttttcctctgtgtagaactgatgatggggtaaaatagaagaaaccacacatatacaccctgatgctgatctaga

SEQ ID NO: 182033 - DNA, 201 bp, Homo sapiens
aaaggcctttgacaaaattcaacaacgcttcatgctaaaaactctcaataaattaggtattgatgggacgtatctcaaaataataagacctatctatgacraacccacagccaatatcatactgaatgggcaaaaactggaagcattccctttgaaaactggcacaagacaaggatgccctctctcaccactgctattcaa

SEQ ID NO: 182034 - DNA, 201 bp, Homo sapiens
agtcaatcagtcacagtaaggtggcaaagatggtcaggggaaacacttggaaatgttttgaagatacccaggggctctcatattctgtatggtattcagattttttttttttttttttacattttttcctcccttactagtatgtgagtttctccaggataaagagtatgtcgtatgcaaatctgtatccctagcagagtg

SEQ ID NO: 182035 - DNA, 201 bp, Homo sapiens
catgtatacatatataactaaccggcacattgtgcacatgtaccctagaacttcaactatagtaataataaaataagaaaaagtaaaaataaaaaaataaaagagaaatgcatttgaggcaaagcctcttttcctctgtgtagaactgatgatggggtaaaatagaagaaaccacacatatacaccctgatgctgatctag

SEQ ID NO: 182036 - DNA, 201 bp, Homo sapiens
aggaaaggggaaggtgagcccgagtcattttgactgtctttataagcataactttaaatatatatatatatatatatatatatatatatatatatatatawggcattacatgttttccctacaaatacaaaattaatatatgccactgtagaaaatttagaaaacacaataagcaacttgacaagaaaaaaaaattgttac

SEQ ID NO: 182037 - DNA, 201 bp, Homo sapiens
acatgtatacatatataactaaccggcacattgtgcacatgtaccctagaacttcaactatagtaataataaaataagaaaaagtaaaaataaaaaaataaaagagaaatgcatttgaggcaaagcctcttttcctctgtgtagaactgatgatggggtaaaatagaagaaaccacacatatacaccctgatgctgatcta

SEQ ID NO: 182038 - DNA, 201 bp, Homo sapiens
cacatgtatacatatataactaaccggcacattgtgcacatgtaccctagaacttcaactatagtaataataaaataagaaaaagtaaaaataaaaaaataaaagagaaatgcatttgaggcaaagcctcttttcctctgtgtagaactgatgatggggtaaaatagaagaaaccacacatatacaccctgatgctgatct

SEQ ID NO: 182039 - DNA, 201 bp, Homo sapiens
tcagttgataggtacatagtaataataacaatatctgcacttttaagcatttagtccatccaataggcctataaaataggtattaaaacttccctttttttgagacagcatcttactgtgtcgcccaggctggagagcagtggcacaatcgaggttcacttcagcctcaacctcccagactcaagggatcctcctatctca

SEQ ID NO: 182040 - DNA, 201 bp, Homo sapiens
gcacatgtatacatatataactaaccggcacattgtgcacatgtaccctagaacttcaactatagtaataataaaataagaaaaagtaaaaataaaaaaataaaagagaaatgcatttgaggcaaagcctcttttcctctgtgtagaactgatgatggggtaaaatagaagaaaccacacatatacaccctgatgctgatc

SEQ ID NO: 182041 - DNA, 201 bp, Homo sapiens
agtctccctctgtcatccaggctggagtgcagtggcacgatctcggctcactgcaacctccgccttctggattcaagcgattctcctgcctcagcctcccragtagctgggattacaggcacctgccaccacacccagctaatttgtgtattttcagtagagacagggtttcaccatgttggccaggctggtctcgaaccc

SEQ ID NO: 182042 - DNA, 201 bp, Homo sapiens
aaactgtccttatttgacaaaatttaaagttcacaatgttatgctgtttttgttttttgccttccttcccccccttcccattttgtggttggaaatcctaytgatttgaggaatcacttgtttagtaaagagagaaccggggtagctgaggtcaagacaaataaggtctgtccccatgctaaaatgctagtaatcacttct

SEQ ID NO: 182043 - DNA, 201 bp, Homo sapiens
ctctactaaaaaaatacaaaaaaattagccaggcatcatggcaggcacctgtagtcccagctacttgggaggctgaggcaggagaatggcttgaacccggraggcagagcttgcagtgagccaagatcgtagcactgcactccagcctgggtgacagagtgagactccatctcaaaaaaaaaaaaaaaaaagccagtcacc

SEQ ID NO: 182044 - DNA, 201 bp, Homo sapiens
agtcattaagtaaacacagatgcagccaaaccaggcaccagatggcaaacaagaattggaataaaaggtaaagaaagcttttggtgtttactcaaagatgkggaaaaaaaccatgatccaaaatgctgtggtttccccagaatggccacctggagtcaccagggcccaaaagtgaccaaataaaacaaaacaaaactagaa

SEQ ID NO: 182045 - DNA, 201 bp, Homo sapiens
tctcaatctcctgacctcgtgatccacccacctcggcctcccaaagtgctgggattacagacgtgagccactgtgcctggccagagtctgcttcttgttamtggagactggtggttagacaccaagatttgggcactaagtgtgctcattgctcttgggctattgtcaatgcttcttggccctcccagctgaaagagcaag

SEQ ID NO: 182046 - DNA, 201 bp, Homo sapiens
atttgggcactaagtgtgctcattgctcttgggctattgtcaatgcttcttggccctcccagctgaaagagcaaggaaatgtgtatgtaccctaacccatrtatatacccatatctataaatatttctgtatgtaatcatctttttgatattaagctaaacatgaattcacactggtttcctactgtaatctattgccaca

SEQ ID NO: 182047 - DNA, 201 bp, Homo sapiens
ggacatttgaggaaacataccttaatgaagagaggaaatatttcattgtgtaaaaagcaaggcagagattttttcaatcagcaaatatatgttgagcacayactttgcctcaagcatgtgctgggcactgggaataccaggatgaagatgacccagtcccttctctagatgactcagcagctggtggaaatgggagatctg

SEQ ID NO: 182048 - DNA, 201 bp, Homo sapiens
agaagagaacacaaagtcctcacgtgctttactcaggctttgggcttaaggagtgtttctgatgtgggctctggagccagactgcatggctgtaagccccrgcctctctgcttcacacctctgtgatcttggacaagtaccttaactttctgtttctcagtttcctcatctcagatgataataggacatgcctcacagggt

SEQ ID NO: 182049 - DNA, 201 bp, Homo sapiens
atgcttcttggccctcccagctgaaagagcaaggaaatgtgtatgtaccctaacccatatatatacccatatctataaatatttctgtatgtaatcatctytttgatattaagctaaacatgaattcacactggtttcctactgtaatctattgccacatggatcattctaactcgctctccttgcttatatttaaattcc

SEQ ID NO: 182050 - DNA, 201 bp, Homo sapiens
aaatgctcagagaggaggataatttctgagtctctcgtcatgcgtgttcctagccgatggcaaataacacaacaccctgccttcttgtttcagctctcatrgtgtaaacaagtgtccttttcgaagtctactcgtgccatgtttttctcatttttgtgctttttgttggcgatttcaccatttaaaatgcaccccaagcat

SEQ ID NO: 182051 - DNA, 201 bp, Homo sapiens
aacaagtgtccttttcgaagtctactcgtgccatgtttttctcatttttgtgctttttgttggcgatttcaccatttaaaatgcaccccaagcattgtgcmaaagtactgtgtagtgttcaagtacagtgcaagaaagctgcgatgtgccttacagagacaataacgtgtgtttgataagcttcattcaggcaggagttaa

SEQ ID NO: 182052 - DNA, 201 bp, Homo sapiens
aaatgagcaaagttgggaaagttgtgttcccgagactacaggataaaaagtaagtgtgtattttttatatgtacagtgctaaggaagtgagcacatacacwcacacatgcaactatagatctggaataaactcaggtggtcaactaatccagtcctttaatttgtggttaagaaaactaagttccagggaggtaatgtcac

SEQ ID NO: 182053 - DNA, 201 bp, Homo sapiens
tttagtatctttaagttttgcttgatttaacattaacatcttagaatgggcgttcaaagagaagtttagggcaggtccctttctagacacaagctttcacytagatgtttaggaagttaaaacaacaacagtaacagagaatcagcttgatactttgccttttagatctgaactcttttgatattgttttgatagggccag

SEQ ID NO: 182054 - DNA, 201 bp, Homo sapiens
cttggtggccctggtaaagttaatttcaataattctggttttttttttcatcttagaaacttagaggttaaaaaataataaatatacatgaggagatttaragtgtatgtggaaacagagatcttcggaggacaagtgggatatttctttatagaaagagttttccctcttgatttttttgcttggtaagtttctttcaaa

SEQ ID NO: 182055 - DNA, 201 bp, Homo sapiens
gctttggcttaagccttttgttccccgtaaaatgcaaatgcttgtaagtgatatggtttggctgtgtccccattcaaatctccacagagttgtatctcccrgaattcccacatgttgtgggagggacccagggggaggtaattgaatcatggaggccggtctttcccatgctattctcgtgatagtgaataagtctcacga

SEQ ID NO: 182056 - DNA, 201 bp, Homo sapiens
cagttcttttgagcatatcttatttgagaaaggtgcacgtgaccttgggtcagtttgtctaactctgtcagtctcagttatcttatttgagaaatggggcyatagcttttaagttaataatccagataaaacatcctatagtgccccagatgtcagtagcactcagtacatgttcatattatgttgccccaaggtcacgtg

SEQ ID NO: 182057 - DNA, 201 bp, Homo sapiens
acatattttccatctttctttccagatcagcaaagacccgatttttgtaccaggcgtctgggggccttatttctcagccatggtacctgggttctggctgmatgaaggtggtcagagcgttactggaaaattggtaagttgacactttctcaatagggtcatggatgtttttatgtcattgattagtccattttgtcacat

SEQ ID NO: 182058 - DNA, 201 bp, Homo sapiens
gatggtagaaaaaccccctaattgattctaatatatatttaatttggcagaacttgagagagatttgctgggataaggcgggacatttctttgatctcccrgacttcttatcgtggaaggcaacaggtgtcacagcacggtatgttaattacaagttggattgtgtttgcgttcttccattcttggatgtctgtctatata

SEQ ID NO: 182059 - DNA, 201 bp, Homo sapiens
ccagagctgtaaggaagcaatgtatttttcagtgaaatagtaccctgccgattggttatcactatggcagaaattgaattttggcccttctccttatactrtgcatacaaatacattccaaacagattaaaaacttaagtatgaaatttaaaaaaataaagttcctaaaagacaaggtcttcatgactttgagatagacaa

SEQ ID NO: 182060 - DNA, 201 bp, Homo sapiens
tgtgacactgtctttaaggctttgaggttcatggcatctccaagcctccaggtgcccgtgttcccctcatccagatgcgggtgcccatagcagaagccccrtgcagcacatcagatccagctgcagccttgcgtggagctggcacctgtgccagcacctgtagctgcctcccctgccacagcagcttgcttgtctggttgt

SEQ ID NO: 182061 - DNA, 201 bp, Homo sapiens
tctctatcagttttggcaatgagtctttacattaagcatagaggaaagagggaaatccttgtggtcagactgatctggtttcagtgtctccatcatgtgcwgtctgtaagaacctggagcaaattatttacctccctgagccttatttcctcatccataagccctctcagggctattaaaacagttctctgggtaaaacct

SEQ ID NO: 182062 - DNA, 201 bp, Homo sapiens
ttctccttatactatgcatacaaatacattccaaacagattaaaaacttaagtatgaaatttaaaaaaataaagttcctaaaagacaaggtcttcatgacyttgagatagacaattttcctaaataggacattaatgtaagtacaaccataaagaaaaggattggtaaataagactatgttaaaataagaaacttcttttc

SEQ ID NO: 182063 - DNA, 201 bp, Homo sapiens
tttgataatgccaagtattgatggggatatcaaacacctgaaatgctcaagcattgatgtggaaatatgaccacactttgggaaagagtttggcagtatcmtgataggctatgattcagcagtcctattcttagacatatatccaacagaaatgtgtaccagaaaaaatacgtatatagtaatacatgtaaaaccattatt

SEQ ID NO: 182064 - DNA, 201 bp, Homo sapiens
tttaaggctttgaggttcatggcatctccaagcctccaggtgcccgtgttcccctcatccagatgcgggtgcccatagcagaagccccatgcagcacatcrgatccagctgcagccttgcgtggagctggcacctgtgccagcacctgtagctgcctcccctgccacagcagcttgcttgtctggttgtgtgcagtggccg

SEQ ID NO: 182065 - DNA, 201 bp, Homo sapiens
tgagaccaagcacagtgtcctccagtacgtcgggggggtgatgtctgtggaaatgcaggccccgaaacttctgtggctgaaagaggtgagtgcatagggtmtaagagaagataccaacaatagtagaggattcctgttactgtggacctgtaggtaccaggcaccctgctaaaatcggttatgtttgatttttcccagcaa

SEQ ID NO: 182066 - DNA, 201 bp, Homo sapiens
agacacctttcctgaatgtatgcccagaaaagtttttctagaacagaagggataagaaaggaagggaagaatttgagagagaatacttgataatataattwattggtagatgttttctgcttttaatgtagacatttattctaaggtcatggtcagagaacacatgactggacgggaaattccaggcctggggacagtgct

SEQ ID NO: 182067 - DNA, 201 bp, Homo sapiens
cagatgtttcaatgggcattgttggctatgcttttgttttgaaaaatttgaaacattattgaaagaggagatggtagaaaaaccccctaattgattctaayatatatttaatttggcagaacttgagagagatttgctgggataaggcgggacatttctttgatctcccggacttcttatcgtggaaggcaacaggtgtca

SEQ ID NO: 182068 - DNA, 201 bp, Homo sapiens
aataaaaagattatttcaatttaaacttagaatgacttataggtttttttaatctgatttccattcttattacttcttgcagcagttttcaaacttgagtstgcataggcattcatggagctagttaaaatgcggatggctgggtccccaccaccacaactcattctgatcagtggctttaactggggcctaaatatctgc

SEQ ID NO: 182069 - DNA, 201 bp, Homo sapiens
cagccttaggagactgcttaaaaaaacctaacccttctgctcatatgggagccaaaacaatccatggttaatcttgatgctgcacctaccataccatgtcyacccagatgctgtaacatgtcatctgcctgagtgccccattgtaaagaaaagaatgtcctgaagtcacattccagaactcaagtcacttagactcagccc

SEQ ID NO: 182070 - DNA, 201 bp, Homo sapiens
actttgcttctctgagccttagtttatttctctgtagaatggagctaatcacaacttcaaatgactattgtgaggtttcacatttcccatgtttcagcacwtggtatctgctcaatacatgtttgcttttgccttttctggttaaagaccttttttcccctggacctttgaatgcaactggtcatctaaaactattgactt

SEQ ID NO: 182071 - DNA, 201 bp, Homo sapiens
ggcaatttcttaggtgatgagtaaaagggaactctgtgtattatttttgtaacttttgtgtaaatctaaaattattttgaaataaaaagtctaaaaaatartgaatggattttcatgctgataatgcttagttgtcaggctgtttaagtaaagtaagatatttttatagaattatcagagaaacccatgtagctagctagc

SEQ ID NO: 182072 - DNA, 201 bp, Homo sapiens
tgtagcccctttgttttggccaatttctcccatttggaatggctgtatttacccaatgcctgtacccccattgtatctgggaagtaactaacttgctttcrattttgcaggctcataggcagaagggacttacctttgtctcagaggtgacgctggactgtggacttttgagttaatgccaaaacgagttaagactttgag

SEQ ID NO: 182073 - DNA, 201 bp, Homo sapiens
aactgtgagtccaattaaacctctttcttttgtaaaatgcccagtttgggatatgtctttatcagcagcgtgaaaatagactaatatagtaaattggcacygggagtggggcactgctgaaacgatacccaaaaatgtggaattgactttggaacttggtaacaggcagaggttggaacagtttggagggctcagaagata

SEQ ID NO: 182074 - DNA, 201 bp, Homo sapiens
acaaaggccccttgccaagcgtggtattgcttgcagcctgtctgaggctttcactactttcccccagactctcagcccctggcctcctggctcatggccaytcccagtgcccttagctttagcttcctgacccccctataactggcacccaggaccacttcaccagcttccttctcagaacaattgacttttgcccctggg

SEQ ID NO: 182075 - DNA, 201 bp, Homo sapiens
gcctctaatgtgacagattattttgtaattacctggcagagataagtttggtttctgcaaataaactagcaaagattccaaggttattaaacacaaccttrcctcatctatctggtcatatccaaaaaccttaaaagaatttttgttcttctgaatttcactctccaaggcacaaagaccaggtgatggtggggcaggggt

SEQ ID NO: 182076 - DNA, 201 bp, Homo sapiens
tttgctaaaaatgtattaactgtgtctctcccatcagttcttgagctttggagggctgtggctgtggcttattcatctctccatacccaaagactagcatrtaatagacatacagtaaaaatggaaagactatattgagctgcagtctaccctgtccaattaaaagtcagtggacatttgttgaataactgctatgtgcca

SEQ ID NO: 182077 - DNA, 201 bp, Homo sapiens
aatttgttcgatttgttttttctttaaaaatattttctggcttcttaagtgttcagtggtgtattttctgaaaagaaatgccataggtcacaaatcaggasatagtctgtagctcaaacagagaatagcctttcaagatgaggctgctatactagatacatcataccatgactcatggcttcattgatatcttattcaaaa

SEQ ID NO: 182078 - DNA, 201 bp, Homo sapiens
tatatgggtcagttgctgtgccaggaggtcctttgactacagtctattcctcaccaaggcttttagttcattgttattaccaccattgtagatgtgagaamatggagagtttcagagagttgcccaagactattcacataacaagtggcagggctggaatttcaatccaagttagcctgtttgcaaagcctttgccctttc

SEQ ID NO: 182079 - DNA, 201 bp, Homo sapiens
cttcagatttcagggtgatagtttgtcctgtaacctcagttctcttatggatccaacaaaaatcactgatttgcagtttcttagcttttttttttttttttggagtaaggatgggataaatgacttagacagtttttacatgttggagctataaccacaagtctctacatgtctttaatgtacttgctgactttccctact

SEQ ID NO: 182080 - DNA, 201 bp, Homo sapiens
agttagaatggcagtcattaaaaagtcaggaaacaacaggtgctggagaggatgtggagaaataggaacacttttacactgttggtgggactgtaaactarttcaaccattgtggaagtcagtgtggcaattcctcagggatctagaactagaaataccatttgacccagccatcccattactgggtatatacccaaagga

SEQ ID NO: 182081 - DNA, 201 bp, Homo sapiens
tgtggtggctcaagcctgtaatcccagcactttgggaggccgaggtgggcagatcacgaggtcaggagattgagaccatcctggctaacacggtgaagccycgtctatactaaaaatacaaaaaaaattagccaggcgtggtggcggacgcctgtggtcccagctactcgggaggctgaggcaggagaatggcgtgaaccc

SEQ ID NO: 182082 - DNA, 201 bp, Homo sapiens
gagaataaagacagttttctttctttctttccagtatgtatgccttctcatttctttgtctttttgcactagctaagacttccagtacagtcttgaatagragtggtgagaaaggacattcttgctttgttcctgatcttagtgggaaagcatccagttttccatcaagtatgataatagctgtagagtttttttgtacat

SEQ ID NO: 182083 - DNA, 201 bp, Homo sapiens
gaggcatcacgctacctgacttcaaactatactacaaggctacagtaaccaaaagagcatggtactggtaacaaaacagagatatagaccaatgtaacagracagagccctcagaaataacaccgcatatctataactacctgatctttgacatacctgagaaaaacaagcaatggggaaaggattccctatttaataaat

SEQ ID NO: 182084 - DNA, 201 bp, Homo sapiens
gttcctttgccctgtccccatcttctgtatattccagcatgtctggaaggctgtgtccatctgaagggttttagatggtgtgggagtaataatcaaggttrcattgtagaagaaccaatcaggaaagagtacagaaagcctgattggacattcttagttgagttgtctttggacatctaagaggaggcatttgaagagtgg

SEQ ID NO: 182085 - DNA, 201 bp, Homo sapiens
cacacctctgtgatcttggacaagtaccttaactttctgtttctcagtttcctcatctcagatgataataggacatgcctcacagggtggttgtgagaacytgaataacatcgtaaagcacttcaaacagtgtctggcacatcagttgttattaataataattatataagataaaattatataattcataatgatgatgtt

SEQ ID NO: 182086 - DNA, 201 bp, Homo sapiens
acaaagagagagccaaataatgagtgagctcccatttacaattgcttcaaaaagaataaaatggctaggaatccaacttacaagggatgtgaaggacctcmtcaaggagaactacaaaccactgctcaatgaaataaaagaggatataaacaaatggaagaacattccatgctcatgggtaggaagaatcagtatcgtgaa

SEQ ID NO: 182087 - DNA, 201 bp, Homo sapiens
ggaatcttctcttcctactatacttctgcttaggtcttattggctggaattaagtcccatggccactcttagcagcaagaagcagggaaagtggaaaacargattatcatggttggcttaaacctgcacattccaatatgatagttactagctatatggctatttaaatttttttagagagatataattcatataccctaa

SEQ ID NO: 182088 - DNA, 201 bp, Homo sapiens
gcaaagtctcaggatacaaaatcaatgtgcaaaaatcacaagcattcttatacaccaataacagacaaagagagagccaaataatgagtgagctcccattyacaattgcttcaaaaagaataaaatggctaggaatccaacttacaagggatgtgaaggacctcatcaaggagaactacaaaccactgctcaatgaaataa

SEQ ID NO: 182089 - DNA, 201 bp, Homo sapiens
tacagtatagtatttctagtatattcacaggattatgcaaccataccccagtatccgattccaaaacattttcttcgccctcaaaagaaatctcatatccrtagcagtaagtcctcatatccctctacacctagccattggcaaccactagcctactttctttctctatggattttcctggacattttgtttggcttcttt

SEQ ID NO: 182090 - DNA, 201 bp, Homo sapiens
ttagtagagatggggtttcaccatgttggtcaggctggtctcgaactcctgaccttgtgatccacctgcctcagcctcccaaggtgctgggattataggcrtgagccaccacacccagcctgcatgccatatttttgcatctttttactctttatcttgcatttttatattgaaaataagtattttttgtttgttttgttt

SEQ ID NO: 182091 - DNA, 201 bp, Homo sapiens
tggtctcctctaggtccaggactgaattttattcatctccaggtcagtgtctagcattgtcttgtaaatgctgtctttattcatgttgcccagcttctacyacacggctactggaagttctcaagctcataacaccgtagcttctacaacagagagcaactgactgtgctttctcctttctgttttcaaagccctgggaaa

SEQ ID NO: 182092 - DNA, 201 bp, Homo sapiens
cccttttgatagttcccttaggggccccttctcccttttttctgtccttgctcaagacgcatcctctgctgatgaagctccctgtggtcctatagcctatrattagacccagatctcctgtctgcatgcccaggactctctctgcctcgcagtggtctgcagcctcatgttctgagcctagaggacatagaatcaaattaa

SEQ ID NO: 182093 - DNA, 201 bp, Homo sapiens
tgccagattatacattccatgagggcaggggccatgtccatctcattacctgctgtggcccagcacctgcatggtacctggcacacagtctttccaagcarttctgtcctagacattgttgtggctttcttctcacccgccttcaggaagatccacccaacttctttctcagttactcagcattaagatctgtagttgctg

SEQ ID NO: 182094 - DNA, 201 bp, Homo sapiens
aacctagattgacattccacaaagctattagccagtttgctccaaaggaaaattaagaaacttaaatactgaagaactgtcctagattggaggagacttawggaggtactacagctgtaagcagtatataatcatggattcaactctggaccagagaaaggacattggtggaggaaaactgttgaaattcaaatagagatt

SEQ ID NO: 182095 - DNA, 201 bp, Homo sapiens
catttaaaatgcaccccaagcattgtgcaaaagtactgtgtagtgttcaagtacagtgcaagaaagctgcgatgtgccttacagagacaataacgtgtgtwtgataagcttcattcaggcaggagttaagtgctgttggctgtaagttcagtgttattgactcaacaatatatattaaatgagttgtttttaagcaagaat

SEQ ID NO: 182096 - DNA, 201 bp, Homo sapiens
ctctttactttgctgtggtattttgttttcccaggaatacggaatatttctttgttctcataagtaatactagaaaagattgccttgactctcagcatttsattgggaggccatgtggtgtcatgatggagaaaaactcgaattctggggcaagtgcattgggctttgccacctgcaagctgtgttggcttgagaacctga

SEQ ID NO: 182097 - DNA, 201 bp, Homo sapiens
gatggcaaataacacaacaccctgccttcttgtttcagctctcatagtgtaaacaagtgtccttttcgaagtctactcgtgccatgtttttctcatttttrtgctttttgttggcgatttcaccatttaaaatgcaccccaagcattgtgcaaaagtactgtgtagtgttcaagtacagtgcaagaaagctgcgatgtgcc

SEQ ID NO: 182098 - DNA, 201 bp, Homo sapiens
tccttctggtctcagttggactcactcactggagtcttggctgactgatccacgttgatccaagacaacctgggggtatctgatccagattgagctcagcwggctattgccctgctccatgtttctcttatcctcctcatgggaccagtggactagcctagaatgatctcatggcagtgccagaggtgcaagagaacaagc

SEQ ID NO: 182099 - DNA, 201 bp, Homo sapiens
tggcaatgacagtgtgtaagaacacctcctcccctttctctcttccttctccattttcctctcctctctttcaggttttgtttttgtttttttacccattstccccttttattgttctcatcctccgaaatatggcagctacttttctttatctgggtcactgagaaaatcaccatttggcccatgattagtttgtaattc

SEQ ID NO: 182100 - DNA, 201 bp, Homo sapiens
agttttgaagtgtattggtcatgtatattgttggatgtccctccattgaaatttgtctgatgttttctcatggtgagacttgggtagtttgtttttcggargaagaccatagagataaaatacctttctcaacctatcaagcgaacacactcttatcacaacttaacactattgatgttcaacttgatcacctggctgaga

SEQ ID NO: 182101 - DNA, 201 bp, Homo sapiens
ggggcagtgtaggcttttatctgggtgtcttcctatccaaatattggggttttcttactaaataaaaagggagaattgatatggggtgggtaaaaagacamtcaaaatcataatttctcagcaatttacattgaccagtatcacagacaccaatttatagtccaatgatagtcacaaggtaaagggagaaggtggtgatca

SEQ ID NO: 182102 - DNA, 201 bp, Homo sapiens
cacactttgggaaagagtttggcagtatcatgataggctatgattcagcagtcctattcttagacatatatccaacagaaatgtgtaccagaaaaaatacrtatatagtaatacatgtaaaaccattatttgcaataggcaaaaactgcaaacccccagttcccatcaataatagaattcatcaatgtttggtatattcgt

SEQ ID NO: 182103 - DNA, 201 bp, Homo sapiens
ctcttggaccaaaaggtttctcatctgctttctgctaaagtggaaatcacaggaaaggtactctttactttgctgtggtattttgttttcccaggaatacrgaatatttctttgttctcataagtaatactagaaaagattgccttgactctcagcatttcattgggaggccatgtggtgtcatgatggagaaaaactcga

SEQ ID NO: 182104 - DNA, 201 bp, Homo sapiens
aaatatcaaaggctctgggccgccctgtgctaggcactgggaatgcagacatgagtatgaaataacctggctctgaagaacggagaggaggaggtgagtgrtaattaataaacaattagagaaggagtttgttagaagtgaagtcagggtgtgtcactttatatgtcagcacacaaaggagcaactcccaactcaacacac

SEQ ID NO: 182105 - DNA, 201 bp, Homo sapiens
gattgtttaatcaggatccaaataaaggactgaaacttttttttttttttttttttgagacagagtctcaccctgttgcccaggctggagtgcagtggcaygatcttggctcactgcaacctctgcctcctgggttcaagcaattcttctgcctcagcctcccgagtagctgggactagaggcatccaccaccacgcctgg

SEQ ID NO: 182106 - DNA, 201 bp, Homo sapiens
atcttattcctcctaataagatctaaggaagaagatttttgcagatgagaatgagctattacagcaagaagcaaataaactgctggtaggtagggcggttrggctgccctcacctccaccctagtacacatcacacgcactcacacacacacacatatacatgcattcacatttacacactcactcatgctcacacagagc

SEQ ID NO: 182107 - DNA, 201 bp, Homo sapiens
aaataaaggactgaaacttttttttttttttttttttgagacagagtctcaccctgttgcccaggctggagtgcagtggcatgatcttggctcactgcaasctctgcctcctgggttcaagcaattcttctgcctcagcctcccgagtagctgggactagaggcatccaccaccacgcctggctaattttgtatttttagt

SEQ ID NO: 182108 - DNA, 201 bp, Homo sapiens
ccaaaatctcctcaagctgataagcaacttcagcaaagtctcaggatacaaaatcaatgtgcaaaaatcacaagcattcttatacaccaataacagacaaagagagagccaaataatgagtgagctcccatttacaattgcttcaaaaagaataaaatggctaggaatccaacttacaagggatgtgaaggacctcatcaa

SEQ ID NO: 182109 - DNA, 201 bp, Homo sapiens
tttgagggggaaaaaaaaatgggctagactgaggaagatatttgcaaggagcagcttgggaatagcatactcaaggggctgtgtatggactgcttccagtyagtactacgaaaataattttacaaattaggttcacaggacaaggcaaggctgtgaacaggtaaaaaataaagctaaaagatcaatattagaaaatctaga

SEQ ID NO: 182110 - DNA, 201 bp, Homo sapiens
cccaaaatctcctcaagctgataagcaacttcagcaaagtctcaggatacaaaatcaatgtgcaaaaatcacaagcattcttatacaccaataacagacaaagagagagccaaataatgagtgagctcccatttacaattgcttcaaaaagaataaaatggctaggaatccaacttacaagggatgtgaaggacctcatca

SEQ ID NO: 182111 - DNA, 201 bp, Homo sapiens
taagtttttcttttcgtacaagaagagcaaagcccttcagggggaggaaagtaggggaaagggatgcatataaatccagtttttgaaaattaaataaactmtacagtggaattatttcattttacaaataaattctatgatgttaccgttaaacaagtcctcatctaatgggggtaatgcgtcttgtctattcaggttttt

SEQ ID NO: 182112 - DNA, 201 bp, Homo sapiens
accccatcgtctcagcccaaaatctcctcaagctgataagcaacttcagcaaagtctcaggatacaaaatcaatgtgcaaaaatcacaagcattcttatayaccaataacagacaaagagagagccaaataatgagtgagctcccatttacaattgcttcaaaaagaataaaatggctaggaatccaacttacaagggatg

SEQ ID NO: 182113 - DNA, 201 bp, Homo sapiens
ttaggcaggagaaggaaagaaagggtattcaattaggaaaagaggaagtcaaattgtccctgtttgcagatgacgtgattgtatatctagaaaaccccatygtctcagcccaaaatctcctcaagctgataagcaacttcagcaaagtctcaggatacaaaatcaatgtgcaaaaatcacaagcattcttatacaccaata

SEQ ID NO: 182114 - DNA, 201 bp, Homo sapiens
atcaaatagacgcaataaaaaatgataaagggaatatcaccactgaccccacagaaatacaaaccaccatcagagaatactacaaacacctctactcaaayaaactagaaaatctagaagaaatggataaattcctcgacacatacaccctcccaagcctaaaccaagaagaagttgaatctctgaatagaacaataacag

SEQ ID NO: 182115 - DNA, 201 bp, Homo sapiens
atcacagcagaactgaaggaaatagagacataaaaaacccttcaaaaaattaatgaatccaggagctggttttttgaaaggatcaacaaaattgatagatygctagcaagactaataaagaagaaaagagagaagaatcaaatagacgcaataaaaaatgataaagggaatatcaccactgaccccacagaaatacaaacc

SEQ ID NO: 182116 - DNA, 201 bp, Homo sapiens
tggggccaagagttctggaggcaaggggctgcaagacacagaaagagatgacttggctttggctctacctgtgcaaaccctgggtcctaagtggtaatgartatggactgcctcattcatctcaaagaagctctgggacttaggaaagcaatttctagaattggcacgtgataaaattttcactgggcaaagaaaggcaga

SEQ ID NO: 182117 - DNA, 201 bp, Homo sapiens
aatcacagcagaactgaaggaaatagagacataaaaaacccttcaaaaaattaatgaatccaggagctggttttttgaaaggatcaacaaaattgatagaycgctagcaagactaataaagaagaaaagagagaagaatcaaatagacgcaataaaaaatgataaagggaatatcaccactgaccccacagaaatacaaac

SEQ ID NO: 182118 - DNA, 201 bp, Homo sapiens
agaaatttcagtactttagaggccaggtagaggaagatgtgcctgcaaaggaggctaaggatgtacctgccaagggcagggagataatgaggagattttasaaggggagggaacaatctccaaggatgctgaaaaaggaagggagataaggactggacactgttcatttgatatagtgactcggggaccttagtgaaagtc

SEQ ID NO: 182119 - DNA, 201 bp, Homo sapiens
catgaactttttataatgaaaatctaatctaatcctgtgacctcccagcataaaccttctcaagtcttcccaatgcttttagggcaaaaaccaaaaacccsaattatggtctcccctccttctggcaccactgttttcattgatctctgacctcagttgccctcttttggttttctgcacacgacacccttctcaccgcaa

SEQ ID NO: 182120 - DNA, 201 bp, Homo sapiens
aataaaatgagagttgtgttatttaaaaagaagaggaggaggggcactaggtaagcaacctggagtcccaccttcaatgaggaagtgttttctaggtgaaragttgagtgaaggagatgctgacagaagtgacagcatgaatacagtttagtgctgagcaatatgatgtgggaagaaggtgctggaacactgagtttgagg

SEQ ID NO: 182121 - DNA, 201 bp, Homo sapiens
ggtgatgtcaagcaagatggtctactgggtatagacaaaaatgttggtatttttatttatctccatttttatttcattttgtttaaattctatttttaggyatgcatcttgacatacacacatataatttataagttcaatagtacattatatacaatttataagtaataaatagctatgttgggagtccatctgaagact

SEQ ID NO: 182122 - DNA, 201 bp, Homo sapiens
ccactttatcttaccccagtgtatatgaagaaacacatgtttacccatgggaatgtgtatgtatttggatctatttcacagagtatcttataaaaaccgayatgaaaagaaagtctgatttatagaatcctatttcctgacattgtgaatactagttcaggactttgctaactactttttgaccagtgtgactgatttatt

SEQ ID NO: 182123 - DNA, 201 bp, Homo sapiens
aacaggactattttctactgtggtcttaagtcataaattgtctattctctgtatctagttcgattctgttcttagctttttgaggtatttctttattgggrcaggtcagtaagtggcattttcatttattttttaccaacctaagcatttccttcctgccctagatgaaaacttagctttgttcaaaatttgcattttcat

SEQ ID NO: 182124 - DNA, 201 bp, Homo sapiens
ctaattactactcctgccaatgcagtaaataacacttgagggcagtaggagccattttagaatatttgtggctcctatgaagctgtttgtgtgtcggggcrggtggcaagcccatttcttttcttttctaaagtcacataccttgccccttagctatcctcccttccataaaggtttgttgtgaagctggaatgtgatatc

SEQ ID NO: 182125 - DNA, 201 bp, Homo sapiens
caaatcaggttggggattcatatgtgatatttccttagagattctcagtgcacaccagcatattaaagtcccaattgttacatcacagaaacctgtgtacwttgttcaactttacatttcctaaatttatttgcacaaatagcttctttcaaataataccttttaacatctttttaaactcctctgggaaacactgattta

SEQ ID NO: 182126 - DNA, 201 bp, Homo sapiens
atgactgtcattttccaactgagcagcagtatagcttttcctttactgaacaattttctctgagaccttgaatcacttttggaatttaatttcatttgctytttcaatatgataaagtagaactctctctgaatttgattcctcacttacaaatagatatgatactatattctctgttgaaaatgttttggaactgtgaag

SEQ ID NO: 182127 - DNA, 201 bp, Homo sapiens
tgtcggggcaggtggcaagcccatttcttttcttttctaaagtcacataccttgccccttagctatcctcccttccataaaggtttgttgtgaagctggartgtgatatcagatgtcacagggcagtgtggtttacgaagcctgtagaaatgttcttaccaactgtaagtacaccttggcacctggaggacaagaatattc

SEQ ID NO: 182128 - DNA, 201 bp, Homo sapiens
tcttttaaaatttttcttcatttttccttcttctctgtaaattatcaagggcctttgaagagaattcttacatgttattaagaaattgcagtcagggagcmctctgttcccagatcatttagaagattgcttttccttttgttaaatacaaaaaattgtcaacctgtattgttaaaatgtgccaaaaactgcattcaccaa

SEQ ID NO: 182129 - DNA, 201 bp, Homo sapiens
gcgggattgaacaggttcaagtgtataaagctcatagtacaacctgctaaggactcaacattagctattcctgctgctgtttttattatttgttgctggcrtataagacctaggcaaatggagctaaatactattgtctaccattaaaatattcaccttctggagggaatagtgcaagggtaacttcagatttgcattgaa

SEQ ID NO: 182130 - DNA, 201 bp, Homo sapiens
atttgtggtgacctggcatactgtattccatctttaagtcctcaccacaagtaggcctttatccaggttcttgttacctggaaatgtgtgttcatttgggktatctagatgaggcaggacttcaaggaaggggatggataatgcacttaatcttcatcttcacataaggatagctgctctttatcttctccctctggaagc

SEQ ID NO: 182131 - DNA, 201 bp, Homo sapiens
cggatttctcagagaaccactggatatctgtatattccggctttggcagcgttgcactctcccagttctctactctcccctcaggtgactcttttcttgcrttgttaaacatttacccattcactgtgtttttattgaatacctgctatgtgcaggcctgtgctaaacccaggtaatacaaagaaaacagaaaagtaccta

SEQ ID NO: 182132 - DNA, 201 bp, Homo sapiens
cgggaattacttcttgccaaaaggcttgtttgtcctctcttgaagccatgattagtctgcctctgccatgtcgttggctcctcaggagattacaagctctytgaggacagagattacattttttttcaagtattatttccccagcagtgctgagcacagtacctgatgtaaagttgtgctctgtaaatgtttactgaattg

SEQ ID NO: 182133 - DNA, 201 bp, Homo sapiens
tcaccttctggagggaatagtgcaagggtaacttcagatttgcattgaaaaacccatggactatcactttacatatttatttccttaccatcttcaacccytatccagacagctccaaatgcacattattcagaaaattggtgatattttcacagcactgagactaagctcatctcctgctggtccttatcactcaccagc

SEQ ID NO: 182134 - DNA, 201 bp, Homo sapiens
aacacacctggctttttttacttttaaatcatcatttcccttttagagatgggatgtcagaggcccaaaaaactcagttcatttgcgtgaggtcatgtaartggtgatatctggaagtgtctccctcaaagtcagtgccctccctcacaggcactcattccctaaggcacctaggatgggcacagagaaaggagaaccaag

SEQ ID NO: 182135 - DNA, 201 bp, Homo sapiens
gttctactggtaaatggggaaaaaaagagaatttaaaaatcaatgctctactcattggtttgtttccctacaccaagtacaggaaacttttggcaacttcwtgggatccatgggatcactcacccaatcacaaactagaactagaaatcactgagccttccttctaaaacacttttaaaatgcaaagcataaataatgcct

SEQ ID NO: 182136 - DNA, 201 bp, Homo sapiens
aagcagtgtgtagagggaaatttatagcactaaatgcccacaagagaaagcaggaaagatccaaaattgacactctaacatcacaattaaaagaactagaraagcaagagcaaacacattcaaaagctagcagaaggcaagaaataactaaaatcacagcagaactgaaggaaatagagacataaaaaacccttcaaaaaa

SEQ ID NO: 182137 - DNA, 201 bp, Homo sapiens
ctgggtacataatgaaatgaaggcagtaataaaggtgttcattgaaaccaacgagaacaaagacacaacataccagaatctctgggacatattcaaagcastgtgtagagggaaatttatagcactaaatgcccacaagagaaagcaggaaagatccaaaattgacactctaacatcacaattaaaagaactagagaagca

SEQ ID NO: 182138 - DNA, 201 bp, Homo sapiens
tcagaccacagtgcaatcaaagtagaactcaggattcagaaactcactcaaaaccgctcaactacatggaaactgaacaacctgctcctgaatgactactsggtacataatgaaatgaaggcagtaataaaggtgttcattgaaaccaacgagaacaaagacacaacataccagaatctctgggacatattcaaagcagtg

SEQ ID NO: 182139 - DNA, 201 bp, Homo sapiens
ccattgatgaccagagagaggaagccaaagggaggcagcctcctggacaggctctagaacagtgcactaagccatggcccagcaacttccctaggagaccyaatagcagaggtgctgttgaggccaggccagtacaggagagacagagaaaccgtgtgtgaatggtgttcatgactagtgatcattgccaggaccaccgca

SEQ ID NO: 182140 - DNA, 201 bp, Homo sapiens
ggtactatgtgggtgtggacgttggaacaggcagtgtccgtgcagctctggtggaccagagtggggtcctgttggcttttgcagaccagccaattaagaaktgggagccccagttcaaccaccatgagcagtcctccgaggacatctgggctgcgtgctgtgttgtcacaaaggtatgggcaaaactggtgttctctcctt

SEQ ID NO: 182141 - DNA, 201 bp, Homo sapiens
gttgcaatcctagtctctgataaaacagactttaaaccaacaaagatcaaaagagacaaagaaggccattaaataatggtaaagggatcaattcaacaagrgctaaccatcctaaatatatatgcacccaatacaggagcacgcagtttcataatgcaagtcctgagtgacctacaaagagacttagactcccacacaata

SEQ ID NO: 182142 - DNA, 201 bp, Homo sapiens
cacacataacaatattaactttaaatgtaaatggactaaatgctccaattaaaagacacagtctggtaaattggataaagagtcaagacccatcagtgtgytgtattcaggaaacccagctcacatgcagagacacacataggctcaaaataaaaggatggaggaagatctcccatgcaaatggaaaacaaaaaaaggcag

SEQ ID NO: 182143 - DNA, 201 bp, Homo sapiens
tgtaaagaccatcgaggctaggaggaaactgcatcaactaacgagcaatataaccagctaacatcaaaatgacaggatcaaattcacacataacaatattractttaaatgtaaatggactaaatgctccaattaaaagacacagtctggtaaattggataaagagtcaagacccatcagtgtgctgtattcaggaaaccc

SEQ ID NO: 182144 - DNA, 201 bp, Homo sapiens
tgcttggcacgtgaaagggaggcaatatgttttatgaatagtccaggtgtcgagacttagtagtaaacagacaagtccttgccctgtgtagcttacattcyggttagggcaaggagtggagaaggcagacaacgaacacataaaccagtaaatatacaaagtggcagaaggaaattagtggcatgcaaatcagtcaatcag

SEQ ID NO: 182145 - DNA, 201 bp, Homo sapiens
acatcctcccttgcccctttctatctgcactgacttcaccgtccctcagtcaccccaccttctttctttccctgctcttccttatgttctcttcccacggyaggcaccctctgcccttctgtttcatggggctgtctcttcattgtccctgaaatttgaacttcagtcctcctccccccgcaaacttcttccaagcccatg

SEQ ID NO: 182146 - DNA, 201 bp, Homo sapiens
taactgcaagacccatatcagatgctttctgctctgcatagccttccatgaaacactcaggtgtatttagaaattctctaaattatgctttttttcagcamactatttgaagaaatgatcatattgcattgtaatttcaaatatatctgcatgtcatttccattagagtgtgaactccttgagaacaggaacattatgtta

SEQ ID NO: 182147 - DNA, 201 bp, Homo sapiens
tgtctgtcctgttcatctctctgtcctcaggatctaaaacagtgcctaagaattagtaaacaactcataatatatgtaggttggttgaatgctatgtaacrtagttctgattacaggcaaggttgtttctctccaaatacttttcagtgtgagcaatgtgtgcttttgattggaatgttaagattttggtttttacataca

SEQ ID NO: 182148 - DNA, 201 bp, Homo sapiens
taatttttttttctatttttaatttttacaaagtaatttttgtgagttaacttggctgtttggattagatttcaacctgatactttaccatgcctaatgtstgagaatgagaaattgtcttttctgaagtcatagatgataatgtccaagtaatctagaggctgtgttgaagttaggaagaaaggaatttctgacatcaag

SEQ ID NO: 182149 - DNA, 201 bp, Homo sapiens
aattgttacatcacagaaacctgtgtactttgttcaactttacatttcctaaatttatttgcacaaatagcttctttcaaataataccttttaacatcttyttaaactcctctgggaaacactgatttaaggcaacatgacaattatatgttaggtgttatggcaataatgaggggggcctaactaccacaactctgggtg

SEQ ID NO: 182150 - DNA, 201 bp, Homo sapiens
cttatccagacagctccaaatgcacattattcagaaaattggtgatattttcacagcactgagactaagctcatctcctgctggtccttatcactcaccarcctttcagccacatcagacatctcctcaatctctgggcaaaccaggccttttcatgtcttcttgactttgcacgtactgtttcctccccgcagagtatca

SEQ ID NO: 182151 - DNA, 201 bp, Homo sapiens
agcagttatcacactgttttgcggttttctccaccactagactgtggtctcctctaggtccaggactgaattttattcatctccaggtcagtgtctagcaytgtcttgtaaatgctgtctttattcatgttgcccagcttctaccacacggctactggaagttctcaagctcataacaccgtagcttctacaacagagagc

SEQ ID NO: 182152 - DNA, 201 bp, Homo sapiens
tataccaccttgctgagagcccagatcataacattgaaacctgacttcgggtctaggataggctgggtttatagctttttggagatgtcacttgactcagkgatagaaccaagaatacccagtttggtagagagatagcatgtcccttcacctttttccatgaatattccttcccttggccagctttgcaaacaaagctgt

SEQ ID NO: 182153 - DNA, 201 bp, Homo sapiens
taaaaattgacctcatttatttagtgcttactatgtaccagacactgtaccaagaatttattatcattcaactttcacaaccctaaaatatgtgtattttwcaaatgaggagaagtaggctggcgagtagcttgcccaaagtcattcaactcagaagagaggccatcgtttaatcttagattgtacttgtaaaattcacac

SEQ ID NO: 182154 - DNA, 201 bp, Homo sapiens
gacctatttctctaatgtaaagagttcattcattaggcaaataatcaccctaagccagttgttctggaagtatggccttcagaccagcagcatgagcagcrtcacttggaaatacattggaaatgcaaattctgtggcctcactcccaccctactcaatcagaaactcttgggagtgggaccaaataatttgtgttttaaa

SEQ ID NO: 182155 - DNA, 201 bp, Homo sapiens
tagctcatgaggaagatttacagcctgggagtcaggaggcccaagttctagtccttgctttgacaccaggtgatattgtggtcttctctgagtattgttgkttcactcttatgagagcattctcagacctgtggcattttcaccattgaatccactgtgcacagaggtaaccaacatttgtgacacctgctgtttgcaaaa

SEQ ID NO: 182156 - DNA, 201 bp, Homo sapiens
tggctgggcaagctacttaatttctctgatctcagttccatattaactgaccccattgagtttctgcaaagattctgtgaatgaaagcacatttagcacartgcctattcagcagaaaagtactattatcattccctgtgttcatttgatcttcaccacaaccctatgaggtaggtggcatcattgtgccactctattaag

SEQ ID NO: 182157 - DNA, 201 bp, Homo sapiens
tgtttccaatttagtagattgagacaaaattcccaggaacgttttgtgcttgatccaggttgcctctttctagatcacccaaaaagaataaatgaatgaaygaatgaccacataagtgagtattggtaaatacttagaagcttcgtacctccaggttcctgttgcttccaggaatctggagaaaaagcctgaggttgaaca

SEQ ID NO: 182158 - DNA, 201 bp, Homo sapiens
ttgtaaatgacttggcactgtacctggcacaaaataccaaatatgatattgttattaaaaatgagttgttaatcacatgaacaatccatgtggttatggaytagaattagagacatcagtatgaactcatattgggggaacccacccccaatatttcaacgtaggttctttctattttccgtaagtgtcagccggctgaga

SEQ ID NO: 182159 - DNA, 201 bp, Homo sapiens
tattaaaaatgagttgttaatcacatgaacaatccatgtggttatggactagaattagagacatcagtatgaactcatattgggggaacccacccccaatwtttcaacgtaggttctttctattttccgtaagtgtcagccggctgagaaataaagagaaagagtacaacgagaggaattttacagctgggctgctggggg

SEQ ID NO: 182160 - DNA, 201 bp, Homo sapiens
atgaccacacacaagatctaaagtagtttttttttttttttttttttgcctgaatttaagaagattgttgtgctttggcttgaagcactggttgttgctgyggtggtttggcggttcatatctggtcactggcctttgatttctggaacctttagaaagaggctgccttttctcctctccctgaccactgattgctgaaac

SEQ ID NO: 182161 - DNA, 201 bp, Homo sapiens
tgtggcttgttagatcctatacagagatactactagttcttagctgtgttaggaatatttagtatctttaagttttgcttgatttaacattaacatcttaraatgggcgttcaaagagaagtttagggcaggtccctttctagacacaagctttcacctagatgtttaggaagttaaaacaacaacagtaacagagaatca

SEQ ID NO: 182162 - DNA, 201 bp, Homo sapiens
atattaacttctatttatatagtgactgtcttctcaaagaactcaaaacagtgtccttttctgtatccctgctattcccaaaacatgtttgtggcaatgtrtgtggcttcaaaatgtggatgtatcattatgaaatataaatgcatgtggtgatggtatttattagaatcatatgttattggaagtacctaacattgggtg

SEQ ID NO: 182163 - DNA, 201 bp, Homo sapiens
aaaactcagttcatttgcgtgaggtcatgtaaatggtgatatctggaagtgtctccctcaaagtcagtgccctccctcacaggcactcattccctaaggcwcctaggatgggcacagagaaaggagaaccaagcttggctggggctgctgtccagagaaggtgggcaggtgtcaagagcaggtgcagaggtggagaggaga

SEQ ID NO: 182164 - DNA, 201 bp, Homo sapiens
gcctgaccaacatggtgaaacctcatctctactaaaaatacaaaaattagctgggctcgatggcaggcgcctgtaatctcagctactcagatactctcctragacaggagaatcacttgaatctgggaggcacagattacagtgaactgagaatgcaacactgcacttcagcctgggcgacaagagcgaaactccgtctta

SEQ ID NO: 182165 - DNA, 201 bp, Homo sapiens
caaatgcagtttctggtgagggctctcttcctaacttgtagatggctgccttctgtgacctcacatggccttttctcagtatgtgtatatgaagagaaaayggttgtattccttccttttcttataagaacaccagttatatcagattaaggccccactgtcatgagctgtttaaccttaattacccccgtaagagccata

SEQ ID NO: 182166 - DNA, 201 bp, Homo sapiens
ataagcattctcatcttatttctaatcttagagggaatgtatataaaatttttccagtgagagtgatatttgctagagattacagacagacagacagacasacagacacacacacacacacacacacacacacacacacacatttccttatgaaattgagtaaatgatcttccaaagcattcagggcaaatagcagcccat

SEQ ID NO: 182167 - DNA, 201 bp, Homo sapiens
attgacccagatgtctgaaaccaaatgccctgctcagagattccttgagaggcagaatgaaaagatttatagacatgcgtttccaaaaaaaaaaaaaaaaatccctttactttaagaacagtggctattctgaagtggaaagtcgcaagaattagtgcagactcttgacttctggctagaaaagatgttctcaaggctttt

SEQ ID NO: 182168 - DNA, 201 bp, Homo sapiens
ttccccaaaggtccagttcaggtgtcaccttcctaaggccctcttcccttcctccaccacgtttaatagattatgactcctctgggccttcacagctgttyatgcatagctgtggtgcactgcttctcattctctgtctttcccatgagcctaaactccttgagtagttggggaaaaatgtctacttcagtgttctatctc

SEQ ID NO: 182169 - DNA, 201 bp, Homo sapiens
cagaatttcatatccagccaaactaagcttcaaaagtgaaggagaaataaaatactttacagacaagccaatgctgagagattttgtcaccaccaggcctrccctaaaagagctcctgaaggaagcactaaacatggaaaggaacaaccggtaccagccactggaaaatcatgccaaactgtaaagaccatcgaggctagg

SEQ ID NO: 182170 - DNA, 201 bp, Homo sapiens
gcaggaatgtcaaatgatgcaacgactttggaaaacattttagcagtttcataaaacctactctaccctgtgatccagacattccatttctataaaagccrggcagggatatctggccccatgtttctggaaacccactaggaacacggcaaagtcaggtgaaacaaggcatctcagaaggtcaggaacaaaagcctttag

SEQ ID NO: 182171 - DNA, 201 bp, Homo sapiens
ccgggagtggggcactgctgaaacgatacccaaaaatgtggaattgactttggaacttggtaacaggcagaggttggaacagtttggagggctcagaagayaggaaaatgtgggaaaatttggaactccctagagacttgttgaatggctttgcccaaaatcctgatagtgatatgaacaataaagtccaagctgaagtgg

SEQ ID NO: 182172 - DNA, 201 bp, Homo sapiens
tatgtgacgggttacaccaataatagagagtcaaatcatgagtgaactcccattcacaattgctacaaagagaataaaatacctaggtatacaacttacargggatatgaaggacctcttcaaggagaactacaaaccactgctcaaggaaataagagaggacacaaacaaatggaaaaacattccatgctcatggatagg

SEQ ID NO: 182173 - DNA, 201 bp, Homo sapiens
accttacatttaacaaatgtcctgctaaaagctagggatacttcaaagaaaggaaagccaacgactccactttcatggagcttagattcaggagggaggaragcagaggtgaggaccacagagaagcaggcagacaataaacaattaaaaatataatttcagatgatgatgtgctatcaagggttatgaggaaaagaaaat

SEQ ID NO: 182174 - DNA, 201 bp, Homo sapiens
cctgttgctagacctctgaacaatagcagagattcacaggttgctgtgccccagaaggtagaatttggaaaaagcagtggaaaaccctcgaaagctgtaagaggcctgtctctggcctttttctcacattactttctagcaagtatctgagcagccagtgccttcagtatctggggatttgtggtctgatgagacattccc

SEQ ID NO: 182175 - DNA, 201 bp, Homo sapiens
tcactgtggatttttctagttttctctaagtctcaaatttccaagctatacatattagcctacctttgagatttgatctttctgggtaggaaggagaaacrggagtgagacccagttatcagaaggtctgttctttgttctctccactcctcgcaatacaaccagcctcttgaattggtttctgattgctctaagtcatgg

SEQ ID NO: 182176 - DNA, 201 bp, Homo sapiens
gtctacagctcccagcgtgagtgacgcagaagacgggtgatttctgcatttccatctgaggtaccgggttcatctcactagggagtgccagacagtgggcrcaggacagtgggtgcagcgcaccgtgcacgagctgaagcagggcaaggcattgcctcactcaggaagcacaaggggtcagggagttccctttcctagtca

SEQ ID NO: 182177 - DNA, 201 bp, Homo sapiens
aatgaggtgacacattgaaggacttcttagagaaatgcatttgaggaagaagcagccaagatggccgaataggaacagctctggtctacagctcccagcgygagtgacgcagaagacgggtgatttctgcatttccatctgaggtaccgggttcatctcactagggagtgccagacagtgggcgcaggacagtgggtgcag

SEQ ID NO: 182178 - DNA, 201 bp, Homo sapiens
cttcctcctcccaccctttgtcctccaccctcccaaaggacccagtgtgtgttatccccctcattgtgtccgtgtgttctcattctttagttcccacttaraagtgagaacatgtgatatttggttttctgttcctgtgttagttgctaagaatgatggcctctagctccatccatgtccctgcaaaggacatgatcttgt

SEQ ID NO: 182179 - DNA, 201 bp, Homo sapiens
gtaatccacacatatatcaagggggagacttggtgggaggtgattagatcctgggggctgtttccccaatgctgttctcttgatagtgaaggagttctcagagatctggttgtttgataaatgtttggcattttccctgcttgttcttgctctctcctgccttccttccccctctccttccaccatgattctaagtttcct

SEQ ID NO: 182180 - DNA, 201 bp, Homo sapiens
agttcccaagcttaacttttctctttaacatagtgagtttggggtccaaagattttattttcctttcacacaactttgtccttatagtgaaaaagcagccyaagacaggccataaatgaatggacatggctgtgttctaatggaactttatttacaaaaactggcagcaggcacatttgggctacaggccagggtttccta

SEQ ID NO: 182181 - DNA, 201 bp, Homo sapiens
gaggccatccctgaatttctaactcacaggcctcccctacgttaatatatttatgtcctcctggcccttgtttactttttacttgtttacttttgcttttstttacttgtttacttttgctccatgaagtcagggacctgcctgcttgctccgcaatccctagaactgtgtctagaaccttagttggttgcagtaaatatt

SEQ ID NO: 182182 - DNA, 201 bp, Homo sapiens
tccatggaaaataccttccaagacccccagtggatgcctaaaaacatgggtagtactgaaccctatgtatactatgtttgttttttttttttttttgatckggtaactgagaggattactaagcggacgacagggaggtagtgcctacagcatggatttgctggacaaagggatgattcacatcccaggtgggaccaagct

SEQ ID NO: 182183 - DNA, 201 bp, Homo sapiens
aaagaactcaaaacagtgtccttttctgtatccctgctattcccaaaacatgtttgtggcaatgtatgtggcttcaaaatgtggatgtatcattatgaaakataaatgcatgtggtgatggtatttattagaatcatatgttattggaagtacctaacattgggtgtaaaggaagcctggtcaagtttccaatagagattt

SEQ ID NO: 182184 - DNA, 201 bp, Homo sapiens
atggaaaataccttccaagacccccagtggatgcctaaaaacatgggtagtactgaaccctatgtatactatgtttgttttttttttttttttgatctggwaactgagaggattactaagcggacgacagggaggtagtgcctacagcatggatttgctggacaaagggatgattcacatcccaggtgggaccaagctaga

SEQ ID NO: 182185 - DNA, 201 bp, Homo sapiens
aggactggaagaagctaaaagattcagcatgttcggatttcatgactcttgtggttttgttcctagacaggacctaccaggggagcctcctgcaaatgagrtggtcttccttttctactcatcacattctatgcctgccctctctaacctacatggtatagtaggaagacgccataccatggagtcagagaatcttgggct

SEQ ID NO: 182186 - DNA, 201 bp, Homo sapiens
atatgaatattcacaccaaacaggttaagtcagctttaaatggcttgatccattcagatcagattttaccatcaaatgaattgtgaaaagacttttggtayttgaaatgctttgggttgaagaagtgtggtagacctgtacttgcttttcttgaaaagagcctgtgctctcttattcatctggcctttgggcatgttgttt

SEQ ID NO: 182187 - DNA, 201 bp, Homo sapiens
tgcaattctgtcagccagtccaggcaatgctaatacagctttgattattatgatcatgattattattttgttttgaaacctttttcagaggccaagcatgytggggacttgagggacataaaaatctttcaactgattatgccacctgcaaacaggataagcctgactttctacctcacccacctcttgctatcacagata

SEQ ID NO: 182188 - DNA, 201 bp, Homo sapiens
ctttatttttcccctttcctctgtacctgtcacagaagggggcctgtctgaataagatggcacataatctgctgagtgcagcaacccctctgtgcagcctygaggaagaagacaaggcagtcaaagtaccttccatcatttcctggaaaatgtgtcggtagcttggagaggcagagtgggagatggaagtaacactgcatg

SEQ ID NO: 182189 - DNA, 201 bp, Homo sapiens
gtgggaaagagcgggaagggagtgagggatataagactgcaaacaaagttcattgtatactgcttgggtgatgggtatatccagatctcacatatcaccaytcaagaacttactcatgtaaccgaacaccacctgttccccaaaaacctacggaaattttttttttctttttttttttgagacagaatctcgctttgttgt

SEQ ID NO: 182190 - DNA, 201 bp, Homo sapiens
ggcttcaaaatgtggatgtatcattatgaaatataaatgcatgtggtgatggtatttattagaatcatatgttattggaagtacctaacattgggtgtaarggaagcctggtcaagtttccaatagagatttacaattgggcctctttgtatctcagtttcttcatctgtatagtgggcataatagttcctattttataga

SEQ ID NO: 182191 - DNA, 201 bp, Homo sapiens
tatcattatgaaatataaatgcatgtggtgatggtatttattagaatcatatgttattggaagtacctaacattgggtgtaaaggaagcctggtcaagttkccaatagagatttacaattgggcctctttgtatctcagtttcttcatctgtatagtgggcataatagttcctattttatagagttattgtgatgattgtg

SEQ ID NO: 182192 - DNA, 201 bp, Homo sapiens
gtgtcgtcttgggcaataacagtaacagtcaacacagatgctatttattgaataatacttatatgtcaggcattatattaggcccaggatataagtgattrtttatcacttattcctttaactttcttaaataggtatgattatactcattttatagatgagttaggtaaggtttagagaagttaagaaactttcccatag

SEQ ID NO: 182193 - DNA, 201 bp, Homo sapiens
aggaaggggaacatcacacaccggggcctgtggtggggtcgggggagtggggagggatagcattaggagatatacctaatgttaaatgacgagttaatggrtgcagcacaccaacatggcacatgtatacatatgtaacaaacctgcacattgtgcacatgtaccctaaaacttaaagtataataataaaaaataaaagac

SEQ ID NO: 182194 - DNA, 201 bp, Homo sapiens
tgcagccaaaaggcacatgaaaaaatgctcatcatcactggccatcagaaaaatgcaaatcaaaaccacaatgagataccatctcacaccagttagaatgscaatcattaaacaggaaacaacagatgctggagaggatgtggagaaataggaacacttttacactgttgttgggactgtaaactagttgaaccattgtgg

SEQ ID NO: 182195 - DNA, 201 bp, Homo sapiens
atggcacataatctgctgagtgcagcaacccctctgtgcagccttgaggaagaagacaaggcagtcaaagtaccttccatcatttcctggaaaatgtgtcsgtagcttggagaggcagagtgggagatggaagtaacactgcatgaggagttaggtggtctatgttcaggggccagggttgtcacttactagataggggac

SEQ ID NO: 182196 - DNA, 201 bp, Homo sapiens
aaagaataaggccagtgcacaaagttgtggcaaagttgtcagtattaacattgtaaatcaagtgtgtgtgaaggggtgctcaccttagctcccttctagawattttgagattctaaagtcaagaaatctatctcatgtagtgaaagaattccttaccgttatattgtcacagagcatcattagtaggagcaaattgttcct

SEQ ID NO: 182197 - DNA, 201 bp, Homo sapiens
acaatatcttgccactgtagcatctgctatgtgtaatgagatgcttgggcctgctggtggtcacctattttctaggtatacgcattggcttttgtggtgtygccatatatatatatatatatatatataaaatatgtattatatatataatatatatacatgatatagatataattaaatgttatattcaattaaaataaa

SEQ ID NO: 182198 - DNA, 201 bp, Homo sapiens
ctatgtgtgtgatgttgttttctcatgttctatggtgtctgggatcttcagagcctgttagccagctggctccaggaacctatgtgtcatgggttccacakgtgaacttcttggtactggggctcttgaggtctctccagttggtgacaggaaacattccaggtgtgagtggctgaccctcagagtagagaaagggttttg

SEQ ID NO: 182199 - DNA, 201 bp, Homo sapiens
attacagtattgttcatcttgggattttcaaggaagtatgtcactaggaaattttgcttttattcttttaaggaataattaatggtggcaggcatatggaktgtgtgtgtgtgtgtgtgtgtgtgtgtgtgtgtgtatgtatgtgtgtgtatgttatgttacggattttctgttatatgatattctgaaatattgtacttt

SEQ ID NO: 182200 - DNA, 201 bp, Homo sapiens
gaattacataaagcttgatggtagccatttaataaatggtagctagtattgttattgctacttcagatgggattaaaaaaagatataatgaaatgtattartataagtattttccaagaaacattgaataattactttgaaaatctctaatgttacatacaagaacaagaaaataaaatgttttcactctcataattgaaa

SEQ ID NO: 182201 - DNA, 201 bp, Homo sapiens
aaatgcagaaatcacccgtcttctgcgtcgctcacgctgggagctgtagagcggagctgttcctattcggccatctttgctcctgccccagtagttccatktttttttaactgaatggaacaaaatgtttgaaattgtttgaatgtttgaatattctttgggcttctgtgaagataaaatattccaaaagcgcctgtgagt

SEQ ID NO: 182202 - DNA, 201 bp, Homo sapiens
atattctggagattaattccttgttcggtgaatagtttacaaatattttatccctttcaacaggttgtctcttcactctattggaaggtttcctttgctgygcagaagctttttagtttgatataatttcatttgtctatttttgtttctttgcctgtgcttttatagtcttattcataaaatctttgcctagaccaatgt

SEQ ID NO: 182203 - DNA, 201 bp, Homo sapiens
tgaaccaagccacctagtggaatgcccaggtggtggtggcagtggctgtgatgtggcccagctgcgggggagagtggggttgcttttactggcagcagtcrtagacaattggctggggagcatgcactttggctccaggtagtggctgcaggtggggtagcgtttcctcggggcacttgaaaatccatggtggctctgctg

SEQ ID NO: 182204 - DNA, 201 bp, Homo sapiens
gtgcctccagatttgtttctttttgcttagtcttgtttttgctatgcaggctcttttttggttccatatgaatttttatttatttatttattattattatrctttttttagggtacatgtgcacaatgtgcaggttagttacatatgtatggttccatatgaattttataattgttttttctaagtctgtgaagaatgatg

SEQ ID NO: 182205 - DNA, 201 bp, Homo sapiens
ctcctcttttgtttcttagtgaggttatttggattttctctcttcttttcttgggttaatcttgctaatggtctatcaattttcttttctttttttgagayggagtctcgcttttgtcacccaggctggagtgcagtggtgtgatctcagctcactgcaatgtccaccacccaggttcaagcttctcctgcctcagcctga

SEQ ID NO: 182206 - DNA, 201 bp, Homo sapiens
ggagtgcagtggtgtgatctcagctcactgcaatgtccaccacccaggttcaagcttctcctgcctcagcctgagtagctaggattacaggcacccaccaycatgcccagctaatttttgtacttttagtagagacgagatttcaccatgttggtcaggctggtcttgaactcctgacctcaggtggtccacccgcctcag

SEQ ID NO: 182207 - DNA, 201 bp, Homo sapiens
ggtcttgaactcctgacctcaggtggtccacccgcctcagcctcccaaagtgctgggattacaggcgtgagtcactgcgccggcccaattttatcttttcraagacccatctttttgtttcatttaccttttgtattttgtttgtttgtttgtttcaatttcacttagttctgctctgatattggttatttcctttcttct

SEQ ID NO: 182208 - DNA, 201 bp, Homo sapiens
gtcctttaggttttgcaatttgttggcataatagttgttcacaataggctttaatgatcctttgtattttgtggtgtcacttgtaatgtctccttttctgttttttttaattttatttatttgtgtgttctctttttctcagtctagctaaagatttgctattatgtttaccttttcatttcattaatttttgtctcaaat

SEQ ID NO: 182209 - DNA, 201 bp, Homo sapiens
tcttcttggttttctaatttgttggtatatagttgctcataatagtctctaatgatgccttgactctctgctatcagttataatatctttaaaaaaaattmtctgactttatttatttgaatcttctttattttttactttttcttttttgtttgaaatggagtctcgctctgttgcccaggctggagtgcagtggcgcta

SEQ ID NO: 182210 - DNA, 201 bp, Homo sapiens
catctctactaaaaaataaaaaaagatttagctgggcatggtggcgggtgcctgtagtcccagctactcaggaggctgaggcaggagaatggcatgaaccygggaggtggagcgtgcagtgagctgagatcatgccactgcactccagcctgggcgaccgagcaagagtctgtctcaaaaacaaacaaacaaaaaaaccca

SEQ ID NO: 182211 - DNA, 201 bp, Homo sapiens
ggttttgttgagactgcaatagcaatgtatccaaggtccaaactaatgatttgccatctggtttcatttagcaaagttaatgttcggtcatcaagtacatrttcagtaggaagtattctttttcgaaacagtttctacagtcatttttttttaaccctgtataaaatgagtttattttggactgttaaaaaaattcaaaac

SEQ ID NO: 182212 - DNA, 201 bp, Homo sapiens
cttaactctgattacaatgaaaataaaaaagaaatcagcaaaaagaaaacaaaaaaaccccccaaaactttaccttaaccccatttcttcactttgtcactttttttttttttttttgagatggagtctcactctgtcacccaggctggatacagtggcgtgatctcggctcacttcaacctctgcctcccgggttcaagc

SEQ ID NO: 182213 - DNA, 201 bp, Homo sapiens
atagtgagaaagctgccctgagaccagagtaactttgtttctttgatgtatcatttacagtaataacccaacggggtgccaaggggctgccactctttggytatgctttattgtccattcacactttgtctccatgtttccttcccccttcctcctgtatacatgtatacagaagggggaaggaaacatggagacaaagta

SEQ ID NO: 182214 - DNA, 201 bp, Homo sapiens
aaaaatgaatgattgcccatatgagattttcagtgataccagtctagggaaggatagagtaaatagaaagatggtagaaactgcttgctctgtggagactwttagggatggcaaaaacatagtgtgcacggtcaatatcttattccatacccatagcagacattgttaattgattttggtatattttcctatagtctggag

SEQ ID NO: 182215 - DNA, 201 bp, Homo sapiens
tatggatatacattttgtttatacattcaacaattgatggacatttgggttgcttctatcttttggctcttatgaataatgctgctgtatgaacacattcytgagtctctattctaccagttgagctagcagggtgacactgaatacatttttaatattaaaaatttggattatttaaaagtatattcagtaaagcctgaa

SEQ ID NO: 182216 - DNA, 201 bp, Homo sapiens
ttgcccatatgagattttcagtgataccagtctagggaaggatagagtaaatagaaagatggtagaaactgcttgctctgtggagacttttagggatggcraaaacatagtgtgcacggtcaatatcttattccatacccatagcagacattgttaattgattttggtatattttcctatagtctggagccctttttaatg

SEQ ID NO: 182217 - DNA, 201 bp, Homo sapiens
tgattgccacctactctgatattgcttggggagaatgacagaaatatattctggattggggttcccatgggtggttacagatttggtttgtacttaaccckcactgtcagattgaggaggtacctcaggatgcagttagaagccaaactctttttcttgagggtagaggaacatatagctctactaccaccagtgacctaa

SEQ ID NO: 182218 - DNA, 201 bp, Homo sapiens
acttgtctatctccataagaaaagcttattggtattttttgggagatttagttgaatttgtaaattaactttgggagaactacatctttatgatgttgtaycatcttatccaaaacagggatatcttttcatttcttatttttttattttatttgagatggagtctcgctctgtcacctgtgctggaggctagagtgcaag

SEQ ID NO: 182219 - DNA, 201 bp, Homo sapiens
cttggtaatgatggcttgtcactttcttccctgtcttgcagagttcatggtctcttttcaggagccagtcattctaatatcctagttcaagaaaacatctycttctgtttattagttgttcaatttctgtagtcctttttcaaagtacttagcttcaggtggaagaaagtttcctaataatttctaaattagaaattgtat

SEQ ID NO: 182220 - DNA, 201 bp, Homo sapiens
tgttgtagagcagatctctagagcttgtccagcttgtttgactgaagctttatgccagttgattagtaactccccatccacctcaccctgcaccagcaacyatcattccactctgattctaagtgcttcatttcttaaccttgatggtggttacgaggatgtttcctttgtgacaaattattaagctttatttttatgctt

SEQ ID NO: 182221 - DNA, 201 bp, Homo sapiens
agaatgtgaggtcccgtactagccaatggaaaccggacatagcagtagggtggacgcgtcaggttataaatgactctgtctcctttgtttggtgtactctkgtggtaaaactgctggcgagtgtaccctttctgcagaaagtaaaaatggccttgctgaggaaattaaatttatgttcaagtgctatttctttatggcacc

SEQ ID NO: 182222 - DNA, 201 bp, Homo sapiens
gttgctagccaattgggacaaatacagaatgtgaggtcccgtactagccaatggaaaccggacatagcagtagggtggacgcgtcaggttataaatgactytgtctcctttgtttggtgtactcttgtggtaaaactgctggcgagtgtaccctttctgcagaaagtaaaaatggccttgctgaggaaattaaatttatgt

SEQ ID NO: 182223 - DNA, 201 bp, Homo sapiens
ggcattaggttatagcctgttcctcttccttatttggaggtgtttttacctttctcagcattccacaagttacttcctccttcctttgttctcgtctgccygtgcctcttttaaaaagttctaagttgctagccaattgggacaaatacagaatgtgaggtcccgtactagccaatggaaaccggacatagcagtagggtg

SEQ ID NO: 182224 - DNA, 201 bp, Homo sapiens
tgttgcttgatttggaagtaatccgcaaagaagcaatagctaaacattttagtgttgtttggggagtagctgctgaacaataaagaccaaaaccataactraaaaacaaacaaacaaacaaaaaaacgcagcccgagacagatcagaaactaggtgtatgtagggcgccaggttatgacactgttctctgacatccacagg

SEQ ID NO: 182225 - DNA, 201 bp, Homo sapiens
gaatatgccaccccaaaatatgctactttggcctaagtattattttgagccgaagccaattgacaaccagtagatgcagttatgtcagtcactggagagcrttagcaaatgtattccaaaaaaaaaaaaattgcttaagataataaccacaatcagctcctcattgaggtgggcaacattggatggttatgacaaggtgag

SEQ ID NO: 182226 - DNA, 201 bp, Homo sapiens; identical to SEQ ID NO: 32215

SEQ ID NO: 182227 - DNA, 201 bp, Homo sapiens
  misc_feature (1)...(201): n = A,T,C or G
gttttagagaatacttgagggaatttggagactgtgttttggcaagcttaattatttagaatcttagcttcataaatgtattcattcattctttcattcancactatgctgggtaggcaagggtgaatgagacatgattcctgtcttccaggggcttataattcagtaagcttctcttttttatcttttttttcccttatc

SEQ ID NO: 182228 - DNA, 201 bp, Homo sapiens
atataatctttttatgggctcttgggttcattttgccaacattttattgaggatttttgattatatgttcaactgagatattgtcctgtagttttcttttkctgttgtgtccttgttcagttttggtatcagaataatgctggcctcatagaatagtttcaaagaattccccgcctttcaatttttttgcaagtctgaaaa

SEQ ID NO: 182229 - DNA, 201 bp, Homo sapiens
ctcggctcacttcaacctctgcctcccgggttcaagcgattctcctgcctcagcctcccaagtagctgggactacaggcacctgccaccacacccggctatttttttttttttttttgtatttttagtagagatggggtttcaccatgttagccaggatagtcttgatctcctgacctcgtgatcttcctgccttgtcctc

SEQ ID NO: 182230 - DNA, 201 bp, Homo sapiens
tttttttttgtagctattataaacagcatttctggcttaatttctttctcagctagttcattattgatgtattgaaatgctgcaaatttttgtatgttggttttttatactgcaactttactgaatttatttattaggtgtaagagttttttttagagtctaggtttttctggatataaaatcatgtcacctgtgaaacag

SEQ ID NO: 182231 - DNA, 201 bp, Homo sapiens
gttaaatttctttttcatattctagaatttttttccgatttctttgtatctgtgttctcttgtctttcactgatatatatatatatatatatatatatatwttttttttttttttttttttttgcgatggagtctcaatctgttgcccaggctggagtgcagtggcatgatgttggttcactacagcctctgcatcctggg

SEQ ID NO: 182232 - DNA, 201 bp, Homo sapiens
catttagactcctgatccatttggagattattattgtgtatggtgtaagatatggatctaattttaccttttcccagaagtctaaccaattgtactagcaytctgtttttttatttttttatttttatttttttttttgagatggagtctcattctgttgcccaggctggagtgcagtggtgcaatctcagctcacggcaa

SEQ ID NO: 182233 - DNA, 201 bp, Homo sapiens
ttaaatttctttttcatattctagaatttttttccgatttctttgtatctgtgttctcttgtctttcactgatatatatatatatatatatatatatattwtttttttttttttttttttttgcgatggagtctcaatctgttgcccaggctggagtgcagtggcatgatgttggttcactacagcctctgcatcctgggt

SEQ ID NO: 182234 - DNA, 201 bp, Homo sapiens
tgtttatcatcctggtgttattacccagatacaatatgatgtgggactacaaataatgagggctattcacagaattgacttgagataatttgagagtatcmagttattaaatatattacaagaattttggatctggaagggacctatgaggaatatctagttcaaattctcaaattttagggaagagaggccaagagaaaa

SEQ ID NO: 182235 - DNA, 201 bp, Homo sapiens
tttttttccgatttctttgtatctgtgttctcttgtctttcactgatatatatatatatatatatatatatattttttttttttttttttttttttgcgakggagtctcaatctgttgcccaggctggagtgcagtggcatgatgttggttcactacagcctctgcatcctgggttcaagtgattctcatgtctcagcctc

SEQ ID NO: 182236 - DNA, 201 bp, Homo sapiens
tattagccctatattgagatcactctgggttgcgaaacaattaagaacattgggatctttgggaggaaactatttgggaattgtgtttggaaatggataayggcaaagccctccaagcctcaggccatccagcaacgtacacgttttttaacttgaagagaaaatggaggaacattttgatgaatcagaaatgtctgcctc

SEQ ID NO: 182237 - DNA, 201 bp, Homo sapiens
ggagtggtgagagtgggcatcttagtcttgtcccagttctcagagggaatgctttcaactttacctcattcaatattatgttggctgtgggtctgtcatakatggcttttattacattgaggtatgtcccttttatgtcaattttgctgagagtcttaatcataaagcttgctggattttgtcgaatgctttttctgcatc

SEQ ID NO: 182238 - DNA, 201 bp, Homo sapiens
aaacacttcaccatctgacccctgctttacccttctatcctaacctctcaccacttctcacccctcaaactgtaagctctaaccaaatttccatgcccgtrgctccattaacattccatgttgttttttgcccctggacttgcctaagttcttccctcttcttgacatgctttttgaggaaagaaaccctctgtctgccct

SEQ ID NO: 182239 - DNA, 201 bp, Homo sapiens
ttggccatcagcatttgactattctttacttatgcaaatttctgtagctggcttgaactcctcctccaaaaaggccttttcttttctaccacatggccagscttcaaatttttcaaactcgtacactttgcttcccttttaaatataagtttcagtttcaggtcatttctttgctcacgcatatgaacataggttgttaga

SEQ ID NO: 182240 - DNA, 201 bp, Homo sapiens
cacctgtgtgatggcagtagcagtagtagaacaaccctctggctccaaagcattctgcattgttgttggtggctgtattaggctgggtgagttggtccccygtgccacaggtgttgcatgcaggtggaagctagctgtggtagtagtagtacgttgggtgggctcatctttaggtctctgggagagtattcaggtgccaat

SEQ ID NO: 182241 - DNA, 201 bp, Homo sapiens
aattttgctgagagtcttaatcataaagcttgctggattttgtcgaatgctttttctgcatctattgagatgatcatgtgatttttgttttctattctgtktatgtggtgtatcacatttatagacttgcctatgttaaaccatccctgcatccctggtgtgaaacccacttgatcatggtagattaactttttgatatat

SEQ ID NO: 182242 - DNA, 201 bp, Homo sapiens
gttcaacaagtctctaggaagttacaaattttcctcatcttcctgtctttttctcagccctccaaattggtccaacctctacctgttacccagttccaaaygcaaattcacattttcaggtatctttataccaatgcccctgtccttgttaccaattttccatattagttcattcttgcactgctataaagaaatacctga

SEQ ID NO: 182243 - DNA, 201 bp, Homo sapiens
tgcatgcaggtggaagctagctgtggtagtagtagtacgttgggtgggctcatctttaggtctctgggagagtattcaggtgccaatggtggtagattggwcacagccattcttagtaccctggattgtatgcttaggcataggggtggagtctggcagggcgggcctatcctcaggcctcctggtggtgtatgcaagtgg

SEQ ID NO: 182244 - DNA, 201 bp, Homo sapiens
gtggacatatgtttcatttctgttgggtaaatacctatgattggagtgtctggtttgccatttatttatttattgagacagggtctcaccctgttgctcakcctggagtgtagtggggcgatctcagctcaactcaacctctgcctcccaggttcaagagattctcccacttcagtctccggagtagctgggactacaggc

SEQ ID NO: 182245 - DNA, 201 bp, Homo sapiens
aaaccattgcagggttttaggaagagggtaaggtgatcatatctgtattttagaaagatctccctggctatattacaaagtctgcatttcagggttttagyagtagggaggtgatttggtttagagtagtggcaatgagaatggttagaattagatagattcaagatctcagaatcagtaggacttggtcattgattgggc

SEQ ID NO: 182246 - DNA, 201 bp, Homo sapiens
tccatatttgttcaaatcaattaatactcaagaaaaagaacattcaaggcaattttatattttttccatattcaaatcaattaatattcaagaaaaagaayattcaaggcaagaaaattaaaggcatttaagggaattactctgtggctaagagtcattaaataaaatgtcacatatagtctcaactaaattgaattgcat

SEQ ID NO: 182247 - DNA, 201 bp, Homo sapiens
tcacgggctgtgcagctgtcattgagggcatatggtagatttcatccttaattgaaatacacaccaaattggctgtgtggattctccagctgagggctcastggacaactggtgtcacagtaaagtgggatattgctggagtgaatgtgaactctatgttagtgcctcaatctgcagaagagcacatcaggaggctgcctt

SEQ ID NO: 182248 - DNA, 201 bp, Homo sapiens
ttctccaattgtacttaacattatttaatacacagagataggtagagatctgctgtctatcaaaataatgccatagtttaggtatgtcatatgaattcccytttataaaggtggagtttttgttaataaaagttctttaaaagtgtattaaaagtgatgatagagactataacatagtcttctattacatgttttaattaa

SEQ ID NO: 182249 - DNA, 201 bp, Homo sapiens
ttcatctgaaagtcatctttctgtttttcaagccaaatttcaaagggcttaagaggcttttctatttgactccctcaatgtagtgtaattcaacagctcaygggctgtgcagctgtcattgagggcatatggtagatttcatccttaattgaaatacacaccaaattggctgtgtggattctccagctgagggctcactgg

SEQ ID NO: 182250 - DNA, 201 bp, Homo sapiens
tcattagagctttgctgatctagcttgagggttttcaggttgtgtgtttgtgtttgtggggtacagtggaaaagccttagaatcacttagccatcaggtaraaatatgcctttgtcctttgctaaagagaatggtgttcctgaattcattttgatctatccatgaagttagcttccagtatgcttcttttctttatgcttt

SEQ ID NO: 182251 - DNA, 201 bp, Homo sapiens
caggactagttgtagctgtgctgttgctgcccttgggcctgaaggtaccctcgacagggagagacatcactttactctccctcccttccccatttcctgcyagagtcctctgttagaagaacctgatgggaagcagagagcaccggagcctgttgatgcacaattatgcattgcttaacaatggggtaatggactgagaaa

SEQ ID NO: 182252 - DNA, 201 bp, Homo sapiens
tctttatgctttttgtgttgtattcatctttgtcatacctaagggcactgagattttcacttatgtttttttctggaagttttatatagttttacctcttmcatttaggtctgcgatccatttcaaatttaattttcgtgtatagtgtgaatgaatgtggaggttcattagtttgcatatggatgtcaaattgttccagca

SEQ ID NO: 182253 - DNA, 201 bp, Homo sapiens
ttcccactacatgtcaaagtgtttgcgaattaactattgtatacataaaaccctttccccaaggcaaatgtgtacactgagatatgtatttggttgactcrgatgatgattcatagaggttctttctttctctttcgtttgcatctatatctgtatgatcagatccatattaggaaaattagcaagtattctcatagttat

SEQ ID NO: 182254 - DNA, 201 bp, Homo sapiens
aaaattttatattttatttttaaaaataaggaatggctatgaaaatacatttgtttcttatttggattttttgagaggatcatgaagtcatagaattttcytctttttattctgttagcatagttcatttaatcaacagatttctggtgctgattaccttcatattcctggaatgaactctgcttggtcacataggttatt

SEQ ID NO: 182255 - DNA, 201 bp, Homo sapiens
ttttagtagagatggggtttcactgtgttagccaggatggtctcgatctcccgaccttgtgatctgcccgcctcggcctcccaaagtgctggaattacacygcgcccggcccaagataatgtatttctaaaaactttcaagtgacgctgatgctgctgttctgaggaccacactttgagtagaaaaacttagactagacag

SEQ ID NO: 182256 - DNA, 201 bp, Homo sapiens
tagagatggggtttcactgtgttagccaggatggtctcgatctcccgaccttgtgatctgcccgcctcggcctcccaaagtgctggaattacactgcgccyggcccaagataatgtatttctaaaaactttcaagtgacgctgatgctgctgttctgaggaccacactttgagtagaaaaacttagactagacagaaaaca

SEQ ID NO: 182257 - DNA, 201 bp, Homo sapiens
taggcttttaaaatcctaacagtgacacaatgaagtaggtaattattataatttgtattttgcagagaaggaaacttacatgctttaaccactgtgctatwcacccacatgatgtaatagagcagagagttaaagtatgtaactcaggtcccaggaggccaggaaaagttccccagaggagttgctccttgaatttagttg

SEQ ID NO: 182258 - DNA, 201 bp, Homo sapiens
atttctttccttctactaattttggatttggattgtttttgctagagatgtaccattaggttgtttatatgcaaaatttctacctttttttttagtggctratttattttattttattttattttattattattatttttttgagatggagttctgctcttgttgcccaagctggagtgcaatggtgcgatctcagctcac

SEQ ID NO: 182259 - DNA, 201 bp, Homo sapiens
ttatatacagacataaatcccataaatttaagcatgtgaattagtaaagttgtcatagtaacagttctagtaaagactgttcctcttggatgtcacacttdaacccgctgaattttgtcacctgcctcttacattctcagatgaaggagttattacacagggaggtggtaaaggagcaacagaggcaaagaaatgggatgc

SEQ ID NO: 182260 - DNA, 201 bp, Homo sapiens
cagcacaacatcttaaatgggtgaaactatatttcttaataaccctaggtttttcctgatctcattagaaatgattatatgttccttaaaatttttttaaytgtaaaagcaatatattctattttataagattatggattattttatttaattttaattataattgtaataaaataacattttatttaattttaattataa

SEQ ID NO: 182261 - DNA, 201 bp, Homo sapiens
gtgtctttatagcagcatgatttatagtcctttgggtatatacccagtaatgggatggctgggtgaaatggtatttctagttctagatccctgaggaatcrccacacagacttccacaaggtttgaactagtttacagtcccaccaacagtgtaaaagtgttcctatttctccacatcctctccagcacctgttgtttcct

SEQ ID NO: 182262 - DNA, 201 bp, Homo sapiens
ttttgatttgcattcctctgatggccaatttcatgtgttttttggctgcataaatgtcttcttttgagaagtgtctgttcatgtccttcgcccactttttsatggggttgtttgtttttttcttgtaaatttgtttgagttcattgtagattctggatattagccctttgtcagacgagtaggttgcgaaaattttctccc

SEQ ID NO: 182263 - DNA, 201 bp, Homo sapiens
tttctttcagaatgttgaatattggcccccactctcttctggcttgtagggtttctgccaagagatccactgttagtctgatgggcttccctttgagggtracccgacctttctctctagctgtccttaacattttttccttcatttcaactttggtgaatctgacaattatgtgtcttggagttgctcttctcgaggagt

SEQ ID NO: 182264 - DNA, 201 bp, Homo sapiens
tcatggtcagttttttcctgtatgtaaactttcttgaggtgcttttgttttatatattagcaatgattaaaaaagctttctcttttttctaggagagcatrtagattattgtggatattctgttcttcctatggctgtagaacaagatgtgctaatagctgtagaacctgtgaaaacgtacgctctccaactggccaatac

SEQ ID NO: 182265 - DNA, 201 bp, Homo sapiens
atattggcccccactctcttctggcttgtagggtttctgccaagagatccactgttagtctgatgggcttccctttgagggtaacccgacctttctctctrgctgtccttaacattttttccttcatttcaactttggtgaatctgacaattatgtgtcttggagttgctcttctcgaggagtatctttgtggcgttctct

SEQ ID NO: 182266 - DNA, 201 bp, Homo sapiens
gtcattctccatccagctttgttccattgctggtgaggaactgcgttcctttggaggaggagaggcgctctgctttttagagtttccagtttttctgttcwgttttttccccatctttgtggttttatctacttttggtctttgatgatggtgatgtacagatgggtttttggtgtgtatgtcctttctgtttgttagttt

SEQ ID NO: 182267 - DNA, 201 bp, Homo sapiens
tgtttggaaatggataatggcaaagccctccaagcctcaggccatccagcaacgtacacgttttttaacttgaagagaaaatggaggaacattttgatgartcagaaatgtctgcctcctagaacttatggtcaacttaattgttcattctaatgaaaaggagtttcagttcagatatgcataaattgtgctccattggct

SEQ ID NO: 182268 - DNA, 201 bp, Homo sapiens
aggccatgggcctagctaatttatttattaattatttattatttctttgatttctgtgggcctaatttttgtttaccatcagaagaatgcaagcttttttyttaatagaatctgaggttttttttttttttttttggtttttgtttttttaaccttttgtttctagtttctttttttcttttctttttttttttttttttg

SEQ ID NO: 182269 - DNA, 201 bp, Homo sapiens
agaaatgaatgagaaatgggttatgactactcacagtacaaatcagtttttacctttccaggtggaacttgcagaaatctgtgccaagagtgagcgttacrttggcactgaaggaggaggcatggaccagtctatatcatttcttgcagaagaaggaactgtaggtagcattccaagtaggaaccattcagaaattcctag

SEQ ID NO: 182270 - DNA, 201 bp, Homo sapiens
cttggccttgtagccctgtcggtgcacttttttgggctgggtgggatgtggagccctgtggtagagcagagagctgtcagtactgctagcagggactctcygaagaaagtgcatggtatcagactgctgcttcctccacagctcctgaatgtacttgtatgcagttatcttggcttacctgatggctgttgccagacggaa

SEQ ID NO: 182271 - DNA, 201 bp, Homo sapiens
tagctactctagcaggaatgtagcagtatactattgtagttttaatttgcatttacttaataactaatgttgaacattttttgtgtgcttatttgtcatcyatgtatcttctttggtgaaatgtttttaaatatattttgcctattttttaaactgggttgtttatcttattactgttgagttgtaagagttctttatgct

SEQ ID NO: 182272 - DNA, 201 bp, Homo sapiens
ctcccaaagtgctgggattgcaggtttgagctactgcatccgtcctggtttgcctttgatatggtttggtggtgtccccacccaaatctcatcttgaattktaactcccacaattcccacgtgtcctgggaggaacctggtaggaggtaattgaatcatgggggcaagtctttcccatgctgttcttgtgataatgaataa

SEQ ID NO: 182273 - DNA, 201 bp, Homo sapiens
ttggagcctcaggggccagacttaattgggagggatgtttcccatggtgtgacccaagaagaaaatttgaagctgtggtcagggtaaggagagataggcasatgtatcaagcgtataactcaagaacacacattggaggacagaagaatttctgagaaggtaaatgggcagtgaagtagagagaatgggtcagttggttta

SEQ ID NO: 182274 - DNA, 201 bp, Homo sapiens
tgaattttaactcccacaattcccacgtgtcctgggaggaacctggtaggaggtaattgaatcatgggggcaagtctttcccatgctgttcttgtgataaygaataagtctcatgagatctgatggttttaaaaatgggagtttccctgcacaagctctctttttgcctgacaccattgatataagacgtgacttgctcct

SEQ ID NO: 182275 - DNA, 201 bp, Homo sapiens
tgtaagctctaaccaaatttccatgcccgtagctccattaacattccatgttgttttttgcccctggacttgcctaagttcttccctcttcttgacatgctttttgaggaaagaaaccctctgtctgccctacttttttcatcttttagaactcagtttagatttctctttttcaactgagtggaacctacagtaggctgt

SEQ ID NO: 182276 - DNA, 201 bp, Homo sapiens
agatggaagaaattagtgtcttatttgtttgagggcttagtcttgttgaccttttatcttgaggttgatgagtaagtgttgccttcctaaggagacctcaracatacacaacattgttttcaaagttttatcacgaaattagatatcctctaccagatccataggtgagctgaaacaagtattagacatgtaaaatcagtt

SEQ ID NO: 182277 - DNA, 201 bp, Homo sapiens
aatccaaggtatggataactgggaaagttaggaaattatagtattgaagtgattttggcagtaagatgacaagctcatttctctctctctctctctctctmtctatatatatatatagatagatagatagattcatctatctatcattgaatttgtctggtgtgatagcaagatatctaaatagagatgtaaaacaggtaa

SEQ ID NO: 182278 - DNA, 201 bp, Homo sapiens
ccaaggtatggataactgggaaagttaggaaattatagtattgaagtgattttggcagtaagatgacaagctcatttctctctctctctctctctctatcwatatatatatatagatagatagatagattcatctatctatcattgaatttgtctggtgtgatagcaagatatctaaatagagatgtaaaacaggtaaaga

SEQ ID NO: 182279 - DNA, 201 bp, Homo sapiens
cctttaggtgtgatgtttggttattaatttgagatctttctaatgttttgatgtaggtgttcagtgctataaatttcctcttaacactactttagctgtgycctacaaattctgatatatatttgttttcattagttttacagaattaatttcattgccttaatatccttctttacctaaaagttattcaggagcaagttg

SEQ ID NO: 182280 - DNA, 201 bp, Homo sapiens
tgttttcattagttttacagaattaatttcattgccttaatatccttctttacctaaaagttattcaggagcaagttgtttagttttcatgggattgtatggttttgagagatcttcttggtattgctttctttctttctttctttctttcttttctttctttctttctttctttctttctttctttctttctttctttct

SEQ ID NO: 182281 - DNA, 201 bp, Homo sapiens
tttcattgccttaatatccttctttacctaaaagttattcaggagcaagttgtttagttttcatgggattgtatggttttgagagatcttcttggtattgctttctttctttctttctttctttcttttctttctttctttctttctttctttctttctttctttctttctttctttctttctttcgtgctgtagtctgag

SEQ ID NO: 182282 - DNA, 201 bp, Homo sapiens
ttcattgccttaatatccttctttacctaaaagttattcaggagcaagttgtttagttttcatgggattgtatggttttgagagatcttcttggtattgctttctttctttctttctttctttcttttctttctttctttctttctttctttctttctttctttctttctttctttctttctttcgtgctgtagtctgaga

SEQ ID NO: 182283 - DNA, 201 bp, Homo sapiens
cgacttgtagctgattcgctacgactccaaaagagactgcaccaccccccgtttcctccgaagtggttggtgccttagcaactaaagctggcaactgggamatcgtccggtgctgcaggtctcagccgaagggcgtcggaaactgcgctcgcatcgagcagtttccagcctcctgggtaaaggagcagtctcctcccttgc

SEQ ID NO: 182284 - DNA, 201 bp, Homo sapiens
gggccagacttaattgggagggatgtttcccatggtgtgacccaagaagaaaatttgaagctgtggtcagggtaaggagagataggcacatgtatcaagcrtataactcaagaacacacattggaggacagaagaatttctgagaaggtaaatgggcagtgaagtagagagaatgggtcagttggtttagattctagctta

SEQ ID NO: 182285 - DNA, 201 bp, Homo sapiens
ctccctactgttttgtataatggctgcactaattacattctcaccaacagtgtataagtgtttccttttttctgtgtccttaccagcatctgttttctttwgtcttattagtaatagccattctaacttgggtaagatgatgtctcattgtggttttgatttccattttgctgatgattagtgatggtaagcagttttcat

SEQ ID NO: 182286 - DNA, 201 bp, Homo sapiens
gctacactacaattagtaatggaaatgtaattaaccacttggcacttgtggcttgcctcagtcattgccacactcccagcctgaaaagtttaaaccaagtractccagtgatcacaaatggcctgggtaatccagcttgtcaaaagacttgaacacagcattgatgaagatcactctgctgacatgtttgctcactcattt

SEQ ID NO: 182287 - DNA, 201 bp, Homo sapiens
tcattgccttaatatccttctttacctaaaagttattcaggagcaagttgtttagttttcatgggattgtatggttttgagagatcttcttggtattgctttctttctttctttctttctttcttttctttctttctttctttctttctttctttctttctttctttctttctttctttctttcgtgctgtagtctgagag

SEQ ID NO: 182288 - DNA, 201 bp, Homo sapiens
cattgccttaatatccttctttacctaaaagttattcaggagcaagttgtttagttttcatgggattgtatggttttgagagatcttcttggtattgctttctttctttctttctttctttcttttctttctttctttctttctttctttctttctttctttctttctttctttctttctttcgtgctgtagtctgagagc

SEQ ID NO: 182289 - DNA, 201 bp, Homo sapiens
gttattcaggagcaagttgtttagttttcatgggattgtatggttttgagagatcttcttggtattgctttctttctttctttctttctttcttttctttctttctttctttctttctttctttctttctttctttctttctttctttctttcgtgctgtagtctgagagcgtgattggtatgattttttttttaatttgt

SEQ ID NO: 182290 - DNA, 201 bp, Homo sapiens
ttcaggagcaagttgtttagttttcatgggattgtatggttttgagagatcttcttggtattgctttctttctttctttctttctttcttttctttctttctttctttctttctttctttctttctttctttctttctttctttctttcgtgctgtagtctgagagcgtgattggtatgattttttttttaatttgttgag

SEQ ID NO: 182291 - DNA, 201 bp, Homo sapiens
agagcgtgattggtatgattttttttttaatttgttgagaattactttatggctgggcatgtggtcagtcttataatacgtgccatgtgcagatgagaagratgtatattctgttgttgttgggtggagtattctatagatatctgttaggtccatttggtcaagtgctgagtttaagtccctaatatctttgttagtttt

SEQ ID NO: 182292 - DNA, 201 bp, Homo sapiens
gtataactcaagaacacacattggaggacagaagaatttctgagaaggtaaatgggcagtgaagtagagagaatgggtcagttggtttagattctagcttaaaaaaaaaaaggaatttgttgggagcatttcttttgggagtgtccaaactgctctgggttggggtggcccagctgcttagccacactgtgctggggtaga

SEQ ID NO: 182293 - DNA, 201 bp, Homo sapiens
aatgggtacagcacaccaacatggcacatgtatacatatgtaacaaacctgcacgttgtgcacatgtaccctagagctcaaagtataatacaaataaatamataaataaacaagaaaaatcaagggcaaaaaaaaaattattggttcattagtagaaatgtaaaagtgcttcagaaaaagtaatcatagtttaggggagag

SEQ ID NO: 182294 - DNA, 201 bp, Homo sapiens
ttttattttattttttgagatggagtcttgctttgttgcccagtctagagtgcagtggcatgatctcggctcactacaacctccgcctcctgggttcaagygattctcctgcctcagcctccctagaagctggaattacaggtactcaccaccacgcccagctaatttttgtatttgtagtagtgatgaggtttcgccatg

SEQ ID NO: 182295 - DNA, 201 bp, Homo sapiens
gagacacttcagtgacacctcagttttccccagcatcttccacagtaagagtttgatacgactgcatatgacaaccatttttttttttttttttttttttgagatggagtctcactgtgtcacgcaggctggagtgcagcggtgcaatctcggctcactgcaacctccacctcctgggttcaagcagttctctgcttcagc

SEQ ID NO: 182296 - DNA, 201 bp, Homo sapiens
ttgcctattttttaaactgggttgtttatcttattactgttgagttgtaagagttctttatgctttttgtgttgtattcatctttgtcatacctaagggcrctgagattttcacttatgtttttttctggaagttttatatagttttacctcttacatttaggtctgcgatccatttcaaatttaattttcgtgtatagtg

SEQ ID NO: 182297 - DNA, 201 bp, Homo sapiens
cttttgaaccagggaggcagaggttgcagtgagccgagatcgcaccattgcactccagcctgggcgacagaacaagactctgtctcaaaaaaaaaaaaaawaataaaataaaataaataattccaagaagagaaattacaggcttgattcttttttagtaattacttgaattgacacctttttggtcatagttcttttaag

SEQ ID NO: 182298 - DNA, 201 bp, Homo sapiens
gtcggggttgcagtgagccaagattgcgccactgtactccagcctgggcgacagagtgagagtttgtctcaaaaaagaaaaaaaaagattaataataattscctatcattcaatatccagtctatattcaaaattaccatattaaatgtataacttagaattggaagagcctttaatgatatcactttacagtataaggct

SEQ ID NO: 182299 - DNA, 201 bp, Homo sapiens
gacctcaagtgatccgcccgtctcagcctcccaaattgctgggattacaggcgtgagccaccgtgccacgtctatagtttaatcttctacataaaacatayccatgtgtaaattcctaatgtgtttccattttatgtgattgtaataataaagatcaacatttctatctatatttaccctgtttgggggaggatggtggta

SEQ ID NO: 182300 - DNA, 201 bp, Homo sapiens
tgaggcaggagaatcgcttgaacccagcaggcggaggttgcagtgagccgagatcatgccattgcactcagcctggatgacaaaagcaaaactccgtctcaaaaaaaaaaaaaaaaaaaaaaaaaagaaataaaaaggaaaaaacaaaatatagttttaaattggggcaatttatctgtagtttggtcaggctaatgtaca

SEQ ID NO: 182301 - DNA, 201 bp, Homo sapiens
gtgctgtctaatatagcagccacttgtttctcatcataattgagatatgctgtaattgagatatgctggattttggagacttatttaaaaaagtaaaatgycaataatttaaaatattatatttaaaatgatattttggtgtattagataaaatatattattaaatttaacatttctttttattgttttgaaagtggcttc

SEQ ID NO: 182302 - DNA, 201 bp, Homo sapiens
ttttcctttggatgtatacccagtaatgggattgttgggtcaaatggtaggtctgttttaagttctttgaagaaactccagacactggctaatttacattyccatcaacagtgtataaatgtcccctttttctctgcagcctcatcagcatctgttagtttttgacacattttggtaacagccattctgactagtgtaagg

SEQ ID NO: 182303 - DNA, 201 bp, Homo sapiens
gagacgggagaatcgtttgaacctgggaggtggaggttgtagtgaacagagatcatgccattgcactccagcctgggcaacaaagagcgaaactccatctaaaaaaaaaaaaaaagattctgttcttttctgtatttactgatgtccctaaacattttacattttttttaaaatttaggttatctccctattaaaactatt

SEQ ID NO: 182304 - DNA, 201 bp, Homo sapiens
tacaggtactttgtagaaatacttcgttctgactaatggggctgaggtctcataaaatgaagtctgtcacctgctacattagcgaagggctttcctgactstctgcttttgctgtttttcttttcttttctttcttccttcctttcttttttctttttctttttctttttttttttttttttgagacggagttttgctctt

SEQ ID NO: 182305 - DNA, 201 bp, Homo sapiens
cactggtattacaggtgtgaaccacattgcccagtcttaaaatatattcctaataataattattttagtggctgtgtaataatccctcgttgaatgtaccygtgcaccataattcatgccattattgttatacattcagagtattgcagaaataacactattttaagcaattctgcagtgaatatctttgaaattttattc

SEQ ID NO: 182306 - DNA, 201 bp, Homo sapiens
cttgtattttcatttataggttctaatatttttttcctcactgttttaggaagtttggggctcaagggtcacgacttactggagcaggatggggaggctgyacagtatcaatggtacctgcggacaagctgcccagctttctagcaaatgtgcacaaagcttattaccagaggagtgatggaagcttagcaccggagaagc

SEQ ID NO: 182307 - DNA, 201 bp, Homo sapiens
tttctgaagggcttcttggaaactatttgtatgaaaagacaactaattgagtgagtaaattaacggcttgaatacctagaatacctaagttgctatacacmagcagaaaatcttacagtgatctgagctagactgaattaaaaaggcatctcctacttagcatataggacaatgtatagaacaactttgtgacccaagtgg

SEQ ID NO: 182308 - DNA, 201 bp, Homo sapiens
ctttgccctcccttcccccatgctggagaagcagggcccgggcccggtgcgggaacggggaggaggtaaaccagtcctgtcaccgcactgagagaggctgkaaacggcacatgctctacggggagaggccgcgggcgccccggcccggaccccgaaaacaagacacatcaccaccctcagagttccattccctgcgcctca

SEQ ID NO: 182309 - DNA, 201 bp, Homo sapiens
tcataataaccctatgaagtaggtatttttatctcccttttttagaagaggaatttcagacttgcctagggtcacaaagtagtggaaccacgctaatctgrtttcattaatttattccttcattaaacattccttgagtgcctgctcaacactgagccagagtctataaaatcagagtaaaacagtctttgccttcaggga

SEQ ID NO: 182310 - DNA, 201 bp, Homo sapiens
gtcaggagatcgagatcatcctggctaacacggtgaaaccccatctctattaaaaatacaaaaaattagccgagcgtggcggcatgcgcctgtagtcccarctactcgggaggctgaggcgggagaatggcgtgaacccgggaggcagagcttgcagtgagccgagatcgcaacactgccctccagcctgtgggacagagc

SEQ ID NO: 182311 - DNA, 201 bp, Homo sapiens
tgggtcatacatacgtgtgtgtacgtgtgtgtttgtaacctattttcatctcctagctttgaagctttatgatggaggcctttgttgtcatagtttccagyatttgaacattaagcaaagtcatgttgagcaggaacgtaatgtgtagagtaggatgaaaagtgggctggaagtgaggaagcttggattccgactctcttt

SEQ ID NO: 182312 - DNA, 201 bp, Homo sapiens
ttttttcttcatccatgcagattcttcttttccttttcttgttgtaattagtgtactctttctactgggcttcagcagaaatgcccatatccacactgaactcctctctttgtctcgcatgccagttgatactgctttttaaaagtcttctttctaaatattaattgaaaacaaacacaaaaaccttcttggtgtctgcat

SEQ ID NO: 182313 - DNA, 201 bp, Homo sapiens
tttttcttcatccatgcagattcttcttttccttttcttgttgtaattagtgtactctttctactgggcttcagcagaaatgcccatatccacactgaactcctctctttgtctcgcatgccagttgatactgctttttaaaagtcttctttctaaatattaattgaaaacaaacacaaaaaccttcttggtgtctgcatc

SEQ ID NO: 182314 - DNA, 201 bp, Homo sapiens
tatccagtaaaccccattcagttgcagacaacaattactgcagatgggatataataagtagatgtggaacttgttaattcattaatatactaaatgttgcrtatctgaaaccagaaaacaatatggctaatcacccagagaatctggaagccagaaattatgaatcagaatgttactggtacaagagagtatgatgtggca

SEQ ID NO: 182315 - DNA, 201 bp, Homo sapiens
ttttcttcatccatgcagattcttcttttccttttcttgttgtaattagtgtactctttctactgggcttcagcagaaatgcccatatccacactgaactcctctctttgtctcgcatgccagttgatactgctttttaaaagtcttctttctaaatattaattgaaaacaaacacaaaaaccttcttggtgtctgcatcc

SEQ ID NO: 182316 - DNA, 201 bp, Homo sapiens
agcagttttcctgcctcagcctcccaagtagctgggactacaggtgctcaccaccacgccaggctaatttttgtatttttagtagagacagggtttcactmtgttggccgggctggtttcgaactcctgacctcgtgatctgcctgccttggtctcccaaagtgctgggattacaggcatgagccacagcacttggcctat

SEQ ID NO: 182317 - DNA, 201 bp, Homo sapiens
tccaaattatatcacagttctttctggaacgttgctcatgtagcttcctacatatgtgcaactatcctcctctttttctcctcatacctgcctaccccctytgttcatattcccctctcaaaatctctttctgtttttcttttcttagtgactttcaagatgtccttttaactaggaatagaacctgtcagatatgctaac

SEQ ID NO: 182318 - DNA, 201 bp, Homo sapiens
tgtatatcatatatacatgtacatatatgtatgcacatatatgtatgtacatatatacatgatgtacatgtatatcatgtatacatgtatatatatgtacatatatatatatatatgtgaattcaggactcttagaaccccacagtggcgtccagctttctcgtcttcaatggacttcaagcatactttagctggttaaca

SEQ ID NO: 182319 - DNA, 201 bp, Homo sapiens
taaagtggcgctcagtgtgcctcacctgtcaaaggctttccctcaccatttcccaccagagatccaataaaataaccaattatgtgtgccctgatttagawtccttgattagagatgggttctgatcataaactatgtaaccatcttttaaaggaaaacgttaataggcaactctttgttacaaagattgcctaaaagaaa

SEQ ID NO: 182320 - DNA, 201 bp, Homo sapiens
gtatatcatatatacatgtacatatatgtatgcacatatatgtatgtacatatatacatgatgtacatgtatatcatgtatacatgtatatatatgtacatatatatatatatatgtgaattcaggactcttagaaccccacagtggcgtccagctttctcgtcttcaatggacttcaagcatactttagctggttaacac

SEQ ID NO: 182321 - DNA, 201 bp, Homo sapiens
ttgcttttcatgatttttatattattcatgtaacaaatatttattgttaatatttattctgtgttatccacagaagagatcatagtagataagctctgccrttttcttgtttttcatttgtgcacaaaatgcaattattagcttcaagcaatgttttatttgcaggaatgttttgcagccacttactcattctaggaggga

SEQ ID NO: 182322 - DNA, 201 bp, Homo sapiens
aggcgtggtggcacatgcctgtaatcccagctacttgggaggctgaggcaggagaatggcttgaacccgggaggcagaggttgtggtgagccaagatcacrccattgcactccagcctgggcaacaagaatgaaactttgtctcagaaaaaaaaaaaaaaaaaaggactagttttgtggcctaacatatggtctgtttttg

SEQ ID NO: 182323 - DNA, 201 bp, Homo sapiens
atgaatgaatggtcagcctgctttcttgtggaactcttattctttttccaggatgcctcttcaacctcacaaggcacatgatcctttgagtaaaggcactrgtcaaccatatcatacattttagtaaaacttaattttatttttattatttttatgtaaaaatcaaatagaaattgaagttctaatattttctttctgtgt

SEQ ID NO: 182324 - DNA, 201 bp, Homo sapiens
gggtttcaccatgttggccaggatggtctcaatctcttgacctcatgatccgcccaccttggcctcccaaagtgctgggattacaggtgtgagccactgcrcctggtctgttatcctgaattttgttgagcttcctcaaaacagttattttgaattctctgtataaaaggtcacttgtccctgccactctgggaatggcca

SEQ ID NO: 182325 - DNA, 201 bp, Homo sapiens
ttcccctcacctagccttaaacaactactgctctgttttctgtatttatagatttagtcactttgggcatttcaaatgaatggaatcatataaaatgtgtstttttttggtgactggcttcttccatgtggcataatgttctgaaggttcatgtatcagtacatcatttaacatgtatcagtatatcattcctttttatgg

SEQ ID NO: 182326 - DNA, 201 bp, Homo sapiens
gtcagaatttattcaaacattctcctatgtaagagtgtttagattgtttccagtattttgcgattataaactattctgcaatgaatattatatatatatgwatatatatatatatatatatatatatatagttggaggtgtatcttcagggcaaattcttagatagtggattgctaggtaaaaattaatgactatgtattt

SEQ ID NO: 182327 - DNA, 201 bp, Homo sapiens
atcagtccttttattaaagtccatttcattcacaacagtcatagctttgtttctcaagttctgttactaatactgctgttcttttttctttgtttctttcttttttttttttttttttaagattttaagtcaaaagagcattcagagcaccagagtcagcaatttgtgctgcaatactttggccaattccccatttaacag

SEQ ID NO: 182328 - DNA, 201 bp, Homo sapiens
tcaccttaatttcacccttctctacctatagctttgaagtactttcagcatttctctctagatatattacaatgaactgctattagatctctttatttctrcaatccgaattccacacactacccagtgagctttttcaaatgcaaaattgatgatttacttcatttttaaacatctgttcacatccattgcctgtatgtt

SEQ ID NO: 182329 - DNA, 201 bp, Homo sapiens
catttgctttatcattctctatctctgttttaattttttttaatttttattttttatgggtacataatatagatgtatatatttatggggtacatgagatrttttgatacaggcatacaatgtataataatcccatcagggtaaatagggtatgcatcacctcaagcatttatcatttctttgtgttataaactttccaat

SEQ ID NO: 182330 - DNA, 201 bp, Homo sapiens
aggtctgcaaagtcatttcttatttaaaaaaaagtcttctgtttagtagtattttccctttgttatttttttattttgtacatttgtgctttatcccccayattattaattcattagctaatggcttattttgttaacttttttcctaaaaccgcaggctttgaatttttaggtctgctgtttttctactccccatatcat

SEQ ID NO: 182331 - DNA, 201 bp, Homo sapiens
ataatttctagttctattgcattgagtgttgtttgtattatttctactttatggaatttactaatgtttcattgtaaccaaatatatgatcagtatttgtkaatgttccatgtactcttgagaagttttattgcctattatcagggtaaaatgtttgatatatgtatacatccataaaatttactttatcaagtttattga

SEQ ID NO: 182332 - DNA, 201 bp, Homo sapiens
atatgctactttggcctaagtattattttgagccgaagccaattgacaaccagtagatgcagttatgtcagtcactggagagcgttagcaaatgtattccaaaaaaaaaaaaattgcttaagataataaccacaatcagctcctcattgaggtgggcaacattggatggttatgacaaggtgaggaaagaattgtctagtt

SEQ ID NO: 182333 - DNA, 201 bp, Homo sapiens
ccacaatcagctcctcattgaggtgggcaacattggatggttatgacaaggtgaggaaagaattgtctagtttgaagattcttggtactatatttagtttytaggtgaagaaataaaaaggaaggctgggcatggtggctcatacctgtaatcgcagcactttgggaggccaaggcaggtggatcacctgaggtcaggagt

SEQ ID NO: 182334 - DNA, 201 bp, Homo sapiens
atcattggcagaattcaaaataaagaaaaaaatgaaataaaggggaaaaactgcttttcaaataggtagcattttccacgtaaacttccagatctgtccaygtgactccacaaatggttatgtagttaagcatatagatttggattatttttgcatctatgtagcagcataggtcaatatttggttgtttatatttagaga

SEQ ID NO: 182335 - DNA, 201 bp, Homo sapiens
ggttataggcacctgccactacgcccagctaattttttgtatttttagtagagacagggtttcaccatgttggccaggctggtctcgaactcctgacctcrtgattcacccgccttggcctctcaaagtgttgggattacaggcgtgagccactgcacctgtccacatgtgtctttttggtagaatgatttatattcattt

SEQ ID NO: 182336 - DNA, 201 bp, Homo sapiens
agtattttgactttgcttggctctaattttttcttgagactaaggagtaatgataaagataggtagctttatgtccaaagagtttcctttatggctatttsccattctagtgttttggccttagaagagataagactgtgtggcatctagaagcttgctttatttaaggaacaactcaacttggccataatatgcataagc

SEQ ID NO: 182337 - DNA, 201 bp, Homo sapiens
tgctttcccacccaaagggtggtctccaaatctgttgtagcttttggcaagatttttatatcacaattgaaaacagatgccctttctgccctttcccttgytgtctgagttactaccgttcaagagattgcaagccatggcaatctctcatgcaccttcagaatgcccagcaagagtcctcgttagacattcctattcaga

SEQ ID NO: 182338 - DNA, 201 bp, Homo sapiens
atagtaagaaacagcttctttcatcctttaatgtaataattgctcccaaggattacaagagcttatagacagctggaacatccagctataatgttagctgracagggaagaaagttgttatggataaagcttcagattttcttggattttttggtatctgtataacagagacctgatgagttgccagcacataacaagcca

SEQ ID NO: 182339 - DNA, 201 bp, Homo sapiens
atgaacatttagatttcagaatttgtgccatgatttcatgactagattcagtaattatttaagattcacattggagaaaatcagtgttctgaagactatgmcgtatatcccgctttgaagttttggatttttcttgaataggataggccattaacaatattggaggaaaatatcatctagtgttatattcttaaattgaat

SEQ ID NO: 182340 - DNA, 201 bp, Homo sapiens
tcgcaaaggatatgatttcatcctttttatggctgcatagtattccctggtgtatgtataccacagtttctttatccagcccaccattgatgggcacctgsgttgattccatgtgtttgctatggtaaatagtgcttcaatgaacatatgagtgcatgtgtctttttttttttagaataatttattttcctatgggtatat

SEQ ID NO: 182341 - DNA, 201 bp, Homo sapiens
tgatgtaatagagcagagagttaaagtatgtaactcaggtcccaggaggccaggaaaagttccccagaggagttgctccttgaatttagttgtagtgaaaragcaagtagaaaatgagaagggtttagaattctggtctgttttctcctgttactatatccccagaagcacatttatttggaagcatatatatatatatat

SEQ ID NO: 182342 - DNA, 201 bp, Homo sapiens
aggaggcagacagatagttgtattgctggtactgaaccattcacgtatatttgcttactcagtaccatccgtgtcaatttgcaagctttagccagatgtarttggttaaatagattctcccctgttgcccccttgattaaagctccttggcctgtaagatgtcaatatcctattaacttttaacttcactatagcgcttct

SEQ ID NO: 182343 - DNA, 201 bp, Homo sapiens
ctaatgttctttatagcaaaatacagcatacgttggtggatacatcccaagacccctcagtagatgcctgaaaccacagatagtaccgaatcctatatatrctatttgcttttttcctatatataaatacctatgataaagtttaatttataaattaggcatagcaagagattaacaataataactagaaataaaatagaa

SEQ ID NO: 182344 - DNA, 201 bp, Homo sapiens
ttaaatacttaaatgtggaattttccacttataacgtcatgtctgtgcttaaaaagcttcaaattttggaatgatttggattttgaaattttgaattaggratgctcaacctgtaattatatactatggtacattttatgtttttctttatctaccagatatttttcttttctcctttagttttgaaatttctgtggtatt

SEQ ID NO: 182345 - DNA, 201 bp, Homo sapiens
taacccctccctcaggaggctttcagggctgagcatgagccctagcattcagcaaccccacacaaggttcccagcttcttctcttttcagcctcagtgtcwgtgttgcttctctatctactcttggtgttttctgtctaagatttgctcaaagtttattagtttacttaatttttagtctcgttcagtgggagtggtgctt

SEQ ID NO: 182346 - DNA, 201 bp, Homo sapiens
attttaactcccacaattcccacgtgtcctgggaggaacctggtaggaggtaattgaatcatgggggcaagtctttcccatgctgttcttgtgataatgartaagtctcatgagatctgatggttttaaaaatgggagtttccctgcacaagctctctttttgcctgacaccattgatataagacgtgacttgctcctcct

SEQ ID NO: 182347 - DNA, 201 bp, Homo sapiens
cccctgaccttatcagttacttgcataaaaaagcactgtgaagatccctgtcctgttctgttcccttctaattaccagtgtatgcatcccccagtcaagtrccccctgcttgctcaatcgatcatgaccctctcatgtggacccccttagagttgtgatcccttaaaagggacaggaattgctcactcggggagctcggct

SEQ ID NO: 182348 - DNA, 201 bp, Homo sapiens
atagcctgtcttcaggttcactatttatttttcttgatcgattctgctgttgagagactctgagacatttttgagtttgccagttgaatttttcagctgcmgaatttctgtttgaaatttcaaaaactattttaatctctttgttaaatttctctggtagaataatgaatttcttccctgtgttatctttaagtttgttga

SEQ ID NO: 182349 - DNA, 201 bp, Homo sapiens
tcttctcttcagggcagtggattccctctgaatgagagtgggtccaggaactaagtcctggaattgacagcttcaggaatctccttggtgctttacttcgrctgagctggtacccaaattgcaagacagtcttctgtactcttcccacttctttccttaagctaaaggaatctctccccaaactgcacttcctggagttgg

SEQ ID NO: 182350 - DNA, 201 bp, Homo sapiens
acattattcccaatctagtcatcacaatcatcaaagtgggatccgagggattttagggttttggtttttgtaattcttgtattgcctctctgatgtgcaayagctcaggagatatatttttaatgttttattgttcttccagaaaaaggcgcaaacatgaaaagttcactaaacacccttggttcacttacttttctttct

SEQ ID NO: 182351 - DNA, 201 bp, Homo sapiens
gttcctggctgctttatttacctaaggaagcctgggcaatggcgcgcgccctcccccagcctggctgccgccttgcagtttgatcttatactgctgtgctrgcaatcagcgaggctccgtgggcataggaccctctgagccaggtgcaggatataatctcctggtgtgccgttttttaagcccgtcggaaaagcgcagtgt

SEQ ID NO: 182352 - DNA, 201 bp, Homo sapiens
catctattgatctaattatctccagcaaagtcaggtctgatgttttcctatgttactatggcaccttctaagtatcttgtcatagcatattattatgctgkattattattatctgtttatttacctgtgtcacccagtagactgtaaactctgtgacttcaggcattgttgcctctcttcttcaatgccctagcatataaa

SEQ ID NO: 182353 - DNA, 201 bp, Homo sapiens
gttccatttttttttaactgaatggaacaaaatgtttgaaattgtttgaatgtttgaatattctttgggcttctgtgaagataaaatattccaaaagcgcytgtgagtttttaagattcttgctagcaaggaaaaatagcccactcaagccagcttcattaaaaaaggagtgtttgctttaagtatgtgtcctaaaatgcg

SEQ ID NO: 182354 - DNA, 201 bp, Homo sapiens
ttgggcagtatgttcattttaacaatattaattttttccaatccatgaacatgggatgtcttttcatttgtttgtgtcctcttcaatttcattcatcagtsttttctagttttccttagagatctttcatctccttggttaaatttattcttaggtatttttttttgtagctattataaacagcatttctggcttaatttc

SEQ ID NO: 182355 - DNA, 201 bp, Homo sapiens
gttttaaatttcaattttacttatttttgctctgatccgaattcttttcctctactaattctgcatttcatttgcttttgcctttctcatttgttaagatkcatctttaggttgcttatttgacatatttctacctttttgatgtaggtgtttattgttttaaatgtgcttttttgtactgctctttctgtatcatggaga

SEQ ID NO: 182356 - DNA, 201 bp, Homo sapiens
caatattaattttttccaatccatgaacatgggatgtcttttcatttgtttgtgtcctcttcaatttcattcatcagtgttttctagttttccttagagawctttcatctccttggttaaatttattcttaggtatttttttttgtagctattataaacagcatttctggcttaatttctttctcagctagttcattattg

SEQ ID NO: 182357 - DNA, 201 bp, Homo sapiens
cttctcagaagaagacatttatgcggccaaaaaacgtgaaaaaaagtgcatcatcactggtcattagagaaatgcaaatcaaaaccacaatgagataccayctcacaccagttagaaaggcggttattaaaaagtcaggaagcaatagatgctggagaggatgtggagaaataggaatgcttttacactgttgttgggaat

SEQ ID NO: 182358 - DNA, 201 bp, Homo sapiens
tgttttcatggagcttacattctcgtggggaaagagagaaatgacaattaaaaataatttgaatggtagtgataagtgctatggaaaaaaatgagaaggamtagagactacaggtttgggtgggtactctttctgtggagtggttgaagaaggtcactctgacgaagagatctttgagcagaggcctgaaggaggtgaata

SEQ ID NO: 182359 - DNA, 201 bp, Homo sapiens
gagatccaataaaataaccaattatgtgtgccctgatttagattccttgattagagatgggttctgatcataaactatgtaaccatcttttaaaggaaaaygttaataggcaactctttgttacaaagattgcctaaaagaaaaactaattttaactgtttacaattatccatttttatattctttctcttttatttgaaa

SEQ ID NO: 182360 - DNA, 201 bp, Homo sapiens
ttgacctgctgtcctcagagcttaaagtggcgctcagtgtgcctcacctgtcaaaggctttccctcaccatttcccaccagagatccaataaaataaccarttatgtgtgccctgatttagattccttgattagagatgggttctgatcataaactatgtaaccatcttttaaaggaaaacgttaataggcaactctttgt

SEQ ID NO: 182361 - DNA, 201 bp, Homo sapiens
tggttttgaggttctcagacttggactgagtcatactactgtcctctctccctccccagcttagagacagcctatcaaggagacttctccttgtgattatwtcagccaattctccctcttttgtatacctatatatcctgttgtttgtgtctcactggagaaccctgattagtacacttattcattattggtccctaagca

SEQ ID NO: 182362 - DNA, 201 bp, Homo sapiens
gaggctgaggcgggagaatggcgtgaacccgggaggcagagcttgcagtgagccgagatcgcaacactgccctccagcctgtgggacagagcaagactccrtctcaggtaaaaaaaaaaaaaaaagaaaaaaaaaaaaagatgtctggaaagtaatgaggcaagaaggaggggttcagaagaatgcagaaattagtgggaa

SEQ ID NO: 182363 - DNA, 201 bp, Homo sapiens
caagaaccacttatctgcaggatacaatttaaacatcttagcatgacatacaaagtcctcattatctggctggcctcagcccattgctttgattttctctyctgttacattctctgttgcttctatttctttatcctcttttcatgctccagtagtcaaagtactttgtttctctaaaagcacctaatggtttataatctc

SEQ ID NO: 182364 - DNA, 201 bp, Homo sapiens
gggctataaagataaagagggcacagtccctgccctccagaagcagtatatggtaactataattagaaaggaacacaaagtaattaaagaagtgtgccgasatgggaggtatggatgcctctgactgttatgtttttggagagttttgtgaaagaggtggcatccaggctgatactgaaagagatgtggggattgcagaat

SEQ ID NO: 182365 - DNA, 201 bp, Homo sapiens
ttatctaccagatatttttcttttctcctttagttttgaaatttctgtggtatttaagaagatttatatttttgttttattggttacctttgtacttatattttaaaacacccttagaaaataggggaatattttcttatttaacttctactatctgctttgtcagtttttttttcccagtggtggctgttgaaaagcact

SEQ ID NO: 182366 - DNA, 201 bp, Homo sapiens
aatgacaactgtactttcccatgttgagtggctatgagtctcatcccatcaaatcttggtgataccaatgagaaccaatttactttctcatatacaaataygaagttgacattttttccaaacatctgggacaatgaatattgctcttgatcaaatttcaagttattttcatttaagaattagacagacatactgtgatct

SEQ ID NO: 182367 - DNA, 201 bp, Homo sapiens
tttggtatcttttaacttttacctcttgcctatttagtaatcaatgagcttattctactttcctctttttctttcctacacttcacctttttttaataggwggactttttctttctagtagtagttttagattaatcttagttttggtggctcccttcttttctctttattttactcaattttcccttcctccccctcttc

SEQ ID NO: 182368 - DNA, 201 bp, Homo sapiens
agaagaatgcagaaattagtgggaataagataaaggatggataaaggatggggaagacagacggtacaagagtagcaggtagtaacatggggaaaggttcraatgaacagtggagctacttgtaagccctagttccttctgaagccttgtgactgtctcactgggtcaggcagagaaggtgttggacatattggaaggggt

SEQ ID NO: 182369 - DNA, 201 bp, Homo sapiens
aagtttgcagaaaatttgctttcattagtccttttttctttctctctctgcctggtcacttccttttgcccatcagcttctattgacttctcagttgtctrgctgtggaggacaggttcatgccaggaataaaggttcctaccttgtttcctagggaaaaaaaatgggcttacctgatatcgcagataaccaggaaattcc

SEQ ID NO: 182370 - DNA, 201 bp, Homo sapiens
ggaaaggttcgaatgaacagtggagctacttgtaagccctagttccttctgaagccttgtgactgtctcactgggtcaggcagagaaggtgttggacataytggaaggggtcctggcaaggcctggtgtgagccactggtgccacagacacaacctctagcaaagtattgctttgtttaaaaaccaccaccacctccacaa

SEQ ID NO: 182371 - DNA, 201 bp, Homo sapiens
taggctgtactgatgagatgcttcagctatgtatccatatagcatctgtgctttgctaccattgtaacacaacttggaaaggtatttgtctgtctactagmctgtctttcccacttgattgcgggctctatgagaggaatgacagtgtctttcctgttcactgttgtatttccagtgcctagtacagcgcctggaggtcaa

SEQ ID NO: 182372 - DNA, 201 bp, Homo sapiens
cagaaataagggcccgaataaagtcttacaataaattaaactgaatagatgaatgaatgaatagtagtgtgagtattagacgatactaacttaaatgtttyaggagtttagaaaaaggggacaccatgatgggaataatattcgaagaagactccatgatgaagaaagattttttatttttttatttttttttgagaaggg

SEQ ID NO: 182373 - DNA, 201 bp, Homo sapiens
gaattatcaagacatatagtccctgctagaggcaggaggcttgattctaccaggacccctaggaagcatgcagtatgcctcctagaattgtccatttgttwtagcattcattgtgtaagtatatcttaatttgtttgtttaccaataatggacatttagatcattcccagtttttgcctgtatgaataatactgctacaaa

SEQ ID NO: 182374 - DNA, 201 bp, Homo sapiens
actatggtcttcttttctcccttcttcttttttccccctattatagataacttaaagtttggcatttcgtcttctagttatactgaagacaaagtttttgkatacttttatttgttcttgttttgttttttgaggatgtatagagaaagatttaggcagccgcatctaccaggtagtccagtagatgtattttgagtgata

SEQ ID NO: 182375 - DNA, 201 bp, Homo sapiens
tttggctatatcctaaagtgtttcccctatatttctttctagtagttttatagttgtgggtgttatgtttaagtctttaacctatcttggattgaattttrtatatggtgagaaataggggttcaattcattcttctgcatatgggtattgagttttcccagcaccatttattcaagagggtgtttgttcctgaatgtatt

SEQ ID NO: 182376 - DNA, 201 bp, Homo sapiens
cgcctctgatcactggcactgatcctgtctttttctttaattaggtcttccgggctgcagggctccctcaggcagaggctatgacctgcagataggccacrccattcttggactggtcctgtagagcagggttccccaatccctgttactgcttcatggcctgttcagaagtgggccacacagcaggaggtgagtggtggg

SEQ ID NO: 182377 - DNA, 201 bp, Homo sapiens
caccttatctgctatccctccaaaagctttaaccctttatgtttttttttagtagctactttatttacttctattctgatcttcattatttctttccttcyactatttttgggttttgtttcttattgcttttctaattccctgagatgcataattaggttgcttatttgaactctttctttctagatgtaggcattcatt

SEQ ID NO: 182378 - DNA, 201 bp, Homo sapiens
ttgcttgtaggttcagcccattcatgataaatgtgctcagcttttgtttttctaggaaagacttcagttctccttcatttatgaaggatgattttgttgartatagtatccttggctgccagtctttttctatctacactttgaatatatcatcccattttctcagggcctgtatggtttctgctgagaaatccactgttg

SEQ ID NO: 182379 - DNA, 201 bp, Homo sapiens
tagctaggacagacagacaaaaaattaaggaaaaaggtcttttatttgcagaattttgttgttattttagttattctagctagctgattgaaattctcccwtgtataataggtatgatgaaatgcataattaggtaatagtatttcatatgttaatcttcagtcatttgagtaatttgcaaagactatggtactttttctt

SEQ ID NO: 182380 - DNA, 201 bp, Homo sapiens
aatcgttattactcagtgactgtgtttcaaggcctccagattttgacttgcaccctacaataagttaagtgttacacagtattcaaataattaactggaayaatgcaagtgatattaagtactacacatatgtgcatagcctttacctactacatcagttgtgtgcattgaacataacttaaagatgaaaatacaaggata

SEQ ID NO: 182381 - DNA, 201 bp, Homo sapiens
gttgtttcaactattccttatggaatatggctactggacctcctcaccattcttgctccctcttcttagaatgtactcttgtttatcatcgctcccctaaygtaactattcctcccatctgctatgtctcagttttttattctatttgtaccaagtgcctattttctttatgtttaaagtgtctaggaattatacaatcca

SEQ ID NO: 182382 - DNA, 201 bp, Homo sapiens
ggagacagagtgagactctgtctcaaaaaaaaaaaaaagaaaaaagaaaagcacttaaaccctagataatcatgagctgtgtagttccttttgcttcagastagaacatttttaaaatggtcatcgctcacctatatgattttatcatgtgcacaaatgatttagacataactttacagctgcttacctgactttttctcc

SEQ ID NO: 182383 - DNA, 201 bp, Homo sapiens
tgctgggcacatacatgctaagaaaatgtagagtgaaagagttatctttcttggcccggcacggtggctcacacctgtaatcccagcactttgggaggccraagcaggtggatcacctgaggtcaggagttcgagaccagtctaaccaacgtgttgaaaccctgtctctactaaaaatactaaaattagccgggtggtggt

SEQ ID NO: 182384 - DNA, 201 bp, Homo sapiens
atggcacgatctcggctcactgcaatttccacctcccagattcaagcgattctcctgcctcagcctcccaagtagctgggattacaggcgcccatcaccaygcctgggtcgtttttgtatttttagtagtgacagggtttcaccacgttggtcccgctggtttcaaactcctgacctcaaatgatctgcctgccttggcct

SEQ ID NO: 182385 - DNA, 201 bp, Homo sapiens
tcatccttcctcagattttggtcctggctgccaaatccaaatttatattttggaagctgagtgctgctgaagaatattacacaaccgtgtatactggcatytacagaattatgatatccaaccccacttgggctttcaatatcgatcttcagtccatttgctgttgctctcaatagggatttcagatgtttggcattctaa

SEQ ID NO: 182386 - DNA, 201 bp, Homo sapiens; identical to SEQ ID NO: 32223

SEQ ID NO: 182387 - DNA, 201 bp, Homo sapiens
tgtacataaaaggggagaatgggaggcacaaaaaggagtcattgattttatttgctgttccaaaatccaggaaatgttggagtttcttttatcaggcctcwaagcagaagaataattctccgtggttcttggctctaccctctagactcttggttttgtcttctgagtcttcctttttcatcaaagctagagtgtgttttt

SEQ ID NO: 182388 - DNA, 201 bp, Homo sapiens
aaacacaattaaaggtggggccgaggatcaaaatggaatgcttccttaggactggtacagagttactcagaaaaattttctgtgacatggtgtgatgattygactttgcctttttttttttgagacggagtctcgctctgtcgccaggctggagtacagtggcatgatctctgcttactgcaatctctgcctcccaggttc

SEQ ID NO: 182389 - DNA, 201 bp, Homo sapiens; identical to SEQ ID NO: 32226

SEQ ID NO: 182390 - DNA, 201 bp, Homo sapiens
cccgtactttgggaggctgaggtggaaggatcgcttgagcccaggcattcaagaccagcttggggaacatggctaaaccctgtccttacatattctttccttttttttttttttttttttgccgagatggggtctccctatgttgctcgagctggtctcgaactcctgggctcaattaatcttcccatcttggcctcccaa

SEQ ID NO: 182391 - DNA, 201 bp, Homo sapiens
tcaagaccagcttggggaacatggctaaaccctgtccttacatattctttccttttttttttttttttttttgccgagatggggtctccctatgttgctcragctggtctcgaactcctgggctcaattaatcttcccatcttggcctcccaaagtactgggattatagatgtgagccactgtgctcaatgcctgtctctg

SEQ ID NO: 182392 - DNA, 201 bp, Homo sapiens
gattacaggcgcccaccaccttgcccagctaatttttgtgtttttagtagagatggggtttcgccatgttggcaaggctggtctcgaactcctgacctcasgtgatccacctgccttggccttccaaagtgctgggattacaggcgtgagccactttacctggcctatcacctagctttgataacagcattttgccaatct

SEQ ID NO: 182393 - DNA, 201 bp, Homo sapiens
tgaggcaggagaattgcttgaacccaggaggtggaggttgcagtgagccgagatcgtgccattgcactccaacctgggcaacagagcgagactctgtctcaaaaaaaaaaaaaaagcgacagagcgagactccatctaaaaaataaaaattaaaaaaaaagggacaggtgcggtggctcttgcttgtaatcctagcacttt

SEQ ID NO: 182394 - DNA, 201 bp, Homo sapiens
cttgaggcagtttgagaccagcctggtcaatataacgagaccccatccctttgaaaaaaaaaaagaaagaaacgaaaaaatactgaaaaaaaaaaaaaaartcgtgaaaatgttatgttgttgctgatatgtactgtacagttaggcctgtacttaacatgtacagacttttcttgtcattattccctgaacaatatagta

SEQ ID NO: 182395 - DNA, 201 bp, Homo sapiens; identical to SEQ ID NO: 32224

SEQ ID NO: 182396 - DNA, 201 bp, Homo sapiens
taggaccagagagattgcctcagataatccagcaaataactgggtagattttgtttttgttctattatattgtaagggatcttgctttttttctttccccygcccaagacagagtcttgctctgtcgcccaggctggagtgcagtggcacgatgccatctcactgcaacctccgcctcctgggttcaagcaattctgcctt

SEQ ID NO: 182397 - DNA, 201 bp, Homo sapiens
atgccatctcactgcaacctccgcctcctgggttcaagcaattctgccttagcctctctagtagctgggattacaggcgcgtgccaccatgcctggctaatttttttttttttttttttgagatggagttttgctcttgtcgcccaggctggagtgcaatggcatgatctctgctcaccgcaacctctgcctcccaggttc

SEQ ID NO: 182398 - DNA, 201 bp, Homo sapiens; identical to SEQ ID NO: 32225

SEQ ID NO: 182399 - DNA, 201 bp, Homo sapiens
atttctgccatgacactcaagcccattgtcagttataattaactagtctaataggtatccagtttctgatattaattgataatgtgtacttacacgttagygttgaatatcaaaatagtacgttttgcttattaatgtctgtgggcttttttaggttaatttaaaactcttctgattaatacctttgctcaaatatgtgct

SEQ ID NO: 182400 - DNA, 201 bp, Homo sapiens
caggcgttcaccttggtcgtcctgatgttttacctcagactccacctttggaggaaatcagtgagggctcgcctattcctgaccccagtttctcacctctrgttggagagactttgcaaatgctaactacaaggttggtttattggcccctttctccatataatcttatctctcttttcaagtccttggaaacctctataa

SEQ ID NO: 182401 - DNA, 201 bp, Homo sapiens
ctttttaagagagaatctcttatatgtgctgatacaggtatgtttcaggttttatagtcatctgaaagtaatatgtagttgagaaagagggtatgagaacrtaagacttatacttatttttagcttaggatcatcagcagcatttctggcattttcttttcatattttttcttgttccttatctttgcaatagcataacgt

SEQ ID NO: 182402 - DNA, 201 bp, Homo sapiens
ttgggggcaatcttagagggtacctacgacacctggagattgaaacagaagagggcagggtactgggaaatattttatagtattcaagaagctaaatatgrttaattaaaacagtgtgcttctaaatctagtagcttctcagcctcttctttccaaattctaaattgattccaaagtgaaaattagagaagcagtatgaga

SEQ ID NO: 182403 - DNA, 201 bp, Homo sapiens
ctgtttggtgagtttgttacttagacatcaaaaatctcagttactaaaacagcttgattgttcttaggcattaagtttgtgggagatggaactctgttccwtagcactgtatgtcctgggctgtatttaaaataagtcttaattagttcattgccattcctttacatttttactttctccccgtttatcctcccacaatgg

SEQ ID NO: 182404 - DNA, 201 bp, Homo sapiens; identical to SEQ ID NO: 32227

SEQ ID NO: 182405 - DNA, 201 bp, Homo sapiens
aggaataatttggcattaaactaaggctgagatgtattaaaattgagccagtgtggagaagctggcctaggaccttctctgtagcatttatagccaagcarttaacctatatacccacccttgggtaataggttctcctctcttatagtacgtgccacacttccaagtgtagactgatgataatgaagacattggaataat

SEQ ID NO: 182406 - DNA, 201 bp, Homo sapiens
ctaccttgtgactgtcgcccaggttggagcgcaatggtgtgatcttggctcactgcaacctctgcctcttgggctcaggtcatcctcccacctcagccttytgagtagctgggactacaggcttgcgccaccacacctggctaaatttttgtatttttagtggagaccagttttcaccatgttgcccaggctggtctcgaa

SEQ ID NO: 182407 - DNA, 201 bp, Homo sapiens
tttgatattcaaggaggggtcctggaaccagtcccccacagatattgagggatgactatactctgaaccaataccttttgtttttctgaggtcttaataaratgtttcacagtcatatgtttgccttcatctttagaccacattttcttggcagtgctctggagcttatccttgctcaaaagccttttttttttttttttt

SEQ ID NO: 182408 - DNA, 201 bp, Homo sapiens
ttattataagcatcaagagaaaaccaggtggcaccttcaggactttgcttggaaatctccgtagctagattgtccaattcattaggcacatattctacttytcacataatcacaaatcacattgttgctaaactttgtgctgctgccttactaggatctcctttccttcaagttccaataaaatttttctcactttaagcc

SEQ ID NO: 182409 - DNA, 201 bp, Homo sapiens
tgaggcagtttgagaccagcctggtcaatataacgagaccccatccctttgaaaaaaaaaaagaaagaaacgaaaaaatactgaaaaaaaaaaaaaaagtcgtgaaaatgttatgttgttgctgatatgtactgtacagttaggcctgtacttaacatgtacagacttttcttgtcattattccctgaacaatatagtata

SEQ ID NO: 182410 - DNA, 201 bp, Homo sapiens
ccaggttcaagcaattctcctgcctcagcctcctgagtagctgggattacaggcatgcgccaccatgccaagctaattttttattttttagtagagatggrgtttcaccatgttggtcaggctggtcttgaactcctgacctcatgatccgcctgccttggcctcccaaagtgctgggattacaggcgtgagccaccgtgc

SEQ ID NO: 182411 - DNA, 201 bp, Homo sapiens
gtggcactatcttggttcattgcaacttccgcctcccaggttcaagcgattctcctacctcagcctcccgaggagctgggattacaagcgtgcaccatcaygcctggctaatttttgtatttttggtagagacgtggttttgccatgttgctgaggctggtcttgaactcctggcttcagatgatctgcctgcctcaggct

SEQ ID NO: 182412 - DNA, 201 bp, Homo sapiens
acatttttgttttatatccattttcagcattgtcagagaacattgtcctttaggatttcagagtttcaccaaaacttaagtggagttcagctaaacagctragaacagtaaatggttttagggtggttgacacgcacacttcttgaatttctacagggccagccttctagcctttaacaattcaggaaatcataaaccatc

SEQ ID NO: 182413 - DNA, 201 bp, Homo sapiens
ttgaggcagtttgagaccagcctggtcaatataacgagaccccatccctttgaaaaaaaaaaagaaagaaacgaaaaaatactgaaaaaaaaaaaaaaagwcgtgaaaatgttatgttgttgctgatatgtactgtacagttaggcctgtacttaacatgtacagacttttcttgtcattattccctgaacaatatagtat

SEQ ID NO: 182414 - DNA, 201 bp, Homo sapiens
cttcttcttatgtcttgctgtccatgctgtgccattgtctcactaactcatctaagaagggctgtgattatcttaggaggaatgtattcccccactccccscaccatgaggtgactctgagtgtcttcgcaaggtagattctctggatgatagggactggcaagttatggctacctctgtttaaccccacagtgaagggag

SEQ ID NO: 182415 - DNA, 201 bp, Homo sapiens
atgttggtcaggctggtcttgaactcccgacctcaggtgatccgcccgcctcggcctcccaaagtgctgggcttacaggcgtgagccactgcgcccggcctttttttttttttttttgagactgagtttcgctctcgttgcccaggctggagtgcaatggcgcgatcttggctcactgcaacctctgcctcctgggttcaa

SEQ ID NO: 182416 - DNA, 201 bp, Homo sapiens
cagattccatagttgctagtgttgcacaagcatgtgggtatgttgggggatggggcagctgagggttttgacaggaaccgtgttctttgagatggtaattwgaatttcatgaaggtctaggtaaattgaaaattaaaccttgctgtgagcctaactttgctcttgcgtcacacgtaatggccaggcatggtggctcatgcc

SEQ ID NO: 182417 - DNA, 201 bp, Homo sapiens
ctatggatgttcgggtcctaggttactttatgaggacccacaagacatctggaaagaggataaccaggtcattctgggggttacaaaacctgttttttttktttgtttgttttgttttgttttgagacagtttcgctctgtcgtccaggctagagtgcagtggcgcgatctccgctcactgcaagctccgcctcccaggtt

SEQ ID NO: 182418 - DNA, 201 bp, Homo sapiens
tgagaggggattttttacctttcctataaaagtattaggggaccagaacaactcatgctgcattataagcatgaaataggataaagtaaaagtgacagggwatttatttatttatttatttatttatttatttttgagacggagtctcgctctgtcgcccaggctggagtgcagtggggccatctcggctcactgcaagct

SEQ ID NO: 182419 - DNA, 201 bp, Homo sapiens
aggtagagagggaatctttgtttttctgtgctccatacccagcccagagagactgaatgaaacaccgatggtgtttcctagaggaaaccctaagaagcccrtttcccctattgcacctcacttctctgccctttcccatctaaacagagaatttaatttcgacatatgtttatcctgttttgttcatatctcctacaagct

SEQ ID NO: 182420 - DNA, 201 bp, Homo sapiens
cagaaattagagaccagctgggcagcatggtgaaaccgtctctatgaaaaataaaaaattaggcaggtgtagtggtgtgtgcctgtagtcccagctacttsggaggctgaagtaggtggatattttgagcctgggaggttgcagctacagtgagccgagatcacaccactgcactctagcctgggttacagattgataccc

SEQ ID NO: 182421 - DNA, 201 bp, Homo sapiens
aaaattgtgagatcctgaaaaatatttttatttcttccaaggctcagatcatgtttttttccttccattaggtgctgcagagcttcaagataatggattayagcctcttgatgtcaatccataatatagatcatgcacaacgagagcccttaagcagtgaaacacagtactcagttgatactcgaagaccggccccccaaa

SEQ ID NO: 182422 - DNA, 201 bp, Homo sapiens
agggatacatatttgaggtctgagaaccatgaaacttgtttgtaggattagaagcaaaagttgactagagggaaatgtagagttattttaatttaactccytcattttccaaattaggaaactgaggtaaagatgttgcataaaggctgtatgttaccaagattaatctttttttttttttttgagatggagtctcgctct

SEQ ID NO: 182423 - DNA, 201 bp, Homo sapiens
aactttttgtattttttttggtgggggtgtttcaccgtgttagccaggatggtctcgatcttctgacctggtgatctgcctgcctcggcctcccaaggtgytgggattacaggcgtgagccactgcgcctggccgctttttttttttttgaacacacttccttagagctatgtgttcagcagtacttctcaggaggcaggt

SEQ ID NO: 182424 - DNA, 201 bp, Homo sapiens
agggaaatgtagagttattttaatttaactccctcattttccaaattaggaaactgaggtaaagatgttgcataaaggctgtatgttaccaagattaatctttttttttttttttgagatggagtctcgctctgtccctcaggctggagtgcagtggcgtgatctcggctcactgtgacctctgtcttccaggttcaagtg

SEQ ID NO: 182425 - DNA, 201 bp, Homo sapiens
caggctggtcttgaactcctaatcctaacctcgtgatctgcccacctcagccttccaaaatgctggagttacaggcgtgagtcaccacgactagcctgcatttttttttctttcttttttctgagatggagtcttgctctgttgcccaggctgattgatgtgcagtggtgcaatcttagctcactgcaatctctgcctcct

SEQ ID NO: 182426 - DNA, 201 bp, Homo sapiens
accacattggccaggctggtctcgaactcttggcctaaagtggtctgcccacctcagtctcccaaagtgcttggattagaggcgtgagcctccgcccgcgyccaccccaccctgttggccttgagacacactagtcaggcccttccttagaggactgaagtttctgccgccaggcagtcagatcagaatattggttaattt

SEQ ID NO: 182427 - DNA, 201 bp, Homo sapiens
aattgcttgaaccgaggaggtggaggttgcagtgagctgagattgtgccaccgcactccagcctgggcaacaagagcgagactctgtttcaaaaaaataargagtaaaaatactcacttttattttctgtgtcttctttctgaggaccaaagggaaaatatgtgtcccttggagttttcttctgtgatcttttagccactt

SEQ ID NO: 182428 - DNA, 201 bp, Homo sapiens
cccggcgcggtggctcacgcctgtaatctcagcactttgggaggccttggcgggcggatcatttgaggtcagaagttcgagacgagcctggccaacatagwgaaatctcgtccctactaaaaatacaaaaattatccggacagtagtggcgtgcatctgtaatcccagctacttgggaggctgaggcaggataatcccttg

SEQ ID NO: 182429 - DNA, 201 bp, Homo sapiens
tgcacttctgactgtttcctagaagagcgttaggaaaaatttacaccagctaagaaacaaaatttagcttttctctgaaatgtggcttggttttcttttcttttttttttttttttggagatggagtctcactctgtcgcctaggctggagtgcagtggtgcaatcttgggtcactgcaagctccacttcccgctttcaag

SEQ ID NO: 182430 - DNA, 201 bp, Homo sapiens
tctgctctagagaaattttaaccaacctacccaaggttacctacttagtaaatgttttttttttttttttttttttttttttttgagacggagtctcgctytgtcgcccaggctagagtgcagtgctgtgatctcagcttactgcaacctctgcctcctgggttcaagcaattctcgtgccttagcctccagagtagctgt

SEQ ID NO: 182431 - DNA, 201 bp, Homo sapiens
ttagccttttcacttttcagaccaactttgggtgtgtgttggggatactagcaattatttgtatctatgtcttggtaatagttgctaaggtagttgctaartaggctctctctttcccttttgaagtgaagccttctccttccaaaaagtttcggtctggctcatctttctctcggcgagcaggctccagtggcaactcct

SEQ ID NO: 182432 - DNA, 201 bp, Homo sapiens
catgagaatcgcttgaaccggggaggcaaagtttgcagtgagccgagatcatgctgctgtactccattccagcctgggtgacagagtgagacttagtctcaaaaaaaaaaaaaaaaaaaggaatattggttaattttagttacattcgatatcagatgaaggaaatgtttagagggctccagatacactctgggggcagaa

SEQ ID NO: 182433 - DNA, 201 bp, Homo sapiens
tctagagaaattttaaccaacctacccaaggttacctacttagtaaatgttttttttttttttttttttttttttttttgagacggagtctcgctctgtcrcccaggctagagtgcagtgctgtgatctcagcttactgcaacctctgcctcctgggttcaagcaattctcgtgccttagcctccagagtagctgtgacta

SEQ ID NO: 182434 - DNA, 201 bp, Homo sapiens
cttctaagaaggctgtggatgccttaaaagcattatttgacgctggctcccatatctcactgccctctccaaaaaatgtgttaccctaacatagaagtatsttttctcagaattcttcagtatattatgaatcagtgactaccttttctctcccttgaaattttcctgtaacttaatgttcatttccttttgtttcagtaa

SEQ ID NO: 182435 - DNA, 201 bp, Homo sapiens
tgggtgttgtggtgcgtgcctgtaatcccagctactcgggaggctgaggcaggagaatctcttgaacccgggaggtggaggttgcggtgatccgagattgyaccattgccctccagtctgggcgacaagagtgaaactccatctaaaaaaaaagaaacaaaactggaaagtaggccttgtgcggtggctcatgcttctaat

SEQ ID NO: 182436 - DNA, 201 bp, Homo sapiens
atagctctagaaaaaggcaactctaggctgggcacggtggctcacacctgtaatctcagcactttgggaggccgaggtgggtggatcactcgaggtcaggrgtttgagaccagcctggccaaaatggtgaaacgctgcctctactaaaaatacaaaaaattaggccgggcgcggtggctcacgcctgtaatcccagcactt

SEQ ID NO: 182437 - DNA, 201 bp, Homo sapiens
aagggagcggggatgttacttttccttaaaaacagttattattttttctaagtatttcaggccttgcattggagacgagggttaggagaggcggtgtggctttgcctcttgtgtggaatggggaggaaggagagaaagcctgcggtgggttgcggggatgcttttcctcgcgacactagcttctccctcccccgcccttgc

SEQ ID NO: 182438 - DNA, 201 bp, Homo sapiens
aagcggggttgtgagtataaggggtagttagttgagccagccagttctgggattaaatgcacagttccatttgtgatccccggacctttgctctatctcartattaagaattataacccctgtccttagaccacttatagtttcttcatattcttgtgtttagccacttaatttttgtatttgggatcacatagtacatct

SEQ ID NO: 182439 - DNA, 201 bp, Homo sapiens
agggagcggggatgttacttttccttaaaaacagttattattttttctaagtatttcaggccttgcattggagacgagggttaggagaggcggtgtggctttgcctcttgtgtggaatggggaggaaggagagaaagcctgcggtgggttgcggggatgcttttcctcgcgacactagcttctccctcccccgcccttgcg

SEQ ID NO: 182440 - DNA, 201 bp, Homo sapiens
tatagccgccccgcccgccaatcgggagggctgctgggcggtgacgtggcgctgggcccggcgcgccccctgccgggcggagctgggagcgagcgaagggrggagcggggctagctgccgcggcggccgcggccgccaatgggagaggctgcgggaggctaaagtagcgggagcggaggggaacaatggcggcggcacatg

SEQ ID NO: 182441 - DNA, 201 bp, Homo sapiens
gaagaatcacttgaacccaggaggtggaggttgcagtgagccgagattgtaccactgccttccagcctgggcaacagaggaagacgctgtctcaaaaaaaraaaagaaaagaaaaaaaggaataaataattcaaaaattagctgggcatggtggcacacacctgtaatcccagctactggggaggctgaggtgggagaatc

SEQ ID NO: 182442 - DNA, 201 bp, Homo sapiens
ggcaggagaatgacgtgaacccgggaggcagagcttgcagtgagctgagatggcgccactgcactccagcctgggcgacagagcgagactgcatctcaaartaaaataaaataaagtaaaaaccatcagatcttgtgacagttatttactcccagcactttgagaggttgagatgggaggatcacttaagcccaggagttc

SEQ ID NO: 182443 - DNA, 201 bp, Homo sapiens
cggcctcccaaagtgctgggattacaggcgtgggccacggcgcccggccagaaagcttttaaagtagtttctttatgtagctgtactctcagcactattcttttttttttttttgagacggagtctcactctctcacctaggctgcagtgcagtggcacaatctcggctcactacaacctccgcctcccgggttcaagcat

SEQ ID NO: 182444 - DNA, 201 bp, Homo sapiens
catggaatatttgggattttaattttctggataactcagggttaatctgaaatacagtgagtccttacttaatgttgtctttaggttcttggaaactaagygaaatgacacttaaatttcaattttcaattttaaaccaaccataacaaaaccaattttttctccacataaatgttataacaaaatgatgttgaaggaaat

SEQ ID NO: 182445 - DNA, 201 bp, Homo sapiens; identical to SEQ ID NO: 32244

SEQ ID NO: 182446 - DNA, 201 bp, Homo sapiens
cattcacagctgggcgcatgaaagcagagtatgtgcttgagtcagcctaaacatttcaccagtcccaaatccaaatatgttttttcaccagtcctctcttyccagcgtaagtcacaagactggtaaaacagataaaaatccacactctttttagtctaacaagtgagctttgtttcattttttcaaaacttggctaaaata

SEQ ID NO: 182447 - DNA, 201 bp, Homo sapiens
gccgactcttggtctagtttatttgtttcttggcctctgtctctctttcttgctcatattcacagcagcaattttcatagagttccattgatttatttgtyacagttatgtaggtaagattgtggaagaactggatcttttacaactgataaaagctaactcttgtattttcttttactcttttatccaggacattttatt

SEQ ID NO: 182448 - DNA, 201 bp, Homo sapiens
aaagtcatacagatctttgaaagatatgtagtcagacttattgagtaaaaggggttgggcatggtggctcacacctgtaatcccagcactttggaaggccmtggcaaggagattacttgagtccaggagttcaagaccagcctgggcaacatagggagaccccatctctacaaaaaataaaaaattggctggacatggtga

SEQ ID NO: 182449 - DNA, 201 bp, Homo sapiens
tagccctgaaaagtgcttacttcttctttgtctgatgggtcttaaaattttctatccttgcagcttaccctgtgttaccactccactaaagaaaacaaagyattcttttttacaataaaaggttatttttatatgaaactttgaatttcacatttatcaactcatttgattttcaaaactggttttgttggaggtgcaggt

SEQ ID NO: 182450 - DNA, 201 bp, Homo sapiens
gtcctgttttggtaccacatgcccagacttccactgctgaggcagaatgaaaaactaagttaatatcccaaataatggctgggcgcggtaactcacacctrtaatcctagcactttgggaggccaaggtgggtggatcatttgaggtcaggaattcaagaccagcctggccaacatggtgaaaccttgtgtctactaaaat

SEQ ID NO: 182451 - DNA, 201 bp, Homo sapiens
tttttttttttttctttgagagtctcactctgttcccaggctggagtggagtggagtggtgcaatcacagctcactgcagcctctacctccttgggcttarggcatcctcctgccccagcctctcgagtagttgggactgaagggagagccaccatgcctggctaatttttgtattttttgtagagacggggtttcgccat

SEQ ID NO: 182452 - DNA, 201 bp, Homo sapiens
acacacacacacacactatgacacaggaaattaacaggaagacttagaggagttgtcatgggaaggagcatgcaagcggggttgtgagtataaggggtagktagttgagccagccagttctgggattaaatgcacagttccatttgtgatccccggacctttgctctatctcaatattaagaattataacccctgtcctta

SEQ ID NO: 182453 - DNA, 201 bp, Homo sapiens; identical to SEQ ID NO: 32242

SEQ ID NO: 182454 - DNA, 201 bp, Homo sapiens
gtgattactcttataccaaatctaaattccacgggatttatatatatatattccagatttctcaccagttttgttctatctgtcctagtaagcgccatctstcttatcacaggcctgtatcccatttcccactctaacttgctccattctaggctgggagtatgacatgtttagggtctggaggtaagagcagatatcttg

SEQ ID NO: 182455 - DNA, 201 bp, Homo sapiens
ggtgagcccaggaggtcgaggccgcagtgagccgtgtttgtgccactgcactccagcctgggtgacagagcaagactgtctcaaaaaagaatgaaccaacyctgggggttgcatgtggggaagtggcattgaaaagactaactcttctcgtttaactccttgtccgtgatttcccagccatcgctatgtacacacacacac

SEQ ID NO: 182456 - DNA, 201 bp, Homo sapiens
ttagtagagacggggtttcactgtgttggcctggcctctcagcactatttttaggaggtaccttttattacccgttttcttcaaaggagatgaataaatayggtaacaacagtttgatttttattaattctatgaccttttcattaaaacaaccacgtgaccgtaaagcatatccatatttgaacttctaaacatttacaa

SEQ ID NO: 182457 - DNA, 201 bp, Homo sapiens
ggtaacaacagtttgatttttattaattctatgaccttttcattaaaacaaccacgtgaccgtaaagcatatccatatttgaacttctaaacatttacaasgcaactttttaaattaggtcttcgaaatttcatggctctttcagtaagcgatcactgagctttgcagagtaatataaattgctgcttgcacagtatcctc

SEQ ID NO: 182458 - DNA, 201 bp, Homo sapiens
actagaaagtcttttacaaaataatcatcttagatcaacagaagaccaatcttcaatgtcgtcctgcaagatgggttactttaacatctcctcctaaaaamaaaaacaaaataccagttagatttgtgcaactctgacaagcttttaaaggtccactttcatgaattgttttaagtcctcactttattttcttcaataatt

SEQ ID NO: 182459 - DNA, 201 bp, Homo sapiens
gacgatctcttgagtccaggagttcaagacaggagtgagctgtaattgtcaccactgcattccagcctgagtgacagatcaagactctgtctcaaaaaagaaaaaaaaaattcttataatgtatgatagtacatgccaggccatttaataagcaacttgaaggcattgtatttgtcttacagatattctcaataagtatgt

SEQ ID NO: 182460 - DNA, 201 bp, Homo sapiens
taaattttcatttaaagtgcttaaatggctttaccttcccagaaccaatttgatggtatctgctttctaacaatttttttactggctcttcatcagtataygtgataaaacaaaatcctcttctttcatttgtttttgtatccatgggaagttcaatattttcaatctgaaatcgagatgcacactcaacgtcatcccata

SEQ ID NO: 182461 - DNA, 201 bp, Homo sapiens
aggagttcgaggccagcctggccaacatggtgaaagccagtctctactaaaaatacaaaaagtaggccaggcatggtggctcataatcccagcactttggraggccgagacaggtggatcacctgaggtcaggagtttgagaccagcctggtcaacatggtgaaaccccgtctctactaaaaatacaaaaattagccgggc

SEQ ID NO: 182462 - DNA, 201 bp, Homo sapiens
atacttttatgcagtaacacttttgcactaaaatagtaccgtctgctaacatgttgactgtaaatcatttgtttttttgtttgttttttgagtaggagtcycgctttgttacccagggtggagtgcagtggtgcaatcacagctcactgcagcctcagcctcctggggtcaagtaattctcctatctcagcccctccaagt

SEQ ID NO: 182463 - DNA, 201 bp, Homo sapiens
atagatgaggagaggggcatattggatgatcaggaactctaaagtaatctccaacttctaaggctgttctcgaacattcaatattgtttgaaaccttgcaycttttatttccttgagttctctgagaagagtggcttcataactccagtgtcctgctctctgtaggctctcaggaaagttgaatgaataagttggttgtgc

SEQ ID NO: 182464 - DNA, 201 bp, Homo sapiens
ttttttttaaatacttgtcatgtatggacaccattcttttcagcagattatttgagtgatatgtacaataatgtggtatgcatgggggataaagctgtgarcaagacacatttaatccatatcctcaaggacctttggtctggccatctagttctgtagttgggagacttttcctgtaaaggaccagacagtgaatatttt

SEQ ID NO: 182465 - DNA, 201 bp, Homo sapiens
tttgccgactcttggtctagtttatttgtttcttggcctctgtctctctttcttgctcatattcacagcagcaattttcatagagttccattgatttattygttacagttatgtaggtaagattgtggaagaactggatcttttacaactgataaaagctaactcttgtattttcttttactcttttatccaggacatttt

SEQ ID NO: 182466 - DNA, 201 bp, Homo sapiens
atacaaaaaattaggccgggcgcggtggctcacgcctgtaatcccagcactttgggaggccgaggcgggcggatcacgaggtcaggagatcgagaccatcycggctaaaacggtgaaaccccgtctctactaaaaatacaaaaaattagccgggcgtagtggccggcgcctgtagtcccagctacttgggaggctgaggca

SEQ ID NO: 182467 - DNA, 201 bp, Homo sapiens
gggttttatcatgttgtccaggctggtcttaagctcctgagctcagggcagtccacctaccttggcctcccaaagtgctaggattacaggcgtgagccacygtgccaggcctgctgagaaattctttttttttttttttttttgagacggagtcttgctctgtcacccaggctggagtgcagtggcgtgatctcagctcgc

SEQ ID NO: 182468 - DNA, 201 bp, Homo sapiens
aattccagcacttttggaggccaaggtgggcggatcacgaggtcaggagatcgagaccatcctggctaacatggtgaaaccccgtctctactaaaaatacaaaaaaaaaaaattagccggacgtggtggcgggcacctgtagtcccagctactcgggaggctgaggcaggagaatggcttgaacccaggaggcggagctta

SEQ ID NO: 182469 - DNA, 201 bp, Homo sapiens; identical to SEQ ID NO: 32245

SEQ ID NO: 182470 - DNA, 201 bp, Homo sapiens
gtctactagaagcatctctagtaacccaagtaaaatgctatcacaaacaccaatttctaataagtttattacaagaacataaattgatctgtgcatatgayctttaatttatatcccagatttaaaagttcttgttttggtttgtagatttcactattagctataaaaagaaaaagcaagcattaaatcttaaaagaatga

SEQ ID NO: 182471 - DNA, 201 bp, Homo sapiens
cgtggcgctgggcccggcgcgccccctgccgggcggagctgggagcgagcgaagggaggagcggggctagctgccgcggcggccgcggccgccaatgggaraggctgcgggaggctaaagtagcgggagcggaggggaacaatggcggcggcacatgggaaagcctgggcgggacctccatcgcggccctcccggcaagga

SEQ ID NO: 182472 - DNA, 201 bp, Homo sapiens
tagttatacccagtataatcatatccgccatagccactatagttttgatcaccaccataggcactattgtaatttccatatccttgatcataatagttatwaaatccttggttccagttttggccctgacctgaaacaatgcacaatgattgttaggaaacaacttctgacccccaattctaacataaaatgatgcgttct

SEQ ID NO: 182473 - DNA, 201 bp, Homo sapiens
aattcctgagaccatgtggccccatgtggcagccagaacacagaaacttcttgatagctcctactgtggtcttcaggaagcctttttgaagagcaattctrataccacaactgctgaaactatctggcagatggcatggaccactccaaaaagtagcaattctcgttgttagaagtatttaaacaaagcttggtgtattag

SEQ ID NO: 182474 - DNA, 201 bp, Homo sapiens
gaccagcctggccaacatggtgaaaccccatctctactaaaaatgcaaaaatcagttgggcgtggtggcacacacctgtaatcccagctactcaggaggcygaggcaggaaaattgcttgaactcaggaggtggaggttgcagtgagctgagatcgcaccattgtattccaccctgggtgacagagcgagactctgtctca

SEQ ID NO: 182475 - DNA, 201 bp, Homo sapiens
cattacaacagtagagcaaatagatgcttagggataaaacttgccctgcagtgaattagataaaaagcctgaatatggaacggccacttgtagtgtcaagycccatgtggattgtgatggcttaacttggtcatattcccgggttgccagtcacgatgaaaactttgctcagggcagtcaggctaggaagtaggggtgagt

SEQ ID NO: 182476 - DNA, 201 bp, Homo sapiens
gggagacctcaggaagcttctaatcatgatggaaggcaaagccggagcaggcgtctcagatggtgaaagtcaggagcaagagagtggggaggggaggtgcyacacactttaaaacaaccagaactcactattgtgaggacagcatcaaggaggatggtgctaaacaaaccattcacgagaagtctatccccgcgatccagt

SEQ ID NO: 182477 - DNA, 201 bp, Homo sapiens
aggcaaagccggagcaggcgtctcagatggtgaaagtcaggagcaagagagtggggaggggaggtgctacacactttaaaacaaccagaactcactattgygaggacagcatcaaggaggatggtgctaaacaaaccattcacgagaagtctatccccgcgatccagtcacctcccactaggcctcacctccagcactgag

SEQ ID NO: 182478 - DNA, 201 bp, Homo sapiens
tgaggtagaaggatcatttgagcccaggaggtcaaggctgcagtaagccatgatcgtgccactgcagtccagcctggatgacaaagcaagaccctgtctcaaaaaaaaaaaaaaaaaatggtggatagaaagcacctctggcctctgggaggaagctgtcccacctagctgggagggacctcacctaggattcaggagacc

SEQ ID NO: 182479 - DNA, 201 bp, Homo sapiens
ataggtaacttgaccagatactttttaaaaataaatatttaccggccgggcgcagtggctcacgcctgtaattccagcacttttggaggccaaggtgggcrgatcacgaggtcaggagatcgagaccatcctggctaacatggtgaaaccccgtctctactaaaaatacaaaaaaaaaaaattagccggacgtggtggcgg

SEQ ID NO: 182480 - DNA, 201 bp, Homo sapiens; identical to SEQ ID NO: 32243

SEQ ID NO: 182481 - DNA, 201 bp, Homo sapiens
ggatgttacttttccttaaaaacagttattattttttctaagtatttcaggccttgcattggagacgagggttaggagaggcggtgtggctttgcctcttstgtggaatggggaggaaggagagaaagcctgcggtgggttgcggggatgcttttcctcgcgacactagcttctccctcccccgcccttgcgcttggttgg

SEQ ID NO: 182482 - DNA, 201 bp, Homo sapiens
tcattcagtctacggatttaggctttttcatccgcagggatgggctactaggatatgctttgtttataaaggtggtgatgaaggttaaataagatggaatkcaaaagcctttgaaaattacgaagtcctatagaaacactgattataatgcaggaagtgtcagactggaggaaatagaaagtgcttatgaaggaaggattg

SEQ ID NO: 182483 - DNA, 201 bp, Homo sapiens
atttcctgaaacccaccatgctcccagttacgtctaccatggttactcccagtgacttctgctccttattgccctacccagaaatatgttaaaaataagaygcaggatattgttgatctctaagaatttgtggaagcactggaatggcagataagtagttgttgatgggttgataaacaactgcccccctctccccaaact

SEQ ID NO: 182484 - DNA, 201 bp, Homo sapiens
ctgcaaagccaccctcgtccatagtcacaccctgcatgcagcaccccagtgagcctcccagctatgccccatgggctggggcccccactgttgggcttctkcataagatgttttctcaaagaaacagtttcttagcaaaataaaaaaggagagggggttaaaacgactgctttaaggctgggcatggtggctcatgcctgt

SEQ ID NO: 182485 - DNA, 201 bp, Homo sapiens
aactccgtctcaaaaaaaaaaaaaaaaaaaaaaaaaaccagctactgctttagtcaaacccatgtctgacgccctaaaaaacctccaataggcctagcctraacccctagtgttggggaattcactattaatacagtgcctgtaggccctctttgcacgtttgtttggttatttatttattttatttgtttttagatgaag

SEQ ID NO: 182486 - DNA, 201 bp, Homo sapiens
tggttatttatttattttatttgtttttagatgaagtctcaccatgtcacccaggctagagtgcagtggctcaagcacagctcactgcagcctcaaccttycaggctcaagtgatcctcccgcctcaacctgtggagtagctagaagtacaggcacatgctaccacacccagttaattttttaattttttgtagagacggc

SEQ ID NO: 182487 - DNA, 201 bp, Homo sapiens
ttccctttaactattcctcggatgatagttttgagtctcccccaccatgctgcggctcatattcttctgatcatgtttcactcatctccatgtctcccatsgtgggtgacccaagtggctgggctctgactggcacagactagagctgactgacacctgcctctagggtttggccatcctgcaatggtaaattttgtgttg

SEQ ID NO: 182488 - DNA, 201 bp, Homo sapiens
cggcctcccaaagtgctgagattacaggcatgagccaccgtgctcagccataagaccataaattctgtcagctccttccaccttcgaagctggctggcttygtgacttgctttggccaaaagaatgaggcggaacaaattgcgacctttctaggctaaaccttaaggggcttactccctgcgaacactgccaccttgtgga

SEQ ID NO: 182489 - DNA, 201 bp, Homo sapiens
tgaggcaggggaattgcttgaacctgagaggtggaggttgcagtgagctgagatcgcaccactgcactccagcctgggtgacagagtgaaactccatctcaaaaaaaaaaaaaaaaaaagagtttggtccaggtgtggtggctcacacctgtaatcccagcactttgggaggctgaggcgggaggatcacttgaggcctgg

SEQ ID NO: 182490 - DNA, 201 bp, Homo sapiens
agtggctcatgcctgtaaatcccagcactttgggaggccgaggcaggtggatcacaaggtcaggagatcgaaaccatcctggctaacacgttgaaaccccrtctctactaaaaaaaatccaaaaaaaattagccaggcatggtggtgggcacctgtagtcccagctacttgggaagctgaggcaggacaatggcatgaacc

SEQ ID NO: 182491 - DNA, 201 bp, Homo sapiens
acacgttgaaaccccgtctctactaaaaaaaatccaaaaaaaattagccaggcatggtggtgggcacctgtagtcccagctacttgggaagctgaggcagracaatggcatgaacctgggaggcggagcttgcagtgagctgagatcacaccactgcaatccagcctgggtaacagagtgagactccgtctaaaaaaaaaa

SEQ ID NO: 182492 - DNA, 201 bp, Homo sapiens
ggttaaaacgactgctttaaggctgggcatggtggctcatgcctgtaatcttagcactttgggaagccaaggcgggcagatcacctgaggtcaggagttcraggccagcctggccaacatggtgaaaccctgtctctactaaaaatacaaaaaattagctgggcatggtggcgggcgcctgtaatcccagctacttgggag

SEQ ID NO: 182493 - DNA, 201 bp, Homo sapiens
agatcgagaccagcctggctaacatggtgaaaccccgtctctactaaaaatacaaaaactagctgggcgtggtggtgcgcgcctgtagtcccagctactckcggggctgaggcaggggaattgcttgaaccagggtggcggaggttgcagtgagccgagatcgcgccactgcactccagcctgggcgacagagtgagactc

SEQ ID NO: 182494 - DNA, 201 bp, Homo sapiens
aggtgatccacctgcctcggcctcccaaagtgctgagattacaggcatgagccaccgtgctcagccataagaccataaattctgtcagctccttccacctkcgaagctggctggctttgtgacttgctttggccaaaagaatgaggcggaacaaattgcgacctttctaggctaaaccttaaggggcttactccctgcgaa

SEQ ID NO: 182495 - DNA, 201 bp, Homo sapiens
attgtggtggtgggtataaatatttgtcaaaatcacccagtggtactccagacatgtgtatttcattttatgtaagttataattcaataaggttgattttyatttttatttttttgacagggtattgctctgtcactcatgctggagtgcagtggcacgaacacgagtcactgcagcttccaactcctagactcaagtgat

SEQ ID NO: 182496 - DNA, 201 bp, Homo sapiens
ttctgtagagatgggggtctcaccatgttgcccaggcttaggttgattttttttttttttgagatggagtcccactctgttgcccaggctggaggcaatgrcgcaatcttggctcactgcaacctccgccttccaggttcaagcgtttctcctgtctcagcctccccattagctgggattacaggcaccctccaccatgcc

SEQ ID NO: 182497 - DNA, 201 bp, Homo sapiens
tgtctcagcctccccattagctgggattacaggcaccctccaccatgcctggctaatttttgtatttttagtacagccggggtttcaccatgttggcctgkctggtctcgaactcctgacctcaagtgatccgcccgccaaggcctcccaaagtgctgggattacaggcgtgagccaccgcgcccagttgcttaggtttat

SEQ ID NO: 182498 - DNA, 201 bp, Homo sapiens
caccggcttgccccgcagccgcagcactctgtacgtgttgaggccgggcacgtcgaagccgggtgacagcccgtggtgatccaaggggtagaagttgaccwgctgcccgtgctgggcctcgagcgagagccacgcgtcgccgagtggcagtgcgcaggggaactcgtgggccacgtgcagctggaagacgcggccgtgcag

SEQ ID NO: 182499 - DNA, 201 bp, Homo sapiens
gcgccggccgcccgctgccgtagaagcccgcggccaggcgcgcgcgcacgtcgggcgtgaggtcaaagcccgtgtctgccatccccagcggctccagcackttctccgagacccagcgctggtagtcgccctgggcggtgtgagctgccaggacgtgggccaggagcgagaaggccagcgtgctgtaatggcatctggaag

SEQ ID NO: 182500 - DNA, 201 bp, Homo sapiens
aaaaataaataattagctggactcagtggcacgtgcctatagtcctagcttcttgggaggctgaggcaggaggattgcttgagcccaggaagccaggttgsagtgggccatattcatgccactgcactccagcatgggaaacagagtgagaccctgccaaaaaaaggagaaggagaaggagaaagaggaggaggaggaagg

SEQ ID NO: 182501 - DNA, 201 bp, Homo sapiens
acctgcctcggcctcccaaagtgctgagattacaggcatgagccaccgtgctcagccataagaccataaattctgtcagctccttccaccttcgaagctgrctggctttgtgacttgctttggccaaaagaatgaggcggaacaaattgcgacctttctaggctaaaccttaaggggcttactccctgcgaacactgccac

SEQ ID NO: 182502 - DNA, 201 bp, Homo sapiens
tggagtttagtgacatcatttccactcaccgtaaactccacctcccgggttcaagcgattctcctgcctcagccccccgagtagctgggattacagtcatrtgccaccacgtgtggctaatttttgtatttttagtagagacagggtttcaccatattgaccaggctggtcttgaactcctgacctcaggtgatccggctg

SEQ ID NO: 182503 - DNA, 201 bp, Homo sapiens
tatagcatcacaaattgactaaaacaggaggaaagatagccatttcaataaatgatgctggaataacaggacacccatgggcaaaaacatgaaccccaacytaaacctcacaccttaatacaaaattaactcaaaatagatcacaaacttaaatctaaaacacataatgatagacttttaaaaaacaccatagaagaaaat

SEQ ID NO: 182504 - DNA, 201 bp, Homo sapiens
ctgtctggagcacacctctccatccccagggtccctcaccacacacatgtcatctgggtgtctgctacttattcacatctcagcctagacaccacttcctycagaaggaggaactgaccctaaggcctgttcctttgtgcccccaaagtcccctaaacttttcttaccctcactcttgccccaggattataaatgtttggt

SEQ ID NO: 182505 - DNA, 201 bp, Homo sapiens
ctaaggcctgttcctttgtgcccccaaagtcccctaaacttttcttaccctcactcttgccccaggattataaatgtttggtatcttcaccgttcctctcrcttccagattagtaatttcttgagagcaggtcagtgtcttcttcctgccatatccatagtgcctcgcacagagtagatgctcaagaaatacatgttggac

SEQ ID NO: 182506 - DNA, 201 bp, Homo sapiens
tgacaataacaagtgttagcaaaaatgtagggcaagcgaactgccacatatgactgttaagaatataaaatggtggctgggtgcagtggctcatgcctgtaaatcccagcactttgggaggccgaggcaggtggatcacaaggtcaggagatcgaaaccatcctggctaacacgttgaaaccccgtctctactaaaaaaaa

SEQ ID NO: 182507 - DNA, 201 bp, Homo sapiens
ccgtttatttccaacctggcaaaatctgtattcaccttgcttatttgctcacggtgtctccctcacaagagtgcaaactccacgaggagcaaaccgggtgwttatcaccttctgggcaaagtaggtgctcaataaatgttaagtgggtaaatggaaaaaacattccattcaaacagaacaggattctgggcccagctctcc

SEQ ID NO: 182508 - DNA, 201 bp, Homo sapiens
gggtgggatggtgggcccctgggtgcactccctccccaccttccgtgagttgagagataacaacaacaaatcagttttttaaaaaagaaaatcagcctagygtggactccagtcctgccttctcttcctgcctgtgtgtcactgggcaggtcactgggcctctctgagtcccagtccttcatctgtaatataagggaaata

SEQ ID NO: 182509 - DNA, 201 bp, Homo sapiens
gagaactgactccaaaggagtagggggaaatcttgggggtgatgaaattttctatatcttgattgtggtggtgggtataaatatttgtcaaaatcacccartggtactccagacatgtgtatttcattttatgtaagttataattcaataaggttgatttttatttttatttttttgacagggtattgctctgtcactcat

SEQ ID NO: 182510 - DNA, 201 bp, Homo sapiens
cactccagcctgggtgacagagtgaaactccatctcaaaaaaaaaaaaaaaaaaagagtttggtccaggtgtggtggctcacacctgtaatcccagcactytgggaggctgaggcgggaggatcacttgaggcctggagtttgagaccagccttggcaccatagcaagaccctatgtctacaaaaaataaataattagctg

SEQ ID NO: 182511 - DNA, 201 bp, Homo sapiens
cctcctgagtagctgggactacaggacaccacacccagctaatttttattttatttctgtagagatgggggtctcaccatgttgcccaggcttaggttgattttttttttttttgagatggagtcccactctgttgcccaggctggaggcaatggcgcaatcttggctcactgcaacctccgccttccaggttcaagcgtt

SEQ ID NO: 182512 - DNA, 201 bp, Homo sapiens
gacttcatcttgacttgttatcatagctttatgattataaaataatttattataataagtaattaatttacatgatttaagattcaaaggaaatcaaagartatacaatggaaaattttcgtcttacccttctccctagctacccatttcccctccctagaggcaacctaatgtttcaatctctttagctcccttccaaag

SEQ ID NO: 182513 - DNA, 201 bp, Homo sapiens
gggatgcttgagaacgtaaccagaagccgaggggctgaggtgggatggatatcctgggccaggctcttttccagccatttcccattcagggacagacctgrgtttggatggtgtctctgcctctcactggccatgtggccttaggcaagtttctagacccatctaagattcagtttcattgtctgcttcaccggttgtatt

SEQ ID NO: 182514 - DNA, 201 bp, Homo sapiens
gtaaaatgatgacatggtgggcacttgagggattcctaccttttggagttgatgggtttatgactgcagatatgaccaaaggcgtctggggcagggcagayagtacctgtcttcacccccttacctgtgtcaatcacagcaaaacccagcacccctccctctaaagaccaacagagggtccttcagaagctttcagagcaa

SEQ ID NO: 182515 - DNA, 201 bp, Homo sapiens
tgtcttcacccccttacctgtgtcaatcacagcaaaacccagcacccctccctctaaagaccaacagagggtccttcagaagctttcagagcaatccctcygcatctgccttgctctgttcctgatcccgccctgcccaattcccgtgccccagcttcatcttccagtgccagcctgctcctgcccccaaccttgtcgact

SEQ ID NO: 182516 - DNA, 201 bp, Homo sapiens
ttcacccccttacctgtgtcaatcacagcaaaacccagcacccctccctctaaagaccaacagagggtccttcagaagctttcagagcaatccctccgcayctgccttgctctgttcctgatcccgccctgcccaattcccgtgccccagcttcatcttccagtgccagcctgctcctgcccccaaccttgtcgacttcat

SEQ ID NO: 182517 - DNA, 201 bp, Homo sapiens
tgtattatacatcccccatgccagacataggtgagtacatctgtaagagaatttcctagaaatgaaattgctgagtcaagggggacatacgttttaaattktgatattaccaattgccctccatacggctgcaccaatttaaattcccagcattgatgggtaagaaggtctgttttaccacaacctcagcaactcagggcg

SEQ ID NO: 182518 - DNA, 201 bp, Homo sapiens
attctcttcttcaaaagacaccgttaagaaaatgaaaaattaagccagacactgggggaaaatacttgcaatgcatatatctaacaaaggactagtatccrtactatataaagagctttcacaattcaataaatgcaattaaaaccacagtgagatatgacttcacaaccatgaaaatggctaaaatgcaaaagtctgaca

SEQ ID NO: 182519 - DNA, 201 bp, Homo sapiens
ttgtctgcttcaccggttgtattaataaaagaatggaacgaggttgtgcatgcaaagtgcctgtctacgttcctaggaggtggtaagtgctcagtacatgytagcacatataactgttggccccatgcctggcacaaagcaggtgcaatttaaatgcaattccctcaggactcctgtaaaacccacagtgtccccaggaac

SEQ ID NO: 182520 - DNA, 201 bp, Homo sapiens
tggcacatggtcagggttggggggatgggcacaaggtagccttttctagtttgggaggtttagggctaaggttctttccagaagggattccttcctgaccytttacccctgtgatgtaacattgggaactcactggacttcagtcctctctggacttcggtctcctcttctataaaactgtcaagacttcataataggccc

SEQ ID NO: 182521 - DNA, 201 bp, Homo sapiens
ccacccatctcggcctcccaaagtgctggggttacaggtgtgagccaccgcgcctggctctaactttgcctttctgagcctctgtctccttctctatagakagggactcatgaggaatgcatgtaagtggttacatggcaatggcgcattccaggtgctcaacagaaggcagcatggttattattgttgcttttatgaaaa

SEQ ID NO: 182522 - DNA, 201 bp, Homo sapiens
cctgcccccaaccttgtcgacttcatcttgacttgttatcatagctttatgattataaaataatttattataataagtaattaatttacatgatttaagaytcaaaggaaatcaaagaatatacaatggaaaattttcgtcttacccttctccctagctacccatttcccctccctagaggcaacctaatgtttcaatctc

SEQ ID NO: 182523 - DNA, 201 bp, Homo sapiens
tctcctgtggtcagtggacttagaccattctggctgcgtggggcaggctcagccacatctgtctgtctgacctgctgtcgtcctgattatgtgtttgggtkgacttcgagccccacttaggacccaggcctaaaccacagcgacaactcattctctcaccagagctgagcatcagggctttgggggcctgagtctgttctg

SEQ ID NO: 182524 - DNA, 201 bp, Homo sapiens
aatataaaaataaaaattagccaggtgtggtggtatatacctgtggtcccagctactcgggagtctgaggtgggaggattgcttgaacctgggaggtcgtygaggctgcagtgagccatgattgcaccactacatgccagcctggatgacagagcaagaccctgtttctctctctctctccatatatatacacacacacac

SEQ ID NO: 182525 - DNA, 201 bp, Homo sapiens
gtaaaagagtgctctctgcacagaggtctgaacaaaggaggttttctctctgtttgccatcggccagaatgaaatctctaatacaatggctgaaagcctcrgaaatgacccactccctaaaactggagaggcagcctaagatcagtacctgtgtatgccatcccccagagtgctaagagcagtacctgtgtgtgccacccc

SEQ ID NO: 182526 - DNA, 201 bp, Homo sapiens
ctccccagtcactgccccctcctccctaaggttaactgctcttctgacgtctctctccattcttctgggagtttccttcccatcctattttaatccactcrtattttaagcatcatggggtttgtggctaaagttagaaatattctatatattccatcttgcagtagaggtggcagtggttgggagaacacatttcctaga

SEQ ID NO: 182527 - DNA, 201 bp, Homo sapiens
tcatcttccattgatttctgaatatgacagatatccatggagaaaactgacctaatatcctagcacagagaatcctaatagtcctggcacacccttacagrtgttcacccaagttttaatctatatgtacaatctattttttctacatatggatatataatctatattagccaaaatgatcagctaagaaaatctcaagag

SEQ ID NO: 182528 - DNA, 201 bp, Homo sapiens
gatgtcactgagataggtccaaatgaaggatagttattgagtgctgaggcaataccttgttttaaaaggaaggggcagagcaagtgactcctatcaaaatsttaccccaacaaagacaactaatgaacaaagggaaagggcaattatgcaggtctgttacaggcagctaggggactccttgctaaccataggatctctttg

SEQ ID NO: 182529 - DNA, 201 bp, Homo sapiens
ctggacaagctcaagctaaggtgagtaccatcttcttaaatgcaaggatcttagatttgagtcaagaagtgtctgctgggaatgatctgatcactccttgytctgttggtcaggtccatgggtttccccaggggcagaaactgtgtcttcctagtatgttgcacaattcctggtgcagagaaacactcagtaaatgtgtgt

SEQ ID NO: 182530 - DNA, 201 bp, Homo sapiens
ttactatatcacaaatttgtttttaaaatatttttggagtgcattttgtataattagtttctttgagtctggcatatattgtattttattcatttagaaamattctgagaaagggaccataaagatttccagactgctaattctcattcctggaatttactgtctttctctgccctccagtgactgcaagaggacctgggt

SEQ ID NO: 182531 - DNA, 201 bp, Homo sapiens
atatgttcactctaccgttgaaggatggctgggagaatgaatgctctgtcccccagtcccaagctcacttactatacctcctttatagcctaggatatgarcatactgctctttttttgtcttggacccaggagcccgagtctatattgcctgcagagatgtactgaagggggagtctgctgccagtgaaatccgagtgga

SEQ ID NO: 182532 - DNA, 201 bp, Homo sapiens
agaagaggcctttggtaacaggtattattactcctagtttatagagcagagctgaggtccaaggaaatggccagctaaagagtatatggcaggtgagggcrtcagaaccggaatgtgggtgctcagctttaaacctagggtgcttccttctgggtgccatttgctgaggtccacatggtgatctgagctacagagctgcca

SEQ ID NO: 182533 - DNA, 201 bp, Homo sapiens
tctgttgaaatatagaagtagaaattttagtgctgaatcttatcatgaactcaatgagcaactagagtctgggagtaaagggaagcccagggtgaaatctytttcccattccatgacagaatccagccctgtctgctctgttgtcccgctttgttcaaggcttttcatcagtgcagtatttattccgtgaagcactggaaa

SEQ ID NO: 182534 - DNA, 201 bp, Homo sapiens
cattctgagaaagggaccataaagatttccagactgctaattctcattcctggaatttactgtctttctctgccctccagtgactgcaagaggacctgggkgtctccaagggcccgaaataacaaaacagctgagcgcctatggaatgtcagctgtgagcttctaggaatccggtgggagtagctggtggaagagctgcag

SEQ ID NO: 182535 - DNA, 201 bp, Homo sapiens
cctcaggtgatccacccacctcagcctcccaaagtcctgggattacaggtgtgagccaccgtgcccagccgtgataggcttttcttcttttatcagcactscatgttccgaatgttttacaggacttttataattagaaaaaaggaacattaaaaacaaaaaacatggggggagcggggagggatagcattaggagatata

SEQ ID NO: 182536 - DNA, 201 bp, Homo sapiens
cccagggtgaaatctctttcccattccatgacagaatccagccctgtctgctctgttgtcccgctttgttcaaggcttttcatcagtgcagtatttattcygtgaagcactggaaatagtcttagtgtctgatgagaggggaatggataagtgataatagctaatgttgcttgagtttttataatgtgtttggtactcagt

SEQ ID NO: 182537 - DNA, 201 bp, Homo sapiens
atcttcaatagcattcaactgaaacatcacccacgttcatcatctctcccttttctacaccatggccttgagtaaagcaagtgagatagcaagggagatasgaatcagaacagctaaccataacagctgactcttatatactgtttagcatatgccagtttcgttttccaccaatgtaataattgaacacttagaacaagt

SEQ ID NO: 182538 - DNA, 201 bp, Homo sapiens
acatctacatgatggccaaccaagccatgggttggtccacggaggtaggcaatccttgagaacttgagtacgaggcagggtggggttcagcgttcaaggcraagactttagggaggagagcatggagcatgttttctgatcctaagcaaatgttatcttccctgactgttctatccttctgcctatacacaagtgtacctg

SEQ ID NO: 182539 - DNA, 201 bp, Homo sapiens
tagtagtagtgatacctgtgactttgtcaccaatagaattataaatatttttatatcacattgcagttgttgcagatatcctagaatgtcacttctgctcsccactactttgaaatcctttgattattagacctggtactagatcttgttatagaatatattaataaataagcctgtgtattactatatcacaaatttgtt

SEQ ID NO: 182540 - DNA, 201 bp, Homo sapiens
ggctgacagaggagaaagtcagggcaggaaaagcaggaaggaagggggtgttgtggataccatggtggaaaaccagaaggaagcatctgcggccgggcagmggtggggctgagttctggccccacctgagctctggggagagttctactgccagcggaaggctgcatggatgactctgtcaagtagctcaacaaacacctt

SEQ ID NO: 182541 - DNA, 201 bp, Homo sapiens
tggctcccacatgctgagcctgggctgtcattccactttcaatcttccctgctggctctcctcacaggccacttcctcctcacctacctgctcctggagcrgctaaaggtgtctgcccctgcacgggtggttaatgtgtcctcggtggctcaccacattggcaagattcccttccacgacctccagagcgagaagcgctac

SEQ ID NO: 182542 - DNA, 201 bp, Homo sapiens
agtgtacctgggtccctagttatgcgatcatggccagagtgggagttggaagccagcaggtgggtcaagggcagaggtacaaagtaatataattaagtatrattgccttacttgtagtctagctctggctcttgctttgaggaatccacaaactcagaccaaactgaccattagagttactcatggcatcaaaattggttc

SEQ ID NO: 182543 - DNA, 201 bp, Homo sapiens
ccaggctggtctcaaactcctgggcttaagcgaccatcccacgttggcctcccaagatgttgggattacaggcatgagccactgggctcagcctaaaaaayttcttatgataaaggaggttaaatggacctaccaaggacagtgttattctaggttctccatagagatctgggttcaagtcccacttctgccaccactatg

SEQ ID NO: 182544 - DNA, 201 bp, Homo sapiens
ggttaagaacctcaaaaagttaccttgtatttgtgtcacatcttatctcttatctcatttgattttcacagtagctttttgcaacagacagaggctttttkttttttttgtttttttttttttgagacttgagtttcgctcttgtcgcccaggctggagtgcagtagtgcgatcttggctcactgcgacctctgcctcctg

SEQ ID NO: 182545 - DNA, 201 bp, Homo sapiens
agtcagggcaggaaaagcaggaaggaagggggtgttgtggataccatggtggaaaaccagaaggaagcatctgcggccgggcagaggtggggctgagttckggccccacctgagctctggggagagttctactgccagcggaaggctgcatggatgactctgtcaagtagctcaacaaacaccttaggtgggagtccttgc

SEQ ID NO: 182546 - DNA, 201 bp, Homo sapiens
aagggaaggaggctgacagaggagaaagtcagggcaggaaaagcaggaaggaagggggtgttgtggataccatggtggaaaaccagaaggaagcatctgcrgccgggcagaggtggggctgagttctggccccacctgagctctggggagagttctactgccagcggaaggctgcatggatgactctgtcaagtagctcaa

SEQ ID NO: 182547 - DNA, 201 bp, Homo sapiens
atgggtgcagcacaccaacatggcacatgtatacatatgtaacaaacctgcacgttgtgcacatgtaccctaaaacttaaagtataataataataaaattaaaaaaaacaaaaaaaaacatgatgagaactgtgttctgctcccaccccctatccctctagtcctcagggcccctgctcattccaaagcaaatctggaggg

SEQ ID NO: 182548 - DNA, 201 bp, Homo sapiens
aagaacacattgtcagcatctgccaaccacaatggaagagcagtgaagagggagaaggggcgtctagaatttagtagcgcctgcgatggaagaggtttgtrcagaggagttcttctggcatttgactctgttctttgtcttactaaaatgtggaatgtcttcagaggaactgagcaagtgagaacacaggtgggtgcccag

SEQ ID NO: 182549 - DNA, 201 bp, Homo sapiens
ctgtcttgggatttgaaggtcagtcatattaaagttctcattgtaatcttccatttcctctgtaatgttgaacttgcagagtaaagtagagaatgaatcaracagggaccttgtcctcatcgtgaaggtggagacaggagcaggcggaagactccatggtgatacaaagaaagggtctgggcgggcatctgagagggggtg

SEQ ID NO: 182550 - DNA, 201 bp, Homo sapiens
gttctctccatttcataggtggggaaactgaggcatggagaatgagcccagagcactgacagccctctgggttggggcacagctgtggtggctgaggatcrtgcccgtgggtgctgtggtttggagatggtcctcctagatccctctctcaccttctttccctctctgccctttttgaacacaaaatgaaaaggctagctt

SEQ ID NO: 182551 - DNA, 201 bp, Homo sapiens
aaataccgtttccttaggattcacaatagtgatgttatctgtagaagttgttggagaagttacaaatcttgcgacctctgtttgagtgaccctggggcagkaagcaacatatagaaaagccagctaagctaagcagttggcaggtcattgtttatgcttattctttagcaaagttcagaccctaccataactctaacctcg

SEQ ID NO: 182552 - DNA, 201 bp, Homo sapiens
attacttgggtactgtggttggattttatagacacatttcagttggtacatatataccatggatgtcatgggttaattgaaaaatatttttaaaacaaaastgggttcttgctattcacatatctgagctgtttcttttctcctatgggtattctcaaggaatgcagctgattttaacaattaccaagtaaggcccacaag

SEQ ID NO: 182553 - DNA, 201 bp, Homo sapiens
aatctctggacaaggcagcgctgagctgttgtggactagtggtgcaggcaagggattatttctgaccaaggatggtgagaaggtttcccatacagactgaygtctggattgagctttgaagaagaaagccaggactggagcagacgacgaggagggaagagtgtgaggttaatgatagtggctttctgtttgatgtcggag

SEQ ID NO: 182554 - DNA, 201 bp, Homo sapiens
catcgtctagtgaggaaggcatgtgtgaatctctggacaaggcagcgctgagctgttgtggactagtggtgcaggcaagggattatttctgaccaaggatrgtgagaaggtttcccatacagactgacgtctggattgagctttgaagaagaaagccaggactggagcagacgacgaggagggaagagtgtgaggttaatg

SEQ ID NO: 182555 - DNA, 201 bp, Homo sapiens
tctttcttaggggaacccagaagaacacacaatcctagaatttgctcagttaattaaaaaccttgttggtaagtaggataagtcatttcctgagtaaaatygactgtgcctgccctatctgttaataacaccttgactagaaagtgggtaattaatacaagctaattgaattggatcaaagcagaactttttatcaggaat

SEQ ID NO: 182556 - DNA, 201 bp, Homo sapiens
acaaaaaagccatttccattttggaatggaaagcagaacgtttccattctgcattgcatgcagggcactggaaatgcaaagtggatgcgtggaccacacargggagcacacctgacctcctcttctctctgttccaggaaggcgtggaagtgcgagtggccagaatcttcaacacctttgggccacgcatgcacatgaacg

SEQ ID NO: 182557 - DNA, 201 bp, Homo sapiens
gctttgctgcacagagcaaaggtaacatgaagccctgctcccaagctgtgccccgtccagcccacagggacctggtgctgagcaagctttatcaacaccgmcctgctgtccgttagagaaaaggcccattaatgatcagacgctgattatttcttggtcaggaagtacgaatgtgatagaagaagctggaaggcattctgt

SEQ ID NO: 182558 - DNA, 201 bp, Homo sapiens
atgcatgatggagccacagagggagactgggcaccctcaggaggaggagagagccagacaccagtgaccatgcagggctttgctgcacagagcaaaggtarcatgaagccctgctcccaagctgtgccccgtccagcccacagggacctggtgctgagcaagctttatcaacaccgccctgctgtccgttagagaaaaggc

SEQ ID NO: 182559 - DNA, 201 bp, Homo sapiens
gccaaatcctaagttgaggtggagaacctgggaaggtacttggtggttaagggtggtttataatttggatagtgacatgcaagggtcattgatattttacmtatctttctggggcttagttttaattcataattttaacagtcaaacagtctggaagtatatggaaagcatcgctcccttccagctaatcctgttcacctt

SEQ ID NO: 182560 - DNA, 201 bp, Homo sapiens; identical to SEQ ID NO: 32254

SEQ ID NO: 182561 - DNA, 201 bp, Homo sapiens
tccctttcttgctttccctttaaacaggtcccgctggaggaaggtttaaacaaagcaattcactacttccgtaaagaactcgagtaccaggcaaataatcrgtacatccccaaaccaaagcctgccagaataaagaaaggacggactcgccacagctgaactcctcacttttaggacacaagactaccattgtacacttga

SEQ ID NO: 182562 - DNA, 201 bp, Homo sapiens
agaaagataaaggagggcaggattggtttctcctcagttttcgttgcaggtttgcatgaagtgggagggaggaggagatttgctcccagtgtttgaggcaygattgtattagatcatcctacatgggtgacaactattggatttccgaactggtcatgtcaagcatagaatttcagacagcaagagacagcaaccaccagc

SEQ ID NO: 182563 - DNA, 201 bp, Homo sapiens
ctttttatcaggaatacttaagtgttttctaatttttaaggaatagaaagataaaggagggcaggattggtttctcctcagttttcgttgcaggtttgcakgaagtgggagggaggaggagatttgctcccagtgtttgaggcacgattgtattagatcatcctacatgggtgacaactattggatttccgaactggtcat

SEQ ID NO: 182564 - DNA, 201 bp, Homo sapiens
gtttggctggttttctaccaaaatattaatgctggtggcctttcagtggcgagatctgggacagctttgactctctttggtatagccctgtgtagtctccygattggtctataatgagcacattatggaatcagaacaaaaaagccatttccattttggaatggaaagcagaacgtttccattctgcattgcatgcagggc

SEQ ID NO: 182565 - DNA, 201 bp, Homo sapiens
gtctaagattgtgtgaagccttttggtggtagtaggtggacgtgtgtgtgcatctcgttctctatttaacaggcgggtcatcattataaggcctgattgcrtttttagaagatggaggttgttcagagggaaaattttccggttgctgatgatgtctgtcatttagccggacagaccaccttcatggcttctcgccttccc

SEQ ID NO: 182566 - DNA, 201 bp, Homo sapiens
tctgtggaatttaattctgattccctgctcccttaccccagtgcatcctaattatttaaaaaacagaatttctatcctaggttcttaattcaatgagaggwccccactatcccaacggaagcgctctctgccctccttaggcttcaccttgcctgcgttcccaccccacccccacccaccagtgtagatgctgaaatgcag

SEQ ID NO: 182567 - DNA, 201 bp, Homo sapiens
cacccttcttccaactcagataaaccccaccccccagtttcaatattaaatcatattgtggatgcaatggaatggcagcttttaatgtctttttataaacstgcacagatgtatgtcatgagtgcactattgtaatgtagcaatactgccatagtgatgaagtgactttttgctagtttctataaaggagaaatcatccaa

SEQ ID NO: 182568 - DNA, 201 bp, Homo sapiens
ttcccaaaggcagtcccttcttcccagctgcctgctttccaccacagggaggtacacaagcaaacaaaacccccgagggcactcttgttcctgtgatgccrcgcttaggagatctccccaagcacctctgttgccgtctccgcctcagtgagtggcgtgatccgtggcgctccgcaggtcattcagcagatgctcatccca

SEQ ID NO: 182569 - DNA, 201 bp, Homo sapiens
gcctggggagctgaaacgattggctgggtgtgaaatcatgggggtgtctaaactgtcttcaggcagctgaatcaattcatggaagccaagtctgaggaccrggtgacatctcttagtctgtctgccaaaatgctaaatctgaaagatacctcaaataccgtttccttaggattcacaatagtgatgttatctgtagaagtt

SEQ ID NO: 182570 - DNA, 201 bp, Homo sapiens
tgaatggaatcattggccacttgcttggtgtctagagagtgggagaattggttggtagtatgggaaaagcacacacacgtggtatcagaagtgttctgtargtagaaacagggtttaagacttgggcatctttattttcaacaattttcccattttccaccatagttcctaagaaaatggacaaggtaaagtagtcaaggt

SEQ ID NO: 182571 - DNA, 201 bp, Homo sapiens
gtccatgtcgcgctgggagccggcgagggtcccggtcggggactccggagcgtgccgcgtggggatacccttggggacagccgaggtcgcgccgcggtgtyggttaagtcggataaaaatactgtggccattggcagagcccccgctccgactgtttgctcctcaggaaaattactcagcgtttaactcttggggagccaa

SEQ ID NO: 182572 - DNA, 201 bp, Homo sapiens
ttataataaatttttgagggatatgatccaaagaaacttacaggcattatccatcttaattgtcccaagtgtgtgtgtttaacagcttgttgagatataaytggcaaactgcacactgcccatatttagaagatacaatttgataagttttcatctattttgacacctgtgaaaccatcgctgcagtcaagctgacagacc

SEQ ID NO: 182573 - DNA, 201 bp, Homo sapiens
cgctgcagagtctgcaatgtggcctccatgacacggaggcagggaaagcctccacaggctttcttctgcaggtctggcccacagtcactggtggggctgtrtactgctggccagtggggcctgggcccagcaaggatgtggaacaggccagcctttgccgtcctccgagaggtccctccagctgggtggctgcacatcttg

SEQ ID NO: 182574 - DNA, 201 bp, Homo sapiens
tagaaattcagactctcatgccctagcccaggcccccagatcaggatctgcctgttgacaggctcttcaggtgatccgtgcgtgctgacgcttgagaaacrctatttgaaacctaaggctggggggaggggcgtgcagcttccctgctgtgcttctgtatatagctttgtgacagaccatcctgaaccacctgtggtggtg

SEQ ID NO: 182575 - DNA, 201 bp, Homo sapiens
gggcaggctcagatcacagctctgtgccatccactccttcacaccctcactgcacagagtgaggcccgtgggccaacgcagcagcagcatcatcagatgcrtgttagaaattcagactctcatgccctagcccaggcccccagatcaggatctgcctgttgacaggctcttcaggtgatccgtgcgtgctgacgcttgaga

SEQ ID NO: 182576 - DNA, 201 bp, Homo sapiens
caccagctgcgtgcttcaggcaggtttgaaattctgtttgcaattctggttatcctggctgccacccactgggggcagtgtagcattgggagcaccccatsaaggtggactcttaggccatgagaaggtcaggtcttccagaccagccctggattgcagacatagagtggatgagcccttggcctcatcttcagacttcct

SEQ ID NO: 182577 - DNA, 201 bp, Homo sapiens
ttttggcctccagcattgttgaagaatttcaagccagtccttctctttctgaagattgtagcatcttcctttcgggtctagttgtcagtgctcgccacacatgtccagccccctgtcccccaggctcttggtaggattgccctcccttcctcactccctgagcttgatggcctcacatggttgttgtgccagtggcctgcc

SEQ ID NO: 182578 - DNA, 201 bp, Homo sapiens
agacccacctgtaaggtaccaattagaacaaaacatgcagcagaccttggccacacaggagggccaccagtgtctcctggagcaggagggaaggttgaagrtgctttctggagaatcagatgctcagatgagtcttggaggtgcaggtgcccaggacactacctgtagacgagctgaagggttggggacagcaagtggttt

SEQ ID NO: 182579 - DNA, 201 bp, Homo sapiens
tagtgtatcttatttccagctctaagaattagtcacataattgttactgaaatacttattgcagagctttctctctgtagtatttttgcagccaaatcctwagttgaggtggagaacctgggaaggtacttggtggttaagggtggtttataatttggatagtgacatgcaagggtcattgatattttacatatctttctg

SEQ ID NO: 182580 - DNA, 201 bp, Homo sapiens
tttggcctccagcattgttgaagaatttcaagccagtccttctctttctgaagattgtagcatcttcctttcgggtctagttgtcagtgctcgccacacatgtccagccccctgtcccccaggctcttggtaggattgccctcccttcctcactccctgagcttgatggcctcacatggttgttgtgccagtggcctgccc

SEQ ID NO: 182581 - DNA, 201 bp, Homo sapiens
aactcatgtgttgtcttcacaccgagcaagcttttgtgccagagacaaaagggagaagatctctggagccgtccatgactgcagttaatcgagaacgtggygggcttcagtctctgtaggcagcttctggtggcaggaggcagaagtcccgagggaggcctttcagaatgtgttttgtttcctttgtcacacagaattcta

SEQ ID NO: 182582 - DNA, 201 bp, Homo sapiens
gggagattcagcaacaggagctgcactgtgaccttgtcagtttatagttctaaatgtgtgatcttttgagatagtttggggagaaaatttaaaactttgtktgttaggatttatgctatctggagacaaataaaatcaaggaggatgaaccaggtggaatagtacgtctggcatatttttaattcattattttaacaactt

SEQ ID NO: 182583 - DNA, 201 bp, Homo sapiens
atatataaaagcccagagcagttttcctataaatgtcccacattctggatttgtctgattgtttccttatgattaagttcagttaaacatttttataacartgcttgctaattggtgtcgttgggaacatgtagtgtctgggctggtcccacttgacagtgttcagtgtgacccctggaaggaatggcctctatgctgctt

SEQ ID NO: 182584 - DNA, 201 bp, Homo sapiens
cgttgccctgaaaactgtgagtaatatacctgttagaagccccccgtgtggtcagctggttcctcctgctcaaggtagcatccctgacgtgaaccctgtcrggaaggtgtccctgtcactccgttggcatgatacgccttctatggagtcaccaggcatgtgccttccaccctggagtccctaacagacagttgcagaatg

SEQ ID NO: 182585 - DNA, 201 bp, Homo sapiens
ctcatcgtgctctgtggctgggagtgtataccacactgggttcacatcaccattcagaaattaaccacacagtggacttaggcgtttagggctttagtctrcaaacagcatgtattgcttattaatttgttctcataaacaatttaaaagatatttgtttttcctgcagtttttgaatctaacttaaatattaagtttttt

SEQ ID NO: 182586 - DNA, 201 bp, Homo sapiens
ggaaggtgtgcatcacaagggttttatagccgcatttcagagcctgccagctggggttgcagagagctgctcttttgcctgcttctggagacaacaaattrgagttctggcttcctggagggctcagagcagggcgaggaccacagggaggtctgataagcaagcgccctttgctttaggcttggagcatgccggttgcta

SEQ ID NO: 182587 - DNA, 201 bp, Homo sapiens
gcctttaaaaaaatcagcaaaaagaaataagcacttattgtaaaaaccatttggtactgttaatagttttccatgtaaaggaaaatttgctccacttggtwatgttgtgagaatcactattgtgatgattaggttggtattgtaatgtaatgcggctgcacatgtctaccagggtaaaaggttactatgccctcaggaggc

SEQ ID NO: 182588 - DNA, 201 bp, Homo sapiens
actggccaagatggtgaggtgggcatgaattggaaatgaaggttaaattacaaactggtgtgaggaaaaggaatgcatgagaactatgccaggaactcctragtgagagcaatcaggtacgtttgttttgttgaggaatcaaaagtgagctgagaatggacggcttatgtaggagttaacagggaagtcataggagagagc

SEQ ID NO: 182589 - DNA, 201 bp, Homo sapiens
agtggacacaagaacctcttagctcacagagacctcccccttaaccctaccttggggtcatttcaggtgcttctcccaaattacctctcctggttcctacrcaacactctaaagttcagggaactctaaaatgttggccatgtgacctatttcttgcaaaccatgtcacctttgcttatgcatgtctttgtaaccagccat

SEQ ID NO: 182590 - DNA, 201 bp, Homo sapiens
tactttttgtcttaaagtcaatagttaaaataagtttgtctcaattgagtaattaattctgtttgtttgctccaaactctgccaacctaaataaatgtctrtatacgcatttcccccactttgagtgtaatacccagatagaacatggggagaagaatcaatctagatgtgttaagatcttccttcttcaaactctgaacg

SEQ ID NO: 182591 - DNA, 201 bp, Homo sapiens
ccactgacctcacttctccacctggggccattcatggctagtgtgatgcctctacagtgtggtaactctccaaggatttgaaggagatggtcctacccccyaagctgcctcctccttggtgcatcagccaaggtcatggtaggacctcttaccctttctgtcactgagtgattttctgagcagttttgttccatctcattt

SEQ ID NO: 182592 - DNA, 201 bp, Homo sapiens
tgcacactccacagtcctgcgcctccgctcctcactgaattggttttctccctgcaccgcgttttcccatatgtagctatattcccattcccgagcggtcytgactctaaaatcatatacacggtagagaaggagccctgaaggtgagtgaggggaagttatgagtcagagacggctccagcgttttcacgacagacagtt

SEQ ID NO: 182593 - DNA, 201 bp, Homo sapiens
ggaaaaacaaacaaacacaaagtaagagtatacaaagaagtaaaacatctgcaaggcacgggtgagtgatgtaatcagtccctccaccttctgaagggccygggtctaagattgtgtgaagccttttggtggtagtaggtggacgtgtgtgtgcatctcgttctctatttaacaggcgggtcatcattataaggcctgatt

SEQ ID NO: 182594 - DNA, 201 bp, Homo sapiens
cgttttcccatatgtagctatattcccattcccgagcggtcttgactctaaaatcatatacacggtagagaaggagccctgaaggtgagtgaggggaagtyatgagtcagagacggctccagcgttttcacgacagacagttcggaggagccacggtgcttatgagcagtcgtgggaaggaaagagtctcagctgtgccac

SEQ ID NO: 182595 - DNA, 201 bp, Homo sapiens
tcattaactgaccaaagttttgatgtttttcacaagcaattttttaggaactgagcgtcttttagtaatgcacgatgtctgggtccatatagttactgtaytaaattaaccattccccaaacccatgattgcctcgaaacaacagtgcagggagtctgaggtctaggtggccatccgcatcggcattttggcatgactctg

SEQ ID NO: 182596 - DNA, 201 bp, Homo sapiens
gtttcacattagcagagtctgagatgatgaggcttcagggactttgccatacttgggcaagggtttcctgacttaaactttttagttattgaggactcagmtgagttcattaactgaccaaagttttgatgtttttcacaagcaattttttaggaactgagcgtcttttagtaatgcacgatgtctgggtccatatagtta

SEQ ID NO: 182597 - DNA, 201 bp, Homo sapiens
tgtgcaaaattcatttaaaatagcctcagagacttttctttttgctaggactaaaatattttgagcattcagtgatgcctgtgctatgtgctgtcccagckcaggacaaaatgcaccctggcccgctctgatggcctggtcactgtcctgtgcctgctttgatggtcgtggctcatgctcctagctgccatcacatgcatc

SEQ ID NO: 182598 - DNA, 201 bp, Homo sapiens
cctcggttatgtgtgcctgcctcgggctgcctcaccagtggcgcccaggcttctccagcccccacaccacatggaatatcaatgagatgttgtgcggtaaraggaaaccagtcaggacccattcttctttctgctctcattatctcaagggcattgtgtgcaaaattcatttaaaatagcctcagagacttttctttttgc

SEQ ID NO: 182599 - DNA, 201 bp, Homo sapiens
atagtgacgcgttcttatcccatcctcctccactcacccagctgtgcccttttctgagggagtcttgctgtcctcggttatgtgtgcctgcctcgggctgyctcaccagtggcgcccaggcttctccagcccccacaccacatggaatatcaatgagatgttgtgcggtaaaaggaaaccagtcaggacccattcttcttt

SEQ ID NO: 182600 - DNA, 201 bp, Homo sapiens
taaattcattcatgagggtggggccctcatagcccaataacttctcattaggcctcacctcccaatactgttgcattgggaattaagtttccagcacatgmttttgggggtacacattcaaacccatagcattctggctgccgtctctagaatttatgtccttcttacatgcaaaatgtatttatttcatcccaatagccc

SEQ ID NO: 182601 - DNA, 201 bp, Homo sapiens
agagtagttaggatagaagcagttgtgtatgccaaagtgcatccaccagtatgtggctattgtaaattctgtgaaagtttctggtatcctgaattgttgtraaacccagttctatattttgaacccacatattttcactcttcattgcaaataccccagtatgcctgtcaatcaggaagtgttattcctgctgtcttaggg

SEQ ID NO: 182602 - DNA, 201 bp, Homo sapiens
tacatgttaaagaaaatatagaaaggtattttacaaagcaaatagaaaattatttttaatctttctataaactgttgaggaagttggctgggcacggtggmtcacacctataatcccagcactttgggaggccaaggagggtggatcatttgagctcaggagtttcagtccagcctgggcaacgcggtgaaacccagtctc

SEQ ID NO: 182603 - DNA, 201 bp, Homo sapiens
caagcacctctgttgccgtctccgcctcagtgagtggcgtgatccgtggcgctccgcaggtcattcagcagatgctcatcccatgctggtatcgcacctcrcatcgtgctgggctccagcagggcaaagggggttcggacaccagtccttctggggagttcacagttgggggcagttggcaaagggctttccctgggcaat

SEQ ID NO: 182604 - DNA, 201 bp, Homo sapiens
tggtccaagtgtgtggcaaagatgtctgtgccgacactgactgcttggtaccctcagataccatctggggtcagggtgggtttgctgattccacacctgtycccacagccctctggcctcccttgggaggagcaccccaggcctgcctggtgagaggctctgccggcatctttggttttgctaatcctccctcccaccccc

SEQ ID NO: 182605 - DNA, 201 bp, Homo sapiens
gaggctgaaggtatagatggtgcagtttagcactgccaggtgagtaactgtcatcttggaagcggagtaccctctggcacacggagctctgctgaagcagwgcagggaggtcagactcggccagtagacgtctctgcagacacgcctgtggtctgggtggtggattgctgctgttgtcatgacgcttataactggaaaccg

SEQ ID NO: 182606 - DNA, 201 bp, Homo sapiens
ccatggccactggggtccctgcccatgcctccaggtctgcctgcctgtaccagccggcctgtgaagaccttctccgacatacttttggcctgctggctgtmgccaggggtgtgcctgtactgggtgtcctcggatggctgagaagcctggacaggtagggtggggaggtgagccacatctggtcaggctgggccgtcacct

SEQ ID NO: 182607 - DNA, 201 bp, Homo sapiens
agcaatccttggtgttctttggctggtagaggcatcactctagtctctgcctccagcagcacatgggtctttgcatgcctttagtattggattaaagtccyaccctaatccagtataaccttatcttaactaaatatgtctgtaggggctctattttcaaataaggtcacattctgaagctctgggacagacataaacttt

SEQ ID NO: 182608 - DNA, 201 bp, Homo sapiens
aagagaaaaatcccagacctcataatttctgcatattaaattgccttcccatccagaaatagcgcctagcttttctttaccaaacttgttcaagccactgsccgcgggctgcatgtggcccaggacaaattcataaactttcttaaaacattatgagttttgttttgctttttttgctcttcagctattgttagcgttata

SEQ ID NO: 182609 - DNA, 201 bp, Homo sapiens
attaaagaccaatacgattgggacattaaacatgttgggtaagttgtcattttcttgtttttttggctgttgctgggaatattttagatgattacaagcayaggtcattgaatcttctactagagtttgatctgagtgtgttccctcgtcccttattgccctgcttgtggtatttggcagttttgcagtgttatttcagtg

SEQ ID NO: 182610 - DNA, 201 bp, Homo sapiens
cacaaccaaagcatggttctgtgagtgttcctctgaaggaggcctgactggctgcaaggtggcacttccttcctgcaaggtggcacttccttcctgcgatrcccttctgtcaatgtgaccttgtctccctttcttgctttccctttaaacaggtcccgctggaggaaggtttaaacaaagcaattcactacttccgtaaag

SEQ ID NO: 182611 - DNA, 201 bp, Homo sapiens
atatctgagctgtttcttttctcctatgggtattctcaaggaatgcagctgattttaacaattaccaagtaaggcccacaagtaaaacaatggtcggccacccccccttccctccttgtgtagataataaagggttgaccctagcttatgtaaattgtatttctgggtggattgagcaagaacactgaggggcttttgcaa

SEQ ID NO: 182612 - DNA, 201 bp, Homo sapiens
tctccatgttggtcaggctggtgtcgaactcccgacctccggtgatctgcccatctcggcctcccaaggtgctgggattacaggcttgagccaccgcgccmggccatgcgtgtgcttttcttctccacctgatccttccccttttccttctcagagctggagcggggagctctgggaaagccaggctgagtgtctggtgct

SEQ ID NO: 182613 - DNA, 201 bp, Homo sapiens
cccagctgaaggctagcacctatgctcagttatgcacctcctatttaaatacatgtagatacagccagaccattgtaacatgggctgtgggggaggggatgggaggttacttactttggatttgaagccaacttagggagtcctgggaagcccttgagttgctgtctttctgcctgagtccacagtgtctacagacgtgga

SEQ ID NO: 182614 - DNA, 201 bp, Homo sapiens
tggagggagccttgtaaagaggggtcggaagctcaagtggctctgcagctccagcagagcacgggacacagccctgttgcctccgcaccttccctcaggcygggcttccttgctcccttgctcctgcctgtcccagcagcgtcttgcttttcttccaggcattcttgttcattcatcctctccttaagggaaccttcttga

SEQ ID NO: 182615 - DNA, 201 bp, Homo sapiens
ctgtccttgggagatatctggggagggaggaatccctgtaccttcattactcctcttgggtcacctcttgcctgtcaggcctgctgttagttggctccacrtctcaggacctgcatacccaagccctcacccctctctcagctgctacgaatgaggcaaggaggcgtttgatgccagttacactgttccagcctagttcgt

SEQ ID NO: 182616 - DNA, 201 bp, Homo sapiens
ggggtgacagagtgtaagaccttgtctcaaaaaaggaaaaaaaaaaaaggccttgtgctcctgcccagccctgagtcagtccagcaggtgcttgggagcacccaggcagctggctcagcatgtggcccagccaacggcacccacatggtcactgcactctatcagtcactgtgctctgtcacccattactgcaaggaggaa

SEQ ID NO: 182617 - DNA, 201 bp, Homo sapiens
aataagacaatactgattaagcaagaaaaaagaaaaattgctatgcataatcccatctagagacaaacataagggggaaaaataaaataaaacaaacaccrctatataaagattgtgagagatataaaacgttgaaatgaagacgttgagatgattctttaacccaggattttgtgacagctggcagcaagggtgggtcca

SEQ ID NO: 182618 - DNA, 201 bp, Homo sapiens
agtttggaagactttccatacttacttgaccaccatagataatgatgttctggtcagttacatgtgagtggtcagtccaggaaaggggttcagagcagaaytgaggaatgtgacagttgctttggaaaaggtgctgtgtaagctgaaccgcataggaggaagaagaatgagtggagagttacccagacagggtggcatggg

SEQ ID NO: 182619 - DNA, 201 bp, Homo sapiens
gccctctggtatagtgggacatgcaggtaaatcaacatggctgtgaaacgttggtccaggacaggctgttggtagatgcagtgtctgtttctgggagcaaygctgtcaggcccagggcccagtctgcaggtgagcctggggaactgtcggctatgtgctctgtaggaggggcaagtgtcatcagcatggccagcatccagg

SEQ ID NO: 182620 - DNA, 201 bp, Homo sapiens
tctcactgagtgtgtccttgggcttgggtctgaattttcacatcctcatgaaaatgccctctggtatagtgggacatgcaggtaaatcaacatggctgtgraacgttggtccaggacaggctgttggtagatgcagtgtctgtttctgggagcaatgctgtcaggcccagggcccagtctgcaggtgagcctggggaactg

SEQ ID NO: 182621 - DNA, 201 bp, Homo sapiens
aggactgtgtcagcaaggtctgtgggggtatgcagtgggcgtcccacgggatccacgcctttccactgcagcccaggcagaacagcctcctcttgtactakggactatttccttgaggcccagttgggcctcaggtgggacctcagagggagtgctgctgagcaccttttgtcaccgtacctgaaggcagcatagcttacc

SEQ ID NO: 182622 - DNA, 201 bp, Homo sapiens
ctgacaaactcatgatggacggccacgaggtgaccgtggtggacaatttcttcacgggcaggaagagaaacgtggagcactggatcggacatgagaacttygagttgattaaccacgacgtggtggagcccctctacatcgagggtgagtgaaaactgcacattgttattattcagagctccgcaggtggccttgccagag

SEQ ID NO: 182623 - DNA, 201 bp, Homo sapiens
cacccctcctggacccccttcctcagccaacccctcgagtcaacttgaaccttttagcacctttgagaatcgtgcttcagcacagtgagctgtgcattctgcagtcgccttagttttatccacaggtagggagcagaacccatcgagatgtatgcatgacaggccctaggggagttagggggttcagccctcacagcctga

SEQ ID NO: 182624 - DNA, 201 bp, Homo sapiens
tgtgtgttaggatttatgctatctggagacaaataaaatcaaggaggatgaaccaggtggaatagtacgtctggcatatttttaattcattattttaacamctttaattaattccttatacataataacatatcccccttaagtataaattgtgattttattgtcaagatcctatatagtatgtggatatgtcttactctg

SEQ ID NO: 182625 - DNA, 201 bp, Homo sapiens
ttctgtgtccccttttcctaagatagagagctttcttgtatttctccctagctattaaatattcattgacatctaaatctctattgagtgattaatttgcmcaatatattatgtgaaaaagattagaaaagcatattcataacatgatcccattttggaaaatatatatttaactgggaaaaaaaattatataaatacacg

SEQ ID NO: 182626 - DNA, 201 bp, Homo sapiens; identical to SEQ ID NO: 32255

SEQ ID NO: 182627 - DNA, 201 bp, Homo sapiens
gttatgagatcctaacctcagggccttcccaagctcacaaatttaacagcccgggacagggaggacgtttgtgtttaatctctctgttcttcctcggcacstggaagcacctaaatgcacctggcacttagaaggccttcagtatctgctgagtggccacatgagggccaaataggagtgtgtacaaaatattaggaccgc

SEQ ID NO: 182628 - DNA, 201 bp, Homo sapiens
ttgcaggcgtgagccaccgcacccaacccctaggcatttcacttcttttagttgattattttggtatttatcattgtgccattgaatcacctggcttcctsatttttcagttgtagatattacctagtgactttgttctttgggagatgatttttttcttctctttgcccctgtacatgctctccaccctcctatatagat

SEQ ID NO: 182629 - DNA, 201 bp, Homo sapiens; identical to SEQ ID NO: 32257

SEQ ID NO: 182630 - DNA, 201 bp, Homo sapiens
ttgattgtttctcataacatttacctatatatgtgtgtgtgtgtatatacatatttacgtatattcatgtatatgtgtgtgtgtgtgtgtgtgtgtgtgtrtatatatatatataaaagcccagagcagttttcctataaatgtcccacattctggatttgtctgattgtttccttatgattaagttcagttaaacatttt

SEQ ID NO: 182631 - DNA, 201 bp, Homo sapiens
acttgctgttctctgtttaaaagttaaaatttgcattcatctccatgactatcgtgactcatgtgctaatcttttactgccacctagcggtgtgtgggtgmagttgcccagctctgagggtgacttgggtgatttcagcgcaggtggagttaagagatggccttttgcatccagcagacctgtgaatgccagaatctgacc

SEQ ID NO: 182632 - DNA, 201 bp, Homo sapiens
tgtcactgctgctgatgggagcatatattcagggcaacttgaattgatgttcctgggttgcagttctcaaacttggcctgaataaactctacgatcctgtktttacttattttgtagtaagatttaattgttttgaaaacaaagtatgcattttgttgtcttcgtaagttaattttctttgtaaaatttaaaatattggtt

SEQ ID NO: 182633 - DNA, 201 bp, Homo sapiens
ccccgctccgactgtttgctcctcaggaaaattactcagcgtttaactcttggggagccaagtgtgggcggctccccggcccgcggccgtgcccaggtgtyggggcgcaccggcatccccattctaggttttcccccggggctcggcggccgggcgaagcaggcaggcagctgggtggccgggcagggcgtgcctgcagct

SEQ ID NO: 182634 - DNA, 201 bp, Homo sapiens
tgctgctgatcattaattggagctcttttaggctcatttcttgagacttctatttttctagctgagctcccagcacgtggccttgtaaatgtgaaaggtcstggcagggtctctagcggtctctggagcaactgtgggcacccatgaatgggctgcctttctgtccccctttgacttcctctccccacctcagcttggatt

SEQ ID NO: 182635 - DNA, 201 bp, Homo sapiens
gccaaagcagacgcagtaagggtagataattggatagataattaaatgtctttaatactaaaacattgcttaaattggccagcaaaaaatgtgcctgcacwtgtaaattcagtctcttttatcatgtcattgctttctatagggctggcaaaacgagtcggtgcccgtctgctcctggcctccacatcggaggtgtatgga

SEQ ID NO: 182636 - DNA, 201 bp, Homo sapiens
ctaatagtgctcttgttaaacatcagtataaactcaccaatgaaagaaacccttttaactattaggtaacaaattatgtccaaaaagatttcatgttgcatttttttttaaagtaacagctttattgggatataattcacataccatacagttcacccttaaaatgtataattcagtagtttttaatgtattcacagagtt

SEQ ID NO: 182637 - DNA, 201 bp, Homo sapiens
tcgctagaacccagaatgtggaggttgcagtgagccaagatagtgccgttgcactccagcctgggtgacagaataagacctcatctcaaaaaaaaaaaccaaaaaaaaaacactgaagctaacatccagttgttttcctaaatgtgattttttttccaattaaaaacatgcttaataggtaatatggttatatggttcaat

SEQ ID NO: 182638 - DNA, 201 bp, Homo sapiens
tgatccgcccaccttgacctcccccaaatgatacctattaatattactactctcttctcttttttagcacatggcaagaaacatttattttatgacactaytgtttatataatttcagtaccactgagaagccagaacttagtaaaaatggtgttttaataagtaaattatcttctttaactgcgagctttgataccaaag

SEQ ID NO: 182639 - DNA, 201 bp, Homo sapiens
ggatgtcatatttaggaaatcttgcctaaactaagggcacaaagatttaccatgtttttttcctaagagttttatagattttgttcttaaatttaggcctrtgatccattttgagctaatttttgaatagggtattaggtcatcattcttttggatatggctgtccggttgtccagcacaatttgttgaaaagactattca

SEQ ID NO: 182640 - DNA, 201 bp, Homo sapiens
ttgtcaaatttatgaccatcttttttggagggtagcttgcccagctcttgttaaagatccccagaaaaaggtctgggatcaatcatctggtacattctgtsaatttaagtcaatggttcctttctctcaggaagtattttccttagaacttttctctcactgagtagtgagaagtttgctctttgaaagggaattttaaac

SEQ ID NO: 182641 - DNA, 201 bp, Homo sapiens
ccaggtgttcaccaggtgtctagaaaaaggcaagaacaggacaacaaggacatagagtttagtaagggttaaaatctcttccctccttttttaaaagtaastaaacttttttaaaagtaagtaaacacttaaccacaaggaaaattaaacagttactcatgtcaccatttaaactcagtattttggaaatttcacagtctt

SEQ ID NO: 182642 - DNA, 201 bp, Homo sapiens
gtcttagcctcacagaatgctggaaaggggagatgattggaaattatttttgactctaggtctttacttttgtattaacaatgtaagctgtccctgttttwttccacggtgattttgtgaggggacttatttagaagcttggcatcctgggcatttcagtccagacggtgccagtccagggacagatgggcgtacccagcc

SEQ ID NO: 182643 - DNA, 201 bp, Homo sapiens
gcgcacatgggttgggcaactggtggctcacaggtgatctttgtggactctggtggcagcagtgcgtggtgtccgagctgaggactgacccaggtgttcaycaggtgtctagaaaaaggcaagaacaggacaacaaggacatagagtttagtaagggttaaaatctcttccctccttttttaaaagtaactaaactttttt

SEQ ID NO: 182644 - DNA, 201 bp, Homo sapiens
gggtgctgctgcttctgcttagaggtgtgcgtgatgccctcttcttgccatcacaagcgcctacccctcctacactctctctgtcccgcccccctccatcrtaccagaactagaccatagaggaaaagatcatgcacttggtgtttagggagattccgtttattcttcctactcgggggatgcagtcactgtgcccgtggg

SEQ ID NO: 182645 - DNA, 201 bp, Homo sapiens
caggcatcagccaccacacccagcctacagttttctgacttctgccctagagtagcaattcccagtcatttgggggagctttttagtcaggctttcagcaratatttagggagcacatactatgttcgtctgtctcagtaccctagataacagcactgaacaaaacaaaattgttgctgctgtggagcttacattttttta

SEQ ID NO: 182646 - DNA, 201 bp, Homo sapiens
atgattatggaggtcaagaagtcccaccgtctgccttctgcaagcaagaaagagaaccaagaaagccaggggtgtagttccaaggcctgagaaccagagarccgagggcagatcgatgttctgtgtaagcagttgaccttcctccatctttgtgttctagtcaagcctgtaagggactggatgatacatccacgttgggga

SEQ ID NO: 182647 - DNA, 201 bp, Homo sapiens
cggaaggcccgggcagaggggcccctgcaggtattcttacacatccatgtgcaagggaggactcattttggcagcagagctttcagatccctgttcttcastcctgtggatggtggatgtgtttcctcaccattggctaaaagtagaatggcatgacatggactttgtctggaaggatggcattcctcctgtgtgtgtgtg

SEQ ID NO: 182648 - DNA, 201 bp, Homo sapiens
ctggacagtatgccaacctctcacagggcgtactcactcacactgggaccactggaacagcccacttgtctgacatgcacagctttgggatgtgagaggaraccagaatacctggagaaaacccacacagacgtggggagaggagaacatgccagctgcgtgcagacagtagccccagccaggaggtgattttttttctca

SEQ ID NO: 182649 - DNA, 201 bp, Homo sapiens
actctctttgaggaatgtagggtgaccctgtctgtgtaagcagaaatgcccgtgagtataagtcaggtggcagcaggctccaggtctagcacacctgagcrggctctgtggtgtcgtactcggctctgaaggtctggccaggttcattttttaaaattttaattttaatttttaaattttatttatttttttgagacggag

SEQ ID NO: 182650 - DNA, 201 bp, Homo sapiens
gggaggctgaggcaggcagatcgcttgagcctaggagttccagaccagcctgggcaacatggcgaaaccctgtctctacaaaaattacccaggcatggtgrcatgcacctgtggtcccagctacccaggaggctgaggtgggaggattacttgagcccaggaagttgaggctgcagtgagccatgactgcaccgcactcca

SEQ ID NO: 182651 - DNA, 201 bp, Homo sapiens
aagtgacatcttggggcaaaattttttcccctgggcatattggtaggattttattgggtaagcctatgggaaggtgtgcatcacaagggttttatagccgsatttcagagcctgccagctggggttgcagagagctgctcttttgcctgcttctggagacaacaaattggagttctggcttcctggagggctcagagcagg

SEQ ID NO: 182652 - DNA, 201 bp, Homo sapiens
atttcagagcctgccagctggggttgcagagagctgctcttttgcctgcttctggagacaacaaattggagttctggcttcctggagggctcagagcaggrcgaggaccacagggaggtctgataagcaagcgccctttgctttaggcttggagcatgccggttgctagagcctgctcaggcaccccagattgacttttta

SEQ ID NO: 182653 - DNA, 201 bp, Homo sapiens
gctagagcctgctcaggcaccccagattgactttttatttgggccacttttcatcctgtgtaaccgcttagaatgagcacaggcctggaaggctgagggcrgctgcagagtgcttctctagtctgggcatgctccaaggtttagggctaaggctccttcaggttcaggagtaggcacggcttcccgttcagcagctgccac

SEQ ID NO: 182654 - DNA, 201 bp, Homo sapiens
ttaatgtttgtgtgtagatctgtcacctagctggactctgaggtcacagccccccagagcctcacatgatgcctgacacatcgtaagactccagcagaagygaattccttcaggcactgtcttttgagggaaaactttacacagctataccaggtgcacactttaggtattgctgccaccatctcactgtcaaggcatggt

SEQ ID NO: 182655 - DNA, 201 bp, Homo sapiens
gctggaaaaccccagcaggactccgggttgctaggggaggtttcaggcgtcggatgggtgttagatgtgtgtagttttgcaagggaggaagaactagtctraagtgtgtgtgtggtcaatcttgagtaagaaagctgagacccaagaggaaagaccatttaaagttgaataactattattatggcagtaatactacctaca

SEQ ID NO: 182656 - DNA, 201 bp, Homo sapiens; identical to SEQ ID NO: 32252

SEQ ID NO: 182657 - DNA, 201 bp, Homo sapiens
atgcccggctaattttgttattttttttagtagagatggggtttcaccatgttggccaggctggtctggaactcctgaccttgtgatctgcctgcctcagyctcccaaagtgctgggattacaggcatgagccaccacacctggccgtggaggaaatctttcaacacagagatctacctcatgaatctatggttgcacaga

SEQ ID NO: 182658 - DNA, 201 bp, Homo sapiens
atcactcagcttccatcctatttaactatctccaccacacccaaaaaaagcaaatcccagacatcaaatatatcatttcatccataaatactttcgcattrtaaacaccatcttagtttgtaggattttgtttcgacattcaattttccatttgggtttttgttttctcctgggggtggtaatttttcttctgggagggct

SEQ ID NO: 182659 - DNA, 201 bp, Homo sapiens
gctttctctctgtagtatttttgcagccaaatcctaagttgaggtggagaacctgggaaggtacttggtggttaagggtggtttataatttggatagtgayatgcaagggtcattgatattttacatatctttctggggcttagttttaattcataattttaacagtcaaacagtctggaagtatatggaaagcatcgctc

SEQ ID NO: 182660 - DNA, 201 bp, Homo sapiens
cattataccagcaagaggtagtcggggtcttttgtgaggtggagctcactttacgtcagtaagagtgacacttgtcagctccacagtacattctgaaagcrgccctgaaggacttctggcttctctcggtgggccgtgatgctggatgctgtcacaaccaaagcatggttctgtgagtgttcctctgaaggaggcctgact

SEQ ID NO: 182661 - DNA, 201 bp, Homo sapiens
ggatttgtagtggccgctttcctttatggtaagtgaaagtggtgaaacttactatcatctcatgtaaccctcttgctgctacttggggttcctaggagctygtgccgtgacctgcgaaccccttagtccacctgctcagttgagaattccacatctcgaggacagcctggtgcctttttagcaactgtgttcagaaactcc

SEQ ID NO: 182662 - DNA, 201 bp, Homo sapiens
ggggctgctgaacgggcacaagcgtcgatgatacctagtaggaaaggaaagtctcccaaagagaggcctcagcaaagtgctgttagagttaaaggcaaaartgactcgagctagggcttgagctatgactgagattgaatgtggaggccttgcaggaatggtaaagagtcttccaggagagatacaaaaggcaaagggaga

SEQ ID NO: 182663 - DNA, 201 bp, Homo sapiens
atgatgaaaataatacatacatgttaaagaaaatatagaaaggtattttacaaagcaaatagaaaattatttttaatctttctataaactgttgaggaagytggctgggcacggtggctcacacctataatcccagcactttgggaggccaaggagggtggatcatttgagctcaggagtttcagtccagcctgggcaacg

SEQ ID NO: 182664 - DNA, 201 bp, Homo sapiens
tctagttaatagctttattttaatttctcccatttccctgctttcttgccacttttatttatttggtcatatattgctgtcttttttttaaaccaagtttyctcctctgtttgaagagagatgtgcttctatggaattagcaacattccccttcttgagagtgggaatttcatgtgggggtgtagtttggatactgaatcc

SEQ ID NO: 182665 - DNA, 201 bp, Homo sapiens
aaccagggactttgtttcattcatggttgcgtccccagcttccagaagaccaccaggtacgtgggcgcaggagagaaatgttgagtggactaattattggrtttgtagtggccgctttcctttatggtaagtgaaagtggtgaaacttactatcatctcatgtaaccctcttgctgctacttggggttcctaggagcttgt

SEQ ID NO: 182666 - DNA, 201 bp, Homo sapiens
aagtagacaagacggtctcagctggcagagcaaagaacacaagccaagctatggaagtgtggagcaaatgtgcagtggaaacaaaggggaatgtgaccctcctcctgccacctccgcatcactttcagagtctcctgcatgcctctccaccttggccttatattagaatctcctggggagctagctgtaacaataccagga

SEQ ID NO: 182667 - DNA, 201 bp, Homo sapiens
cataatatagtggtacatatacatatatgtggggtgcatgctcaacactgataattggaagcgggtgaccagattgttctggagaactcagaaatcttgarcaggaaaaggacaaagactttttggacaaaccgtgtaaagacgggagaagtgccacgtggggatggcatagacagaagggcccggaaggaggtggcatgg

SEQ ID NO: 182668 - DNA, 201 bp, Homo sapiens
aacaggagtttcatggagaattacatgttttaaaaccatagacctaggagtttgtataccttttattttaggtagaaaggattgctgtcttcctattaatwctttccgtttgaaacagaagggtgaaatgaatgagaattttggtgaagagaaggcagagtggagaacaggatacagcaggctagagaattgagttgtgca

SEQ ID NO: 182669 - DNA, 201 bp, Homo sapiens
ctccccaggggcctctgctggcattgccatcccgcccccgccccccccaatcctcttcctccaccagaatctccttctccgtccgtaagtcatcccacagscatcttcacgctactccccaggactcaggtgactgcagcctttacttctccagggtgcattatatataggtggctgctgaccattttccttcaaggacaa

SEQ ID NO: 182670 - DNA, 201 bp, Homo sapiens
taaacaggagtttcatggagaattacatgttttaaaaccatagacctaggagtttgtataccttttattttaggtagaaaggattgctgtcttcctattartactttccgtttgaaacagaagggtgaaatgaatgagaattttggtgaagagaaggcagagtggagaacaggatacagcaggctagagaattgagttgtg

SEQ ID NO: 182671 - DNA, 201 bp, Homo sapiens
ctgaaatggggggcatctttcacattccaggaggcttcgctgccccactgaggatttcatggaggttgatgtcactcagtttttgtttgagcatgtgccaygtggcattgaggatgggggattagcttagaggatgtgtttggaaatgaacaagatgcgtttcttccatgcagatgggaaggaatctggagcccttgacag

SEQ ID NO: 182672 - DNA, 201 bp, Homo sapiens
gttggaggtggggcctagtgggaattatttgggtcatggggacagatccatcatgaatggcttggtgcacaccccactgtaatgagttcacacaagacctrattgttaaaaaagagtatgggacccccttcttctccctgtcttgccacgtgacatgcctgctcccccttagccttctactatgattgaaagctctccgaa

SEQ ID NO: 182673 - DNA, 201 bp, Homo sapiens
attctggctgcggctgagcaagacaccagtgtcctgggacaccaaccgccttctgggtggcaataatgacagcagcagctatttcaactgcagctgctaayggtatttccatatacttaatcccacagggcagaagttggcagtagtgtccagcagcagaaaaaaatgctaactgggaatgctgggcttaaggagtttagt

SEQ ID NO: 182674 - DNA, 201 bp, Homo sapiens
cacatatcatagaattcacgcttctcaaagatacgattcagtggcttatagtatgtccacagagttagcaccgcattctgattccacagtttcttcatcaycccaaaaaagagtcctgtactcattagtagtcacttccatttcccagtcccctcccgccagctctgggaaaccactaaaactactctctatctctatgaa

SEQ ID NO: 182675 - DNA, 201 bp, Homo sapiens
gttgtaaccaagggaaagaaccaagttattctgacactcatcaaaggggctagtgatggctctggtggaaatggccattagctgtgaataatggatcctcstaaacagggcttctcagcaaaactcatacattgccaaatcaggatctttttctttttttcttttggtttcttttgctgttctgtggaatttaattctgat

SEQ ID NO: 182676 - DNA, 201 bp, Homo sapiens
ggaaaacaggatgacatgcatactgaggaggaccccacaggcactctccccttcctgtttttcagctttgtatgtgtggcttctcgaagaagtgaggagtrtaagatagttttttaaaagtttaattacttgagcgtatacatatgaaatctaaaacttggctgctacatattgaagaagaacaaagcaagaaactcaacc

SEQ ID NO: 182677 - DNA, 201 bp, Homo sapiens
ttggccctcagcaaagttttgtaatttctttcttttgtgaagtgtatttccatcaaatttctctttcgcattcattctacatcaagatcaagtatcaaatatattactaacaaaacttcttaacagtaagcaataaaatgagccctgaagtcataatccatcttttaaaaaaatttctcctttgccttttgcattaatcct

SEQ ID NO: 182678 - DNA, 201 bp, Homo sapiens
gggtggattgagcaagaacactgaggggcttttgcaaagccttctgagaagggagctgtcttcgggaagccatggcaggcccatgacctcagggggccagytagtgggtatcgatgcagagaccacctatttagtccagcgttaggcctgtatgcatcgtgtgtgcttcttcatagggcaggaggcactcttgtaaaaata

SEQ ID NO: 182679 - DNA, 201 bp, Homo sapiens
tttccctgggcaatgagccagagaagcttctccaggaggtggcatcagagcttgtccctaaaggatgagtagcactctgccaggtggaaagtagacaagayggtctcagctggcagagcaaagaacacaagccaagctatggaagtgtggagcaaatgtgcagtggaaacaaaggggaatgtgaccctcctcctgccacct

SEQ ID NO: 182680 - DNA, 201 bp, Homo sapiens
gctaatttttgtatttttttgtagagacaggatttcaccatgttactcatgctggtctcaaactcctgggctaaagcagtccacactcccaaagtgctggsattacaggcatcagccaccacacccagcctacagttttctgacttctgccctagagtagcaattcccagtcatttgggggagctttttagtcaggctttc

SEQ ID NO: 182681 - DNA, 201 bp, Homo sapiens
tatagtatttttagaaattgaaagcaaagcctgctggttctaagttagaatttggttgacatatatactgggggtgaccttgctttttttttttttttttwaaaaaaagacttgagcaggcagctgggttttatcagcaacagaacattggtggtgtaggatggcttggttgtaaccaagggaaagaaccaagttattctg

SEQ ID NO: 182682 - DNA, 201 bp, Homo sapiens
ggaatgttattcttagtatctttgaatatttttatagtatttttagaaattgaaagcaaagcctgctggttctaagttagaatttggttgacatatatacygggggtgaccttgcttttttttttttttttttaaaaaaagacttgagcaggcagctgggttttatcagcaacagaacattggtggtgtaggatggcttgg

SEQ ID NO: 182683 - DNA, 201 bp, Homo sapiens
tactcacactgtctcccacacactcacactgtcatatatacactgtcatacaaacacacttaatacaagtatactcacacacactcattttcacacatacrtatacattcacactatcatacacattctcacattcactcacatgcgcacactcactgatccacactcacattcacacatacactccctctcccacataca

SEQ ID NO: 182684 - DNA, 201 bp, Homo sapiens
acattcacactatcatacacattctcacattcactcacatgcgcacactcactgatccacactcacattcacacatacactccctctcccacatacatacmcacacacacacacacacccctgactgtgaacgctgtgccaagggcgctggcagcacacgctcagagccctgcgtagccccagttgcctgcctattgagtg

SEQ ID NO: 182685 - DNA, 201 bp, Homo sapiens
tttaattgtaatttgtgtagcactctgaaagttaagaacaatttacggaagagagggaagacttaaaattgggagacctgatctttttctttttttttttyccctgtaagtaaaatattgtcattgcttaatatcatatcctactggaactcaagagaatggactggaaacctgaggttgcctctttaatacatctctcca

SEQ ID NO: 182686 - DNA, 201 bp, Homo sapiens
atcccttttctgaataaagcggtctcaccctatcacgtggtgcaagctttctaaccttctgtttcaattttttttttccatttgtaaaatgaaaatactcytttgccttgcaggtaaaaataatttgttttaaatactgtgaggaattgaagggatttctctaaagagctgataacttcacttgatgagcttcaagggaaa

SEQ ID NO: 182687 - DNA, 201 bp, Homo sapiens
tgtggagttgggttttgcaaggtgggtgggatggtgtcgatttgattcctaccaccagggcatgtgtgtgtctcctgacaaaggctgctgtgtatgactakgtggggtgctcagatcccttttaaaggagctctgtggttttacttaaaagactccatttttacattaaatccccaggaaagcccagcaggcacaaacaca

SEQ ID NO: 182688 - DNA, 201 bp, Homo sapiens
agaactgacacagaagcatctctcctctgcccattgatcttcctccggggccctctcttggcagagcataatgcgaagcctggaagatgcagtgagcacamgctaggcccagcagtgttcagagtagagtgcaaagatgaagatggaggctgacactgctagtgagtagccaggaaagaaagtaacccttgatgagggtgt

SEQ ID NO: 182689 - DNA, 201 bp, Homo sapiens
ttcagggctctgagaccaagtgtctcagcaaatgtggcagaagcactggcggccatctgtgaccatctaaaggcatcatatagtgtatcttttgctcttcmctgtggtccaagcagctcaagacccccagacttaaaagaaggacacagagacacttctgtccccccatgcaaggtgtgccagataatttttggataggtt

SEQ ID NO: 182690 - DNA, 201 bp, Homo sapiens
gcacctgaaaattgtataaaatgcacatttctgtgtccttcaataaagttgtgtgggagcacagccatgcttttacaaattatcttcagctgtgttcactytccagtggtagagttgaatagctgggacagagatgtcccacaaaactgcaatatttgctattctggctcttttaatagagttttgtgggtttttaatttt

SEQ ID NO: 182691 - DNA, 201 bp, Homo sapiens
cactgttttggttgtggttatgtttcactgcttaaccaaccactttaaaacatagtggcagaaaacagttaccgttgtatttatacccatgggcttggtgkatcaggaatttgagacggggatggctcttctttgtttcgtgatgcctgggaccacacccaggttagagcatccacttgcagggggcttcttcactggcag

SEQ ID NO: 182692 - DNA, 201 bp, Homo sapiens
cccttagagcagaggtcagcaaactgtggcccatgggccatatccagcccagtgctagtttttgtaagatccaagagctagaaagttttaacaattcttaratggttgaaaaaagtcaaaaagaatactagttcacagcacctgaaaattgtataaaatgcacatttctgtgtccttcaataaagttgtgtgggagcacag

SEQ ID NO: 182693 - DNA, 201 bp, Homo sapiens
ttgtcagcatctgccaaccacaatggaagagcagtgaagagggagaaggggcgtctagaatttagtagcgcctgcgatggaagaggtttgtgcagaggagwtcttctggcatttgactctgttctttgtcttactaaaatgtggaatgtcttcagaggaactgagcaagtgagaacacaggtgggtgcccagagcagaggg

SEQ ID NO: 182694 - DNA, 201 bp, Homo sapiens
ctttcccaaagtctttgttacctactctggccctgagtctcctccttgataccacataactcttcttcatgtcttagggttgaccacctgctaacttgcaytgtacttgagttctttcccattcatatgttggcttttttttctcaatgaaatcccgattctgaggacagggattgtgtcttatgtgtttcagcccttgaa

SEQ ID NO: 182695 - DNA, 201 bp, Homo sapiens
gttttctaatctctgcttttcctaattagtaatcttgccctccctgttacaagtaaaatctcaccactgtttgaaaaaactgtccatacttcccaattatrtacaccctcactgttagccagcctccgttgcagaaatgccctccctgtttcgggaacagaactcaagttctgttagcctttctccttctcctccttacat

SEQ ID NO: 182696 - DNA, 201 bp, Homo sapiens
cagacacacactgaaatgaaatcacctgctaacctgttggcgttaccaagatctgattccagaggtgagtgggtacttcacttgtctgaagtgacttcagytgagctctaggaaggcaagtatgagtagatccagcctgtgtgctacagcccagctgttcaggaggtggagctggaaaaccccagcaggactccgggttgc

SEQ ID NO: 182697 - DNA, 201 bp, Homo sapiens
agtaaaatatggggtaatatttgggggcagaggagtcttcacgaaactcctcaaatcacactttatcaaactaacagattctgcgtttggccctgcttatracaagtattcaacaaaatactggccttctgagaatccatttatgtttttcttactgtatttgttttgtttattttggtgccaaagcagacgcagtaaggg

SEQ ID NO: 182698 - DNA, 201 bp, Homo sapiens
ggtgttggggcgcaccggcatccccattctaggttttcccccggggctcggcggccgggcgaagcaggcaggcagctgggtggccgggcagggcgtgcctrcagcttctctgtgcgcgggtccagtttctgtcatcgctcacagcatgctgcctggagacagggcaggaggggcacttcgcaggcaggtggtcggccctct

SEQ ID NO: 182699 - DNA, 201 bp, Homo sapiens
cagcagacctgtgaatgccagaatctgacccattgcaaacatggctcgcggggtggaggagatagtccttgtggagggcacaaggtagatagtgttcttaygttgaatttcacgctgaaactaaatgcagataaaaatatattttttgaatagattcacgtggtgatttttattgctttcttggcagcccttataaaccca

SEQ ID NO: 182700 - DNA, 201 bp, Homo sapiens
taattaaatgtctttaatactaaaacattgcttaaattggccagcaaaaaatgtgcctgcacttgtaaattcagtctcttttatcatgtcattgctttctrtagggctggcaaaacgagtcggtgcccgtctgctcctggcctccacatcggaggtgtatggaggtgagtaggaggctctctcaggagatgttcactccag

SEQ ID NO: 182701 - DNA, 201 bp, Homo sapiens
tttgtatctatttcatctgtatacttgtcaattttacttcctttgctcgtgctgtcattcttattgtggcagcttgatgctgttctgtgattttgcaaccrtgtctcaaaaaattactcccttatttaagaggacatgcagtctgttactgttggtccatttttgatgtattaaaacaaattctacctcaaaggcaaaatg

SEQ ID NO: 182702 - DNA, 201 bp, Homo sapiens
atagcaaatctagataggactccaggtgaatagatttccaatatttatgcagagaagttttgagagcaggaaaagtaggaggaagcagaggaagacaggawccaagcttcttttcttatatgattttttccaaggcctacattttgttactgtttttttgtgtcaacttggctggattgtgacacctacatatttaatcaa

SEQ ID NO: 182703 - DNA, 201 bp, Homo sapiens
attctggcaacttacccaaagtcaggtaagggtagcaaaacataaaaatattcaatattttcacgtgaaattattgcataatctgtattgataaatgaagyatgattgggatttggagagaaacaattcctcattatggagatctgttctttggtgctgcaggacatttagcattcctgatccctaggacaacaatttcca

SEQ ID NO: 182704 - DNA, 201 bp, Homo sapiens
tcacatataataaatgtgtactataaatctcggctttacaccatatagacaaattttattactagaaaattatttccacttcgttaaggaaccagaacgawagttacagaagcttatttcaaaggagcactaatttactttatagccttgggttttgtcccagtactgggaactaacagtgctctgacttcttccagttgt

SEQ ID NO: 182705 - DNA, 201 bp, Homo sapiens
catacatacttagatacatagatagatacatagatacataaagaaacagatgatagattagatagatagatagatagatagatagatagatagatagatggatagatagatggatagatagatgcaggtataatacaacagttttcatttctgccttggcaacattgatctaattttaaagtgctctcatgttgctgtctt

SEQ ID NO: 182706 - DNA, 201 bp, Homo sapiens
acagaagcttatttcaaaggagcactaatttactttatagccttgggttttgtcccagtactgggaactaacagtgctctgacttcttccagttgttggcrggtcctggtttgaccatgtgaaaggatggtgggctgcaaaagacatgcaccggatcctctacctcttctacgaggatattaaaaaagtaagtggcactga

SEQ ID NO: 182707 - DNA, 201 bp, Homo sapiens
aaaacgctcccacgatggaaaaaaagccagaactgtttaacatcatggaagtagatggagtccctacgttgatattatcaaaagaatggtgggaaaaagtmtgtaatttccaagccaagcctgatgatcttattctggcaacttacccaaagtcaggtaagggtagcaaaacataaaaatattcaatattttcacgtgaaa

SEQ ID NO: 182708 - DNA, 201 bp, Homo sapiens
aaagccaagtggagtggaaatgagggaccattcatagtggaaagaccagggggagtgggactgagggaccctcactcatgggaaaatcacgtgggtaggcytaggaaccattcactatagaaaggttaggtggaatgggtgcagagtctgtcatgaacttctttgatgtcctacagggatgcctggagactggaagaacca

SEQ ID NO: 182709 - DNA, 201 bp, Homo sapiens
agttcttcttctttcctccctcttcacaatgcctttttctcccatgatcagaatccaaaacatgagatccacaaggtgttggaattcttggagaaaacttktcaggtgatgttataaacaagattgtccaccatacctcatttgatgtaatgaaggataatcccatggccaaccatactgcggtacctgctcacatattca

SEQ ID NO: 182710 - DNA, 201 bp, Homo sapiens
atcttacccatcccagattcccaatggcgaagattgagaaaaacgctcccacgatggaaaaaaagccagaactgtttaacatcatggaagtagatggagtycctacgttgatattatcaaaagaatggtgggaaaaagtctgtaatttccaagccaagcctgatgatcttattctggcaacttacccaaagtcaggtaagg

SEQ ID NO: 182711 - DNA, 201 bp, Homo sapiens
gaattcttggagaaaacttgtcaggtgatgttataaacaagattgtccaccatacctcatttgatgtaatgaaggataatcccatggccaaccatactgcrgtacctgctcacatattcaatcactccatctcaaaatttatgaggaaaggttggtggcatttcttttccttaactgaactctaaaaaattttctacccta

SEQ ID NO: 182712 - DNA, 201 bp, Homo sapiens
cttggcaaaacaccctgaagtcccagatgagaatggcagccctagctgataccttgattttagcctagtgagaccctaaacagaggactagccatgttaascccaatttctaatctacagaaactatgaccgaatattcaggtgttgttttaactcatgaagcttgtggtaatttgttaaccacaaagtcttcaacctaga

SEQ ID NO: 182713 - DNA, 201 bp, Homo sapiens
cctccctcttcacaatgcctttttctcccatgatcagaatccaaaacatgagatccacaaggtgttggaattcttggagaaaacttgtcaggtgatgttataaacaagattgtccaccatacctcatttgatgtaatgaaggataatcccatggccaaccatactgcggtacctgctcacatattcaatcactccatctca

SEQ ID NO: 182714 - DNA, 201 bp, Homo sapiens
ctatagaaaggttaggtggaatgggtgcagagtctgtcatgaacttctttgatgtcctacagggatgcctggagactggaagaaccactttactgtggctwtgaatgagaactttgataagcattatgaaaagaagatggcagggtccacactgaacttctgcctggagatctgagaggaacaacaacaaactaggtgaca

SEQ ID NO: 182715 - DNA, 201 bp, Homo sapiens
agtggaaagaccagggggagtgggactgagggaccctcactcatgggaaaatcacgtgggtaggcttaggaaccattcactatagaaaggttaggtggaaygggtgcagagtctgtcatgaacttctttgatgtcctacagggatgcctggagactggaagaaccactttactgtggctatgaatgagaactttgataagc

SEQ ID NO: 182716 - DNA, 201 bp, Homo sapiens
agtgctctgacttcttccagttgttggcaggtcctggtttgaccatgtgaaaggatggtgggctgcaaaagacatgcaccggatcctctacctcttctacraggatattaaaaaagtaagtggcactgagacttataggtcagacccagaaaccctcctgacaatgttattctgttaaaaagctgtgtctttaattggcca

SEQ ID NO: 182717 - DNA, 201 bp, Homo sapiens
gttttgtcccagtactgggaactaacagtgctctgacttcttccagttgttggcaggtcctggtttgaccatgtgaaaggatggtgggctgcaaaagacaygcaccggatcctctacctcttctacgaggatattaaaaaagtaagtggcactgagacttataggtcagacccagaaaccctcctgacaatgttattctgt

SEQ ID NO: 182718 - DNA, 201 bp, Homo sapiens
cacccccaaaatagaaatctatgttcatataaaaacttgtacacaaacactatagcagacttattcaaaattagcccaacactgaagaaaacctaaattcrtattgtcatataaatgaataaacaaatcactgcttatccatacaattgaactgttctcagcaattaaaaaaaatgaactacagatatatacaagaacata

SEQ ID NO: 182719 - DNA, 201 bp, Homo sapiens
taacgtctttcactgtccctgggagaataagataggctgtcccccaggaagtccatgatggtaaccagctgtagactttgggttgggtacactagagccargagtgtaccctggagcagaagattcagcacagtggggcacctcagtggggcctgcagcatttgaggaaggagtataaggatgctgtgtgccttgtggtaa

SEQ ID NO: 182720 - DNA, 201 bp, Homo sapiens
acatttataacaggttcattctattctatgtaatttttaccacactgaagtttatttcaaaaaacgtgattccataatgatgaaaaatacaaaaagaaaawcttatgtattatgattgaagataactgttattcatctcttagactaaaaagaagtaattaagagaaagaatttagaggaattgcagttcttccctgattt

SEQ ID NO: 182721 - DNA, 201 bp, Homo sapiens
tgtcctcaccacaactgataaaaacacatctcccttcacatctgattccaccatctatctggaaagaaaactgcaaggtataaagagggggcttttcaaamttctcttagcttggtgatataaactatacaactgaagatatctttcaaaataatatactttgaaaaatattttccaaaatataatttgctatttttctta

SEQ ID NO: 182722 - DNA, 201 bp, Homo sapiens
tagatagatggatagatagatggatagatagatgcaggtataatacaacagttttcatttctgccttggcaacattgatctaattttaaagtgctctcatrttgctgtctttcttcaaaatattcaataacttagaatgaaagttcaattgactaaaattaaagaactatttcaaatattttcaggtacaacatggatgca

SEQ ID NO: 182723 - DNA, 201 bp, Homo sapiens
aatattttcaggtacaacatggatgcatgaaattttagacatgattctaaatgatggtgatgtggagaaatgcaaaagagcccagactctagatagacacrctttccttgaactgaaatttccccataaagaaaaaccaggtgagtaatatgcacgaagatagaaaggactttcacttcaggattccagagcaatgtgtac

SEQ ID NO: 182724 - DNA, 201 bp, Homo sapiens
caatcagctattgtaaaataacaggtgtgatttctgaagaaaaaggaggagaagtaggggggatataccgtggacattcccagaattaattgggggagctraaaaggtttcctcagagtgtaaaacccagtgaataacatgaaataaagacagacctcctagaggtctttctttccaagaatgacaacctattgtaaaaaa

SEQ ID NO: 182725 - DNA, 201 bp, Homo sapiens
ttctaatcaaaggcagtaagatgataacccatactatgaaccataaaacaacatttttaaaaattttaattagtattgatcttacccatcccagattcccmatggcgaagattgagaaaaacgctcccacgatggaaaaaaagccagaactgtttaacatcatggaagtagatggagtccctacgttgatattatcaaaag

SEQ ID NO: 182726 - DNA, 201 bp, Homo sapiens
ctatgaaaatgtcattaaaagcaaatatttttgatagagtaaagtggcagggtttatattaactgatttcatgacatttaactcagcttcaacattcaaaagactgtgatactgttgatattgttgatagacataaatacttgacccttacttggtgccagatgcaaaaaagtcaaagtgcaatgcatcagacctcaaaaa

SEQ ID NO: 182727 - DNA, 201 bp, Homo sapiens
tgcatgccctaattttgttgccagcagaatacttactttttcttaattttatcaagaaaacatcaccttacatattaatctaatttctttaaataagatakacacagacacacatacacacacacgcacgggttttactgaattaaaattccatatttgtcacttactatatactcatataaaattgaatctcttctggta

SEQ ID NO: 182728 - DNA, 201 bp, Homo sapiens
aagcaactgatgcaggtttactaggcatttgtaaaaaaatcaaataagaaacagaataaagaaaaaatagtacctatattctcataaccctaagaaaaacrtcagcgttttcatgtatttaaatctagatgttttaagcttaggtagatgagatttgtttgttgaatttagttcagcaaagtgaaggagagactttttcat

SEQ ID NO: 182729 - DNA, 201 bp, Homo sapiens
tgaattttctgtttcaagatttaaaaaaataaaagaacttctgttaattttgcagccatctgcttgccctagtctccatcacctgcctaggaaaaattacytttatttggtagttattatcgctatataggcccctgaaattaaggactcacccagctttggttcaactggactttaaactcagtccctttccctggaaaa

SEQ ID NO: 182730 - DNA, 201 bp, Homo sapiens
tagagacagggtttcaccatgttggtcaggctggtctcaaactcctgacctcaagtgatcctcctgccttggcctcccaatgtgctgggattacaggaatragtcaccgttcccagccaacaaagactaattctgattggcacctactggaggatttgatgctatatctacttaggttgtgtccaaggactgtgagcccaa

SEQ ID NO: 182731 - DNA, 201 bp, Homo sapiens
tcccaccacgttcgtctctcaacatgtagggattatggggattacaattcaagatgtgatttgggtggggacacagagccaaaccatgccatcaggcttgyagtgggcctcagtggaaggaagggaggaagggagggagggaaaaaggaaaagagggaaaaagagacaaaggggaaggaggaaggaagcctttttaaaaga

SEQ ID NO: 182732 - DNA, 201 bp, Homo sapiens
ttaagtaaagacaatgaggttttgcactgtctcgaactcctggcctcaagtgatcttcctgcctcagcctcccaaagtgctgggattacaggtgtgagcchtagctcctggcctgtcaaaccatattctaataaccattttctcctactgtcaacttacaacgaagtgttagattggggtttaaatggacactgctatgct

SEQ ID NO: 182733 - DNA, 201 bp, Homo sapiens
gcgtggagagataaaagaacaggcaggtgttttgtataatctatttggcaggctctggagcctctggcctcagtccaggcctcatcatcatcagaatatcrctgatggatgtgtaatttacgaagcctgtgtcattcctttgtcagagccacaagcagcctgccgccttcgtggtcacccagcaccctctacccaacaccg

SEQ ID NO: 182734 - DNA, 201 bp, Homo sapiens
atctgtgtgacatcattcctttggatttatgatttccgttttccaggtgaagaacatgagctttggaatcatctaataacttgccagtatttagcacccamcccgccaaaaaaaaagcactctacaaagtttgaatgaatggatgaatggatgaatgaataaatgggcaaatggatggacagatggatgactcataactta

SEQ ID NO: 182735 - DNA, 201 bp, Homo sapiens
gtcccttgtgctgcatccattggcttagctttattcaagtcacttcagcctgacattggtgaatacccattctgctgaacgtataaaggtgagtaagatgwgacataccaaaaggtttctgacagtacaatggggtgcaaacataatggcacacagtggagctgtcctggtagccccaagaacaaagaaatttgtacacat

SEQ ID NO: 182736 - DNA, 201 bp, Homo sapiens
aatctcattcaatctgtgtgacatcattcctttggatttatgatttccgttttccaggtgaagaacatgagctttggaatcatctaataacttgccagtayttagcacccaccccgccaaaaaaaaagcactctacaaagtttgaatgaatggatgaatggatgaatgaataaatgggcaaatggatggacagatggatga

SEQ ID NO: 182737 - DNA, 201 bp, Homo sapiens
catcatatattctccctcataagtgggagctaagctctgaggatgcaaaggcataagaatgacacaatgactttggggactcggggaaagggtgggagggrggtgagggataaaatactacaaattgggtacggtgtatactgctagggtgatgggtacaccaaactctcagaaatcaccactatataacttagtcatgta

SEQ ID NO: 182738 - DNA, 201 bp, Homo sapiens
cattcacaacactggttaatggcccagtctcctaacataaataaaatgcctccatccttacatatccagcccttgccataatgagccacagtccatctcaygttaacaaatgccttttcaggttgggcctgattttccttagttattccggttcggacgttaaaatgacagagttagtaattggagggcttcagaagaatc

SEQ ID NO: 182739 - DNA, 201 bp, Homo sapiens
aagaacacacacacacacacacacacacacacacacacacacacacacacacacaaacttggttgattttatttatttttcatatttctttctctctttctttttttttttttgagacagagttttgctcctgttgcccaggctggagtgcagctcactgcaacctccacctcctaggttcaagcaattctcctacctcag

SEQ ID NO: 182740 - DNA, 201 bp, Homo sapiens
cctacctcaacattataggttgatgctgaaaatggtctactcctatttggtaaatagctactccaatttggtaaacatcatcctgtttgcccagatcagaaaaacctgagagtcatttggaatccacccctcaccatccttagcctttacacccaatcagccatactactgtgcatgttccctccttatcctttagatctg

SEQ ID NO: 182741 - DNA, 201 bp, Homo sapiens
taagtaaacggaggtatttcatttctggatgggaaggcttggtattttaaagctgtcaatttaaaatattgaatgcatattgcaatagaaatgtataagcratgttataaaatgattttaaggtttatctggaaaaataaatgggcacagatcatcaagcaaatgttgaaaagagaatgatggagaaagacttctacttcc

SEQ ID NO: 182742 - DNA, 201 bp, Homo sapiens
ctatgagttttcctccagtttccaatatcttatttcttgtttctgtcagagacctcatcagaattgcctttaccatccatatttctaccatcattctgttygtgactatacttataatatctaagaagattgagcctttctctccagctttcttcttttgaacctttgccagaaacacccttaatactctgttcacaataa

SEQ ID NO: 182743 - DNA, 201 bp, Homo sapiens
atgcaccaccatgtccggctaattttgtatttttagtagagatggggcttttctcagttggtcaggctggtctcgaattcctgacctgaggtgatccaccygcctcggcctcccaaagtactgggattacaggcatgagccactgcgcctggcacttggttgattttattacatcaaaaataaaggactcttacttattag

SEQ ID NO: 182744 - DNA, 201 bp, Homo sapiens
cactttgcttagatacttctttcaccagatatcctagtttatcacctgcaagttctccctttcagaaagcattgagacatgggcatgattcagccaagttmttggctatcttgaagactatgagttttcctccagtttccaatatcttatttcttgtttctgtcagagacctcatcagaattgcctttaccatccatattt

SEQ ID NO: 182745 - DNA, 201 bp, Homo sapiens
agctcgctgagaggtgaagatgccagctgctcatcatttcctggcagcctgggtgtggctgaataggtaacctggatgcagcaggtggaccctgctgcccmggacttttcatctaggaaggatgggccagcagccagaggctggagaattggggtgtgcagtagtaggggtggtgtctggccatggtgtttgtgctacaaa

SEQ ID NO: 182746 - DNA, 201 bp, Homo sapiens
ttatgatggcaaaaataatgtgtattcattgttgagaaaatgctcaatagagatagctataaagaatgaaatgaaagtcatatgttcacacaaacttgcakaaatatgtattttgctatttaatacttttttctttagcattttcccatgtcattaaatgttccataaaaccatgttttctaaaggtttcatagtttccca

SEQ ID NO: 182747 - DNA, 201 bp, Homo sapiens
gggtttcaccatgttggtcaggctggtctcaaactcctgacctcaagtgatcctcctgccttggcctcccaatgtgctgggattacaggaatgagtcaccrttcccagccaacaaagactaattctgattggcacctactggaggatttgatgctatatctacttaggttgtgtccaaggactgtgagcccaagccaggga

SEQ ID NO: 182748 - DNA, 201 bp, Homo sapiens
tttaggaaatgagagggctgggttttgactgcaggggtgtggctccagagcctgcatcttcattgctgtgctgtgctcctaagaacaaggctgtaagattwaaaaaaaaaaaaaaaatcttccctatattaggaattagggtgtgagatatacctatctacctgccttccaagtgtatattcaaaaagaggatttgacaga

SEQ ID NO: 182749 - DNA, 201 bp, Homo sapiens
tttatcaccatagagcagtttttcttgttcttgaacttttcacataagtggggtcatcatgcattcttttatttttcttttgcatgaatttttttgagatytactcatgttgttgtgtgtgtctgtgtctgcagcttgttcatttcttgctgagcagcgttccattgtgtatatgtgtatccctttatggatccataagct

SEQ ID NO: 182750 - DNA, 201 bp, Homo sapiens
ttatctccattttacagattgggaaacaaagacagagaaaaatctatgtaatttgcccagggatgcactttaggaaatgagagggctgggttttgactgcrggggtgtggctccagagcctgcatcttcattgctgtgctgtgctcctaagaacaaggctgtaagattaaaaaaaaaaaaaaaaatcttccctatattagg

SEQ ID NO: 182751 - DNA, 201 bp, Homo sapiens
tcatcctgaaggaagtggaatatcgcaccaccacaggcacgtgggcagagacccacatagtcgactctcccaactataagctgtggcatctggaccccgaygttgagtatgagatccgagtgctcctcacacgaccaggtgaggggggtacgggaccgccagggcctcccctcaccaccaggaccaagtgtgcaggtaaga

SEQ ID NO: 182752 - DNA, 201 bp, Homo sapiens
ggaaataaccttaagagactttgggaatcccaacctcttgcagtttcccttaaaaattcccatgagaacagcacaaaagcatcagatcatagcaacactgkaaagtgagacaggtgaacttttgacagaatctgggagagttttccctcaactccaaggctaataggaatggtcggaaaaacagagctcagccacctatgc

SEQ ID NO: 182753 - DNA, 201 bp, Homo sapiens
gtgactatggtgacaactgacctcatccacaaaagagccaaaacccagggagtcagattgttcttatgtggaagagaaggcccaggcctggcaaacagtastgaaagttcgtctgggaaactgcaatacccacatgatgctcactttacgaatatcagtctctttgctttgaaaagaatcccaatgttattctctgcacca

SEQ ID NO: 182754 - DNA, 201 bp, Homo sapiens
cgccagggcctcccctcaccaccaggaccaagtgtgcaggtaagattttttttttttcccaggctccattatgagaggctgtgctattgccaagactggcyttcctcttgccttcctgtgacagataattccgaattttctttgaatgtgaatgtgcttcctattgtggataaacaggatcaaggccttggggtttttttt

SEQ ID NO: 182755 - DNA, 201 bp, Homo sapiens
cccccccccgcccaggccattttctctgggcctctgtttccctatctgcaacacgggactgaatttattgttttattcactggagtggcactgtctagcaygtgccagcgacaataccagtgccaaggacgtaaaacaaagtcaggggtgtttctgccctgccagtaggcttacgttccggctcttgtttgctggcctttt

SEQ ID NO: 182756 - DNA, 201 bp, Homo sapiens
aaaaaccaggaaatgcagagcggggggacaaatggaggagagatattaactagaacattgctgactcaaggccgtccagcttcagtgggagttctgattargccccatgtctgcctgatgccacctgcaacatgggctccgcatgtgccaagacactgagaactgtttgccgacacttggtgtatttgtcagtgatcttac

SEQ ID NO: 182757 - DNA, 201 bp, Homo sapiens
gcaaatgccagggtggcttctccagatctctctattagacttctgcccttctctccaagagacacattccataatagttaaaatgaacatagaacaggaarctgcttaaatcttatggctttagcagaatcttctggctctccacacacctgactcaaagtcagactttcctccctcgggggatcaagcctgtactatgtg

SEQ ID NO: 182758 - DNA, 201 bp, Homo sapiens
atgcactaatcatggtttagttgattagtgattaatacgccctttttcattgccattggtcacattagaaaatagtgtttctccaaaaacaaggtaaccatttttttttttttttttttttttttttttgagacggagcctcgctctgtcgcccaggccggactgcggactgcagtggcgcaatctcggctcactgcaagc

SEQ ID NO: 182759 - DNA, 201 bp, Homo sapiens
aaaggaagatgttggctctgtggcaattgttttgtctggattttctaagggagccccaggttgagaagagctggatatgcatggaggagggagtctggaargtgggtggagagtgatgactcactgtttgcgccaatatcctctcctggatgtcttgggaaacacatctacggggataaagaagaaatgtcattcttgtcc

SEQ ID NO: 182760 - DNA, 201 bp, Homo sapiens
tgcactaatcatggtttagttgattagtgattaatacgccctttttcattgccattggtcacattagaaaatagtgtttctccaaaaacaaggtaaccatttttttttttttttttttttttttttttgagacggagcctcgctctgtcgcccaggccggactgcggactgcagtggcgcaatctcggctcactgcaagct

SEQ ID NO: 182761 - DNA, 201 bp, Homo sapiens
gaatgtttaatacctcaccagggcccagtgctaggtggcttttgaccatcagaaatgtttcaggttttattctttctccagcttttcttcttttcctttawtttctttaaatgaataaagcgacttgccatgaatcaagtgggaattgaagtgaaactaacccagatgttatgggtttgacttctccttttcttcacccca

SEQ ID NO: 182762 - DNA, 201 bp, Homo sapiens
gcactaatcatggtttagttgattagtgattaatacgccctttttcattgccattggtcacattagaaaatagtgtttctccaaaaacaaggtaaccatttttttttttttttttttttttttttttgagacggagcctcgctctgtcgcccaggccggactgcggactgcagtggcgcaatctcggctcactgcaagctc

SEQ ID NO: 182763 - DNA, 201 bp, Homo sapiens
ccatgtcttaaatgcctcctggctctgacagtatctctgaattgtttctggaactaccttagtccctaagagcttcctgcctctgtatcccctggaggctyctatccctacctaagagtctgggttgggactattcctctgaaggtcctctggattccactctatctctatgggttactgactacacctgtctctctgata

SEQ ID NO: 182764 - DNA, 201 bp, Homo sapiens
gtcagaaaattcaaaatgacatctgtgggtcgccctctgtttctttttttaaaaattttttgtgggtacatagtaggtgtatatatatttatgggttacaygaggtattttgacataagcatgcaatgcgtaataatcacatctcgatagatggggtgtccatcccctcaagcaattatcttctctgttagaaacaatcca

SEQ ID NO: 182765 - DNA, 201 bp, Homo sapiens
aacttgttttgctgctgctgcactctctgcttcctctgggttgtaggaccacggaagagagatgaaagctaaagaagggagaaaacctgctctgatcataytcggttatggagcctctgattgagacgccataagaattatctgggcacggcgtggtgactcacgcctgtaatcccagcactttgggaggccgaggcgggc

SEQ ID NO: 182766 - DNA, 201 bp, Homo sapiens
cgattttcacctcattgcacttctgcaatcctcaacagtaggttacgtcttcccataagaagaatatttcaactggtgttataatttttctcttgcatttrtttgccctatctggcaaataagtatgcctgctattacgattaatttaatgcttaattagtaattattccatttacatttttagagcttagaagggctttt

SEQ ID NO: 182767 - DNA, 201 bp, Homo sapiens
tgttccagatgggcaggaggtagtctaggcaggaggaaatcagctggattgtgactaatacagcccaaagcaaaaatttgcataattcaaactggatctaygttaattaggacacatgatttgcataatgcaggccgctattgagtataactcgagccaggctggtaacaaggaaaaaagctcttgtttcctctaaattgt

SEQ ID NO: 182768 - DNA, 201 bp, Homo sapiens
ttacctccctgagcctccacttcctcatctataaatgggagcagtaactgagggtggtgttgagagttaaatgagagtagcacaatgcctgatatgcagtyattaataaacagtagttctaaaggaggacattagctgcgtaaggcctcttatcaaccatccccttgatttctgctctctctgcagacgaccattcccggg

SEQ ID NO: 182769 - DNA, 201 bp, Homo sapiens
agtggtgctgctacctgcccttccttccttcatgtcttccctccacctttctctgcctgtgccctggcacaggagattgagtctcagacatcactgtgttrccttgccttctgttcatctgaaagagcgccttgcaggggatgaggagagagggaggagaccaagggaggggtgttgactgctgcagctttctcccctcca

SEQ ID NO: 182770 - DNA, 201 bp, Homo sapiens
agtcaagaacccatacctcagagaaaactctaagtacaccacatgcttttgatatcatatatcaaaataacatatgataaccatatatatacatgcgcgcktgtgtgtgtgtgtgtgtgtgtgtgtgtttgtgtgtgtatggtttttttcttttagagacacggtcttgctcttgctctgtctcccaggctgaggcaggag

SEQ ID NO: 182771 - DNA, 201 bp, Homo sapiens
tgagtacttgtttgaatatatgaatgaatgaatgatggagctggaattcacactcagatctagttccaagcccagacctggttccatcttttctcataatrtattctctcttcaattaagccaaaatctgtcctctgtaacttcattcattcctgcttttgtacacaaccatgtattagtcagcaaccacgtgctggcctt

SEQ ID NO: 182772 - DNA, 201 bp, Homo sapiens
gtcaagaacccatacctcagagaaaactctaagtacaccacatgcttttgatatcatatatcaaaataacatatgataaccatatatatacatgcgcgcgtgtgtgtgtgtgtgtgtgtgtgtgtgtttgtgtgtgtatggtttttttcttttagagacacggtcttgctcttgctctgtctcccaggctgaggcaggagg

SEQ ID NO: 182773 - DNA, 201 bp, Homo sapiens
tttgctccaagtcacacagtttaggaagtagctgaggttggggcctactgagtccgattagagtcctgctctggacccagctgaccatagaactctaagtrcaatgcttagaacttagtaggtgcttagtaaattggagcctttggtactttaacacctaggggctcactttctctctcattatcaatatattacctactt

SEQ ID NO: 182774 - DNA, 201 bp, Homo sapiens
ataaatccttcatttccatctaagacctcatcagcctggccttcactgtccgtatttctatcagcattttggtcacaaccacttaacaagtctctaagacrttccaaactttccctcatctccctctctttttctgaaatctccaaactcttccagcctctgcccattaccagttcaaaaaccagttcaacatcttcaggt

SEQ ID NO: 182775 - DNA, 201 bp, Homo sapiens
tgtggtgactcatgcctgtaatcctagcactttgggaggctgaggcaggtggattgcctatctcaggagtttgagaccagcctgggcaacatggtgaaacyctgtctctactaaaatacaaaagaaattaccaggcgtggcagcgtgtgcctgtagtcccagctactcaggaggctgaggctggagaattgcttgaacttg

SEQ ID NO: 182776 - DNA, 201 bp, Homo sapiens
ctccagggagtgctttcccatcacagtgacagttctgccatagacttgcactcagctttggcccttttgtacccccatccctcttcttgctttataccagygtattagaccattcttgcattgctataaagaaatacctgtggccaggtgtggtgactcatgcctgtaatcctagcactttgggaggctgaggcaggtgga

SEQ ID NO: 182777 - DNA, 201 bp, Homo sapiens
ggggatattgaatctattcacagggccatggcagtcagttatgaggcttttatttttcctacatttttaattccctcacacacacctttcttttcttaggycttcaatgaaggactatgtaaactgtgcattgcacaactccagggagtgctttcccatcacagtgacagttctgccatagacttgcactcagctttggcc

SEQ ID NO: 182778 - DNA, 201 bp, Homo sapiens
agttattaaatgggacaatgtatgtgatgcccttagcacagtgcctggcacatagttagcactcaactaaaggaagctgttgtcattatgatgattgtctrgtcgcatgtttgggtgctttcaacattgctatccttccctttcccttcctaggtgcctccacccagaattctaacactgtggagccagagaagcaggtgg

SEQ ID NO: 182779 - DNA, 201 bp, Homo sapiens
actaatcccagcattctcccttatggatgaataaactatttatgattgcagttgggcagaattgggtcgtgtgtccatccctaaactatgggagtgggaargtagatatgctgattgacttaagctaatctgaacctactctgatcataccctgctgctggcaggataaatcccaaaccatatgggctggctatgggatag

SEQ ID NO: 182780 - DNA, 201 bp, Homo sapiens
ccaagctgggggagacagggaggacaaagggcaaagcttctataggtgatgatctgttctgcctccttcttttcgaagcagatggcagccgcggggagctytcccagcccaccctcacgatccagactcatccctaccgcacctgtgaccctgtggagatgagctacccccgggaccagttccaacccgccatccgggtgg

SEQ ID NO: 182781 - DNA, 201 bp, Homo sapiens
cttccccactgtgtctctgtactggcatgagttgatgcagcctttgattggatcccataagctttgggccaggcactgccaacacctagatgaaaagtgaytacttacttccatgaggatgttcactggctgagcagagtagtgggtgggaggggcagattagcaatctatgaaatggttgctaactaatgcagctttggt

SEQ ID NO: 182782 - DNA, 201 bp, Homo sapiens
atctagctgttccacagtacctttggggactcaaatacctccaaggtatggagcactgtagcaggctacttagtgtgaggactatgaaaacgatgacagcwgagctcgtgatccaagtgtcttcttggtgggacccttctaaatctttccctgggacaccacattctccaattgcggacatccagtctctataggattgcc

SEQ ID NO: 182783 - DNA, 201 bp, Homo sapiens
tatcttgttttgatttgcatttctccgatgattaacaatgctgagcattttttcatgtttgttggccacttatacgtcttcttttgagaaatgtctgtttrtgtcctttgcccactttttaatggggctatttgtttttttttcttgctgatttgttaaagtttcttacagattctggatactagtccactgtcagatgca

SEQ ID NO: 182784 - DNA, 201 bp, Homo sapiens
aaagttactggggaaactatggaaagacgctgaggtcaggtctaaattccatcatatcaactgggaagctcagtcttagacaaaataaagacacaagttgkgataatgtgaaaactatttgaaaactatgggatcagggttaaatctacatcctattaaatgaggagtctaatagagcagtaaagtaagaattgtatgtat

SEQ ID NO: 182785 - DNA, 201 bp, Homo sapiens
caaaaggtctcctggtcttatgtcgctagcttcgttttacatcatgcctcaggtaattcattatgatgatagccatgccagaattttgtatgtcttcaacwgcaccatgcattttcccactttcaggcctttgcatgtctgtgtctgagtctgggatgaccttcctgatgcttcctgtgtctaacttctaaggttaaatgg

SEQ ID NO: 182786 - DNA, 201 bp, Homo sapiens
tccttcaagaaagacaagtacagcatgccctggctttttgaatgttgaaagctacttttccatagctttgctatatgaaaaacacatggctagctatgaartccttggttaatattaatactttctctgagcttttggaaaatgctgccacattgttttcttgctttgcatgctgtttttgagaagtatcatgatagtcta

SEQ ID NO: 182787 - DNA, 201 bp, Homo sapiens
ctttttcagtgagtttctagctcttcttgcatgttccctataaattttagtgtccacttgtccagattcataaaaagtctattagtaattctgggattgcrttaaatttatacattaattagagtgaaatgacatctttaagatgttgaattatcttacctgagataagggatgtctttctatttgttcgagtctacatta

SEQ ID NO: 182788 - DNA, 201 bp, Homo sapiens
tgtttttttgagacagagtcttgctgtgtcaccaggctagagtgcagtggcatgatcttggctcaactgcaacctccccctcctgggttccagccattctsctggctcagcctctcaagtggctgggattaaaggcacccaccaccatgcccagctaatttttgtatttttagtagagacagggtttaaccatgttggcca

SEQ ID NO: 182789 - DNA, 201 bp, Homo sapiens
tgtgcttcctttgccccagctctggttcctttaaatggggaatggtacttattatagaaactcagacctgggaacgagtgggaatcattgttagtgagtaycactgattctaggctctttgtctatgtatccctctacctgtctatccatctatctttctgtctatttttttttttttttttttttttgagacggagtttt

SEQ ID NO: 182790 - DNA, 201 bp, Homo sapiens
caggctacttagtgtgaggactatgaaaacgatgacagcagagctcgtgatccaagtgtcttcttggtgggacccttctaaatctttccctgggacaccayattctccaattgcggacatccagtctctataggattgcccacatcttgctctgccttggaatttgtgcacaccatttcaagtcctgagttcaccctggcc

SEQ ID NO: 182791 - DNA, 201 bp, Homo sapiens
tgtccattaaggttttctccactataaagctactatttctttgtaatatataagtgttttgtacacacatatttctagactatgtaaaatcttcttcaaaytttcatcttttagcatttgctgatattttttgttgaaatcaactattacaaagatgtttgccattaggtatatctcccaatgctatccctcccccttccc

SEQ ID NO: 182792 - DNA, 201 bp, Homo sapiens
ccttctattccacaccatgcatatgtactcttgctttgtaactaagattcccagtaacgaaacacaggcaggaatggaattggatgagtgcttatgccacrtgtcttgcgggtgcacttgacctcacaggaacagacaggggaaaagcaatgggagctgggcactcagaaggctgtacttttctggcaaaggaaaaactac

SEQ ID NO: 182793 - DNA, 201 bp, Homo sapiens
tgtcagagataattttctgaaaaatccccaaacgctaggttagagatggtcgagtgctatgtcaagaaatctttcaaatctcttgtgacttaagtgctttsctggattcactgcccagtggccaagctggtagagaagaaatcaggggtcagggtctcactgctgttgtcagggagaaggatcaagacctggaaagatggg

SEQ ID NO: 182794 - DNA, 201 bp, Homo sapiens
tgcaggctgccaataattggtctttaaatatcaccacagcagtgatggtcttatgcagatgttgccagattttcttgcatgagagatatcaagttttagcsctttgaagatttacagtagtaaaagtcacatattaagtatctaagtctatcttacattttccagattgacagctgcttactaatgaatcattaattgaac

SEQ ID NO: 182795 - DNA, 201 bp, Homo sapiens
tggaggagctgagatttgaattcaggccgtctggatccagaatctgtgccctgaaccactctctatttttcaattaatattttatgaaacgtgattttaaratgtatgtgtaattaaattgtatattagataccataagtggacttttgcctaattcaatcatctgtacacttaaaattgtatttattaaagttgcccgaa

SEQ ID NO: 182796 - DNA, 201 bp, Homo sapiens
attctattcttggagcccagcgtccatctggcttagtcagaatcatggcttttggagacagggacagaggtctatgggaccttgcagaattgtgttgtttygaagtcctttcccaaagagcagtgagttaggctgtgctaagtctctcttcaggcaagatacggcaggggcagaggcagccctaggggaatgagggaggat

SEQ ID NO: 182797 - DNA, 201 bp, Homo sapiens
gtctctgattccctactaggcctgtgagtggctgcagggtatggactgcctctcgttgctgaattccttgtatcctgcatggggcctggaataaggaaggyggttatttaaaaataactgaattattgttaaagttattcgtgttgggaaagttgggagaaagtggtttcaggaggaccctaaaggggctgccacttgctt

SEQ ID NO: 182798 - DNA, 201 bp, Homo sapiens
aagaagataggaattacagtccagacctctcattgcagctgccagggatcctcaaagctttgacatcccataagggcaactattcagggactgtttccctrtaacattgactcccttatgacttgcacacctttattactatgagaatcactaggattcttcagaggctggcaagcaggcttgaaaaacagatcttctggc

SEQ ID NO: 182799 - DNA, 201 bp, Homo sapiens
gctgtggttgggggtagtttgtcaagtagcagtggataactaatacatggcttaacatgtgagatgttaattaatttgcccaaagcctttgactaataagyagtagagccaggatttaaccctggttcttctgatgcatttcaatagacaagaagataggaattacagtccagacctctcattgcagctgccagggatcct

SEQ ID NO: 182800 - DNA, 201 bp, Homo sapiens
aaatgaatctgtcagtatcatgtcagtgattatgaaatcagttaacttgaattctctcccagctgagtcttcagatgagatcattaccacagcggtcagcytgagtgcaacctcacaaaagaccttgagccagagatacacatctaggctgcaaccagatttctatctgcagaaactgagatcgtatatgtttgttatttt

SEQ ID NO: 182801 - DNA, 201 bp, Homo sapiens
ctcctcatgacctctttagcttgctttctgatcatctgctttttccacctctatgttctggcagcaccaaactgcttattggcagccccttccagaagctsctctttacctttgtacttctttgcacattgataacgctgatttgccttcaaggcctccctctctcatccactggctgtttgctgggataatgtctgcttg

SEQ ID NO: 182802 - DNA, 201 bp, Homo sapiens
catgcatgaatgcatggataggttcatggatggatggatggatagatggctgaacaggtgggtttgtgatctagatggatgggtaggtggttaaatgggtsgttagatagacaactttgtcctgtttaaattgtatggaacaaaagaaaactgtgcctgaagtcaatcttgtgagctagctgaaaaaaggttctgcagtat

SEQ ID NO: 182803 - DNA, 201 bp, Homo sapiens
agttgggtttgtctgaggttttctcaagattagattcaagttatgcatttttgtcaggaataccacaaaagtgatgttgcttccttctcaatgtgtcatamtaggtggcacatgatatcagtttgttccattactggtgacattaactttgattacttaaactgttgtccattaaggttttctccactataaagctactat

SEQ ID NO: 182804 - DNA, 201 bp, Homo sapiens
tcctctgtaaggagatatgaatgatgatgataaaaccccaaaaacccaccaattatttattatgggcttgttgtgagtcagttgggaatacagataaatargttacagttcctgccctcagcgaacccacaatccagtggagaagacagccatgaagacaaatgtgggcaataaattatcagcaatcccagtggcagaata

SEQ ID NO: 182805 - DNA, 201 bp, Homo sapiens
tcaacaaatagtgaggagctgtactaataacaattatcataataaattggcctttgattacatctgtcacctgagaatttcaaagactttacaaacatcarttagtaattacagctcaatggatctcttacagagcaggaatcattaaggtcagataagagctgcgcagggaagcatgaaggactgctctggtttgggttg

SEQ ID NO: 182806 - DNA, 201 bp, Homo sapiens
agtctcttcttcttttggaaaacattaacacccatagtatcaactttataagaatgtttctaaatattaaataataagatgaataaaacacttatcacggkgcttggcatgcaataaacatccaattaatgtcagatattgctattacatatcacaggtgggatagagcatagaggtacactcaggaaagaacaagcagaa

SEQ ID NO: 182807 - DNA, 201 bp, Homo sapiens
acagataccaagatgagctctcccaggttgctaatttattttttcatccacttacagtttctacagattttattatcatggtatgagacctgagggagcargaacattttccttcccatgcaaatatactttaaattcatttggaaagggagatgaaggttacccaaatgttgacagctgataatcttgtcagcctgggcc

SEQ ID NO: 182808 - DNA, 201 bp, Homo sapiens
gtacagataccaagatgagctctcccaggttgctaatttattttttcatccacttacagtttctacagattttattatcatggtatgagacctgagggagsaagaacattttccttcccatgcaaatatactttaaattcatttggaaagggagatgaaggttacccaaatgttgacagctgataatcttgtcagcctggg

SEQ ID NO: 182809 - DNA, 201 bp, Homo sapiens
acaggagtggctcctaaaatcagaccagtcttatccaattgtcccactgggtatactggaagcaggtacttattttctctgaaccgtaagttgcttgtcgrtaaatgggaatacctacatcacagattgttttgaaggtcgaataagctaaactgtgtaaattgcaactggtaattgttcaacatgctctttgggggctgg

SEQ ID NO: 182810 - DNA, 201 bp, Homo sapiens
gaggaatggtaaagaaatgcctgaaactcaatgtgctgctgttccaccctgaaaagcaacggtcttccaatgcttctataactcagcagaccttagacctstaccacccatcggtagctgagccaaggcaacagagagctgtgacccagaggcccccacgtaaccgtttgctgacttgtcactatagtctatgtaaggaat

SEQ ID NO: 182811 - DNA, 201 bp, Homo sapiens
ggtctcagttacttcacactgaaggagggattttagtaacagcttttcccctttacctccatggaggaatggtaaagaaatgcctgaaactcaatgtgctsctgttccaccctgaaaagcaacggtcttccaatgcttctataactcagcagaccttagacctgtaccacccatcggtagctgagccaaggcaacagagag

SEQ ID NO: 182812 - DNA, 201 bp, Homo sapiens
gtctcagatattaagcaaggtgctttcacctatgctgcttccttgattggtctcacaaagtgactacattttttcagtagatggacgaacacctagaggcycctggaatcccatggggtctcagttacttcacactgaaggagggattttagtaacagcttttcccctttacctccatggaggaatggtaaagaaatgcct

SEQ ID NO: 182813 - DNA, 201 bp, Homo sapiens
cagtttcaagcctgatatctgttcctgttgagtcttttggcacaattgatcttatcttttggttatgatattgccctttctaccccatttcttatttctcrtgttagttcagtgactgttcgcatgtccttatgaaaacctcagatagacatggaatgagaagctgtagatataagctctagagggttcgagttaagatca

SEQ ID NO: 182814 - DNA, 201 bp, Homo sapiens
ggagcacagcagggctgattctgagacctctgaggagggagaccccacagattgtactgcagctgtaaggggcatggcctaggttatattagttccttcaraaagatactgtgccatgggtgctacaaagaccagaaaagatgaaggcctggagcgtagcagcccctgttgctggaatgatgctacaaggaccttgaagca

SEQ ID NO: 182815 - DNA, 201 bp, Homo sapiens
cgcttacctctctactatgcttctgtagctgagtttatcacatgttgtctctgattccctactaggcctgtgagtggctgcagggtatggactgcctctcrttgctgaattccttgtatcctgcatggggcctggaataaggaaggcggttatttaaaaataactgaattattgttaaagttattcgtgttgggaaagttg

SEQ ID NO: 182816 - DNA, 201 bp, Homo sapiens
aaaggggcctcaggtgccccccataagggtaaaaaaaatttctgtttttcccagaacattactggttttagcactgaaagtcccacgtaccgggcaacccrtcagtcctgggcagactgagcaagtggcaagccagttggtcactctccctctactatcagtcagtcactgaaggatgctgccccacccagccacacccca

SEQ ID NO: 182817 - DNA, 201 bp, Homo sapiens
agtcatcactcttaagttcaaccttccacagattcttagggcatgagcataatgcagccaagttttttgctagggtgtaacatgagtgacctttattctaktccctaataaatccttcatttccatctaagacctcatcagcctggccttcactgtccgtatttctatcagcattttggtcacaaccacttaacaagtctc

SEQ ID NO: 182818 - DNA, 201 bp, Homo sapiens
tatcccctagagacttcccccacggccctgccgacccaccttgatttcagacttctggcctccagaactgtgagagaatgaatctctgttatcctaaaccrccaagtttgtggtaatttgttccggcagccctagaaaagtcatacatccaattaggaaatggctggaaagggctccaagccagggtttctgtcttctgga

SEQ ID NO: 182819 - DNA, 201 bp, Homo sapiens
cacacacacacacacacacatttcacccaactagcatgtcatggaagcagcaccgtctccagggtggtcctggcctgttccttcacaccatggggcctttscctgtgggttcctgccttgctctaactgctcatgtgtctaaagggagggttgaggtctgtttgggttgaatggtgtctcctaaaaagataagttgaagtc

SEQ ID NO: 182820 - DNA, 201 bp, Homo sapiens
agggaaataattcattgcagggtggtcagaacattcttttgggatggcctctgtttgcttctgtgaagtaggaggtaagatcatttcctgaagttgagggratagaggagcatggtgaaagttgaaaaaagctgcagtggggaatagaagggggtggtgacaaaggagtgttagctcggctgacactggaacccacgctat

SEQ ID NO: 182821 - DNA, 201 bp, Homo sapiens
agatcatttcctgaagttgaggggatagaggagcatggtgaaagttgaaaaaagctgcagtggggaatagaagggggtggtgacaaaggagtgttagctcrgctgacactggaacccacgctatcacttggagattgtacagttttctccagcagtgctcaggaccctgattggggcataggttcaaagaaagttgtggtt

SEQ ID NO: 182822 - DNA, 201 bp, Homo sapiens
gaggggatagaggagcatggtgaaagttgaaaaaagctgcagtggggaatagaagggggtggtgacaaaggagtgttagctcggctgacactggaacccaygctatcacttggagattgtacagttttctccagcagtgctcaggaccctgattggggcataggttcaaagaaagttgtggttggattgatacaaggtact

SEQ ID NO: 182823 - DNA, 201 bp, Homo sapiens
gggatagaggagcatggtgaaagttgaaaaaagctgcagtggggaatagaagggggtggtgacaaaggagtgttagctcggctgacactggaacccacgcyatcacttggagattgtacagttttctccagcagtgctcaggaccctgattggggcataggttcaaagaaagttgtggttggattgatacaaggtactatg

SEQ ID NO: 182824 - DNA, 201 bp, Homo sapiens
actggaacccacgctatcacttggagattgtacagttttctccagcagtgctcaggaccctgattggggcataggttcaaagaaagttgtggttggattgrtacaaggtactatggacctgaattatatgttgaagtcctaaccctctgatctcagaatatgaccttatttggaaatacggtcattgtgcatgcagttaaa

SEQ ID NO: 182825 - DNA, 201 bp, Homo sapiens
ccttacctggcatataccgatttgtccagtaaactccacatagaagcacacaccttcctaactttggaggactttaggacttgtgtctgtgtcccagctgwtgaccgccttgactcacccatgactcaccccaggctgtattcctcttagtttaacttctcatacatggttttgtcactggaaaggggtccggatccagac

SEQ ID NO: 182826 - DNA, 201 bp, Homo sapiens
tgtacagttttctccagcagtgctcaggaccctgattggggcataggttcaaagaaagttgtggttggattgatacaaggtactatggacctgaattataygttgaagtcctaaccctctgatctcagaatatgaccttatttggaaatacggtcattgtgcatgcagttaaattaagataaggtcattaggtgtgtgtgt

SEQ ID NO: 182827 - DNA, 201 bp, Homo sapiens
gctgaaggtctgaatagatcagaagactgagctctcctgagtaagagggaattccccagccgatgcctttcagactggaactgcaacatcagctttccccrgttctctagcctgacagcatttggtcttgacataactaatacaggccgggcatggtggctcacgcctgtaatcccagcactttgggaggccaaggcgggc

SEQ ID NO: 182828 - DNA, 201 bp, Homo sapiens
tttttttccccagatgtctcatttcccaagctccaggctcctgggcagccttgatttcctccaaatcctccaaatggtacccagggtagctgtctcagttstaaacagcgggtgggtgcagtttcgcattgtttgtttcacactcttcccagaatgaggtctgctgaatctactgttctctgcatcctcaccaccattagc

SEQ ID NO: 182829 - DNA, 201 bp, Homo sapiens
ttgtatcttatccagtgtttgcatttacctggaatctgccaagaggaatttcagcttcattcaaaaatgaatttgaatcattactcaaaaatccaagactycatactgtaaatggaggtgcccagttctctattaggacaaagtttgatagagcttctgtacagggccctttacttggagatgatagggcatcctttctcc

SEQ ID NO: 182830 - DNA, 201 bp, Homo sapiens
cacaggcaggaatggaattggatgagtgcttatgccacatgtcttgcgggtgcacttgacctcacaggaacagacaggggaaaagcaatgggagctgggcrctcagaaggctgtacttttctggcaaaggaaaaactacacactgtttcaaatgactgtctttagtattaaattttactgagaagagttgggtgaaagggt

SEQ ID NO: 182831 - DNA, 201 bp, Homo sapiens
ttctttcacagcccttcaaaggaatccaccctgctgacaccttgatcttggactttcagtttctagaacaataggatgataaattcctattgttaagcccycaccccccacccagtctatggtactttgttatagcagctctagcaaactcatacacaagggatgtatatttttttgtccttttccttcttttccccttca

SEQ ID NO: 182832 - DNA, 201 bp, Homo sapiens
tggttgggtttccatgatgagatgggaaagaagtagctttactttattcttcccactaagatactcagaaaacctagaaatagagcatggctatagaaccygggaaaccaacaaatgcacatcagaaggaatgtcctcaccataagagtggttggccctgagccaaccacagaggttttgttacaggaaaggggtcctgat

SEQ ID NO: 182833 - DNA, 201 bp, Homo sapiens
cctcagcctcccaaagtgctgggattacaggcgtgagccaccgtgcccagccccaaagtggtcatatttcttttaacaaacaccaacaaatgctaagcccwacagttcatattaagtttatgtagtatgtaccctccaagagcttatagaaatgtaagggagtctgtcatgtgccttgttatgcagtgtataacatggaga

SEQ ID NO: 182834 - DNA, 201 bp, Homo sapiens
agtgagttaccattgttgtctcctatgaagaaaatctaagtgatgaacttcctaaagtgtaaaaattagattaattaggtggcaagccactaaataatttkcccacagggttgcattaaatagtacacgtgtgtgtagataatgtatattgcacacaagttggttattaaattcattttcaggaacattctttttgccaga

SEQ ID NO: 182835 - DNA, 201 bp, Homo sapiens
catcaataaataaaggcaaggacctaggttccttaaggaccctaaaacttatgcctcaaggatgaaaatggtttaattcaaagtgttgggggctgggtgcrgtggctcaagtctgcaatcccagcactttgggaggctgaggcgggcggatcgtttgcggtcaggagttcgagaccagcctggcccacatagtgaaatcct

SEQ ID NO: 182836 - DNA, 201 bp, Homo sapiens
gaaaggaaatgtagaaggaggagcagacaggtttgtaggggttggggctaagttgagttttagatgtgtctagtgtgagctggctctgagacagctaagtrgaggtaaagttctacaacgtggtaggtttgaaaatctgatgctcaggactggagttttgttgtagaccgaaccaatgcttccacataggagaagttgggt

SEQ ID NO: 182837 - DNA, 201 bp, Homo sapiens
ccattgttgtctcctatgaagaaaatctaagtgatgaacttcctaaagtgtaaaaattagattaattaggtggcaagccactaaataatttgcccacaggsttgcattaaatagtacacgtgtgtgtagataatgtatattgcacacaagttggttattaaattcattttcaggaacattctttttgccagaacaagacat

SEQ ID NO: 182838 - DNA, 201 bp, Homo sapiens
ggaaatgccccaaccctgctatatggttgatacagtctttgattctctgagctcaggaattaaaatgagaaaattggaagcatttcttttctgttcttcargccattgggtttgctttatcccaagtaacaaagtctatcaaagtcaattgtatcatgtttgtttcagctccatagaaaatggcacagtggagtggcattc

SEQ ID NO: 182839 - DNA, 201 bp, Homo sapiens
aattcatttgaacaagcattcattgatcacttgttgggtgacaggcatcctgctgggcagtatggggtgggggtggagaatgaggcagagataagtaagcracaatgcctactttgtaaaaggtcacaatctagccagtgaaagagtagtcccatctcatgatattggaaaacaaagcagatggagattagatgagctcta

SEQ ID NO: 182840 - DNA, 201 bp, Homo sapiens
ctaagggataaagactttactctttgttgtagtttatttgaagccccctcaccaggaagacctatggttttaaaaatgaacaagtaggcaggggtatttgytcaaagaaaaaattcacttggacaggcctggcacagtactgatttccctttaaacagcctgggcagccttgtctctaggcaggtgtgggggtgaggtgcc

SEQ ID NO: 182841 - DNA, 201 bp, Homo sapiens
caataggtgaggattcaatttgttccacgtcctcacctgcagttagcattttttttcctttttcccctttgttttaaattttagctcccctaacaaaatgygcagttgtgtcttattgtgattttaatttggattcccctaatgagtaatgatgttgaacatcttttcatattcttatttgctttctgtacatcttcttta

SEQ ID NO: 182842 - DNA, 201 bp, Homo sapiens
aacatattacaggtttcaaatattaggatatggacatctttgggaggcccttattctgtctaccacaaagtggccgaggactgtgtttgcgggggagggtrggagagatagtcttcatataagaggcaggaggggtgggggtcaggatgtgtaaggctccacatattctcatgaaagaccttgggctttataggaagtggg

SEQ ID NO: 182843 - DNA, 201 bp, Homo sapiens
cgtggcagcgtgtgcctgtagtcccagctactcaggaggctgaggctggagaattgcttgaacttgggaggcagaggttgcagtgagccgagatcgcaccrttgcactccagcctgggcaacagagtgagattccatctctaccaaaaaaacaaaacaaaacaaaaaaaacaccggagactgggtaatttataaagactgg

SEQ ID NO: 182844 - DNA, 201 bp, Homo sapiens
cttgggaggcagaggttgcagtgagccgagatcgcaccattgcactccagcctgggcaacagagtgagattccatctctaccaaaaaaacaaaacaaaacaaaaaaaacaccggagactgggtaatttataaagactgggtaatttataaagaaaggaggtttaattggctcacagttctgcagctgtacagaaagcatag

SEQ ID NO: 182845 - DNA, 201 bp, Homo sapiens
ctagcttgttctatctcttttctctcttctgttgtacttttttcccctctgttatggaaggcaattaggttttgcttctgggttcttcccacaagcttgcrtgtttaaactaatgttggtgttcagcaaaataggggccttctgattgaaaaaaccttccttctgagaagtgaataaaaatatttcttctaacacatgaag

SEQ ID NO: 182846 - DNA, 201 bp, Homo sapiens
catgctatgtctgcttggtctttactaagatctaaatgaattcaggactaagcctttcaaaaacctactacaaaaacatcagtgaatagtataaactttamtaaatattccttgtgtgagatggagaaagtatacctttcagaggaaacaactgaaaattaatatcagaccatctttttttcaatgttcattctcacctgt

SEQ ID NO: 182847 - DNA, 201 bp, Homo sapiens
gaataaatgtataaaagacagacagataggacaataggtcgccgaactagtcagaggcaaagcaaagatgcacgtgcactaattctgacactaatctgccraatgtacacctcctcccattttcttgtctcctctgcgagctattttgactaggcaaatagtgagtaaaaacaggaattcccagagtcttggaagaaaggt

SEQ ID NO: 182848 - DNA, 201 bp, Homo sapiens
atcctgtagcctgaaattcttcatttctgttctactgcctgcagtccaccaaccacactttgagcagcaaggctctgagaccatgcctccatcaggctcaygaaggatcgtggccacatgacatttctgggtcttgcgccacatctatagaatctgactctagggccagggccctggaacctgcatgttgacacattctcc

SEQ ID NO: 182849 - DNA, 201 bp, Homo sapiens
gcagcaattgtgaaggctccagccaactttcatagagcactttctagaatgcacttcctagacatgtaatttcagtctttgcactgccctgtaggttcctyccttcccagaatccttccctggcagagttcttgctgccctcacttcattggattatagtgaacagttcattatttctccactctgagctctaagcaccca

SEQ ID NO: 182850 - DNA, 201 bp, Homo sapiens
tgcctccatcaggctcatgaaggatcgtggccacatgacatttctgggtcttgcgccacatctatagaatctgactctagggccagggccctggaacctgmatgttgacacattctccaggtaattctgatgcatcctgaaacctgtgaccctctaatcggtggactgaggtaggaggctctgggctcctgtaggaggggg

SEQ ID NO: 182851 - DNA, 201 bp, Homo sapiens
tcttaaatttgatgatttcatctcataattatggaatttctgaaacactaagtgataaaattttctttttcattaatttatgttgcgtgtaattttatacrtaaaattatatgtttctctctctctgtcatacacacacacacacacacacacacacacacacccctacctagtccatttttatttaactcatactctagt

SEQ ID NO: 182852 - DNA, 201 bp, Homo sapiens
tgtgcagatcggtctttgctcacattcttttttatgccagtttctgaaagccacaaccacttaaatcaatcatttgcaaacttcaccaggaacaccctttsctccaaggtatgaagcatatttggataagatagtgagacatttgtgaaaattgaggtcgagaatcgatggctgaggctgaggcattagctcagccatgat

SEQ ID NO: 182853 - DNA, 201 bp, Homo sapiens
tgtgttttcttcatctcattcactgaaacctcttgtgagtttctttaattaagttttattatcttggtttaccagctaataatcacaccatctatgaatamtgataattttatgtcctcctattacagttgcaatagctcttgttttggttttatgttttgttgctttgggtagagctttccgggcaacgttgccaaataa

SEQ ID NO: 182854 - DNA, 201 bp, Homo sapiens
acttaaatcaatcatttgcaaacttcaccaggaacaccctttgctccaaggtatgaagcatatttggataagatagtgagacatttgtgaaaattgaggtygagaatcgatggctgaggctgaggcattagctcagccatgattactcatctagcccttgacctttctgcggagacgtctaagaagtgagtaaattaacac

SEQ ID NO: 182855 - DNA, 201 bp, Homo sapiens
gctattttgtaacatattaaattaaaaaaatattttcaaagtattttcatattcctatctttgatccttatcacaatactaaggtaattcatacaatgttwtcattttattttaaatgatgtttaagttagagtcaccacaaaataatgcatgcttatatagaaatgataggaaaatttttaaaatactgacatttgggaa

SEQ ID NO: 182856 - DNA, 201 bp, Homo sapiens
tcaacaatgcccagctgggtagagagtattaggcatagattatgccatgtcgttcatgtggataaatccatccatcaattaaaaatatgatactacagctrttttgtaacatattaaattaaaaaaatattttcaaagtattttcatattcctatctttgatccttatcacaatactaaggtaattcatacaatgttatca

SEQ ID NO: 182857 - DNA, 201 bp, Homo sapiens
gagatggagtctcattctgtcacccaggctggagtgcagtggcgtgatcctggctcactgtaacctctgcctcccatgttcaattgattatcctgcctcascctcccaagcagctgggactgcagacatgtgcccctaccacgcccagctaatttttttgtatttttaatggagatggagtttcacgatgttggcgaggct

SEQ ID NO: 182858 - DNA, 201 bp, Homo sapiens
tgaaattttgtcagctttttgcgtaattcttagctatttccatatggttgaaaatttgggtcatttccagttttttttgttataaataaccaagcaatcasaaatttattcatgtttttcttttggtattgtacctttaaatagcaaaaatccccaggaatgcaattactgaaatgaaaaaaattgaactacagtgtactg

SEQ ID NO: 182859 - DNA, 201 bp, Homo sapiens
tttcttggccaagtttctgagattttccatgcaacacactcgcatgcattattttttcctggctggttctactaatagaattttactcctaaggaaggtgwtgtgctttttaaggtcactgtaaagagatgacatgaggtcaagtcttaccccttaattccctctcattagaatgtggcacccagaattcagccagagatg

SEQ ID NO: 182860 - DNA, 201 bp, Homo sapiens
gctggagaattggggtgtgcagtagtaggggtggtgtctggccatggtgtttgtgctacaaagttgctggacttcttgcttgttgatctcccagaactccyttttttttctgcttatttttcaggcctgatccttcagctttctgttcattatgagcttctcaatattccagaaacttcgtattttttaaaagatagtcat

SEQ ID NO: 182861 - DNA, 201 bp, Homo sapiens
gattatattttagatgtattgggttagataaattattaaaagtaacccatttcttttttacctttttaaatgtgcctattagaaaatttagaattgcataygtggctcacattgtgtttctattggtcaatactctcctagattattagatttttatgacgtcacttgtattcccaccaacagggatatctctctttgaga

SEQ ID NO: 182862 - DNA, 201 bp, Homo sapiens
ccatttttcttcctccaaaatgtttgcatctctcaattgctgtcacttttttccccattctcttggtatatatgggtttgtttatgtctttttaattcctrcactgtcattttggtgcatttggaagaaaatggaggttaatgcatgtgtttactttgtgatgtttaattgaaagttgaactcttctcaagtcgtttttct

SEQ ID NO: 182863 - DNA, 201 bp, Homo sapiens
ggacctcttacacaaagcagttagttaagttggaaacactgttaaaggaaattaaatatggcctgagaaggactccgtatttctttctctttctttcttgttttttttttctttttttgtctgttgtttgttagaattgaaaacctaactagtagtatgcagctgtaacaatagctaagtcttggccaatcccagtggccg

SEQ ID NO: 182864 - DNA, 201 bp, Homo sapiens
gtgagacatttgtgaaaattgaggtcgagaatcgatggctgaggctgaggcattagctcagccatgattactcatctagcccttgacctttctgcggagaygtctaagaagtgagtaaattaacaccagcagggagtgacaagggcctgaagacctgcagcttttctcactcagggactgatgagcagaactgagcctggg

SEQ ID NO: 182865 - DNA, 201 bp, Homo sapiens
tagcccttgacctttctgcggagacgtctaagaagtgagtaaattaacaccagcagggagtgacaagggcctgaagacctgcagcttttctcactcagggrctgatgagcagaactgagcctgggatgtcagtgttaccaggccccccttggcttttgaatctctttgcctgcccctaagcaagggcagtgagctccccta

SEQ ID NO: 182866 - DNA, 201 bp, Homo sapiens
attaacaccagcagggagtgacaagggcctgaagacctgcagcttttctcactcagggactgatgagcagaactgagcctgggatgtcagtgttaccaggmcccccttggcttttgaatctctttgcctgcccctaagcaagggcagtgagctcccctactgcaggctgtgtcctggggtcagtcctggcctgagcagaaa

SEQ ID NO: 182867 - DNA, 201 bp, Homo sapiens
ttaacaccagcagggagtgacaagggcctgaagacctgcagcttttctcactcagggactgatgagcagaactgagcctgggatgtcagtgttaccaggccccccttggcttttgaatctctttgcctgcccctaagcaagggcagtgagctcccctactgcaggctgtgtcctggggtcagtcctggcctgagcagaaag

SEQ ID NO: 182868 - DNA, 201 bp, Homo sapiens
atttagtaggcatcaggaccaaggcagataaggaacccttattaagcttttccgtcctgcctttgcttttcctctccaaagtctcaaccattttccaagcyggtattttgtgcctgtaagacagtaattctcaaagtttggtcccagatcgaatactgatgtattacctgggacttttttagaaatgcaagtgtttaggct

SEQ ID NO: 182869 - DNA, 201 bp, Homo sapiens
cctactgcaggctgtgtcctggggtcagtcctggcctgagcagaaagtggctgaatggattcagccatgggtccagctctgaccacgtgacccaccttcayctgctccggggcaggtctaactggattctgaatggactcctcaggcattcatagaggcctgtgccttgcatgtgcctctccctgtagtgcttgggtcacg

SEQ ID NO: 182870 - DNA, 201 bp, Homo sapiens
gagagtgtgggggacttctaagggaccttttacaaggtcagttaggacatgagacctgctttcttaggttgcttgaggcatggtgcacagggtgtgggaaytctagcctggaggaccaggggtatgaaagatggaaccctagaagacagtgtaacaagatatatacttctaaaggtcattgcaagttctcttcacctcctg

SEQ ID NO: 182871 - DNA, 201 bp, Homo sapiens
agagggggaaagtgttcaagctccggaatgaaacccaccacctctttgtgggtctgtacccagggaccacctattccttcaccatcaaggccagcacagcraagggctttgggccccctgtcaccactcggattgccaccaaaatttcaggtatctctgctagaaaggaaaaaggaaaaaaggttgtttcacccccacttc

SEQ ID NO: 182872 - DNA, 201 bp, Homo sapiens
gttggatacactgaaacaggagtggctcctaaaatcagaccagtcttatccaattgtcccactgggtatactggaagcaggtacttattttctctgaaccrtaagttgcttgtcggtaaatgggaatacctacatcacagattgttttgaaggtcgaataagctaaactgtgtaaattgcaactggtaattgttcaacatg

SEQ ID NO: 182873 - DNA, 201 bp, Homo sapiens
tatctggtagaactgagtgtgcaggggggcgagatgtggcagggaggactgttgctgtgtggggctcccgcaccctcatccctccagccaaaccacctcarcagcttggcctatttttctaacactccacaatggagatttattgcttttgtattgctttcctcaggccttcaaagatttattggtttttaagtgacagaa

SEQ ID NO: 182874 - DNA, 201 bp, Homo sapiens
tgttcatattttattattcctaaagaggtgaacactttgttcctggtgaccagaataagaagcagtaaaccttatctctgtggatgaggtgcagacataarccaccctttactgagccctaatacattccagatgtttagattaatataatctaatatcaatttagattaatggaatttacatagaatactttatatatta

SEQ ID NO: 182875 - DNA, 201 bp, Homo sapiens
accagggcggttgttgctttaacataaacatcaaggtgggagtgctgggatgagaatgggagtgtgtttgagaggctcaggcctgtttgaaggacatgggsagctactagagagatgcatgcagcctcactccttgtgtcactggaggctaggacaccagcccagaagggggcttttgagatggtctagctagccattgtc

SEQ ID NO: 182876 - DNA, 201 bp, Homo sapiens
agtttaaggctgtagggtgctggagtcccataggggcacttgctgtcaaggtaaaactgctgattttaccaaacgtggttggagatcaggaatacactgaygcatctccatagttaaactgaccactgctagttcatgatatcaggagcgtgggcatctcttttaaacaagatacactttgcacaagggcagcaatattga

SEQ ID NO: 182877 - DNA, 201 bp, Homo sapiens
tgagtgctcagatgttggaggccatctctgcctggagaccagggaagtgagactgcatttggctattttttttttccctatgtatggttccttttctacayttaaaaaaaagatagcaggaattggtttgaaaaactatgaaaataatgtacatgttgtattggaaaaatgcagaaaacagctaaaatagaacctcaagac

SEQ ID NO: 182878 - DNA, 201 bp, Homo sapiens
atttgttaaaaatattcttcttttgctagccaccaaagtgtggcctttttaccttgtgttgaaaatcccagtcaattgccagggtagcgtgctgtcttaayagaaggtttcttgggttgcttctgatgggaagttgaaacataaagggctgggggccgggcagcttcttgtgatgaatgcctgcaactgtttctgtgaaat

SEQ ID NO: 182879 - DNA, 201 bp, Homo sapiens
acacacatcagtgttggtgagacctctggcaaccaggtggccatacactgttggtataagtacaagttggtacaatatttagggacaacaacttaaaaagtttctgagcagataaatgtacactttatgtcttcatgacttcatgaaattctgggtgtgtgacctatgacatggtgcttgacctcccagagtgtcagttat

SEQ ID NO: 182880 - DNA, 201 bp, Homo sapiens
tttttaccataagacaaagggaaaaggaagatgttggctctgtggcaattgttttgtctggattttctaagggagccccaggttgagaagagctggatatkcatggaggagggagtctggaaggtgggtggagagtgatgactcactgtttgcgccaatatcctctcctggatgtcttgggaaacacatctacggggataa

SEQ ID NO: 182881 - DNA, 201 bp, Homo sapiens
atttgggatgattggcccaggaaatcattggagttatgaaaccctgagaaaatggtgtaccttcttgattaatgtggggttgtcacattttgcttctcttccccacccccagccacttgaacgctatctactggagtcccttctcctgacgctgcagctcattgaggcacaaaggagagagtaagagccctaaacctttgt

SEQ ID NO: 182882 - DNA, 201 bp, Homo sapiens
aaacacatctacggggataaagaagaaatgtcattcttgtccgtctatggagtgaagctttgaggtctaacatttatcacaatctccaggttccacttctraatgtattccactccttttatccattcttcacttcttatcgagattgagcttctgaaaacataaatcacatcatgccagttccctacttaaaatgcccta

SEQ ID NO: 182883 - DNA, 201 bp, Homo sapiens
taagaaatattaaaatgtcaaattacaggctgtatttcgtattggaattcttatctactacaagtgaatcttggtacaaccactttggaaaaccagaagcrtatggcaggatctacaaaaactaagtatatgcttaaccattaattctacttctaagtacaaatgagcagacatgaacacctaagtatgtaaaaagatgag

SEQ ID NO: 182884 - DNA, 201 bp, Homo sapiens
agcttctgactctcagcatccccatctcctgatgccttcacttgaacatctttgctgggcagctccaccaccatctttgactcctcaagtatgctagcaacctgggtggaacctgcatttgtcatattctcttggccactctgagtgaacttgtgttcactctctagggaggtctaggtttcccagtgggtttctgcagcc

SEQ ID NO: 182885 - DNA, 201 bp, Homo sapiens
cttcttatcgagattgagcttctgaaaacataaatcacatcatgccagttccctacttaaaatgccctaagagcttcctattgcacttacaatgaaatccraactccttgtttatatggcccacaaggcccagcaagatctagtcgcaccagcctctcaaagctcatctccttctattctcctggccatgcactatgctcc

SEQ ID NO: 182886 - DNA, 201 bp, Homo sapiens
aactaaatgcattttccctttcctttttcatctctctcgtctcctcttctccctctctgcctctgctcctctccgcctctcaggaacagtataaatttgtrtacgaggtggcactggaatatttaagctccttttagctcaatgggatggggaacctgccggagtccagaggctgctgtgaccaagcccccttttgtgtga

SEQ ID NO: 182887 - DNA, 201 bp, Homo sapiens
gaagaatctttcaggcccagatgttggtacagagtttgagaactgattctctaaatgcaaaaacatcaggctcagaagtaccctgaggttggctgccataygcagctggcaagcattccctgaaaccggcagatgaatagagcacttattgatataaatatcatcaccgcagcagctgggcgccttatgaaaataaacaat

SEQ ID NO: 182888 - DNA, 201 bp, Homo sapiens
gcatcaccaccctacgcttttggctgaagaaataaaagaatgaactcagctcatgagcctgggcatgaagtctggcctgcaaaaccctgtttgctcttctstttttcaacatccctttctgcaaaaccagagctcaggcacagaggatgactttcaaagaacttcacttcgggacatataaaacctttgaaacaaaggtca

SEQ ID NO: 182889 - DNA, 201 bp, Homo sapiens
tctggaacattccctgcagagttttggagtctgaaggcatcaccaccctacgcttttggctgaagaaataaaagaatgaactcagctcatgagcctgggcrtgaagtctggcctgcaaaaccctgtttgctcttctctttttcaacatccctttctgcaaaaccagagctcaggcacagaggatgactttcaaagaacttc

SEQ ID NO: 182890 - DNA, 201 bp, Homo sapiens
  misc_feature (1)...(201): n = A,T,C or G
ggcctcctttactgaaggcctggaaggcttcttatccaacccctttcctaaacgtcctccctctatccatgctgtgtctttaaggatggcagcaaggggcngtggggagccagttgggaatctgtgctgaactcacctgcactctctgtttcctgtccagctccatccatgcctgagtacgacacagacaccccattgaat

SEQ ID NO: 182891 - DNA, 201 bp, Homo sapiens
gggttagcctgcaaggtataccctgcctgctgtctctggcctcttctcagaaggttgatagggggataggtgaagctctgccctcactcattggttcatcytacagaatctgtctttatggtaattaggtaatttctggatttctttttttttctgcagtataagcatgttgcagtttccaatccttttcacaacagttgt

SEQ ID NO: 182892 - DNA, 201 bp, Homo sapiens
tgcatgaaaaccttgcactttttgcaaaatacctttttatatcatattgagaatgcggctcttatgtggttgcaggatttctataagaaaggcatatctgyagactctaatatcattggagtaaaaggcaattattatatgacaacttaaaacaaaaggaaggtaaaggatctaaagctggggtatgtaatgccagcaaag

SEQ ID NO: 182893 - DNA, 201 bp, Homo sapiens
gggtatttggaggctgggatcatctggaaagtggacagcaacaggcagcttagcagaatctgctggccaagttcacatgcctgccccttcccccgcctccmtaaggttcctctaaaggagctccatccagcttcctgagtgaggcatttatttgtttgtttgtttgctggcttgtcctacagatcaactacaaggctgtcg

SEQ ID NO: 182894 - DNA, 201 bp, Homo sapiens
gtacctgggaatgccttatttgctactacccatgacaacatggatgaatcccatggacataatgataatgttgagagaaagaaaccagaaacaaaaaagcrcgtttcataggatttcactgatacacagtgcaaaaactggcaaaactcgtctatgctgttaaaagtcacacagaggtgatccctgatgggggtaggcaag

SEQ ID NO: 182895 - DNA, 201 bp, Homo sapiens
gtgatcctcctgcctcagcctcccaagtaactaggactacaggcgtgcatcaccatgcccagctagttttttaaaacaaattggtgtagagatggggtctygctgttttgcccaggctgctcttaaactcctaggctcaaataatcctcctgccttagcctcccaaagtgctgggatttcagacatgagccactgcgcctt

SEQ ID NO: 182896 - DNA, 201 bp, Homo sapiens
ctgagctcagcaggaatgccacctactgttgcttagtttgtgcactgcacaaagacacactaccaaggaaatgaaatccattaaactctgtgctgtgtctkccaggaagaatatgactgggcaccaagaaaagcgtatcttcttcttctcacaaaggcagcatcagctcactgaagtacagggggctgagactgagttgag

SEQ ID NO: 182897 - DNA, 201 bp, Homo sapiens
ctgggcctcagccccggacattctgatcaggaggtctgggatagactcatgaatctgcagctctaacaagctcccaggtggtgctgatgctgtttatctgsaaaccacacgtttagtagcactgtggtatgatcctgtgtctctcttgatggcctaccctctcctttaatggctctatattaccctcgaaataaaatatat

SEQ ID NO: 182898 - DNA, 201 bp, Homo sapiens
gagagcttatgaaacaacagagtgctgggcctcagccccggacattctgatcaggaggtctgggatagactcatgaatctgcagctctaacaagctcccargtggtgctgatgctgtttatctgcaaaccacacgtttagtagcactgtggtatgatcctgtgtctctcttgatggcctaccctctcctttaatggctcta

SEQ ID NO: 182899 - DNA, 201 bp, Homo sapiens
aattggattaagagtcaggcatcggagatagtgcactcacagatttgtagcttaagcaaggtggtgagagcctgggaagaactgagcaggctgcctggtgrggggccctgtgggccccagggactgcttacagggattacctgtcatgcaagtggatagtagcttctgaactctcctttagactaaaggtgcttttcccca

SEQ ID NO: 182900 - DNA, 201 bp, Homo sapiens
aactgagtgtgcaggggggcgagatgtggcagggaggactgttgctgtgtggggctcccgcaccctcatccctccagccaaaccacctcagcagcttggcytatttttctaacactccacaatggagatttattgcttttgtattgctttcctcaggccttcaaagatttattggtttttaagtgacagaatcccagaatt

SEQ ID NO: 182901 - DNA, 201 bp, Homo sapiens
attctcctggccatgcactatgctccagccgtactggccttatttggtttcctagaaccctctaagttttttgcctgtttgcgttttgcacttgtcatttyctttgtctaaatcgtttgtcccctctccaccccacccctagccccctggatcttcacttggctggctgatgctgctcatttgctcattttagtctcggct

SEQ ID NO: 182902 - DNA, 201 bp, Homo sapiens
ataggtcttaggagttcttgattgttgattcttaaacatattatagtttttgttatcatagtatatggtatcttttttaactgtgttttttagttacttaytgatggtgtagaaaaatgctattgattttctggagttgatattatatctagctacctagtaaaacttattgattctaatagtttgttgactgtgtggcat

SEQ ID NO: 182903 - DNA, 201 bp, Homo sapiens
tagccacttcctccctctgaaaggagacttagggaaaggaatacaaatcttgttgatttcctctgaaaggagagtgggggaagcattgtacaagtctcatygatttcccattttaggctcaaacatagaacacatgcattgtcgggggtgaggcagcagcgtgagtctcatatttctgagtaaatggaaaccattcatggt

SEQ ID NO: 182904 - DNA, 201 bp, Homo sapiens
cttataaaagaggcttgagggaccccctctgttcctgctgctacgtgagggcacatagaagctgccatgcatgaagaagaggccttcatcagacatggaamctgccaccaccttgatctttgacttttcagcctcaagaactatgatcaataaatttaggccaggctcagtggctcatgcctgtaataccagcacttttag

SEQ ID NO: 182905 - DNA, 201 bp, Homo sapiens
agggaccccctctgttcctgctgctacgtgagggcacatagaagctgccatgcatgaagaagaggccttcatcagacatggaacctgccaccaccttgatstttgacttttcagcctcaagaactatgatcaataaatttaggccaggctcagtggctcatgcctgtaataccagcacttttagaggcgaaagtgggcaga

SEQ ID NO: 182906 - DNA, 201 bp, Homo sapiens
gatgttcagctgtgtaatagcacagcaaggtccagacaaatgcagattttaaaggagctttgactcattagtgggccttgttcctggtgagtggaatgtcrgagctctgatgctacctaagaggaggcaagtaccaaacctgcagctggatggggtgggatatctgctttgtggctgagccccagctagcagtggggtttt

SEQ ID NO: 182907 - DNA, 201 bp, Homo sapiens
ctgaacttcagtattattttcatctgtaaagtggggacaataacacccacctatctcaccttgttctatttgatgacatagtgtgataatgcattggaaarttacaaggagctttgcaaaagaaggtactacaattatttctaatggctccagtgcctctgggagtgagcttggccctgtgcagcttgctgatccctggcc

SEQ ID NO: 182908 - DNA, 201 bp, Homo sapiens
cagacccccaactgccacctcttaatgatgtccccctcccaaccacttctgcttccacctcctatttcccaccttttattctcatctttgctcagctgatratactcagctgctccaccctgacagagcagaaaggggactcagtcagtccccaaactggccacatggccttggacaagtcaccaaacctctgaacttcag

SEQ ID NO: 182909 - DNA, 201 bp, Homo sapiens
gaccaggtgagactttacccatgagtccacccttatctagtccatcactcaattttacagatgaggaaacagacctaaaggggtagagtacctaccctgaygtcactcagccaaaacctaggcacaaaatctgacgctggactctgattccagtgcttgtggtcactccactcagactgttccccagggacccaggcccag

SEQ ID NO: 182910 - DNA, 201 bp, Homo sapiens
atcatggctcaagaaagactttttggtggttgatgctccccataaacctggaaactccttctctacctgtttttgggtgcataaggataagcaatgcccawccaatctttgctcccagtgccactggctccaaggcaagcctatgtaggcacctcacaagtaactataaaaatagctagcatttagtgacttactacacac

SEQ ID NO: 182911 - DNA, 201 bp, Homo sapiens
acaactgctaattatgcctctgattcatttcctgttttatcattgcaaggcatgtttcaagcctttaaagacaggaaaccagagctgtaggttaagagcastgtccaaggtcacacaactgaacttcagttctctgcccacttaggacacaccacgaccttcttcttctgtctgtaataggttaggcagacagggcaaatg

SEQ ID NO: 182912 - DNA, 201 bp, Homo sapiens
aggacattgataaattgatcatttatttaagcaatgagagatcaagaaagtgatggtttcccattcaagtactaaccaggcccaaccctgcgattaccacaaaaaaaaaaaaaaaaagtgatggtgatcctccacttttgtaattcaccaagatcagaaacacatggtaggagcaacagggttattttcacataattccct

SEQ ID NO: 182913 - DNA, 201 bp, Homo sapiens
ataagttcgtttctttttgttttgtttttaatcatttttgctttccggtttttcaacttcattttatattttaaaaattccctttcaacattttaaaccayaatctctgtttccagtgctatgggccccaggggcaggcataactcaacaaataaaggagatttctgaatcagtaagtcataatgagaccactgagtgaaa

SEQ ID NO: 182914 - DNA, 201 bp, Homo sapiens
tccctgtgctggcagtgctggggaaggtgtgcagcccgggcaggccccggcacagccaaccaagcctgcaggctgagcctctgaccctgaagcttggcttyggaaagcagggaagcctggcagatgctgttcagaggcgttgctgctctgttctgttgtctccagggcccttcggctggtgagggtacaaaatagagcttc

SEQ ID NO: 182915 - DNA, 201 bp, Homo sapiens
cagccctttgatccatggtaaccaagaaagtccgcaccaggctagaggaagcccctgcagggccgcagcagggctgatacggccaggaaccacgggcatgkgtccctgtgctggcagtgctggggaaggtgtgcagcccgggcaggccccggcacagccaaccaagcctgcaggctgagcctctgaccctgaagcttggct

SEQ ID NO: 182916 - DNA, 201 bp, Homo sapiens
aaacgagttaacttccccactcctacaacagccctttgatccatggtaaccaagaaagtccgcaccaggctagaggaagcccctgcagggccgcagcaggrctgatacggccaggaaccacgggcatgggtccctgtgctggcagtgctggggaaggtgtgcagcccgggcaggccccggcacagccaaccaagcctgcag

SEQ ID NO: 182917 - DNA, 201 bp, Homo sapiens
ctgggccagctggatttcgagtttgttttctccctatgtttgatcccacagccaataggaaaacagctgaagtcagagagcagggcattgattggaaatcrgcaaaagccatgttgggcaaacgagttaacttccccactcctacaacagccctttgatccatggtaaccaagaaagtccgcaccaggctagaggaagccc

SEQ ID NO: 182918 - DNA, 201 bp, Homo sapiens
ggctgcagggttccaatgagcaggatcatgggattatttaacttcttgcatctccatgcccaaagccaactggagaggaattggtcatgcaacttagcaayttaaccaggttaaacttagcagaacagaaatcagctgagtgtgaagttggaaggcaagcagctcacgttcagaaacccaagaagtattgcaatacagact

SEQ ID NO: 182919 - DNA, 201 bp, Homo sapiens
tggaccagtcttgcctaaccgcagcctcgacctccctggctcacgcaatcctcccggcctcagcctcccgagtagctgggactacaggcatgcaccaccaygcctggctattttttaaaaaaaattttttgtggagatggagtctggctatgatgcccagcctgaatgtccatatttctcattactggtattgttgacatt

SEQ ID NO: 182920 - DNA, 201 bp, Homo sapiens
tttttagagacagggtctcactctgtcaccgaagctggagtgcagtggaccagtcttgcctaaccgcagcctcgacctccctggctcacgcaatcctcccrgcctcagcctcccgagtagctgggactacaggcatgcaccaccacgcctggctattttttaaaaaaaattttttgtggagatggagtctggctatgatgc

SEQ ID NO: 182921 - DNA, 201 bp, Homo sapiens
ttagacttacagaaaagttgcaagattagtatggagtttctatatacccatcacctggcttccccttatgttagcatcttgtataaccacaggatagtgaytgaaaccaggaaattaacattgatagatactttaagctacattataatgaacactataatctacaggccttatttgaatttcacttatcttcccactaat

SEQ ID NO: 182922 - DNA, 201 bp, Homo sapiens
attacccgcgcccgccaccatgcttagctaacttttgtatttttattggagacggggtttcaccatgttgaccaggctggtctcgaactcctgaccccagrtgatccgtcccccttggcctcccaaagtgctaggattacaggcgtgagccaccgcgcctggctcaatatttaattttaaaataattttagacttacagaa

SEQ ID NO: 182923 - DNA, 201 bp, Homo sapiens
tactcctaacatgtctttgcactctagctgatcctttaagagatttccagcaaaagtttttggtctcccaggccctggaagtaagactggccactcttcaygatgacaaaagagctccaaggttaagcaggtggattctagattcatactgccggggttccaagcctgcctctgcctcttcctatctgtgaagacactggg

SEQ ID NO: 182924 - DNA, 201 bp, Homo sapiens
ttaaatttaatttggctgaagattttcttttatcagtgcaaatggaaagttcttgaagaaaattaaaagtgctactataatgagcacacaaatacaccagraatgtttacctatgtatacatgtatttgtatgtattgaaagagatataagaaatattatgtataactatttatagatatagatatttaaactaatataga

SEQ ID NO: 182925 - DNA, 201 bp, Homo sapiens
ttttcttttatcagtgcaaatggaaagttcttgaagaaaattaaaagtgctactataatgagcacacaaatacaccaggaatgtttacctatgtatacatrtatttgtatgtattgaaagagatataagaaatattatgtataactatttatagatatagatatttaaactaatatagaaaaaaacacatatacatataaa

SEQ ID NO: 182926 - DNA, 201 bp, Homo sapiens
agatgggcagatcacttgaggtcaagagtttgagaccagcctggccaacatggtgaaaccccgtctctactaaaattacaaaaattagctgagcttggtgrtgcatgcctgtaatcccagctactagggaggctgacgcaggagaattgcttgaacccaggaggcggaggttgcagtgagccaagatcgcaccattgcact

SEQ ID NO: 182927 - DNA, 201 bp, Homo sapiens
cttgaggtcaagagtttgagaccagcctggccaacatggtgaaaccccgtctctactaaaattacaaaaattagctgagcttggtggtgcatgcctgtaakcccagctactagggaggctgacgcaggagaattgcttgaacccaggaggcggaggttgcagtgagccaagatcgcaccattgcactccagcctggacaac

SEQ ID NO: 182928 - DNA, 201 bp, Homo sapiens
ttggacgctgttattcttgcttcagaaatgatagaaccgtctttcataggagacctttctctcctctctctctctctcatgtttgttttttagcctgcttttttttttttttttttttgcactagtgtctttttatctatgtcctttccagccaaggtggccagtagtttgagccaaaggaaggtacaggggcattctttt

SEQ ID NO: 182929 - DNA, 201 bp, Homo sapiens
cttctgcactgtcctagcagaggttctctatgagggctccactactgcagcaaacttctacctggacatccaggtgtttccatatatcctttgaaatctargtggaggtttccaagcctcaattcttaacttatgtgcaccctcaggctcaacaccacatggaagctgctagggcacaggacttgcaccctcttaagccat

SEQ ID NO: 182930 - DNA, 201 bp, Homo sapiens
gtgggaatgagtgatgggaatggcagaagagggcagacttgagaaactgcatctttccaggatctaggggactattttctattcccaaagctactcaagamaacccttgggtttaattctttcttttagcctgagcagccctgtccacttgacttggaggaagggataggtcttcctaccccttgtgtcacagggaagggc

SEQ ID NO: 182931 - DNA, 201 bp, Homo sapiens
catattttacatcttttaatccttgcagcaagtctgcacagctatatatgatttggatgttatagctgggtaaacagaggctcaggggaggtggtaacctrccccaggtgatatggttagggtgtgacaagcctcaggtctgccttcagactccacccaatccataacctcccttctgctaaaggcaagaattggctgcca

SEQ ID NO: 182932 - DNA, 201 bp, Homo sapiens
aggtcttgcttcaagtcagtgggcaaatgccaggcccattgttccacgggcagatatcccaggcaggccaataccttagcaatccctaaaacaaatagccrttattgatctgaagtagagacagagagctgaatgagggaaggatggagggtacagaacactggtcattgcacgtaacatctagtccattggctagagcag

SEQ ID NO: 182933 - DNA, 201 bp, Homo sapiens
ggtggggctatggagtgcagagaggaccctcactcctagtgaggaactcaggttcaaaacaaaacccagaggacttttttcacagcaggtttctctgctgmttcctggggagacagagctgggggtgacagagtgggtgccttattcaatgctcctgactctcagcctccattcttcttcactgtctctgagggtggccat

SEQ ID NO: 182934 - DNA, 201 bp, Homo sapiens
tcctagaaccacgccagccagcaaagcatgctgtcacttctcagactcagcagaaagaacattttcaaccacatccaacagcattgacaagatcttttccmtctttgtggtctctacggaccaccagaaagacaccagaaagaagccctccttgcagtcatgccacactcaccatactgtttagagagctcaggagatcct

SEQ ID NO: 182935 - DNA, 201 bp, Homo sapiens
tgggctcaggtgtattggggtcttagacatgaggtcaggcagtcccaggttttcatcccagttctgttgtttaccttcagcacaatcacttcacctcaccmaccttcaggttctcacccatcagatggctctagggcagctctcaggatggagaggccaaattaagctgaatgattattaaatctgaatcttgtgtggccc

SEQ ID NO: 182936 - DNA, 201 bp, Homo sapiens
caaccacatccaacagcattgacaagatcttttccatctttgtggtctctacggaccaccagaaagacaccagaaagaagccctccttgcagtcatgccayactcaccatactgtttagagagctcaggagatcctgcacgccagccaaagggtggggctgtgtggtagccagaatcgtggccccaccagagatgtccaca

SEQ ID NO: 182937 - DNA, 201 bp, Homo sapiens
cactgggctcaggtgtattggggtcttagacatgaggtcaggcagtcccaggttttcatcccagttctgttgtttaccttcagcacaatcacttcacctcrcccaccttcaggttctcacccatcagatggctctagggcagctctcaggatggagaggccaaattaagctgaatgattattaaatctgaatcttgtgtgg

SEQ ID NO: 182938 - DNA, 201 bp, Homo sapiens
ttgtggtctctacggaccaccagaaagacaccagaaagaagccctccttgcagtcatgccacactcaccatactgtttagagagctcaggagatcctgcaygccagccaaagggtggggctgtgtggtagccagaatcgtggccccaccagagatgtccacatcctaacccctgagacctatgaatgtgctatggcacctg

SEQ ID NO: 182939 - DNA, 201 bp, Homo sapiens
gcacacaggatatcagcacattttctgagacttatcttctcccaatctaggaaaagccactgggctcaggtgtattggggtcttagacatgaggtcaggcrgtcccaggttttcatcccagttctgttgtttaccttcagcacaatcacttcacctcacccaccttcaggttctcacccatcagatggctctagggcagct

SEQ ID NO: 182940 - DNA, 201 bp, Homo sapiens
aagccctccttgcagtcatgccacactcaccatactgtttagagagctcaggagatcctgcacgccagccaaagggtggggctgtgtggtagccagaatcrtggccccaccagagatgtccacatcctaacccctgagacctatgaatgtgctatggcacctggtgtatggagcatacaaggatgtttctttcctttaaaa

SEQ ID NO: 182941 - DNA, 201 bp, Homo sapiens
gtgctaattcttgggctccaccccagacttactgaatcagaaattctgaggacagagtctagcaatctgtatttctagaagccctctaggtgatggtgacrcatgtgcaactttgagaatgtccaatcttggccatagcaatcagcctcctggattagagggccagatgaagtggagagggggtctgcgggcacacaggat

SEQ ID NO: 182942 - DNA, 201 bp, Homo sapiens
cctgggaactcattagaggtgctaattcttgggctccaccccagacttactgaatcagaaattctgaggacagagtctagcaatctgtatttctagaagcsctctaggtgatggtgacgcatgtgcaactttgagaatgtccaatcttggccatagcaatcagcctcctggattagagggccagatgaagtggagaggggg

SEQ ID NO: 182943 - DNA, 201 bp, Homo sapiens
tgttacctgggaactcattagaggtgctaattcttgggctccaccccagacttactgaatcagaaattctgaggacagagtctagcaatctgtatttctaraagccctctaggtgatggtgacgcatgtgcaactttgagaatgtccaatcttggccatagcaatcagcctcctggattagagggccagatgaagtggaga

SEQ ID NO: 182944 - DNA, 201 bp, Homo sapiens
agaaaattgggtatccagaaattaacaaaattaagaaaaacaatggcttcttcaaggaagctaggggggtaattggcccagtgattttgcacctggaaaacacacacacacacacacacacacacacacacacacaccccatcaatagagaacatatgaaaaacacaataacaacattaggtcgggtatggtagctcacgc

SEQ ID NO: 182945 - DNA, 201 bp, Homo sapiens
ccaatcttctgcctgtgctttccattggctggggccaaccagaatccagagaacaggagatctgttgacctaatccagtggttctcaaagtataatgcctrcagcagtggcattagtgttacctgggaactcattagaggtgctaattcttgggctccaccccagacttactgaatcagaaattctgaggacagagtctag

SEQ ID NO: 182946 - DNA, 201 bp, Homo sapiens
cagaatctcctttctaatttaagagtcaatcattctgcaagagatcagggcaagagcaggtctgcattcagtgctgaaagaagacagtgccgaggtaaccrgtgaattcagaaagcagcgcaagacataaaggagaatcaagaaaaaaagggaaatggaaaaaaaacaacctggaattgaaatgggatatgtaaaaaagaa

SEQ ID NO: 182947 - DNA, 201 bp, Homo sapiens
cttggcctctgacaatgatgcaggaagttcccaggtggtcagaaaacccctctggggtgcttggaaatgcattctagcatcaagtcccctgatcgcccctrattctccagatttatttccaccccatttcaccttaattttggcctctgtgcccccaacgatgcactcaaaagctctctctgcctgtccaaatactcctaa

SEQ ID NO: 182948 - DNA, 201 bp, Homo sapiens
gcaagaaagggagcaagggagagagaagaaaagtcctaggctcttttaaataaccagatctatgtgaacttattactgcaaggaggccatcaagccattcrtgatggatccacccctatgaccgaaacaccttccaccaggtcccacctccaacactggagattacatttcaacatgagattctgtggaggggacaaacat

SEQ ID NO: 182949 - DNA, 201 bp, Homo sapiens
tcaaagaaagttgtggttggattgatacaaggtactatggacctgaattatatgttgaagtcctaaccctctgatctcagaatatgaccttatttggaaawacggtcattgtgcatgcagttaaattaagataaggtcattaggtgtgtgtgttgggggtgttcaaatccattgtgacaggtgtccttacaaaaaggggaa

SEQ ID NO: 182950 - DNA, 201 bp, Homo sapiens
cctttgttatcccatcgctgcctccttcgagtagaaccagttactgtggggccttaggtgtgcttcctaacctctctgagcctcagtttcctcctgctccmatctcctttcagcactctgtaaatggagtagttccttccagctgtgaggttccactctggacccagctatgagcctggggtcactgcagaataggagaac

SEQ ID NO: 182951 - DNA, 201 bp, Homo sapiens
aagaaggtggtccacaaggccctgctgccctgggctgagttgtggccaggctgaaggacagagcccctggttaccctgtgagggctttgggaagtcccctsgagcaggagggaagtcatgggcagagagcacgtcttcctggcaactggctgcaggtgaggagggggacctgactcctggcactcagtgtggaagggaatg

SEQ ID NO: 182952 - DNA, 201 bp, Homo sapiens
acagagagggcagagtggtcaatgacaaggtagagcttcttgggagccacaggtgcagaaatggaccctactggccagtgggaagccacgagatgggaagsgaagcaagtgccagaatctctcagaagctgagggagaaaaccacttagcacacagttagcaacctcccaagtctggggtagactggggcaggggtctggg

SEQ ID NO: 182953 - DNA, 201 bp, Homo sapiens
atagttattgactccacatgaatgagtctgtggtttccccaaaaataccatcaaacaccctctctgatgttgtagattcaggtctgactgacctactcgayagtctcccaagtgctaggaattttcaagctctcttatacacatggacacatttcaacttcatgaaaaacctttcttcttgatgatggaatcgaatattat

SEQ ID NO: 182954 - DNA, 201 bp, Homo sapiens
tactgatactgcccaagagatagttattgactccacatgaatgagtctgtggtttccccaaaaataccatcaaacaccctctctgatgttgtagattcagktctgactgacctactcgacagtctcccaagtgctaggaattttcaagctctcttatacacatggacacatttcaacttcatgaaaaacctttcttcttga

SEQ ID NO: 182955 - DNA, 201 bp, Homo sapiens
aggtccgcagcacccagagcctgggtagaagagcctcaggagatcaggggtccctgcatcctgcatctatggtctgagttggagctgttacctttcaggakgaagagttcagtcctgcaaccagttctcaccatgaagtctgtctcagcctggctctcacaatttgtagcagcccccatgccacccaggctagatgcctaa

SEQ ID NO: 182956 - DNA, 201 bp, Homo sapiens
attggtttgaaaaactatgaaaataatgtacatgttgtattggaaaaatgcagaaaacagctaaaatagaacctcaagacatcccataataccaacgtctrtctagcctctattaaaattttgtgtcttccctaacaagttttcttcttctcatctatattttacaaaacataagatgcccttgagtatactattttgtac

SEQ ID NO: 182957 - DNA, 201 bp, Homo sapiens
agggagggagggatggtcagagtcagagtttgtgaacacacacgtgcatgtatctttgtaatagaatgatgtatattaatttgggtatatacccagtaatrggattgctgggtcaaatggtatttctggttctaaatctttgaggaattgcaacactgtctcccacaatggttgaactaatttacattcccaccaacagtg

SEQ ID NO: 182958 - DNA, 201 bp, Homo sapiens
tgaggaattgcaacactgtctcccacaatggttgaactaatttacattcccaccaacagtgtaaaagtgtttctatttctgcgcaacctcgccagcatctkttgtttcttgactttttaaatcaccaagtttgtggaactttgctactgcagcaataggaaagtaataaaagtccctaggacttggaaggcaaatgtcaca

SEQ ID NO: 182959 - DNA, 201 bp, Homo sapiens; identical to SEQ ID NO: 32303

SEQ ID NO: 182960 - DNA, 201 bp, Homo sapiens
actctggccttttgtgttttcagcatttttttgttgattctttctcatattcgtgagtttgtttagttttcgtttttgaggctgctgacccttgaatgggttttttttttgggtctttttgttgttgttgttgttgatgctgttgttgtcactttctgcttctttatttttatttcaatagtcaggtccctcttcattagg

SEQ ID NO: 182961 - DNA, 201 bp, Homo sapiens
gagcaagagagaggtggaggtgctgggctcttttaaacaaccagatctcatgtgaatggattaccacagggagagccttaagacattcatgagggatctgccccccatgacccaaacacctcccaccaggtcccacctcccacactggggattacttttcaacaagagatttgtagagggggcaaacattcaaactatatc

SEQ ID NO: 182962 - DNA, 201 bp, Homo sapiens
caatttaatttaattcagggagtattattgtgtacacattgataggtgagattgttctatagttttatgtttaatttcattttcaaagatctgttaaaccaaaaaaaaaaaaaaaaccaaacatgattaagatgtcaaataactcagaagggttcatgtttaaaaaccaccatatgctgtttggcttctctgcctttcaga

SEQ ID NO: 182963 - DNA, 201 bp, Homo sapiens
tctggtgcagacatagccaataactgaccagcactggaggttcaaaagcctttggtttgagatgagacaaatgctgggggtataatttatgctccagagckccctatgagatcaggctaagactgggactttgcctgatatcacacccttgctccacttcctcccattttctctcactcctttactagtttcttctgggac

SEQ ID NO: 182964 - DNA, 201 bp, Homo sapiens
ttttagcatttgctgatattttttgttgaaatcaactattacaaagatgtttgccattaggtatatctcccaatgctatccctcccccttccccccacccmacaacagaccccagagtgtgatgttccccttcctgtgtccatgtgttctcattgttcaattcccacctataagtgagaatatgcggtgtttggttttttg

SEQ ID NO: 182965 - DNA, 201 bp, Homo sapiens
aatgtcatgcataggtaacacacaagtattgtcactgccaaatattcgtaggtacagccttcaaagtaaaataaatacagagaagacaaagttatctcgtrcaaaatgctaagcatgtattctaattagaacaggagtctacaacagcctttgtctgactcagtgtaaccaacctggaccttttgacatctcaccaatggt

SEQ ID NO: 182966 - DNA, 201 bp, Homo sapiens
agagaccacagctttctttgccatgcctgtgtggttagacagatatatcgctcatgattttcacttttataaagaacactggaaccaacatcattgaatayaaagcttcatttatatttaaagttattccctgagaaaagattcttagatgtctggacagataagactgaatttctttaaagtgaagatacatatttagaa

SEQ ID NO: 182967 - DNA, 201 bp, Homo sapiens
cagatgtccattttggaaagatcactagggcagcagatatggaaggtatacttgattgggaagggctggtagcagagggatcagtcagcagactactgcartagtctcaccaagggatgatggggcctgaacaaacagtgacaataacttgtgtgtgacaggtgcatggtattcagttctggggggtgaggaagagagaga

SEQ ID NO: 182968 - DNA, 201 bp, Homo sapiens
cttggaagtaaaggctgatgctcagaagaagccagtaactctggcatacacctggggcttggggtatgcccagctcaggcctcacaggagcccggggctaytcctatagtatgagagacagagtttagggcaacacagattctacctgtccccactatagtagggcaggggctctgaggtgagggcctgccctcaggtctg

SEQ ID NO: 182969 - DNA, 201 bp, Homo sapiens
aaaatgcacatgtaataggatgcattttctaagaacacaaaataaatatattaaaatggttgctcatggtaggagagtggggaatgggataaaataaattaaaaaaaaaaaagtcaggataggctaggtatgctcgaggaacaaatgaccccaaaatctgatggcttaacccgcaacagaaatctctctctcgctagtgtg

SEQ ID NO: 182970 - DNA, 201 bp, Homo sapiens
ggcagcaacctggggtgaggagcatgggccccagcctgtgagggaggggctaggagaacccgggcaagagaatgatgctcctccaagaaggtggagtcacwctggctgatgcttggaagtaaaggctgatgctcagaagaagccagtaactctggcatacacctggggcttggggtatgcccagctcaggcctcacaggag

SEQ ID NO: 182971 - DNA, 201 bp, Homo sapiens
gaagctcctctaattcaaaggaggactttggcagcaacctggggtgaggagcatgggccccagcctgtgagggaggggctaggagaacccgggcaagagartgatgctcctccaagaaggtggagtcacactggctgatgcttggaagtaaaggctgatgctcagaagaagccagtaactctggcatacacctggggcttg

SEQ ID NO: 182972 - DNA, 201 bp, Homo sapiens
ggtccagggacagacaaaatctatgtcctccccaggccccatccaaggacatctatccctttccactaggagtcccatcgcagtgggtcttactttgcccygttggttcatctccacttccataaagctcctatctcaggccactctaaccactctgtccttgctttttaggccttaccagaggggcagacagcttcgtgg

SEQ ID NO: 182973 - DNA, 201 bp, Homo sapiens
attcccccactgggctagattgtgaactcatgacacagaagacatcaataacatttgaaacaatgaacaagagaataggtccagggacagacaaaatctaygtcctccccaggccccatccaaggacatctatccctttccactaggagtcccatcgcagtgggtcttactttgccctgttggttcatctccacttccata

SEQ ID NO: 182974 - DNA, 201 bp, Homo sapiens
caacaactaatacatgaaactgttgggtatgttttttggcttaggatctgtgggaaaaaaaaattaccaaaacaccaagggcactgtgaacctctggttamctgtatataaagaattgcctagaaaatggaaaacattaaaagagaacatgaaaacactagacaaaggtggcaactgtggggagcagctactgccagggtt

SEQ ID NO: 182975 - DNA, 201 bp, Homo sapiens
acattctcccacccaaactccctgggagtgcctcccaaacaaactacttgtgcctgacttgttatctctgagtctgcttccgaggcaacccaagtcaacarcattcaactgaacatcctgcaaataatcacttctcatatgtccaccaccacggtctaagagtccaaggtaccatcatgtgttgcctggagtactgccaca

SEQ ID NO: 182976 - DNA, 201 bp, Homo sapiens
cacctgtattgcttctcttccaggatgtttgtctaagggcgttggacacagaaagaacaaaattatgacccattaatagctaggaaggcactttattaccygaatctaaaacctaagaaaggctaagttgtagaacatggctcagcctgagaagcccaggaaaggaactccttcctgtgccctctaatgaatcttcagttg

SEQ ID NO: 182977 - DNA, 201 bp, Homo sapiens
acaagccaccccaaagacaaatgcctaaacctcaacataaaatgagctttacatgtgaggatttttgaaaaacatcatgtttattataacctgttttatattaaaaaaatctatttaatgtgcataaagtataaatagaatattcctaataaaattagacatagacaacattatgtatggtgatctgggaccaagatcaat

SEQ ID NO: 182978 - DNA, 201 bp, Homo sapiens
cttcatttagtcagccccaaattttctttcattcctgcagtggttgctgttcaaaggtaattatgatcaatgagggctcaaaataaaggcattcaaacttytgcattcaaccttacagatttttctaactctttaggactccaaatgtctgtggtcagatttgtggggtaaaatcctagaaccacgccagccagcaaagca

SEQ ID NO: 182979 - DNA, 201 bp, Homo sapiens
accattacatgaaatcattagttgctcttggcaacacgcccaggagttctgaatcaggcatattcctacagggactgtctgtaaagagtttgaagggtgtktccatgaagatgatttatggagtttcagaaaggagtaacagagacacagttctgccaccaaccctgtatccctagactcaagatcagtagcatcttgctt

SEQ ID NO: 182980 - DNA, 201 bp, Homo sapiens
cccaaaatagcctgaagactagctgcataaacatcctaggagtagagaagtcttgctaaaactgctgatgtcctgactacattctggaccaacctacatgkagactcagccccaaccacctgccatatgatccctctaaggtgaccccagtcttactccctagttcaactggacaggggtagaaagactacaatttagcag

SEQ ID NO: 182981 - DNA, 201 bp, Homo sapiens
gtcactctccagtccagaacccctattttctgaccaactgtcttgctcctctgtctttaattgtctcccttcacttggaaacatagccaagggctgatggrtcttctcatctttgaaggttggactcttcatgcttttattacatcttggatattagggaagtaaggaatgtttggagtctcttgatacagggtgactcca

SEQ ID NO: 182982 - DNA, 201 bp, Homo sapiens
tacttcactcctggtgttactctgcaaagtaaataacgcaatgtatactgcagagcctagtgaaatgctaggcacacagtaggtactcagcaaaatgtgcrtgtcctccataggccctatttcactgagatccctgtcatttcttcctgcctaggatgtggcagaagcctctgtgttttgttatattttagttagacattg

SEQ ID NO: 182983 - DNA, 201 bp, Homo sapiens
ttcatttttgtattgcaagatggattggtctgttatcaggtttaattctctgttcacccatgtatagccaatatataattttatcctaataggaaaaaaawaaaacacaggatagatttcacacaaaaggtccagtttcctatctaaaggttagttgttttgaagtgatcattcttcatatgccttgtagattccctgact

SEQ ID NO: 182984 - DNA, 201 bp, Homo sapiens
cttgagaagaaagagctggtgttgagagtgagacagatgggctatggcagtgatgctctctgctcagggaaactgccacatttccctgcagctggcagacrctgaaacacactgaggtcattgcttttttatttagatgttaggggttagaggtgctgacttgcacctgttctgcctcctagactgtcacttgccctctct

SEQ ID NO: 182985 - DNA, 201 bp, Homo sapiens
catctttctcttccttcacttttcttttctgtcctccaaagccatgtcttccacaggcaatttacagaggtggcgaactgaggctcagcgctaggaaatgyctcctccacagtcacaaggctcacaaccggaagcacaggattttaggttgaggtcgtttgttaggttgaggttttaggttgaggtcagtggtactttgaa

SEQ ID NO: 182986 - DNA, 201 bp, Homo sapiens
ctatagtgttatttttgtgaatcacagcactaatgctaccacttcactctggcttcatctttctcttccttcacttttcttttctgtcctccaaagccatrtcttccacaggcaatttacagaggtggcgaactgaggctcagcgctaggaaatgtctcctccacagtcacaaggctcacaaccggaagcacaggatttta

SEQ ID NO: 182987 - DNA, 201 bp, Homo sapiens
ggcaggatgcagcagagggcaacactgaagttcaaggtttttaaaaatcagcctgcagtagcattctgaccccaaagctatctactgaaatagggcttagkttcttagtggactaccagcctcacacgtttactctataggccttgggcaggattgactatcgaactcatgggagccagagattaaagctttgggagtgaa

SEQ ID NO: 182988 - DNA, 201 bp, Homo sapiens
tagtttgccatggcacaagatggcatgcatgacatggaggtggactcaataggaaagcttgattatggaaagaattctgtatcaggaaaggaagtggaactttttttttttttttggatatcaacgccttccagctaaagaccattaggaacacacccatagttgaacaagttgggtttatgacttattgtagtgagggag

SEQ ID NO: 182989 - DNA, 201 bp, Homo sapiens
tgattttatattttacatttaggtttatgttccattttgagtaaacttttacatatagtgagaggtataggtcaagggtcctcctttcttccccccgctcygtgtgaatgtctaattgttctggtactatttgttgaaaagcctgtcctttctccactgaattatctttctaactttgtcaatccctcagaatttcacaga

SEQ ID NO: 182990 - DNA, 201 bp, Homo sapiens
acttctggaggctggtgttcgattacaactgctcctctgtggtgatgctgaatgagatggacactgcccaggtaggaggaggccaagccaagccctaggtkggtcaggggggccatgctctaaacctggagggagatcccttgacagccggtgcctgccacatctgccccagccagctgtcttgtaataagcagtgtctgg

SEQ ID NO: 182991 - DNA, 201 bp, Homo sapiens
agtctgccaattacggggtcattaccactccctcccagaggctctattaggcatccctcctctgcttttatcaacatcatcacagcccccaggcctactcrgtccccttcagcccccactaagggagacagaggctcccaggaccatgacagggcctgtgtggtttcccacgaactgccacccacttatcacaactgtttt

SEQ ID NO: 182992 - DNA, 201 bp, Homo sapiens
gttctcccaccttcccctgttacacagcaaaaccctaagcatcacagcaaaatataagagatgtgggctggagagccgagttatctgtgtcccatgtaacygctgccatggtagtcagaagagcagcaggtttagggaagaaaagggagaattggaagaggtgactttgtgatgggagagaaggaagaagcacattcatcc

SEQ ID NO: 182993 - DNA, 201 bp, Homo sapiens
gtgggttctcagtaagtcgaactcatgaaaccaaggggttgatggagaaagggaacacccccatgtttgccaagtggtacatttaagcaatgccagtgaayatgtactagctattacctaaaatcccgggagaaaaagtaagcagtatttctctgtgcagtcaggaaggttttgctaacgacttgcctaggcccttctttc

SEQ ID NO: 182994 - DNA, 201 bp, Homo sapiens
tgtctgttgaatcctggaaatatggccagtctgaattgaaatgtgctgtaagtgtaaaatacacgttggatttcaaagcttttgtgtgaataaagaatgtraaaatatagcattaataatttttgtgattatatgttgaaatattatttcagacatatggggttaggtaaaatgtattattgaaattactttcatgtgttc

SEQ ID NO: 182995 - DNA, 201 bp, Homo sapiens
cactcttcatactctcctgccctaaagagcacatggagctaggatgaatagtgatagaagaaatacattgatactggtaaggaactacaggaatttgattrgctagttaagaaattttgtcttgactccctgaagacttttgctaagaaaaatgacttgatcaaagctctgtaaagggaactgtgaaagaaggaagggcca

SEQ ID NO: 182996 - DNA, 201 bp, Homo sapiens
ggagcttgggaaacctgttccccaccccctaatctccactccaacctctccccattatacagagcagaacagatcaagggcaaggaatctatctaatggtraacaggcctaggaccatcctagtccataatagtaagagtaatgttcataacataatcatatcaatagctaacatgtactaaatgcttattattatgtgac

SEQ ID NO: 182997 - DNA, 201 bp, Homo sapiens
agctgtttatgttatcaataaggcttctgctcaacagtaggctattagtagttaagttttgagggcgtcataagttatacatggattttcaactccacagrgggttggttcccctaacctccatgttattcaagggtcagctgtaacttatttgaggtcctatagctagaaatctgtgaagatcacatttgaatccaatgt

SEQ ID NO: 182998 - DNA, 201 bp, Homo sapiens
ttccagttaacaggatctgaatgtggaaggtagaaaggcccagaatggtatttagtttgccatggcacaagatggcatgcatgacatggaggtggactcartaggaaagcttgattatggaaagaattctgtatcaggaaaggaagtggaactttttttttttttttggatatcaacgccttccagctaaagaccattagg

SEQ ID NO: 182999 - DNA, 201 bp, Homo sapiens
aatgaataaattattgttggaggctcttcttctcttcctactaagggataaagactttactctttgttgtagtttatttgaagccccctcaccaggaagayctatggttttaaaaatgaacaagtaggcaggggtatttgctcaaagaaaaaattcacttggacaggcctggcacagtactgatttccctttaaacagcct

SEQ ID NO: 183000 - DNA, 201 bp, Homo sapiens
tgaggcaggagaatcacttgaagccgggaggtggaggttgcagcgagccgagatcatgccactgcactgcaccctgggtgacagagcaagactccgtctcaaaaaaaaaaaaaaaaaaaaaaaaaagccaggcatggcagcgcatgcctgtggccctaactgaggtgggaagatcgcttgagcccaggaggttgaggctaa

SEQ ID NO: 183001 - DNA, 201 bp, Homo sapiens
acatacctccatgagccaattaaggtaataatctatgatatcaaaatgaattagaaacacaccctactgtcggggagctcagagtccaatgggagaacaaraacacgctcaagacagcatgataagtgcaatgcaaagctacgctaagagccgtaggaccaagcaggctcattttctttcccctttggcagccctttcctg

SEQ ID NO: 183002 - DNA, 201 bp, Homo sapiens
tatacaccatgaaatattatgtagccataaaaaatgatgagttcctgtcctttgtagggacatggatgaagctggaaaccatcattctcagcaaactgtcrcaaggacaaaaaaccaaacactgcatgttctcactcataggtgggaattgaacaatgagaacaggtggacccaggaaggggaacatcacacaccggggcc

SEQ ID NO: 183003 - DNA, 201 bp, Homo sapiens
cacccacactatatgttaaaacatcaaatgtttacttctcacctgtatgacacgtccatcatgggtcaacagggagcagtcacacagggacccgggctgayggagctgccaccaagctgaacgttgctagtcatcatgtcagagggaaaatagaaagcggcaaattgggctttggctcttaaagcacttacctggataaaa

SEQ ID NO: 183004 - DNA, 201 bp, Homo sapiens
attttccctccctccttttcttccactcctccttcccttcctttcactcaccctaaaacatatattgagcactgtatctgtcaggttaggctagattacasctcaataacaaattcccaaatctcaaaagttaaacatcaaacatcaaaagcttatctttcacccacactatatgttaaaacatcaaatgtttacttctca

SEQ ID NO: 183005 - DNA, 201 bp, Homo sapiens
ctttggtactttaacacctaggggctcactttctctctcattatcaatatattacctacttatatgtttcaaactggtagtaaccagttttggcaaggaaygaagtaggctcttaacaggcatttctgcaggtgagttaactggtacaacatattaagaggacagtatgctatcttttttcagtttctctctcattaccta

SEQ ID NO: 183006 - DNA, 201 bp, Homo sapiens
gggcctactgagtccgattagagtcctgctctggacccagctgaccatagaactctaagtacaatgcttagaacttagtaggtgcttagtaaattggagcytttggtactttaacacctaggggctcactttctctctcattatcaatatattacctacttatatgtttcaaactggtagtaaccagttttggcaaggaac

SEQ ID NO: 183007 - DNA, 201 bp, Homo sapiens
cactggctaggatagctattattttaaaaacaaaaagataagtgttggtaaggatgtggaaaacttgcacactgttggtggagatgtaaaatggagctatraaaaaatagtatggagttctctcaaaagattaaaaatagaattaccatgtgacccagcaatctcacttctggatatatacccaaaaaaattgaagttaga

SEQ ID NO: 183008 - DNA, 201 bp, Homo sapiens
attaattaaatatctctcacatctactgctgtaagacacctagaagaaatagggggaaagctccatgacattggtctgggcgatgatttttggatataacrttaaaagcataaacaacaaaagtaaaaataggccattggaatcacatcaaactacaaggttttgcacagcaaaggcaacaagcagcataatgaagagaca

SEQ ID NO: 183009 - DNA, 201 bp, Homo sapiens
tattcaattaggaaaagaggaagtcaaattgtccctgtttgcagatgacatgattgtatatctagaaaaccccatcgtctcagcccaaaatctcctttagytgataagcaacttcagcaaagtctcaggatacaaaatcaatgggcaaaaatcccaagcattcttatacatcaataacagacaaacagagagccaaatcat

SEQ ID NO: 183010 - DNA, 201 bp, Homo sapiens
taggaaagtgctatctctgtccccaccccaggtcttctgagtcagggtctgcactgttacaagatccccaggttgtcactgtgcacgttgaagttcagcaygtacagtactgagttgtctgcaggccaagcattttccatcatgccaggaacatttactggagcctcagttttggaaccagtctttccctgaaccatgctc

SEQ ID NO: 183011 - DNA, 201 bp, Homo sapiens
atgtaatcacttccagcgttggaggggaaactacctgtggttgaatcaattgagagattatgttgaatcaattgagagagggattttcgagaaatttttascagttgaaatatatatcttcctgcacatgggatgtgtgctgctgcaataataaacaagttttcttcccagattctggcaataggttagtggatagactta

SEQ ID NO: 183012 - DNA, 201 bp, Homo sapiens
ctttttcatctctctcgtctcctcttctccctctctgcctctgctcctctccgcctctcaggaacagtataaatttgtatacgaggtggcactggaatatytaagctccttttagctcaatgggatggggaacctgccggagtccagaggctgctgtgaccaagcccccttttgtgtgaatggcagtaactgggctcagga

SEQ ID NO: 183013 - DNA, 201 bp, Homo sapiens
tcctcaggggtcacaaatctcatacacctatgctagtgcaagtctagaattcagaaacacagaacagagcattcttacaacatgactcctaagcacaagcmaactgcttcatcttatgcttcaacaaggaaatgtaatcacttccagcgttggaggggaaactacctgtggttgaatcaattgagagattatgttgaatca

SEQ ID NO: 183014 - DNA, 201 bp, Homo sapiens
atttgctctttattttttatgacactatggtatttcattgtgttgatggaaatactgtaatttattcaaccaatatccagtggacacccaggttgtttccrttatttactatcataaataatactgtagcaaatagcattgtgcatatgttgtttggtacttgtggcaatgtatctttagggtaaattcttaaaagtggga

SEQ ID NO: 183015 - DNA, 201 bp, Homo sapiens
attatcttctagaacaggaagtcaagtgttagagttggttgaatgagatgcccatgaatgtcattgaggacccacattctttcaagctctcctcttcatcmtcttatcttggcatgagggcaacctcagcccagctcccctcatggatgcaagattgtttcagcagttccaggcatcacacacagacatggtactgtctgg

SEQ ID NO: 183016 - DNA, 201 bp, Homo sapiens
catatttgacctccccctcacctccttgtttctatggatgaaccatttgctttttaaataaaggccagttttgctacttaatgcagcaaatcccacttacttttttttttttaactcaatgtcattgctccagcaattgtcccctttccaccctacatcaaaatttccctttgtaactggatatatttctcaccctccaca

SEQ ID NO: 183017 - DNA, 201 bp, Homo sapiens
agatcagtaacatatatgtcaattttctggttataatattgtactatagttacacaagtgttaacattggggaaaactgggtgaagggtatttaagacccrtttatgttatttcttacgattgcatgtgaatctgtaatgatctcaaaatatgacttcttttttaaaaagctagcacccaggtgatgggctggtgtttacc

SEQ ID NO: 183018 - DNA, 201 bp, Homo sapiens
tagcggagtttggcatttcactgagagacaattcttttcattattgctgcagtctcccagaatctagtaaccaggtcttagtgtagaaagaagaaactcarcgctagtgttccattgcatgagaggtccttgtgatgtaaccatttctgcatcttgactgtgatggtggtcacacaggtctacacatgggataaaattgca

SEQ ID NO: 183019 - DNA, 201 bp, Homo sapiens
ttattccctcacttcctagtttgatcactaagtggttaaggccagccacagagaatccctatcactactaaacatctgttgctctggcaaactcaacgacytttcattttttttccaaatgtattgtttatacaacctatgctgtggaacactggtatcagcatttttgctgcctctttcctcactgattttgatagaatt

SEQ ID NO: 183020 - DNA, 201 bp, Homo sapiens
gtaggttttatcatgaccattactaccaaggccagagagatttagtgttttgctccaagtcacacagtttaggaagtagctgaggttggggcctactgagkccgattagagtcctgctctggacccagctgaccatagaactctaagtacaatgcttagaacttagtaggtgcttagtaaattggagcctttggtacttta

SEQ ID NO: 183021 - DNA, 201 bp, Homo sapiens
tccttcaatccatcttaatttttatgcatatcaaaggaaattttagacatcactacacttccctttcctcccaatatttaactgtacacatcattaatgcmgactcaagagtctggttttttcctttgagataaaatttacttgcaaaaaaacacagaaatcttaggttttccattttatgagttcaacaattgcatacac

SEQ ID NO: 183022 - DNA, 201 bp, Homo sapiens
tccctaattatttcttctagtctcccggctttaaaatccatccatatgttaataattttcccaattgatacctccaggccaggcctctgcccagccctccrgagtcatttatccagctgtctcctcaacctctccacctagattgctaatcagcccgtggaattaaacacattcaaaactgagcctgtgatcctccttcaa

SEQ ID NO: 183023 - DNA, 201 bp, Homo sapiens
atcctcaccaaaagaattagaagacatgacagatgaaccttgaagataaacaaacattgtatttatcaacaaggtggagggtggatttcagagagcaaggwgtacctaacaaatgagtgtttccagagtaggcactagattctggagatacacgagtaaacaacacagatatgatacctgtcttcatggagcttacagtcc

SEQ ID NO: 183024 - DNA, 201 bp, Homo sapiens
caaaatcccagagggcctagaggggtgaggaggtagactcccatagaatgaggagaaaagagcccagtatttttctaagtacaaaaggcagcaggataagycatcgagtagtgagaataggtcacctgtaccaaccaggcaggtttggatagggccagattagaaagtcagaaccatcactactgtgagcgaatgtggtgg

SEQ ID NO: 183025 - DNA, 201 bp, Homo sapiens
tctttgaatagttatgattttgatgacataagaaattgcccaagaaaatgactggtacaaagtaagtgtctactgttagtggaaattaaaattagtccagycactgtggagagcagtttggagatttctcaaagaaccaagagttgaactaccatttgacccagcaatcccattactgggtatatactcaaaggaaaataa

SEQ ID NO: 183026 - DNA, 201 bp, Homo sapiens
agccggcatgttggcgggtgcctgtagtcccagctactcgggaggctgaggcaggagaatggcatgaacccaggaggtggagcttgcagtgagccgagatsgcgccactgcactccagcctgggcagcagagtgagactccgtctcaaaaaaaaaaaaaatttaagtccatagagaaaaagctacatgtactccaaagcta

SEQ ID NO: 183027 - DNA, 201 bp, Homo sapiens
tcattcctttattcgttctccctctttcatttttcttctttctgacacacgacttagcaaattaagtctttttaaatctctggtttatgcataataagaaygtgccccagagaaattaaacatcttctccaggaccctggagctagtagaggttaagctggacctcacagtgaggactttcagctccagaacccaactcct

SEQ ID NO: 183028 - DNA, 201 bp, Homo sapiens
gtcccctggagccacagtgaagctgaacattttcactctgagagaagagcttcggatctgagtgtagttaaaatcaccagaagcccatcaggagaagataygcattttgagtaaatgtggcttatcaacctccccacactcaccaaggcaaatggaactgaggcaggaaatagagatcatgatatcctcaccaaaagaatt

SEQ ID NO: 183029 - DNA, 201 bp, Homo sapiens
attgagtttttctagtttagctaagtattactctgcaactattttgcattccttagtcttattataatttttatgaatgagagatagaaaataggagcagyctgtattttcagtgtgaggcattacttagtcttttccttctatcacacatcttcccataagtgtgcaggttatggagtttggtgatatatacataataca

SEQ ID NO: 183030 - DNA, 201 bp, Homo sapiens
cttgtgcctatgagagctgagtctcaccactagcctagccttctggggtaaggagaaaactctgtaatctttgacttccttgtttatgacaaaacacgtcwatctgcaggaatcttcccggagccaccgcatccaggatctgtccttggtgctgaccctgatcttctttagctcaagatgatctagcattgatttctgcat

SEQ ID NO: 183031 - DNA, 201 bp, Homo sapiens
tttcagaaggtaccattgtaaattaaatgggttgaaaccatggtgcttccaaaaaatagtgaagacccttgtgcctatgagagctgagtctcaccactagyctagccttctggggtaaggagaaaactctgtaatctttgacttccttgtttatgacaaaacacgtctatctgcaggaatcttcccggagccaccgcatcc

SEQ ID NO: 183032 - DNA, 201 bp, Homo sapiens
taagggatgtatcatattgtatttaaatgggaaagtacaagaaactaatatttattgagccctaactgtgtgccaaggactatgctagatgctgtgcataygttatatcatttaatccttaaaacctatgagttgatgattattgttggtactaggcttctttcacacatgtggagattgaggttcagggagattaaataa

SEQ ID NO: 183033 - DNA, 201 bp, Homo sapiens
ccttttacacttccccagtcacagcttactcttctccaatttcatgcccttgtgagccttcccaatatctggcataatctgaaaagtcaatttactcttaygtattaagggatgtatcatattgtatttaaatgggaaagtacaagaaactaatatttattgagccctaactgtgtgccaaggactatgctagatgctgtg

SEQ ID NO: 183034 - DNA, 201 bp, Homo sapiens
ccaccatgtttatgggtgtgactgattttcagaaggattttcttactttctctttgtctctacttcccacctgctttgtgggtctccaggatctttcatgrtggtgaacagctctgggagagcctctggccagaaggcccaccttctcctgccaaccctgaaggagaatgacacccactgcatcgacttccattactactt

SEQ ID NO: 183035 - DNA, 201 bp, Homo sapiens
gaaggttgagggaggaggacaagggaggggaccattgcactagtctgggagagatatatggtgcactttgcacctccatttcttagaaagtcctaatcctkgtatctttgtcctagtcatcagttctaaaggccccatcaccaaatactggcttccttggactctctaccactcagtgtagccctggaaaacagagggaac

SEQ ID NO: 183036 - DNA, 201 bp, Homo sapiens
cctttgacctccttctgtgacctctttccttatctcagttctgtatgcagtactggcctgagaagacctccgggtgctatgggcccatccaggtggagttygtctccgcagacatcgacgaggacatcatccacagaatattccgcatctgtaacatggcccgggtaagtacacggccgccattgcttgctgagcccctcc

SEQ ID NO: 183037 - DNA, 201 bp, Homo sapiens
atctgcacagaaatgtcaaaatggacagggctgtctgtaaacaagaaccatggcagttcatgaagtttctcactttcaaattaataattatttaaaaagaraaatgaaaagaaacctaacctgggccaccaggatgactgcttctataacctcaatgttgatgggtgaacccagtgactgtaagtggtagtatggtcaagg

SEQ ID NO: 183038 - DNA, 201 bp, Homo sapiens
tgccgcatattattggatgtgggtcattgggtcagtctcaatgcctttcagaactggctcaatactgaagtctttagctgtcgctgacttttcctttttttttttttttttttttttttaactgcactatcctccctgagcaaacagggcatctttctgagaatgatcatataaatttctttgcatttttcacaaatgtgt

SEQ ID NO: 183039 - DNA, 201 bp, Homo sapiens
tggatgaaaccttgcctataaaagtgtgcatgtgcccaagaaaagacaagacttcacaatatttgagcaaatgacaagcattccccattcgttactgatcrtccttagaaacaaactgcagcggctcacactggagcatctggctgtaaaattttgtctctgaaacagactgtctcagattgcaactaaaatgttggagaa

SEQ ID NO: 183040 - DNA, 201 bp, Homo sapiens
cttccctctgcctccttataacaacccactgtgactccagggagattattaaaatcccccacggaagtggaggcccagagttgcctatctcctgactccaytgcactcccatttgccttctttccccaccctgtgtgtcttgttaatgtccagatggggtgggggctgtgatggctcctaggccttagggttttaggtctg

SEQ ID NO: 183041 - DNA, 201 bp, Homo sapiens
tacccagcttctgtcttaaggctttctgaggcttctcattgctccaggaaagaccaaagccctgttgtggtctccaaagctctgagtgctgatcctccctraacctccaaatcatcatcatgctccacatcccactctgctcactttacactggcttctgccaattgccagaatgttctgactctctcctgcctcgggaac

SEQ ID NO: 183042 - DNA, 201 bp, Homo sapiens
ctagcctggccatctcaccctaggtgtcaagaagtcatgtagacaaaactcacatacttctgttgcatgacacagcattgaagaattatggccttttgagktaaatagatctgggtttgaatctttgactctgctactttcttgctaagtattactgggcaagaacaggggttggcaaactttttcagttaagggccagtt

SEQ ID NO: 183043 - DNA, 201 bp, Homo sapiens
ctttgcacatattgttccttgttccttctcaccagaatttgttttctcaattcttcactttgttgatttctctttcgttctttggttgtctctctctctcyttttttttttttttttttttttttgagacagagtgtcgctctgttgcccaggctggagtgctgtggcgttatctcagctcactgcagcctccacctccca

SEQ ID NO: 183044 - DNA, 201 bp, Homo sapiens
aatttattatcttctggccttctgggagtcagatgtctgaaatgggtttcactgggctaaaatcaaggtgttgcctggatgtgttggttctagaggttctrggacagaatctgtcggctgactttttctagctcctagaagctgtctgcactgcttggctcatggccccttcctctatcttcaaaggtagcagtgtagcat

SEQ ID NO: 183045 - DNA, 201 bp, Homo sapiens
tggggtttaaatggacactgctatgctatctagctatgcagtgtacatttcttaaaaactatgataccgttctccaagcacagtcatgtgtttttccaaasattgtttgctgtcatcattccagaagttatccatctatttgatcaaattccagtacataaaatatatttcaagttgctatattttagccagtctacttct

SEQ ID NO: 183046 - DNA, 201 bp, Homo sapiens
aacaaatggcatttagtaaattgaatatccacatgtagcagatccttaacttacaccatacacaaaaattaattcaaaatggattaaagacctaaacatgrgagtgaaaactgtaaaacccctagaagaaaatgtaggtagaaagttttatgatgttggatttggcagcgatttcttggatataacaccaaaagtacaggc

SEQ ID NO: 183047 - DNA, 201 bp, Homo sapiens
tcaaatctgccaatatcttttaaaattgcttcctttcctaggtgttgtgtttccttattaagaaacccaaattgcactttctcaggattcaaagccttgtmgtcaatgaaacaacttgtgaaagctatgaacaagcaagaatatgttatgtcttttaagaactctgagagtgtctaaggttaaaataagacctatagcttc

SEQ ID NO: 183048 - DNA, 201 bp, Homo sapiens
ctgaaatctttattttccattgacaatccttgattaattttaaaatgaaattagcatgcctgtaccttcctctacttgtcactataatgtagtctgtgctrcaaaacaaccctgaagttcagagattcaacacaatagaagttcattttataatcatgtgaagtctcatgtgggtctggtacctctcctgggaagctcttc

SEQ ID NO: 183049 - DNA, 201 bp, Homo sapiens
gatggctgagatgtctctaaaaaataaagtccaacaatctggaaaatccagtaatccattgaggtcccatttgccatatctaatctggtggtcattagccrcacatggctacggagtactggaaatgtggctagtcctgtaagtgtaaactacacaccagatttcaaaaacttagtatgaaaaaatcatgtaaaaacatct

SEQ ID NO: 183050 - DNA, 201 bp, Homo sapiens
tctttgcagtgggtcttctgaagacagccaggagctctgtgagcttggaagcagatcctatcctagtcaggccctgagaggactgtagccacagtagacaycctgtttgcagccttctgagtgaccccagccagaaccagctatcaagctgcactaggctgtacagatggcagataaacacttgaaaagatgttccatgct

SEQ ID NO: 183051 - DNA, 201 bp, Homo sapiens
tccaatgtggacactcagcttgcagaattcttggtgacgatatcaagctggcagtttacagatactattcagcaggtgttttgaactccatctggatctcrttctaccaactagacctagaattccattagctgaaagttggatttttacttggtcttaaaacaaaaaataaaataaaatctaaggcttcaaaaaagagat

SEQ ID NO: 183052 - DNA, 201 bp, Homo sapiens
gaatcatcctgatcatggtgatgctggctggatgctgatgctaggcgatgtcttcgtggaccattcaaccgattgggctgctgcaggggctagagctcctscaagtgaacctttcatttttaaatgtgtgatctgtcttttccttagtaaagaaacaggttttcattatgctttggctattatagtaatttgaattacaaa

SEQ ID NO: 183053 - DNA, 201 bp, Homo sapiens
ctcagtccctacccacttcagacttttgccctcccttgaaactgtaaaagaatgccagggcttgggcaacctccatgcagccataataaacaacccttccycaggatttctggattgttttaccatgtataagagtaatcaagttcgaggttactgtagcctaatattattcaaattgtcggtcaactctattaatttcat

SEQ ID NO: 183054 - DNA, 201 bp, Homo sapiens
tgaattgttccatgatactaagtttaaattattaagtatggctcagtccctacccacttcagacttttgccctcccttgaaactgtaaaagaatgccaggscttgggcaacctccatgcagccataataaacaacccttccccaggatttctggattgttttaccatgtataagagtaatcaagttcgaggttactgtagc

SEQ ID NO: 183055 - DNA, 201 bp, Homo sapiens
tagcctaaatttaagggagtagaggagcagactcaacccttctataggaaaaatggcatatgcatataggaagagaaggaatcaattgtggtcatcctggwaacaagctatgacattattctaaaataaaagaatacatatacaggggcatagaggtgggaaagtctacttggctaatatagtcaataataggaatatttt

SEQ ID NO: 183056 - DNA, 201 bp, Homo sapiens
ctattgaaggacatattggttgcctccaagtttttgcagttttaagtaaagctgctataaacatccatgtgcaggttttcctatggacataagttttcacytcatttgggtaaataccaagaagtacaattgctagatatagtatggtaagtgtatgtttagtcttgtaagaaactgtcaaactgtcttccaaagtggctg

SEQ ID NO: 183057 - DNA, 201 bp, Homo sapiens
ctccctcatttgcatattcaacccctatgctaaaatgactgtaacatctagggtaggctggaatcactctctccctatacatctaccttaggcttcctagyaacaggacagactcatggtaattgtacttcttgcatgatagctgtcttcccccagagcaagtgtttgagaaagccaggagaaatgctagtcctcctaaaa

SEQ ID NO: 183058 - DNA, 201 bp, Homo sapiens
gcctccctcatttgcatattcaacccctatgctaaaatgactgtaacatctagggtaggctggaatcactctctccctatacatctaccttaggcttcctwgcaacaggacagactcatggtaattgtacttcttgcatgatagctgtcttcccccagagcaagtgtttgagaaagccaggagaaatgctagtcctcctaa

SEQ ID NO: 183059 - DNA, 201 bp, Homo sapiens
tgggacctcagttcttccttaggtggcatctgtcagggatggaaggcccaaatgcctccctcatttgcatattcaacccctatgctaaaatgactgtaacrtctagggtaggctggaatcactctctccctatacatctaccttaggcttcctagcaacaggacagactcatggtaattgtacttcttgcatgatagctgt

SEQ ID NO: 183060 - DNA, 201 bp, Homo sapiens
taattctttgggccaggagtttggataggttacaacagggatagcttgtgtctgcttgaaaatggggagcctcagctgggatgacttgaatggctggagawgactgtgacagctcttgtaggacaacatgtctgggacctcagttcttccttaggtggcatctgtcagggatggaaggcccaaatgcctccctcatttgca

SEQ ID NO: 183061 - DNA, 201 bp, Homo sapiens
atcttgacacgttcctctctctcacctcccacatcgagttcaacaccaagttttgatgagtctacatcttcgatatatctagaatccatctattttcctcyatatccactacctccatccttgtccaagtcatcatcatctcttacctgaataagatccacaactcctaaataatcctcatatccatccgtgtcattctgt

SEQ ID NO: 183062 - DNA, 201 bp, Homo sapiens
taacatagattaatcttgacacgttcctctctctcacctcccacatcgagttcaacaccaagttttgatgagtctacatcttcgatatatctagaatccayctattttcctctatatccactacctccatccttgtccaagtcatcatcatctcttacctgaataagatccacaactcctaaataatcctcatatccatcc

SEQ ID NO: 183063 - DNA, 201 bp, Homo sapiens
agaatagacagatgttaagtgagcacaagattccactaaccaaaataataaccattagtagcataagaaatggcatttctactctcaaaaagcccatgaawtagggaacacagataatagttatatgacttggtatgcccagtagaggtgtgtgtagaagctgccaagagaatgttgtccagtgagggtgggggagctgtc

SEQ ID NO: 183064 - DNA, 201 bp, Homo sapiens
ctaatgaatcattaattgaacttggggtagtgatcccatcttcttccttgttaagttcaatgaagagactctgaaggacagtgctgtgttggatacatgcytcccagtttgtaggttgttccaaattgtatggtcttccatcttttccacagttttgagtatattctttaattttcttattttaaattaactattcatcat

SEQ ID NO: 183065 - DNA, 201 bp, Homo sapiens
taatttttaaaatatcaaacttctaaaaaataaataccactaaaactttcaaaacaatccagacatatttttcagcatatctgttattcagaaactctatrgtaggaaatagaatcaagcgtagttgtgtgtttgtgaaccaaatatttgactgaacaccatttcatcaggaatctgaatggatttgtgagctctgataca

SEQ ID NO: 183066 - DNA, 201 bp, Homo sapiens
ttctaaaaaataaataccactaaaactttcaaaacaatccagacatatttttcagcatatctgttattcagaaactctatggtaggaaatagaatcaagcrtagttgtgtgtttgtgaaccaaatatttgactgaacaccatttcatcaggaatctgaatggatttgtgagctctgatacatttgagtataattaaaagta

SEQ ID NO: 183067 - DNA, 201 bp, Homo sapiens
ccatctctactaaaaatacaaaaatgagctgggtgtgatggtgcatgcctgtaatttcagctactcgggaggctgaggtaggagaattgcttcttgaaccygggaagcggaggttgcagtgagccaagatcgcaccactgtactcatagcctgggagacagagtgagactccatctcaaaaatcaaaaaacagaaaacaaa

SEQ ID NO: 183068 - DNA, 201 bp, Homo sapiens
aaacaatccagacatatttttcagcatatctgttattcagaaactctatggtaggaaatagaatcaagcgtagttgtgtgtttgtgaaccaaatatttgaytgaacaccatttcatcaggaatctgaatggatttgtgagctctgatacatttgagtataattaaaagtaaaaagttaatacagacctgacatcaaaagca

SEQ ID NO: 183069 - DNA, 201 bp, Homo sapiens
attgtatccctccagagtcagaggcaccatcttccatgaaggtttgagtgctatatttcatcatatatatcaacactgttaggttcctgtaagaatatgakagaatccctacagttgatactttcaaaagccatcagatccacacatgctggaacttgcacatctcaccatcacttccatccttcatctccattttatttt

SEQ ID NO: 183070 - DNA, 201 bp, Homo sapiens
gcttttggagacaacgtggccctgccaataccctgattttggacttctagcttccagaactgtgagacaataggtttctgttgtcttaagccacccagctyatggtaatttttaatagcagttctaggaaactaaaaccaggtcaattacacatcagtaccctgaccccatcacctacccaggttaccttttccacacgag

SEQ ID NO: 183071 - DNA, 201 bp, Homo sapiens
gaaggagacagtggtgaaccattctggcttctaagtgaaacacgtagaccagtaattctcaaagcatagttccctgaccagcagtgtcagaataacctgakaacttgttgaaaatgcaaattattaggtcctcacttaaacctatggaatcagaaactctgggggtggcatccagcaatctaaatcttaggaaaccctctt

SEQ ID NO: 183072 - DNA, 201 bp, Homo sapiens
gctgatcagtcagcagccatcaacatcgagacaagaccctccaccaacaaaaagattacaacttgctgaaggctcagatgatccttagcatttttcagcarcaaagtatttttcagtaagtaatgttcatgtattttagacataattctgttgaacacttaatagactatagtgtacacataacttttatagacctcttgt

SEQ ID NO: 183073 - DNA, 201 bp, Homo sapiens
tatcttcaaaagcacacatccccatgtccacctgttttatgtttcgaccgctcaggcagggcaaagtagatgttcagccccgctaaatggacatcctgaartaagatttagataagcttcccagtctatcccaatctgttatactgagatgtcccattttccctcctttaattggcaacaaacctgtctcacctctggtct

SEQ ID NO: 183074 - DNA, 201 bp, Homo sapiens
tcatttagtcataagtaagacagagggagattttatggacttgtgtaactgaaaatccattgttgggcccaactttagacttgaataatatgagtcatatrttctatccatagactcaagattaggatcagtttccccataatacatgtagagcaggagcgaagggtgagtatcttcaaaagcacacatccccatgtccac

SEQ ID NO: 183075 - DNA, 201 bp, Homo sapiens
gattttttttctagtgtttgtttaaatatgtggtatttaaattggctctgccattttaattctccattaattcatgggtttatcttagacatctttctaaygtgtgggaaaacagtttataaacagagaagaaaattgaaattcaacctatatattatggattttttaattgcagaaacaatgtgactaaaatttaagcaa

SEQ ID NO: 183076 - DNA, 201 bp, Homo sapiens
ccaaaggaagctggccaagaagcagaaggagacccagagtggagcccagagggagatggggcctgtggcctctgccgacaaacccaccaccaagctcagcrccagccgcaatgatgaaggcttctcttctagttctcaggacgtcaacggattcagtaagtagagccaacaaaggggaaggggacatccgtggtccagctc

SEQ ID NO: 183077 - DNA, 201 bp, Homo sapiens
ctgaatggtgatcctcaatgtagatttaagtcttccactaatttcaaacatctctagacatttttttcccaatgcttattttcaatacttgtgttgattaragaagattctcgctgggtggcatggcaggtaatcctagcactttgggaggctgaggcggtggtcaggagttcgagaccagcctggccaacatggtgaaaa

SEQ ID NO: 183078 - DNA, 201 bp, Homo sapiens
gcactctaagacgcttagaagtcagtatgaggctgcatagtcaagatagagctgggactggaaactgggacttcaggctccaagcattgctccctctgtcracaccaggtcttgcctgggcatggaggtatcatatcatgcctctctagcctttgccttgcctctctttaccactcttggtctctgtggctgcttattcca

SEQ ID NO: 183079 - DNA, 201 bp, Homo sapiens
aagtaatggaactggttgcatcagtcagctattgccataataatgctgcgtaacaatactcaatgtgcatcttggattaactagcaggtcagctggaactrgatggtctcaggtggcttcagctgggtgactccactttggtccacctggtctgacattcaataagctagcctggccttggggtgtcttctcgtggaagaa

SEQ ID NO: 183080 - DNA, 201 bp, Homo sapiens
ctgaagctcttcctttctgctcatactcactctaggtaggtggtgatgatgccaaatgagatagcacaggaaggggccagatttgaagcagaagagggggrcatttacatctaggccaatcgatttgaggtgttattgagtcatggaagagatgccaggttggcagtggactctggggcctggagctcaacagaggagcct

SEQ ID NO: 183081 - DNA, 201 bp, Homo sapiens
gctaagtgatttggaaaatacgatgtaaggagatggattttgatttgaaaatagtgcaagagaacagattgacccaggtggaaggggcaaaagcttggaartatgaggtgtgaggtctggtggactcagagaagtgggtttgaagtccaagatactctgtgtcaagaatgtatggccagagacgaagctggaatggtagct

SEQ ID NO: 183082 - DNA, 201 bp, Homo sapiens
aatgaatgccgactctatgccaagcattttagggattgtaaagataaataagacatggtctctgcctccaatgatattactgtcctctaagaggagagttktaagtggattagtttcaataaatgtgataaatgatagagaaaaggtgtgtatagtgtcccagaaacactgatcagacacccagcaagtgattaattctgg

SEQ ID NO: 183083 - DNA, 201 bp, Homo sapiens
aagaatcaaggcaaaaggtctgttgctgagaaggaagaagtggagaggagtcagaggcatgctggggacattgatccagaaaagattcattgctaattgtrcatatcccagaggttaaaccattttctcgaagggtaagggaagagcatttctttgtaaaactaaacacagagtttcccagcattggagctaagactctgc

SEQ ID NO: 183084 - DNA, 201 bp, Homo sapiens
acttattaagttcctggcaacccaaagttgaatggaattgtttattccttagcagttacaaaatggaaatttaggcagccttgagaaagttgaccaatttyccatcacaaacactaaggagttaaattaagacaagttttagagaagaatattagactcaaaaaagatataatagttatacataatcaaactaaaactaaa

SEQ ID NO: 183085 - DNA, 201 bp, Homo sapiens
tgcaagcaggtttgattcagcagcctcccaggaagggctatgttaggcacactggtgccataggctcctgggtatcaagtcctaagtgaggcttagactgygattatctaggaagacatggggaaggtgggaactgaggatggcttgggcgtctcccttctctcatagctgttttgtctcttaacaagatagagttagttc

SEQ ID NO: 183086 - DNA, 201 bp, Homo sapiens
gcaataagtaagctacatgacatcacagtcagaacctccatgcctgggtcagcacctaacacatctattaagaaggcaaagtcagacaaggtattagagartgactgagagggcagacagggaaggtttcttcagggaggtgaaataggagtgggtgtctgagtggtgaacacagcttcccttcttaatatttcagagtag

SEQ ID NO: 183087 - DNA, 201 bp, Homo sapiens
tgttcccatttagggctgtgggtttccaggcttgagggtgggggttttgccagggaaccctcttctacccagtatttccctgactcctatccgtatcactrtgaaacacacagacaactttcacgaaccatacagctctttaatccagcatttgggtacccctggactcctcatgacctctttagcttgctttctgatcat

SEQ ID NO: 183088 - DNA, 201 bp, Homo sapiens
gagtctggttgttctagggtctccccatgagatgatgattagggtgtcatagttataccaaggcactcccactcatttttctttgttttcctcttctgttrtgattaaacagttgggatttctctattgctgcagggaaatgaatagaactttgtcatgcatttcaccagcctagagattcagggaaatcttcctgcaata

SEQ ID NO: 183089 - DNA, 201 bp, Homo sapiens
ttcaccaggtgttatcagcatgtatgaagaaaatagtatgtgtgaagtaatggaactggttgcatcagtcagctattgccataataatgctgcgtaacaawactcaatgtgcatcttggattaactagcaggtcagctggaactagatggtctcaggtggcttcagctgggtgactccactttggtccacctggtctgaca

SEQ ID NO: 183090 - DNA, 201 bp, Homo sapiens
tgaagtctgtctcagcctggctctcacaatttgtagcagcccccatgccacccaggctagatgcctaaatctttcaaagactcacagagatctgtgtgacycacacacacccctttcaccccatctcccactctcctctcctggaaagctcttctcttgggtatccacttagctaattccctcacctccatgacgtccttg

SEQ ID NO: 183091 - DNA, 201 bp, Homo sapiens
tattggaggttggttgggaaaacctggatttcaagtcctggttctgctgtttacttggacaagtttcttaatcattctgtgcttcatcacctgtaaaaaakgagccaagtggaagagactgctaaccaatatctgtttgtaccttcttacttcctgagatgggattatttttttctggcaatgatgtgagtgctaaaagac

SEQ ID NO: 183092 - DNA, 201 bp, Homo sapiens
gtaatattcactactataacctgctctttctgaagcctcaactgcaactccactgcaggtgggccaggattccagaggttcccagcactggtcaacctctsacatttctgttcagctctcagccctgcatcaaccactcttttctagaccttacagagttttaccttgcaaatatgcaggccagccaatatccaaattcta

SEQ ID NO: 183093 - DNA, 201 bp, Homo sapiens
ctaccacttaattggaaccttccaatccatgaatatggtatctctcttggttccttatgtttttttaaaattctcagaaatgtgttaaagatatttttctrcactgtcacgggttgcaaagtctctttattttttaatatttgtgtatatgtatccattgttcagactggattagttctgttgatctgcttttatattcaa

SEQ ID NO: 183094 - DNA, 201 bp, Homo sapiens
tacctaagaacaatcccatctaccagggtcaatagggagattttccacctttacctccctgtgagctgcatgtcagctttatttttaaaataaaagctctrtccagctcatgtgcattgagaacttgcttcaaggatcatatgtccactgtttctcatctctgatttctgcacttgatggtatttcttagggctgtgtcct

SEQ ID NO: 183095 - DNA, 201 bp, Homo sapiens
ttttctccctcttaaggaagaaaaggccatgcctccatacctaagaacaatcccatctaccagggtcaatagggagattttccacctttacctccctgtgrgctgcatgtcagctttatttttaaaataaaagctctatccagctcatgtgcattgagaacttgcttcaaggatcatatgtccactgtttctcatctctga

SEQ ID NO: 183096 - DNA, 201 bp, Homo sapiens
ccaatcagagcgctcacattgtatttggttttcagctgtctttatcctctttgatctagaacagccctctcaactttattttttctttcaggatactgactttttttttttttttttttttttttgatggagtctcactctatcacccaggagggagtgcagtggtgcgatctctgctcactgcaagctccgcctcctggg

SEQ ID NO: 183097 - DNA, 201 bp, Homo sapiens
tagggctgtcgtcctgcagagtgttccacaatccagatttgtctaatttttttcatcatgataacattcaggttacacattttggcaaaaatatgacatarctgatatgacgtacttccctttacatcctattaatggacatatcataccgctttgcacattaccagtgatggtaagtttgagttcttcttaaggttagat

SEQ ID NO: 183098 - DNA, 201 bp, Homo sapiens
tttttgggtgctactgtaaattgtactatttatgaaaattcagattctaattgttcattataaatacacagaagtgaaaccgatttttatatgttgaaaawtatatatatatataacttttttaaaaagataagaaaatagatatctcagatggggaaataatttcgttactcaaaaaaggctactgcatgaacgatgtgt

SEQ ID NO: 183099 - DNA, 201 bp, Homo sapiens
atctcatttaacctttgccacttctctgggaataactgatgctgttctcattttgcccatgagaaaatcaagacttggagaggatgtttattaatattgtrctgtttgcaagctttgacaacagactcttcacagtgcttttctcctgttatccagggataccatcgacctcggcactacattgcgactcaaggtaagtgc

SEQ ID NO: 183100 - DNA, 201 bp, Homo sapiens
aaactaatgttggtgttcagcaaaataggggccttctgattgaaaaaaccttccttctgagaagtgaataaaaatatttcttctaacacatgaagtttatytgcaaggagaattcttatgaatgacatgcttgccatcaattataaccacagaattcttgtgtcacccacctcctgatgaaacatggcactaaagatggca

SEQ ID NO: 183101 - DNA, 201 bp, Homo sapiens
ctcatatgattaagtaataagaaaaaatggcttggggccgggatgggggtataaacaaagcaaaggaagggggttatggaggaggttaactttctctaatsgtagcaaaatcttcaggactgtcttctaaattgagtaagataaatgaaaatagggactaccttctcatcagaaaagtaaatacctgcaagtagatgtagt

SEQ ID NO: 183102 - DNA, 201 bp, Homo sapiens
aggtcaataaagcgagggttcaggataatggaataaatggacagcatgagattaatagggacaaaaggaaacaaattgaggcccaaaatagcattaatagkattaaagagcccataaataatgacagcaaaaagtgaaacaatacaaaaacaaaatagaatatacattgctggaaaaaacagtgtagagggaagtcttaac

SEQ ID NO: 183103 - DNA, 201 bp, Homo sapiens
ttcttgggttgcttctgatgggaagttgaaacataaagggctgggggccgggcagcttcttgtgatgaatgcctgcaactgtttctgtgaaattgactccygccctgtgtgttgcaggtgatatttgaatccgtctcattgaagggtcatcctggctacatcgccgtggacgaggtccgggtccttgctcatccatgcagt

SEQ ID NO: 183104 - DNA, 201 bp, Homo sapiens
atatcctcccaaaaattgttactgttcatttttggactacaggattccatttataagtaatatctagagtacgcaaattcatagagatagaaagtagattmgaggttaccagactggggcaggagagaatgaagagttattacttaatggttacaaaatttctctttggggtgatgaaaaagttttagaaataaataatgg

SEQ ID NO: 183105 - DNA, 201 bp, Homo sapiens
ttttccttagggctttcctatcttgcctcagcttttctccctcttaaggaagaaaaggccatgcctccatacctaagaacaatcccatctaccagggtcartagggagattttccacctttacctccctgtgagctgcatgtcagctttatttttaaaataaaagctctatccagctcatgtgcattgagaacttgcttca

SEQ ID NO: 183106 - DNA, 201 bp, Homo sapiens
ctccaacacatagagatgcaacgagcgacatccaacctgccatctgcctgtttcctgacacacttgctgccgtgtagacaaaacttcttagacattagctsttccccactgtgtctctgtactggcatgagttgatgcagcctttgattggatcccataagctttgggccaggcactgccaacacctagatgaaaagtgat

SEQ ID NO: 183107 - DNA, 201 bp, Homo sapiens
aaaaatataagcaggcaaaagccagtgtcatatgataggtgaaaagggggtgagagagtggaggcattgttttgattacagtcttaatatactgttatatrgatgtacaattgatttcatcctaactttgatttccagacatgtaagtttttcctaatttttaaaagctgtaatcagcatcctgaaagatactaatatatg

SEQ ID NO: 183108 - DNA, 201 bp, Homo sapiens
gtaaatacatcctttttcacatggtggcaggaagtagaagtgtggagcaaagggggaaaacccttataaaaccatcagatctcatgagaaatcactcaccrtcacaagaacaggatgggggcaaccactcccatgattcaattacctccacctggtcccaccctcgacacatggggattatgggaactacaattcaagatg

SEQ ID NO: 183109 - DNA, 201 bp, Homo sapiens
cccagggaatgccaccaccataaggttgggttgtgaagaaagagcctgaaaagaagaccatgaacgaacaactaaaagcaggaggaaaacaaggaagttgygatgccctcaggtcaacagcaaaactgaggatggagaaagtagccaactctgaaggattgagtaagaggtgctccaaagggtccccttggtgtattagtc

SEQ ID NO: 183110 - DNA, 201 bp, Homo sapiens
cataaacaaggttctatattaatcatttgacaaaagcattgtgagcagaggctcacaggaactgaactttgtatttctcctaggagccatgggttcaataktcagtaattcagtgcaactttagagaacattacttccaataagaagaatcagttagatatatgtacaagtcagtgatagagacatacatttgggttcttt

SEQ ID NO: 183111 - DNA, 201 bp, Homo sapiens
atgaaagatattacctaggagagcaccaggccctatggggatgagctattaaagctgtcatatgagcaggctggaggtgctgacccagatgttttttttgmgagttagagagttcctggtgcctggagctgttcaaacttctgctgtatatagtggaaaagttaaggcaggtattcacgtcttaatggcatttcgtagcaa

SEQ ID NO: 183112 - DNA, 201 bp, Homo sapiens
ttctagaccaggctggccaatatggtgaaacccgatctctactaaaatgcaaaaattagacgggcgtggtggcatgcgtctgtagtcccagctacttgggmggctgaggcaggagaatcacttaaacccaggaggcagaggttgcagtgagccgacatcatgccactgccctccagcctggacgacaaagtgagactctgt

SEQ ID NO: 183113 - DNA, 201 bp, Homo sapiens
gaatatcctccacaaggagaaaaaaaaaagtcaagttgtcctcagacttctctacagcaggattcaatgtcaaagatgaaagaatggttatctaaaagatytgagggaaagaaagcatagttcaagaatataatagaatataaagctcacaagtcatggttgtcaagagtaaatgtactcaggcagtgtaatatccataag

SEQ ID NO: 183114 - DNA, 201 bp, Homo sapiens
tatttaattcaggcttcccttgtgtgtataagtgggccggggctttgacttgttctgtcttatgtaatcaccccaacatccaggtaggtcatcttctcctygcactctcttattttattttattttattttttggttgatggagcctcactctgtcagccagactggagtgtggagtgcagtggcatgatctctgctcact

SEQ ID NO: 183115 - DNA, 201 bp, Homo sapiens
tgcatggacccctcagctgcctgtttttgtaaagctttgttggaacacagcctcatccatccatccatttatccattgtctctgcagttgtcacaccccawcagtagaattgagtagttgttaacaaaaacttttcggcctgctaagcctaaaatattgactctctggccctttatggaaaaagtttgtcagcctttctac

SEQ ID NO: 183116 - DNA, 201 bp, Homo sapiens
gccacctgctttggtggggactcactttgtctctggccagtccattctattttgcaccaactttacttgttagaaagttatttgtacactgaactgaaatktaccccctcatggtttctttcatgagtctgccctcccaggcagctttatcaataagctattgtcacaataaagctgcatgacacactgaaaagaaactca

SEQ ID NO: 183117 - DNA, 201 bp, Homo sapiens
tggttttatttttgaaaatttgtaataaatctatacacctttgctctccctacaggtgctaggtctagaaaggacttcatttattcactcgtgtttactgygcttctcctcctagccaagctctgcagaggtgacctaacacagccgctgtcccacttgaattcatcatttgtaggaaaagactgatatgtagataaaata

SEQ ID NO: 183118 - DNA, 201 bp, Homo sapiens
gtattttataacaaccctggtaggctctgaggcagtaccctgtaatcaaatgtaatatttctacagcaaaacttacacacactcacaagaaatgggataartaaagactgtaagtagtatcaggccattcggctgtgttcaggttttaccaccaaattactttttataatactaaggtgaagaacgttgttttcagagctt

SEQ ID NO: 183119 - DNA, 201 bp, Homo sapiens
tacagaatgcatactggcacatgtggcttaggtttatcctcattttgtagataaggcaaacattttctgttaagggcagaaagaaaacatttttgtctttrcaagccatacaatttctattgcaattactcaattctgccattgtaccatgaaagcagtcatagataatatgtaaatgaatggacccagctgtgttccaac

SEQ ID NO: 183120 - DNA, 201 bp, Homo sapiens
tttgaggaggccaaggcttgtaagaatgaggcctttcaagcccagagcaaaaagggattggaagtgaatccagactctctgcaataagcagcctcaggtgrtctctgtgttctctgaaaagcctgtgggtcccacaggcaagggtctttcagggcaacatgcagttctaggacagagtagaggcagagaattataaaaaga

SEQ ID NO: 183121 - DNA, 201 bp, Homo sapiens
cagaaggtttcttgggttgcttctgatgggaagttgaaacataaagggctgggggccgggcagcttcttgtgatgaatgcctgcaactgtttctgtgaaaytgactcccgccctgtgtgttgcaggtgatatttgaatccgtctcattgaagggtcatcctggctacatcgccgtggacgaggtccgggtccttgctcatc

SEQ ID NO: 183122 - DNA, 201 bp, Homo sapiens
gacaatgccatagtttccagtcagcattttgtgggagctgaacagtgatcagaagcaggtttgctgcgtctggtctcatagtaggcggagttagctgattstgtctacccacagtgctattgggattcaattgtctgaaaggcgctccttctccctgagcacatctgcactcatctctgtggcttttcttctatgactcac

SEQ ID NO: 183123 - DNA, 201 bp, Homo sapiens
tgaaaaaatacgattataaatgcatcagtgatgtaaaagataatattataatctctatgctaattaccctaaagaattaacctgaaatgagtgaattgtaraaaaatattaaaacttagtgaaaaaaaaatctgagcagtcctgtaatctttaaaggattactttataatctgtcaacaatctccccaaaatgaaaacatc

SEQ ID NO: 183124 - DNA, 201 bp, Homo sapiens
ttctacctgatccctgggacctgaccggctaccctggccttctgtcctctggctgctgttgcaacccattttccttgtcttcttggtggaattagaaaccrgcccgctggcattttcctaccaattccctctattctcaggtctagagagaaaggaacaaaatgcagacaggattgaactaatatttgttaagactcaacc

SEQ ID NO: 183125 - DNA, 201 bp, Homo sapiens
gtcacattattttttctaattttgcactggattgatggcaactttgtcatggaaaagccctggtccttgtacatacctgcatttggaaactactactgtarggctatgttgcaggtggagtcatatctctgcacatattattccttgagagtaatatactttttcctctagtaggatgatgcattagattggatccttgag

SEQ ID NO: 183126 - DNA, 201 bp, Homo sapiens
gcagaagctctttagtttaattagatcccatttgtcaattttggtttttgttgtcattgcttttggtgtttcagacatgaagtccttgcccatgcctatgwcctgaatggtattgctatatcacgtttcttaaccttagcactattaatgttttggactgggtaagtctttattttggggactgtcctatgcactgaagaa

SEQ ID NO: 183127 - DNA, 201 bp, Homo sapiens
tctaagaggagttctgatgtgccaacatttttctcttctcctgaaaatgtttgcagccccttgaaatttttgccatgcagattttctgctcaagaactatraaagattaggttaaaacaccaggtctgttaaaccatggcctgacatatccacaccctcctccaagtatgaacaaaaaccattttttggaaggatgagcaa

SEQ ID NO: 183128 - DNA, 201 bp, Homo sapiens
cttttcagacttctacacttgtgttcagaatcaagccatgcccctcttctcttgctgctgaagcacaaaagtctcctcctcctttcctgtgaggtgtagtygagggatctgaaaagtgaactcttaattcctacctggacaagcaagcccagaactcacaatgaaaaggacatttgctttttaattctcattttaaagagt

SEQ ID NO: 183129 - DNA, 201 bp, Homo sapiens
tcagagcctcttgtggggaattgcttcctggctttgcacaagtagtcatgcacagggagaggttttcacctttccatgcaagcctcatctcttcaacaccygcaccaggaggtctctaatgaagcctatgggctggagcatgtgcaatagatggtaggtccacatggcagccttggagctgaagagcatctacagagacgt

SEQ ID NO: 183130 - DNA, 201 bp, Homo sapiens
ctgccatgccctcagacatttcctgtggacctggggacatcccttcctaagaatctcttaagcaaatattcccagatgcacaatgtaaatttctgctcacrtttcattggcaagaatgaggtcccatgcccataggttaaccgatcactggtgaagaaaatagttatcatgattgactgagattcttcaatatttattctc

SEQ ID NO: 183131 - DNA, 201 bp, Homo sapiens
ccccaaagaggatggacactgctcttgggatgacgtttggtaaatgagagcacagggggtctcactcacacatagaagagttggtcttagatgcggcatargtccttctgctgtagaaaaaggagggaagacagaatgtatggggatgggtcagttaagctgacatgtgccgtgttctcaccatggaacttccattttctc

SEQ ID NO: 183132 - DNA, 201 bp, Homo sapiens
tgggaaaactgacaccatctcactggagcttatgttctagttgagtgcgacagatagtaaatgaatatatagtaaatcagacggcaataatgctgtcaggkaaaaaaaagcaggataatggggacagggtgtactggccacctgtgtgggagggacattttattttcaatgaaagacctggctttaaaggtggcatttgaa

SEQ ID NO: 183133 - DNA, 201 bp, Homo sapiens
ctctccttgaatttacatgcctagaagcctccagcttcctagtttaatatcgcctgtgttctctttagatcccagacacatcacttgttttggaatttcckgctacctctctcctttttctaggtcccatgagttctttttttgtgtggggtttactttctcattctattagagcatggtatataggagcttcctgagaaa

SEQ ID NO: 183134 - DNA, 201 bp, Homo sapiens
gcaataagcatgatgcagatgtctcctcaatatattgatttatcttcctttggataaatgcccagtagtaagattgctggatcatataatagttctatttrtagtttttttgaggaacctctgtactgttctccatagtggctgaactagtttacattcccatcaacaatgtataagagttcccttttctgcacatcctca

SEQ ID NO: 183135 - DNA, 201 bp, Homo sapiens
ccatctttgagatgtacatactttatttaacctgctcctgtttttagataatttttggctgttatgctcaatgctgtaatgaaaatccttgcacataaatsttcccacatgtaaatgattattttgttaatacattatggctactgctgcttgatatttttgccaatagaatagaaaaaaacccataccattttaatttat

SEQ ID NO: 183136 - DNA, 201 bp, Homo sapiens
ctgtttggttccaaagctcggctcatccccttgtgttttgttgccatttctgacttgcagctctagaaaccaggtgttggcctgcgtccaggtcttagagytcagagacttgaatttcaagacagacctggcctttcttttcatattcaaatactctgcttggttccgcattgccaagcttgtaaggagtcatgaggatca

SEQ ID NO: 183137 - DNA, 201 bp, Homo sapiens
gattctaggtaggaaaaggtactaaactattctgtgtctctgtttccccatctataaaccaatgacaataacaccacttatggctgggtgcggtggctcamgcctataattccagcactttgggaggctgaggcgggtggatcacctgaggacaggagttcgagaatagcctggccaacaagaagaaaccccatctccact

SEQ ID NO: 183138 - DNA, 201 bp, Homo sapiens
gctgggtgcggtggctcacgcctataattccagcactttgggaggctgaggcgggtggatcacctgaggacaggagttcgagaatagcctggccaacaagmagaaaccccatctccactaaaaatacaaaattagcttggcatggtggtgcatgcctgtaatcccagttactcaggaggttgaggcaggagaatcgcttga

SEQ ID NO: 183139 - DNA, 201 bp, Homo sapiens
accccatctccactaaaaatacaaaattagcttggcatggtggtgcatgcctgtaatcccagttactcaggaggttgaggcaggagaatcgcttgaacccrggaggtggaggttgcagtgagccgagatcatgccattgcactccagcctgggcaacaagagtgaaactccatctcaaaaataaataaataagtactacca

SEQ ID NO: 183140 - DNA, 201 bp, Homo sapiens
tttatgcagaaagggaagtctaacagagaagtagtttcggtggaaaaatgacagatttatttatagtcatactgacctttctgggttattctaaatcttasaaacattatatgtgaggcacccagaaaagtacctggcatgtcgtgggtgcttgataagtggtgcctcttactcttgtttcattttttttaaatctatttc

SEQ ID NO: 183141 - DNA, 201 bp, Homo sapiens
cacggcagcctcctcacttagctgtctgttgcccagatgactggactcagctggggctgtcaatctagagcatctacacagggactgtcatgcaccctgcrtttgctcacacatggcggccccaggggagttagacttcttatacagcagcttagacactgtagacataagagtctctgtggacaagtcagaaactacatt

SEQ ID NO: 183142 - DNA, 201 bp, Homo sapiens
aagtctccagccccttaaatccacactgactgtgaatctttttgactaatagaaagtggtagaagtgatgatgtgcaagtctagaaatgaggttttcaaaygccttgactgactaggaatgtttgctcttgccctcccagtgtctggggccacctttctgtgaagaaactcagtctggtctcctggaaaatgagaaattaa

SEQ ID NO: 183143 - DNA, 201 bp, Homo sapiens
taattctgatggtaatgtggatgctatggtggtgggagctttggcatcaggctcatatctaaagatgagtttataggagttctcatttttctcttcatgcyttttgaatttggtaggcttgcctccctgaacccggggtatgttttcatcacaaaaagatttgaaaaacactatgatttctaattactggtgctttcctat

SEQ ID NO: 183144 - DNA, 201 bp, Homo sapiens
aaatcctggtcctggaaaccaatgaaatcacctgagcaaggactatgactctcatagaaaggaccccttaattctgatggtaatgtggatgctatggtggygggagctttggcatcaggctcatatctaaagatgagtttataggagttctcatttttctcttcatgccttttgaatttggtaggcttgcctccctgaacc

SEQ ID NO: 183145 - DNA, 201 bp, Homo sapiens
gtggtccttgtaatacccacatgctcatgcatgaacatatacaagcacacgcatgtgtatacacacacacacacatgcacatacacatgcacacacacacmcccccaaaccacagtccccctgagagagcaaaacacaaagcggcatgagtagcagcagatgttttcacaaatcctgcaagttcctccagattaaatgcct

SEQ ID NO: 183146 - DNA, 201 bp, Homo sapiens
ttgacttagcaacgagccagctaccaagagccctaatgaggaccaaagatggaagatgtctgtggggagtgagacccgggtaatcagcttgttttttcccrtctgtgagttttccatctgatgagaagaaagggcgtcaggaggtagactggtccaagggctgctctttgaagacacctgatctcaaatcactaccatggt

SEQ ID NO: 183147 - DNA, 201 bp, Homo sapiens
aaaaggtccagtttcctatctaaaggttagttgttttgaagtgatcattcttcatatgccttgtagattccctgactgcatgccctaattttgttgccagmagaatacttactttttcttaattttatcaagaaaacatcaccttacatattaatctaatttctttaaataagatatacacagacacacatacacacacac

SEQ ID NO: 183148 - DNA, 201 bp, Homo sapiens
cagaaaggagccttgtgagtcttcatggatctttagatacttttgatagaaagtagtaactcagttattctcagtgtcacaccaggcagaatgctatttawtatgcaacataaaagcagaggcaaaaactcaagtacttcttgagctgtgcagggaacagaatagatgtaagacaagaacaaaatgttcaactctaatgag

SEQ ID NO: 183149 - DNA, 201 bp, Homo sapiens
caagatggattggtctgttatcaggtttaattctctgttcacccatgtatagccaatatataattttatcctaataggaaaaaaaaaaaacacaggatagrtttcacacaaaaggtccagtttcctatctaaaggttagttgttttgaagtgatcattcttcatatgccttgtagattccctgactgcatgccctaatttt

SEQ ID NO: 183150 - DNA, 201 bp, Homo sapiens
gttgttaaaagcacagtcttttaacagcagaaaggagccttgtgagtcttcatggatctttagatacttttgatagaaagtagtaactcagttattctcartgtcacaccaggcagaatgctatttattatgcaacataaaagcagaggcaaaaactcaagtacttcttgagctgtgcagggaacagaatagatgtaagac

SEQ ID NO: 183151 - DNA, 201 bp, Homo sapiens
tgagctaggactcttctcctatgcatgggcattggagcttctggttgttgggctatcagacttccagacttacaccttctcatcctgggttctcaggactytggcctcagactgagagttataccatcagccatcacctcttctagttctcaggctttaggacttgaactaaattataccactggctttcctgattctcca

SEQ ID NO: 183152 - DNA, 201 bp, Homo sapiens
tcacctagaagcctatgatgctatgattcctcctctccctctcttcctctgttctgcagcaatggaatggcagggacacggccctgatggtcacccgtgtrgtcaaccacaggcgcttctcagccacagtcagtgtggcagacactgcccagcggagcgtcagcaagtaccgctgtgtgatccgctctgatggtgggtctg

SEQ ID NO: 183153 - DNA, 201 bp, Homo sapiens
agccctcccatgtggggttagcgttcttatgagagagatactggggagctatcttccccttcacccatgtgattacccaataagaggcacatcttgcaagygcagagcaacccttatcagacaccaatctgccactgtttatctaggacttatcagatgccagaactgtgagaaaataaatttctgttgtttataaattac

SEQ ID NO: 183154 - DNA, 201 bp, Homo sapiens
ttgccaaatgaacgaatgaatgaacaaataaaaggaaacaaatgggtacgtatggaaaggaagatggaatgtcaccattacatcctactctccagacagamacactctgggtataaggagatccagagtcatgttgtgacgaggtattgtgagccgtaatggtactgcaggtctccccagttctactccaatgatttgatt

SEQ ID NO: 183155 - DNA, 201 bp, Homo sapiens
ttcagcttcttcaagtcttttttccaatgtcacctctcagcaagctcttctcagaccattctattaaaaactggaagtctcctacagcacactctttgtcyctctttccagctttgggtgtctccttagcaattatcatctgacatactgtatatttcactatatgttttattatctgtcttctcccactagaatgcattc

SEQ ID NO: 183156 - DNA, 201 bp, Homo sapiens
tctcctacagcacactctttgtccctctttccagctttgggtgtctccttagcaattatcatctgacatactgtatatttcactatatgttttattatctktcttctcccactagaatgcattccacagagacaagattttttccttgtgtttttcttactctgcttcccaagcacttagaagaacagtgccaggtagaca

SEQ ID NO: 183157 - DNA, 201 bp, Homo sapiens
ttgctcaaccccagcaccatggatgtctggggccagatagttctttgttgggggccggtggcagggggctgtcctgtgcactgtaggatgcttagcaacawccctgcctctccccactggatgccagcagcacgtcaaccccaattgtaacaaccaagtacatctccagacattcccaaatgtgccatggagacaaaaatc

SEQ ID NO: 183158 - DNA, 201 bp, Homo sapiens
taatttaatataaaaatatgaacaagatattttatactttttatactaagatttgaaatacagcgtgcattttccacttacagcatgtttcagtccagacraatcatacttcaattgctcacttgacaaatttcagtttccttatttgcgtaatgaggggatacaaatacctgttgaatgtcactctgaggataaaatgag

SEQ ID NO: 183159 - DNA, 201 bp, Homo sapiens
gagttgagtagttgtaacagagaacgtacagcccatcagacctaaaatatttactatctggttctttacagcaactttgtcaacccctgttctaggtcagyggggctggagaaatgatgtggaaggtgacatcaagttcataacttttccattctgtagttccaggagctgttcctctagaatccatccaaggggggccct

SEQ ID NO: 183160 - DNA, 201 bp, Homo sapiens
caaggttgtcagaattcgagagaggccaccatattctgaacaatgccattagaaatgttgcctttctgggaacagagcttagaggagttggtgtatttgcrggagggcactcagctagggagaagaccccaagccacagtctataaagagaggttggagaactgacttaactggtcaggggtagtgcctagacattttaaa

SEQ ID NO: 183161 - DNA, 201 bp, Homo sapiens
taaccttttgcaatatggcaggtagaaaatttaaaagtataaatgtggcctgcattgtatttctgttggacagtgctgatctagcagctgcctatctcttyattcacatcctctgccacattcccccttgctggtgataccctggtctgtttttttttggttttttgtttttttttaaccacaccaggctctctcctgtct

SEQ ID NO: 183162 - DNA, 201 bp, Homo sapiens
aggttctataaagcagttctgctgtggcatactttgttcattactgcaaccagggaccacatgaaaagacttcacaatacaggaatgaagagagtcttgastgcacgtggaggtggtagcagcatggagcagatggggcctggcaggccagagagccacctggagtatagttccaacctctggaaaataaatcttattttt

SEQ ID NO: 183163 - DNA, 201 bp, Homo sapiens
aatggagtctgaaataacatcacttaggtcaagtggttgaagttttgctcagattttctctaattttaataattttccctctacttgttctatcaattacygggagaggaaagttttcaaatatagttgtggattttcatatttctctttccagttctcagttttgttttatgtatttttgttggtggtgtatttttgttt

SEQ ID NO: 183164 - DNA, 201 bp, Homo sapiens
cattgttcttccagcccctgtcccaggtcaggcagtgcgggagctcaatacagaggagctctgtgtaattttgcatttaacacccatcttcctcaatgaastataagctccatcagagcaggaagcaacttttccattcacagctatgtgtcctcagctcctaaaactggcaccagaatgccctcaatgaatattgaataa

SEQ ID NO: 183165 - DNA, 201 bp, Homo sapiens
tttttttttttttgagacagggtttagctcttgttggctaggctgtagtgcaatggtgcgatctcggctcactacaacctctgcctccctggttcaagtgwttctcctgcctcagcctcctgagtagctgggattacaggcgcacaccaccatgcctggctaatttttgtattttcagtagagacagggtttcaccaagtt

SEQ ID NO: 183166 - DNA, 201 bp, Homo sapiens
ctactataggtaaaactgttatgaatatttgtgtacaagtctttgaatagacatacatttttatttctcttggataaatatccaggatttgattttctggkttatatgtaaagtataagtttataagaagctgcctaactgttttccaaagtggttgtaccattttgcactgtatcgaagagtcccagtcatttcatagcc

SEQ ID NO: 183167 - DNA, 201 bp, Homo sapiens
tggggcccaggaaacagcaggcaattttagtacattgatcttgagaaccactgggtgtttgggaagctaggaaaggggtcaaggccagggtcaagatttcrcaggagaaagggaagagcagaggggagagagcagaactctgcacattgccacaatctagggtgtgggtagaggaatgggagcctgagaaggagacggagg

SEQ ID NO: 183168 - DNA, 201 bp, Homo sapiens
tacaattgattcctatttccacttccagtcccaggcaattgctaatctgatttctgtctctatggccttgccttttctccataacttaataaatacgaatrgaatcatacaatatgtagtcttctacgtcttatttctctcatttagcataatgttttggagcttcatgctgcagattgtagcagtagtttatttcttttg

SEQ ID NO: 183169 - DNA, 201 bp, Homo sapiens
gtagggtgagccatgtgagatcttgggaaaggtataaaccagtaggatcagaaatgatcaggtgattttctgttggatctcttaatgtggtaatgcatgartgcacattttctaatattgaaccatcttgcacagctgaaataaatctcattttatcataagatatggtattttattgagctgctcaagtaacaatattta

SEQ ID NO: 183170 - DNA, 201 bp, Homo sapiens
actttatacttgtcatctttcttttattaagtctttacaacagccttttgaaggagctagtggtaacagcccattttacagttcagaaaaatgaggcacayaaagattaagtaatttatttaaaatcacacagaagtggcagtgtgattttatctaaaatcacacgtaagtggcagaggcaaatactcaaaccaatactct

SEQ ID NO: 183171 - DNA, 201 bp, Homo sapiens
aggcgggctgatcacctgaggttaggagtttaagaccagcctggccaacaaggcaaaactccgtctatactaaaaatacaaaaattagccgggcatggtgkctcctcgggaggatgaggcaagagaaccgcttgaacctgggaggcggaggttgcagtgagccaagattgcgccactgcactccaacctgggtgacagagc

SEQ ID NO: 183172 - DNA, 201 bp, Homo sapiens
tgtcattttaaaaagtagctgtttgtttccattttaccaagccttttatcatagatagagattgaatttcttaaaacccttgtcaatatctactgatattmatccatcaagtattggttgagtagtgctaggcattctgtagacagtaaacaaagtcttggccgggcacagtggctcatacctgtaatcctagcactttgg

SEQ ID NO: 183173 - DNA, 201 bp, Homo sapiens
actgctgcatttgacgagttagaataaaggggttgtctgggaggcagaggttgcagtgagctgagactgcgccattgccctccagcctgagcaacgaaagsaaaacttcatctcaaaaaagaaaggaagaaagaaagaaagaataaagaggttctaaagtctatgtgaatggataataaaccactatgtcttttaacctaa

SEQ ID NO: 183174 - DNA, 201 bp, Homo sapiens
agcaacttgcctatggtcccatagcaagaagaggcaaaactgggatttgaacctaatgcccaaccattgccctaggctctactgctgccttttacttacaygttccttcagttctatttctggactctattctgtagtattttccgttgggctgttctgcacgattaccatacagtttcaccttctgtacttttccaatac

SEQ ID NO: 183175 - DNA, 201 bp, Homo sapiens
tggccacttaggagtgtagacagtgaatagaatcatagctcccaaactcttctgtcatccatctctttttatgccactgtattcagagttagttttcaccwtccaaggctacatgatattctcctgggtgaatgaaccatggtttattcaactaacacctaagagatagaggtgggagaagaaagaaatgccagaatgcct

SEQ ID NO: 183176 - DNA, 201 bp, Homo sapiens
aggggatcaaaaaatgtcgagcagcctgggaaacatatagagaccctttctctacaaaaacttttaaaacattagctgggtgcagtggctcatgcctgtcwtctcaactcctcaggaggctgaggtgggaagatcacttgagcccaggagtttgaggttacaatgagctatgatcatgccactgtactccagcctgggtga

SEQ ID NO: 183177 - DNA, 201 bp, Homo sapiens
taatgattattggctagattaaatttttttccatgtagttgttaactatttatgtgttatttctgaaacattgttttctaactcatggtccttgctgtggrggcagagacctaagtaaggctgataatgtggtcagttttggagccctgagccagagtctaagctagactcatcattctcagttctgtcattttagactgg

SEQ ID NO: 183178 - DNA, 201 bp, Homo sapiens
gcttctccctttgaatagtctcagcatctgcttgctggtcatgccctggcctgggctttgcttcacaagccaggctgtggtaacctgttctcagtgtcccrgaattacatgacctgcagactgtccctgattggcttttgtacttggctctatactggctgctcctgagaagcctctccttggcccattgctgccctggga

SEQ ID NO: 183179 - DNA, 201 bp, Homo sapiens
cagggcatcctaaagagtttatgttcttcttcttacatctgttcttcagactaaacccttaatccccagtgcaggccgtgggtgctcctgcctgcagcagmtaagcggctttgagcctcctgagctccaggctcaaagcacagattctataagcaaggagccagtactgtcagcactgagatgactcagcctcttcatccg

SEQ ID NO: 183180 - DNA, 201 bp, Homo sapiens
gttttgttgtagaccgaaccaatgcttccacataggagaagttgggttgacaccattagagctaacaagctcattcttccagaaagttgctcaaccatctrtgtctcctctttcctgtccagtgtttatcagctggttgtcaaggaggagcgacttcagaagtcacggagggcagctgacattattgagtgcttttcggtg

SEQ ID NO: 183181 - DNA, 201 bp, Homo sapiens
ggatgtttgggaggagtctgcccttattaatgggattagtgctcttatgaaagatgctggagggagcttgttcaccccttctgccacgttaagacacagckagaaggcgccatcgatgaagaacaaaacctcactagacactgaatctgcaggcaccttgatcgtggatttcccaacctcaattgtgagcaataaattgct

SEQ ID NO: 183182 - DNA, 201 bp, Homo sapiens
gatgtttgggaggagtctgcccttattaatgggattagtgctcttatgaaagatgctggagggagcttgttcaccccttctgccacgttaagacacagctmgaaggcgccatcgatgaagaacaaaacctcactagacactgaatctgcaggcaccttgatcgtggatttcccaacctcaattgtgagcaataaattgctg

SEQ ID NO: 183183 - DNA, 201 bp, Homo sapiens
atgtttgggaggagtctgcccttattaatgggattagtgctcttatgaaagatgctggagggagcttgttcaccccttctgccacgttaagacacagctasaaggcgccatcgatgaagaacaaaacctcactagacactgaatctgcaggcaccttgatcgtggatttcccaacctcaattgtgagcaataaattgctgt

SEQ ID NO: 183184 - DNA, 201 bp, Homo sapiens
ctctgggctgcatctgtgcccagaggctcagtcacagctgggcatgagaaaaacgtgtgtgcatcagaggcagtgtgtctgcctgtcatctcctgtgtgakgctggtgtctgtttatttctggccggatggaatataattgctccctgggctgacagtgacaaatggtggtgtggggagtattcctctgagtggtgggatg

SEQ ID NO: 183185 - DNA, 201 bp, Homo sapiens
gtgtgcatcagaggcagtgtgtctgcctgtcatctcctgtgtgatgctggtgtctgtttatttctggccggatggaatataattgctccctgggctgacastgacaaatggtggtgtggggagtattcctctgagtggtgggatgcacttgtgcacctaggcggacagaagcaggccctgtcacacagcaacgtggggttt

SEQ ID NO: 183186 - DNA, 201 bp, Homo sapiens
tgggctgacagtgacaaatggtggtgtggggagtattcctctgagtggtgggatgcacttgtgcacctaggcggacagaagcaggccctgtcacacagcawcgtggggtttgcttctcagtttgaggcctcccaggcatggagaaagttccaggtgggtgggctgtgagctgccttggggactagtgtctgtgtcttttga

SEQ ID NO: 183187 - DNA, 201 bp, Homo sapiens
ggcatggagaaagttccaggtgggtgggctgtgagctgccttggggactagtgtctgtgtcttttgagatgtgaagggcagccagggatatttcaggcccycttcttctcgggtgctgtcttcatgtcccagctctaacacgaaggacccggggcgccagaacaccagggcactaattgcagcttgatttacagtggagga

SEQ ID NO: 183188 - DNA, 201 bp, Homo sapiens
cgaaggacccggggcgccagaacaccagggcactaattgcagcttgatttacagtggaggactgtctgattcctctgcaaagccatcagaatggaaatacrgttgaccctcagtatcctcaggagattggttccggcaccctccttggatactaaaattcttggatgctcaagttcttcatataaaatgaggtcgtatttg

SEQ ID NO: 183189 - DNA, 201 bp, Homo sapiens
aaatacggttgaccctcagtatcctcaggagattggttccggcaccctccttggatactaaaattcttggatgctcaagttcttcatataaaatgaggtcrtatttgcatgtaatttatacacatcctcctgtatactttaaatcatctctaggttacttacaacacccagtgcaatacaaatgctatgtaaatagttgtt

SEQ ID NO: 183190 - DNA, 201 bp, Homo sapiens
agcactgtggtatgatcctgtgtctctcttgatggcctaccctctcctttaatggctctatattaccctcgaaataaaatatatacacttgagtagttcaytaaaggcttccataatctgagctcagcaggaatgccacctactgttgcttagtttgtgcactgcacaaagacacactaccaaggaaatgaaatccattaa

SEQ ID NO: 183191 - DNA, 201 bp, Homo sapiens
tgccttaccccagcctcaagttccagcatccacagtgcttaacatctaaaccacatgccagaaagtactattgcctggaggggagtcttagagttgtgagrcaaagttctaagaaaaggaggtggttcaaagcagagacatgctaaaatagaggaagccatctgttcatgtttcccccaaaatctaaccttcccctgctgc

SEQ ID NO: 183192 - DNA, 201 bp, Homo sapiens
tgccttccacaatggctgaattaacttacactgccaccagcagtatataagtgttcctttttctccacatccttgctagcatctgtttattttttgacttyttagtagtaaccattctgactggtgtcagatggtatctcatggtggttttgatttgcatttctctaacgatcagtgatgttgagcatgttttcatgtttg

SEQ ID NO: 183193 - DNA, 201 bp, Homo sapiens
agcagatgccaaataaatagagatttactgggggctaagtcacagtttagcacaagctttaaatttgttttaaaaagttagttgtttatatttataaaatrtagtaacagaaaacaaattatcagttactcagaatcttacttttgtttcatttttttctcctagtacctgtctatatacatatgaaatttttctgtaatt

SEQ ID NO: 183194 - DNA, 201 bp, Homo sapiens
acccatattactcataatacgtaactcacaaagaaagaattggcctttcttccccctcaacctgtcctattttagctgagcagtaaattccgtaatgtcaragaaatatagaaaacaaaaagcatttcttgttttctttttccacacacttttgtcagccgtgtctatttgcttaaatccatctttttccacgcatacgtc

SEQ ID NO: 183195 - DNA, 201 bp, Homo sapiens
tgcatctcacgctccaggcaaggattttgtcttgttcatcaatgtttcccagacatctagaagagtacctagcagagagtggatgcatactggatgtttgrgtaatacagaacccatattactcataatacgtaactcacaaagaaagaattggcctttcttccccctcaacctgtcctattttagctgagcagtaaattc

SEQ ID NO: 183196 - DNA, 201 bp, Homo sapiens
taacgctgatttgccttcaaggcctccctctctcatccactggctgtttgctgggataatgtctgcttgcctcaatcatctcagtcattacctctcttttrccccagctttattgaagtgtacttgacaaataaaaattgtatctgtttagggtgtgcaacatatgtatacgttgtgaagtgattaccacaatcaatctaa

SEQ ID NO: 183197 - DNA, 201 bp, Homo sapiens
tctgactgagctttcaaagctctggaggcttaaaagacaggcagatccaaattcttctaaaagctactgaatcagaaacttcaggggtggggccaggaaakatttataaatggagcccagaggagtctcttgtgccaccatgtttgacagctactgtggcaaatctgtctgcactgacctctgccctcctacctttgccct

SEQ ID NO: 183198 - DNA, 201 bp, Homo sapiens
ttttataagttttacaggtttgcaggctaacaagtttttaagtttgagaaacacttaaaaggatgaaagaccttccctttttgtgtattctttaactcccrtggtacttcttaacctcagtaaagtattgccatgcagtaggtgccaaatagactgttacagaaagaaaagaatgggggagaagaggagggatggatttta

SEQ ID NO: 183199 - DNA, 201 bp, Homo sapiens
ttgcttagatcacaggacattatcatagggaagagtggtagactagtcccaggaagccacagagagctgatccaataccctcacctgcaccccgccgaccaaaaaaaaaaaaaaaaatcataattacaaggaatctagttttggttgaccataaggaagaactttgaaccaactacaacagccaacatgaaacatggctta

SEQ ID NO: 183200 - DNA, 201 bp, Homo sapiens
caggaaacactgtgaaggagcaaataagtggatgagtgaattcatttttcaactgatgcactgttaacaggccaggcaatgtggtatagaatatagagtayaggctttggagtcagacctgcctagtacggtgtctgcaagagattgttgaatgtacctgggaatgccttatttgctactacccatgacaacatggatgaa

SEQ ID NO: 183201 - DNA, 201 bp, Homo sapiens
agccaaactctagcccctgctttgccacttactgctcctctgaagccctgtggatctgactctatctggtagaactgagtgtgcaggggggcgagatgtgrcagggaggactgttgctgtgtggggctcccgcaccctcatccctccagccaaaccacctcagcagcttggcctatttttctaacactccacaatggagat

SEQ ID NO: 183202 - DNA, 201 bp, Homo sapiens
aatacctacatcacagattgttttgaaggtcgaataagctaaactgtgtaaattgcaactggtaattgttcaacatgctctttgggggctgggcctgatgsctcatgtctgtaatcccagcactttgggaggctaaggcaggcagatcacctgaggacaggaattcaaaaccagcctggccaacatggtgtaaacccatct

SEQ ID NO: 183203 - DNA, 201 bp, Homo sapiens
aatagttgttttactgtatttctttatttgtattattattatttttattttgctttaagttctgagatacatgtgcagaacgtgcaggtttgttacatagrtatacatgtgccatggtggtttcctgcacccatcaacccgtcatctaggttttaagcccttcatgcattaggtatttgtcttaatgccttaatgctctcc

SEQ ID NO: 183204 - DNA, 201 bp, Homo sapiens
ttaagttctgagatacatgtgcagaacgtgcaggtttgttacatagatatacatgtgccatggtggtttcctgcacccatcaacccgtcatctaggttttragcccttcatgcattaggtatttgtcttaatgccttaatgctctcccttcccttgtccccccaacaacctcctgacaggccccagtgtgtgatgttaccc

SEQ ID NO: 183205 - DNA, 201 bp, Homo sapiens
agtagaatggatacattgttgtattgtactgctacagtggaatactatttatcaacagaaagggactggctatctgtacactccataatgtgaattaacckcaaaacttatatgttgaacaaacaaagctggacgcaaacagtatatactgtaggattccatatatatgacattcacaaacaggcaaaactactcatgttg

SEQ ID NO: 183206 - DNA, 201 bp, Homo sapiens
tacattgttgtattgtactgctacagtggaatactatttatcaacagaaagggactggctatctgtacactccataatgtgaattaacctcaaaacttatrtgttgaacaaacaaagctggacgcaaacagtatatactgtaggattccatatatatgacattcacaaacaggcaaaactactcatgttgatgaactccaa

SEQ ID NO: 183207 - DNA, 201 bp, Homo sapiens
gcaaaactactcatgttgatgaactccaaaacagtggttccctatgggggtgtggcattacctaggttagggaacaagataattctggagggctggaaatrtattctctatattgggttggatgacaggtatgtgaatgtatagaaattcattaggctgtacacttaagatttgtttattttactgaatgcaaattacagc

SEQ ID NO: 183208 - DNA, 201 bp, Homo sapiens
gatgccaggaatgctttgaaatatccaacaacacacaagacaagatgaccctccatcacaaacagttgtttggcctcaaataccaatagaactgaggttgrgaaatgctgctgtaggagaatgtagccactgtacaaaccatggaaaagcagggagagaatcactgcccaacctcgccatcctcctattctccaatcccat

SEQ ID NO: 183209 - DNA, 201 bp, Homo sapiens
caaacaggctaagtacaattgcattatggttatttcagctttgacatttctttgcatttagaatagcatcagcagagatgtttggagaccaagttgttctyccttctcagagcccagcttcttcaagtcaggggtcaaagagcatcaatggaagagactataatgtcatgccgtgccctgtagactctagattaatcattc

SEQ ID NO: 183210 - DNA, 201 bp, Homo sapiens
tatcaaatgaacttcttggaaaacaaaagtatggcatagagacaagaaaacaggtttgctgctcacctagtgggtgccaggactctactagctgctttgcrtaagttacatatgttgctaagacgagaagcttcccccatctagccttgcttccctgtaactatggtctctggggccacaaaaagaaaggcgatgaagaga

SEQ ID NO: 183211 - DNA, 201 bp, Homo sapiens
aaaagtatggcatagagacaagaaaacaggtttgctgctcacctagtgggtgccaggactctactagctgctttgcgtaagttacatatgttgctaagacragaagcttcccccatctagccttgcttccctgtaactatggtctctggggccacaaaaagaaaggcgatgaagagaaattccagggtggtttgcagattt

SEQ ID NO: 183212 - DNA, 201 bp, Homo sapiens
tcatgcccaccatggaggtgacttcatcgtcatgattgtatttgcaaattccattcaacctgaacattcctgcaactgagtagacatattcagagcccatscttcccctcctgtgaagctgagtggcatgcttgacctgatggctttgggagggctctgacacaaataggcactgtctggtgtgtcaacatcaaaggaaaa

SEQ ID NO: 183213 - DNA, 201 bp, Homo sapiens
gccactcgctccctattctcatctgcttgtcagtcattttgcatcctgcgtgagccaggccagttcaggcattggtaacgcagaggtgagtgggacagagctggccttggggtggtcagggtggactgttgtcatttggtgtgaggttaagcccctgttcccttctttacaacagcaggaacctatgaatgaaagtggcta

SEQ ID NO: 183214 - DNA, 201 bp, Homo sapiens
agggtggccataagcttgcagatgtagggtggggaggagtaaaggcgcagttttggaatgaagagggtgactgaggtctggatctagccttggcttggaawccatgtagtctacatggtgtcccccaagcttgaattgccaaatccttgaggaggggtgccctgtcagtattggatgaacaaggcttgtgtagggaaatga

SEQ ID NO: 183215 - DNA, 201 bp, Homo sapiens
ccactcgctccctattctcatctgcttgtcagtcattttgcatcctgcgtgagccaggccagttcaggcattggtaacgcagaggtgagtgggacagagctggccttggggtggtcagggtggactgttgtcatttggtgtgaggttaagcccctgttcccttctttacaacagcaggaacctatgaatgaaagtggctaa

SEQ ID NO: 183216 - DNA, 201 bp, Homo sapiens
taaatgatggtgaaattaacctgaatttcccaatcatgatcaatccacttgattagggtggccataagcttgcagatgtagggtggggaggagtaaaggcrcagttttggaatgaagagggtgactgaggtctggatctagccttggcttggaatccatgtagtctacatggtgtcccccaagcttgaattgccaaatcct

SEQ ID NO: 183217 - DNA, 201 bp, Homo sapiens
gtcacagctcctcccaaggtgacctttcaggttctaggacctgctccctcctccacccctcccactctcgcttacttagttcactcctccacgatacctcygccccgattctctcaaccggctcacagggttgtaaatagtgcctttagtcaactctccttgaattatctgtctatttcctgctcgaatcccatggagacc

SEQ ID NO: 183218 - DNA, 201 bp, Homo sapiens
gggaggctgaggcatgaaaatcgcttgaacctgggagttgcagtgagtggagatcatgccgctgcactacagcttgggtaacagagcaagactctgtctcaaaaaaaaaaaaagtggcagtttcccttgcatgctgtctctctcctgccaccatgtaagatatgccttgcttcccctttgctttctgtcatgattgtaagt

SEQ ID NO: 183219 - DNA, 201 bp, Homo sapiens
accagaccttaggctcccaacagattatgaaacgttcccattccctaaatgctattttacctatacctagagggaccagcttatcccaattttcccaaaayggtcccagttttaaaactgaaagtcctacatcctgggaatccctttggtctgaggcaaaccagaatagatgtttcagagatttcccatctttgcccttgt

SEQ ID NO: 183220 - DNA, 201 bp, Homo sapiens
agctgctttgcgtaagttacatatgttgctaagacgagaagcttcccccatctagccttgcttccctgtaactatggtctctggggccacaaaaagaaagrcgatgaagagaaattccagggtggtttgcagattttcaggtgaatggtataacttggaatccttgtatacatcacagatcaggcagcatggaattaaaca

SEQ ID NO: 183221 - DNA, 201 bp, Homo sapiens
cgtaagttacatatgttgctaagacgagaagcttcccccatctagccttgcttccctgtaactatggtctctggggccacaaaaagaaaggcgatgaagasaaattccagggtggtttgcagattttcaggtgaatggtataacttggaatccttgtatacatcacagatcaggcagcatggaattaaacattaaatcctg

SEQ ID NO: 183222 - DNA, 201 bp, Homo sapiens
ttcacatggagaattctgttcagagtcttagggatgttgatccccaagctggcgtgaatcccaaggatcctatttctggccagctagctttgcatcagccrcaagctggcatggagcaacactttaaggtaaatgcacgtggctgtattgtcggtggttacatcagtgcaatattcgtcagaagagtaactctaagccggt

SEQ ID NO: 183223 - DNA, 201 bp, Homo sapiens
aagggtactaggtttaatacctgagtgatgaacaccaggggtctctacaacaaacccccatgacacaagtttatctatataacaaacctgtacttataccyctgaatgtaaaagtttaaaacaaacaccaacagtgacaatactaactacctttcagttaaacaagtaattcattcatttaactgaaagaatatttctatt

SEQ ID NO: 183224 - DNA, 201 bp, Homo sapiens
cttatacccctgaatgtaaaagtttaaaacaaacaccaacagtgacaatactaactacctttcagttaaacaagtaattcattcatttaactgaaagaatrtttctatttgtaattgcccaatgggttggccatgggaaaggtctcctgggtcaggggaatggctgttccagccttcctgagaatttcaacattggagctg

SEQ ID NO: 183225 - DNA, 201 bp, Homo sapiens
tttgtaattgcccaatgggttggccatgggaaaggtctcctgggtcaggggaatggctgttccagccttcctgagaatttcaacattggagctgggctatkgggcttatccaggtaaaggaagcaaaggtgaggtacacatttccagtttttctctacataggaaactcaaccattttcttcgtatgtctatttttgcttg

SEQ ID NO: 183226 - DNA, 201 bp, Homo sapiens
agcctttccatggaagagctgaacttccaaccctaaccatcctgcctctgccacactgggttgccttctgtatgtataggatgttagtctttcccagtagygaaaagtgtctggcaaagcaaaagtgcaggggagagagacacgcatccctctcactgttattcccttagacatttggctggtggtggtctcagaccctgg

SEQ ID NO: 183227 - DNA, 201 bp, Homo sapiens
agacacgcatccctctcactgttattcccttagacatttggctggtggtggtctcagaccctggtgcggagtagctctttctgattgaaggcacatcatgmtatgcagcttcctcatgaacattgaatctggctctccctgggcaccagcaatgtcactcagttgaggatgaattgactaagcaataatgttcattgaact

SEQ ID NO: 183228 - DNA, 201 bp, Homo sapiens
caagtgatgcagtgatattcttggtttcaggaaggtggggtttccaccgccaatatccacttacttcatgattttaaggaagtcgcttagctcccagcctragtgttctcatttgtaaatatgagatgttgatattcaccatcctgccctgtctcacaagctaattgcagggttctagtgagatgtaaaagatgagaagga

SEQ ID NO: 183229 - DNA, 201 bp, Homo sapiens
tcataatgaccaaaacaggaatacctgggctccacctgctcgtttcactccactccaccccacctccagattgaaaaaagacaataggccattatagggastggccaaaagccatcagtgaccgctgtggtttcaaacttgagagttttccagcaggaaagagctcacatggaagagactatggttatgatcatggaagag

SEQ ID NO: 183230 - DNA, 201 bp, Homo sapiens
accagagatttatgtcagctttcatgatactctcagagcaggctgatgtgtgaaaagcgtatcatgcatgttggcagatccatttgcactctccaaggacktgctggagacactcttgcctcatcaattcctgttcactccctttcccctttgcccttcaatagcaagtagattgcctggtccccagtcatctcccagagg

SEQ ID NO: 183231 - DNA, 201 bp, Homo sapiens
tgacctggattcaaatcctagatctaacgttgcctaggtggctgacttttgggcaaattaacctctgaaattgaatgatcttattggtttaataaaattgkgtgtaggagaagcaatattaagcctacaattcaggaatattataagaattcaaaatgtattgtagtcctagctgtccagtatccattcaatgtcaaagtt

SEQ ID NO: 183232 - DNA, 201 bp, Homo sapiens
atctggttgacctggattcaaatcctagatctaacgttgcctaggtggctgacttttgggcaaattaacctctgaaattgaatgatcttattggtttaatraaattgtgtgtaggagaagcaatattaagcctacaattcaggaatattataagaattcaaaatgtattgtagtcctagctgtccagtatccattcaatgt

SEQ ID NO: 183233 - DNA, 201 bp, Homo sapiens
tatttaatgggaaagaaattgctctgagaagctaagtcattcccccaaagctacccagaagtagatgggagggagaattgattatcctggaaatggagacrtcttggggtgagaaatggtcatgtgagtcatatgcatatgactctggatatattgcagtgagaatgctggtggagctcccaagcaaaagcatcccatggg

SEQ ID NO: 183234 - DNA, 201 bp, Homo sapiens
agcctagtgacagcaagaccctagcctgtgtgtggaggtgcagagaatgtgtcaagactcttgcaagcaggtttgattcagcagcctcccaggaagggctrtgttaggcacactggtgccataggctcctgggtatcaagtcctaagtgaggcttagactgcgattatctaggaagacatggggaaggtgggaactgagga

SEQ ID NO: 183235 - DNA, 201 bp, Homo sapiens
tccagtggctggtgtcagaataacttggggaacttgatggccatgtagaattctaggtcctgtcctacttcaatgatcctgagcctctgtgtgtgtgtgtktgtgtgtatttttttgtgactcttcaggtgattcaaatttacaccaaagtttgagaagcactgctctacactattattatcataatagttatattatgat

SEQ ID NO: 183236 - DNA, 201 bp, Homo sapiens
gccttgttcataatttggttttgtattgccacaaagagtctgttttaaaattaatgctggtcaattgtgcctaaaatccaaaagggagggaatgtagtaaygtgtgatttcctttcccccatggccaagaattccggttttcaggtttctctggggtccccttggccaagaaggcatccgttcagttggttgggagcttag

SEQ ID NO: 183237 - DNA, 201 bp, Homo sapiens
attagtttggccccaaatgacgagatatcctgaagtgagggcttatatgttataggtggattcagagatttttaaatttgtaattggttaaaggagtaagkctctgtctaaaacttggaatcagcagaaaggaatgttttcagttaagataaagatgctatgtagctggattgatggcctgcagctgtgacttaacccttg

SEQ ID NO: 183238 - DNA, 201 bp, Homo sapiens
gacagtgtcattaattcaggcctaaaggaaaggatgctggattagtagaatgtgaagtatgttttcaattcagtccaattatattccaattaatttatggyaatttttacaatagagagcatttatagtagagagtactatggaggaaagtgtgataaagagagtgtgtgggcagagccccgggtgataagacctggtacc

SEQ ID NO: 183239 - DNA, 201 bp, Homo sapiens
gactttttttttttaattttcactatgcccaacatattctcatttctgtgtaatctatttattccatttaatggctctccattccctgaacatatggaccrtatttactttcaaatcactttattcgggatgtgttgattgatcttactagaatgttagatataattttgggggtatgataagagtgaactggatcttttt

SEQ ID NO: 183240 - DNA, 201 bp, Homo sapiens
ctagttcttgtgcatttgcaacagctttgacgtggttatggtgactttttttttttaattttcactatgcccaacatattctcatttctgtgtaatctatktattccatttaatggctctccattccctgaacatatggaccatatttactttcaaatcactttattcgggatgtgttgattgatcttactagaatgttag

SEQ ID NO: 183241 - DNA, 201 bp, Homo sapiens
tatatagtgttagaaaaatagggagtggaaataacacactagccatcttcatgtgggtttattttctttctagttcttgtgcatttgcaacagctttgacrtggttatggtgactttttttttttaattttcactatgcccaacatattctcatttctgtgtaatctatttattccatttaatggctctccattccctgaa

SEQ ID NO: 183242 - DNA, 201 bp, Homo sapiens
ttcattttcatggtagacgatagacataagagattgagctaagtgacacaggtacattcctttagatgttctgtacagcaatacctgctcatattccattkgtcaaaacaagtcatatggcaaacctcctgtctctggggcaaggaggtctcctcagccagcggggaaggactataagttacgtggcggtgtccgggatgc

SEQ ID NO: 183243 - DNA, 201 bp, Homo sapiens
gcaacaggcgtaagagatattcaaatatcgacatcgctatgatggcttgattttttaaataatttagttttcattaaatgttagtgacaatataacaataktatatagtgttagaaaaatagggagtggaaataacacactagccatcttcatgtgggtttattttctttctagttcttgtgcatttgcaacagctttgac

SEQ ID NO: 183244 - DNA, 201 bp, Homo sapiens; identical to SEQ ID NO: 32273

SEQ ID NO: 183245 - DNA, 201 bp, Homo sapiens
cgtgattgctgctttatttttctctcgtactcatcatgttctattatcgttctgtatggtttacttatttagtttttaaattttctatctgcacctggcckccctagactgtcagctccatgagggcagggatttttatcagtatttctatgactgtatcctcagaccctgggaaagtagcatgaatactttgagttgatt

SEQ ID NO: 183246 - DNA, 201 bp, Homo sapiens
tattttcaggttgctccaagattaaattgaatctgggagaagaattgaatgttacaagcttgccccctccagttttattgaatatcttacaggaattattraatattttgcaatcatccacttagctgacagattaaaggacacacttattaagttcctggcaacccaaagttgaatggaattgtttattccttagcagtt

SEQ ID NO: 183247 - DNA, 201 bp, Homo sapiens
aggataaaattctagaaaaatgggaattgtggattaaaggatagatggtcttatgcccatctacagttttggggtggagtgggggatggacgtaatgttckgtgtgtgtgtgtgtgtgtgtgtgtgtgtgtgtgtgtgtgtgtgtgtgtatgtttgagagtctcactctatcccccaggctggagtgcattggtgtgatct

SEQ ID NO: 183248 - DNA, 201 bp, Homo sapiens
aatctaaaaaataataactccccaacttgcctcaccttttacataaaatcttcaaagctctgtttccaacattcaatatatctttaattttgttcttttcwttgacacttgagcacaaatttgaccagcttaagtccaataagcatccaattgaaactaaaaatgtaccacttccaatgatgcttaatgatttccatcatt

SEQ ID NO: 183249 - DNA, 201 bp, Homo sapiens
agcatgcatgagaggaaaagcaaaaatggcttagagaaaagaaaaatggtcagtaagaaggaaagtaaatgtgagtggaagggggagatagaaggtaaaartgagagagagtgaaaatgggctgagagaaagtaaatgcatatgtgggagaaagaaaggaaaaatgtgtggagaagaaagactggtgtgtgtttggcacag

SEQ ID NO: 183250 - DNA, 201 bp, Homo sapiens
gcaactgaacaaagcacattgcataccccaagtacccactacgtgttattgttaaagatgatgagtgctgggaattatctgatatgtttataaagtggttmtgtctgggaatgaggtttatgagatggtaggagtcaggaagtgaactgaataacatatgtacctagcctgagaaaaaaattaaaaaatggaattaaaagg

SEQ ID NO: 183251 - DNA, 201 bp, Homo sapiens
tgagactatttttcattttaatgaataaaaacatcatatatcaaaaatcttattgttttaattttcatttctttgatacccaaagtggaactgttgttcaygcttcctggctacttgtatttcttcttttctaaactacgaatttacttcccttgtacatttttctttggggatactcattagttttctcattgatttgta

SEQ ID NO: 183252 - DNA, 201 bp, Homo sapiens
gaacttagagattcaaacttctttctatcacagatgtagacacgaacactaaaagctaagcttattacaccagataagcattgactaacacattttgcatrgagggaaaatgcacttagtcaaacaaacaaaaaaaatctctgtttagccatccatttcaaatttttatagaaaatagtgtaggcagcatcaattatgctt

SEQ ID NO: 183253 - DNA, 201 bp, Homo sapiens
ttaatagggggtaacttggctttggatcaagaatgcaactaggtctgctattcactggttgtgtgttttgaggtgggatatctattctattggattcaackgatagaaactcaactaaaaaaaaaccctaatccaaagaataatttcatggttcatataatttaaaagctcaggggtggcatttgccttatgcctatcttc

SEQ ID NO: 183254 - DNA, 201 bp, Homo sapiens
tctttgttattttcatttgctagtgagtcccttcaagaaattggaacggtggtctggagatacttctagtctttaatggcaggctctcactgtccttcctraagtcacatacgtacccctatggcaagaaagttggggaggtgattggcaacctatcaggataacatggaggagagtgacaattcacaaaagcaaggggcg

SEQ ID NO: 183255 - DNA, 201 bp, Homo sapiens
tcagagctcattattcaattccactattactgtgccttttgttctgtttcagtattggattgggcaagtcaccatccttcatcttagctagtcatggattkttattctttcttataaattttaagctaagtttatctagttcttataggagtccaattagaatttttacaagattgcattgagtttgtaaattaatttaat

SEQ ID NO: 183256 - DNA, 201 bp, Homo sapiens
gtatggttacccttgaacaacatgggtttgaactgcacagctctacttaatatatgaattttcttctgactctgtcactcctgagacagcaagaccaacctttcttcttcctcctcctcctcctcctcctcctcagtctactcaatgtgtagacaatgaggatgaagaactgtatgatgatccacttccacttaataaata

SEQ ID NO: 183257 - DNA, 201 bp, Homo sapiens
tatggttacccttgaacaacatgggtttgaactgcacagctctacttaatatatgaattttcttctgactctgtcactcctgagacagcaagaccaacctttcttcttcctcctcctcctcctcctcctcctcagtctactcaatgtgtagacaatgaggatgaagaactgtatgatgatccacttccacttaataaatag

SEQ ID NO: 183258 - DNA, 201 bp, Homo sapiens
ttaaattagctggatgtggtagcacacgcctgtagtaccggctactcgagaggatgatatggaaagattgcttgggcctggaagaccaagagtgtagtgarctgtgatcatgccactgcactccagcctgggcaacaaagtgagaccctgtctcaaaaaaaaaaaaaaaaacaaaacaacaacaaaaaaaaaaacaagaaa

SEQ ID NO: 183259 - DNA, 201 bp, Homo sapiens
gaaagattgcttgggcctggaagaccaagagtgtagtgagctgtgatcatgccactgcactccagcctgggcaacaaagtgagaccctgtctcaaaaaaaraaaaaaaaacaaaacaacaacaaaaaaaaaaacaagaaacatcctaatcaggacctgagatggtctagaaggaaacttcctggaacatgtttatggtaaa

SEQ ID NO: 183260 - DNA, 201 bp, Homo sapiens
agaccaagagtgtagtgagctgtgatcatgccactgcactccagcctgggcaacaaagtgagaccctgtctcaaaaaaaaaaaaaaaaacaaaacaacaamaaaaaaaaaaacaagaaacatcctaatcaggacctgagatggtctagaaggaaacttcctggaacatgtttatggtaaatttagttagtggggtcggtgg

SEQ ID NO: 183261 - DNA, 201 bp, Homo sapiens
ttaggaagttttagagaccacactctgcctacgatgaccccacctactaattaggtacgaccccatcagtgtctcaaagtcagaccagtcagattagtagmctctcctcccttggtaggtggaggcaggcagaaggctgcaaagtgaaaaatttatcccctactccaaccacagatataagtgaaagcattagggtgacca

SEQ ID NO: 183262 - DNA, 201 bp, Homo sapiens
agaaaagaaaagcttgttgataaatgagactttgatacccgccccctgcctttgacctccttctgtgacctctttccttatctcagttctgtatgcagtaytggcctgagaagacctccgggtgctatgggcccatccaggtggagttcgtctccgcagacatcgacgaggacatcatccacagaatattccgcatctgta

SEQ ID NO: 183263 - DNA, 201 bp, Homo sapiens
  misc_feature (1)...(201): n = A,T,C or G
ctccaggctgggcaacaagagtgatgctccatctcaaaaaaaaaaaagaaaaagaaaaaaagaaaagaaaagcttgttgataaatgagactttgatacccnccccctgcctttgacctccttctgtgacctctttccttatctcagttctgtatgcagtactggcctgagaagacctccgggtgctatgggcccatccagg

SEQ ID NO: 183264 - DNA, 201 bp, Homo sapiens
gaaatgaaacccccgctgctgcctcctctgtctcccctcccatcgctgttcccctcacactctgttttcccaggacaggagacccttgcagctcccccacsgtgcttgcttttttcaggatatctgccttcactctagccattccctctgatggaaagacttcctcattgtgcactggccaaaccttactcatttttaatt

SEQ ID NO: 183265 - DNA, 201 bp, Homo sapiens
ccccagccctctgggcattatgagagagtgacccagaaaatcgaatgcagagaagtgtcccgaaatataggagtcttgtttgaggcgtagtagaatctatyagcttgagaaattggtctggaaatcttattaaaagagacaaatcattccacattctctccagactgaagatattggggataataggacttccctgatacc

SEQ ID NO: 183266 - DNA, 201 bp, Homo sapiens
cagtgggaagagaaaacatggcccccctgctttctttctcttatttcccatggctagaatatatgcagtgtcccgggctgcagagagaccctgatgatccstggcagctcaaacaccacatttgccagcacatcaccctgctgaattcacccattctgctgctgctgtagtctcacaaattagggcatccaagtgaaagga

SEQ ID NO: 183267 - DNA, 201 bp, Homo sapiens
gccagcgacaataccagtgccaaggacgtaaaacaaagtcaggggtgtttctgccctgccagtaggcttacgttccggctcttgtttgctggccttttcayacgtaaatctcattcaatctgtgtgacatcattcctttggatttatgatttccgttttccaggtgaagaacatgagctttggaatcatctaataacttgc

SEQ ID NO: 183268 - DNA, 201 bp, Homo sapiens
agaatcttcccaatcttttcaaatacatgacttcagggtggggagaaaataaatagggccctggatgaagctgccagaccaccccaccccccccccccccrcccaggccattttctctgggcctctgtttccctatctgcaacacgggactgaatttattgttttattcactggagtggcactgtctagcatgtgccagcg

SEQ ID NO: 183269 - DNA, 201 bp, Homo sapiens
atctggaccccacaccttatctcctgaatcaaaatctcctgggggatgagaggtggggcccaactgagggatatggattttgtaagtcattcagagagttytcataggcacccagatttagaatacagcacttggacagaggcaatagctatgcttagatactgatgtactgtctttgggaagagagattagtttaaacct

SEQ ID NO: 183270 - DNA, 201 bp, Homo sapiens
tctccatctctgaggccatccaagcagggacagaatgacaaatttcggggattattggaatagtattcttgccttgggtgaagtgatagagaaggaaagaraaggactggcatttattcagtgaccactacgtgccaagcgatggttcagtcactgcagggaatggtttaatcaacaaagtaattgagtacttaagctggg

SEQ ID NO: 183271 - DNA, 201 bp, Homo sapiens
gtagagcttcttaggtagcatttttacaagatttttgctaatgtaacatgtaattttctaaataagtgttagagttctgaggctcaaaattcaaaacacayaaaagcgtacacaggcatacctcattttattgtactttgctttattgagctttatagatattgtatgtttttacaaattgaaggtttgtggcaaccctga

SEQ ID NO: 183272 - DNA, 201 bp, Homo sapiens
actacacaggagcagggcccctgcagcattctgcttgttcttgcttctgttggttagcactgtttgctttgaatgctctatttgttaagtataacaataayaaaaaacaagtttattatttgtagagatggggtctcactatgttgcccaggctggagagcagtggcgtgatcatagctcactgcagcatcaaacttgatc

SEQ ID NO: 183273 - DNA, 201 bp, Homo sapiens
aggggtaacctccagggtgggccagcccctgtcagctgagggcgtgtctccagagaaggggacaattgaaaggcagtagcaaccaacagtccctgcagctsaggcctggaagcacaggcccaaggaagaggacccaggggtaccagtctcatctgccacatctgtgttgaatgcccgaggatgggatgagtgactggcgac

SEQ ID NO: 183274 - DNA, 201 bp, Homo sapiens
gtaataaacactgaaatttcctctttctcattagtgagctttctggcaccagacttttggcaaggccgggggtgagaacctgcctctgccagccatctccygacatgtgccttttcttgggaaagcaggggcttgtttgtttatttacttttaattgacaaatattaattgtgtgtatttagagggtgtagtgtgatattt

SEQ ID NO: 183275 - DNA, 201 bp, Homo sapiens
cttcttaggtagcatttttacaagatttttgctaatgtaacatgtaattttctaaataagtgttagagttctgaggctcaaaattcaaaacacacaaaagygtacacaggcatacctcattttattgtactttgctttattgagctttatagatattgtatgtttttacaaattgaaggtttgtggcaaccctgaatcaag

SEQ ID NO: 183276 - DNA, 201 bp, Homo sapiens
tcagattcaaaacatacttgcacatatacacataagtacagtggcaagaaaaggaggcctatcagaaaatccaatgacactagcaaaatgggttttaaaaktcaccagacctggagctctggtcctgtacatatgattctatgggctaaatacaaattactgggcttcggagctgatggtttatgtattaatttattaaag

SEQ ID NO: 183277 - DNA, 201 bp, Homo sapiens
actgaatacgttaggactctctatgcatctgacgtcctcaggctacagctacaaaaacactctcaggatcttttgactgccctagaatgcatcaggtacctttaaaatgccctgtggaaccactgggatgagatttgagggggaaaaatgtaagtaatgcttacactggagatgagaaattgcttctgaaatcaccctgat

SEQ ID NO: 183278 - DNA, 201 bp, Homo sapiens
agcgtacacaggcatacctcattttattgtactttgctttattgagctttatagatattgtatgtttttacaaattgaaggtttgtggcaaccctgaatcragcaagtctataaggcactattttttttaacagcatgtgctaactttatgtctctgtgttacgtttcagtaattctcttaatatttcaaacgttttcatt

SEQ ID NO: 183279 - DNA, 201 bp, Homo sapiens
cattactattagatctatgacagtgatatgtaataagtgatctttgatgttgtaattgtttggggatgcacaaacgttgcctttctagcaatgagcaaacrtagtgggtaaatgttgtatgtgttctgactgtccactgaccatccattctcctgtcattctccctctcctgggcccccatattccccgaaacaaaaaaat

SEQ ID NO: 183280 - DNA, 201 bp, Homo sapiens
ccaagctgtaaccaatccagccattctgtacctcaccttcaatttctgtacattatttccccccttttttgtgtataaatcttcttccaccacgtggctgygctggagtctctgtgaatctgctgtaattctggggtttgcccgatttgtgaatcgttcattgctcaattaaacacctttaaatttaatttggctgaagat

SEQ ID NO: 183281 - DNA, 201 bp, Homo sapiens
agtaactataaaaatagctagcatttagtgacttactacacactttatgtgcaatatctcatttaacctttgccacttctctgggaataactgatgctgtyctcattttgcccatgagaaaatcaagacttggagaggatgtttattaatattgtgctgtttgcaagctttgacaacagactcttcacagtgcttttctcc

SEQ ID NO: 183282 - DNA, 201 bp, Homo sapiens
ggtaggggagtaaagcctaggtttgtttcctcaggataggctggggaattgaaagtgtgggttgagcaaaatggtacctgggaaaaaaagaatctcgccakagtgggtgtgcattgagtgcaaaaagtggcttttggtggcaggcaaatggccgtttgtgtggagggctgcacacactgctgtcagctggctctggctgct

SEQ ID NO: 183283 - DNA, 201 bp, Homo sapiens
tcctctttatagagtggcatcatgatgtgtgttcatcagacaaggggactggggcaggggctgtggctgcccatgatgcatgaggcacctcagctgtggcyattgagtacttattccggagacatgagaccatgaggtgccagatgcagagtttgggccttggagcctggagtctggatgcaagtctaccctctggttatt

SEQ ID NO: 183284 - DNA, 201 bp, Homo sapiens
gccgtttgtgtggagggctgcacacactgctgtcagctggctctggctgcttctagctggacttgcagaatcctactagggtggtttgatgaacccctggwttaaaaactcctgtttgccaggtaactgagaattgtttcacacatataagaagcatgggaaaaggtgtgtggcttgaccggtactacggaattccaaggt

SEQ ID NO: 183285 - DNA, 201 bp, Homo sapiens
aatgagactttgatacccgccccctgcctttgacctccttctgtgacctctttccttatctcagttctgtatgcagtactggcctgagaagacctccgggwgctatgggcccatccaggtggagttcgtctccgcagacatcgacgaggacatcatccacagaatattccgcatctgtaacatggcccgggtaagtacacg

SEQ ID NO: 183286 - DNA, 201 bp, Homo sapiens
gaggaaggcaacataggattgggaaaacagcctccaggtggcatatctcccaaaagaaactggaagtatgggaggtggataataaatagctgtttgggtgaaaaaaaaaaaagaaagaaaggaaatggtatattcaacattagtcataacaatttgattaaaaatttcaaatatcattaagggagatatgtggcttaccaa

SEQ ID NO: 183287 - DNA, 201 bp, Homo sapiens
ggttaattggaaaatattgcctgataaaagtcatttcacaatgtgctagcccgcaatgtccagcccagaatacagctggattgctttgatcatcaaggctmctgtgatatctcggtaatcctcctgagcataggagtcacagatctgctaggagaatcattgtcctattgcagataaaagactcctgagcctccagtgcta

SEQ ID NO: 183288 - DNA, 201 bp, Homo sapiens
atggccaaaatcttggtaaagcatgaatgaaatttgttgaactggaatcagaaatatcagaatggatagacaggtgagtaggtaggtaggtaggtaggtcrctaggtaggttagataggtagatacacatagagagagatatgtatgtatgtatataggtaggtgggtgggtggatggatggatggatggattagataggt

SEQ ID NO: 183289 - DNA, 201 bp, Homo sapiens
gattctgtggaatctgtgcagggtacaacagggacaacctgtttcttctacacagtgttcagagccttggctaggaagtctccaaggctgggggctggaatcatctgaacatgtcttcactcacatgtctagtgactgatgcaggctttcagctgggattgtccactggaagacctacacatggcctcttcagtggcctgg

SEQ ID NO: 183290 - DNA, 201 bp, Homo sapiens
ctgcaccctagggcataacatatccaattatctccagggatacagtcaagcaaaggagagtgaaggggggcattgcaaatgacagaatctgctgaggataggaggtaaatgggtaaatgaaatgggctgacacgccctcagccttgaattgggagtgagctgctctaggaagctttgtgttttgacatcttactattttag

SEQ ID NO: 183291 - DNA, 201 bp, Homo sapiens
ctgcgacgatgggaaggagacaatctgggctttcgtaatccaataaaggggtatggacatctcagggcctaatgggaatttaggaccaggtgagactttayccatgagtccacccttatctagtccatcactcaattttacagatgaggaaacagacctaaaggggtagagtacctaccctgacgtcactcagccaaaacc

SEQ ID NO: 183292 - DNA, 201 bp, Homo sapiens; identical to SEQ ID NO: 32306

SEQ ID NO: 183293 - DNA, 201 bp, Homo sapiens
tccagggatacagtcaagcaaaggagagtgaaggggggcattgcaaatgacagaatctgctgaggataggaggtaaatgggtaaatgaaatgggctgacaygccctcagccttgaattgggagtgagctgctctaggaagctttgtgttttgacatcttactattttaggcataactcagaagggcttaggtgcaaagaag

SEQ ID NO: 183294 - DNA, 201 bp, Homo sapiens
tttgacatcttactattttaggcataactcagaagggcttaggtgcaaagaagagtgtctaaagaaggatggcaagcttctgttggtttggctcagtagarccaggtagaagaaaaaatcagccacacaggcatcagcgatcattctcagttctagcagaaaatgaacgtactaagtgggacattgaggtaggtttcatag

SEQ ID NO: 183295 - DNA, 201 bp, Homo sapiens
aaggatggcaagcttctgttggtttggctcagtagaaccaggtagaagaaaaaatcagccacacaggcatcagcgatcattctcagttctagcagaaaatkaacgtactaagtgggacattgaggtaggtttcatagtcctatggactgagtcagcacagcagaacacaagaagtctgtgacttgtggtcatgtggtctga

SEQ ID NO: 183296 - DNA, 201 bp, Homo sapiens
gtgtatatctatagtaactagttttatatatatatgtatatctatagtaactagttttatatatatatgtatatctatagtaactagttttatatatatatgtgtgtgtgtgtgtgtgtgtgtgtgtatatatgccttcagctacctcttattctgaaaagagtgctgttcaatagaattttctgcagttacagaaatgtc

SEQ ID NO: 183297 - DNA, 201 bp, Homo sapiens
ttggctcagtagaaccaggtagaagaaaaaatcagccacacaggcatcagcgatcattctcagttctagcagaaaatgaacgtactaagtgggacattgargtaggtttcatagtcctatggactgagtcagcacagcagaacacaagaagtctgtgacttgtggtcatgtggtctgagcctcccatgggctcagctctgt

SEQ ID NO: 183298 - DNA, 201 bp, Homo sapiens
aatgagcattgcacattgagaagatgaggagaataccttctgggcccaacaacatggagacaccccaaacagctcaaagaatagctgtcagaataggcccrtcatgatacaagcaccaatagtggaggacaaagaacactctgttcaaagttcagcaacactcccacaggaggtgggaggatactcatgagggtggaacag

SEQ ID NO: 183299 - DNA, 201 bp, Homo sapiens
tgtatatctatagtaactagttttatatatatatgtatatctatagtaactagttttatatatatatgtatatctatagtaactagttttatatatatatgtgtgtgtgtgtgtgtgtgtgtgtgtatatatgccttcagctacctcttattctgaaaagagtgctgttcaatagaattttctgcagttacagaaatgtcc

SEQ ID NO: 183300 - DNA, 201 bp, Homo sapiens
ctgagtcagcacagcagaacacaagaagtctgtgacttgtggtcatgtggtctgagcctcccatgggctcagctctgtggataggagggtgggttgcactygcagggagagttagtctggggcgggtaccagatgataattttattctaaaatctataaagcatatcatcaaggataaagaaggttccagtgacaagcact

SEQ ID NO: 183301 - DNA, 201 bp, Homo sapiens
gtatatctatagtaactagttttatatatatatgtatatctatagtaactagttttatatatatatgtatatctatagtaactagttttatatatatatgtgtgtgtgtgtgtgtgtgtgtgtgtatatatgccttcagctacctcttattctgaaaagagtgctgttcaatagaattttctgcagttacagaaatgtcct

SEQ ID NO: 183302 - DNA, 201 bp, Homo sapiens
ttacctgcagtagctagaagcatcttccacctagagatggcctaaactggtggcaatatggatgcaaggtttggtagaatgaggagcaagaagagaaataygaaaaggagaagaaggagaaagaacaagaggagaaaagtgagagataagccccacatttgtgaaatgagcacttacctatccttataacatttttgccat

SEQ ID NO: 183303 - DNA, 201 bp, Homo sapiens
tatatctatagtaactagttttatatatatatgtatatctatagtaactagttttatatatatatgtatatctatagtaactagttttatatatatatgtgtgtgtgtgtgtgtgtgtgtgtgtatatatgccttcagctacctcttattctgaaaagagtgctgttcaatagaattttctgcagttacagaaatgtccta

SEQ ID NO: 183304 - DNA, 201 bp, Homo sapiens
gctttaatttcttcatctatctattatagatagggatatatatatatatagggatagcgaattgatgctcaaatactcaagtatataaaaattcaagtgaygcagtgatattcttggtttcaggaaggtggggtttccaccgccaatatccacttacttcatgattttaaggaagtcgcttagctcccagcctgagtgttc

SEQ ID NO: 183305 - DNA, 201 bp, Homo sapiens
gtaaagtattcgcagaacactttgtgagccgtggtagacagagtacacagtcagtaaatgttagctatcattattgataggaagctgaggctcagagaggyttcagcactttcttgggccacccagatactgagtgttaggaccaaacaatgaatccatttgcccccatgctctgttgcactataccagtgtttccctaag

SEQ ID NO: 183306 - DNA, 201 bp, Homo sapiens
atttagctcccactgtaagtgaaaacatgcggtatttgactttctgtttctgggagttttttgcttaagataatggcctccaggcccatccatgtatccaygttgctgcaaaagtcatgatttcattattttttatggcttagtagtattccatggtacacatatatatgtatatacacacaccatggaatactacatcta

SEQ ID NO: 183307 - DNA, 201 bp, Homo sapiens
aaattgtcagtcaaactgggacaagttggtcacctagaaagcaggaaggtcaggtgttcccttccattatctttccttgccaggaacaggcttgccgatgytgctgccgagaagtagagtgtgcattcacacacaggatccatgtctgatggagtattccaacatgacaggcaaataagctgaagggcacatggattttga

SEQ ID NO: 183308 - DNA, 201 bp, Homo sapiens
tactttctaaagtaagtgctttgaagaagatggatgcaggagaaatgacacattaagtatttctgctgaaatgtgggatttctgctcaaatggaagttgcygtgtttatgactggcacacaaattgaagaacggaacttgctttttgaacaattgagtttatcatttttgctctcagaggtacctcttgctaatggagaaa

SEQ ID NO: 183309 - DNA, 201 bp, Homo sapiens
tgaaaaatttatcccctactccaaccacagatataagtgaaagcattagggtgaccaaccattcctgtgtgcccatgactgagaggtttcccaacagctgkactttcaatgttaaaactggaaaattgtcagtcaaactgggacaagttggtcacctagaaagcaggaaggtcaggtgttcccttccattatctttccttg

SEQ ID NO: 183310 - DNA, 201 bp, Homo sapiens
catcatccacagaatattccgcatctgtaacatggcccgggtaagtacacggccgccattgcttgctgagcccctcctccccaagacagatggaggctgcygagagaggatcccgctgagccagccaagagtctgtgttgtgctctcctgataatttcttccttgaggaagtgatgcctgtgctgattccggctccagact

SEQ ID NO: 183311 - DNA, 201 bp, Homo sapiens
tcatccacagaatattccgcatctgtaacatggcccgggtaagtacacggccgccattgcttgctgagcccctcctccccaagacagatggaggctgccgrgagaggatcccgctgagccagccaagagtctgtgttgtgctctcctgataatttcttccttgaggaagtgatgcctgtgctgattccggctccagactca

SEQ ID NO: 183312 - DNA, 201 bp, Homo sapiens
gagaccagcctgggcaacataatgagaccttgtctctcttaagaataaaaatgtttttaaataaaaaaagaagacccatgtctgttattcttaaaagctcrggaatgtatagcttacacaagacttgaatgcaagaccatgtgatcttacttgcttactaggcttttggtgcctgcattctcacataaacagccaggctac

SEQ ID NO: 183313 - DNA, 201 bp, Homo sapiens
gttggctagactgatctcgaaactcctgacctagacaatccgcccacctaggcctcccaaattgctgggattacaggcatgaaccaccgcacctggccccracttcttctcaaatagttatgtaaacattttagtgagcactaaaacaaaattagcacatcacattcatgattttatgttgcactatcattcataatgagg

SEQ ID NO: 183314 - DNA, 201 bp, Homo sapiens
cttgtctctcttaagaataaaaatgtttttaaataaaaaaagaagacccatgtctgttattcttaaaagctcaggaatgtatagcttacacaagacttgartgcaagaccatgtgatcttacttgcttactaggcttttggtgcctgcattctcacataaacagccaggctactctctgtgctctctcctgagagaggagt

SEQ ID NO: 183315 - DNA, 201 bp, Homo sapiens
tgttattcttaaaagctcaggaatgtatagcttacacaagacttgaatgcaagaccatgtgatcttacttgcttactaggcttttggtgcctgcattctcmcataaacagccaggctactctctgtgctctctcctgagagaggagtggaaagtctcccaagtgctgagacaataaatgtcccctctacccaaagtctggc

SEQ ID NO: 183316 - DNA, 201 bp, Homo sapiens
taaacagccaggctactctctgtgctctctcctgagagaggagtggaaagtctcccaagtgctgagacaataaatgtcccctctacccaaagtctggcatrcagtgggttttcttacatatctgtgatatgctccagacaacaggagtgaaacagtcatattgctgatacatagagagtttgagtggtctagacagaagat

SEQ ID NO: 183317 - DNA, 201 bp, Homo sapiens
gtgggctacatgtggaaggggctagagatggccgctggatcccaccccccacccccaagaccttacactagcattgctggatgcttctgtgcctttgcctrggctattctatttcaaatgcctcccaagttaccaccaaggcttgctgctcttaatgatatccttaggtagcctgtcttgcaactttgcttagtagctact

SEQ ID NO: 183318 - DNA, 201 bp, Homo sapiens
tgctccagacaacaggagtgaaacagtcatattgctgatacatagagagtttgagtggtctagacagaagatcaaaccagccgcagcattcccttaagccraagcctaatccaaagcaaggtcctaactctcttcaattccataaaggctgagagaggtgaggaagtagcagaagaaaattttagagccagcagagcttgg

SEQ ID NO: 183319 - DNA, 201 bp, Homo sapiens
ggacagacttgctctctagtgagggggtaatgcaactggtgactcttgagttgaagactgtgcttatttaccattccaaaaatcctgggactcttaaacaytacgctaaatctaccctgcctgtgctctgtaaatggaacaacaaagcctggatgacagcacatttgtttacagcagggtttactgaagattttaagccca

SEQ ID NO: 183320 - DNA, 201 bp, Homo sapiens
tgaacaatgtgcaaagccattaaaaactcaattaggactttctttttactgccgacgtgaggaaatgcaatcctgaggtgctcatgtgtaaacacaatagmcaccatctgctatggagaagcattttgcctccaaaaaggagatctgtgttgcagacacatcaataacgaggcgcttatcaaggcattattatgcacgaag

SEQ ID NO: 183321 - DNA, 201 bp, Homo sapiens
atggagatgtacaaaaagattaacgttgttttcatgcctgctaacacaatatccattctacagaccatggatcaagaagtcattttgacttttgggtcttrtttaagaaatacattttgtaaggctacagctgccatagatattgattcctctgatggatatgggcaaaataaatgggaaaccttcaggaaaggattcgcc

SEQ ID NO: 183322 - DNA, 201 bp, Homo sapiens
tatctgttataaaattagcgtttattaagtaccgtttttacttaatattcactgaaaacaaacaactttgatctgtaggtttcattatcccattttatagrtgagggcattgaggcccagggaattttactgacttgctcaaagtcacacaactaagaaatgccagaagctggagtgaaacccagtttacttaattgaaga

SEQ ID NO: 183323 - DNA, 201 bp, Homo sapiens
acaagcaaagaaagtggtttcttgagatggaatcttttattgatgaagatgctgtaaacactggtaaaatgacaacaaaggatttagaaaattatataaasttacttgataaagtagtggcatggtttaagaggattgattctaattttgaaagaagttctacatttgggtaaaaggctgtcaatcaaagagcatctcatg

SEQ ID NO: 183324 - DNA, 201 bp, Homo sapiens
cctactgagcactgtcaggtttaaagagcaagataaagggcacaataatatgtcttcagatgctgcactgacatctgtaggcgtctaaatgtcactaacgwcaaggcatttttgccccaaatgcacagccagtcttctgttaagcccattcagtggcatcccatctggggggaattgggtctcagtgtggagtgagtagga

SEQ ID NO: 183325 - DNA, 201 bp, Homo sapiens
tagcagcagggacatgcgtaggatgtttgaagtgtgtattagtttcctattgctgctgtaacaaattaccacaaatttagtggccgaaaccccacacattytaatctggacatcagaagtcctaagtgggtcacactggggtacattcaaggtatcagggctgcattcttttctggaggctctagggtagagtttgttttc

SEQ ID NO: 183326 - DNA, 201 bp, Homo sapiens
atggttatattctgggtttagacttgaactaggacttctggctgatcaaaacagatcaggagctggagtgagtgtgcatcctacccccagagcctagctgrgtgtgaagtcgagttgcaaggctcctaggaaagttttctcatctcaggagcagtttcaggagctgaagggggatgtgtgcagccatgtcaataaagcatt

SEQ ID NO: 183327 - DNA, 201 bp, Homo sapiens
aataaataaggtttgttttttattgactgatttgtagtacttctttctatattaggaaaactatgagttatgcttttttcagtttaaagtttttgacatartatattaattagtctgttcttatgctgctaataaagacctacccaagactgggtaatttataaaggaaagaggcttaatttacttacagttccacatggc

SEQ ID NO: 183328 - DNA, 201 bp, Homo sapiens
ccctccagtcctcaccactccttattgtctcctcagtgctgaggctactggtggataccagttattgtgcttacaacattgcttttcttatataaagaaayctttatttttctcaagtctctatcaaaagtgggaaagtaaaagatggggcaaggaggtggtatttttgttttgttttacagctgaacgactttattaatt

SEQ ID NO: 183329 - DNA, 201 bp, Homo sapiens
gtatggctattggtctattgttatgtttgcaattggcttgatgattactagttttcatggtaatactggtagcactatctgcttctcttgcacctacattwtcttacttgaaagtgcattgtgccttttgatgtctttgtgccactttcacttttattatgactagatagctaaatttcatcattatggacttttaaatta

SEQ ID NO: 183330 - DNA, 201 bp, Homo sapiens
agcactctgagactctcagaaaggacagagacggggagtcagctcccagcgagggtgcagaaagtggaatcgacaggcatttcttttgggaagtttctagscagcccatttacagtagaagcagatgtctcatggagcttccatccaatgtcagatcagagaagagactatttccaggagcaggagggtcagttgctaatg

SEQ ID NO: 183331 - DNA, 201 bp, Homo sapiens
aaaggaaacaatttcagacaatcagagcagcatggcatttgtcaagttgactagatgcaggaattttcaactctgaaaagcccatagaggtggttttcccygggccttgggtccttgacaccacaccagccatggtggctcaaaggtagcctgaggggtctctgagctgctgtcattagtttaaaaacctgagtaaaagta

SEQ ID NO: 183332 - DNA, 201 bp, Homo sapiens
agtatgctgggtaaaaagtctttattttcacttttgcttttgtttgggaggtcaggagggatgcaagcttgtgtaggggttgcatgtagtttacatgttaktctgctttgtctccataatcttttgcctcttctctccccctgctcagtaccccttccctcgcctgcagttcatgtctcctgcttctccttctgcctcttt

SEQ ID NO: 183333 - DNA, 201 bp, Homo sapiens
gaggttttatccgtggaggtggctctcagtgagatggatggggagccagaaggggaggatggagtgggaaggtggtcttcccctggagttgggccgcccartggcagattcttatctgactgcctccagctgaacccccctcagcgtccagacatcctttctcttctgtctttctctgccacattgttccattgtcactgg

SEQ ID NO: 183334 - DNA, 201 bp, Homo sapiens
ttggaaggaccagaagaagtatgctgggtaaaaagtctttattttcacttttgcttttgtttgggaggtcaggagggatgcaagcttgtgtaggggttgcrtgtagtttacatgttagtctgctttgtctccataatcttttgcctcttctctccccctgctcagtaccccttccctcgcctgcagttcatgtctcctgct

SEQ ID NO: 183335 - DNA, 201 bp, Homo sapiens
gtattttatttttaaaaaacgttggtgtttaagttacagctaaaatcttgaataattcacattttacaaaatgtgtcatcaagaagataatcttccttccygcatcgccactgatggtggaatgttttttgcctcgtaattaatttttaagagaattccagggctggtatctatttgtaggtggtgtttattggtgttggt

SEQ ID NO: 183336 - DNA, 201 bp, Homo sapiens
ggtatgtcggtggcccttctttctggcagtggttagaaaggagccagtggattcatagtttgagataaatccctgttgcctgtgtggtgaaatgctggccytcttttctgtagagtgggactttatagcttgcttttccttaagtggttttggatcataaattaataagttaaaaggaggaccagccaatgcccctgtttt

SEQ ID NO: 183337 - DNA, 201 bp, Homo sapiens
gatcactagagctcagaagttcgagaccagcctgggcaacataatgagaccttgtctctcttaagaataaaaatgtttttaaataaaaaaagaagacccaygtctgttattcttaaaagctcaggaatgtatagcttacacaagacttgaatgcaagaccatgtgatcttacttgcttactaggcttttggtgcctgcatt

SEQ ID NO: 183338 - DNA, 201 bp, Homo sapiens
catagccttgcctatccccagcccaagttacggccactgactacactacagtgacattgttagtttaagcatctgtctatcccaccaggctcccatgaggrcacgctcatcttcccagctccagcagacagacaatagcacggcttctcaaataaaacatgcttggctgagtcccttcccttttctgtatatgtttccctt

SEQ ID NO: 183339 - DNA, 201 bp, Homo sapiens
ttttttctatctatttttgctacattattttcccaaaattccttagaatgaatgaaaagctctgttttccttcatctaattgacactgactccttctgaasactcaattaaacaatcttctcctctgaggatgcttccctgatgtcctcaggccttgttacattcccgaagcctggtttgttcccaaagtatcttgcatgc

SEQ ID NO: 183340 - DNA, 201 bp, Homo sapiens
agctttgacatcccataagggcaactattcagggactgtttccctgtaacattgactcccttatgacttgcacacctttattactatgagaatcactaggrttcttcagaggctggcaagcaggcttgaaaaacagatcttctggctgggcacggtggctctcgcttgtaatcccagcactttgggaggccgaggtgggtg

SEQ ID NO: 183341 - DNA, 201 bp, Homo sapiens
gaattaatcctttctggcaacggtcctctttatagagtggcatcatgatgtgtgttcatcagacaaggggactggggcaggggctgtggctgcccatgatrcatgaggcacctcagctgtggctattgagtacttattccggagacatgagaccatgaggtgccagatgcagagtttgggccttggagcctggagtctgga

SEQ ID NO: 183342 - DNA, 201 bp, Homo sapiens
gttggggagggaattccaacattagaatatagttggatccactggcaatagtagaaaaaacaagaatagcaactgctaggtgtctagtgtccactatgtgygaggcactgtgctctgtgtattttatgcattgtctcatttaatcctcacaaccctataaggttggtcctgtcatctgccacagtatacagaagaatagtt

SEQ ID NO: 183343 - DNA, 201 bp, Homo sapiens
aaaacaagtaaacccgcagatctacatatttatgtccttaacatgttgtctgctctccaaaaagagacactgagccttcatttaagccaaaagtgctcacmagggtgacaccctttgtggaatgagtgtattgcagaaaatctgggagtctgagctaaaagtctaagtttctatcaaccaggtttttttccccccatttct

SEQ ID NO: 183344 - DNA, 201 bp, Homo sapiens
tctcttctttggggctctggttactgcttcctctatttgttcctctggtcccataggtaataaacagctctcctactgaggcactagtatattatgggtcyctatacatttgtcacctttatcagcagaccttttataaataaaccttcctcaaattgtcctcatttgagtatgccctctgtcattcttctgtgaagtcta

SEQ ID NO: 183345 - DNA, 201 bp, Homo sapiens
agaatcagaagaggagaggaactggcaaagcagacagacaggtaggagaaaagcgtaaggcccaagagaaggcttttgcagcaggaggagttggttggccrtagcagatgctgcagaggatggagggggtgggtttgggcacagcctggacatttggccatcagaagtaacttgtacaggttgtagggatgaaggttgaag

SEQ ID NO: 183346 - DNA, 201 bp, Homo sapiens
agatcttgctgcactgtggctcattttccctagctcagccccctaaggaggtatggggctttccttcttctgtggcttcttaacttttagactcactttcyttctgggtgtgtagggttgggctttgctttaggagtgatgcagctctgggctcatgtcccgcctctatcatgcactggttatagagcctcgggcaaattt

SEQ ID NO: 183347 - DNA, 201 bp, Homo sapiens
ttggaggtcagttgtctcactgtctctgtactgagcaatgatgttcccaattttggtatagattaatcgccatgtgacttgatgtgtaatatttctgagcrgccaattaattctgctaatcacattagtggcaattagcaagatgctcctctgattagggggctgaggtcaagatgcttttacatgcttgtgtttactgaa

SEQ ID NO: 183348 - DNA, 201 bp, Homo sapiens
tttgctctccttgtgttttgccttcctccccagccatttcttctcattcttctttactggttctgtacttgctcccaacctctaatcattgaagtgtcccyggccttagccctgaagctcttcctttctgctcatactcactctaggtaggtggtgatgatgccaaatgagatagcacaggaaggggccagatttgaagca

SEQ ID NO: 183349 - DNA, 201 bp, Homo sapiens
acttgtctgttccttgggaagctagctactatattgtaagttgacctattggcaagaaatcgagggagatgcccagccaacagccagcaaggaactgagtsccatactgcagtagcccatgaaaaaatgaatctgtcagtatcatgtcagtgattatgaaatcagttaacttgaattctctcccagctgagtcttcagatg

SEQ ID NO: 183350 - DNA, 201 bp, Homo sapiens
tggagcttgggacatacacagtgctcagtaaagacttgctggattaattgaaagagaactgaacttggaggcaaacagctggttttcaatcctggctctgkgccttactaactgagcaagtcacttaagccaaacctcactttcatcatcagcaaaataaaaacataatttccctttcagtgaaaaaattctgttgaaaga

SEQ ID NO: 183351 - DNA, 201 bp, Homo sapiens
aatattacaaaaaaagttttcatttctgccagtctaatgagccaaaaatggcatctcatcttcctaattaatacagaagttgaacatcttctcatgtgttstgataaacactttatgtatgtccttatttaatcttgagacaatccaatgagtaaactgttactgtcttcattttagagatgtgtaatcagtggcccagaa

SEQ ID NO: 183352 - DNA, 201 bp, Homo sapiens
ttcattgccattgacaccatgcttgacatggccgagaatgaaggggtggtggacatcttcaactgcgtgcgtgagctccgggcccaaagggtcaacctggkacagacagaggtgagtcctagggggccaagacagttggccacctgtagccctgaccaaggagaaacatgatgatagaacggagagacacataggtagggg

SEQ ID NO: 183353 - DNA, 201 bp, Homo sapiens
ctggactttaaaagaaaaatgaattctgtgttcattcaaggcaaaactaaatcacttgtcaaggaaagacgatcaaattattatgagactgacagctacargatctgcatggtgtcaggactactcagggagaaggagaggaaagtaataaggcatcgtatgggcttcagagtcacacataactaacaggtacttcctgga

SEQ ID NO: 183354 - DNA, 201 bp, Homo sapiens
atagttatgaattaattaattagctagttaattaatttttcattcaccatgtgaatagaatctaagtccattgttttttcaaatactatagttaatcagtrttccagaaccatgaattaatagtttagcctttctcccctcattaaaagtggggctgttctcatcaaatgcattctcatatatggtctattgatgttcttt

SEQ ID NO: 183355 - DNA, 201 bp, Homo sapiens
ttatgaaaataaacaatgacacaggatgagcatcagaaaagccgccctcagcacctggaggggcggttctttgaagcggcgtcagcatctgtctgcctgcrtgctcatgccaaggcagcctccaagctagcccagcctggcaacatggacaggtctgccttaggacctgagcattgctaggtcactcctgagaggaccgat

SEQ ID NO: 183356 - DNA, 201 bp, Homo sapiens
agaagcacgtggatgaagtgaatatgccagagtttctgccgggtgggatgttgacatgctttgcaaaaattccaataactcgaaggccctagcagaatgakgccatgtccctcaggcctctcacatggagatggaataagcactgaattctatcaccatttcatcccattccgtagagtttaaccttgagaaagtgtaact

SEQ ID NO: 183357 - DNA, 201 bp, Homo sapiens
gccacttgcttgaagtttactttgtattttagcctggcttattatacgtgtaaccttgaaaaatgttatttaatcttgtgagaaaaaaatggacattgtcrtatccacctcacagtcttgttataaggattaaaagacataaactatgctaagtaggtatgagacaagagaatcactggaacccaagaggcagaggttgca

SEQ ID NO: 183358 - DNA, 201 bp, Homo sapiens
cattctgaaagccctctgggtaattataatatgcagccacaagttgagaactattgatcttgagcaaccctccattgagattctgagatgactgttcactrccctcacttgaagaatcagtgatggagaagccactatgattggtgagagattaccgtatctctcagatgaggagtgctggaaacaaagtttgaaaattac

SEQ ID NO: 183359 - DNA, 201 bp, Homo sapiens
tatgggtatggagttggctaaaacaaggggtcccagaagaagcacgtggatgaagtgaatatgccagagtttctgccgggtgggatgttgacatgctttgyaaaaattccaataactcgaaggccctagcagaatgatgccatgtccctcaggcctctcacatggagatggaataagcactgaattctatcaccatttcat

SEQ ID NO: 183360 - DNA, 201 bp, Homo sapiens
tgtgggaacacaagtccaggactcagagttcaggaaaatcaggagtctcctgaagtatgggtatggagttggctaaaacaaggggtcccagaagaagcacrtggatgaagtgaatatgccagagtttctgccgggtgggatgttgacatgctttgcaaaaattccaataactcgaaggccctagcagaatgatgccatgtc

SEQ ID NO: 183361 - DNA, 201 bp, Homo sapiens
aggaatcaatgttttttttcaaaaaaaggaatttggtcccaatccaggctaagtttcagcctattgttcaatttcttcaattcaaagccatctgcttcccrcggctctcagataacgtctcccctgccaggacaccctgttcctgcttaattgaaattagtttccaagaatagttgtccaaagcagtttccaatggtggga

SEQ ID NO: 183362 - DNA, 201 bp, Homo sapiens
tatgttgctacattgctttcgttataatgttctgtcaagtggatggacgtaatttaattatacattcccctgtggttggatatatttggtgcttccgtgtytttacaaaataacgcttcaataaacatgttacaaaataaagtttaattcattggtttggattatagctttaggaataaattcagaatttggaaaaactga

SEQ ID NO: 183363 - DNA, 201 bp, Homo sapiens
cccccgacacacacaccccaattacaaatacattactttttctttagaaattgatattgaattttgtcaaatacattttggagtctttgggattaacttcragctatggctaaaggtaattactttggtcgaatgttaattacaataatcctggtggaatttctggaatagattcttatttgtaatagtatattattcttt

SEQ ID NO: 183364 - DNA, 201 bp, Homo sapiens
tctgaaataatcagtcctcctctgggtaggacccctagtactatttctgcactattagttataatgatgctatttttactactgctactctattggtgctsctgctgtattcagaatactatcatccaggttcttcctatagtgttatttttgtgaatcacagcactaatgctaccacttcactctggcttcatctttctc

SEQ ID NO: 183365 - DNA, 201 bp, Homo sapiens
tggggctaagggaagtgaggagtgcatggagggaaggcccaggttgttccacatctgaggcaggacagtgagtgtgggctaaacctgatctctgcatagcstaccagtcagtgcctaatgcatctcggtgccagaaagctggccattttaggagacagtgctccagcacatggagaaggtggcagcgtgatttagatcagg

SEQ ID NO: 183366 - DNA, 201 bp, Homo sapiens
ctttgcacttgcattctctaacctcactgtcttctctgttggcaggtccgatgcaggagactgtaaaggacttttggagaatgatctggcaggagaactcygccagcatcgtcatggtcacaaacctggtggaagtgggcagggtaagcctctcctgcactcgcctgggcagaggatgctggagatgcactctcgaacatc

SEQ ID NO: 183367 - DNA, 201 bp, Homo sapiens
gtcctcccatttatactagaagccctcttggtgagactgcttcaaggttatcagccaggttggtccattcaaatagttgtttttttttttgtctatccctscttagcagtgtccttctgccagcatggcaagaataaaaacccatgagcccatggtactcacagtcacataagccatggatcacagcatccagtccaggca

SEQ ID NO: 183368 - DNA, 201 bp, Homo sapiens
aagccttggccctacacatgatatagtggtattttcccccattcttaggggacaaaatataatatgcttgcattattcctgtattttcctattatagctgyaatggtaaccaactctaatgggttcttaccacttatcaaacactgcagaatcagtggcctgagactagtcttctctctctactctctgaattcaactagt

SEQ ID NO: 183369 - DNA, 201 bp, Homo sapiens
gaatctgtcagtatcatgtcagtgattatgaaatcagttaacttgaattctctcccagctgagtcttcagatgagatcattaccacagcggtcagcttgastgcaacctcacaaaagaccttgagccagagatacacatctaggctgcaaccagatttctatctgcagaaactgagatcgtatatgtttgttattttaagc

SEQ ID NO: 183370 - DNA, 201 bp, Homo sapiens
attaagagtggggatttgagaggctctgctaaacgacttgcataactagctctggggctcagtggggcatctttattgggggtgtagactgtgggcctctscctcgtgagctgtaggtctgctttgggaagaaaatgtctgtattgaaaggactgggtttatacctggagcccatgactggtcaagcctaagcacctccca

SEQ ID NO: 183371 - DNA, 201 bp, Homo sapiens
gatgctaaatgggctctgacagcagggtaagccttggccctacacatgatatagtggtattttcccccattcttaggggacaaaatataatatgcttgcaktattcctgtattttcctattatagctgtaatggtaaccaactctaatgggttcttaccacttatcaaacactgcagaatcagtggcctgagactagtctt

SEQ ID NO: 183372 - DNA, 201 bp, Homo sapiens
acttgcataactagctctggggctcagtggggcatctttattgggggtgtagactgtgggcctctccctcgtgagctgtaggtctgctttgggaagaaaaygtctgtattgaaaggactgggtttatacctggagcccatgactggtcaagcctaagcacctcccagggtcgtgggagagatgttgggggaatggtttcag

SEQ ID NO: 183373 - DNA, 201 bp, Homo sapiens
tactcgggaggctggggcaggagaatcgcttgaacctgggaggtggaagttgccgtgagctgagatcatgccagtgtactccagccggggcagcagagtgrgactccatctccaaaaaaataaaataaaattgactttgtgcaaggcgcctagagagtgttttcagacttgatgatacctgttatcagcagttggctcctc

SEQ ID NO: 183374 - DNA, 201 bp, Homo sapiens
agagacaattcttttcattattgctgcagtctcccagaatctagtaaccaggtcttagtgtagaaagaagaaactcagcgctagtgttccattgcatgagdggtccttgtgatgtaaccatttctgcatcttgactgtgatggtggtcacacaggtctacacatgggataaaattgcataaattaaacatacacacaagcg

SEQ ID NO: 183375 - DNA, 201 bp, Homo sapiens
ttggctcctccttctcccattcttccatccatatctgatgatccaacaaggtcatccttgtttcacatgtgtcaaacccggctcattagacagtcgtggtmtcacggtgcccttccccgtactattcactgggacttttaaacctcagataccttttattacctttaccaagcggatttttaaactaacatctttttgaac

SEQ ID NO: 183376 - DNA, 201 bp, Homo sapiens
gcaacctcagcccagctcccctcatggatgcaagattgtttcagcagttccaggcatcacacacagacatggtactgtctggtggcagagacgggccactggattgtccttcttagagataagagaacctttcctagaagccttctaatggaacttccctcccatatcatataaaagatttttatttaacttgcaaaaggt

SEQ ID NO: 183377 - DNA, 201 bp, Homo sapiens
aatgatgaggaaaggtggcaggttgcagtgtgtacattaagggtgtggtcagatgctgagagatgacatctgtggctgcagaccttaaacaaagtcagcakatctgcaagactgacagtgtaccataagccaataatcccttcgatgtcaatttcagggataaagcacataggatgggacaattcctgggtacagtttggc

SEQ ID NO: 183378 - DNA, 201 bp, Homo sapiens
agaaataaagtttgaccctgaaaatctgcaaccagcaaaattgccattcacatataagtacaggagatggacaatataaacacacaatttcaggaatatgrtccccattaatgtttattgttaaattattagaagataaactctagccaacaacagatagattccgtgttctctgcctagtctttttgctgtagcttctac

SEQ ID NO: 183379 - DNA, 201 bp, Homo sapiens
ctgaaggaagggacaatattcaaagtgagatgaccaagtactttctagaactgatgacagacaccaattctcagtttcaaaaagccagtttatcctaagcrggataaataagaaagaatcaaaagacacttagatttattacaggaaatttcatagcaacagaaaggtcttcaaagaggctgaaaatgtatacagatcact

SEQ ID NO: 183380 - DNA, 201 bp, Homo sapiens
tgaattctgtgttcattcaaggcaaaactaaatcacttgtcaaggaaagacgatcaaattattatgagactgacagctacaagatctgcatggtgtcaggwctactcagggagaaggagaggaaagtaataaggcatcgtatgggcttcagagtcacacataactaacaggtacttcctggaaagctcaaacatcaaattt

SEQ ID NO: 183381 - DNA, 201 bp, Homo sapiens
aagcaaaggcacaaatatcaaaaagtaaaatttaagaaaaagttcttgttgtactatttctttttctgaaataacttcaataattacttattgaaagggcrgtcatacctacttgagaacaccaacctggattgccaacactgagccatgttttagtaaaatttttggacctcaaaagaaaataattctttcatgcttcca

SEQ ID NO: 183382 - DNA, 201 bp, Homo sapiens
aaggaggctaggatttggcctcttctcttttaaaatgaaatgtgcttgcaccagcttttcattattaatcagagtagcatgcctgttgctttatatgtctrtccaggggcagatgtgactcactttcaacccagtaaatggaaactgtgcctttttgatggaatgcggcctggtggtacggagcaggcagttattggcaga

SEQ ID NO: 183383 - DNA, 201 bp, Homo sapiens
ttttttcccccctaacccatatgatccttctcctttttcatgctttcctaaacctggtagaaaaggaggctaggatttggcctcttctcttttaaaatgaratgtgcttgcaccagcttttcattattaatcagagtagcatgcctgttgctttatatgtctatccaggggcagatgtgactcactttcaacccagtaaat

SEQ ID NO: 183384 - DNA, 201 bp, Homo sapiens
gcccagagatgctgttaaacaccctacgatacacagcatggccccctgacaacaaagaatgacccagctccaaaggccagtcgtactggcccagatcctgycccatgggaaggcttttgtacttagtgccctactattcatctaggacgccaggtgcagaaactggatgggaagatacttcctctgtgggcctctggccaa

SEQ ID NO: 183385 - DNA, 201 bp, Homo sapiens
gcattagtgtggtacattcattacaattagctaatattgatttattattattagctaaagtccatagtttattcaggtttgctttttatgttgtacagttmtataggatttgacaaatgtacaatgacatatatctactattgcactattgtatagaatagtttcacggccttaaacatcctctatgcttcacctattcat

SEQ ID NO: 183386 - DNA, 201 bp, Homo sapiens
tgcctttgtggtggacctacagctgaattccaccctttagtgaacacacacaatagttctttgcctctgcagatagatggatctgtatttggtacagaggkcaagtggagagcaccaagtttctaagtatctctgctattagctcactgcctgcctcacattcagccccaaaaccatcatttattaagcacctgctgtgta

SEQ ID NO: 183387 - DNA, 201 bp, Homo sapiens
gagtaccaaattagctgtttttcaagcttgcaaaatgtagatagagcataatgaacattctaggctgcttgtaaattacctcgtataaacgccttcacatygcctgccgccccatctttctccatgtgcatgtgggtaaacacaattttttatccttctaattatataaagttagaagaagaaggggacacagaataatat

SEQ ID NO: 183388 - DNA, 201 bp, Homo sapiens
tgaggaattgcagctagcaaaccatgttgaggcattaaggtcctttctcgtgttacattttctttgtcttttaaacaaccacgagggaagatattactcayagggagatgcccttaaaagaccccaagggcctctgaggattaactgggcttagccagcctctccacagcatgcaggcaggcactcagcaaacattacctg

SEQ ID NO: 183389 - DNA, 201 bp, Homo sapiens
tttgaagatttaaataaaatttgctctgttccctactccccatcctatgggaaaacccaatgtccatccccaacatttctgagaattctgagggggttgtmttctcatgtttacttccaagtttcagctgaggctttagtcggagagatatgagcttcatatcccagcaatgcccatgacttcaagttgaacatcacacat

SEQ ID NO: 183390 - DNA, 201 bp, Homo sapiens
tagatacagatccctatgctaagtagacattaaaattcacagccactcataacaaactggagaagctaagagatgtagccaagccattcaaactagaaagygatagagccacgatttgaatccagggagcttcaagaagaaaccccaatgcattttcgcaccttttgctacacaacataagcaaaccaaaatggtagcatc

SEQ ID NO: 183391 - DNA, 201 bp, Homo sapiens
gtttccctttggcccctgtgcaaatttcacagagcaggattctatgaaaggctggtaggttaagttaaatatgacagtgttcaccccagcacctaggacartgcctggtacaagtcatggcttcatgctagctgaatcagaatctgagttcagcagggttttttttttttgtttgtttgtttgtttgttgctattgttttg

SEQ ID NO: 183392 - DNA, 201 bp, Homo sapiens
aaatgcattgggctacttgcaatgttaataactcatgctgttctaaccttatgttcctgataaaggaattctctgccgtttaaggctctgggatgaataayagctgagtgtttctattgtcctcttaaaatggagattactatatgttgaatcacaacagaactacttttttatagactgtgaatagcatacaggtccatc

SEQ ID NO: 183393 - DNA, 201 bp, Homo sapiens
acttctcccaaagtgctacttgaggtctagccttttacttttaaaaatcgttaaattttttcaatagtttgagcacctcaataaatgcattgggctacttkcaatgttaataactcatgctgttctaaccttatgttcctgataaaggaattctctgccgtttaaggctctgggatgaataatagctgagtgtttctattg

SEQ ID NO: 183394 - DNA, 201 bp, Homo sapiens
gcttctacagtgatctcaaccttcctcttttatcttctgggtcattcagctcatcggagcaacccacagatctctgtattttgacatgcagtatcccatayctaggatgctactcatcttcacagctaccccaagctggctgatccagaatttccacacgggcagtcctttgagtattatcctaaagagaaattttcataa

SEQ ID NO: 183395 - DNA, 201 bp, Homo sapiens; identical to SEQ ID NO: 32301

SEQ ID NO: 183396 - DNA, 201 bp, Homo sapiens
ctactcactaaatgcccatagcaacccgcaggtgtgacaatcaaaatgtcttcagacattgcccagatgccctctgggaaacaaaacagtctcagactgaraaccactgtcttaaacagaaggtcaatcactgccttttgctctcagctgtaggttctaatttccaattccagataaatagaaagaatcataggcaagatc

SEQ ID NO: 183397 - DNA, 201 bp, Homo sapiens
tgagaaccactgtcttaaacagaaggtcaatcactgccttttgctctcagctgtaggttctaatttccaattccagataaatagaaagaatcataggcaaratctgtcagcaccatgtgacattaacttttggtgcaaagtaagcataattatccccactttacctatgagaaaactgaggcctgggctgcacagctagtg

SEQ ID NO: 183398 - DNA, 201 bp, Homo sapiens
ccgaaacaggagggggctcccaataaatagcctgcctagcttcttagtggttctgcccaacaaagtctaaacgaaggactgagacagacggggatgatgamcaacctggaactttatcagtctgtgcccttgaaatgtgttgtggtcattggtttgcttgtgggtttgatacttagatctaccaacacagccaggccaggg

SEQ ID NO: 183399 - DNA, 201 bp, Homo sapiens
tctgcttccgaaacaggagggggctcccaataaatagcctgcctagcttcttagtggttctgcccaacaaagtctaaacgaaggactgagacagacggggwtgatgaacaacctggaactttatcagtctgtgcccttgaaatgtgttgtggtcattggtttgcttgtgggtttgatacttagatctaccaacacagccag

SEQ ID NO: 183400 - DNA, 201 bp, Homo sapiens
gcagtccaagactagccccaattcttcccagggtaaaactcaaaggaaaaaaaaatagtagagaagccaggtcacagccatgcaggcaaatagaccagaaktatacatgtgactccaatcttcgagtacctgaggccacctgaggctctcctcccctgcagacaggcatcaggcactatttccagcctctctgcttccgaa

SEQ ID NO: 183401 - DNA, 201 bp, Homo sapiens
agaagtaatcatttctcaaacatctcaggatattattttgattttggagaagggggaagcttttctgactcctgtattatctctgtttcttctagagtcattttttttaattcactgctctctttcatgttggaagcattgcttacctaaccagtgaacctccatagccaatatttaaaagtaaggtgttgagaaagttga

SEQ ID NO: 183402 - DNA, 201 bp, Homo sapiens
ggcatgcctgagtttctgtatctggcattcatcatttgactagaatcccccaacaaaagtcattttcctagataggcactcactccaaagttgaatgagcrtctgactacagtcagggccaagatacactttggtattttataggcaacaaacgaaattgctttaaatgcaagttaatctctacaactgctaattatgcct

SEQ ID NO: 183403 - DNA, 201 bp, Homo sapiens
gaacaggattaagagaaaccagtagggtagggtgcagtatcactaggctaacaatagtagggagtccttaccagccctagacccagataagggaagagagkagctatgagagagggctgcccttcaagaactgaagcccttgattgagtgacaaggtcaagcaaggcatggagacctggcagggaggaacctagaagaaca

SEQ ID NO: 183404 - DNA, 201 bp, Homo sapiens
ccagcaaagataaaattcctggggtctctatagggattcctggcaaaacagtactccagacagctaactaggtcctcactccatcaccctggtctccaacrcagccacaatccttcctggctctctaaagagctaactgcccatgctagaatcatttctctacaattggatcttgacgattcattaaaataactccattgg

SEQ ID NO: 183405 - DNA, 201 bp, Homo sapiens
aagccctgttcacttctcctccacttctgctttctcctccagaatataatgggctcatttctctggacagaccagtgtttcctagttggagcctccattgyacaccccacatctctctcaatgtcaccttgatgggacttacagctcagagcgtatgctcagtgaatccttgtcaacagcaaatgaatataacttattgtc

SEQ ID NO: 183406 - DNA, 201 bp, Homo sapiens
atattttttacactacttctgatctgatcatgaatgaacactatgaaggttttcctggaatgaggaagagcttgtgatgatttgcgtggtgaaaagaaaamtagatggtacttgccctttctttagcatgttctatctaatcctgacagcggggcttagaggtagatattattctccccattttacagatgaggaaactca

SEQ ID NO: 183407 - DNA, 201 bp, Homo sapiens
cctcatttcaacctaagcagttctgaatagtttgtgcctttgacacacttctcccaaagtgctacttgaggtctagccttttacttttaaaaatcgttaawttttttcaatagtttgagcacctcaataaatgcattgggctacttgcaatgttaataactcatgctgttctaaccttatgttcctgataaaggaattctc

SEQ ID NO: 183408 - DNA, 201 bp, Homo sapiens
gttttcttttatgtattatctacattctctaccgtaagtattgcattgagaataattaaataatgattgccttcttaaaactgtgccatttttatatatgwcagctgtatattttaacaattcacagaatcagatgttatagtggtccttgtaatacccacatgctcatgcatgaacatatacaagcacacgcatgtgtat

SEQ ID NO: 183409 - DNA, 201 bp, Homo sapiens
ataggtcaccatgaccatagacctttcactatttgctaaacacttcatatgcattgtcttatttacttctcacaatagcctttaacaatactctttagctrtaacattcccacattggagctgaaaaaaatgaggctcagaggggagaaataacttgcccaaggaccacggctatagagctaacttcttgccttcctgcca

SEQ ID NO: 183410 - DNA, 201 bp, Homo sapiens
aattctacttcaaggttttcacactatttttgcaacaactgctttctgtttatttgcatttctttattatgtctttcttcaacttgttctttttaatgttrtgcagtcattctgttttaggtgtttatcttatagcatacaattcagagatgtatgacatgggaagatttgagaaatgctaataaggtagaataaaaagga

SEQ ID NO: 183411 - DNA, 201 bp, Homo sapiens
ctgaattttctgtttcaagatttaaaaaaataaaagaacttctgttaattttgcagccatctgcttgccctagtctccatcacctgcctaggaaaaattayctttatttggtagttattatcgctatataggcccctgaaattaaggactcacccagctttggttcaactggactttaaactcagtccctttccctggaaa

SEQ ID NO: 183412 - DNA, 201 bp, Homo sapiens
atggttgaaggagataatgcatgtaaagtttctcttacctaccatgaatccaataaaggttaacttcaaactcctcccccatgtcacattccactctcccrctcacccaaagggattgcttagaccacccacctgctccctctagttgcttctgctgaaacttccccctgatgagtaagaaaagtcgcatttagtataact

SEQ ID NO: 183413 - DNA, 201 bp, Homo sapiens
aatatggatggaactagagacaataatcttaagtgaagtaactccaaaacagaaaatcaatacggcatgttctcacttataagtggtagctaaataatgcrtacacatggacgcagagtgtgaaatgatattcactggaggcttggaagagttggagggtgggatgggggtgagagatgagaaattacttaatggatacaa

SEQ ID NO: 183414 - DNA, 201 bp, Homo sapiens
aataacttctctgacatagagacattgctccacttaccttgtgttactgcacggccataaaactgggacgccttactcagaaacaccaggcaaagacaccygcacctttgttccacttccagtggctccttccccaggaggtgctacattttccgaaatcatgacttttgcggcaatatggatggaactagagacaataat

SEQ ID NO: 183415 - DNA, 201 bp, Homo sapiens
gtttatgataattcaataacttctctgacatagagacattgctccacttaccttgtgttactgcacggccataaaactgggacgccttactcagaaacacsaggcaaagacacccgcacctttgttccacttccagtggctccttccccaggaggtgctacattttccgaaatcatgacttttgcggcaatatggatggaa

SEQ ID NO: 183416 - DNA, 201 bp, Homo sapiens
ctcatctctaagcctcaatttctgcccctataattgctcctttttagctgcccccttgcgagtttatgataattcaataacttctctgacatagagacatygctccacttaccttgtgttactgcacggccataaaactgggacgccttactcagaaacaccaggcaaagacacccgcacctttgttccacttccagtggc

SEQ ID NO: 183417 - DNA, 201 bp, Homo sapiens
tgctactcctcagtggcagaggcagtcacaaaccctttgtggggcttgtgagttgctacttacctgtccaaggaaaccttttggaaccctgtggcatgtargccagtggacagatatgggcatggatgcaggctcggtctcatctctaagcctcaatttctgcccctataattgctcctttttagctgcccccttgcgagt

SEQ ID NO: 183418 - DNA, 201 bp, Homo sapiens
tgttgaaggctcagttgcagattgggattcttgggactttactgagaagtggcaagagtgcagttagggcccccttggttttctgcgggtctcttcaggcmcatcacacagcctggattttaagagcactgcatcatgaagagcacttcactccttcaatctgtggatcttgtgtttgctagaaggctttctttcctgatg

SEQ ID NO: 183419 - DNA, 201 bp, Homo sapiens
gttacagggttgtgcatgaagctacatggaacagggcaatctctacctcctcagcgagcctgccctgctaccgaagctaggatggaaagaagtgggatcawgaactggtggaaggaaaaccttcccaactctctctacagtggattgtaaggagccaagggtacatgagcccgtggcgtgaattggcaggaggacaggagc

SEQ ID NO: 183420 - DNA, 201 bp, Homo sapiens
acactgctgataaggacatacaagagactgggtaatttataaagcaaagatgtttagttgactcaccgttcagcatggctggggatgcctcaggaaacttmtaataatggcggaaggggaagcaaacatgtcctttttcaaatggtgacattaaggagaagtgccaagaaaaagggggccatctcctttaaaaccatcaga

SEQ ID NO: 183421 - DNA, 201 bp, Homo sapiens
gcccattttagccatgactggagtggctgggattcaggacacgaagttcctaggctgcccacagcaggggtccctgggcctggcccacaaagccatttttyttcctagtcctctgggggaggggctactgtgaaggtctttcacgtgccctggagacattttcccccttgtcttggtgattaacattcggctcctcattac

SEQ ID NO: 183422 - DNA, 201 bp, Homo sapiens
aaaggatccatgggggttcagtgtgtcaagggagctttgtcagatgcagtacagagaatgcattcaggactggaaacattcaaatgacttttcaccccagycttttaaagcctctgcagcaaggttgtggtttgccttccttgcaaccttgggctctctgcttcctctttattatccgtgttgatccctggagatgttaat

SEQ ID NO: 183423 - DNA, 201 bp, Homo sapiens
ccctgcagagccaagacagaaatgcaagcagcagagaataaaagcacttttcttgtgcatgctgagtctttcaacaaccctggcctctgtgactgtgtctkcctgtaactgtcaaggtgatgattgaaatgaatctgctggtcaattccagtttagtccaatccctgatttgaaaaggccccctctactgcagctgattga

SEQ ID NO: 183424 - DNA, 201 bp, Homo sapiens
agaggccccaaaatgctccttcatgtcttctgccatgtgaggacccaggaaatgggccctcactagacacttaatctgctggcaccttgatattggacttkccagccctcagaactataaaaagtaaatttctgttgtttataagttacccagtctatggtattctgttactgcaacctagatggattaagacaaatattc

SEQ ID NO: 183425 - DNA, 201 bp, Homo sapiens
tgtgcctggccatattatcccttttttaaggatgagggtgaagcttggagaaggaagtcacttgtccatggtcacagagctaatgagtggcacacccaaaytttgaacctagatgaagcttccagtgtctctgctcagcaatacaacctgccttgaatatcattagtaatgttctagaaaaggcaactgctcaaggcacag

SEQ ID NO: 183426 - DNA, 201 bp, Homo sapiens
ttagtcacattcgggggcctagggcaactcttcatgtgggcagcttctcacttaatgatagaacctgctgtttctcttctgaaccttagcagctgccttcygattatctgtgtagtgattcaacacattccttgagagcatcaggctgctgaggccaactgtgttcctgtgatggcttctctctctgccgggcttggtttg

SEQ ID NO: 183427 - DNA, 201 bp, Homo sapiens
cagacaacctcaggggagccgtttccccagaggatcaggggaaagtgttttcacctaaagtctaaggaaagacccacttcagggccatttctaagctgctrtctccaaagtgtccttggttgccatcttgagtagggacgagaaatttccagcaaagcttacctcagagaagaaactcctgactttgttattacttaatga

SEQ ID NO: 183428 - DNA, 201 bp, Homo sapiens
ttctggagggtgtggtcagacctatataaggtgggctacatgtggaaggggctagagatggccgctggatcccaccccccacccccaagaccttacactascattgctggatgcttctgtgcctttgcctgggctattctatttcaaatgcctcccaagttaccaccaaggcttgctgctcttaatgatatccttaggtag

SEQ ID NO: 183429 - DNA, 201 bp, Homo sapiens
tccaagtagttgacagatttcctccacaccgtttattgaatactccttccagtcttactgaacggtgatgttgcctgtgtgtgtgtgtgtgtgtgtgtgtrtgtgtgtgtgtgtgtgtgtgtgtgtgccactatattcttggtttatactgttccattagatctgcctctctgttggtcactgtgtctgtatcacccattt

SEQ ID NO: 183430 - DNA, 201 bp, Homo sapiens
attatgccaacctgttgatcaaagcgggccccacagagctgatgatatacaagggttttcactcctgagcaatctctagtggcgcgcttgagctcaactcrcagataggctcccttcctttctggagggtgtggtcagacctatataaggtgggctacatgtggaaggggctagagatggccgctggatcccaccccccac

SEQ ID NO: 183431 - DNA, 201 bp, Homo sapiens
agaagtaatagcatcagattcaaattattgactgaaaaggaatacattttaccctcaacttcttgaccatagtcatgaaaaaaaaaaaagtccacaaacgrtgagtactatattcagtgcatttggtgaaagccttcaatcaactccaaataagacaaaagtcctgtcctggcttccttcgagtttctcttccccttgagt

SEQ ID NO: 183432 - DNA, 201 bp, Homo sapiens
gctcatttttgatctccaggaaactgacagccctgggatgatattaattatgccaacctgttgatcaaagcgggccccacagagctgatgatatacaaggrttttcactcctgagcaatctctagtggcgcgcttgagctcaactcgcagataggctcccttcctttctggagggtgtggtcagacctatataaggtgggc

SEQ ID NO: 183433 - DNA, 201 bp, Homo sapiens
tttttactgccgacgtgaggaaatgcaatcctgaggtgctcatgtgtaaacacaatagccaccatctgctatggagaagcattttgcctccaaaaaggagwtctgtgttgcagacacatcaataacgaggcgcttatcaaggcattattatgcacgaaggggaaaaatgcaaaatttatggccagccagagagtacttcct

SEQ ID NO: 183434 - DNA, 201 bp, Homo sapiens
aacaatgtgcaaagccattaaaaactcaattaggactttctttttactgccgacgtgaggaaatgcaatcctgaggtgctcatgtgtaaacacaatagccrccatctgctatggagaagcattttgcctccaaaaaggagatctgtgttgcagacacatcaataacgaggcgcttatcaaggcattattatgcacgaaggg

SEQ ID NO: 183435 - DNA, 201 bp, Homo sapiens
agatacctctggcaacatgggggcattggcatccttccacaaagtggccccagcagagtatcaagacagacacaatttcatgagtccctgggggatgtggsagcagccaccaaaggatcagacatcactgggaggttatcactaaatggcattttactgatggtctgaaatgggttggcctgttgataagtggagggaggt

SEQ ID NO: 183436 - DNA, 201 bp, Homo sapiens
ttatagatgagggcattgaggcccagggaattttactgacttgctcaaagtcacacaactaagaaatgccagaagctggagtgaaacccagtttacttaaytgaagatccagaacttgtttcatgtcaccacagctgcttggcttttggcagcatttgaggccccaccagcatccattcccttcaagtaggtgctggcact

SEQ ID NO: 183437 - DNA, 201 bp, Homo sapiens
ggttaccattgtggccaactgtggttcatccccactggaggccctgctggacacacatataccttagaaagttagggtatttatccacccattcccagccracattggatgagggtcgctcatggagtgttaacttcctaactcttccacacgacccagagttgagcacattccctcagggagagccccttcccctccatt

SEQ ID NO: 183438 - DNA, 201 bp, Homo sapiens
tatcccattttatagatgagggcattgaggcccagggaattttactgacttgctcaaagtcacacaactaagaaatgccagaagctggagtgaaacccagyttacttaattgaagatccagaacttgtttcatgtcaccacagctgcttggcttttggcagcatttgaggccccaccagcatccattcccttcaagtaggt

SEQ ID NO: 183439 - DNA, 201 bp, Homo sapiens
tagtggtgcagccaaggctgactgcaacctctgcctcctgtgttcaagcaatcctcccacctcagcctcctgagtagctgggactacatacacatggctamatttttaatatttttgtagagacacagttttttattgcccaggctgatctcaaactcctcggctcaaacaatcctcccacctctgtctcccgaagtactg

SEQ ID NO: 183440 - DNA, 201 bp, Homo sapiens
tcatgtatgtctactgggcacttgaaatgtggctagtatctctaagtaaatgatttttttctacttaattttaattattttaaataggcatatggcgttaytagctactggttaggaaagtgcattcctagaccctgtagtctctgctttctaagaaggaataattggtttgagtatttatcactttctggctatgtggct

SEQ ID NO: 183441 - DNA, 201 bp, Homo sapiens
tatttatttatttattttttcagagatggggggtctcgctatgttatccaggctgctctcaaattcttgggctcaggcgatcctcttgtctcagcctctcrtagtgttggcatttacaagcatgaaccttcatgcttggccaagttttttttttttttcttttaatttcagtgttttgaggtttcataatgactttaggtt

SEQ ID NO: 183442 - DNA, 201 bp, Homo sapiens
accagtcatgtatgtctactgggcacttgaaatgtggctagtatctctaagtaaatgatttttttctacttaattttaattattttaaataggcatatggygttattagctactggttaggaaagtgcattcctagaccctgtagtctctgctttctaagaaggaataattggtttgagtatttatcactttctggctatg

SEQ ID NO: 183443 - DNA, 201 bp, Homo sapiens
gctgtacagctcgggcaaggaacggcagagttgtctgcggtagaaactgaaatcggagtcggaaaatctgagtctaaatcttcattgtgttggttgacctyggccaagttacttgttccctactggagtttataaaatgagtaggttgggttagttaagttcctgtgactcacttggatgtaatttgttatgctttggtaa

SEQ ID NO: 183444 - DNA, 201 bp, Homo sapiens
tttgagtattctaccttagtctttttttttttgcatatctaaaagccaaaattaaggaaatggaaagatgttaatataatacacacacacacacacacacacaaaaagggtaattactgattttattaaaaacatttatcacagagccacataaccattgttatttcaggcctgggaatacaatgcatgctattaagccat

SEQ ID NO: 183445 - DNA, 201 bp, Homo sapiens
cctcgctttgtcatctagtgtggagtgcagagatgtgatcatagctcactgcatccttgagctcctgggctcaatcaatccatcctcctgcctcagccttytgagtagctgagactataggcacatgccccactttatttattttatttatttatttattttttcagagatggggggtctcgctatgttatccaggctgct

SEQ ID NO: 183446 - DNA, 201 bp, Homo sapiens
tcaaatactctgcttggttccgcattgccaagcttgtaaggagtcatgaggatcagcttctaatctgggagggctttgcaggaaatagaaatgtccaaggrttgccatttattcaacagctggaagtacacagaccaggtggtggcactgaagtctcagcagccatttatacctggtttcagggacttgtctcttgggagg

SEQ ID NO: 183447 - DNA, 201 bp, Homo sapiens
atggtggagggaaacaagaaagaaatgccctgagctttgtttttgttttaaatttaccttctacctcctgctgtagcctctcactggctgagccccactgrccaccagagggtaagagggctgagagatgcagtgaatagatttgggcctccaggtgcatgagggaggacagagactgaattaggggagcaaacagaataa

SEQ ID NO: 183448 - DNA, 201 bp, Homo sapiens
aagcccaacttctaccatctatcagagcaccctcctggagaaatatggaatgtgtgggctccaggtcagtcagaccagaataaggttctatgttctgccaytttctagaagaatgacgttgggtagtaagtcaggttttctctttgtcaacattaaggacacagacatggattcatgtgtttggtgtcatactttcatttt

SEQ ID NO: 183449 - DNA, 201 bp, Homo sapiens
tgttgttagtggggtcccagctccagaattacataactgatgtaacagggtgggcttgaggcaaaaagaccagagctgaatactagcacactcctttagtytcctcatctataaatgcatactagaatagtacttactttccggtgtgatatgaggaataaatgaatttgtatgtaaatcccgaaatagagccaggcacgc

SEQ ID NO: 183450 - DNA, 201 bp, Homo sapiens
gagcagtaactgagggtggtgttgagagttaaatgagagtagcacaatgcctgatatgcagtcattaataaacagtagttctaaaggaggacattagctgygtaaggcctcttatcaaccatccccttgatttctgctctctctgcagacgaccattcccgggtgaggctgctggtgctggatggagacccgcactctgac

SEQ ID NO: 183451 - DNA, 201 bp, Homo sapiens
aggcacaccatgcattgacctcgaagagcttgggctacctatgtgacccctttgtgaactttctcctcagctgggttttctagaaggttattttgtgctgaaaaaaaaaaaaaaagtcctgtgagtaatgaaattctacctgatccctgggacctgaccggctaccctggccttctgtcctctggctgctgttgcaaccca

SEQ ID NO: 183452 - DNA, 201 bp, Homo sapiens
accctgttagaaaggggttgaagattgccaggaggtgtactcacatattccttgtggtattattcacaatagcaaaatcatgaaaccaaccttagtgtccrttaacagaggactggataaagaaaatgtgttgcatatataccatggaactctattcggccataaaagaataaaagtatgtattttgcaacaacatggttg

SEQ ID NO: 183453 - DNA, 201 bp, Homo sapiens
attctacctgatccctgggacctgaccggctaccctggccttctgtcctctggctgctgttgcaacccattttccttgtcttcttggtggaattagaaacyggcccgctggcattttcctaccaattccctctattctcaggtctagagagaaaggaacaaaatgcagacaggattgaactaatatttgttaagactcaac

SEQ ID NO: 183454 - DNA, 201 bp, Homo sapiens
acagtaaacaaagtcttggccgggcacagtggctcatacctgtaatcctagcactttgggaagcggaggcgggctgatcacctgaggttaggagtttaagrccagcctggccaacaaggcaaaactccgtctatactaaaaatacaaaaattagccgggcatggtggctcctcgggaggatgaggcaagagaaccgcttga

SEQ ID NO: 183455 - DNA, 201 bp, Homo sapiens
atttactagaaaaattatcactctcgaaattctcaaatttcttattacagagttatacataatattttaaaatttaatatcttgtctatttatggttataycacctttctcttttttaatatgttatactctcttattttcatttgcttcaccaaatgtaccatgttttttcaaaggacgacctttgattttatttagata

SEQ ID NO: 183456 - DNA, 201 bp, Homo sapiens
atcaaggatcacacattgtatttggttggcaagggcatactaaaatttttcagtaaataaattaattctgaactattggaatataatgtggtttttcataygtagcgaggtcttaaatttgatgatttcatctcataattatggaatttctgaaacactaagtgataaaattttctttttcattaatttatgttgcgtgta

SEQ ID NO: 183457 - DNA, 201 bp, Homo sapiens
acttgcagctctagaaaccaggtgttggcctgcgtccaggtcttagagctcagagacttgaatttcaagacagacctggcctttcttttcatattcaaatrctctgcttggttccgcattgccaagcttgtaaggagtcatgaggatcagcttctaatctgggagggctttgcaggaaatagaaatgtccaagggttgcca

SEQ ID NO: 183458 - DNA, 201 bp, Homo sapiens
atggtggagatatgtttggaaaagctgtgttccctgttgtagcagaacatgtaccccagcttcccgatggtctcttcagaacccttgtttcttgcctgcaygttttgcagatccggtacatggcccacagaacgtggaaatcgtagacatcagagcccggcagctgaccctgcagtgggagcccttcggctacgcggtgac

SEQ ID NO: 183459 - DNA, 201 bp, Homo sapiens
tgtgttttgttgccatttctgacttgcagctctagaaaccaggtgttggcctgcgtccaggtcttagagctcagagacttgaatttcaagacagacctggyctttcttttcatattcaaatactctgcttggttccgcattgccaagcttgtaaggagtcatgaggatcagcttctaatctgggagggctttgcaggaaat

SEQ ID NO: 183460 - DNA, 201 bp, Homo sapiens
gaattggggaaatcagggaaaagtgtgtagtattttaccattgattatgatgttagagtaatgtgttagataccctttgtcagattataggactttccttytatttctagttttctaaaagttttatcatgaatggctgttgatttccatcaagtgcttcctcagcatctcttgagacaactatgtgatttttatctttca

SEQ ID NO: 183461 - DNA, 201 bp, Homo sapiens
aaggtgtaggagcctcaagtctcatcatcccaagcccaagcacaggttcctatataaagggggcaaggactccccagaggttcccctaggaaggatgagcrggggacacggctgggcgggcagccaatgatggccactacactagacattggtgaaaaaatgggaaagggagattgtcaccaatttgtattggaatttgga

SEQ ID NO: 183462 - DNA, 201 bp, Homo sapiens
ctttccggtgtgatatgaggaataaatgaatttgtatgtaaatcccgaaatagagccaggcacgcagtgaacattatgagaatgttatttgtccttgctgygtgacagtaataataacagctctcaccatcctgtgggtgtacagacgtggttgtctctggaactcttaagatccaaactggataaggcaagagtttcttt

SEQ ID NO: 183463 - DNA, 201 bp, Homo sapiens
gacctcctcatgcaacacccattgccaccaaggccttttcctgcccacattgccagagcacctggccaaggccttcctccctactcccagtacatccctcrtgcctgcttctccccagatctggaccctgctgtgttatgagcccagaggaccaatgtgcaaaccatggaatgctgcttcctgtgaagtgaagatgtgtat

SEQ ID NO: 183464 - DNA, 201 bp, Homo sapiens
aaatttggaactcagctccccttaatattctttatcctttctccagcatgcacatgcacatgcacactctctctctcaagttctttggggtataatagacytctgaggatttagggtactggaaggggtttatagcatagaaatacaaatgtcctcaatgggatctgatgaatttctgcccttacaagtgcccttgccatc

SEQ ID NO: 183465 - DNA, 201 bp, Homo sapiens
tcgcccactttttgatggggttgttagtttttttcttgtaaatttgtttgagttcattgtagattctggatattagccctttgtcagatgagtaggctgcmaaaattttctcccattttgtaggttgcctgttcactgtgatggtagtttcttttgctgtgcagaagctctttagtttaattagatcccatttgccaattt

SEQ ID NO: 183466 - DNA, 201 bp, Homo sapiens
taacgtcacctattagaaacgttagctgagagatgcctctacatactgtagtacaggaacacttagttgagtgatgaattttttgtgtggcaggggatagktatcagtgtattcagagatggctttacccattactgaaaaaattaaaattctgattagaggaaactgcatctgcaaagacacggaggtacgaaacaatat

SEQ ID NO: 183467 - DNA, 201 bp, Homo sapiens
aagtcaaaaatgaaagtcaaggaggaaaagtagctatcatttttgagattctgatatgaagaagtatcatttggtggcttatgtaaaagcctgtgctaggrttgtgtctcacaatgtcatggccaagtgtcagcccctattagaggggtcagtcaggaaacagaccatgtgcattttaacccctcatcttttctgagaggt

SEQ ID NO: 183468 - DNA, 201 bp, Homo sapiens
ggagttttctgattctaaagatctttctaagagaaggtcttcttgtaacaatgatttatgccaaaacttaagagatgtggaatggagctggaatttttttwaaaaattactgtgatgattagaatgaacgtggttcctgtcacatgctgagacctcagtttgggactgatgatgaagtggggagcagggcaaagctgggga

SEQ ID NO: 183469 - DNA, 201 bp, Homo sapiens
ctcccaggtcttaacccatatctagcagttattgacccgtatctagtacgtctaggtattgcctgtgcctatggcccttacctttaccaccccaactccargctaccacctttctcaccctctcttatccaaccatgaccataagactcttggttgactactagtccatgatgtcatcaaggaattgccctactgtcttca

SEQ ID NO: 183470 - DNA, 201 bp, Homo sapiens
caatgccatagtttccagtcagcattttgtgggagctgaacagtgatcagaagcaggtttgctgcgtctggtctcatagtaggcggagttagctgattctrtctacccacagtgctattgggattcaattgtctgaaaggcgctccttctccctgagcacatctgcactcatctctgtggcttttcttctatgactcacct

SEQ ID NO: 183471 - DNA, 201 bp, Homo sapiens
ccaggtggcttggatttttccagttcgttggtgacctgctgtgatcctgtctctgtccatctgaattctggacagtgtgttccagcctgtgattccacctstagcctcagagcttcgtctggccaaccctgagtttgaggttcattctcttctccccaggggcctccaccccaggccttgcctttgggaccagccctccac

SEQ ID NO: 183472 - DNA, 201 bp, Homo sapiens
aatatttgcaacatacaaagccagcaacaaataagtatctagagtaaatcatgaatctcagtgaatcaattttaaaaaggcatttgaaaagaaaagaaaarcgtgaacaaagaaaatgcattttataaagttggatgatcacaaagaactgagaaattgtattaaaatcttagaaacagatattaaaagtactaggtgata

SEQ ID NO: 183473 - DNA, 201 bp, Homo sapiens
cctattattcaagaagaatataggctacaaacttttgttcctaggtagggaagggctgtaggactgcaccatcctgcaaatttgctgggactgctgtggtyatacaagccaattcttcctggggcattttcaaggggggttaggtattggaaacacaacggggccctgaacttatgcacatgatggtgcttttggactcag

SEQ ID NO: 183474 - DNA, 201 bp, Homo sapiens
cagcagcccctgggctgcatgcagcccaggatggctttgaatgtggcccaatacaaattcataaactttcttacaacgttatgagattttttttttgtaattttttttttttagctcatgaactatcgttcgtgttagtgtattttatgtgtggcctacaataataattcttcttccaatgtggcccagggaagccaaaag

SEQ ID NO: 183475 - DNA, 201 bp, Homo sapiens
acaacagtggacatcgagcaaggcactggtctgactgctccgaggatcctgagtacattcacacactcaggcaagggaggggtgggctgcttgcttaccartgtctagacactttggtcttaggcagcccccttctcccacaggggcatcttcatccttaccttcatagtaacaagggatgagagctgaatctgatggtcc

SEQ ID NO: 183476 - DNA, 201 bp, Homo sapiens
gatgtaataataatggagctgggttctaacagagtgtgttgtggcccccagggctgatgctctgcccactgtaccaccctatcttggagaatgaacctctrtgggttttggctaccctaggggcatgtgaggagggagtttcaaaattgtcctcttgggaaaaagaaaccactggacagtgcctgcatctgatctgtttcc

SEQ ID NO: 183477 - DNA, 201 bp, Homo sapiens
tggcacatagttagcactcaactaaaggaagctgttgtcattatgatgattgtctagtcgcatgtttgggtgctttcaacattgctatccttccctttccyttcctaggtgcctccacccagaattctaacactgtggagccagagaagcaggtggacaacaccgtgaagatggctggcgtgatcgctggcctcctcatgt

SEQ ID NO: 183478 - DNA, 201 bp, Homo sapiens
attcaataagcatagccctataggtcctctcaggtatattatcccaattcatatcttgggccttctaacctgcccatggatatataaagtgagtgggaaayaaatattggtggttttcaagccactaagatttggggcgtgtttttactcctgcataatgaggtctcacaacttatgtggacctgggagctgagatttgaa

SEQ ID NO: 183479 - DNA, 201 bp, Homo sapiens
aaagaaagggaagagcaagttcagtagaaacttgaaagtgccttttttatagggggtcattgggatttgaattccatgaaatagtatatcgtaggtatgcyctgcccagctcccagaatatcggacctatcgaatggaggctatttgcatgcataaatttcacagatgtgtatgcataacttatttctactgacctgcaga

SEQ ID NO: 183480 - DNA, 201 bp, Homo sapiens
tcaatggtggtgaggctgagaaatcctggtttagtaggcacaagagggatggtgtgaattaatgatatgtctgagttagaggtgcatgcagtatctcccaygcactacaccaggttctttgaataatgacccccgtgcccaagattcttttctctttccctggggtctcatctgggtacagtttggcctctgcgatgctga

SEQ ID NO: 183481 - DNA, 201 bp, Homo sapiens
atagatttgagaaaatcattccaaacggtagaatcagtaagtttactggctctgaaggggcagagttcttggcctgttttaagaaaagcagggagactggyatgagcagaaggcataagaagaatgcttggagataccagatacatctctgtaattgacagacaaagtagacaaataactagtaaataaagaaaagattta

SEQ ID NO: 183482 - DNA, 201 bp, Homo sapiens
agcaagtccatttgtgaagtacagcaagatctttccttgcagacctgagatctaacatttataaacattcatttctgtttgtcagggttcccacgtcatayaccaacccacagtaccactgacgtcagctttgattctggtgatccactcatttctcccagtttgaggctgaatttctgccagaggaggtcagctgcagga

SEQ ID NO: 183483 - DNA, 201 bp, Homo sapiens
aatatttaatgatttaagcaatcatattacggtaaaaaagaacaatagattaaacctaagggtaatggaaagaggatataactaatattagagaatacatyaatgaaataagaaaagctaaaacagagtgtatcaacaaagccaaaactctttgaaaaggcataaaaaaacacaccaaactccttttttctctccagaaaa

SEQ ID NO: 183484 - DNA, 201 bp, Homo sapiens
agcaagatctttccttgcagacctgagatctaacatttataaacattcatttctgtttgtcagggttcccacgtcatacaccaacccacagtaccactgaygtcagctttgattctggtgatccactcatttctcccagtttgaggctgaatttctgccagaggaggtcagctgcaggaggagacagaaagctggattttt

SEQ ID NO: 183485 - DNA, 201 bp, Homo sapiens
aataaatgtgggatattcatgtaatgcgcttttatacagcaatgggaatggatgaagtaatgttacttaaaacactgtggtggactctcccaaacctaagrttgaacaaatgacacaaaagagcagatgcttatgatttattctagataaaagttcaaaaataggcaaatacaaacaatgaagttatcaattaggatactg

SEQ ID NO: 183486 - DNA, 201 bp, Homo sapiens
gatgagtgctgggaattatctgatatgtttataaagtggttctgtctgggaatgaggtttatgagatggtaggagtcaggaagtgaactgaataacatatrtacctagcctgagaaaaaaattaaaaaatggaattaaaaggtcatccgatggggaaaaaaatggaaagggcaaatttaaaattataattaaaaatacata

SEQ ID NO: 183487 - DNA, 201 bp, Homo sapiens
tcatgcagcccagaaatatcaaaaatcaaaaaatttttaagtatgtcatgaaagatgtagatagtagtctattttatcatttgctaccataaaatattctraaatctgttattaaaaagttaaaattggccaggcatggtggctcacgcctgtaatcccagcattttgggaggccgaggcagctggatcgcaaggtcagga

SEQ ID NO: 183488 - DNA, 201 bp, Homo sapiens
ttgggaaagagaggttcgaaaatttaactgaaacaaaatccagtcacttcaaatctacatgttctttgtaaagcagaaaccacaatctctctctctctctcacacacacacacacacacacacacacacacacacacacacatttacatgaaataaagatgtgttgtgcctggcaaacttttctttgtaaagcagaaggaa

SEQ ID NO: 183489 - DNA, 201 bp, Homo sapiens
tgggaaagagaggttcgaaaatttaactgaaacaaaatccagtcacttcaaatctacatgttctttgtaaagcagaaaccacaatctctctctctctctcacacacacacacacacacacacacacacacacacacacacatttacatgaaataaagatgtgttgtgcctggcaaacttttctttgtaaagcagaaggaaa

SEQ ID NO: 183490 - DNA, 201 bp, Homo sapiens
cacagccaaaccatatcacatcccaaccttattggcccagttcttgggactctttcccattcgtatccataccagaggttggccaggtcttaaagtatagkctttatccatgagagggtctgtagcagctactcgatgccaccattgtagcaggaaaacagccagggacaatggataaacaaatgggtgcggcagtgttcc

SEQ ID NO: 183491 - DNA, 201 bp, Homo sapiens
tttgggaaagagaggttcgaaaatttaactgaaacaaaatccagtcacttcaaatctacatgttctttgtaaagcagaaaccacaatctctctctctctcwcacacacacacacacacacacacacacacacacacacacacatttacatgaaataaagatgtgttgtgcctggcaaacttttctttgtaaagcagaagga

SEQ ID NO: 183492 - DNA, 201 bp, Homo sapiens
tcacccaaatgccagtgagtgaagagcagccatcctgatccgggagccacacctggcaggagtcacacctggcacctggagtcacacctggcgggacaggrctgtgtgtcccttgcgtttgtttccggcagccctttctcctgtcctcagtctggctcactttccctgccaagcctcagagcaggtttggaggccttggag

SEQ ID NO: 183493 - DNA, 201 bp, Homo sapiens
ggctcatgcctgtaatcccagcactttgggaggctgaggcgggaggatcacgaggtcaggagatcgagaacatcctggctaacacggtgaaacccgtctcaaaaaaaaaaaaaaattagctgggtgtggttgtgggtgcctgtagtcccagctactcgggaggctgaggcaggagaatggcgtgaacccaggaggcagagc

SEQ ID NO: 183494 - DNA, 201 bp, Homo sapiens
gtgccccacagaccctcaacattgtgacaccccgtgtgcggcccgaggactgcagcattgggctcctgccccggaaccatgataagaatcgaagtatggaygtgctgcctctggaccgctgcctgcccttccttatctcagtggacggagaatccagcaattacatcaacgcagcactgatggatgtaagccgagcccggg

SEQ ID NO: 183495 - DNA, 201 bp, Homo sapiens
aagcttggtaggcatttctggggctgctgacacagcagggctcttcaaggtccagcagtcctgagtagtgtctgtagattaatgtgattccttggaagatyaagaatgtcctgggatgggggagttgtcagctatgagcagcctcagctttgaaaaaccctggatctgaatatgaaaagccaaattctccagctgaaaaaa

SEQ ID NO: 183496 - DNA, 201 bp, Homo sapiens
attgcctatacagaattgttaactatcctggttttcaaactgtgttgagacagtgtaagacaccactcttaactcacaagagcaccggtagtaccagtatygtggaaaacacagcatcatctgtcagacacgctacaaatgactacttgaaggggcccagagtttcaacatgagattgggctacattccttctgatgtcat

SEQ ID NO: 183497 - DNA, 201 bp, Homo sapiens
tagttaagaaagaaaaaaatagctttattttgatttgtgtgtactgttttctcaaaccacttcttatttgttaggacgcaaatacttattaagttgtttgsaacaactaatacatgaaactgttgggtatgttttttggcttaggatctgtgggaaaaaaaaattaccaaaacaccaagggcactgtgaacctctggttaa

SEQ ID NO: 183498 - DNA, 201 bp, Homo sapiens
aggggttagaggtgctgacttgcacctgttctgcctcctagactgtcacttgccctctctgctcccacctccctggagcccccagttcccaaacagggtgrcagaccccaccccagcaccctctggcctcagctcaggttctccgcctggttcctgcatgactcatgctgtgaggtgcttcattggcatctttgacctgtg

SEQ ID NO: 183499 - DNA, 201 bp, Homo sapiens
attagaagaggtggtggaaaataagcaagagagtgggtttcgatgatgctggaaagaagatggattttatttttgttccccttacctttttattcccttcrtgtatcatttccatgcagaaagtgcaaattaatggtcacatcgaactatctgtcaacatatttctgctcttgcagtatcaaattatgttggcaataatgt

SEQ ID NO: 183500 - DNA, 201 bp, Homo sapiens
tattttctgggaatagcttttctaattggttgttttattttttattctgttttcagacatttcagatttacatatagacaaatctgtcatttttcttttgwcttttgtaaattgttctattattaagcttaaacaattcttttccactcaagattatctttttctttgatttcaaacctacaggatattgcaagaatgaga

SEQ ID NO: 183501 - DNA, 201 bp, Homo sapiens
caagagagtgggtttcgatgatgctggaaagaagatggattttatttttgttccccttacctttttattcccttcgtgtatcatttccatgcagaaagtgyaaattaatggtcacatcgaactatctgtcaacatatttctgctcttgcagtatcaaattatgttggcaataatgtttccagctgcctaggactccattgc

SEQ ID NO: 183502 - DNA, 201 bp, Homo sapiens
ttgcctttgacagcagggatggaggctgagtccatacagaacaaaaaagggagccaattctgacttaaccacatgattacccttaacaattggagtgtaargagatcctgattcaaccctctacttattgcttttcccctgccctctattagcacctaaattcgggtggcttggtcttcagctatcactactttctagatt

SEQ ID NO: 183503 - DNA, 201 bp, Homo sapiens
cacaaaggtgggtacagattagagcaggttgtccttctcacttctgtgtgaatctgatgccttgtggattttcagagaccagatgccagggatgttggcaktcccatggattctatgggagacaactatgatgaaagacatcttcaggtagcttcttcgctgtgacttgggctataatttgcagagaaccggaaccagagt

SEQ ID NO: 183504 - DNA, 201 bp, Homo sapiens
gtacagatcataattcttaaccacttggctccacaatttcccctagtagagttcttgaaaggcttagccacgcctggaacttgtggatggggagatgaagsggggtaactccaaggctgggctctcagaagggacctggcctttatgaggtgctggttctgctcattctcatcctccattgctggagaatcccgcagctat

SEQ ID NO: 183505 - DNA, 201 bp, Homo sapiens
gtaccagcttagagtcagggtttcaaaggttttccctactgggtgccagatacgtacaaagccagagaaactcttcaacaaaagaagccattcagtagacwggggtaaactgccagcaaagtaagatttgcctctgataagccacactggggataatatgcccttggatagctgagaaacaactgtatgttttaaagagtg

SEQ ID NO: 183506 - DNA, 201 bp, Homo sapiens
acttgatcgcaagtctgttattgcaaagcagttgcatcttctaaaggaaaaggggggccttttaaaattgggagtccgggaaggaacacatttggggtagrctagagacaagggttataaataaagagaataaagctctattggatattttaaaccccattgatgggatctcaatgtgatgtttgaggagggattaaaagg

SEQ ID NO: 183507 - DNA, 201 bp, Homo sapiens
tacatgttgcattctaacctctttactcaacaagataacattgtctttttgtatcaatatatagaggtctcttatgttcatttttcttagtcatgtggatyaataatgtttcacccctataaataatgatggagatgaccatcctcatacagcatcactcccatgtacacactttgtccaagatagctaactagttgtgct

SEQ ID NO: 183508 - DNA, 201 bp, Homo sapiens
atttttcattttgagctacttactgttctttgaattttttttcttataacattcacttcttatttatagaagtaatcatttctcaaacatctcaggatatkattttgattttggagaagggggaagcttttctgactcctgtattatctctgtttcttctagagtcattttttttaattcactgctctctttcatgttgga

SEQ ID NO: 183509 - DNA, 201 bp, Homo sapiens
aaaaccatctgaggtcattactattattataatactattcttccccactaccatgcaggagaacaatgttttccagaaaggcagagcaactgggctagacrtggtggctcacacctataatcccagcactttgggaggtcaaggcaggactgtcgcttgaggctggaagttcaaaagcagcctgggcagtgtagtgaaacc

SEQ ID NO: 183510 - DNA, 201 bp, Homo sapiens
tattattacataattaatttaaagcttgctaagattttaagttctttatgtatattaactcagttgattatcgtcaaaaccctaccaggtagaaactagtrttatccctattttacagatggggaaactgaagtactgaaaggttaactaacttgctcaagatcatgcagctagtagcagccgatatgaaatttgaacata

SEQ ID NO: 183511 - DNA, 201 bp, Homo sapiens
ttatgggagaggaaattgctgaggacttgcaaaaagcctctgggggctttgtctctaatctgtctctaaatttattgaaattctgacactagatttaggtytattgaattgtcagttgatcctcttcctggggtgggtggtcccctaaagcttcagtttgctcacctgtttcaaaatgagtcagctgctttaatgagaggt

SEQ ID NO: 183512 - DNA, 201 bp, Homo sapiens
tttattgtcctgtcattgacgatgactagatgagggtcctccagccctaatagtatatgcatttttacatactgtgccgtcacatgttcaggaactgcagyggatctagtattgatgagaggacagtacctgggaggttgcccagaagacaaccctgggggaacctgggggtgttgtcgagaagctgatacactcccggtc

SEQ ID NO: 183513 - DNA, 201 bp, Homo sapiens
ccagtgcccctttttactgcaccccagctgttgcttccatcttccattttctctcccttttttctcctcctttttccctcccaacatcctatcttcatccytcttctttcctctttatacatgtagggtcaggttggggtctaagctatagctttgccacttaataaatacgtgaacttggtttttattgtcctgtcattg

SEQ ID NO: 183514 - DNA, 201 bp, Homo sapiens
caagcttgtccaaccagcagcccctgggctgcatgcagcccaggatggctttgaatgtggcccaatacaaattcataaactttcttacaacgttatgagattttttttttgtaattttttttttttagctcatgaactatcgttcgtgttagtgtattttatgtgtggcctacaataataattcttcttccaatgtggccc

SEQ ID NO: 183515 - DNA, 201 bp, Homo sapiens
tgatcaatgagggctcaaaataaaggcattcaaacttttgcattcaaccttacagatttttctaactctttaggactccaaatgtctgtggtcagatttgyggggtaaaatcctagaaccacgccagccagcaaagcatgctgtcacttctcagactcagcagaaagaacattttcaaccacatccaacagcattgacaag

SEQ ID NO: 183516 - DNA, 201 bp, Homo sapiens
cagtcatgccacactcaccatactgtttagagagctcaggagatcctgcacgccagccaaagggtggggctgtgtggtagccagaatcgtggccccaccaragatgtccacatcctaacccctgagacctatgaatgtgctatggcacctggtgtatggagcatacaaggatgtttctttcctttaaaacaaataagagtc

SEQ ID NO: 183517 - DNA, 201 bp, Homo sapiens
cccctccactggcttaagcttgcctgggtcttctccctgccttccctggtcatggacatggttactttccggggttttttttctgctcctaatagattcarctgactcaaagcccccctaaagctataaccacagatgtttccagaaacataagatgtccccagcttctccctctgaaggtttgtgatcactgactttaga

SEQ ID NO: 183518 - DNA, 201 bp, Homo sapiens
aaactccgtctatactaaaaatacaaaaattagccgggcatggtggctcctcgggaggatgaggcaagagaaccgcttgaacctgggaggcggaggttgcrgtgagccaagattgcgccactgcactccaacctgggtgacagagcaagactctgtctcaaacaaaaaataaagtctctactctcgtggcgagtgatggtt

SEQ ID NO: 183519 - DNA, 201 bp, Homo sapiens
gggaaatgggggctgcatgggagctcctcagaaccagccctcgtccccccatccctaaatgtcagaccagccctgctgaagagatggtggccaactctttyaggaattctctgggctgtagatgagaagagtctactcagtcagccctggaatttgatgagttggttttgccattagcttgtgaaaggaatgaataaaatt

SEQ ID NO: 183520 - DNA, 201 bp, Homo sapiens
tacattgtggattagccacatctcagaaatcatgtctccagcctgggaaatgggggctgcatgggagctcctcagaaccagccctcgtccccccatccctraatgtcagaccagccctgctgaagagatggtggccaactctttcaggaattctctgggctgtagatgagaagagtctactcagtcagccctggaatttga

SEQ ID NO: 183521 - DNA, 201 bp, Homo sapiens
gcattgttcctagagtaataggatcctctctaggggctctttgccattgcactcctagtctctagaacaggacctggtagcaggcacactaagtaaaattkggctgtgccagtgagtgaatgccccagagacaacccttcctccaaatctaaataaaaagactctatcaatattgaggaaatttggatctgagattctccc

SEQ ID NO: 183522 - DNA, 201 bp, Homo sapiens
cccccagcagccacacagctaatccgccagaaagtttgattatttctcttgccaaaatagacacaggtcaggccgcatggcaccatctctgctgccacatyctgttctgagcacccctcagatgcttggagcatttcagttcctccctgcccacccccttccacacttcacctgttccatatgtccacactgcagccagac

SEQ ID NO: 183523 - DNA, 201 bp, Homo sapiens
tccaccctatcgtgcaaagatttgtggtcatccttgacagttctttctcctttattccccatatccaatccatcaacagattttatctataactatttcargtaattgtctcttttatcacatctgcctatcttcactgtcatcacctgagcctaagcaactatcaactcccatctgaatgcccgcagtagtctcaaaact

SEQ ID NO: 183524 - DNA, 201 bp, Homo sapiens
ttctgagcacccctcagatgcttggagcatttcagttcctccctgcccacccccttccacacttcacctgttccatatgtccacactgcagccagacagawcatcttaagaggtaaatctgatcctgttcctcgtctgctttggcttcatcttaacttcgaggcactgaaggatctggcactggctgcctctctatcttca

SEQ ID NO: 183525 - DNA, 201 bp, Homo sapiens
ctcttctcttggctctaggatactacactctcccgggtttacttcctacctgtctggtcactcctgttccccattcaggcttatctccctctactcactaratactgcagaccctcaagtctctattctaggtctgtttctccttccactctttattctttcccagggtgatttcaccaacaggcccccacgcttcaaata

SEQ ID NO: 183526 - DNA, 201 bp, Homo sapiens
ccaaatccccaggccctgcttaataaaacaaagtcacccagagtcggagacagccttttagggactaaggctgatactaagcctgactctcatggaaaggrtatgcttggggtaaaagtaacgcaggtgttatcccactgaagggcttccagtgggatagccctctgaaaagtccctttcgattttggggccactgagtca

SEQ ID NO: 183527 - DNA, 201 bp, Homo sapiens
gaggcagcagagagagaaaacatggcaactagaccctatgtatggagctaatattgagggagggaagtagagcttaataaaccaagggccatgccttgtgyaccaggtttccatatgtaagagtagacaggtagcacatataaaagccagattaagactctgggctggagctaggaggagactggatccttagccatcatg

SEQ ID NO: 183528 - DNA, 201 bp, Homo sapiens
ttttcctgcacggacctagcacccatctccatgacactctccacctggcccaggcagtctgtgtttatgaaattcatcccttatgtctcagttccaggackgctctgtcttgtccatgaacacctatgagagatattgccaagtgatgtacagggatctggaagcagtctgccaatggtgtacccaggcagaaggcagtgt

SEQ ID NO: 183529 - DNA, 201 bp, Homo sapiens
ttaggtctcagtaatccttggggaaaatcagctgggagggttgctgggtagcatgggaggaggcagcagagagagaaaacatggcaactagaccctatgtrtggagctaatattgagggagggaagtagagcttaataaaccaagggccatgccttgtgcaccaggtttccatatgtaagagtagacaggtagcacatata

SEQ ID NO: 183530 - DNA, 201 bp, Homo sapiens
gggaggaagtgagttgacgcagacctcaggacatcattagccaactccacggggagctaaaatggcccgtccgagtctgcaacgggcaggactggctgagrctttcaaccctagcctccatcagttgctggatgtgcagctctcagaaaggcagaccttgggagtacactctgcagctgacacagtccctggaggggctac

SEQ ID NO: 183531 - DNA, 201 bp, Homo sapiens
tcatccagatgcaagcctgatatgggccttgcctatatgaggaaagttaagtgaatcactctaggggctctgcctttatcctgaggatcggatgaacttargtagcaggttacaaggaggcattgcctcagcctctatgacctacagttcatagacacaaaaaaccctagtgctaccctggatccagtgctaaggtcacat

SEQ ID NO: 183532 - DNA, 201 bp, Homo sapiens
acaaaaaagcgcgtttcataggatttcactgatacacagtgcaaaaactggcaaaactcgtctatgctgttaaaagtcacacagaggtgatccctgatggsggtaggcaagtaggattgcaagggagtgtgaggaaaacgttttgggcctggtaatggtttggtttttgattatatgactgtatccagttttcaaaaattc

SEQ ID NO: 183533 - DNA, 201 bp, Homo sapiens
tctctggccctttatggaaaaagtttgtcagcctttctactattacctgtattaattcagttaatcctcaagcttaactgaggatcctgtaaggtttgggttttttttttttttttttgagacagagtcttgctctgtcgccaggctggagtacagtggctcaatcttggctcactgcaacctccgcctcctgggttcaag

SEQ ID NO: 183534 - DNA, 201 bp, Homo sapiens
caaggtgccagcaggctcagtgtctggtgagggcccagtctttgcctctgtcattggtgaagactgagctggaaccctgccagaaagtaagatgtagtttytaggcttccagccccagtgatatgtgggtgagcttaggagggtaggaatgatacaagataccatgacacaattctcagtacagtgtactctaagtgagta

SEQ ID NO: 183535 - DNA, 201 bp, Homo sapiens
tgaagtggagaatcttcccaatcttttcaaatacatgacttcagggtggggagaaaataaatagggccctggatgaagctgccagaccaccccaccccccycccccccgcccaggccattttctctgggcctctgtttccctatctgcaacacgggactgaatttattgttttattcactggagtggcactgtctagcatg

SEQ ID NO: 183536 - DNA, 201 bp, Homo sapiens
cccactgaatcacagtcttcttaacaagatccccagataattcatgtgtacattaaagcataaaaagcactggtttaagaaacattctcaaatctcacaattgtgatcagcacaagagggtggtagaggtggtaagggaatatcaactggtctggaaagctctgcctgatgaaaacattgcagtcattgcatgaataacgt

SEQ ID NO: 183537 - DNA, 201 bp, Homo sapiens
aaacattgactcagccacactgttggtattctctccataatatacctttatgtcctggccaggctgggaattttcaaaatctttaagctctgcttcccttktacttataaattcatctttaattgatttcttatctcacttttactataaacagtcaagagaagccatgtagcaccctcaacactttgcttagatacttct

SEQ ID NO: 183538 - DNA, 201 bp, Homo sapiens
acctatgagaaaactgaggcctgggctgcacagctagtgagcacctgagaccagatttggacccaaggccgcctgaggtcaaacccatatatatatatatwtatattttttttttttttttgagatggagtctcgctgtgtcacccaggctggagtgcagtggcgcgatctcagctcactgcaagctccgcctcccgaaac

SEQ ID NO: 183539 - DNA, 201 bp, Homo sapiens
aaaatacaaaaagcttagtgagtttccagattggaaggaggaggagttgggagaacacacacacaggtgacacacatgcacatgcacacacacacacgcgcacacacacacacacacacacacatttcacccaactagcatgtcatggaagcagcaccgtctccagggtggtcctggcctgttccttcacaccatggggcc

SEQ ID NO: 183540 - DNA, 201 bp, Homo sapiens
tgcctgactccccagatttctcaagatatatccattttcttctgtccttgaaagcagcacaggcttgaggtcaagaacatgagctatgggctgggcacggyggttcatgcctgtaatcccagcactttgggaggctgaggcagatggatcacgaggtcaggagatcgagaccatcctggctaacacagtgaaaccccgtct

SEQ ID NO: 183541 - DNA, 201 bp, Homo sapiens
tatagggatagcgaattgatgctcaaatactcaagtatataaaaattcaagtgatgcagtgatattcttggtttcaggaaggtggggtttccaccgccaawatccacttacttcatgattttaaggaagtcgcttagctcccagcctgagtgttctcatttgtaaatatgagatgttgatattcaccatcctgccctgtct

SEQ ID NO: 183542 - DNA, 201 bp, Homo sapiens
aaatacaaaaagcttagtgagtttccagattggaaggaggaggagttgggagaacacacacacaggtgacacacatgcacatgcacacacacacacgcgcacacacacacacacacacacacatttcacccaactagcatgtcatggaagcagcaccgtctccagggtggtcctggcctgttccttcacaccatggggcct

SEQ ID NO: 183543 - DNA, 201 bp, Homo sapiens; identical to SEQ ID NO: 32292

SEQ ID NO: 183544 - DNA, 201 bp, Homo sapiens
gcaagctccgcctcccagattcacgccattctcctgcctcagcctctcgagtagctgggactacaggcatccaccaccaggcccagctaatttttctgtayttttagtagagacggggtttcaccatgttagccaggatggtctcaatctcctgacctcatgatccgcccacctcggcctcccaaagtgctgggattacag

SEQ ID NO: 183545 - DNA, 201 bp, Homo sapiens
aggaatacatgagttaatgtgtgctaaagctgagaacaatacctggcacacagtaagtgctgaataagtatttgttcatattttattattcctaaagaggkgaacactttgttcctggtgaccagaataagaagcagtaaaccttatctctgtggatgaggtgcagacataaaccaccctttactgagccctaatacattc

SEQ ID NO: 183546 - DNA, 201 bp, Homo sapiens
tatgtgtaattaaattgtatattagataccataagtggacttttgcctaattcaatcatctgtacacttaaaattgtatttattaaagttgcccgaaaactttttttttgaggagaggatgtcttctcactggaaaaatggaagaaatgctttacttttaatggagggttgatcctgtcagtttgttgaattgtctaagtc

SEQ ID NO: 183547 - DNA, 201 bp, Homo sapiens
cataatcagagatgcctgtaatgcttaaaaccttccctgacgtagaagtaccagcttagagtcagggtttcaaaggttttccctactgggtgccagatacrtacaaagccagagaaactcttcaacaaaagaagccattcagtagacaggggtaaactgccagcaaagtaagatttgcctctgataagccacactggggat

SEQ ID NO: 183548 - DNA, 201 bp, Homo sapiens
ggtcaaataatcttcactaagggtaccaagactacacaatggagagagaataatttcttcaacaaatggcatttagtaaattgaatatccacatgtagcakatccttaacttacaccatacacaaaaattaattcaaaatggattaaagacctaaacatgagagtgaaaactgtaaaacccctagaagaaaatgtaggtag

SEQ ID NO: 183549 - DNA, 201 bp, Homo sapiens
agtttggcctggtgtggtggctcacacctgtaatcccagcactgtgggaggccgaggtgggtgaatcatgaggtcaagagattgagaccgtcctggccaasatggtgaagccccgtctctactaaaaatacaaaaattagctgcttgtggtggcgcatgcctgtagtcccagctacttgggaggctgaggcaggagaatcg

SEQ ID NO: 183550 - DNA, 201 bp, Homo sapiens
tggaatgggagaaaatatttacaaacctctcttgtagggttactatctggaatacataaagaatgcctaccactcaacaataacaaaacaaataacctgatttttttttttttttaaaaagggctgaaatagacatttgtccaaagaagataaacaaatggtgagaaacatgaaaatacggccaggcacggtggttcatgc

SEQ ID NO: 183551 - DNA, 201 bp, Homo sapiens
atggtaggtccacatggcagccttggagctgaagagcatctacagagacgttggaattctcagcctgggccctctgctccactccctgtactcagggtctyggcctccatttactgacttggagtgccactgggtatgcatggcctgcctcctgaagacatcccatccctactcccctgcctcctgaagacaggaggaaaa

SEQ ID NO: 183552 - DNA, 201 bp, Homo sapiens
gtggtggctcacacctgtaatcccagcactgtgggaggccgaggtgggtgaatcatgaggtcaagagattgagaccgtcctggccaacatggtgaagcccygtctctactaaaaatacaaaaattagctgcttgtggtggcgcatgcctgtagtcccagctacttgggaggctgaggcaggagaatcgcttgaactcagga

SEQ ID NO: 183553 - DNA, 201 bp, Homo sapiens
gtttttgtagagagaaaagtttattgcaaggctgctgaacaaggagacaggagtcaggcttttggaggcggggacaggttttataggcagaaggtaatggmgtgatctgattggacatttgcaatgtcgtgatgtgggagacttgatctgactggatcatgtcatgaggtgatgctattgaatcatggatcatgccatgtg

SEQ ID NO: 183554 - DNA, 201 bp, Homo sapiens
agagtctcatttagccgtctttcctggtgtgtgtaacatgactgaactagaatttgacctacacagagcatttacagtgtaaaacaaggtctatctggaarcatagattcaggagaccaagcaaaatcagcacttgaggaacaatttatttgagtggcctgagtgctttcaaacaatcaattaaagctattcctgtctcac

SEQ ID NO: 183555 - DNA, 201 bp, Homo sapiens
gtgggcagatcacctgaggtcaggagttcaagaccaacctggccaacatggtgagaaccccatctctacaaaaaatacaaaaattagtcaggcatggtggygtgtgtctgtaatcccagctactcacgaggctgaggcaggagaattacttgaacccgggaggtggaggttgcagtgagccaagattgtgccactgcactc

SEQ ID NO: 183556 - DNA, 201 bp, Homo sapiens
aaaactcgtctctactgaaaatacaaaaattagccagatatggtggcaggcacctgtaatcccagcttcttgggaggctgatgcaggagaatcgcttaaacctgggaggtggaggttgtggtgagccgacatagtgcctctggactccagcctgggtgacagagtgactctgtcacaaaaaaaaaaaaaaaaaaggccata

SEQ ID NO: 183557 - DNA, 201 bp, Homo sapiens
tggttgtgtctctgagggctcctggctctcactgtgccccgtgaacgcttcatttagactatgtccttgggggcttctggttttggttgtatctttaatgwgtttctaattctaacattgttcctgaggctccctgagctgggcctgtgacccttggttttgaaaattttcttgatggctcctggttctagaattgtctcc

SEQ ID NO: 183558 - DNA, 201 bp, Homo sapiens
cagatatggtggcaggcacctgtaatcccagcttcttgggaggctgatgcaggagaatcgcttaaacctgggaggtggaggttgtggtgagccgacatagygcctctggactccagcctgggtgacagagtgactctgtcacaaaaaaaaaaaaaaaaaaggccatatgtaaatttttaaatttatgtctcatagttctgg

SEQ ID NO: 183559 - DNA, 201 bp, Homo sapiens
tttgtctctgggggccctggccgtgtttctctgagggttcctggctctgtttctctgagggctcctggctctggttgtgtctctgagggctcctggctctsactgtgccccgtgaacgcttcatttagactatgtccttgggggcttctggttttggttgtatctttaatgagtttctaattctaacattgttcctgaggc

SEQ ID NO: 183560 - DNA, 201 bp, Homo sapiens
cttccactaatccttcctatagattgcctgcttcctcccgtgccccttctctcctttccaggcactctgatgctagctgcaagcggcatgttgcagatgcrtaatctggacaaagctgccccagatgggcagatctttgcttctcctcccctttcttgcccctctaagtcaggtaatacagtcaccccttaggggatcaat

SEQ ID NO: 183561 - DNA, 201 bp, Homo sapiens
agatatggtggcaggcacctgtaatcccagcttcttgggaggctgatgcaggagaatcgcttaaacctgggaggtggaggttgtggtgagccgacatagtrcctctggactccagcctgggtgacagagtgactctgtcacaaaaaaaaaaaaaaaaaaggccatatgtaaatttttaaatttatgtctcatagttctgga

SEQ ID NO: 183562 - DNA, 201 bp, Homo sapiens
tttgtttgttttttagaggaccttcttgctgtggttgcatttctaggggctttctagctctgactgtgattctaagaacttcctgactttagctgggtcaygggaggttcctggatctaatagtgtttctgatgagacacactggctctgtgtcttccagaactcctggtgccatttgtatgtctgaggctttctaatgct

SEQ ID NO: 183563 - DNA, 201 bp, Homo sapiens
caagtggcatctgctacaaccacactggccacttcttctaccctcctcacctcccactaagagcagagctgcttttccatccatcctttggggaggggaamagatcagcttttaatacagaacacagtgattcagtgtttctgctttcaaaagcaaaggggcaaaggctagaagaaagaaaacatgttcatggtggatttg

SEQ ID NO: 183564 - DNA, 201 bp, Homo sapiens
aacagggagtcctttccccattgcttgtttttatcagccttgtcaaaatcagatggttgtaggtgtggggccttacttctgggctttctattacgtttcaytggtctatagatctgttttggtacctataccgtgctgttttatttactgtagccctgtagtatggtttgaaggcagctaatatgatacctccagctttgt

SEQ ID NO: 183565 - DNA, 201 bp, Homo sapiens
aacagtaaggatagattgtgtttatccagtgcttattatgtccaggcactgttataggggctttacaagtattatctcagttattccccattctgacctayaagaaagggacatcattgtctccatttaacagaagagaaaatcagggtaccaagatgctaagcaccttgcccaaagtctcaaagctagtaagtggcttac

SEQ ID NO: 183566 - DNA, 201 bp, Homo sapiens
tttaggtttgcctttaaatactctttttccccttttcttttctgccaatttcttctatttcctaaaacaaaacagaacaactccctcaaaaaaattctcawatttgtttataattttggcagtcataatttttcattttgagctacttactgttctttgaattttttttcttataacattcacttcttatttatagaagta

SEQ ID NO: 183567 - DNA, 201 bp, Homo sapiens
agcattgggaaataccatggcaggatggttcaggacagtctcagaagccacataatttactatctgagaggctttgagccccaaagtttccccattttctyatctgcaaaatggaaatactaaaaatgaccagttattgagaagaatcatgagataaaaaacttcattatcttagacttgtgccatcattataatgatctt

SEQ ID NO: 183568 - DNA, 201 bp, Homo sapiens
tgttctggagattgatgcctgaggatgtggcagaattacaggaaggggtcacttcaccatctacatgttgaaggagagccttggaagctcagggccgctgmtgcccaggtctcatggatggctcctggcatccttgtcctcgcagcgctttgatgcctggctggaaggcactgatgtcatctcccagctcagccctcagct

SEQ ID NO: 183569 - DNA, 201 bp, Homo sapiens
ctgcactgctgctcccttgccaccaggtcctcaatatcttactcctaataaaccagggcatcttgtctccctgcctccagtttgctccctcaactccatcyttcaccattgcaaataagatgattgttggaacactttgatttgcttacaaggttctagcctgccagtatcttcttcattcgtttatttagccgccgtgaa

SEQ ID NO: 183570 - DNA, 201 bp, Homo sapiens
agccaggcctcaagggggtggcctggacttctgagcccaagaggagactgacagtgtccagtctggaggccagagtagctgtgctaaaggtcatccccagkggcagatctgacttcattgtcttggccatgccccatgcccattgtcaattttctacagaaaaaagagctgtgggacaagccctcatctggagcccaaact

SEQ ID NO: 183571 - DNA, 201 bp, Homo sapiens
ccttttttcatacagttttgtcccccaggccatggcattctgggcctgtgatgagagtgacaactttagagatctttgaaatgccttcggagtcattcttycattgtcttgataaatagcatctggcttccttacacccatactaataaccctatcaggcatcttaatatttttatcaaacattgactcagccacactgtt

SEQ ID NO: 183572 - DNA, 201 bp, Homo sapiens
ctatgagaaaactgaggcctgggctgcacagctagtgagcacctgagaccagatttggacccaaggccgcctgaggtcaaacccatatatatatatatatwtattttttttttttttttgagatggagtctcgctgtgtcacccaggctggagtgcagtggcgcgatctcagctcactgcaagctccgcctcccgaaaccc

SEQ ID NO: 183573 - DNA, 201 bp, Homo sapiens
atgagaaaactgaggcctgggctgcacagctagtgagcacctgagaccagatttggacccaaggccgcctgaggtcaaacccatatatatatatatatatwttttttttttttttttgagatggagtctcgctgtgtcacccaggctggagtgcagtggcgcgatctcagctcactgcaagctccgcctcccgaaacccct

SEQ ID NO: 183574 - DNA, 201 bp, Homo sapiens
caagaagacaaacagcattaaatctcgaggcttgagaatgatcttctttgactctacgtcctgccttttggacaccgtgcagcaagggtgggccaaagacycaggcagccccattcttcatggctttgctgggcgtgccccacaaagcagctctcagtggttggggttgggtgcctgtctctctcccaggcttgtgttgcg

SEQ ID NO: 183575 - DNA, 201 bp, Homo sapiens
tggaacctttgtacattgtttgtgagagtgtaaaaatggtatagtctatatggaaaaccaaaaataaaaaatagaaccaccatatgatctagcaatcccarttcttgaaatagaatcatgtatcatttaatgatgggaatacattctgagaaatgagtcattatgcaatttcatcattgtgtgaacatcatagactgtatt

SEQ ID NO: 183576 - DNA, 201 bp, Homo sapiens
aggataagcaattgggacaggcagctcctactccataacacaatactttcctgaaaaattgcataaaagtcaaatgtctgtgttggaacggttgacttagsttttctttttgtggtagggagtgaggaggtttgcttcaagaaatctaaaaaataataactccccaacttgcctcaccttttacataaaatcttcaaagct

SEQ ID NO: 183577 - DNA, 201 bp, Homo sapiens; identical to SEQ ID NO: 32308

SEQ ID NO: 183578 - DNA, 201 bp, Homo sapiens
gcagcacaccaacatggcacatgtatacatatgtaacaaacgtgcacattgtgcacatgtaccctaaaacttaaagtataataaaaaccgacccccccccmaaaaaaaaaaacttgcaagactcaaaggccattgtaagggcttaggctttggctctgcatgaaatgggaagctgttgcagggttctgaacagagagtaag

SEQ ID NO: 183579 - DNA, 201 bp, Homo sapiens
gctgatgcaggagaatcgcttaaacctgggaggtggaggttgtggtgagccgacatagtgcctctggactccagcctgggtgacagagtgactctgtcacaaaaaaaaaaaaaaaaaaggccatatgtaaatttttaaatttatgtctcatagttctggatgctgggaattccaagtttaagatcaaggtgccagcaggct

SEQ ID NO: 183580 - DNA, 201 bp, Homo sapiens
ctgatgcaggagaatcgcttaaacctgggaggtggaggttgtggtgagccgacatagtgcctctggactccagcctgggtgacagagtgactctgtcacaaaaaaaaaaaaaaaaaaggccatatgtaaatttttaaatttatgtctcatagttctggatgctgggaattccaagtttaagatcaaggtgccagcaggctc

SEQ ID NO: 183581 - DNA, 201 bp, Homo sapiens
tgatgcaggagaatcgcttaaacctgggaggtggaggttgtggtgagccgacatagtgcctctggactccagcctgggtgacagagtgactctgtcacaaaaaaaaaaaaaaaaaaggccatatgtaaatttttaaatttatgtctcatagttctggatgctgggaattccaagtttaagatcaaggtgccagcaggctca

SEQ ID NO: 183582 - DNA, 201 bp, Homo sapiens
ggcaggagaattgcttgaacccagggcggaggttgtagtgagccaaaatcgtaccattgcgctccagcctgggcaacaagagcaaaactccatctcaaaawaataataataataataataataaataacaacaacaacagagatgctcaaaacatgatagtaaaggagaacaactctgtacagtagatccttggtgataaa

SEQ ID NO: 183583 - DNA, 201 bp, Homo sapiens
gatgcaggagaatcgcttaaacctgggaggtggaggttgtggtgagccgacatagtgcctctggactccagcctgggtgacagagtgactctgtcacaaaaaaaaaaaaaaaaaaggccatatgtaaatttttaaatttatgtctcatagttctggatgctgggaattccaagtttaagatcaaggtgccagcaggctcag

SEQ ID NO: 183584 - DNA, 201 bp, Homo sapiens
gttaaattttatagtatttcatggctgttgatcaagtttgccatctgtattatttttgaaattatgtattttttgtttatcagttggtctggaatactctrtcttctcaattttgcataagaacttcctgcagttttgttgatggatcactggagaaagctgcagtccctggacaagcctaaaacacctttcaaccttttg

SEQ ID NO: 183585 - DNA, 201 bp, Homo sapiens
tgaggcaggagaatggtgtgaacctgggaggcggagcttgcagtgagccaagatcgtgccactgcactccagcctgggtgacagagcgagactccatctcaaaaaaaaaaaaaaattaaaaaaaaaaataaacaaactgagctcagatatgtgcattatatgtgcaaaaaatgattgatataattaacatgtaaagaggtt

SEQ ID NO: 183586 - DNA, 201 bp, Homo sapiens
cttctgtaaggctgttgattaggatgaggagtgagaacgaaggagttaagaactgaggatgagccctagattcagattctggccacttgtcagatgctgcwaccatttactaagaaaggaaatgtagaaggaggagcagacaggtttgtaggggttggggctaagttgagttttagatgtgtctagtgtgagctggctctg

SEQ ID NO: 183587 - DNA, 201 bp, Homo sapiens
ggactcggggaaagggtgggaggggggtgagggataaaatactacaaattgggtacggtgtatactgctagggtgatgggtacaccaaactctcagaaatyaccactatataacttagtcatgtacccaaataccacctgttttccaaaaacctatggaaaaaattttttaaagacctctgttttctaacaggatggaaac

SEQ ID NO: 183588 - DNA, 201 bp, Homo sapiens
cataaacattggggttgctttcagaatgttgcctttatcagcagtgatgaaatgagcatccttgtgcctaccttctcctgtatatgtgcaagattttctcytgaatttctatctagaaactaggtcagatggtaaatgaatgttaagttttacaaaaatactccaaactctttcccaaactggttgcactaatttacactc

SEQ ID NO: 183589 - DNA, 201 bp, Homo sapiens
ccctcagacaagtatccctcagtttgagagtgggaggcaggtggaaggtgtttactaccagctctggtgttctctgcccaaggctctggaatccactggtrggaaacttacagcccgacccatatgggtcctaggataacaatgcccttggagtaaccttgaaagctgcaatctgggctttaagtttctgtcagtaaattg

SEQ ID NO: 183590 - DNA, 201 bp, Homo sapiens
agaagacaaacgctgcattattacgtggttggcattttcaacacttatccccaaaactaaggcagcattgttcaggctcatcacttttgttttcctaattrtaattgaattgcctggctctttcagttggtacatgtttctgtttattactctttttaaaaaacaaaatcaatgaatggtttgctatcgtttaacctatta

SEQ ID NO: 183591 - DNA, 201 bp, Homo sapiens
tatgttgaaggtacccaaggactttgtatttttggtgagtcaggagaggggagaggggtcagaagggaagcatgagagccccacttagcccattgtcatgkgggggaagtcatggggagtggtcagcatggattccctctgagagccccagccaggggccttctgtcactgtgagtaaccaaattgtttttttgaccaaga

SEQ ID NO: 183592 - DNA, 201 bp, Homo sapiens
ccctcagtttgagagtgggaggcaggtggaaggtgtttactaccagctctggtgttctctgcccaaggctctggaatccactggtaggaaacttacagccygacccatatgggtcctaggataacaatgcccttggagtaaccttgaaagctgcaatctgggctttaagtttctgtcagtaaattgggagtattttttgca

SEQ ID NO: 183593 - DNA, 201 bp, Homo sapiens
gtaatcccaacactttgggaggctgaggcggatggatcacatgagttcaagacaagcctggccaacatggcgaaaccctgtctctactaaaaatacaaaarcagcagggcgtggtggtggacacttgtaatcccagctactcgggaggctgaggcaggagaatcgcttgaacccaggaggcagaagttgcagtgagccaag

SEQ ID NO: 183594 - DNA, 201 bp, Homo sapiens
catggctggggatgcctcaggaaacttataataatggcggaaggggaagcaaacatgtcctttttcaaatggtgacattaaggagaagtgccaagaaaaagggggccatctcctttaaaaccatcagatctcttgagaactcacacactattatgagaatggcagcatataggtaaccaccaccatgatttaattacctcc

SEQ ID NO: 183595 - DNA, 201 bp, Homo sapiens
ctggctgagacagagcaggccaagggaaaattgtttctgacctagttgttcaattctagaactatattgttcagtccccctttgagaaactgatgcccagytccatccaagttctcttacccactgatgtcctgtctttctaattcttccgtgactcctttcttgtactcatctgttcattttgctacttttccttaccca

SEQ ID NO: 183596 - DNA, 201 bp, Homo sapiens
aaatggtgacattaaggagaagtgccaagaaaaagggggccatctcctttaaaaccatcagatctcttgagaactcacacactattatgagaatggcagcrtataggtaaccaccaccatgatttaattacctcccaccaggtccctcccatgacatgtggggattatgagaactacaattcacaatgagatttgggtggg

SEQ ID NO: 183597 - DNA, 201 bp, Homo sapiens
tttcacaagcgctgagggtggaatgctcaagtgcagagtctgtggaggtgaggtcatagggctgagagtggagacctaggtgtggaacttcctgaggatcwggctgattttacagcagagactcaggggaacttgcaaattggatggtttcatctattagctgtcacagctggacttccgggtaaagtgaatgtctgagaa

SEQ ID NO: 183598 - DNA, 201 bp, Homo sapiens
cacaaatttattgtctcacagttctggaggtccaaagtctgaaatcaaggtgtctgcagaccttgttccttctgagtgttgtgaggaagaatcttttctaygtgtgtctcttagcttctggtggtttgctggcaaatctttggcatttcttggcttttggaagcgccaccctgatcactgccttaccatcacatgacattc

SEQ ID NO: 183599 - DNA, 201 bp, Homo sapiens
ttttaacgtatactaattgtaaatatttatgggatacatagtgatgttttgagacatataatgaatagtgatcagatcaaggtaattagcatattcatcaytttgaatatttaccatttctttgtgttgggaacattcagtatcctctgtctagctatttgaaactatatattttgcttaactatagtcatcctacagggc

SEQ ID NO: 183600 - DNA, 201 bp, Homo sapiens
aagccaagggttgaactgatgctaatgagaccaaggtaatggatatagtccatgtggaggtcactgggctttgtccagttattttcatggccatgggctamattttatttctgaataaagtctaagccacacttgtgggcaagtttgaccccaccatggatgcagactgactgccataacacttctaaacccgagccgtaa

SEQ ID NO: 183601 - DNA, 201 bp, Homo sapiens
gacttggccaagtaaacccaacatgtctaagttacaacagcttggggaaagtgctctgagagaggaaacacttaatgctcttaagcaaaaaaaaagggggygcatcaatgtgctggagggcttaaacatcagtgcattttgggaatcaggaccatagcttttgggtagtagcattccttcaactcaagactctgctgagtt

SEQ ID NO: 183602 - DNA, 201 bp, Homo sapiens
ttgttattctttcttataaattttaagctaagtttatctagttcttataggagtccaattagaatttttacaagattgcattgagtttgtaaattaatttmataataatatagcacatttgttatatcattgtatcctatccaagatcatagaatgcctggatttgttgagttttttcatgtccattaccttatcagattt

SEQ ID NO: 183603 - DNA, 201 bp, Homo sapiens
caagtctataaggcactattttttttaacagcatgtgctaactttatgtctctgtgttacgtttcagtaattctcttaatatttcaaacgttttcattactattagatctatgacagtgatatgtaataagtgatctttgatgttgtaattgtttggggatgcacaaacgttgcctttctagcaatgagcaaacatagtgg

SEQ ID NO: 183604 - DNA, 201 bp, Homo sapiens
agaagcaccatgctaaataattctaagacatcctttttcactcttgtttctctccccttcccctttcattatccaaagtttcattacctccaacgtttctrcactttggagtctcacctccattcactatgccagaatggctcaagctcccatcccacatgctgtagaaaagccagcacatctcccctgccaatgatttcc

SEQ ID NO: 183605 - DNA, 201 bp, Homo sapiens
aatgacactgcatcctattgacctggtttttccttattatatagccaaatatattttatgttttgtcctctgtgaattatctgttcataaacatttttatrttttccatatatgtatattataagcttttttatggagaaaggatattattctttacctggtacttacattttttcagtttttatttgctttcagaatttt

SEQ ID NO: 183606 - DNA, 201 bp, Homo sapiens
gatttgggtggggacacagccaaaccacataagggcatttatagtgctatagatttccctcttaacactgccttagctgtatcccagagattctggtatgytgtatctttgttctcattagtttcaaacaacttcttgatgtctgccttaatttcttttttttatccaaaacttattcaggggcatattgtttaattttca

SEQ ID NO: 183607 - DNA, 201 bp, Homo sapiens
ctttaggtctttgaagaatcaccacactgccttccacaatggctgaattaacttacactgccaccagcagtatataagtgttcctttttctccacatcctygctagcatctgtttattttttgactttttagtagtaaccattctgactggtgtcagatggtatctcatggtggttttgatttgcatttctctaacgatca

SEQ ID NO: 183608 - DNA, 201 bp, Homo sapiens
ttatagtgctatagatttccctcttaacactgccttagctgtatcccagagattctggtatgttgtatctttgttctcattagtttcaaacaacttcttgwtgtctgccttaatttcttttttttatccaaaacttattcaggggcatattgtttaattttcatgaaattgcatggttttgagcaatgtttttagtgttga

SEQ ID NO: 183609 - DNA, 201 bp, Homo sapiens
ttatgtaatggccttccttgtcttttttgatctttggctggataaagtctgtgttgtctgaaatgagggttgcaacccctgctttttctaatttctatttrcttggtagattttcctcatccctttattttgagcttttgtgtgccattcattgcatgtgagatgggtctcttgaagattgcataccatttggtcttgctt

SEQ ID NO: 183610 - DNA, 201 bp, Homo sapiens
cagttaaattatttttgaccatagaccgcctgttgtgctagcaaatgtaagatcttattcattatttcaattttttctacccattaaccatccccccaccyggtactgcccttcccagcctctgataaccatccttctactctctatctctgtaagttcaattattttaagttttaactcctacaaatcaatgagaacatg

SEQ ID NO: 183611 - DNA, 201 bp, Homo sapiens
tgaagatcagatggttgtagatgtgtggtgttatttctgaggtctctattctgttccattggtctgtatatctgttttggtacaggtaccatgctgttttkgttgctgtatccttgtagtatagtttaaagtcaagtagtttgatgcctccagctttgttttgtttgcttaggattgtcttggggtcttctttgattccat

SEQ ID NO: 183612 - DNA, 201 bp, Homo sapiens
tctgcaacttacaggagcctgctagctttcatttaaggaacaagcacttgctaccagcttgtctctatatataacactacctgtattctcgcaacattgtrtaatagtctcctcattttgcaaatatagaaattgagacaaacagaagctaagtcagttgactcaggctataaagccagcaaacggtacaggcaaaattta

SEQ ID NO: 183613 - DNA, 201 bp, Homo sapiens
ttgctcttgcctctctaggtattttaattgtgatgttaggatatcaatttgatatcttcctagcattctgatgtgggcatttagtgctataaatttccctmttaacactgctttagctgtgtcccagagattctggcatgctgtctccttgttctcattggtttcaaagaacttcttgatttctgccttaatttcattatt

SEQ ID NO: 183614 - DNA, 201 bp, Homo sapiens
atgatctgcctcaaaaaaatcgggagagagtaaattagacaatgtatattaaagtatcttatcgcattacagttggactatttgttcttttttcttttggstgctttccagaggctcctcttctgagggggaagagggttggagcatccttacctggcatataccgatttgtccagtaaactccacatagaagcacacacc

SEQ ID NO: 183615 - DNA, 201 bp, Homo sapiens
tgagttgaaaacatagataataattctactagctaacattttgtgagtaattgctggacaaagcactttctatgcctcatttcatttaatattctcaacamtgctatgaggcatgttatggaaactgaggctcagagaacttaagtaacttgctcaaggtcacatagctaccgagaaaccaagcccagggcttgaacctag

SEQ ID NO: 183616 - DNA, 201 bp, Homo sapiens
atcttcctagcattctgatgtgggcatttagtgctataaatttccctcttaacactgctttagctgtgtcccagagattctggcatgctgtctccttgttstcattggtttcaaagaacttcttgatttctgccttaatttcattatttacccaggagtcattcaggagcaggttgttcaatttccatgtaattgtgtggt

SEQ ID NO: 183617 - DNA, 201 bp, Homo sapiens
gttagtctgatgggcttccctttgtaggtgacctggcctttctctctgtctgcccttaatagtttttccttcattttgaccttggagaatctgatgactgygtgtcttggagttgatcttgttggagagtatcttaatggtttctttgcatttcctgaatttgtatgttggcctgccttgctaggttggggcagttctcct

SEQ ID NO: 183618 - DNA, 201 bp, Homo sapiens
acatccaggtaggtcatcttctcctcgcactctcttattttattttattttattttttggttgatggagcctcactctgtcagccagactggagtgtggartgcagtggcatgatctctgctcactgcaacctctgcctcctgggttcaagcgattcttctgcctcagcctccagagtagctgggactacaggtgcacgct

SEQ ID NO: 183619 - DNA, 201 bp, Homo sapiens
gcatatgggcacgtgatctatactataaaagtgatgcagcatcagaaatgcacaggctcagaaaatacaccattcatagatccttcctggggaaataatcrttgcaaaggtacttcagagcctcgaaagatgagctaaaaatcaagaattttaaaaggggtaatcatggcatgaaaaactggcatgcattccctggggggc

SEQ ID NO: 183620 - DNA, 201 bp, Homo sapiens
gtgaggacagcctccctgccctcacagagtctgcaagccctttggggatataattgtgtcaatgacattgtgcaaagagatgatgcagccagcatttagcwagtggtgggcaaaatttgttatcctgtgatagctctattttaaaaaatccattaatgcacgaagcttaagttttacagaatttttttttaagaatttcag

SEQ ID NO: 183621 - DNA, 201 bp, Homo sapiens
caagagtgatgctccatctcaaaaaaaaaaaagaaaaagaaaaaaagaaaagaaaagcttgttgataaatgagactttgatacccgccccctgcctttgasctccttctgtgacctctttccttatctcagttctgtatgcagtactggcctgagaagacctccgggtgctatgggcccatccaggtggagttcgtctccg

SEQ ID NO: 183622 - DNA, 201 bp, Homo sapiens
actccaggctgggcaacaagagtgatgctccatctcaaaaaaaaaaaagaaaaagaaaaaaagaaaagaaaagcttgttgataaatgagactttgataccsgccccctgcctttgacctccttctgtgacctctttccttatctcagttctgtatgcagtactggcctgagaagacctccgggtgctatgggcccatccag

SEQ ID NO: 183623 - DNA, 201 bp, Homo sapiens
cgtttatttagccgccgtgaagtactctgtggcaggccctgtgacaggcactggaggtgcagaggtgaacgaggggtgctgccatcagtacccttacagcytgatgggcgaggcagccacaatagaaggcactgttaagccatgggaggaagctgtggtcagtgagtgctcagatgttggaggccatctctgcctggagac

SEQ ID NO: 183624 - DNA, 201 bp, Homo sapiens
tcacacagatcttgcagagccaggaggcttcctcccccagcactgagcacctgcagccctgaaaaatacccagatgcccggccacactcacctcccttccmcctctgcaatgcagcctgtacagacagagcctgggacttgaaccttggacacattacccactgaccaccccaccaagccccagttcctcacggttgacct

SEQ ID NO: 183625 - DNA, 201 bp, Homo sapiens
cttcatcttggcttgattacatctacaaagaccctatttccaaataaggccacattctcaggtaccaggggctaggtgttgaacatatctttctggttgayacaattgaatccgcagcacccatgtgtattggctttcatgaatttgaaatccccctcccaactccttttgggttattcttgtatgtttttgcttctgaag

SEQ ID NO: 183626 - DNA, 201 bp, Homo sapiens
ccctatagcagggagcaggagaggacagaacatcaccgtggaagagaaatgggtcccgggaaagggagagtggggctgcgcttagagggtggaaataggcragttaggctgagttggaacattactgtctcttttgctcaggggcagccaaatgagcagggcctatctattcacctttgtgccccacagaccctcaacatt

SEQ ID NO: 183627 - DNA, 201 bp, Homo sapiens
gggtcccgggaaagggagagtggggctgcgcttagagggtggaaataggcgagttaggctgagttggaacattactgtctcttttgctcaggggcagccawatgagcagggcctatctattcacctttgtgccccacagaccctcaacattgtgacaccccgtgtgcggcccgaggactgcagcattgggctcctgccccg

SEQ ID NO: 183628 - DNA, 201 bp, Homo sapiens
gtttcaaattcaacccggtgaacaaagctgtgatctcatgctgctcagaaacctgaaggggggaacttgctttgattaggagaaaatggaggaagaggtartccttcacaaattcagtttatgcagtggacaagcctttcataacatgcagcccagggagaaatgtagtcatagggaaagttgagaaccccttggcttatc

SEQ ID NO: 183629 - DNA, 201 bp, Homo sapiens
catggtagctaattctcaacatgtcaggtactattctaagcgtgtaacatacagacacatttaattcacgtaacaagcctaggaagcatgtacaacttttkccatcatcacctccatttttcagatggagaaactgaggcttatagatgttaagtatgttgcccaaggccacacagctgagagctgacagagctgggattt

SEQ ID NO: 183630 - DNA, 201 bp, Homo sapiens
aaatagcagctactattcctcacattctgagctgacaaaaatgcctctctgggatccctttttgcctttctgtagtaaagcagaccccaacaacttcagtygttcagtgtttgcctttttaaaggatattaagagttggcatgtgtccacaggttaatttacctcaaggtgtgtgataggcacagtaattgttttgaacag

SEQ ID NO: 183631 - DNA, 201 bp, Homo sapiens
tttacatgttagtctgctttgtctccataatcttttgcctcttctctccccctgctcagtaccccttccctcgcctgcagttcatgtctcctgcttctccwtctgcctctttcccttgttccccttcctcccttcttcccttccatccatcctcttccccttttccctcctttcttcatcttagttttcattactcttttg

SEQ ID NO: 183632 - DNA, 201 bp, Homo sapiens
caagaaaaagacgtttaatgcgtgaggctacctctgcatttgttatatatcacacgtgaacttgcaccccccaaggacatcttttcatggcccaaacagcyatggagagcactaggtggaataatgtatggcagctgttccagggctatccacacaggcttcacaacctttgcttggtttaacttgttctgacaaaagaca

SEQ ID NO: 183633 - DNA, 201 bp, Homo sapiens
ctcctctgtggtgatgctgaatgagatggacactgcccaggtaggaggaggccaagccaagccctaggtgggtcaggggggccatgctctaaacctggagrgagatcccttgacagccggtgcctgccacatctgccccagccagctgtcttgtaataagcagtgtctggccacgagcatcagacaagccattctgctacc

SEQ ID NO: 183634 - DNA, 201 bp, Homo sapiens
ccctgctcagtaccccttccctcgcctgcagttcatgtctcctgcttctccttctgcctctttcccttgttccccttcctcccttcttcccttccatccakcctcttccccttttccctcctttcttcatcttagttttcattactcttttgttttctccttcttttctttcttcttccccttctccattccttctttgtc

SEQ ID NO: 183635 - DNA, 201 bp, Homo sapiens
atagacccatatgctagttttcattcaactcatcggagcatgtttattccagtgataacaagctttctgattccatcagcaagaaaaagacgtttaatgcrtgaggctacctctgcatttgttatatatcacacgtgaacttgcaccccccaaggacatcttttcatggcccaaacagccatggagagcactaggtggaat

SEQ ID NO: 183636 - DNA, 201 bp, Homo sapiens
ctgaaggcatcaccaccctacgcttttggctgaagaaataaaagaatgaactcagctcatgagcctgggcatgaagtctggcctgcaaaaccctgtttgcycttctctttttcaacatccctttctgcaaaaccagagctcaggcacagaggatgactttcaaagaacttcacttcgggacatataaaacctttgaaacaa

SEQ ID NO: 183637 - DNA, 201 bp, Homo sapiens
ccagagagtacttcctggtttaattccacaattttcagtgctatgtataataactatgaggaaactaatgctgttttatgttccttatcacgttagtagattttttttttttaagggagaagggaaaagaatgtatttacagtctttctctttcttgtttctgactgatcttggcgtaatgaccggctcatttttgatctc

SEQ ID NO: 183638 - DNA, 201 bp, Homo sapiens
aagggtgcccatttgtgaacccatgctgccctggaacaaggtgctcctgaagcatggcctttgattccaaagctttagaatccagcttctcctagcccctyctttggaggtgacagactcttgattcatgctttctgaggactcctgattagcaggcaaggaaaggaaggctcttctagaatgtttactctgctcttaatt

SEQ ID NO: 183639 - DNA, 201 bp, Homo sapiens
ttccttaactggacatagtatcaaagccaattatatatttttggatctttatagaatctgtttaaaggaattttataatcactgatgctgaattttaaaarcaattcaggaaacttacatttctctctttaaaataccaattcacttcacctttaggtggcctgggattgatttcttcactctgggtcgcaggggccttaa

SEQ ID NO: 183640 - DNA, 201 bp, Homo sapiens
gagaatcttcttcctagttgtgtaatgttagctgtatcctgtcatcattcagaatcacagttccctcatctgtagaatggagaggatattaggtatgatargaccttctgcagatgaaattagagaacatatatgtatcatcatgtcaggtatattagtctgttctcatactgctataaagaacttcccaagactgggtaa

SEQ ID NO: 183641 - DNA, 201 bp, Homo sapiens
tcttccaccctctccccaaaagttgttcctttcttaagctgcaaaatctagccatctccttagtacgtctttcttaaacctgctctgagccttgcctcccrccccaagactcttctgtaggtaagttcctaaactccaacccttccttccctgaaacaaactctgatgcagctgttttaagagtaagtttccacccactat

SEQ ID NO: 183642 - DNA, 201 bp, Homo sapiens
atattaggtatgataggaccttctgcagatgaaattagagaacatatatgtatcatcatgtcaggtatattagtctgttctcatactgctataaagaactkcccaagactgggtaatttataaagaaaagaggtttaattgactcacacttccacatggctggggaggcctcaggaaacttacaatcatggcagaaaggga

SEQ ID NO: 183643 - DNA, 201 bp, Homo sapiens
accatgttacgcagatgcttctctctttgaggaggccaaggcttgtaagaatgaggcctttcaagcccagagcaaaaagggattggaagtgaatccagacyctctgcaataagcagcctcaggtggtctctgtgttctctgaaaagcctgtgggtcccacaggcaagggtctttcagggcaacatgcagttctaggacaga

SEQ ID NO: 183644 - DNA, 201 bp, Homo sapiens
catttacctcctttcccatccctcccttctcagctcttccaccctctccccaaaagttgttcctttcttaagctgcaaaatctagccatctccttagtacstctttcttaaacctgctctgagccttgcctcccaccccaagactcttctgtaggtaagttcctaaactccaacccttccttccctgaaacaaactctgat

SEQ ID NO: 183645 - DNA, 201 bp, Homo sapiens
catgatccaatcacctcccaccacgttcgtctctcaacatgtagggattatggggattacaattcaagatgtgatttgggtggggacacagagccaaaccrtgccatcaggcttgcagtgggcctcagtggaaggaagggaggaagggagggagggaaaaaggaaaagagggaaaaagagacaaaggggaaggaggaagga

SEQ ID NO: 183646 - DNA, 201 bp, Homo sapiens
aggaagacaatagaaagccacagagcaaaaaagagcaatttaaaaatcaggttttgttcttatcattaaaataggaaatgttagaaagggcaagtgagcaggggaatcatttagaaccatacctttggaagatgagggatgggctcaacataggtagcaggttgaagatgtcagccacaggtgcttaaggtgatcctttag

SEQ ID NO: 183647 - DNA, 201 bp, Homo sapiens
tgccgcctcctgggttcaagcgattctcctgcctcagcctcccaagtagctgggattacaggggtgagccaccacagccagctaatttttgtatgtttagyagagatggggtttcccaatgttggccagactggtcttgatctcctgatctcaggtgatctgctgatcttggcctcccaaagtgctggggttataggcatg

SEQ ID NO: 183648 - DNA, 201 bp, Homo sapiens
gatatattttttgactgtacattacagtgaagtgtaatctttttacacctgcaagtccatcttatttattcttgtaaatgttccctgacaatgtttgtaayatggctgtgttaaaaaatctatacaataaagctgtgaccctgagattcatgttttcctaagatattcgtactggtgtcttcctgaggttgggtagggatg

SEQ ID NO: 183649 - DNA, 201 bp, Homo sapiens
ttgcagaggactttcataagagctacatatcagggaccgcagattgatagagcctgcatgtacacatgttttgttaagcctgtactgtgttttaataacaygttgagtttagagtgagagatttcatataaagtctggatttcttactggcctggagaaatcagacgtttgacacccctatacaaagcatgcatgcctggc

SEQ ID NO: 183650 - DNA, 201 bp, Homo sapiens
ctcacatacaaaatcacacataagcaaatgcagaattcgtgttgtgctcaaattgccctttcatatattaattgggttggaacaaatttgcgttttcaaarcaagagttgtagtggaattagctgtaaccattcttaagtatctcagtggtgtatcgtggtagtatgtaacccaggtatttttgttgcttggaaatattcc

SEQ ID NO: 183651 - DNA, 201 bp, Homo sapiens
gaattttctgtttcaagatttaaaaaaataaaagaacttctgttaattttgcagccatctgcttgccctagtctccatcacctgcctaggaaaaattacctttatttggtagttattatcgctatataggcccctgaaattaaggactcacccagctttggttcaactggactttaaactcagtccctttccctggaaaac

SEQ ID NO: 183652 - DNA, 201 bp, Homo sapiens
agcctgtactgtgttttaataacatgttgagtttagagtgagagatttcatataaagtctggatttcttactggcctggagaaatcagacgtttgacaccsctatacaaagcatgcatgcctggccttcctctgctgaatttaagtaggagctgccccctttcagtgtcccctttcagagtctctctccagttccctccag

SEQ ID NO: 183653 - DNA, 201 bp, Homo sapiens
aatgaaatgcattggatgaacaaatggatggatggatggatggatggatggatggatggatggatggatggatgagtggatgactaacaggtcattattcytccatggcttcatttttttcaaatgcaagttacatgtcaggattgttctcttaaatggtaggagtaaaagtgacagaggtaaagtgtccactatgggatc

SEQ ID NO: 183654 - DNA, 201 bp, Homo sapiens
gtgaggctgaaaaatgcagcagagcccagcttgcagagaggtccctgtgccaggctaaggagcttgggtcttggttggcagcatagcaagcttcagacttytactttgtaagcgacagaatcctttctatgaataaaagctttcatgcaagcccaatgtatgaaatagggatgaccaaaagctgctcatgatgaagcagta

SEQ ID NO: 183655 - DNA, 201 bp, Homo sapiens
cctggccttcctctgctgaatttaagtaggagctgccccctttcagtgtcccctttcagagtctctctccagttccctccagtcctcaccactccttattktctcctcagtgctgaggctactggtggataccagttattgtgcttacaacattgcttttcttatataaagaaatctttatttttctcaagtctctatcaa

SEQ ID NO: 183656 - DNA, 201 bp, Homo sapiens
ttcctcttgccttcctgtgacagataattccgaattttctttgaatgtgaatgtgcttcctattgtggataaacaggatcaaggccttggggttttttttktttgtttgttttttagaggaccttcttgctgtggttgcatttctaggggctttctagctctgactgtgattctaagaacttcctgactttagctgggtca

SEQ ID NO: 183657 - DNA, 201 bp, Homo sapiens
ttggccaggctgatctcggactcctgacctcaagtgatccacatgcctcagcctcccaaagtgctgggattacaggcatgagccgcggtgcctggcctctttttttttttttttttcttatgaagatgggatgggcttttcttatgaagatgagatccctttgaaggcgtaggtagagtaacagaagtatctcttagcatc

SEQ ID NO: 183658 - DNA, 201 bp, Homo sapiens
tgctccagagacagatgagcacattgtcccaacctcatgtggctgtgttataatagaggtcagcagtgaagtgctgtgttggccaggagcagggagcaatkaattctgcccagagggtgagggaagacttcaaaaagaaggtgactttggccttgaagaaggcagaggagctttaggcatatggaggctgaactcactggg

SEQ ID NO: 183659 - DNA, 201 bp, Homo sapiens
ggacagcctgggttagttttgagacactgagtgggtgacatgtttggggctggataagtaggcaaggggacatttgcagagtctttgtaccagaataggarcctgggcttcatcctgtagtagtctaggggctgtgacggaccctatccatggccatggatagtagtgtgcacactcataaggtgggatctctgcatccag

SEQ ID NO: 183660 - DNA, 201 bp, Homo sapiens
tggccaggctgatctcggactcctgacctcaagtgatccacatgcctcagcctcccaaagtgctgggattacaggcatgagccgcggtgcctggcctctttttttttttttttttcttatgaagatgggatgggcttttcttatgaagatgagatccctttgaaggcgtaggtagagtaacagaagtatctcttagcatcc

SEQ ID NO: 183661 - DNA, 201 bp, Homo sapiens
tggaagaaacctgctggggttgaggcagaagctgaattcttgctgtgccatcattctttttctacttaggctcatatcactttttggaaagaacttcactmacaatctgtgtgttctatgtaagaaatgtttatagacctcaggctcccctggttttgtgccaaactttacttcagcaaaagcaggttttcctttgaggct

SEQ ID NO: 183662 - DNA, 201 bp, Homo sapiens
tcctgtgtggactcattcatgatgccctcttcagcttctttttcatctttccctccttgctttcttgccctggttatactacatttcttttcttttttttkttttttaagtacaacagggtgcttgccccattaggcaaggctatttctcctgctgctcccatatgctgctttcatggtccctttgcctggttacagcctg

SEQ ID NO: 183663 - DNA, 201 bp, Homo sapiens
ctagccttatattgtaagtgccaagggatacacacatttataaacaaagggactcacaatatagggatacacatgtacaagcaagtatgtgcatataaatmcacacacacacactcctatatatatacatagctcatctctggaaagaactcagtaccttacctagtacctggaacacaatagggtctcaaatttggtggt

SEQ ID NO: 183664 - DNA, 201 bp, Homo sapiens
agaatacagctccatccatattcctgcaagacatgatctcattcatttttatggctacattgtattccatggtgtatatgtaccacattttcttcatccartctagggcacttaggttgatttcatgtctttgctattgtgaatagtgctgccatgaacattcatgtgcatgtgtctttatggtagaatgatttatattcc

SEQ ID NO: 183665 - DNA, 201 bp, Homo sapiens; identical to SEQ ID NO: 32291

SEQ ID NO: 183666 - DNA, 201 bp, Homo sapiens
ttattatgattcttattttctaggtgaggaatcagagacttagagaggcttagtgacctctctacattaagacctaaggttaaggacagacaactagagtraagttgagggccgagtggctgcaagttctcctggggttagcacagagtcaggcacacaacggagcaaatgctagggtatgggcgacccacagagaggcac

SEQ ID NO: 183667 - DNA, 201 bp, Homo sapiens
ctcaacttactgcaacctccacatcctaggttcaagagattcttatgcctcagcctcctgagtagctggaattacatgcacatgccaccatgcttggctattttttttttaatttttaatagagacggggtttcaccttgttggccaggctgatctcggactcctgacctcaagtgatccacatgcctcagcctcccaaag

SEQ ID NO: 183668 - DNA, 201 bp, Homo sapiens
gctggatgctgctgctgtagatgaagacattctcctacttttggacagagagcagacagagtgacccagagcactctgagactctcagaaaggacagagasggggagtcagctcccagcgagggtgcagaaagtggaatcgacaggcatttcttttgggaagtttctagccagcccatttacagtagaagcagatgtctca

SEQ ID NO: 183669 - DNA, 201 bp, Homo sapiens
ccaaagtctctttgattttttgttttatccacataaatatgtatttggcatagataccatcagaagagagtaccattttatttcagttattttaaagttartgctatattacacatattttgcatatttctttatgacctttagcatttttataatttaataattgcatacaattttaaggagtgaatgtacctacctgta

SEQ ID NO: 183670 - DNA, 201 bp, Homo sapiens
ttgttctggagattgatgcctgaggatgtggcagaattacaggaaggggtcacttcaccatctacatgttgaaggagagccttggaagctcagggccgctrctgcccaggtctcatggatggctcctggcatccttgtcctcgcagcgctttgatgcctggctggaaggcactgatgtcatctcccagctcagccctcagc

SEQ ID NO: 183671 - DNA, 201 bp, Homo sapiens
ggtcacttcaccatctacatgttgaaggagagccttggaagctcagggccgctgctgcccaggtctcatggatggctcctggcatccttgtcctcgcagcrctttgatgcctggctggaaggcactgatgtcatctcccagctcagccctcagctccatgaaggcaagacttcctcctccttaatttagttgcaaactttg

SEQ ID NO: 183672 - DNA, 201 bp, Homo sapiens
aaaactataataaaatgtatcctattcttaaatgtaattacagtataaacacttaagtgtaagctaagaattgtgcagcatgtatatgaaaatacaaacayctacaaagttttattgaggatgagaaaacaagacctgaacaaatggccatatgtcatgttgttggattagcaaatttaatattgtgaggatagcaatcct

SEQ ID NO: 183673 - DNA, 201 bp, Homo sapiens
tagatgtatcttttggagaccgccacccaacctgctgcacttggcaactcctttaaaaaagtgtgtgtgtgtgtgtgcatgcgtgtgtgtgtgtgcgtgcrtgcgtgtgtgtgtatgttagggggtcaggaacttgctggaaacaccacatgtcattacgttgagaagagaagtgcagactgcatctaatttttcagaaag

SEQ ID NO: 183674 - DNA, 201 bp, Homo sapiens
aagtgaaggaggctgaagcaaaacaaataaagtaattatatgattatattattataatctatatattatataattgtacaagcattatatagaagtatatrttatataaatgtgagttatagtatataaataattatataatcatataatttacatttatatatcatatatacatttataattatataagcatatcatata

SEQ ID NO: 183675 - DNA, 201 bp, Homo sapiens
tgccatctgacaaatgcctgtgtggctagttaaatccaggcttatgtgcaatcaggtaattggaagtaggctgtattagtcagggttctccagagaagcagtgtgtgtgtgtgtgtgtgtgtgtgtgtgtgtgtgtgtgtgtgtgtgtataattttatatattttcatatataatatatagtatgttataatatatatcat

SEQ ID NO: 183676 - DNA, 201 bp, Homo sapiens
gccatctgacaaatgcctgtgtggctagttaaatccaggcttatgtgcaatcaggtaattggaagtaggctgtattagtcagggttctccagagaagcagtgtgtgtgtgtgtgtgtgtgtgtgtgtgtgtgtgtgtgtgtgtgtgtataattttatatattttcatatataatatatagtatgttataatatatatcatg

SEQ ID NO: 183677 - DNA, 201 bp, Homo sapiens
cgagcatcagacaagccattctgctacctacagagggtcctgtcaccccccagacctccagcaaagactccccctgcctatgggctttgtccaactccccrcccgggaccagactctgttgctccatctcacaagcattgattattgtcttgctccaaatcacacagatcttgcagagccaggaggcttcctcccccagca

SEQ ID NO: 183678 - DNA, 201 bp, Homo sapiens
ccatctgacaaatgcctgtgtggctagttaaatccaggcttatgtgcaatcaggtaattggaagtaggctgtattagtcagggttctccagagaagcagtktgtgtgtgtgtgtgtgtgtgtgtgtgtgtgtgtgtgtgtgtgtgtataattttatatattttcatatataatatatagtatgttataatatatatcatgt

SEQ ID NO: 183679 - DNA, 201 bp, Homo sapiens
aacacacctgccaccccagagaggatcgcagccaccatccaagacaggccaaggcagtggccagtttctcctgagatgtttcttcagatgtgtccaagcastagaggagtggctggcactctcgctgttgttctgcctcatataataaggttggggtgacttagcctgagaatttccaaagcaaatgaaacaggcccatca

SEQ ID NO: 183680 - DNA, 201 bp, Homo sapiens
tgcaggctctggtccaaacctagacacaaggtgggctcttggctccttttctcatacaaagagcctggaaagaatagaccagaagcgtaaggtggctcccrtgtcaccatggcaagtctacaggcctgcctagcaacctcttccattccccacagagccgactctcagcctgaagtttagtaaagcaggtattttctgtgc

SEQ ID NO: 183681 - DNA, 201 bp, Homo sapiens
gcttgtgtactctacacatttagttaaactgttagacatttggatttttcttctgagaagagcagcagttgtacactccccaaacaaggctgtgaagacamaatgaagatttatacaaaaatacccagctcaggggctggcacatagtagataaatatccagttaataacattaataaacatccactcaaactgcaccaac

SEQ ID NO: 183682 - DNA, 201 bp, Homo sapiens
tgtgaatatgttttttaactgaggtcttattcagttctagtccaagttgtgaatggagacaaatttatacaaacaggtgtgaatttcatgctccttcatcyctggagggactcaggtcctctcagtaatttttcagtagactcttactgctaaaagtgtggtctgcagcctgaccaacatggtgaaaccctgtctctacta

SEQ ID NO: 183683 - DNA, 201 bp, Homo sapiens
ctcctctgtgcctgccctttctcctcttccttgttctactcttcatttcctcttgttcataccctttgacatataatcccattcctcgcagttggttctargaaaacatgagataagacagactgaagtctttgcacaaagatgttcattgcagcattatttaccatagcaaaacatgaacaactcatgggtccagcaatc

SEQ ID NO: 183684 - DNA, 201 bp, Homo sapiens
ctagagaatctttgcttctaggtaattaattggaagggaaatgcttagtgcgtctctatctcaaagcccttacctgagttccaagctaaaatgtatacctrccttctatccatgtgaataacccagaggccctctataagtgaaatattctcaaacaaatgcacattgtattctaccctcatatgcctcctctgtgcctgc

SEQ ID NO: 183685 - DNA, 201 bp, Homo sapiens
tgtgggtcaaatccagcccattgcctgttttcataaataaagttttattggaacgccaccgtactcattcatttatggattatctatagtcatttttgtgstaaaatgacagagttgagtagttgtaacagagaacgtacagcccatcagacctaaaatatttactatctggttctttacagcaactttgtcaacccctgt

SEQ ID NO: 183686 - DNA, 201 bp, Homo sapiens
tctcaataaaaaatggctatgtatccaggcacaaagcaatttgtatgcattatgcattttaattgtaatttcatccaatttatacatattgtgctattaaygctgtgaggtggatctattaattattatcaacatcattttatagatgagtgagtattttaattattatcaacatcattttatagatgagtattgaaaccc

SEQ ID NO: 183687 - DNA, 201 bp, Homo sapiens
atgtttgttactatacttgcacatgccattagaaatacatgaaaagaagctaaccatttggaaagatttaatactttattttctttctggtggtcagcaaytgaatactgctgtctgaaataggagagcagaaaaccatggtgaaaagtcaatggaaaagaactaaatggggccactcactcagcctccaaactattgaag

SEQ ID NO: 183688 - DNA, 201 bp, Homo sapiens
gtctttgaatcctcccaaatggagatgaagtatcctgtcaagggtgtccagaattggaggaggatggccttcctgacctgaaggctggccagctggcatcsccctccttcccaacgcctctctcttccaatatgaccttggggcagcccatcttttcagaccctggatgcttgagttatcacatccctgccctggcagttt

SEQ ID NO: 183689 - DNA, 201 bp, Homo sapiens
gtctggcaaatgagatacacaggggtttccttttcctccctgctgactctagccattggactggatggccctgtacatttcctatactgtcttcttgaagrgttcatcttagagatagagaactgctataaatagatagggtttgtctatgtatttttaaaataatgtgctgcttaccaaaaacattctgtgctatatttt

SEQ ID NO: 183690 - DNA, 201 bp, Homo sapiens
atcgctggcctcctcatgttcatcatcattctcctgggcgtgatgctcaccatcaaaaggaggtgagtctctgctgctgcctgcaagactctgctgacccraggtgacctcaacactgctgtgtggccaggtttttgctctgttgatcattgtccagcagggatcttctgttataaccattgaggtccggaaatacatggg

SEQ ID NO: 183691 - DNA, 201 bp, Homo sapiens
gcaaatgactgggatacaaaacagaagcaaggcctaccctatcacgaagagatcagaaaaggcttcctgaaagaagtgatgatttgaatgggatttgaagkacttgtgatcatctcttaatatgttaattcaacaggtctttacaggatacccgcttgttccaaaatctatgtaaggccctggggaattggtagtgaacaa

SEQ ID NO: 183692 - DNA, 201 bp, Homo sapiens
tggttcttcacttggagtctgcagtttttcttctctgtgccacatgggcctccagttgaatcatgtgactggcaatgcccatgggcaagactggccaggarcaaagcttcctcggaggaaggaggtcagcagccccaagcccagttcaaagggagcccctgagttcaaggcaaacctgggtgacatagggagaccccgtct

SEQ ID NO: 183693 - DNA, 201 bp, Homo sapiens
gcttgaacctgggacgcagaggttgcagtgagccaagatcatgccattacactccagcctgggcaaaaacagcaaaactcagtctataataataataatawtaataataataataataataataaagatgcccacattctactgtccagaatctatgaatgtattctctcacatagcagaagggattttgctggtatgatg

SEQ ID NO: 183694 - DNA, 201 bp, Homo sapiens
atcctttgggaatgggagaaaatttttgcaatgtactcatctgacaaagggctaatatccagaatctacaacgaactcaaacaaatttacaagaaaaaaacaaacaaccccatcaaaaagtgggtgaaggatatgaacaggcacttctcaaaagaagacatttatgcaaccaaaagacacatgaaaaaatgctcatcatca

SEQ ID NO: 183695 - DNA, 201 bp, Homo sapiens
gcaaccaaaagacacatgaaaaaatgctcatcatcactggtcatcagagaaatgaaaatcaaagccacaatgagataccatctcacaccagttggaatggygatcattaaaaagtcaggaaacaacaggtgctggagaggatgtggagaaataggaacacttttatactgttggtgggactgtaaactagttcaaccatgt

SEQ ID NO: 183696 - DNA, 201 bp, Homo sapiens
actttctatgctcaatacaaaatgttgagatattagcaacttttcacaggataaaaatactttaatgcagcaagtaacttgctcaaatgtacgtacctagyacatccactaatcaaggcccagcaaaaaaaaatacaaactccagatgtttcaaacagaaggaatttaatgtagggaattggttgcaaagatgagccaatt

SEQ ID NO: 183697 - DNA, 201 bp, Homo sapiens
ctatggtgggaagtccagcattggcctgagatgctacaagaacatctgcctaaagaagagagggttagtggggagagagacagatagacacacacacacayacacacacacacacacacacacacacagagagagagagagagataaagagagacaaagagagacagacagacacagacagacagacatacatgacctgga

SEQ ID NO: 183698 - DNA, 201 bp, Homo sapiens
ggcctgagatgctacaagaacatctgcctaaagaagagagggttagtggggagagagacagatagacacacacacacatacacacacacacacacacacamacacagagagagagagagagataaagagagacaaagagagacagacagacacagacagacagacatacatgacctggagtctccctcctcctaatctcct

SEQ ID NO: 183699 - DNA, 201 bp, Homo sapiens
tgagatgctacaagaacatctgcctaaagaagagagggttagtggggagagagacagatagacacacacacacatacacacacacacacacacacacacavagagagagagagagagataaagagagacaaagagagacagacagacacagacagacagacatacatgacctggagtctccctcctcctaatctcctaaga

SEQ ID NO: 183700 - DNA, 201 bp, Homo sapiens
gagatgctacaagaacatctgcctaaagaagagagggttagtggggagagagacagatagacacacacacacatacacacacacacacacacacacacacrgagagagagagagagataaagagagacaaagagagacagacagacacagacagacagacatacatgacctggagtctccctcctcctaatctcctaagag

SEQ ID NO: 183701 - DNA, 201 bp, Homo sapiens
ttattttgttttgatagatatctgttattttttctgaaggcttatgggaatttttctttagttttatatttcaaaaatattgccagtatgtacttaagctsaagtctcatcattgattttgcctggaacccactgtgctcttcagagtctgcaaactcaggcctttgggtatttcagagaagttttctttacatatgtctt

SEQ ID NO: 183702 - DNA, 201 bp, Homo sapiens
gggatgctcagggaagtataaactgtgttaggtagagcctttgaatcaagaagatctggttctagctctgccactgactttctaagggaacttgataaacrccaccttgctacctcttggcctctgtttcccactgtaggttaatggtgatagaacagtgttctcaaagttctgtagggctgtggatctttacaatacttt

SEQ ID NO: 183703 - DNA, 201 bp, Homo sapiens
atgtgttcacttcagtctggcacaagatcatgctcctcttctagactcacatctgagaaaggagggtcttgtggtagctaaccatctcataggactgatcmttcttatatcacaattcccctatgctagaggtcatgattttgattcatcacaaggcggactagggtaaatcttcaagcagtttttctctaagggaaggca

SEQ ID NO: 183704 - DNA, 201 bp, Homo sapiens
gagcctttgaatcaagaagatctggttctagctctgccactgactttctaagggaacttgataaacaccaccttgctacctcttggcctctgtttcccacygtaggttaatggtgatagaacagtgttctcaaagttctgtagggctgtggatctttacaatactttccatgggcctgcattcattacaggacacagggca

SEQ ID NO: 183705 - DNA, 201 bp, Homo sapiens
ggtttactaggcatttgtaaaaaaatcaaataagaaacagaataaagaaaaaatagtacctatattctcataaccctaagaaaaacgtcagcgttttcatrtatttaaatctagatgttttaagcttaggtagatgagatttgtttgttgaatttagttcagcaaagtgaaggagagactttttcataggaatttatgatg

SEQ ID NO: 183706 - DNA, 201 bp, Homo sapiens
ccacagagcaggcggtattgacacagctgctttctaggtaaccttggtgtcctcatctgtaataagggtgtagtactgtctgctttgtgttgtcactatgkagagaaaaatgaggaaacaggtaaactactgtgtggttgcaatgattagaggattatctgaaagtcaagtgtcaaaactcacagtggaggtctttgaggg

SEQ ID NO: 183707 - DNA, 201 bp, Homo sapiens
ggagggaaaccctaaatcacaccaggtatttcaaacagagggtttttattgaagggaatccattacacagtgatgaaaggctgtcagtgcaaaagtgggaygctaaggtagccaaaaatggcaggaagtggtgaccacacctggggctggggtaacaaaatggaataggaggggttatggtacctagaagtctgtaggagg

SEQ ID NO: 183708 - DNA, 201 bp, Homo sapiens
ctcatgtgaaaaataaagataattataatacctattgatataaatcacagtccaggagggaaaccctaaatcacaccaggtatttcaaacagagggttttwattgaagggaatccattacacagtgatgaaaggctgtcagtgcaaaagtgggacgctaaggtagccaaaaatggcaggaagtggtgaccacacctggggc

SEQ ID NO: 183709 - DNA, 201 bp, Homo sapiens
agcacactcactaattagccacatgaccttgggcaatttgtaccttggtctcctcatgtgaaaaataaagataattataatacctattgatataaatcacrgtccaggagggaaaccctaaatcacaccaggtatttcaaacagagggtttttattgaagggaatccattacacagtgatgaaaggctgtcagtgcaaaag

SEQ ID NO: 183710 - DNA, 201 bp, Homo sapiens
attggaggtatggtgggccaaaaggcaactttttgggtgcgaaaacagaaatgtctgtgctgacttagctctgtgggtcttcaggcttgagggtggggccyttactggggaaccaccctcttctacccagtgcttccctgtcttctgtctgtatcaataccacacaactgtgtgagtccacaggactctgggcctgccact

SEQ ID NO: 183711 - DNA, 201 bp, Homo sapiens
tttcagtctcccaacccaaccctcggcctagttcctctgcctctgcctctccagccccgtggccattacttgagttatgcctccatcatttctttcctcartgtaattgacacaacttccttattggtccccctgtctgtttctctcccttagacccattattcaccgtgcactcagaggagttgtccctaaaactcttgt

SEQ ID NO: 183712 - DNA, 201 bp, Homo sapiens
gaaccgatgcacacagtgcacagattggcaccaatccataaagcatgcttagaggaacatttctccacattgtcttggcctggggccattgaaagttttgtttttttttttttaacaatgttattaaggtaaaatgtacatatcacagaatccacctattttaagtgtgcaatcccatgactttagaaaacctattgaatt

SEQ ID NO: 183713 - DNA, 201 bp, Homo sapiens
ctaattcccaatgtagtggttttcatgtgcgtccgtgtgaggagaccaccaaacaggctttgtgtgagcaacatggctgtttatttcacctgggtgcaggmgggctgagtcccaaaagagagtcagagaagggagataggggtggggccattttataggatttgggaaggtaatggaaaattacagtcaaagggggttgtt

SEQ ID NO: 183714 - DNA, 201 bp, Homo sapiens
cgttaagacacagctagaaggcgccatcgatgaagaacaaaacctcactagacactgaatctgcaggcaccttgatcgtggatttcccaacctcaattgtragcaataaattgctgttgtttataagttacccagtctgtggtaatttgttatagcagcccaaactaagacagattttataagttttacaggtttgcaggc

SEQ ID NO: 183715 - DNA, 201 bp, Homo sapiens
gttccttcagcttcttcaagtcttttttccaatgtcacctctcagcaagctcttctcagaccattctattaaaaactggaagtctcctacagcacactctktgtccctctttccagctttgggtgtctccttagcaattatcatctgacatactgtatatttcactatatgttttattatctgtcttctcccactagaatg

SEQ ID NO: 183716 - DNA, 201 bp, Homo sapiens
gtccctctttccagctttgggtgtctccttagcaattatcatctgacatactgtatatttcactatatgttttattatctgtcttctcccactagaatgcrttccacagagacaagattttttccttgtgtttttcttactctgcttcccaagcacttagaagaacagtgccaggtagacaaataaggacacaataaatac

SEQ ID NO: 183717 - DNA, 201 bp, Homo sapiens
gcaattatcatctgacatactgtatatttcactatatgttttattatctgtcttctcccactagaatgcattccacagagacaagattttttccttgtgtktttcttactctgcttcccaagcacttagaagaacagtgccaggtagacaaataaggacacaataaatacattattgaacgaatgaattctgagtcctcag

SEQ ID NO: 183718 - DNA, 201 bp, Homo sapiens
tacccaacaccttcaagcaggattttgttccaagatgttctagctaaagacttgctttctatgggcccttggaaatcactgtatatgtcattgagttcccygggcctatgcttgagaaatacatgaataagatgttagaaatacctagaacagtgcctgcaatgtcataaacaatatatttaccttttccttcctgtttcc

SEQ ID NO: 183719 - DNA, 201 bp, Homo sapiens
tttagcgccttcttgctgtgtcatcttatggtagaagggcaaaggaagagagagagagacagagagaagagttaaactggcagcctcaaggctttctttctttttttttttttttttgacagggttttgctctgtttcccaggctggaatgcagtggtgtaatcatggctcacttcagcctcagcatcctgggctcaagca

SEQ ID NO: 183720 - DNA, 201 bp, Homo sapiens
ctctcttcaggcaagatacggcaggggcagaggcagccctaggggaatgagggaggatttggaagaagctcgtttttcagttcctttgcataagggagggygtcatctcttaaactcttcccacaaactgagtaggctctatggataagcctcttaatccatctggacaccccttcctgacacttcagagcagtcgatact

SEQ ID NO: 183721 - DNA, 201 bp, Homo sapiens
gactgtcttgatcctgacacaggaaggggaatgcgtttgatgggatctttctgtctctctgttgggggggcacaaaataagaatatcagttaaggctgtcactgacagctgaatggctcatcggtggctggttgggaggatgatgatattagtagcaaagacagtttacttgttacgtgtaggaactgttctaaagtatca

SEQ ID NO: 183722 - DNA, 201 bp, Homo sapiens
tactttgttgcccactgataatacataaactctaaaatgtttttccttgggcgatcattcattcataggcatttgctgttcacctgtgcttgtgctggacytgagagccacagagatcttcacacatagctcctgcttgggggagctgaagatgtatcacagagaagaccgtagcaatacccttttgctgatccagccaga

SEQ ID NO: 183723 - DNA, 201 bp, Homo sapiens
aacacattcaaacattgaaaaaacaaaacagtagcaattctcaggaagcagatgccgaaaacagccgtatctcaacagttggggtggctgtgggttcccartgtaatcgatgaggttcagtatgctcacgttgtattgtttttaaacttcacccatgccccttgcacaacatgtgctcattttgatccagggagctcagaa

SEQ ID NO: 183724 - DNA, 201 bp, Homo sapiens
cacaagggagttatatcacttgcttaatgtcacaccattaaataatagagattgcaaggcaacctctgtctgacccagtgatcttttactttccagtacamctcacttccctttgtaagtgaaagtgaatatgaaaatgcaaagggatgaagtgtattgggcatagtttggagaagctagcatagagtactggggtactgc

SEQ ID NO: 183725 - DNA, 201 bp, Homo sapiens
actgtcttgatcctgacacaggaaggggaatgcgtttgatgggatctttctgtctctctgttgggggggcacaaaataagaatatcagttaaggctgtcactgacagctgaatggctcatcggtggctggttgggaggatgatgatattagtagcaaagacagtttacttgttacgtgtaggaactgttctaaagtatcaa

SEQ ID NO: 183726 - DNA, 201 bp, Homo sapiens
ctgtcttgatcctgacacaggaaggggaatgcgtttgatgggatctttctgtctctctgttgggggggcacaaaataagaatatcagttaaggctgtcactgacagctgaatggctcatcggtggctggttgggaggatgatgatattagtagcaaagacagtttacttgttacgtgtaggaactgttctaaagtatcaac

SEQ ID NO: 183727 - DNA, 201 bp, Homo sapiens
tgtcttgatcctgacacaggaaggggaatgcgtttgatgggatctttctgtctctctgttgggggggcacaaaataagaatatcagttaaggctgtcactgacagctgaatggctcatcggtggctggttgggaggatgatgatattagtagcaaagacagtttacttgttacgtgtaggaactgttctaaagtatcaact

SEQ ID NO: 183728 - DNA, 201 bp, Homo sapiens
aagtgagactgagaagaaagaaagccccttaaagagtgcactatgggctgagcagggtggctcacgcctgtaatcccagcactttgggacactgaggcggrtggatcacaaggtcaggagatccagaccatcctggccaacatggtgaaaccccgtctctaccaaaaatataaaaaattagccgggcatggtggcgcatgc

SEQ ID NO: 183729 - DNA, 201 bp, Homo sapiens
tatttaccttttccttcctgtttcctcatgttctcttcctctacagaagcacctagaggcagtgacctgtggtagacaacagcatgaagccactaattctrttcttggagcccagcgtccatctggcttagtcagaatcatggcttttggagacagggacagaggtctatgggaccttgcagaattgtgttgtttcgaagt

SEQ ID NO: 183730 - DNA, 201 bp, Homo sapiens
taatcccagcactttgggacactgaggcggatggatcacaaggtcaggagatccagaccatcctggccaacatggtgaaaccccgtctctaccaaaaatayaaaaaattagccgggcatggtggcgcatgcctgtagcacctgtagttctagctactcaggaggctgaggcaggagaatcacttgaacccgggaggcggag

SEQ ID NO: 183731 - DNA, 201 bp, Homo sapiens
tctacacacacaattatgtagtctatgaataatgaaagctttattacttcatttccaacatttatttcttttatttctttttcttgcctcattgcattggstaaaactaccagtagaattggggaaatcagggaaaagtgtgtagtattttaccattgattatgatgttagagtaatgtgttagataccctttgtcagatt

SEQ ID NO: 183732 - DNA, 201 bp, Homo sapiens
attagccgggcatggtggcgcatgcctgtagcacctgtagttctagctactcaggaggctgaggcaggagaatcacttgaacccgggaggcggaggctgcrgtgagctgagatcgcgccactgcactccagcctgggtgacagagtgagactctgtctcaaaaaaaaaaaaaaaaaaaaaaaaaaaaaaaaaaaaaagagt

SEQ ID NO: 183733 - DNA, 201 bp, Homo sapiens
gaacttttctaaattaacttgttaatttttatcataatttgagatttttaaagaattttctacacacacaattatgtagtctatgaataatgaaagctttrttacttcatttccaacatttatttcttttatttctttttcttgcctcattgcattggctaaaactaccagtagaattggggaaatcagggaaaagtgtgt

SEQ ID NO: 183734 - DNA, 201 bp, Homo sapiens
agcttctcctagcccctcctttggaggtgacagactcttgattcatgctttctgaggactcctgattagcaggcaaggaaaggaaggctcttctagaatgwttactctgctcttaattttgggaagtggcccagcaaagagtaatcttgaaaatgttgaggttttgggggataagggggagccggggcagacagagtgttg

SEQ ID NO: 183735 - DNA, 201 bp, Homo sapiens
aatggccccactgcactccagcctgaatgacagagcaagactccatctcaaaaatataaaataaaaataataaaataaaacaaaaaggggtttctgactattttttttgtggctacatcaagaattctgtcccttgtcgtcatgtgcttgtagtctgctctgtaaatcatttgaatctgacagtcctttttgattgcttgt

SEQ ID NO: 183736 - DNA, 201 bp, Homo sapiens
taatcctaattgttttgttgagaatacacttctcctaccacagtgaagtgtcagctgtatcacagatcaagtgattatcaatatgtggatttgtttcttgyctccattgtttcttgaactgtttttcaatttcttaattactgtagcttaatacctcattttcttaattattgtagcttaataataaatcttaatttccta

SEQ ID NO: 183737 - DNA, 201 bp, Homo sapiens
aaggaaaggaaggctcttctagaatgtttactctgctcttaattttgggaagtggcccagcaaagagtaatcttgaaaatgttgaggttttgggggataarggggagccggggcagacagagtgttgcagatcataaaacttcatctggtgctaagttgttattgaattatgcatttctgaatgacttcactggttgcaac

SEQ ID NO: 183738 - DNA, 201 bp, Homo sapiens
ttgtccaaagtcatagaatggccagtggtacggtcaggaattacacttagattttctgactctcagcttttgacttttggccacatcatgatgaataaaaragagagagagagagagagagcattgtatatacagctggggatgttctagtggaggcgggtgtggctcaggggagcaggcagcatgggtttcagaaaacaa

SEQ ID NO: 183739 - DNA, 201 bp, Homo sapiens
ctatagtaccctggaattgactttgtttatagtataaagtagggcacaatgttgaaggttattttttcatatggatgcctaaataatcctaattgttttgktgagaatacacttctcctaccacagtgaagtgtcagctgtatcacagatcaagtgattatcaatatgtggatttgtttcttgcctccattgtttcttgaa

SEQ ID NO: 183740 - DNA, 201 bp, Homo sapiens
aggctgagctcttaaatttatttgctggtaggagttttggcaggagtacacactgacatgactgtagactgtcttgatcctgacacaggaaggggaatgcrtttgatgggatctttctgtctctctgttgggggggcacaaaataagaatatcagttaaggctgtcactgacagctgaatggctcatcggtggctggttgg

SEQ ID NO: 183741 - DNA, 201 bp, Homo sapiens
aaaaccacagtgaaacatcactacatacttatcagaatggctaaaaagaaatagtgacaatagtagtacaggtgaggaactggaccactcatgcattgatrgtagtaatgtaaaatgatgtagccgctgtggaaagcagtttgatagttctgaattccatatgacccagagattgaactccaaggaatttaccccagaaaa

SEQ ID NO: 183742 - DNA, 201 bp, Homo sapiens
ttcttagtggcagccttgcagaaacagaccatttggcactcacttgtctccccaggctgaattcccagacatattcaatattatctggacaggcacactgytggtgtaaacagtctggttgctgagttggatttaataaccttgtagttccctgcatctttcaaagcaagctctatgctctcccatctcagctccatgtta

SEQ ID NO: 183743 - DNA, 201 bp, Homo sapiens
gtgagccaagatcatgccacttccatccagcctgggcgacaaagcaagacactgtctcaaaaaaattttttttttttaaagaagtctctatacttaaagaytggtgcccagtgaatgaagttcccagtgaatggtaactagtgttacactctttataccaaacaatgtgactaaaatgtaagcaaaaatgtatagacaaag

SEQ ID NO: 183744 - DNA, 201 bp, Homo sapiens
caagtaacacaaggtgcaacatgcccatttgattaagaacttgttagacttggtgagggcaggtacagaggtgtggtatgggcagaaaccagattgtagcrggtaaagaatgaactccatctgtgtagacaacacttttatgatgtttggctgtcaaaaggagatatcatataggtccatagctgctgacagatggcaggt

SEQ ID NO: 183745 - DNA, 201 bp, Homo sapiens
gttggcaactgaaggtctaagatggggtcagggtgagaggaggcagttgtgagctggtgagagggagatcaccctggagtcctggtttgagatctgagaaraggtgtgggcatgtgagtgtggaacggagaaggaggttcactcagctgtagggaaatagccataaagcctcagcaaccaggagacgctgcttggaagcgg

SEQ ID NO: 183746 - DNA, 201 bp, Homo sapiens
aaatcttgactgagccgggctacttcttaagtgccagttccaccctgcccagtgcccatcctgagctgccatccaccaatagggaagtggtgcaggctgtygaatctcattctcttgtgttctttggtttctctcttaggaaaagcacctcattttctgcgactccaaaacgtggaggtgaatgtggggcagaatgccaca

SEQ ID NO: 183747 - DNA, 201 bp, Homo sapiens
ggcaggaggaaatcagctggattgtgactaatacagcccaaagcaaaaatttgcataattcaaactggatctacgttaattaggacacatgatttgcatawtgcaggccgctattgagtataactcgagccaggctggtaacaaggaaaaaagctcttgtttcctctaaattgttcaagccagaaatgagagcgtcatccg

SEQ ID NO: 183748 - DNA, 201 bp, Homo sapiens
attaggaattgagcatcttttgggaccactattctgtgtatgatactgaaatgagagatttcccttatctcccttgcaggatgtgaaacgggtgtggctcrctccttcagttgcccactgtaccagaagaattggatcacatgtgggctcaaaggatgagtgcgaggttttatccgtggaggtggctctcagtgagatgga

SEQ ID NO: 183749 - DNA, 201 bp, Homo sapiens
tgcaggatgtgaaacgggtgtggctcactccttcagttgcccactgtaccagaagaattggatcacatgtgggctcaaaggatgagtgcgaggttttatcvgtggaggtggctctcagtgagatggatggggagccagaaggggaggatggagtgggaaggtggtcttcccctggagttgggccgcccagtggcagattct

SEQ ID NO: 183750 - DNA, 201 bp, Homo sapiens
gtttgctgagaatgatggtttccagcttcatccatgtctctacaaaggacatgaactcatcatttcttatggctgcatagtattccacggtgtattatgtsccacattttcttaatccagtctatcattgatggacatttgggttggttccaagtctttgccatagtgaatagtgctgcagtaaacatatgtgtgcatgcg

SEQ ID NO: 183751 - DNA, 201 bp, Homo sapiens
tagaagtctgtaggaggagcacagcagggctgattctgagacctctgaggagggagaccccacagattgtactgcagctgtaaggggcatggcctaggttmtattagttccttcagaaagatactgtgccatgggtgctacaaagaccagaaaagatgaaggcctggagcgtagcagcccctgttgctggaatgatgctac

SEQ ID NO: 183752 - DNA, 201 bp, Homo sapiens
taggaggagcacagcagggctgattctgagacctctgaggagggagaccccacagattgtactgcagctgtaaggggcatggcctaggttatattagttcyttcagaaagatactgtgccatgggtgctacaaagaccagaaaagatgaaggcctggagcgtagcagcccctgttgctggaatgatgctacaaggaccttg

SEQ ID NO: 183753 - DNA, 201 bp, Homo sapiens
aaatagctggacttagtggtgggcgcctgcaatcccagccactcaggaggctgaggcaggagaataatttgaacccaggaggtaggggtttcagtgagccragattgcgccattgcactgcagtctgggcgacagggcgagacttcatctcaaaaaaaaaaaaaaaaagaatattagcatccctgaactctaacttttaga

SEQ ID NO: 183754 - DNA, 201 bp, Homo sapiens
tgggcgtggtggcgggcgcctgtagtcccagctactcgggaggctgaggcaggagaatggcgtgaacccaggaggcggagcttgcagtgagccgagattgygccactgtactccagcctggacgacagagcgagactccgccttaaaaaaaaaaaaagaattatccgcagacggacaagcacctgtgagggcataagatgt

SEQ ID NO: 183755 - DNA, 201 bp, Homo sapiens
ctgtgtccatgtgttctcattgttcaattcccacctatgagtgagaacatgtggtgtttggttttttgtccttgcgagagtttgctgagaatgatgatttycagcttcatccatgtccctacaaaggacaggaactcatcattttttatggctgcatagtattccatggtgtatatgtgccacattttcttaatccagtct

SEQ ID NO: 183756 - DNA, 201 bp, Homo sapiens
ctatctgcccttgggtataggtacagagacagacatgccatatatatgtctgtatattatgtatatatattcatgtatatatataaatacacacacacatacacacacacacacacacacatatattcaggtattgagactgtgggtcacaaaaatttatataatttagaaattgttgtacccattggagtcaaatgtgaa

SEQ ID NO: 183757 - DNA, 201 bp, Homo sapiens
gtttgatgggatctttctgtctctctgttgggggggcacaaaataagaatatcagttaaggctgtcactgacagctgaatggctcatcggtggctggttgrgaggatgatgatattagtagcaaagacagtttacttgttacgtgtaggaactgttctaaagtatcaactataataatttatataatctttatggcaatta

SEQ ID NO: 183758 - DNA, 201 bp, Homo sapiens
tatctgcccttgggtataggtacagagacagacatgccatatatatgtctgtatattatgtatatatattcatgtatatatataaatacacacacacatacacacacacacacacacacatatattcaggtattgagactgtgggtcacaaaaatttatataatttagaaattgttgtacccattggagtcaaatgtgaat

SEQ ID NO: 183759 - DNA, 201 bp, Homo sapiens
gtttgggaggagtctgcccttattaatgggattagtgctcttatgaaagatgctggagggagcttgttcaccccttctgccacgttaagacacagctagawggcgccatcgatgaagaacaaaacctcactagacactgaatctgcaggcaccttgatcgtggatttcccaacctcaattgtgagcaataaattgctgttg

SEQ ID NO: 183760 - DNA, 201 bp, Homo sapiens
agatatgatgagatatttcaccctcccgcctcggcctcccaaagggctgggattacaggcatgagccacccccgcctggccatgcatgatctttgcagtgrgtcttctgaagacagccaggagctctgtgagcttggaagcagatcctatcctagtcaggccctgagaggactgtagccacagtagacatcctgtttgcag

SEQ ID NO: 183761 - DNA, 201 bp, Homo sapiens
actgacagctgaatggctcatcggtggctggttgggaggatgatgatattagtagcaaagacagtttacttgttacgtgtaggaactgttctaaagtatcractataataatttatataatctttatggcaattaccatgaggaagatgttactatatccccagtttacaggtgaggcagtttagacacaaagaggttaag

SEQ ID NO: 183762 - DNA, 201 bp, Homo sapiens
ctgagttggagctgttacctttcaggatgaagagttcagtcctgcaaccagttctcaccatgaagtctgtctcagcctggctctcacaatttgtagcagcycccatgccacccaggctagatgcctaaatctttcaaagactcacagagatctgtgtgacccacacacacccctttcaccccatctcccactctcctctcc

SEQ ID NO: 183763 - DNA, 201 bp, Homo sapiens
tttctaactgaaaaattgataaattgaaccttattaaagttaaaatttttgctctgtgaaagctcaggcaaggaggatgaaaagataagctacagagtgaragaaaatatttgccaaccatatatatgacaaaggactaatgtctagaatatatcaagaattcttaaaactcaatgacaaaacaattagaaaatttgcaaa

SEQ ID NO: 183764 - DNA, 201 bp, Homo sapiens
aatttccagagttgggaaacagctcccatagaatcagaatctgataacaaggaagcatgagctataaacaatgcagtttttcattgaagcacagatttttcccccccacaaagccatactaataaatgccatcaacctagataaagcatgtggagagacaagagaggccaatcccagggaatgccaccaccataaggttgg

SEQ ID NO: 183765 - DNA, 201 bp, Homo sapiens
tggtaggaaatagaatcaagcgtagttgtgtgtttgtgaaccaaatatttgactgaacaccatttcatcaggaatctgaatggatttgtgagctctgatayatttgagtataattaaaagtaaaaagttaatacagacctgacatcaaaagcatgatttctaactgaaaaattgataaattgaaccttattaaagttaaaa

SEQ ID NO: 183766 - DNA, 201 bp, Homo sapiens
acctacctcaacattataggttgatgctgaaaatggtctactcctatttggtaaatagctactccaatttggtaaacatcatcctgtttgcccagatcagaaaaacctgagagtcatttggaatccacccctcaccatccttagcctttacacccaatcagccatactactgtgcatgttccctccttatcctttagatct

SEQ ID NO: 183767 - DNA, 201 bp, Homo sapiens
actgaaggccatgaatgacaggaggagggagtcactgagggtcattgtagaggctggaggctgcaggctgccaataattggtctttaaatatcaccacagmagtgatggtcttatgcagatgttgccagattttcttgcatgagagatatcaagttttagccctttgaagatttacagtagtaaaagtcacatattaagta

SEQ ID NO: 183768 - DNA, 201 bp, Homo sapiens
atttctttttttcttaaaaagatggagtcttgctctgtcacccaggctggagtgcagtggtgcaatctcggctcactgcaatctctgcctcccagtttcargtgattctcctgcctcagcctcccaagtagctgagattacaggggtgcactaccatgcccggccagtttttgtatttttaatagagacaaggtttcacca

SEQ ID NO: 183769 - DNA, 201 bp, Homo sapiens
agtgtaacagaatctcagaaatattatcacatcgcttttgctgtactctgctagaagcgagtcactaggtccagcccactctctaagtgatagggttactsaaggccatgaatgacaggaggagggagtcactgagggtcattgtagaggctggaggctgcaggctgccaataattggtctttaaatatcaccacagcagt

SEQ ID NO: 183770 - DNA, 201 bp, Homo sapiens
tagtgtaacagaatctcagaaatattatcacatcgcttttgctgtactctgctagaagcgagtcactaggtccagcccactctctaagtgatagggttacygaaggccatgaatgacaggaggagggagtcactgagggtcattgtagaggctggaggctgcaggctgccaataattggtctttaaatatcaccacagcag

SEQ ID NO: 183771 - DNA, 201 bp, Homo sapiens
ggggaaagggaaggggaagagagaaggagagaggcaagtaaaatggtagacttagtgtaacagaatctcagaaatattatcacatcgcttttgctgtactstgctagaagcgagtcactaggtccagcccactctctaagtgatagggttactgaaggccatgaatgacaggaggagggagtcactgagggtcattgtaga

SEQ ID NO: 183772 - DNA, 201 bp, Homo sapiens
aaatttactgagttgtactcagagactgcagtctgctccatttctagaattaaacaagttttcttttaagccaagtagatagtatgacagcagctatagamattaagtaacaaaaatgtgttgctatattctaacaaaactttacaaagatagagcaaaggttgaatttggcccatggccatgccaaactctttcctgaag

SEQ ID NO: 183773 - DNA, 201 bp, Homo sapiens
accaacatctcgtgcttgggcttttgattcaaccccctaactaatctccttgctgcagccacatcctctgtgacccaagtcacatattgcttgttgatgcrcagctccctaagtgctctcctataccaaagggtcatgaagcccagaagccacgtttcccagattccttcacctgcagggtcccagtgagatcccactgat

SEQ ID NO: 183774 - DNA, 201 bp, Homo sapiens
ggctgtgatgggaatgagaaaaagctgaaccaactgtgacttgtccaacccgtgagggcggggcaggtggtgctactgcagggaggctctgtctgttaccstggcccttctcgccttgatggcttagaaacctcattctggccatctatgcagtggacagatacccacagcatgcagacaatgccatagtttccagtcagc

SEQ ID NO: 183775 - DNA, 201 bp, Homo sapiens
ctctcttatccaaccatgaccataagactcttggttgactactagtccatgatgtcatcaaggaattgccctactgtcttcagaaatcacagaaaaggccrggtgtggtggctcatgcctgtaatcccagcactttgggaagccgagtcaggtggatcacctgaggtgaggagttcgagaccagcctggccaacatggtga

SEQ ID NO: 183776 - DNA, 201 bp, Homo sapiens
gattccatttgtttaacattttccatctgtatttataggtaaaatttatctctagttttatttttgcattatttgtatcctgttttggcatgaaaattatrttggatatataaaatgaatggaaaagctttatttttatatggactgagataatttaaatattatcagagttatctttccttaaaggatatatttttaaaa

SEQ ID NO: 183777 - DNA, 201 bp, Homo sapiens
ttgacccctccataattcccacctctgcaacacacatctcaccttacttccttgcaatcacttgcttatatgcattctcttattgcactaccagtcagacrcaaccatgtgaccttgggctaatcagttaaattttcatgcctcagtattcacatatgtaaaatgggaatagtgatttttacctcccattctgctaaggga

SEQ ID NO: 183778 - DNA, 201 bp, Homo sapiens
atgcaagtttacgaaataatataagcaatatatgcaaaatgcaaaaatcgtatacctagaatgactgaaactatgtaaaaatgagtaggaaaaagaaaagrggggaggtaacacatgaaagtattaagatttcttgggtaatcagactaagactttttgttttcttttatgtattatctacattctctaccgtaagtattg

SEQ ID NO: 183779 - DNA, 201 bp, Homo sapiens
gggtcatgcttgctatgaaaaaaaagtcatatggaagtcccatatgattttttaaatgatgtccctgaattagacactggaatagttttgccttaaaaatcaatgatcagttttactccacattgctgtctctttagtaaaaagaaaaaatgtaatctggcacgggtaatgcccatggctccgagttgggttaaagacaac

SEQ ID NO: 183780 - DNA, 201 bp, Homo sapiens
gctccgggttataatgaggactgactccatcccatcccactttcctttaaaatccctacaaatatgtagtcaaagctggaaacatgggaccacacctggcrgccaagctattgtgtgaatccgggaggaatttcctctgattacaagacacaagaagctgaaatgagaatcgtaatcagtggttgatgctgaatcatgttt

SEQ ID NO: 183781 - DNA, 201 bp, Homo sapiens
atgccatagaacaattcagtgaaagctcttcactgaaggaccaaaatgaaggggcccagctacatggttctctgcaagtcagacctaagccagatgtaggktttcagaatctttagtattatataaacaagttttctctcctctctgagtgtccatgagctggaggcttttagcccagaaccagtgaaatagctattctga

SEQ ID NO: 183782 - DNA, 201 bp, Homo sapiens
actcaatataaaattatttaaggcaaaaggtgaaagttcccacttctcaaaggtacctgttaacatttttatgccattccagacctttctatgcataaacwtattctacgtaagtggcatcaaccagtatatactctgagacctgcttcttctcacttaacagcatacagttgtcatatttccatggaaatatgcttaaat

SEQ ID NO: 183783 - DNA, 201 bp, Homo sapiens
aataaaaaatgacacattcattcacttttctcctcggcctcataacattgaaacacacacacacagaaacacactttttttcataacttaatttgatagcrtgctaggaaaaaaacttaaaaaggcaaagaagtggaagaaaggaatgctatagagagggaaagaaaggggtagggagaaagtttgaatcctatttatact

SEQ ID NO: 183784 - DNA, 201 bp, Homo sapiens
aaaatggagctatgaaaaaatagtatggagttctctcaaaagattaaaaatagaattaccatgtgacccagcaatctcacttctggatatatacccaaaaraattgaagttagaatctcaaagagatatctgcattcccatattcattgcaacatgatttacaatagccaagacatcgaagccacctaaatgcccactggt

SEQ ID NO: 183785 - DNA, 201 bp, Homo sapiens
cagtactcaaactgggacatgaggctgccaacctctcagttggatgcatatgtcctctattttcttctggatgagcagaagaaataactagaacctgactycttggagtttactagttcccaagttctttgtatgtgtccagatataagcctgagctggaaacacaagccgcaggggtggagcgcagggttcaccttgttc

SEQ ID NO: 183786 - DNA, 201 bp, Homo sapiens
tgcaatctcggctcactgcaatctctgcctcccagtttcaagtgattctcctgcctcagcctcccaagtagctgagattacaggggtgcactaccatgccyggccagtttttgtatttttaatagagacaaggtttcaccatgtttggccaggctggtctccaactcctgaactcaagtgatccacctgccttggcctccc

SEQ ID NO: 183787 - DNA, 201 bp, Homo sapiens
gttttagtaaagatggggttttaccattttggccaggctgatcttgaactcctgacctcagatgatccacccacctcagcctcccaaagtgctgggattayaggcatgagccactgtgcctggccatattatcccttttttaaggatgagggtgaagcttggagaaggaagtcacttgtccatggtcacagagctaatgag

SEQ ID NO: 183788 - DNA, 201 bp, Homo sapiens
gctatatctacttaggttgtgtccaaggactgtgagcccaagccagggaagaatgagaaggctgggctactgccgattgctcactgttagggtagtcattsagtacacatagaatccctgtggcccttggtagagaaaatttagggacttttatgacttgaatctttcattgtcaaggtaaaataaatttgaggaccatga

SEQ ID NO: 183789 - DNA, 201 bp, Homo sapiens
ttggccgggcacagtggctcaggcctgtaatcctagcactttgggaggccgaggtgggcggatcacaaggtcatgagattgagaccatcctggctaacacrgtgaaaccccatctctactaaaaaatagaaaaaattagccaggcatggtggcaggtgcctgtagtcccagctactcgggaggctgaggcaggagaatggc

SEQ ID NO: 183790 - DNA, 201 bp, Homo sapiens
agtggtaagccaaggtcaaggaaagcttgaaccctggccccaaggtagtcctttttgatcctcagtccattattgtatgaaaacagtgttgcgcataaatygtagaaagtttaatcagcattgaacatctactctgtgcctagccctgtgctacacgaaagtaagtcgtcatgaagcagttttgaaaagaaaaataggcat

SEQ ID NO: 183791 - DNA, 201 bp, Homo sapiens
tactaaaaaatagaaaaaattagccaggcatggtggcaggtgcctgtagtcccagctactcgggaggctgaggcaggagaatggcatgaacccgggaggcrgagcttgcagtgagctgagattacaccactgcactccagcctgggcgacagagccagactctgtcaaaaaaaaaaaaaaaaaacaacgacaccaaaaaaa

SEQ ID NO: 183792 - DNA, 201 bp, Homo sapiens
gctgaggcaggagaatggcatgaacccgggaggcagagcttgcagtgagctgagattacaccactgcactccagcctgggcgacagagccagactctgtcaaaaaaaaaaaaaaaaaacaacgacaccaaaaaaaaaaatcccctttcctttagaaattacccactcttaggtatgtctttatcagtaacatgagaatgga

SEQ ID NO: 183793 - DNA, 201 bp, Homo sapiens
ctgaggcaggagaatggcatgaacccgggaggcagagcttgcagtgagctgagattacaccactgcactccagcctgggcgacagagccagactctgtcaaaaaaaaaaaaaaaaaacaacgacaccaaaaaaaaaaatcccctttcctttagaaattacccactcttaggtatgtctttatcagtaacatgagaatggac

SEQ ID NO: 183794 - DNA, 201 bp, Homo sapiens
tgaggcaggagaatggcatgaacccgggaggcagagcttgcagtgagctgagattacaccactgcactccagcctgggcgacagagccagactctgtcaaaaaaaaaaaaaaaaaacaacgacaccaaaaaaaaaaatcccctttcctttagaaattacccactcttaggtatgtctttatcagtaacatgagaatggact

SEQ ID NO: 183795 - DNA, 201 bp, Homo sapiens
gacacaaaaaaagtctggtaatattaagctacattattagctatctatggagtatgtttgatgtcttagttgtctatgacctatgttacaaaataaagtgycttaagaaacatttattatctcacaagaatgccttaggagctttagtgcagcttgatagctggttctggctggagtcactcagaaggctgcaagcagggt

SEQ ID NO: 183796 - DNA, 201 bp, Homo sapiens
aactcatgggtccagcaatcagagaatagttagtgtgataacctgatggattgttatgcaaatattaaagacaatgatgataaagctcaagcagtatatgaaaaaaaaaatccttacaatataagtgaaggaagaaaaatgaatctacattgggtctatgtgttattataacaacacaaaaaatgtgtcagtacataaata

SEQ ID NO: 183797 - DNA, 201 bp, Homo sapiens
cagtgagctgagattacaccactgcactccagcctgggcgacagagccagactctgtcaaaaaaaaaaaaaaaaaacaacgacaccaaaaaaaaaaatccyctttcctttagaaattacccactcttaggtatgtctttatcagtaacatgagaatggactgatacaggatgtgcccacctgcagggctgtggcctggcct

SEQ ID NO: 183798 - DNA, 201 bp, Homo sapiens
gtaaaataaaacactgggttaaccaaatgtttggacacacttgaagtgcattaaaatgcctcctttgacagtgtccttcaataacagtaacccgtatcctyttatgtttatctgaaacagattcagccacatcttctccaggcttttgcctactttctaagcttcaccttcaatggtgattctgaaactgatgttaaagga

SEQ ID NO: 183799 - DNA, 201 bp, Homo sapiens
tgcgcatgtttatttaccactgtaaaataaaacactgggttaaccaaatgtttggacacacttgaagtgcattaaaatgcctcctttgacagtgtccttcmataacagtaacccgtatccttttatgtttatctgaaacagattcagccacatcttctccaggcttttgcctactttctaagcttcaccttcaatggtgat

SEQ ID NO: 183800 - DNA, 201 bp, Homo sapiens
agaatccaaaagatggaaaatatagcaagagtccgggtcaagagcgctgatgttccttgcaaagaagaggcaggggatggtgtggatggatatcaagtcartgggtaaaaagttagaagtcagcccctctttccctcttgcctcttgaagatgtgggtgtctgctgggattacatgggtgcatgttgaaagggcggcagtt

SEQ ID NO: 183801 - DNA, 201 bp, Homo sapiens
ggccagaagttgcgcatgtttatttaccactgtaaaataaaacactgggttaaccaaatgtttggacacacttgaagtgcattaaaatgcctcctttgacwgtgtccttcaataacagtaacccgtatccttttatgtttatctgaaacagattcagccacatcttctccaggcttttgcctactttctaagcttcacctt

SEQ ID NO: 183802 - DNA, 201 bp, Homo sapiens
caagaccaagacaggtgcttccctcctctcttctctccacagaacagaccagattcagatccatctactgggacccaggagggaaagagggctgcgctgayactctccccacaaagccaccattattataatcatcacagcacttagcaagtaacctggagtgctggtttcactggggtgaacaagccagtcaaagccagc

SEQ ID NO: 183803 - DNA, 201 bp, Homo sapiens
cacgcaaatcagtgtttgccagaagtgaagaagagggccggggagagagatggatattacatagacaagtgtgtcttctgctaaggaagatacacattttyaccatttttgaaggcatatccatcaagtagtaaaattaaaaaaaaaaaaaaaagacctgtcacatcttcatagactttgtgcatttttaccttcctcctt

SEQ ID NO: 183804 - DNA, 201 bp, Homo sapiens
catagaatatacagaggaaatgtataaaatggccagaagttgcgcatgtttatttaccactgtaaaataaaacactgggttaaccaaatgtttggacacayttgaagtgcattaaaatgcctcctttgacagtgtccttcaataacagtaacccgtatccttttatgtttatctgaaacagattcagccacatcttctcca

SEQ ID NO: 183805 - DNA, 201 bp, Homo sapiens
ggacgtactgtggtccactgcctgtgagtactagggaggtgtcaccagggcaatagggtggtgggtgatagagcatccttgcagatgctgctggccacatrccccagtcctaggcaggcctggctataccacaactcaacatccctcaaaggctagtggcagtacattcaaaggaattatgatcctttaatggaacggggc

SEQ ID NO: 183806 - DNA, 201 bp, Homo sapiens
tgtgtgtgaagacccagtgtctgccccatggccgtgtctgttttgtattgagttccatgtgtgcaaacatccatccatatcttactgaccatttccttacyggttatcttcctttcgagtaatttgcaagttaatgtcttccttgatatcaggatcatagaatatacagaggaaatgtataaaatggccagaagttgcgca

SEQ ID NO: 183807 - DNA, 201 bp, Homo sapiens
gcattgaatatagctattgaagaaatactgattcaggtacttacatgcaaacccttaaagtagggcatgaatgggatttaaaagggttttcaggccaggcrtgttggctcatgcctgtaatcccagcactttgggaggctgaggccagcggatcacctcaggtggtctggagttcaagaccagcctggccaacatggtgaa

SEQ ID NO: 183808 - DNA, 201 bp, Homo sapiens
tgctacattaaacctgtgtgttctttgttatatgtggctttaagcagattgctttactgattaagatctagatgaggctttaggcaagaattttaagagarctttgttattgcttatatgtgttcttcctcaatgaagaatgatggcaatttcactgagaccatcaatgtgccccattgaataggccaaggtatatctttg

SEQ ID NO: 183809 - DNA, 201 bp, Homo sapiens
gtgttgttcactctggtaatccatagtatgggctcgttgttgaatgaatagatggatgaataaatgaccattccacataaaagttcatgcccttttcgtgmtaccatagtgtcccatttatgggtattgtttgtgaagatgggggatatgtatgacgtcttttagctatattcaaagctaactcagacttgcttgcatctc

SEQ ID NO: 183810 - DNA, 201 bp, Homo sapiens
tattaactgctatgcagtcctgcctcctgatacgagggaaaacagtgcattctcctttaaatgctgcacacatccatatccctatttacactattgattcttttttttttttttttttttgagaaaaaagactaattgggtcatctttattttcctagcactagcatggtacttatactttgtgacttcccaacacattga

SEQ ID NO: 183811 - DNA, 201 bp, Homo sapiens; identical to SEQ ID NO: 32275

SEQ ID NO: 183812 - DNA, 201 bp, Homo sapiens
attaactgctatgcagtcctgcctcctgatacgagggaaaacagtgcattctcctttaaatgctgcacacatccatatccctatttacactattgattcttttttttttttttttttttgagaaaaaagactaattgggtcatctttattttcctagcactagcatggtacttatactttgtgacttcccaacacattgaa

SEQ ID NO: 183813 - DNA, 201 bp, Homo sapiens; identical to SEQ ID NO: 32276

SEQ ID NO: 183814 - DNA, 201 bp, Homo sapiens; identical to SEQ ID NO: 32277

SEQ ID NO: 183815 - DNA, 201 bp, Homo sapiens; identical to SEQ ID NO: 32278

SEQ ID NO: 183816 - DNA, 201 bp, Homo sapiens
ggttgcgaaaattttctcccattttgtaggttgcccgttcactctgatggtagtttcttttgctgtgcagaagctctttagtttaattagatcccatttgwcaattttgtcttttgttgccattgcttttggtgttttagacatgaagtccttgcccatgcctatgtcctgaatggtaatgcctaggtttccttctagggt

SEQ ID NO: 183817 - DNA, 201 bp, Homo sapiens; identical to SEQ ID NO: 32280

SEQ ID NO: 183818 - DNA, 201 bp, Homo sapiens; identical to SEQ ID NO: 32282
  misc_feature (1)...(201): n = A,T,C or G

SEQ ID NO: 183819 - DNA, 201 bp, Homo sapiens
cagtaccatgctgttttggttactgtagccttgtagtatagtttgaagtcaggtagtgtgatgcctccagctttgttcttttgggttaggattgacttggygatgtgggctcttctttggttccatatgaattttaaagtagttttttccaattctatgaagaaagtcattggtaacttgatggggatggcattgaatctg

SEQ ID NO: 183820 - DNA, 201 bp, Homo sapiens; identical to SEQ ID NO: 32283

SEQ ID NO: 183821 - DNA, 201 bp, Homo sapiens
aattagctctgagaaaccacaagcaagattaaaggtaattgactttaaactttccttttcattcagtcatccaaagattgtggatacctgctgtgtttcargcactgtgcttggggctgaggattcaaagataagtaagaaatggaaatggctttggaactggaaataaaaaagacttaccttagatttcactttaatgtt

SEQ ID NO: 183822 - DNA, 201 bp, Homo sapiens; identical to SEQ ID NO: 32284

SEQ ID NO: 183823 - DNA, 201 bp, Homo sapiens
gagaaaccacaagcaagattaaaggtaattgactttaaactttccttttcattcagtcatccaaagattgtggatacctgctgtgtttcaggcactgtgcwtggggctgaggattcaaagataagtaagaaatggaaatggctttggaactggaaataaaaaagacttaccttagatttcactttaatgtttgttttataa

SEQ ID NO: 183824 - DNA, 201 bp, Homo sapiens
cccgggtgataagacctggtaccatggtggaccaccgcaccatgcacgaggagctttaatataagtctttaaacctactcgaatagtggtcttagtcaaartgaggccatattaacgtgtgggtcacagaccagcagcagcatcattatctgggagcttgttagaaatgcagaatcttgagccccactccagatttactga

SEQ ID NO: 183825 - DNA, 201 bp, Homo sapiens
gaataatagctgagtgtttctattgtcctcttaaaatggagattactatatgttgaatcacaacagaactacttttttatagactgtgaatagcatacagktccatcatgttgttgcaggcagcgccaacagaatggataatggcaagccaattattataaataatgccttgtttccctttggcccctgtgcaaatttcac

SEQ ID NO: 183826 - DNA, 201 bp, Homo sapiens
ttaaatatgacagtgttcaccccagcacctaggacagtgcctggtacaagtcatggcttcatgctagctgaatcagaatctgagttcagcagggttttttktttttgtttgtttgtttgtttgttgctattgttttgttttccttcgtggggctggggcaggtgtggcagggtatgagctcaggtgtattgcagagctcct

SEQ ID NO: 183827 - DNA, 201 bp, Homo sapiens
gggcaatttgaagagtccataaatgcctgcaagctgtgaagagctctataggaatgatacgattagagatcaattctttttttaaaaaaagttaatacttygggaaaattgctacattaaacctgtgtgttctttgttatatgtggctttaagcagattgctttactgattaagatctagatgaggctttaggcaagaatt

SEQ ID NO: 183828 - DNA, 201 bp, Homo sapiens
atgacagtgttcaccccagcacctaggacagtgcctggtacaagtcatggcttcatgctagctgaatcagaatctgagttcagcagggttttttttttttktttgtttgtttgtttgttgctattgttttgttttccttcgtggggctggggcaggtgtggcagggtatgagctcaggtgtattgcagagctcctagacag

SEQ ID NO: 183829 - DNA, 201 bp, Homo sapiens
ctcacatcagccttctgggcagaacatcgatagttcagggtcaatcttgagtacacactagctgttgggaaaccttgttgggtttccaactaggaacatayaatcaaagttacatttcctttcctttaggggaatcaaaggtaggagaggaagttcatggggcaatttgaagagtccataaatgcctgcaagctgtgaaga

SEQ ID NO: 183830 - DNA, 201 bp, Homo sapiens
aaggatggccaattggatattctctgagcttcatcctcctattgtgagagagagttaattgattgactcaccgatgcatcccgtcagtcagcagctgtttrcggaacaccagctgcaggccaggcaccgtgctgcaaggcgtagatatgttgctgaacacgactcccttccagatgttcaggatttaacaggcaagtaaac

SEQ ID NO: 183831 - DNA, 201 bp, Homo sapiens
atatcctacttagaaagaatacatataatccgtcgtaaaatcagctgctgtttgattactagaatgcaaccaacatcacctagcaataactttttctcttytggagaatcctttcaattattctttgtggggcataaagtctgcgtcactcaccactttatctccctgatggagatgaggtgtgggtctgtagctaaactc

SEQ ID NO: 183832 - DNA, 201 bp, Homo sapiens
agaataggcagactgcctcctcaagtgggtccctgacccctgacccccgagcagcctaactgggaggcaccccccagcaggggcacactgacacctcacamggcagggtattccaacagacctgcagctgagggtcctgtctgttagaaggaaaactaacaaacagaaaggacatccacaccgaaaacccatctgtacatc

SEQ ID NO: 183833 - DNA, 201 bp, Homo sapiens
tgtgcagccaagtttgaggccactggtgcaacccatgaagatattttttttagagtgggatagcttaatacaaaggacttttagtaaaagcagtacttggmccttagttggaaatggacttggagggacccaggcgtttgccatttaggtgtgggtacaatttagtcctttcagaggggtcctgtaagcattaagccctgc

SEQ ID NO: 183834 - DNA, 201 bp, Homo sapiens
ttcatgatacccaaagttattaagtggcatctttggacactttctttttaaccaaagtggagtaggctgggaaatgtcaatagtgataatgtacagttacrtctccaatacccttttgattgaacacatgattgaaatagtgcaaactgcagagccctttgcagggaattgccagttaaagaatttgttcagactcacggg

SEQ ID NO: 183835 - DNA, 201 bp, Homo sapiens
tcaattggtcaagccacttcaggcaaacattggcattttattataaagcaaaagatgaatatatcgtatattttagccattccatcctggaggagctaacytaaataaacccatgtttatcatggattatgcccaagaacattcctagcaaatttgtttgtacaagctaaaaattgataacaatctaaatggaccatcata

SEQ ID NO: 183836 - DNA, 201 bp, Homo sapiens
gagcgcctctcctcctccaaaggaacgcagttcctcaccagcaacggaacaaagctggatgcagaatgactttgacgagctgagagaagaaggcttcagaygatcaaattactctgagctacgggaggacattcaaaccaaaggcaaagaagttgaaaactttgaaaaaaatttagaagaatgtataactagaataaccaa

SEQ ID NO: 183837 - DNA, 201 bp, Homo sapiens
tgtggtttgccttccttgcaaccttgggctctctgcttcctctttattatccgtgttgatccctggagatgttaatgagcattgcacattgagaagatgargagaataccttctgggcccaacaacatggagacaccccaaacagctcaaagaatagctgtcagaataggcccatcatgatacaagcaccaatagtggagg

SEQ ID NO: 183838 - DNA, 201 bp, Homo sapiens
gtggcatctttggacactttctttttaaccaaagtggagtaggctgggaaatgtcaatagtgataatgtacagttacgtctccaatacccttttgattgarcacatgattgaaatagtgcaaactgcagagccctttgcagggaattgccagttaaagaatttgttcagactcacgggtttttgactgtaaactctgagtg

SEQ ID NO: 183839 - DNA, 201 bp, Homo sapiens
ctctaagcttcgtcttccaagagctgaggtttaataaataaaacctgggttgcagtaaaaggagcagaaagaggagcatcagttggatcatgagaactctrtgttgctgggcccactgcacatagctctgcctaccatagccaagaccacttttaggttggggttcaacttccattcaccccactcctggtaacaatgctc

SEQ ID NO: 183840 - DNA, 201 bp, Homo sapiens
gctgggaaatgtcaatagtgataatgtacagttacgtctccaatacccttttgattgaacacatgattgaaatagtgcaaactgcagagccctttgcaggraattgccagttaaagaatttgttcagactcacgggtttttgactgtaaactctgagtgttttaaataaaatactggctgccatggccctccaaccggaaa

SEQ ID NO: 183841 - DNA, 201 bp, Homo sapiens
tgattgaaatagtgcaaactgcagagccctttgcagggaattgccagttaaagaatttgttcagactcacgggtttttgactgtaaactctgagtgttttraataaaatactggctgccatggccctccaaccggaaatgtcaaatgctctgcctggctctgcaacccacataggcaggctcaatgcttctccaacttggg

SEQ ID NO: 183842 - DNA, 201 bp, Homo sapiens
acttccgacctcaggtgatctgcctgcctcaatctcccaaagtgctgggattacaggtatgagccaccacgcccggccgcatgttattatttttgatgctyatttggaatatgatttgaagtatgacaacaatcgaataggaaaggtattcatttcagtgtaggaagaaagtaaacagccaatacctggagcctctattct

SEQ ID NO: 183843 - DNA, 201 bp, Homo sapiens
aggagttaaaagatttaacaaaattaataaaatctttaaaaaattaaagaattctatgtttggacgtcagaatacatattcttcccaagtacacatggatrcataaaattgatcaaataaggactcaattaattcaaaacatgaatacacacaaacacacatcaatatctatatctgtctgtctatctggaaagacagaag

SEQ ID NO: 183844 - DNA, 201 bp, Homo sapiens
tttcctagggctgctacaacaaagcaccacaaactgtgtgtggcaaaaaaaacaacaaacaaaaaaacaacacacagaaatttattcactcacagttctgsaggctaagagtctgacagcaaggtgttagcagggccagactccttttggaatctgaagggtaattcttccttgcctcttcctggcttttggaggttgcct

SEQ ID NO: 183845 - DNA, 201 bp, Homo sapiens
ctaaccccaaattcagaaaaatgggtgtttcttggggtaaagaaatgtatgaattagaagagtgcagcaaagtggaattcagagatatggataatgttgtwtctcaaactgctggtgaagagtgttcttctgatgatcgttctttacactttatgtgtagcatatatatttcccagcacctggaaatgtaatagaatatta

SEQ ID NO: 183846 - DNA, 201 bp, Homo sapiens
ttctgacaccacacatctctttcgccagaaggaatttccatcttttttaagagttcaccttactatgtcagatctactcagaataatctccctttcttagrgtcaagggtgccatgtaacataacctactcatgggaatgctatctcggcatatgcatgctcccaaggattatacagggcccgtataacaggatgaaaatg

SEQ ID NO: 183847 - DNA, 201 bp, Homo sapiens
aatttctctgcatgtcagtttcttcatctcaaaagaatctaatgataatcccaacctcacaaggaattggtcctcagaagttattaaatgggacaatgtaygtgatgcccttagcacagtgcctggcacatagttagcactcaactaaaggaagctgttgtcattatgatgattgtctagtcgcatgtttgggtgctttca

SEQ ID NO: 183848 - DNA, 201 bp, Homo sapiens
aataacaacattaggtcgggtatggtagctcacgcctgtaatcccagtactttgggaggctgaggtgggtggatcacctgaggtcaggagttcgagaccarcctggccaacatggtgaaaccctgtctccactaaaaatacaaaaatgagctgggtgtggtggtggatgcctgtaatctcagctactcaaaaggctgaggc

SEQ ID NO: 183849 - DNA, 201 bp, Homo sapiens
aaaagagggaagtacaatttattaagtaatacattcataatgtctttattatgatagggcactgaggccacagaatgttaagcaacttgttcaagccactyaggaggtagctatggaaagagaaagaccaagacagagacctacgggaaatgcaaagtggaacgtgtagagcatgcctgctatcttgggcccttaacacaa

SEQ ID NO: 183850 - DNA, 201 bp, Homo sapiens
gtgtgggggaaagggtgggtagggccagggatggcaggactcctagaacttgcattttatcctgaaaggaatggaaagccctaggagggttctacacagakgaatgaagggatccaatttatattcttaaaaggtcatccagctgttgtgtggataagagatggtgggcacacaagcatcctggaaacatctggaaaatgc

SEQ ID NO: 183851 - DNA, 201 bp, Homo sapiens
agagagcatttatagtagagagtactatggaggaaagtgtgataaagagagtgtgtgggcagagccccgggtgataagacctggtaccatggtggaccacygcaccatgcacgaggagctttaatataagtctttaaacctactcgaatagtggtcttagtcaaaatgaggccatattaacgtgtgggtcacagaccagca

SEQ ID NO: 183852 - DNA, 201 bp, Homo sapiens
gagagatgcattaatcacctggagctcccctggctggtggatttggttgctgatttggaatggcatttacacattaaagtgaggaatatccttatgtgccraggagagctctggagtgaagggtagttactcagcagggacacggcgggtttccaggtgtgacatcctgactcagtacagcatctgtccaagggtcacctt

SEQ ID NO: 183853 - DNA, 201 bp, Homo sapiens
aatgtgaagtatgttttcaattcagtccaattatattccaattaatttatggtaatttttacaatagagagcatttatagtagagagtactatggaggaargtgtgataaagagagtgtgtgggcagagccccgggtgataagacctggtaccatggtggaccaccgcaccatgcacgaggagctttaatataagtcttta

SEQ ID NO: 183854 - DNA, 201 bp, Homo sapiens
gccctggaggagatgtttagccctgagcctggagggattgtcagggctgagtgatgagggtgatggactccatgtagaacctgctgagcctcaggtgcctytgggcatcaaaatgtgctgatgaggaacttaagtgtggaatgaattttggtgcttaaatccctggtactggaccatggaataaacgcaggagaaatgaat

SEQ ID NO: 183855 - DNA, 201 bp, Homo sapiens
tgtttaataaataaaaatgcattccaaacttgagtcaaggttaaggcaacaggcgtaagagatattcaaatatcgacatcgctatgatggcttgatttttwaaataatttagttttcattaaatgttagtgacaatataacaatagtatatagtgttagaaaaatagggagtggaaataacacactagccatcttcatgtg

SEQ ID NO: 183856 - DNA, 201 bp, Homo sapiens
atgtttaagtggacccagagcattcttttggacatggatgcaagcatcagcaaggatgcaggtgtcacatgtacaaagacacagtaccatcctgcccttgsggtttgggtgagtgtgccctgagtgactgtaacatgctcatagaaccaagaaaacatcaagctaattgaactctcaaaggtcatctagtccaaccccttc

SEQ ID NO: 183857 - DNA, 201 bp, Homo sapiens
ctgccaccaaccctgtatccctagactcaagatcagtagcatcttgcttaaaccaaagtgtatagtagagacctgtcattttaagataaagcctatcaggmccagttcctccctccaagttcctacctccaagcttgggctggctgaccctaggctaacagagcattgctgtccttagtggaggatgggaagaactagtag

SEQ ID NO: 183858 - DNA, 201 bp, Homo sapiens
tttatctatgtcctttccagccaaggtggccagtagtttgagccaaaggaaggtacaggggcattcttttaccaacagggaacttggtttccttgagggcyacagacaccataacagaccttgaaatgcaggcaccagtcagtgaatggaaagcaactctctgtacttgaaacatctggtcactgcatgtcctgtagataa

SEQ ID NO: 183859 - DNA, 201 bp, Homo sapiens
ctccttccctgctctaccaggccatatctgacttatgccaaaatttcttatatgcatgaatttttttctgagctctctattccactggcctccatgcactrtaaccatgcatagtcatatttattacagcttcacagtgtcctgatctctggtagagaagattcctcctcctcatacttgttcagcaatatcttggttatt

SEQ ID NO: 183860 - DNA, 201 bp, Homo sapiens
tatcaattttgtagatcctttcaaaaaaccagctcctggattcattaattttttgaagggttttttgtgtctctatttccttcagttctgctctgatcttwgttatttcttgccttctgctagcttttgaatgtgtttgctcttgcttttctagttcttttaattgtgatgttagggtattaattttggatctttcctgct

SEQ ID NO: 183861 - DNA, 201 bp, Homo sapiens
aaaaattgataacaatctaaatggaccatcatagaaaaaatgagaagtaaattgtcatatttacgctcaatggggctactacacagcagtgaaagtgagcwaactatagccaccagtatcaaaatggatgaattccacacatactgttcagagaaaaatgaatattagagcggaatgcattcactatgattccattgacat

SEQ ID NO: 183862 - DNA, 201 bp, Homo sapiens
gcgtgtgcacccagaggcctttgtagggtgtccttctgtgcacatggccacatggctagagatggaactttctccctggctgctgtggtcctttcaataawctgtgcccagaggcagcacttaagttgtgaagtgtctctttaaacatcacaagttgttctcttttcatctcagatgttttaccgtgttacccctgttgga

SEQ ID NO: 183863 - DNA, 201 bp, Homo sapiens
ttttgagtattctaccttagtctttttttttttgcatatctaaaagccaaaattaaggaaatggaaagatgttaatataatacacacacacacacacacamacaaaaagggtaattactgattttattaaaaacatttatcacagagccacataaccattgttatttcaggcctgggaatacaatgcatgctattaagcca

SEQ ID NO: 183864 - DNA, 201 bp, Homo sapiens
ttgagtattctaccttagtctttttttttttgcatatctaaaagccaaaattaaggaaatggaaagatgttaatataatacacacacacacacacacacamaaaaagggtaattactgattttattaaaaacatttatcacagagccacataaccattgttatttcaggcctgggaatacaatgcatgctattaagccatt

SEQ ID NO: 183865 - DNA, 201 bp, Homo sapiens
gaatgcaattctatgatcattcccctaacagagtgacagatcatgcacagatagaggcagcaccaacggccttgtgtccacaaactagcatcattaacatmacttgcaggcatgttagagatgcagaatcgcaggccccagcctggacccactgaatcacagtcttcttaacaagatccccagataattcatgtgtacatt

SEQ ID NO: 183866 - DNA, 201 bp, Homo sapiens
taaagataaaagcatgattaaatacgttaatgaaagtgccaggctgcatcaagaggcacaccatgcattgacctcgaagagcttgggctacctatgtgacycctttgtgaactttctcctcagctgggttttctagaaggttattttgtgctgaaaaaaaaaaaaaaagtcctgtgagtaatgaaattctacctgatccct

SEQ ID NO: 183867 - DNA, 201 bp, Homo sapiens
ggatttggctaaactcacaatttcagggaaattcctagctttaacatgcttacagtaatgaagaatatccaaatatttaatgatttaagcaatcatattayggtaaaaaagaacaatagattaaacctaagggtaatggaaagaggatataactaatattagagaatacattaatgaaataagaaaagctaaaacagagtg

SEQ ID NO: 183868 - DNA, 201 bp, Homo sapiens
aacattgcagcctgattttttaaatgaggtagatctaactaaactgacacatccaaaatgattggtaggatgcatcactgatttttataaaatgcagaacrgtgtatgcagtcagcttgaaaacatttagttaatttcttaataaattaaacacgtactacttgttagacccagcaacccaaatactggttatttatccta

SEQ ID NO: 183869 - DNA, 201 bp, Homo sapiens
atgcctctttatccctagaggatccacttcctggttcctcaactgcttctgatgtttgttctcacctaagaaaataaaatgtggtgtataggaacccttcatcaaagcacaacatcacagggagaggactgaaagccaggatgtttgttgctgacattcaccagctgatccaggtatctgctgagtctactgtgctgctca

SEQ ID NO: 183870 - DNA, 201 bp, Homo sapiens
ccaaattgttttacaagcaaatttgaccaagcattcaaagaaaatataatttctttctttctttttgcatactctttcagagaatgaaaaatataggaaamtttcctaattcattttgtaagtctaggatattttgatatcaaaaccacaccaggacaaaaaaaatgaaggcatattagcttaatgtcacttatacataag

SEQ ID NO: 183871 - DNA, 201 bp, Homo sapiens
gagcagtgtcctgaggctgggcagggcagaagggtcccatgcctggcccctaaaaccattctttcctcctatgcctctgggcctgtgatgggaggggctgkactgaggatctctgaaatggatttaaggcctttcccccattgtcttggctattagcccttgtctcccttttagtcatgctaatctctctagcaaatggtt

SEQ ID NO: 183872 - DNA, 201 bp, Homo sapiens
aatttattttcttccatctaagggatattataatgcaccattttgttggaaagcttcagtgagataagttatatgccttgcagagaaccgggaacttaggrgccctttaataaacattatttagaaataaatcttaggcctggggaaaggatgtcagaacctgatttccttcactgtagcatgatggaccctgttttaaga

SEQ ID NO: 183873 - DNA, 201 bp, Homo sapiens
taataaatattttaagctttgcaggttgtactgtttctatcacaactattcaacactgccactgaggtgctaaaacagcatagacatacataaacaaatargtgtggctgtgtttcaataaaactttatcaacaaaaattgttggcaggcggaagagaagggttgtagcttgtagatccttggtgtatatagaaagtaaat

SEQ ID NO: 183874 - DNA, 201 bp, Homo sapiens
gcattttaccatggttttatttttgaaaatttgtaataaatctatacacctttgctctccctacaggtgctaggtctagaaaggacttcatttattcactygtgtttactgcgcttctcctcctagccaagctctgcagaggtgacctaacacagccgctgtcccacttgaattcatcatttgtaggaaaagactgatatg

SEQ ID NO: 183875 - DNA, 201 bp, Homo sapiens
tcagtatacaagtcatttacatttttatataataattataaaatttaattcaaaaatattaaaatagcatttaccttgctgatgggggtagtgagtagacyggcataaagaggcttatgtgattctggtaacatctttcttgatttttgtctggttatacaagggtgaagtttgtggaaattcagagatgcgtgtacttct

SEQ ID NO: 183876 - DNA, 201 bp, Homo sapiens
gccagccaatatccaaattctaacaggtactccccatatgaactctctggtacccttcctcacaaattccagatgagtcagcagcccagaactctaattcrggttcctcagttcaacaagactgcgatgctgtttggcctccacctctctgtgtcgggtctagaaaataaccaccaggcagaaagccaagacaaacatgag

SEQ ID NO: 183877 - DNA, 201 bp, Homo sapiens
gttagtggataaaaaaactcaaattacaaacagaactaaaaataaattaaaataaatattcatcaaaagaataatgaatgaactgtgatatagtcatacartggaaaactggatagcagtagaattaatgaacttaagctccatgtatcataatgaatgaatctaactaaaatgatagaagctgaagaagggtatgtatat

SEQ ID NO: 183878 - DNA, 201 bp, Homo sapiens
tgtctcccaggctggagtgcagtggcgcaatctcggcccactgcaagctccgccccctgggttcacgccattcccctgcctcagcctcccgagtagctggractactggcgcccgccaccaagcccggctgattttttgtatttttagtggagatggggtttcaccgtgttagccagtatggtcttgatcccctgacctcg

SEQ ID NO: 183879 - DNA, 201 bp, Homo sapiens
tccaattattcaagaccacttttgacttcttttaggacatggaaacttctgtgaaacaggcactgaaactaaagcaagaggtggaagaaaaattggtaccmcatagaaacatttttgagagaaataaaaaagtgaaaaagacaaattgcaatgtgtttttgtgaagttacatggggtatgcctgcctctcctgcctcacct

SEQ ID NO: 183880 - DNA, 201 bp, Homo sapiens
aaaatgcaggaaaagacacattataactgaatataataatgtaaacaacatcctgatcgagatacagaatataaccagcacctcagaagccctcctcggtytcactccaagtcattgattctcctttgcaaaggtattgtgactactagaattattttccctgtttttgaattttatataaataagagcataaattatata

SEQ ID NO: 183881 - DNA, 201 bp, Homo sapiens
tatatgctactcacttattagtcgcttagtagccctcttggttatcagactgaaaaatcagataagaatacaagaaaagaaaatacaggcccatttcatgygtgaatgtatagaaaatacatcgtatgttaaatactaactaacgaagtcaacactgttttacaaaaataataattatatggggcttatcccaggagcaag

SEQ ID NO: 183882 - DNA, 201 bp, Homo sapiens
catttacagtagaagcagatgtctcatggagcttccatccaatgtcagatcagagaagagactatttccaggagcaggagggtcagttgctaatgtccagrggatttagtcacatagaggccattagtgaattaagccagagatgttctggtaaggaggtgggcattggaggtgggtgtgaggcagtggagacagtgggca

SEQ ID NO: 183883 - DNA, 201 bp, Homo sapiens
cattatttctgagggctctgttctgttccactggtgacttttaaaatttatatgacactttgggaggccagggcagaaggatcacttgagcccaggagttsaagaccagcctgggcaacatagcaggaccccagctttacaaaaataaaaaatttatatgaattgaaaattgcttatcaaatagtacatgattaataaatt

SEQ ID NO: 183884 - DNA, 201 bp, Homo sapiens
gcctgaaaataaggattaaaaatgaatatttatgaactgatagttctgcaactctgtcctcaaaatgcttcctttggtgacacttacaaggctgtcactctttgaacagaagccagagcccagcctggcagcataccattagttccatgaccttgactaagtcactcaccctctctgagcctgtctcctcagcagtaaagt

SEQ ID NO: 183885 - DNA, 201 bp, Homo sapiens
aaatgaagatggtaagacaataatcccttctttgcaaaaccaggttggagacttaatcaaaatcgtgacaagacagcactgattgagcatttatatgttargcattgacctaagcactctatatacatttacttatttaacactcccagaaagtcaatgagataagtactactcttacccctaggaagacattctgaggtt

SEQ ID NO: 183886 - DNA, 201 bp, Homo sapiens
gcaattcactactttaaatatgctaaagaataaaaatcatatgattatttcaatccttgagacaagcatttgatacatgaatgtccatagcagatttactyataattaccccaaacttgaaacaacttaaatgtccttaaatgagtgaataggtgataagcatttgataaaggtattcaccaatttatgattattttttaa

SEQ ID NO: 183887 - DNA, 201 bp, Homo sapiens
tgggacatccggcccctggttgacctgccagctgcttccgagctgggcaggaccatattcaagccctcgttttctgtgtgttcttggtgtggccccttttyctttaatattggcaaaatgaagatggtaagacaataatcccttctttgcaaaaccaggttggagacttaatcaaaatcgtgacaagacagcactgattga

SEQ ID NO: 183888 - DNA, 201 bp, Homo sapiens
cacaaaataaatatattaaaatggttgctcatggtaggagagtggggaatgggataaaataaattaaaaaaaaaaaagtcaggataggctaggtatgctcraggaacaaatgaccccaaaatctgatggcttaacccgcaacagaaatctctctctcgctagtgtgttgtgatcacataggtcaacaggggaaagtgaaat

SEQ ID NO: 183889 - DNA, 201 bp, Homo sapiens
atgataaatctccctgcctagatgaaatgagcctgtcattaaacattctcaaggcacctgctctttcctttacagcatgtttgtttctagttagagtttawtgaggaaggtttttttttctttctttttttgagacagtctcactctgtcacctaggagttcaagaccagcctggccaacatggtgaaaccccgtctctac

SEQ ID NO: 183890 - DNA, 201 bp, Homo sapiens
tcatggtaggagagtggggaatgggataaaataaattaaaaaaaaaaaagtcaggataggctaggtatgctcgaggaacaaatgaccccaaaatctgatgrcttaacccgcaacagaaatctctctctcgctagtgtgttgtgatcacataggtcaacaggggaaagtgaaatgggccaattacacttgggctttaaaaca

SEQ ID NO: 183891 - DNA, 201 bp, Homo sapiens
caccaagtttgtggaactttgctactgcagcaataggaaagtaataaaagtccctaggacttggaaggcaaatgtcacagtgagctgctttgcatgcacaracaagactggatttgcataaccttggccacccttcccttctctgaacctcacttttctcatttgtaaagtggaggattttaatactattgtacaagtgtt

SEQ ID NO: 183892 - DNA, 201 bp, Homo sapiens
gtagagtgtcagttgctttttcttagtgtgttctctgtaagtggtgctttggcagcagatgttaagatgatagtgggaagatggtagaagaagcaatgtgagacataagaccaaataatcagtgctttgactctgagtcacaaagaaaatgttggcacaggatggtgccttttggatgtccttattccttcaccgaccagt

SEQ ID NO: 183893 - DNA, 201 bp, Homo sapiens
ctgaatgtaaaagtttaaaacaaacaccaacagtgacaatactaactacctttcagttaaacaagtaattcattcatttaactgaaagaatatttctattkgtaattgcccaatgggttggccatgggaaaggtctcctgggtcaggggaatggctgttccagccttcctgagaatttcaacattggagctgggctattgg

SEQ ID NO: 183894 - DNA, 201 bp, Homo sapiens
agtttccatgtcgttgagcggttttgagtgagattcttaatcctgagttctagtttgattgcactgtggtctgagagatagtttgttataatttctgtgtycttttacatttgctaaggagacctttacttccaagtatgtggtcaattttggaataggtgtggtgtggtgctgaaaaaaatgtatattctgttgatttgg

SEQ ID NO: 183895 - DNA, 201 bp, Homo sapiens
tgagcaccctggagccatggacctttagatcctgggcccaccttccctgaaagatgggtgtctcaccctgaccctattaccactccagggctatgaaaccrtctcattctgcagcagcctcaaactctctctctgcccactgaaaggggagctcagaatcctcgtcagagcccactggttccggcctcatctgagctgcaa

SEQ ID NO: 183896 - DNA, 201 bp, Homo sapiens
tgatttttaaaattaggttctagttgtaatttcaagagagaaattcataaattacaaattaccctcttttggcctcaaaatagaatattttattacaaagraaaataggataatgcaaatggaagagaaattcaggattgtctgtggccttctatatacaaccttggcctcagcaaagttacaagcaaagaaaaaataagg

SEQ ID NO: 183897 - DNA, 201 bp, Homo sapiens
tgattctgtcattatgacgttagctggtgattttgctcgttagttgatgcagtttcttcctagtctcgatggtctttacattttggcatgattttgcagcrgctggtaccggttgctcctttccatgtttagcgcttccttcaggagctcttttagggcaggcctggtggtgacaaaatctctcagcatttgcttgtctgt

SEQ ID NO: 183898 - DNA, 201 bp, Homo sapiens
agacatccatccccatcacttatgagttttctcaggccacacgcttgggagaagctttcttcctggggagtaccccgagaggagggcaggtactcatactratacaccttgcctagcacattttcaaaacttctttgggaaagagaggttcgaaaatttaactgaaacaaaatccagtcacttcaaatctacatgttcttt

SEQ ID NO: 183899 - DNA, 201 bp, Homo sapiens
ctgtctttttgtttgtctgtgccctgcccccagaggtggagcctacagaggcaggcaggcctccttgtgctgtggtgggctccgcccagttcacccagttygagcttccgggctgctttgtttatctaagcaagcctgggcaatggcgggtgcccctcccccagcctcgctgccaccttgcagtttgatctcagactgctg

SEQ ID NO: 183900 - DNA, 201 bp, Homo sapiens
tcttcagttacttcaggccatctggatgtatacgtgcaagtcacaggggatgcgatggcctggcctgggctcagaggcctgacagtggtattaagaggtgrgacctttgggagatgataaaatgcttggatgtttgggaggagtctgcccttattaatgggattagtgctcttatgaaagatgctggagggagcttgttca

SEQ ID NO: 183901 - DNA, 201 bp, Homo sapiens
aaggggttacagcagaaagtttggggaataatttgttttctggctcaccgtcttccagactgttgtaagaatagtgaaatccagcaggaggatgctggcargaagactgaccggcttatagaaggagccccaggaaaggttgcacttattagttcaaaatgctggcgtaggtcattcattcacctattcatccaaccaaca

SEQ ID NO: 183902 - DNA, 201 bp, Homo sapiens
attaggctgaaaacaaaatctgtactctccagtattctaaaaaagacacacatacacatgcacttaattttttaaatagtcagtgttggcaagaacagacrtagtcttctgttggggagtccagaatggtacaaactttctgaaaggcaatctggtaatatatgtcaaaagccttaaaaataaaatagttcatttactttg

SEQ ID NO: 183903 - DNA, 201 bp, Homo sapiens
tattttgaatctttttcttagttgctttaatcataacctctcttgtctttaagagagtcattattttggctccatatctcattcttgttatggtttgaatycccctccttttcacagccagcattgtttacttgcctcacctcaccttcccctctcttctcaaccctcttcaggatggcttgtgatgccaacattctccct

SEQ ID NO: 183904 - DNA, 201 bp, Homo sapiens
aaccaagcttcaagctcagtgttcaaatagagtaagggacagttaaatagggggtttgctttcagtcccatcagagttttaatgctagattcactccttaggatgctggacagccttgggcaattgcttgacctctgtgaatcagtttccccctctgttaattagtataatgctgcttacctcactggatagaaatacagg

SEQ ID NO: 183905 - DNA, 201 bp, Homo sapiens
cgtggaatatttgagaacagatttcatgtctaccattagggagacatttcaaaaaaataacaacatgtatacatatgtaactaacctgcaggttgtgcacrtgtaccctaaaacttaaagtataatttaaaaaaaggtaaaaagataaaaataaaataaaaccttgagaatcagcaaagaacacacacacacacacacaca

SEQ ID NO: 183906 - DNA, 201 bp, Homo sapiens
  misc_feature (1)...(201): n = A,T,C or G
tgacacggaggtctacggagacattaaagtcaccctgattgaaacagagcccctggcagaatacgtcatacgcaccttcacagtccagaaggtaagcttcntggaggctgtgggcagccggtccaccatgagagccagcttgtttgttcatccagaacatgtggtaactgagggtctgctctacgtccagccccatacttg

SEQ ID NO: 183907 - DNA, 201 bp, Homo sapiens
caacgagtttataaagataaaaatccaaaaggctgaaaaatataggaagaaattctcaaactccttagtactgaaacaatataaattaaaatagtaatggkaaaaaatacgtagtgcccatcagattggtaaaaaggtagaaaaattggataataccaaaggttggatgaatgtgggttcacaggtacctttacatacagc

SEQ ID NO: 183908 - DNA, 201 bp, Homo sapiens
agaatgtttaatacctcaccagggcccagtgctaggtggcttttgaccatcagaaatgtttcaggttttattctttctccagcttttcttcttttcctttwatttctttaaatgaataaagcgacttgccatgaatcaagtgggaattgaagtgaaactaacccagatgttatgggtttgacttctccttttcttcacccc

SEQ ID NO: 183909 - DNA, 201 bp, Homo sapiens
tggattcatgtgtttggtgtcatactttcattttgagcctttctcatttgtaaaattagggcaaatctacctgcatcagagagcttttgggaggactaggwattgtatgctgggctcatagcacagtgcgtggcatatggcagaggttatcatccttgttggcttcattggaagctgtggtcaattcagcctggccaaggg

SEQ ID NO: 183910 - DNA, 201 bp, Homo sapiens
tggccaatgtggtgaaaccccatctctactaaaaatacaaaaattagtcgagcgtggtggcatgcctgtaatcccagctatttgggaggcagaggcaggckaatcccttgaacctgggaagtggaagttgcagtgagccaagatcacgccactgaactccagcctgggtgacagagcgagactgtctcaaaaacaaagaag

SEQ ID NO: 183911 - DNA, 201 bp, Homo sapiens
cagtctctcttccctccttgatttttctccacagcacttactactatctgatgtgttacatacttttctgatttatctgatatattatttaatctcctacycccactagaatatatacaccataagggcacagagggtttttgcctgtttggttcactcctacatccagtatagttctcagcacatggtagaaactcaaaa

SEQ ID NO: 183912 - DNA, 201 bp, Homo sapiens
tgactgcagaaggctgggcaatcaggctgctcacttcgtgggttttactctgcaatccccagcttaggacaccaagtttatagccttcgcaatcagcttcgctcacatgtgccgtgtagccactagaatcacaagaggggcagagagaaaaggcagtcttctatgactccagtgctcatgttcttacagcactgcccactg

SEQ ID NO: 183913 - DNA, 201 bp, Homo sapiens
ctgcctcctttatctctggcttaatcttcccgctcccttttctccctctctcgtccccttctatacacactcttcccctttacctggtttaatcctatccmtcctttgcccaaggtccctttttcaggaaagaattcttggcctctagactaaatattacattgttggtaatttatctcaaatatttaagcttacacagtg

SEQ ID NO: 183914 - DNA, 201 bp, Homo sapiens
aaagaataatcctgtaagacctctagtcttcgaccttagggatggtgtcaaaaccttgattcctaaacagtactgtgttagccatgagattaggaggattrccggctgcctaaagtgacaatcatagtcatttattttacctccataacaagagtaagcatgctatagcctaaggttctagctttttgtaaataaacattt

SEQ ID NO: 183915 - DNA, 201 bp, Homo sapiens
tgacaatcatagtcatttattttacctccataacaagagtaagcatgctatagcctaaggttctagctttttgtaaataaacatttattgaaactcagccmcacctattttgcgtacatgttgtctatggctacatttgcactataatagcagagatggaaagatgcaacagagactgtctaacctgcaaaggtgcaaaac

SEQ ID NO: 183916 - DNA, 201 bp, Homo sapiens
tactcagccactgcatagatgaggatcatagtcatgcttctagaataaaggtcagcaagctatagccataggctaaatccagcccaacatccatctatcthtctatctatctatctatctatctatctatctatctatctatctatctatgagacaaagtctcactgtcacccaggcaggagtgcagtggcgtgatctcgg

SEQ ID NO: 183917 - DNA, 201 bp, Homo sapiens
gctgcttgccctgtctggtccccagcattctctgctcctgcactgtggacactgtaccctaaaatatatagtcacttatctgataaagcctatgcctgagrctctgagcttgcttcaccctagccctgccctgcctgcatctcttagactgaggactttctccaaagctgggaaaggatcccctgcccaggcacaggcagc

SEQ ID NO: 183918 - DNA, 201 bp, Homo sapiens
caggctttgtctgaattccagcctgctggatgggctgtcccccaggaagtcctctctggggctagaatcctgcaggaactggggaagagctgtttgcacasactccagctgtagtgcctgtgagatgcctgagactctgggacagcaagttatgtgggcagagtagggtttcagggtcagataaacctaaccgagaagtcc

SEQ ID NO: 183919 - DNA, 201 bp, Homo sapiens
atatatatgtatatacacacaccatggaatactacatctatatatatatatctcttcatatatatccatatatatatggaatactatatatatatatatatataaaatttctttattcagtcatccattgagatggacacataggttgatttcatatctttgttattgtgaattttaaaactgaggcacaatgagactaag

SEQ ID NO: 183920 - DNA, 201 bp, Homo sapiens
atatatgtatatacacacaccatggaatactacatctatatatatatatctcttcatatatatccatatatatatggaatactatatatatatatatatawaaaatttctttattcagtcatccattgagatggacacataggttgatttcatatctttgttattgtgaattttaaaactgaggcacaatgagactaagta

SEQ ID NO: 183921 - DNA, 201 bp, Homo sapiens
gtgaagagaagtgcatttgttagggtaggcgtggctgcagtaataaatagacccaaaggcacaatggctcaatacagctattttaaaaatcgttttttttytctctctctctctctcttttatttttttttgtttgagatggagtttcactcttgttgcccaggctggaagtacattggcaccatcttggttcactgcagc

SEQ ID NO: 183922 - DNA, 201 bp, Homo sapiens
tgctgtgctagcaatcagcgagactccgtgggcgtaggaccctccaagccaggtgtgggatataatctcgtggttcgccgttttttaagcccgtcggaaawgcgcagtattcgggtgggagtgacccgattttccaggtgccgtccgtcacccctttctttgactcggaaagggaactccctgaccccttgcgcttcccaa

SEQ ID NO: 183923 - DNA, 201 bp, Homo sapiens
aggaatcgcttgaacccaggagcgggaggttgcagtgagccaagatcgcgccactgcactccagcctgggtgacagagcgagactctgtctcaaaaaaaaraaaaaagaaaaagtcctccacctaccctagtgtgcctctgcagctcggctttcttgggagggacatgttatcttttctagtggctttactcttagagact

SEQ ID NO: 183924 - DNA, 201 bp, Homo sapiens
tatagtaagcactctaatatatcattattctctgcctcctcttaatgttttctttctccccctccccagattatttattaatccttcaggacaggaacaatgtttgtttgttttcatattcccactcctaataccagcatctactgcatcttagattttcaataaatatttgttgaatataatagtaataatttctcaata

SEQ ID NO: 183925 - DNA, 201 bp, Homo sapiens
atagtaagcactctaatatatcattattctctgcctcctcttaatgttttctttctccccctccccagattatttattaatccttcaggacaggaacaatgtttgtttgttttcatattcccactcctaataccagcatctactgcatcttagattttcaataaatatttgttgaatataatagtaataatttctcaataa

SEQ ID NO: 183926 - DNA, 201 bp, Homo sapiens
tagtaagcactctaatatatcattattctctgcctcctcttaatgttttctttctccccctccccagattatttattaatccttcaggacaggaacaatgtttgtttgttttcatattcccactcctaataccagcatctactgcatcttagattttcaataaatatttgttgaatataatagtaataatttctcaataaa

SEQ ID NO: 183927 - DNA, 201 bp, Homo sapiens
caccaagcccagcctctattttgaatctttttcttagttgctttaatcataacctctcttgtctttaagagagtcattattttggctccatatctcattcytgttatggtttgaattcccctccttttcacagccagcattgtttacttgcctcacctcaccttcccctctcttctcaaccctcttcaggatggcttgtga

SEQ ID NO: 183928 - DNA, 201 bp, Homo sapiens
ggatggtctcaatctcttgatctcgtgatctgcccgccttggcctctcaaagtgctgggattataggcgtgggccaccaagcccagcctctattttgaatytttttcttagttgctttaatcataacctctcttgtctttaagagagtcattattttggctccatatctcattcttgttatggtttgaattcccctccttt

SEQ ID NO: 183929 - DNA, 201 bp, Homo sapiens
tgcagtggcatggtctcggctcactgcaacctccacctcctgggttcaagcaattctcctgcctcagcctctcgagtagctggaactacaggtgcgcgccrccatacccagctaatttttgtatttttagtaaagacagggtttcaccatgttggccaggatggtctcaatctcttgatctcgtgatctgcccgccttggc

SEQ ID NO: 183930 - DNA, 201 bp, Homo sapiens
acataagttttcaagatgtacgtataaatctataaaacactgaaagacgttaaggaaggcctaaataaaagatataccatgttcatggatgagaaaactaytattataaagacatgatattatctcccatttgatctataatacatgcaactaaaattcaaaaaccaaacattttttgaaaaggtacaagctagtcctcaa

SEQ ID NO: 183931 - DNA, 201 bp, Homo sapiens
attcccaggtccttttgacatgttctcattagtcttccttgcttctggcacaacaaaaatattctagactattcttttaatgtccctgccccagacctgargccaaccacttattagggatttgtggttgctttcaatggggagtggtattttggcactaagatatacatcttaggtgtgctcggtgatgcgttattgcct

SEQ ID NO: 183932 - DNA, 201 bp, Homo sapiens
ttaacacgtcctgagagtcttcacctgaaccagttattacgttggtgcttacaaaagggtgatttaaacatctataattctccctacgcttactagttagscttcttctttagagaagagttgtttctctcttcatcttcctccctgtttttggtctccctgttgattcatagatcatttttgactccgtgtattgaaatc

SEQ ID NO: 183933 - DNA, 201 bp, Homo sapiens
ttggctgaatggctgaattcatgctgctgtcatccgtgccacaaaattgtcttctggggaatttgcagaatttgtaatttcagcacctcagtgcatttgasggcctgcgaagaaatccagcactagagagcagctcatggctgctgagccccatggcttcatttgggtagcagctgttcataagaaactaaacagattctt

SEQ ID NO: 183934 - DNA, 201 bp, Homo sapiens
ctattttgcgtacatgttgtctatggctacatttgcactataatagcagagatggaaagatgcaacagagactgtctaacctgcaaaggtgcaaaaccttraatatttactatctggcccttaaaaaaaaaaaaaagctcacctacttctgccttagagtattgttgtacttgcctcgaatgaacctttcatgaaaaatgg

SEQ ID NO: 183935 - DNA, 201 bp, Homo sapiens
gctgacccagatgttttttttgagagttagagagttcctggtgcctggagctgttcaaacttctgctgtatatagtggaaaagttaaggcaggtattcacrtcttaatggcatttcgtagcaatgatgaaaaaaatatgttttcattattttattttggaagatacagaaaaacactaaaaaaggatgtaaaaagaaacca

SEQ ID NO: 183936 - DNA, 201 bp, Homo sapiens
tcacaaggtagactgccacagtttcatagatgctggcagaagacatgaaacttctgggtcagagacaaagaactttgttattcaccacacagcaagcagcrttaagtttcatgttctcattagtttcctttgtcccccaccaagccctgtgggacttatgccaggtccctcctgactctttgcaggagttctaaacccaga

SEQ ID NO: 183937 - DNA, 201 bp, Homo sapiens
gccccatgtgtaaaaaaaaaaaaaaaaaaaaaaaaaaagcagatttagaaacagactgccagaaaatctcaaggcagtagctcattggatttcaggaaacmcaacgtataatttactgtaggagaaggcagagacaggaaagtgccaagtggaatgcatgcttttagtgtcctggacagatcccctttgcaggcaagtgcc

SEQ ID NO: 183938 - DNA, 201 bp, Homo sapiens
aataccacagaggcaaagttagaaaaaggaagcttctaacctgaggccagagggttggagaaaaggttagtataaatgatcgttttaaccaagaagggagaaaaaaaaatgttcatctcttctagtaagaaggagatataacaaaaaaaaataggctttacaaaaccttctcatagtaagtaggggcgaatacaatttctt

SEQ ID NO: 183939 - DNA, 201 bp, Homo sapiens
atgtgccatcattcaggtctcagctgaaatggcagtatgtcgtcttctcccagagaacttccctgaccccccgcccacacctcccttcctggtggtcacarttccttctcattacctggtctcctcttccacatagtttttatcacactttaaaatgctggtttgcctttatttgtttacttggtgactttttgtctcccc

SEQ ID NO: 183940 - DNA, 201 bp, Homo sapiens
gaagggagaaaatctgaaaaacagaccaaaaaagaaaaaggattctcaagggccaagtgctgtgttatgggatgggatctggattccttcttggactgacrtcacccacaaccctgggatatcacagaaagaaaaccatgtcttcaaggtcttcctcctcacaggttcccaccctttggttccagttcagggcaggagata

SEQ ID NO: 183941 - DNA, 201 bp, Homo sapiens
accttgtcccaactctgtgaccttgaacatgatctaacctcttggggcctcagctggctcatctgggaacaggaatgtaggattacctccctcagaaggcrtcatgaggatgacatgtgataatggatgtaggagttcttagaacagtgccctgcataggcactctaaggtatttgttaaataaaataaataaattgccca

SEQ ID NO: 183942 - DNA, 201 bp, Homo sapiens
tgatgctatatctacttaggttgtgtccaaggactgtgagcccaagccagggaagaatgagaaggctgggctactgccgattgctcactgttagggtagtyattcagtacacatagaatccctgtggcccttggtagagaaaatttagggacttttatgacttgaatctttcattgtcaaggtaaaataaatttgaggacc

SEQ ID NO: 183943 - DNA, 201 bp, Homo sapiens
aactttagagaacattacttccaataagaagaatcagttagatatatgtacaagtcagtgatagagacatacatttgggttctttggctctagatataacwtaaaactgttaaaagataattttcaagaaaaggtaaaatcaaggtacttttcttaagaaaaggtaaaaaaaaaaaaaaggtaaacctcacagagatgtaa

SEQ ID NO: 183944 - DNA, 201 bp, Homo sapiens
tgcccaattctctcttcattacacaaactcttcctagatgtcttacctgttccatgacttcaacaagacatgaatatatccccacttctgaacttcaagtycttatgcctgactacttttcctacctgttttctacctacctcaacattataggttgatgctgaaaatggtctactcctatttggtaaatagctactccaa

SEQ ID NO: 183945 - DNA, 201 bp, Homo sapiens
tcaagctggcagtttacagatactattcagcaggtgttttgaactccatctggatctcgttctaccaactagacctagaattccattagctgaaagttggrtttttacttggtcttaaaacaaaaaataaaataaaatctaaggcttcaaaaaagagatgccacaaactgtatgtgtaattcagattctagcatttccaaa

SEQ ID NO: 183946 - DNA, 201 bp, Homo sapiens
agtaagcactctaatatatcattattctctgcctcctcttaatgttttctttctccccctccccagattatttattaatccttcaggacaggaacaatgtttgtttgttttcatattcccactcctaataccagcatctactgcatcttagattttcaataaatatttgttgaatataatagtaataatttctcaataaaa

SEQ ID NO: 183947 - DNA, 201 bp, Homo sapiens
agaaagggagaacttcacttccttactgataggtcagctggcttttctaccatgtgggcagaagctgctgccacagctgttttctgaacagaggcctgggrccaggtactggcatggagcctagcagattcccacaaggtgccaggtactatgataagcatgctcaaatatggagtcttagtcattctctcagtaaccctg

SEQ ID NO: 183948 - DNA, 201 bp, Homo sapiens
ttgatagttgttccaaaatttggaaccaaattgggctgattctttatactaaagcatggtgaatatgaacattgaagaaaaaaacacgagtgaccccccctatactccctcccagacacagaggccaagtctcttgagtccccgcatctggattttggggagtaggttctgaagcaaacttaagtcagacttcattcaaac

SEQ ID NO: 183949 - DNA, 201 bp, Homo sapiens
ggtgcctgccacatctgccccagccagctgtcttgtaataagcagtgtctggccacgagcatcagacaagccattctgctacctacagagggtcctgtcaccccccagacctccagcaaagactccccctgcctatgggctttgtccaactccccacccgggaccagactctgttgctccatctcacaagcattgattatt

SEQ ID NO: 183950 - DNA, 201 bp, Homo sapiens
catgcctgtaatcccagcactttgggaggccaagagttcaagcccagcctgggcaacaccatgagaccctgtctctacaaaaaaaaaaaaaaaaaaaaaawattttaattagccaggcatggtgccatgtgtctatagtcccagttactcaggaggctgaggcgggaggattgcttgagcactgcaaggctcaagtgagct

SEQ ID NO: 183951 - DNA, 201 bp, Homo sapiens
atgcctgtaatcccagcactttgggaggccaagagttcaagcccagcctgggcaacaccatgagaccctgtctctacaaaaaaaaaaaaaaaaaaaaaaawttttaattagccaggcatggtgccatgtgtctatagtcccagttactcaggaggctgaggcgggaggattgcttgagcactgcaaggctcaagtgagcta

SEQ ID NO: 183952 - DNA, 201 bp, Homo sapiens
tatgagaaaactgaggcctgggctgcacagctagtgagcacctgagaccagatttggacccaaggccgcctgaggtcaaacccatatatatatatatatawattttttttttttttttgagatggagtctcgctgtgtcacccaggctggagtgcagtggcgcgatctcagctcactgcaagctccgcctcccgaaacccc

SEQ ID NO: 183953 - DNA, 201 bp, Homo sapiens
tttggacgctgttattcttgcttcagaaatgatagaaccgtctttcataggagacctttctctcctctctctctctctcatgtttgttttttagcctgcttttttttttttttttttttgcactagtgtctttttatctatgtcctttccagccaaggtggccagtagtttgagccaaaggaaggtacaggggcattcttt

SEQ ID NO: 183954 - DNA, 201 bp, Homo sapiens; identical to SEQ ID NO: 32285

SEQ ID NO: 183955 - DNA, 201 bp, Homo sapiens; identical to SEQ ID NO: 32286

SEQ ID NO: 183956 - DNA, 201 bp, Homo sapiens
ggtgaatttcctgttcatgtcatttatcattgtttttctatttgcatgttcttcttttttattgatttgtaagagctttttcatatttgaaaatattgackttctctgccatatatgtttatgtatttttcattttgttgtttccctttaatattatttgattgtaagttttaacattattaccgtatgatttttaaactc

SEQ ID NO: 183957 - DNA, 201 bp, Homo sapiens
tgtattccttatctcaatgaactgcacctagtaactcaagatagagacctgaaagccagcctaggagcctccatgtctccctcccaaacccaccccacctycatacccccatttctaatgggtatgcttcctgcagtttatcttcctcataacttgagactccaagaacctagagccactactgctagaacacataacttt

SEQ ID NO: 183958 - DNA, 201 bp, Homo sapiens
tagcgtacacattggatccacccagaactgaatattcatctggctggatgacagtcatctcaagctcaaggtatctgaaattgaactaatctccaattctmtactgactttcctgtattccttatctcaatgaactgcacctagtaactcaagatagagacctgaaagccagcctaggagcctccatgtctccctcccaaa

SEQ ID NO: 183959 - DNA, 201 bp, Homo sapiens
attggctcacagttctgcagctgtacagaaagcatagcactgacatagcttggcttctggggaggctgaggagcttttactcatggtggaagatgaagtakgagcaggaacactacgtggccaaagcaggcgcaaaagattggcggtgccacacacttaaccagatctccggggaattcactcactgtcgcgaagacagca

SEQ ID NO: 183960 - DNA, 201 bp, Homo sapiens
ttttcctacctgttttctacctacctcaacattataggttgatgctgaaaatggtctactcctatttggtaaatagctactccaatttggtaaacatcatmctgtttgcccagatcagaaaaacctgagagtcatttggaatccacccctcaccatccttagcctttacacccaatcagccatactactgtgcatgttccc

SEQ ID NO: 183961 - DNA, 201 bp, Homo sapiens
gggccgaatggagagcgaggagctggtggtgcagactgaggaagacggtgagcaagggaggagagcttacatgggaatggggatattgaatctattcacasggccatggcagtcagttatgaggcttttatttttcctacatttttaattccctcacacacacctttcttttcttaggccttcaatgaaggactatgtaaa

SEQ ID NO: 183962 - DNA, 201 bp, Homo sapiens
agtgatccacctgccttggcctcccaatgtgctgggattacaggcgtgagccactgcacccagctgagatctggcaaatttctaaggcagattattactattttttcttttccagtagatgatgatgtatttttaaatgtgatttaattttgctacttccatacctttccatttttggtccattgaaatggaccttttcag

SEQ ID NO: 183963 - DNA, 201 bp, Homo sapiens
ctgtcaaaaagatcacttgccacttctgacttgttgggttcagctagtgagaactgccacaggcgaccagaggaagggcataaggtgtagtcagggcattttttttttttttttttttttttgcctctggttctctccctgtcaggttgtctatgactggctgggcctttcaagagaaagccgctgcttctgttcagggta

SEQ ID NO: 183964 - DNA, 201 bp, Homo sapiens
gtaaagaaaaatgttctctaaattatattgcctgtgtcaaaaatcatgatggcagtgattgaatggtggagatatgtttggaaaagctgtgttccctgttktagcagaacatgtaccccagcttcccgatggtctcttcagaacccttgtttcttgcctgcatgttttgcagatccggtacatggcccacagaacgtggaa

SEQ ID NO: 183965 - DNA, 201 bp, Homo sapiens
tttgggaagccacaggatattccaaggagagtatgaccttccagatttaaactctcatctcactacttaccagctgtgtgaacctgagcaacttactaaasttctctgggctaattccttatctatacatttggaataactgtacccatctcagtgggctcctgtgaggctttaatgaacagatatgtagagagtcattca

SEQ ID NO: 183966 - DNA, 201 bp, Homo sapiens
ctttgatgcacccttaagaatttaacaatttcacatttatttttatggttaacatttatttaagatgttttccttttatatatttatgttttctattagaygcatgtatttaaataagacaagggagattgatgtaaagaaaaatgttctctaaattatattgcctgtgtcaaaaatcatgatggcagtgattgaatggtg

SEQ ID NO: 183967 - DNA, 201 bp, Homo sapiens
gtatctttgttctcattagtttcaaacaacttcttgatgtctgccttaatttcttttttttatccaaaacttattcaggggcatattgtttaattttcatraaattgcatggttttgagcaatgtttttagtgttgacttctatttttattgcactgtgatctaagagtgtgtttggaatgattgtggttcttttgcattt

SEQ ID NO: 183968 - DNA, 201 bp, Homo sapiens
gtctaaatagacaataaacatataaatattaatattgtgaaagtggtatgaagaaaaataaagcatgataaggagagagaggtgttccctggctctccagrgggctgaggtggaagaaaaggactcctgttttaggtaagatatcagagaagacctctctgattgactgaaatgtatgcaaaggcctgcatgaagccaggg

SEQ ID NO: 183969 - DNA, 201 bp, Homo sapiens
ggattacataagccaaaactcaattttcttgtttttttttctttgcttttccttcttcttcttctttttttttttttctttctgtattctggacaatatcytcaacttcatcttctaagccatctattgcaatttttatttatacttgtatagttttaacatctgatagttatcttggttcttggaatgatccttttttac

SEQ ID NO: 183970 - DNA, 201 bp, Homo sapiens
tcagttgtgccatctcaataatggggacagtagtagggcctaccttcagaggttgctgtgaggacttaagtgtttagtgccgtgcccagcacacaataaayacttagttaggtattaattttactgttgctcttgtttctgttttaactgtctttattacccatgaactgctcttcccagacctctggacctgcaaaccat

SEQ ID NO: 183971 - DNA, 201 bp, Homo sapiens
gctcatgaactagatgctacaattcggtttttgcctctgcctttctgtgcattcactaccctattacttagtcggaagattccccagctctttggtttgaktcattactggcttaatcgaccccatgatgttccaatggctgagtttttcatatgcttgaaacttaccatttcactacactggaaagggaagaaaagtttg

SEQ ID NO: 183972 - DNA, 201 bp, Homo sapiens
aggttgattccagatggaacaagattatatttgattttattaatgtttattcattgatattggcaacattcttttctgtcccgagagaaagagaacgaacmttacaaagtgtaaatattggccctaaattgtcactcataaaggatattaatgcctgtagtctgtttcacgaaccaattttacagaaagagggtttttttt

SEQ ID NO: 183973 - DNA, 201 bp, Homo sapiens
ctgagagggggatgtagagtaaggacaaagcaccccaacagccctttttgctgttaatgaagcatgttcgtgaaggaccccttgattgaagtgatggaggwgtctgttcttcttgagccattttttccttggatgcatttgtcttcaatatgacagccaataacccagtaaattaaacagcatgccccaaggcccagggtc

SEQ ID NO: 183974 - DNA, 201 bp, Homo sapiens
aatagtgagaaaaataatcagtatcaggaaaatgtgaaggtcaggaccaggatatattgaaatataactatattacattaaaatgtaatctaaaatatgcrctctgataattttaaattccactttggctctgggatttctagtagaaaatgcccaaagaagaagataacttttattgggcacctactatgtgctaaaact

SEQ ID NO: 183975 - DNA, 201 bp, Homo sapiens
gccagaggaggtcagctgcaggaggagacagaaagctggatttttgaaaatctgggagtggataaatatttgatatgtcttggcttgagctggacattctrtacctgagagtcagaggaaactaattcagaatctcaattctagggacgctacccttctaaagcagtctggagaaaaggtggaaccaaataaattggcatt

SEQ ID NO: 183976 - DNA, 201 bp, Homo sapiens
atgttcgtgaaggaccccttgattgaagtgatggaggagtctgttcttcttgagccattttttccttggatgcatttgtcttcaatatgacagccaataayccagtaaattaaacagcatgccccaaggcccagggtctttagaagagctctgtaaaaaccccagacaacctcaggggagccgtttccccagaggatcagg

SEQ ID NO: 183977 - DNA, 201 bp, Homo sapiens
taatggactttttctcagtacatgcctacccctgtgctgtaagccatgtggcacggtctggggagagaggtagtttcaaagatgaataaaatgaggtattrtatcacaaataatacatggttctacttgtaagcctttcatagtttacgaagtctttctgcaaaacgctccactgcagcaatagttccttattcctgtagg

SEQ ID NO: 183978 - DNA, 201 bp, Homo sapiens
gagtgttaaatgctaccaaggaaacaaatcacttgccttggtaggcatgagctgtttgagcagactggactgcagcagacctggctggatccaggggcccragattggtccttccctccactttgatggcagggcatgggtggtgctcttggtcaccatggtggaggaaaagatgagctctcaagaggtgtggactagggc

SEQ ID NO: 183979 - DNA, 201 bp, Homo sapiens
tgtcatcttcttgttcattttcagtccaaacaaaaatgcttcaaaataaattccttttgaattcctgtgatatggggacttggtagtctgctcttcccatratggcatttgacagattaacttgcctactgggtaccatgagttaactccgtcctgatttttatgctttccctctattgaattattccatgtctggaaggt

SEQ ID NO: 183980 - DNA, 201 bp, Homo sapiens
gagaaagcaattacattagttcagaggaacaaacgaagatgatacctgaactattaatacgttaggaactgcaaagatggagggatctgagccaggagatrtttcagaagtagaattggcaaagttttggtattgtcaggactgatttttaccaggtgggacatggagacagagggatgaagtgagcagcacatattcctt

SEQ ID NO: 183981 - DNA, 201 bp, Homo sapiens
atgagaaaatcaagacttggagaggatgtttattaatattgtgctgtttgcaagctttgacaacagactcttcacagtgcttttctcctgttatccagggrtaccatcgacctcggcactacattgcgactcaaggtaagtgccctccctccacctagtgcctcagagaggcttcaggggtcccaggggaaagggctctct

SEQ ID NO: 183982 - DNA, 201 bp, Homo sapiens
tttggaggctgggatcatctggaaagtggacagcaacaggcagcttagcagaatctgctggccaagttcacatgcctgccccttcccccgcctccctaagkttcctctaaaggagctccatccagcttcctgagtgaggcatttatttgtttgtttgtttgctggcttgtcctacagatcaactacaaggctgtcggctcg

SEQ ID NO: 183983 - DNA, 201 bp, Homo sapiens
ccgccgtggtattccgtatggaagtgggaaggaaaggcatgagaaagcaattacattagttcagaggaacaaacgaagatgatacctgaactattaatacrttaggaactgcaaagatggagggatctgagccaggagatatttcagaagtagaattggcaaagttttggtattgtcaggactgatttttaccaggtggga

SEQ ID NO: 183984 - DNA, 201 bp, Homo sapiens
tttctaacacaaaggaatgataaatttagaggtgattaatatattaattaccctgattattatacattatatacatgtatcacactataccccataaataygtatataattagtgtcaattaataataatagaaaaaaagagaaaggctcatcaggagctcactgagtctctggctatgctaagttgtcactggatcccct

SEQ ID NO: 183985 - DNA, 201 bp, Homo sapiens
ttcagggagagatgggatcccacagtggggctgttggggagggaattccaacattagaatatagttggatccactggcaatagtagaaaaaacaagaatarcaactgctaggtgtctagtgtccactatgtgcgaggcactgtgctctgtgtattttatgcattgtctcatttaatcctcacaaccctataaggttggtcc

SEQ ID NO: 183986 - DNA, 201 bp, Homo sapiens
taatagctgttactacaaatggctaaattaccttcccaaaggaatagatatagtcgcattcctatcagctgagtatgagggaagggaggtctcatgaaggaaaaaaaaaaaggtagaggggaagtagttcataattgatgtaatttgcattttaaatgtgtttggcaaggttgactctgctttcacttctttgttagtact

SEQ ID NO: 183987 - DNA, 201 bp, Homo sapiens; identical to SEQ ID NO: 32298

SEQ ID NO: 183988 - DNA, 201 bp, Homo sapiens
aacagaataagacactgtccacacatacatacacacacacacacacacacacacacacgcaacttttctcttcttggttgggattcctggatccagttccyctttccacctttctctactgtgctctctgcttccagagtgcattctgtatgaagtctgtcaaaaagatcacttgccacttctgacttgttgggttcagct

SEQ ID NO: 183989 - DNA, 201 bp, Homo sapiens; identical to SEQ ID NO: 32299

SEQ ID NO: 183990 - DNA, 201 bp, Homo sapiens
aattagtgaataaagaattccattttaggctacatgtttctccaaattatggccaaaacgagacgtataaagaaactttctcggctgggcacggtggctcmcacctgtaatcctagcactttgggaggccaatgcaggcggattgcctgagctcaggagttcaagaccaccctgggcaatatggtaaaacgctgtctctac

SEQ ID NO: 183991 - DNA, 201 bp, Homo sapiens
gtcattcatctcccctctgttctctctcctctccttctttgcttccatccgtcaacccatttgctgaagaagaaaaaagaagagaaaagaagggtagaaamtaggaaagacatatctatgaggcagctccagcatgccaggaaccatgctaggtgttttatgctatatggatgtattattttatccatcagacaaggcaat

SEQ ID NO: 183992 - DNA, 201 bp, Homo sapiens
ggagtctgcagtttttcttctctgtgccacatgggcctccagttgaatcatgtgactggcaatgcccatgggcaagactggccaggagcaaagcttcctcrgaggaaggaggtcagcagccccaagcccagttcaaagggagcccctgagttcaaggcaaacctgggtgacatagggagaccccgtctatacaaagaaaaa

SEQ ID NO: 183993 - DNA, 201 bp, Homo sapiens; identical to SEQ ID NO: 32300

SEQ ID NO: 183994 - DNA, 201 bp, Homo sapiens
agcctcaggtgcctctgggcatcaaaatgtgctgatgaggaacttaagtgtggaatgaattttggtgcttaaatccctggtactggaccatggaataaackcaggagaaatgaatgcatatttctataaacattcccacataagaatgttggtaatagctttatttgtaatagtctccaaatgaaaacaacccaaatgaca

SEQ ID NO: 183995 - DNA, 201 bp, Homo sapiens
ttttttttttttttttttttttgcctctggttctctccctgtcaggttgtctatgactggctgggcctttcaagagaaagccgctgcttctgttcagggtrcctccttttcacagctctcttctttggggctctggttactgcttcctctatttgttcctctggtcccataggtaataaacagctctcctactgaggcact

SEQ ID NO: 183996 - DNA, 201 bp, Homo sapiens
catgcaccaccatgtccggctaattttgtatttttagtagagatggggcttttctcagttggtcaggctggtctcgaattcctgacctgaggtgatccacycgcctcggcctcccaaagtactgggattacaggcatgagccactgcgcctggcacttggttgattttattacatcaaaaataaaggactcttacttatta

SEQ ID NO: 183997 - DNA, 201 bp, Homo sapiens
gatgaggtgtgggtctgtagctaaactcaagatgtcacatctagaactaaattcaagatgctaaatgggctctgacagcagggtaagccttggccctacayatgatatagtggtattttcccccattcttaggggacaaaatataatatgcttgcattattcctgtattttcctattatagctgtaatggtaaccaactct

SEQ ID NO: 183998 - DNA, 201 bp, Homo sapiens
atatcagtcataaatggctcatccaagccatttgcaagttctctgggtccactggaaagaattacattcagccttaatctggctcccagtgatggcaaagyatactcacagtgtttgtgtggatcacagacttagagggacttttccaaagtctgtaggctttggtttacagaaaagctgatgcctgacctatgatagaga

SEQ ID NO: 183999 - DNA, 201 bp, Homo sapiens
acatcctgtgctctcacagtgccaaacttctgatgatgtcctgcatgcttttcatataatcatgccttttcaacatcgtgtgtgtgagtaaaataacagtktttttgtttattcaaagctttatatatgtgtatgcatggcatagagtcacatgttttagtttgtttattttaggacaaaggtatctatttattttattta

SEQ ID NO: 184000 - DNA, 201 bp, Homo sapiens
gggaacctgaggcacgagaatcacttgaatccaaaggttgcagtgagccaagatcatgccacttccatccagcctgggcgacaaagcaagacactgtctcaaaaaaattttttttttttaaagaagtctctatacttaaagattggtgcccagtgaatgaagttcccagtgaatggtaactagtgttacactctttatacc

SEQ ID NO: 184001 - DNA, 201 bp, Homo sapiens
gtagatcacaagcttcacccctgagctgggtaggatctcatcccctctacatctgcttaaaggagatgagcaggtggattcccagaggaaagctttggtawcagtcaccagaagaagggaaaatagctactgggtggcacaataacagatgtcacttcactgtctattgattcaaccagatggcttttcccattaatttct

SEQ ID NO: 184002 - DNA, 201 bp, Homo sapiens
tctctcctctgctctttataaggacaccagtcatattggtctagggcccaccctaatgacctcatcttaacttgattatagatgcaaaaaccttattttcraataaggtcacttcacaggtacagaaggtcttcaggtgatcctctactgtcaggacagaaattataggaggaagtaaccagaaccagggaggtagggaag

SEQ ID NO: 184003 - DNA, 201 bp, Homo sapiens
tggttacccttgaacaacatgggtttgaactgcacagctctacttaatatatgaattttcttctgactctgtcactcctgagacagcaagaccaacctttcttcttcctcctcctcctcctcctcctcctcagtctactcaatgtgtagacaatgaggatgaagaactgtatgatgatccacttccacttaataaatagta

SEQ ID NO: 184004 - DNA, 201 bp, Homo sapiens
cccttgaacaacatgggtttgaactgcacagctctacttaatatatgaattttcttctgactctgtcactcctgagacagcaagaccaacctttcttcttcctcctcctcctcctcctcctcctcagtctactcaatgtgtagacaatgaggatgaagaactgtatgatgatccacttccacttaataaatagtaaatata

SEQ ID NO: 184005 - DNA, 201 bp, Homo sapiens
ttgaacaacatgggtttgaactgcacagctctacttaatatatgaattttcttctgactctgtcactcctgagacagcaagaccaacctttcttcttcctcctcctcctcctcctcctcctcagtctactcaatgtgtagacaatgaggatgaagaactgtatgatgatccacttccacttaataaatagtaaatatattt

SEQ ID NO: 184006 - DNA, 201 bp, Homo sapiens
ttctcattctgttgggttttacaaagaccgccgtggtattccgtatggaagtgggaaggaaaggcatgagaaagcaattacattagttcagaggaacaaaygaagatgatacctgaactattaatacgttaggaactgcaaagatggagggatctgagccaggagatatttcagaagtagaattggcaaagttttggtatt

SEQ ID NO: 184007 - DNA, 201 bp, Homo sapiens
taaccttgaaagctgcaatctgggctttaagtttctgtcagtaaattgggagtattttttgcacagagaaagtgcacctgtgacattggatttcagctggrgacaaaaaggttttgttttttgaggtttggaaaacttgagtgtccaaagtcatgacaagaacaaaaatgttttaagggccaaaaaataaaaaataaaaaa

SEQ ID NO: 184008 - DNA, 201 bp, Homo sapiens
ctcaagacatcccataataccaacgtctatctagcctctattaaaattttgtgtcttccctaacaagttttcttcttctcatctatattttacaaaacatragatgcccttgagtatactattttgtacactactcattttacaaaccaatactctcgcatttaaaaaacagctcttttgttgtgtcttgttataaaagga

SEQ ID NO: 184009 - DNA, 201 bp, Homo sapiens
tttagtgatacatttataaaacaaaacattggtgaagactcctgtggtcctaacccctccattcgtctgtctgtcaagcagggcaactgcttctgcttctytgcagaggaatttgtcttcatgagtatatggaggtagggcacctgacgtacaatctatccctgagagcccagaccttcacagaaagataaatctcccagt

SEQ ID NO: 184010 - DNA, 201 bp, Homo sapiens
gaacgaggggtgctgccatcagtacccttacagcctgatgggcgaggcagccacaatagaaggcactgttaagccatgggaggaagctgtggtcagtgagkgctcagatgttggaggccatctctgcctggagaccagggaagtgagactgcatttggctattttttttttccctatgtatggttccttttctacacttaa

SEQ ID NO: 184011 - DNA, 201 bp, Homo sapiens
ctgagctgtgcaaggggtggtgtttgtggaaggctgtcttgcaatggtagcttggtggcatttgattaagatcccctgattacaaatgtaaaattaatgcycagagtcagtcttctccccattgtacatgctctttgacatcactcatggctttatgaaatgtgcggccagttctgtgtaaagagttttcagagtggggat

SEQ ID NO: 184012 - DNA, 201 bp, Homo sapiens
tgaatattttgttaattctgcaaacattccaagaaggaaatgctaagttaccgcccaaaatatttctagttacgaatattccaggtcaccagctaattttrtgcaggcgtttccttctctttctttgcacgtatctacttttaaagtggttgtaatttgtgttcagagtaagaggactatcttttctagactccaaattgc

SEQ ID NO: 184013 - DNA, 201 bp, Homo sapiens
gtggagcaggtgtccacattcctgaactggcaggcagaaagcagggcttgcatcctacatgctgtgcatcttagctaagggactactctgtccaggcctcrgtgtcttgtctatgaaatgagaagatgctatagttcccttacagttgcgatgtgtaactttaagctgagatctagtcatgccagcagagcatcctggatt

SEQ ID NO: 184014 - DNA, 201 bp, Homo sapiens
taaaactcaaaggaaaaaaaaatagtagagaagccaggtcacagccatgcaggcaaatagaccagaattatacatgtgactccaatcttcgagtacctgaggccacctgaggctctcctcccctgcagacaggcatcaggcactatttccagcctctctgcttccgaaacaggagggggctcccaataaatagcctgccta

SEQ ID NO: 184015 - DNA, 201 bp, Homo sapiens
gagatggtaatttgcaatcacttgcatccactggaataatataatgggaaaatgaaaggggtgatggtgcaggtagaaggcagattgtatgttggagatgsagcagagaagagccaaaggtgaccctcaaatttcattctgaaagggggtcttttgcactgtttggaatcaatgggaaagaattttccactatggagagta

SEQ ID NO: 184016 - DNA, 201 bp, Homo sapiens
tggtacccaacagaggcagtgagcagacaggatgctcattgcctgcaggacatgagtggttgtgagtgagttttctggccgcagctgtctatgcatgtatktgcatatgtgtgagtgtgtgtttgcctggggagaaagggagacagctgagaaagctttaggacaaggggagatatgtgatggctttttgcctaagcgtga

SEQ ID NO: 184017 - DNA, 201 bp, Homo sapiens
gagcctcatgtttcttgtgtgtaaaatgtggaagatggtttctggccttcaaatctcacaaggattttatgagcacccagataatcgtgacatgtgctgawgcttgatggcctacaaagcgatttgtagataatgcttttgtgacgggtgagatggtaatttgcaatcacttgcatccactggaataatataatgggaaaa

SEQ ID NO: 184018 - DNA, 201 bp, Homo sapiens
cactagatttaggtctattgaattgtcagttgatcctcttcctggggtgggtggtcccctaaagcttcagtttgctcacctgtttcaaaatgagtcagctrctttaatgagaggtccttctgtttcatggacttttgtcgtttgtttttctaaacccattcattttcttgtctttgcccatttgagtcctcatatgagata

SEQ ID NO: 184019 - DNA, 201 bp, Homo sapiens
tttgccatgctgggggattcacaagccctagatgagggtgatggggcaggagggaaaggacccaccagctatgccccagaattggtacccaacagaggcastgagcagacaggatgctcattgcctgcaggacatgagtggttgtgagtgagttttctggccgcagctgtctatgcatgtatgtgcatatgtgtgagtgtg

SEQ ID NO: 184020 - DNA, 201 bp, Homo sapiens
agaaaaaaaaaaaagaaaacaacaaaaaaaaccgagagttcctctatacaagctctctctttgcctgagaccacctatccacgtaagatgtgacttgctcytccttgccttctgccatgattgtgaggcctccccagccatgtggaactgtaagtgcattaaacctctttcttttgtaaattgcccagtctcaggtatgtc

SEQ ID NO: 184021 - DNA, 201 bp, Homo sapiens
aatttactgagcctcatgtttcttgtgtgtaaaatgtggaagatggtttctggccttcaaatctcacaaggattttatgagcacccagataatcgtgacaygtgctgatgcttgatggcctacaaagcgatttgtagataatgcttttgtgacgggtgagatggtaatttgcaatcacttgcatccactggaataatataa

SEQ ID NO: 184022 - DNA, 201 bp, Homo sapiens
ggcaactgaaggtctaagatggggtcagggtgagaggaggcagttgtgagctggtgagagggagatcaccctggagtcctggtttgagatctgagaagagrtgtgggcatgtgagtgtggaacggagaaggaggttcactcagctgtagggaaatagccataaagcctcagcaaccaggagacgctgcttggaagcggttg

SEQ ID NO: 184023 - DNA, 201 bp, Homo sapiens
gatcatctcttaatatgttaattcaacaggtctttacaggatacccgcttgttccaaaatctatgtaaggccctggggaattggtagtgaacaaggccaamaaggttgttgtccttgtggttatagtctagcagggcaatagccctgtaagttagccattcagcaagaaggagatgatgtttctagttggcaactgaaggt

SEQ ID NO: 184024 - DNA, 201 bp, Homo sapiens
tattcctttgtctactagcatactggaattatacagttttatttactgaaatgtaaagtatgcttgaatatcatagatagctaatctacccccaacacccrccttcaccccatgtaatgctcatcattttcagttgtctaatattgttggttgttcatttttcacataaaatttagaattatcttgttggtgtttttattg

SEQ ID NO: 184025 - DNA, 201 bp, Homo sapiens
gactgatgaagaaaagttggaagataaatggtatgtgatcccctctggggcagaagatggcattccatagaccagtagttctcaaaatatagaacctagcrtctcctaggaactcggaaatgaaaagtttttgcactcacccctgatttaccaaatcagaaactggtgatggagaccaacaatgcctgcttaacaaggtga

SEQ ID NO: 184026 - DNA, 201 bp, Homo sapiens
ccatcttagtcagtttgggttgttataacaaatttccatagattgggtggtttaaatgacagacacttattcattacatttctggaggctgagaagcccarcatcaagcttccagtaaatccagtgtctggggagggctcacttcctgacttgcagatagccgtcttctcgttgcatattcacgtggtggaaagtagaagc

SEQ ID NO: 184027 - DNA, 201 bp, Homo sapiens
tctcactctatcccccaggctggagtgcattggtgtgatctcggctcactccaacctccccgcctctcaggttcaagtgattctcctgcctcagcctcccsagtagctgggacttcaggcgtgtgtcaccacaccgggctaatttttgtattttagtagagacgggatttcgccatgttggccaggctggtctcgaactcc

SEQ ID NO: 184028 - DNA, 201 bp, Homo sapiens
gagggtgtcactatgttgcccaggctggtcttgaactcctggcttcaaacagtcctgcctcagcttcccaaagtgctgggattacaggcatgacccatcaygacctgcctccctgttcttttttggaaataaatgtacaatggcattttagcttgttgatatccgcaagcttgttaatatcctgctgagtttcgactgggt

SEQ ID NO: 184029 - DNA, 201 bp, Homo sapiens
aaatctttgattctaatctgctcttctaagttgtgagaacttctgagagttacttcatgtctctgagctttaatttcttcatctatctattatagataggratatatatatatatagggatagcgaattgatgctcaaatactcaagtatataaaaattcaagtgatgcagtgatattcttggtttcaggaaggtggggtt

SEQ ID NO: 184030 - DNA, 201 bp, Homo sapiens
aatctttgattctaatctgctcttctaagttgtgagaacttctgagagttacttcatgtctctgagctttaatttcttcatctatctattatagatagggatatatatatatatagggatagcgaattgatgctcaaatactcaagtatataaaaattcaagtgatgcagtgatattcttggtttcaggaaggtggggttt

SEQ ID NO: 184031 - DNA, 201 bp, Homo sapiens
atctttgattctaatctgctcttctaagttgtgagaacttctgagagttacttcatgtctctgagctttaatttcttcatctatctattatagatagggawatatatatatatagggatagcgaattgatgctcaaatactcaagtatataaaaattcaagtgatgcagtgatattcttggtttcaggaaggtggggtttc

SEQ ID NO: 184032 - DNA, 201 bp, Homo sapiens
cttggaaagcccagaagactgtgggctaaggaggagactttagggaaagttctctgggtgctttttagtgaaatgctgtaggctgtgctaggggaatgtaccctcctgtgtcccctacaaaatgattcgtgaaaggaatatgcttccttagagttgagacccaaggaatgctctgggaattgcggagagagcggattcagg

SEQ ID NO: 184033 - DNA, 201 bp, Homo sapiens
ttgaattatctgtctatttcctgctcgaatcccatggagaccccattatctttaccatgtatcactgagagtgcttatcatcatgcattttgtctcagccmttcaaggtaaggatcactatccccatttaatactgagccttagaagaaggaagttacttgcctgagatgacctgactactaaacaaaacctagattccta

SEQ ID NO: 184034 - DNA, 201 bp, Homo sapiens
aaattagctgggtgtggttgtgggtgcctgtagtcccagctactcgggaggctgaggcaggagaatggcgtgaacccaggaggcagagcttgcagtgagcrgagatcgtgccactgcactccagcctgggcaacagagtgagactccatgtcaaaaaaaaaaaaaaaaaaaaaaagaatctccagcaaactgaccatgacc

SEQ ID NO: 184035 - DNA, 201 bp, Homo sapiens
gccctgaggtggaaatgacttaggcaagtcttaaaaatgtagtaaaaaggagaccggagtgactggggcctcctgagcacagaggacagtgatgagactgkgtgggggaaagggtgggtagggccagggatggcaggactcctagaacttgcattttatcctgaaaggaatggaaagccctaggagggttctacacagagg

SEQ ID NO: 184036 - DNA, 201 bp, Homo sapiens
ttccaagtagcattggtcaagggcacctgagtccttgtgcagtgttaataaaggatcccaagatttgggtggttaagatatcagggttaacccttatcctaagaagaactccaagactgccaacatctaaggcttccttgtggacagacttgcttctgttcttacagccattctatcagacagttaacagactagatttcc

SEQ ID NO: 184037 - DNA, 201 bp, Homo sapiens
aataaaaacagtgagtgcaaaggccctgaggtggaaatgacttaggcaagtcttaaaaatgtagtaaaaaggagaccggagtgactggggcctcctgagcrcagaggacagtgatgagactgtgtgggggaaagggtgggtagggccagggatggcaggactcctagaacttgcattttatcctgaaaggaatggaaagcc

SEQ ID NO: 184038 - DNA, 201 bp, Homo sapiens
ccaagtagcattggtcaagggcacctgagtccttgtgcagtgttaataaaggatcccaagatttgggtggttaagatatcagggttaacccttatcctaagaagaactccaagactgccaacatctaaggcttccttgtggacagacttgcttctgttcttacagccattctatcagacagttaacagactagatttccca

SEQ ID NO: 184039 - DNA, 201 bp, Homo sapiens
ggtgggggtagggtggggaaaaatcccttttcatacacatatgcataatacgcataaagcccacatacagccatgcaggtatgcatagcgtccatatacarctatacaccacatctgtagagttaaaattcataggggtacaacacagaaagtctaaatacatttcttaggaggtgatagtaaagaaaaaaatgattgaga

SEQ ID NO: 184040 - DNA, 201 bp, Homo sapiens
tgggctataatttgcagagaaccggaaccagagtattgtaactggttgagttgtttgtaagcatttgaggctacttttgcggaatatgccaaaattattgrgggatgctgtaaagacagctaaggaggttgtagatttaggccattgtattgtgagcataaacatgagtgtaatcttgtgtatcaaaagctagtgaggcct

SEQ ID NO: 184041 - DNA, 201 bp, Homo sapiens
tcccatggattctatgggagacaactatgatgaaagacatcttcaggtagcttcttcgctgtgacttgggctataatttgcagagaaccggaaccagagtrttgtaactggttgagttgtttgtaagcatttgaggctacttttgcggaatatgccaaaattattgagggatgctgtaaagacagctaaggaggttgtaga

SEQ ID NO: 184042 - DNA, 201 bp, Homo sapiens
gaaaaaaaaaaaagaaagaaaggaaatggtatattcaacattagtcataacaatttgattaaaaatttcaaatatcattaagggagatatgtggcttaccaaaaaaaaaaaaagggacaagtagccaaatgctgagaaacacatatgtaagaacttgcaatctgaaatttgaagacagaattacaagtgtatttgactact

SEQ ID NO: 184043 - DNA, 201 bp, Homo sapiens
ggatgttggcattcccatggattctatgggagacaactatgatgaaagacatcttcaggtagcttcttcgctgtgacttgggctataatttgcagagaacyggaaccagagtattgtaactggttgagttgtttgtaagcatttgaggctacttttgcggaatatgccaaaattattgagggatgctgtaaagacagctaa

SEQ ID NO: 184044 - DNA, 201 bp, Homo sapiens
aaaaagaccaagtctgagaattacaagtcttgagttgcagtctaaactttgtatctgactagattaatttactgagcctcatgtttcttgtgtgtaaaatrtggaagatggtttctggccttcaaatctcacaaggattttatgagcacccagataatcgtgacatgtgctgatgcttgatggcctacaaagcgatttgta

SEQ ID NO: 184045 - DNA, 201 bp, Homo sapiens
gggaatgaacgacattgggatggcaaagacattgagaagcagagccggtaacaaggcatggagccctgtattatttctggtatcaaggaatgtgtggtttyattattattttcataaatggtctcagttcagtttttgttgcttgttattcacacccagggcacctggtgttcaccatgcctgcatcctgcccggcacaga

SEQ ID NO: 184046 - DNA, 201 bp, Homo sapiens
aaaggaacataaactttaaaagcagagaagaaaatgaatgtgttagtggcccagagttgtgggaaaagccacccactaaattacatttctgtaccaaaaayggacttcaggcaaagtgggaatgaacgacattgggatggcaaagacattgagaagcagagccggtaacaaggcatggagccctgtattatttctggtatc

SEQ ID NO: 184047 - DNA, 201 bp, Homo sapiens
tattacccttatgattattatcccattctacaagtcactttgcatgttgctgaatcttctgaggggttcctaagaacaatctagtagcatgagggtcttawtggaaatgctccagtctctcccaagacttgcaggagcttttaggagtttctctgttgcctgtgactttgcaggaaagtggtgatgtgctgcctgttgtgc

SEQ ID NO: 184048 - DNA, 201 bp, Homo sapiens
cattcctaataatgtgacctgtagagtgtcctaatgtcactatgcctcagatctcccctctgaaacatagagatattgacagcatttccctcacagagttrtcaggagagttaaatgaaaggatatatagaaagccgtttgaccagtgtccggcagaaagtaagcactatcaaataggcgtttattacccttatgattatt

SEQ ID NO: 184049 - DNA, 201 bp, Homo sapiens
ctctgtgtccccacccaaatctcatctcaaattgtaatccccatgtgtcgagggagggaatgggtgggagctgactggatcttgggggtggtttccctccrtgctattctcatgatagtgagggagttattgtgagatctggtggttctaaaagtcgcagttttggccaggtgtggtggctcacatctgtaatcccagcac

SEQ ID NO: 184050 - DNA, 201 bp, Homo sapiens
cacaatgagatatcaccttacacccattagggtggccactataaaaagacaaacaaaaagaaataaacgtcaagcatctggaaaaattggaacctttgtayattgtttgtgagagtgtaaaaatggtatagtctatatggaaaaccaaaaataaaaaatagaaccaccatatgatctagcaatcccagttcttgaaataga

SEQ ID NO: 184051 - DNA, 201 bp, Homo sapiens
tggctctgtgtccccacccaaatctcatctcaaattgtaatccccatgtgtcgagggagggaatgggtgggagctgactggatcttgggggtggtttcccyccatgctattctcatgatagtgagggagttattgtgagatctggtggttctaaaagtcgcagttttggccaggtgtggtggctcacatctgtaatcccag

SEQ ID NO: 184052 - DNA, 201 bp, Homo sapiens
agtgaaaggaaggaaggagagagggtgtatcacctgaggccttcccctgggccctaacacacccaacattatagcaaaagactgtaacaaggaatatgggmgttataaaccaggcagagtggacaaatccaatctatatattgcatgacaccacaggtatctcatgaaatctttgagtcactccaatgaggaaatatttta

SEQ ID NO: 184053 - DNA, 201 bp, Homo sapiens
agtgaagacataacaaaggcaaggaagtcactgattctattttgaggaaagataccatgggttaacgggcccagtaaagtttttggtataaagtagatgcmagatgtttccttaaagaaatgacacatttggcctggtgcggtggctcacacctctaatcccagcactttggcaggccagggcaggctgatcacttgaggt

SEQ ID NO: 184054 - DNA, 201 bp, Homo sapiens
cagattcttatttttcctgctgactttgagaacaactctcatggcatcctcacatcactctgatttaattgtccctttcataatgtttatccctgcagtgmattcttcctggaattcttcctatcccccttgtgtgcccagaaaactccagtatctttataaagggagtgtcattgttctctactttggaggccccctcca

SEQ ID NO: 184055 - DNA, 201 bp, Homo sapiens
aagcagaccccaacaacttcagttgttcagtgtttgcctttttaaaggatattaagagttggcatgtgtccacaggttaatttacctcaaggtgtgtgatrggcacagtaattgttttgaacagaggtattttactgtagtagttcttgagaaagcgcgaaggtgtttaccaattgttctggctgagagagagcacgtaac

SEQ ID NO: 184056 - DNA, 201 bp, Homo sapiens
tggtgaagggcaacgagagagtgtatatgtagagtggctggcacacagtaggtattttataaatagcagctactattcctcacattctgagctgacaaaartgcctctctgggatccctttttgcctttctgtagtaaagcagaccccaacaacttcagttgttcagtgtttgcctttttaaaggatattaagagttggca

SEQ ID NO: 184057 - DNA, 201 bp, Homo sapiens
tacagtgaacactttttccacaataaaaaggaatgaaggcatacatgctgcaacatagacaaaccttgaaataacatgataagggaaagaagtcagacacraaagactagtgtattgcaatgttcagaataggtaagtctatagacacggaaagaagattagtggttgcctaggcaaagagtttgtgtggaagtgaagggt

SEQ ID NO: 184058 - DNA, 201 bp, Homo sapiens
gttgtcttatctataaaataggaaaagtaataccctcctcataggtatcaggggccacctggtccttttaatgaataaacactgatttcattgaagtgtgytctctcttcaacacactttggctcaccagtctcttcaatgaaatcagtgtttattcattccaccaatatttgtggaatgtcctctgcatgctaggcattg

SEQ ID NO: 184059 - DNA, 201 bp, Homo sapiens
aacactttttccacaataaaaaggaatgaaggcatacatgctgcaacatagacaaaccttgaaataacatgataagggaaagaagtcagacacgaaagacdagtgtattgcaatgttcagaataggtaagtctatagacacggaaagaagattagtggttgcctaggcaaagagtttgtgtggaagtgaagggtatggaat

SEQ ID NO: 184060 - DNA, 201 bp, Homo sapiens
agcaagatgtggcttcttggtggtgtctttcctgacctactcagagacagatagttctgttgtcccctggactccccagtttcgcatatatctttgtttgyccttgctcacaaatgtagaagtcatttaaataccatctcctctctaggcttgaactcctcaagggaagaaattataacagactcatctccctaggacata

SEQ ID NO: 184061 - DNA, 201 bp, Homo sapiens
taaattcctagaagtagagttgccaagtgaaaacttattcacattttgaaattttagatgtagaatagagatatagactaaaaagggccaggctgacctcyaaaattgactgtaccgctactcaaggcggttcttattgcccttgcctgccagtacctgagactatttttcattttaatgaataaaaacatcatatatcaa

SEQ ID NO: 184062 - DNA, 201 bp, Homo sapiens
aaattgcccaagaaaatgactggtacaaagtaagtgtctactgttagtggaaattaaaattagtccagccactgtggagagcagtttggagatttctcaamgaaccaagagttgaactaccatttgacccagcaatcccattactgggtatatactcaaaggaaaataaatcattctgccaaaaagacacctgtgatgtat

SEQ ID NO: 184063 - DNA, 201 bp, Homo sapiens
ttgggtactacactcactacctgggtgacagattcattggtatccaaccctcagcatcacgcagtatacctttgtaacaaactggcacatgtacccctgaytccaaaataaaagttgacaaaaaaattacatatccagtaactattggctttcctagagatttgtttcacaaaaacaaaaaattgtttataacctgtgtgc

SEQ ID NO: 184064 - DNA, 201 bp, Homo sapiens
gaaacagtgtgggagtctgaaaatgagactgaaatggggaaatgtaaaggatcaccaggaaataccaagggagcacttgaggttagcagacaggagttacracgagaccagttagcatgggtcactgctttcctcacacttgtccagcagactcggagtaggcagaaaatatgggcttcagcagagttaatactgtgacaa

SEQ ID NO: 184065 - DNA, 201 bp, Homo sapiens
acgcccctcagctttattccctcacttcctagtttgatcactaagtggttaaggccagccacagagaatccctatcactactaaacatctgttgctctggmaaactcaacgacctttcattttttttccaaatgtattgtttatacaacctatgctgtggaacactggtatcagcatttttgctgcctctttcctcactga

SEQ ID NO: 184066 - DNA, 201 bp, Homo sapiens
ggagactgtgggtctctgaagacaactgtccccatgtttgatggtagctttggtgggaaatactcacaggcctcctagcattgactcagctcatcctttcrtagaaatcatagagtatggcatgactccaagctttaggtatgcagcatccatacctctgtggctcttgccatagctttgtaccatctctagatgaatcaa

SEQ ID NO: 184067 - DNA, 201 bp, Homo sapiens
tactcacaggcctcctagcattgactcagctcatcctttcatagaaatcatagagtatggcatgactccaagctttaggtatgcagcatccatacctctgyggctcttgccatagctttgtaccatctctagatgaatcaaacacaagtgctcccttcctctccatttccaatcacaccatcacaggagtgatattcgctg

SEQ ID NO: 184068 - DNA, 201 bp, Homo sapiens
atcacaaatacgtctcaggccatgcagctggtcagtggcagaaccaggatgggaaccagacctgaatggctcccagtttagcactctttctccttcccctccccccccccactcccagacaccgccttgtagccaacacacagcaaggaccgagtcagcatatattgatgcaggttgaattgattccttccatttctcctc

SEQ ID NO: 184069 - DNA, 201 bp, Homo sapiens
ccggactgcggactgcagtggcgcaatctcggctcactgcaagctccgcttcccgggttcacgcaaggtaaccatttttgtgtcaaatatttctttggtcraggattggcaccagtcataatattagaaaatcacagggctggaaagcatatcaaaggtcattcaacaatctcaaacacacacaaaacaatggttctatcc

SEQ ID NO: 184070 - DNA, 201 bp, Homo sapiens
ttcaggatgagtggccccatctaatggaaattcagtggcaactggacacaatgcttctccatgctggacagtcatcatggcagaaaaggcagaaaaaaatrtcgggggtaatgctcaaatgaccatgtagagcaaataaattaatcacattgagtgtgagggaagaaagccaaaaaagtggggatcccagctcaaaagcta

SEQ ID NO: 184071 - DNA, 201 bp, Homo sapiens
tatgttgtagcatgtgtaagaatttccttcctttttaaggctaaataatattttattctatgtatgtgccacattttaattattcattcattcacccatgrgcacttgggttgcttccacattttagctgtgatgaaaatttagctatgatgaatagctgctgtgagcatgggcatactcagtgccacttgtagttcagga

SEQ ID NO: 184072 - DNA, 201 bp, Homo sapiens
ggaggctgaggcaggagaattgcttgaacccagggcggaggttgtagtgagccaaaatcgtaccattgcgctccagcctgggcaacaagagcaaaactccrtctcaaaataataataataataataataataaataacaacaacaacagagatgctcaaaacatgatagtaaaggagaacaactctgtacagtagatcctt

SEQ ID NO: 184073 - DNA, 201 bp, Homo sapiens
ctaatctatgttgtagcatgtgtaagaatttccttcctttttaaggctaaataatattttattctatgtatgtgccacattttaattattcattcattcayccatgggcacttgggttgcttccacattttagctgtgatgaaaatttagctatgatgaatagctgctgtgagcatgggcatactcagtgccacttgtagt

SEQ ID NO: 184074 - DNA, 201 bp, Homo sapiens
atgattttgactactcttaagtgtctcatgtaagtagaattatataatatttctctttttgcgattgacttatttcaattagcttaaggctaatctatgtwgtagcatgtgtaagaatttccttcctttttaaggctaaataatattttattctatgtatgtgccacattttaattattcattcattcacccatgggcact

SEQ ID NO: 184075 - DNA, 201 bp, Homo sapiens
gcataaatatgtattttgctatttaatacttttttctttagcattttcccatgtcattaaatgttccataaaaccatgttttctaaaggtttcatagtttyccattgcaatgactgttccacgatttatttcatcaccccatattgttgcatatttaagtcctttccagttactcctgaatcatgttgcggtgagtattct

SEQ ID NO: 184076 - DNA, 201 bp, Homo sapiens
caaccttcacaccatccatctccaaaactctttttcttgcaaaatggagactctgtgtccattaaatacgaactcttcatttccctcttctcccacccccyggtagccaccattctacttcctgtctctatgattttgactactcttaagtgtctcatgtaagtagaattatataatatttctctttttgcgattgactta

SEQ ID NO: 184077 - DNA, 201 bp, Homo sapiens
cctccacctcccatttttttaaattgtggtaaaatacaggtaacataaaatataccatcttaatcatttttaaatgtagagttgagtagcgttaaatacaytgataatgtgcaaccttcacaccatccatctccaaaactctttttcttgcaaaatggagactctgtgtccattaaatacgaactcttcatttccctcttc

SEQ ID NO: 184078 - DNA, 201 bp, Homo sapiens
ctccaagcgctctctgctcaaagtggtccgacgactggagaagtggcaggagcagtatgacgggagggagggacgtactgtggtccactgcctgtgagtaytagggaggtgtcaccagggcaatagggtggtgggtgatagagcatccttgcagatgctgctggccacataccccagtcctaggcaggcctggctatacca

SEQ ID NO: 184079 - DNA, 201 bp, Homo sapiens
catcatgatgtgtgttcatcagacaaggggactggggcaggggctgtggctgcccatgatgcatgaggcacctcagctgtggctattgagtacttattccrgagacatgagaccatgaggtgccagatgcagagtttgggccttggagcctggagtctggatgcaagtctaccctctggttattccttggacagacagctt

SEQ ID NO: 184080 - DNA, 201 bp, Homo sapiens
gttggccatttttgtggttatttcttaatgatatgctaaaaaaaaaggggtggattattcatgagttttctgggaaaggggtgggcaattcccggaactgrgggttcctcccactttcagaacatataggctaacttcttgatgttgtcatagcacttataaactgtcatggtgccggtagaagtggcttttagcatgctg

SEQ ID NO: 184081 - DNA, 201 bp, Homo sapiens
atcactcaactgtggcagctacaggtctgtgagagacattgatggctgtggcatgtgactctaaagccccatttagtgtcccagtgatgagggctgaacaygtatatccaagttgatgcccatggatggagcaacatctcgtgccttgagtgcttacttcctgggcagattgagagctgtgctagtggtgttcacgcgacc

SEQ ID NO: 184082 - DNA, 201 bp, Homo sapiens
gcttgttctatctcttttctctcttctgttgtacttttttcccctctgttatggaaggcaattaggttttgcttctgggttcttcccacaagcttgcgtgyttaaactaatgttggtgttcagcaaaataggggccttctgattgaaaaaaccttccttctgagaagtgaataaaaatatttcttctaacacatgaagttt

SEQ ID NO: 184083 - DNA, 201 bp, Homo sapiens
aataagaaaaaatggcttggggccgggatgggggtataaacaaagcaaaggaagggggttatggaggaggttaactttctctaatggtagcaaaatcttcrggactgtcttctaaattgagtaagataaatgaaaatagggactaccttctcatcagaaaagtaaatacctgcaagtagatgtagtgaatctgagtatggg

SEQ ID NO: 184084 - DNA, 201 bp, Homo sapiens
gattctaacctaaaaaaataacatttcagaaacagaggtaaattattcacaattgcttcattctatagaacaatttgatatgaacaccaggtcaataaagygagggttcaggataatggaataaatggacagcatgagattaatagggacaaaaggaaacaaattgaggcccaaaatagcattaataggattaaagagccc

SEQ ID NO: 184085 - DNA, 201 bp, Homo sapiens
caccaggtcaataaagcgagggttcaggataatggaataaatggacagcatgagattaatagggacaaaaggaaacaaattgaggcccaaaatagcattartaggattaaagagcccataaataatgacagcaaaaagtgaaacaatacaaaaacaaaatagaatatacattgctggaaaaaacagtgtagagggaagtct

SEQ ID NO: 184086 - DNA, 201 bp, Homo sapiens
caaatgtcccctcaaaaatgcccagacagagcaacttgcttccccagacccattgtcactgttggattctctgggattcagaatcagagatggagatgagygtttattaggatgtttattggaaattgccccctggactagcagctatggaagggaaggaagggatgagcagcaggctgcgggaggaagtgagttgacgca

SEQ ID NO: 184087 - DNA, 201 bp, Homo sapiens
atgagtgtttattaggatgtttattggaaattgccccctggactagcagctatggaagggaaggaagggatgagcagcaggctgcgggaggaagtgagttsacgcagacctcaggacatcattagccaactccacggggagctaaaatggcccgtccgagtctgcaacgggcaggactggctgaggctttcaaccctagcc

SEQ ID NO: 184088 - DNA, 201 bp, Homo sapiens
agccccttttctcatctgctgatcctcccccacattcagtaaaagaggagattaatttctagtcactctggcctccctccccaacacaaactccccaaacrggagaaactatggtaaaatcatgcaacattgcattgctattccaacttgagtctcacatacaagagccatacgtgaaagactgtggaatatataacacag

SEQ ID NO: 184089 - DNA, 201 bp, Homo sapiens; identical to SEQ ID NO: 32289

SEQ ID NO: 184090 - DNA, 201 bp, Homo sapiens
ggtttcagaggattctgtaaaatgggctcaatctatttagccagctccctcatcttgggtatttagttttttctagttgttcattattgcactgaacaaawaatgattcaatgaattcccctttatgtcactctttgctcatagttttgattcttctgaaagtagtattgctaaacaaatagtaaaataatcagctctaag

SEQ ID NO: 184091 - DNA, 201 bp, Homo sapiens
caaacaataggaacctaggaaaaatcttagctcagttttagacatgttaaatagctaaggaatacataaatactacaataaatatggtactttactttgaragagatgcagtctgtgtgtaagtgggcatcagattccaacttgtgtgttattgagaaatggtgtatggaagatcgtctgaaatgggagggaaagttggaa

SEQ ID NO: 184092 - DNA, 201 bp, Homo sapiens
tcaacatgtgatgtgtgctgtgaaagaagaatttagtttgctgtgaaaacataaatcgtggaggacctaatttaccttgagaatcagataagaccctatakcacgtttctttttttttttatactttaagttctaggatacatgtgcacaacgtgcaggttagttacatatgtatacacgtgccatgttggtgtgctgcac

SEQ ID NO: 184093 - DNA, 201 bp, Homo sapiens
aaagagggacctgaccatgctatgcattacaagccgttataaggactttggcttttactctgactaaaatggaaagccacctcagagctttgagaagacargtgctaatgatctgaccttacttccttctagctactgtgttgagaatggaacttaggaaggcaagggtgaaagcaagttaagaggacattgcagtaaccc

SEQ ID NO: 184094 - DNA, 201 bp, Homo sapiens
caaccactctctgtcttggggacagctcagaggactctcgtttctgtcctgtcattcatctcccctctgttctctctcctctccttctttgcttccatccrtcaacccatttgctgaagaagaaaaaagaagagaaaagaagggtagaaaataggaaagacatatctatgaggcagctccagcatgccaggaaccatgcta

SEQ ID NO: 184095 - DNA, 201 bp, Homo sapiens
gggggagtgggggtcagctgatctgctcttatttgtctgccagcctacagcctccctagacagcacacatccctgggccgccctgttccttgcccttctcytagaggaagagaagctggaaggctctggtttgcagctggttactcagctctaaagatggattccatatcttggtagaaagaacgaggcagcccagctgct

SEQ ID NO: 184096 - DNA, 201 bp, Homo sapiens
ctagtcacatgtcacctggattcagcatttcttttagcgtcgagattctaagctttagctacaagtaggtatcactgggttttgcttgggagcctgatgayagtggcgtgtcagggaaagagcttctgaagaatttacggtcgctgcttttcttccaggccacatggacataggttgtatatatttagggaaacttcaaca

SEQ ID NO: 184097 - DNA, 201 bp, Homo sapiens
gcccatcatagacccgccctggggggagtgggggtcagctgatctgctcttatttgtctgccagcctacagcctccctagacagcacacatccctgggccrccctgttccttgcccttctcctagaggaagagaagctggaaggctctggtttgcagctggttactcagctctaaagatggattccatatcttggtagaaa

SEQ ID NO: 184098 - DNA, 201 bp, Homo sapiens
cctgttctgaatgtgtttatccaattgcccatcatagacccgccctggggggagtgggggtcagctgatctgctcttatttgtctgccagcctacagcctycctagacagcacacatccctgggccgccctgttccttgcccttctcctagaggaagagaagctggaaggctctggtttgcagctggttactcagctctaa

SEQ ID NO: 184099 - DNA, 201 bp, Homo sapiens
tgcctccttggagaacagctcctggaggccacagcacatttgtcacatgtcactgggatctgcatatggaggtgaaatgtatattttaaaatgtgctcacrctcggctgcacattcatcctgttctgaatgtgtttatccaattgcccatcatagacccgccctggggggagtgggggtcagctgatctgctcttatttgt

SEQ ID NO: 184100 - DNA, 201 bp, Homo sapiens
aagggtatggaatttctttttggggtaatgaacattttctaaaattgacttacaatgatggctgcataactatgtgaatatacgataattcactgcattayacactttaaatggatgaattgtataattgtatggttgtgagttttatctcacaaagggtgttatcccccacaacaacaacagaaaaagaaaaaatgtgcc

SEQ ID NO: 184101 - DNA, 201 bp, Homo sapiens
ggcgacagagtaagaccctgtcaaaaaaagaaagaggaatgaaggataatgtcaatgattggggcctgagcaatagaaggttagaaactgagataactataaaaataaatgaattctcataaaacagagagttctggaacattccctgcagagttttggagtctgaaggcatcaccaccctacgcttttggctgaagaaat

SEQ ID NO: 184102 - DNA, 201 bp, Homo sapiens
aggacctacatgcagcgatacttatctacgcactttataaatagtagttgtattaatcctcatggattacatgaggccacaatatgagatgtgttttatarccattttatagaagatggtacttgagagtcaaagagttaagtgacttgtttaagatcatcagagagaagagatgtatcttgggttccagtttatcccagg

SEQ ID NO: 184103 - DNA, 201 bp, Homo sapiens
acaaaactttaggggtatgggaaagatagaaaagaagctgtttttgaggacctacatgcagcgatacttatctacgcactttataaatagtagttgtattratcctcatggattacatgaggccacaatatgagatgtgttttatagccattttatagaagatggtacttgagagtcaaagagttaagtgacttgtttaag

SEQ ID NO: 184104 - DNA, 201 bp, Homo sapiens
aggctcacatgtctcaggcccgtgtctcagatacttggtgtcttaacaaggatcacctggcctcactcctgctcaccagtgtggagacttgaccaaccggrgggacaaaccttctcagctgctgctttgcacttgcattctctaacctcactgtcttctctgttggcaggtccgatgcaggagactgtaaaggacttttgg

SEQ ID NO: 184105 - DNA, 201 bp, Homo sapiens
aaggaagaagatggtcagagaaacaaaaggaggaggcatccctggaccttgatgccttatcaattgtgggaggtggagacggggcagcagattttactctrcctctcagtggatttcttactattttcttcttcagtctattaaggtctccctgctacactgaaacaaaactttaggggtatgggaaagatagaaaagaag

SEQ ID NO: 184106 - DNA, 201 bp, Homo sapiens
cctcaagtggagcctaatgccttccaggaagatctcataaagttgatagtgaacatttgtccagttagaagtgtctgtaaccaatagccacctatcctgcaacctgaggctgcaccttgccactcactgttggtgactgagggtctgcagaatccagcatacgtgctttctagtgagctagcactcaagtgccccactgct

SEQ ID NO: 184107 - DNA, 201 bp, Homo sapiens
cttcatcatattaaatacataataaatatttctggaaaggaagggtggataagggaaagcaataggatacctgactaattaaaagcttctgcatacctaartgatttcaaaagccaacaaaaaaactggcgaaaatatatttgcaacctatgcaagaaagcttacgtccttaaaatgaaattacaatgacgagcccataag

SEQ ID NO: 184108 - DNA, 201 bp, Homo sapiens
ggccagtgccaagggagtggaaaggaagaagatggtcagagaaacaaaaggaggaggcatccctggaccttgatgccttatcaattgtgggaggtggagayggggcagcagattttactctgcctctcagtggatttcttactattttcttcttcagtctattaaggtctccctgctacactgaaacaaaactttaggggt

SEQ ID NO: 184109 - DNA, 201 bp, Homo sapiens
tcataaagttgatagtgaacatttgtccagttagaagtgtctgtaaccaatagccacctatcctgcaacctgaggctgcaccttgccactcactgttggtkactgagggtctgcagaatccagcatacgtgctttctagtgagctagcactcaagtgccccactgcttctgttacccctttaaaggcattcctcatgcatt

SEQ ID NO: 184110 - DNA, 201 bp, Homo sapiens
cgagaacatgtcacggttggctttgtatctcagaaagatggtgctgagtactgttttattggatggtgagagaatcaaggactagactgcttaggaagtcrttgcaaaataaacagtttctgacacaaatgccatggacctgaattaggccagtgccaagggagtggaaaggaagaagatggtcagagaaacaaaaggagg

SEQ ID NO: 184111 - DNA, 201 bp, Homo sapiens
aggactttctgaagcacttaatgttctattgttttcctcccacctttcttttcacatcctgctcaaggctgaaactcacaaatacaacagggcaaaaattrtcagagacattgtggcagcgcattgcatcttggaaggtgtcgttttcacaagtgcagtgctataggtgggctggaaggaatacttctgtggatggtggtt

SEQ ID NO: 184112 - DNA, 201 bp, Homo sapiens
tgggctttataggaagtggggaatttcctataaaggaagacctcaatggaagtcgagaacatgtcacggttggctttgtatctcagaaagatggtgctgastactgttttattggatggtgagagaatcaaggactagactgcttaggaagtcgttgcaaaataaacagtttctgacacaaatgccatggacctgaattag

SEQ ID NO: 184113 - DNA, 201 bp, Homo sapiens
tgaagcacttaatgttctattgttttcctcccacctttcttttcacatcctgctcaaggctgaaactcacaaatacaacagggcaaaaattatcagagacrttgtggcagcgcattgcatcttggaaggtgtcgttttcacaagtgcagtgctataggtgggctggaaggaatacttctgtggatggtggtttttcatgta

SEQ ID NO: 184114 - DNA, 201 bp, Homo sapiens
ttttggttcatggctccttctttcatctcaaagtaagcagcatagcctcctcagatagctcctcaactgtgattctgactctcctggcccccttgtctacytaaaggacccttgtgattacattgtgctcagctggaaaatccagaataatctccccatctcaagcttatctggttaataaccttaattccatctgaacct

SEQ ID NO: 184115 - DNA, 201 bp, Homo sapiens
aggtacttcagagcctcgaaagatgagctaaaaatcaagaattttaaaaggggtaatcatggcatgaaaaactggcatgcattccctggggggcgtctacrggagccctattcaacttgtttcaaagctcttgaggagcattttcatctccgcaaactgtctctgatgaagtatcttcactgttttgttcacagctgtact

SEQ ID NO: 184116 - DNA, 201 bp, Homo sapiens
atttgttcactctttgggtgatgggttcaatagaagccctaacctcagcattccataatatattcatgtaacaaacctgcacaccaaccctctgaatcttmaaacaaaacaaaacaaaacaaaaaaactctgcagaattccctttattgtgaccacattttaagagaatattcccacagaaagcaaattaatgttcacatt

SEQ ID NO: 184117 - DNA, 201 bp, Homo sapiens
gtttttggttcatggctccttctttcatctcaaagtaagcagcatagcctcctcagatagctcctcaactgtgattctgactctcctggcccccttgtctrcctaaaggacccttgtgattacattgtgctcagctggaaaatccagaataatctccccatctcaagcttatctggttaataaccttaattccatctgaac

SEQ ID NO: 184118 - DNA, 201 bp, Homo sapiens
ctaaaaatacaaaaattagctgggtatgatggcacatgcctgtaattccagttacttgggaggcttaggcaggagaattgtttgaaccctggaggcgaagkttgcagtgagccgagatcatgccactgtactccatcctgggcaacagagcgagactccttctcaaaaaataaataaataataaataattaaaaaagcaca

SEQ ID NO: 184119 - DNA, 201 bp, Homo sapiens
cagagagatgtggcttttgcagggtcacccagacccttctagagtgacttgatctctggccactcctctggccaccatgtttatgggtgtgactgattttyagaaggattttcttactttctctttgtctctacttcccacctgctttgtgggtctccaggatctttcatgatggtgaacagctctgggagagcctctggc

SEQ ID NO: 184120 - DNA, 201 bp, Homo sapiens
gtagagtttgttttctcaccttttctagtttttttctggccacctgcagtttttggttcatggctccttctttcatctcaaagtaagcagcatagcctccycagatagctcctcaactgtgattctgactctcctggcccccttgtctacctaaaggacccttgtgattacattgtgctcagctggaaaatccagaataat

SEQ ID NO: 184121 - DNA, 201 bp, Homo sapiens
ctcttataaaccatggtaaaaaaaaaaaatcatggcaatgacagattgttgcaacagttcctaaacctctctctctttccttccttatctccttgcgaacygatgcacacagtgcacagattggcaccaatccataaagcatgcttagaggaacatttctccacattgtcttggcctggggccattgaaagttttgttttt

SEQ ID NO: 184122 - DNA, 201 bp, Homo sapiens
cgaaaccccacacattttaatctggacatcagaagtcctaagtgggtcacactggggtacattcaaggtatcagggctgcattcttttctggaggctctarggtagagtttgttttctcaccttttctagtttttttctggccacctgcagtttttggttcatggctccttctttcatctcaaagtaagcagcatagcctc

SEQ ID NO: 184123 - DNA, 201 bp, Homo sapiens
atggtaaaaaaaaaaaatcatggcaatgacagattgttgcaacagttcctaaacctctctctctttccttccttatctccttgcgaaccgatgcacacagygcacagattggcaccaatccataaagcatgcttagaggaacatttctccacattgtcttggcctggggccattgaaagttttgtttttttttttttaaca

SEQ ID NO: 184124 - DNA, 201 bp, Homo sapiens
ggccattgaaagttttgtttttttttttttaacaatgttattaaggtaaaatgtacatatcacagaatccacctattttaagtgtgcaatcccatgacttwagaaaacctattgaattgtgcaaccatcattataaagcagtccagaacatgttcatcatcctagtaagatacactgtgctcatttgcagttaatctccac

SEQ ID NO: 184125 - DNA, 201 bp, Homo sapiens
cagtcagatctgcattttggagaaatttctctagcatctgaagcagaagatgaaccggtggctgggggcttcttagacattctccaagttaatatccatgrtacagttcttccagattttagtgttaggaatacatgtatctattgagattgcttgttgggtttaccttaatgaggcaattcaagctttatttcccttttg

SEQ ID NO: 184126 - DNA, 201 bp, Homo sapiens
ggtaagtgataacccaagcttgaacggaggtagtgccttgttttttacccgttttgtttgatttcactgtctaagctagtataatccagtataaatataaygggaaccacacatgtcatttataaacgtttagtagccacattaaaaagtaaaaggaaatcagtgaaattaattttagtaatacattttacttaaaccaac

SEQ ID NO: 184127 - DNA, 201 bp, Homo sapiens
aggtctggcctaaagctgtcttccaaaacatattttaacttattgaatctctgggctggttaaagttgtttggccttcagcctcctggtttatatcactgmcccaagcagcgtattaccactcaggaatacatggcctcatttttattggaatgatatttataggtaccgcttatcctctgtatgaatatgtttaatatga

SEQ ID NO: 184128 - DNA, 201 bp, Homo sapiens
atttggaaccaaattgggctgattctttatactaaagcatggtgaatatgaacattgaagaaaaaaacacgagtgaccccccctatactccctcccagacrcagaggccaagtctcttgagtccccgcatctggattttggggagtaggttctgaagcaaacttaagtcagacttcattcaaaccatgaaagtttctcatg

SEQ ID NO: 184129 - DNA, 201 bp, Homo sapiens
tcaactcctgggctcaaggaatcctcccaccttggtctcccaaattgctgggattacaggcaggagccaccacacctggccctacatgtttcttcttatamgagcactaatcccgttcatgagggttctatgctcatgatcgaaacgtcttccaaagtcccaacctcctaataccatcacattgggggctaagattacgac

SEQ ID NO: 184130 - DNA, 201 bp, Homo sapiens
caccttcatacgtaacaacctcaaaactagaaacaagacagatgtcccttgggtgaatagttaaacaaattggtacctgcacaccattgattactactcakcaatacaaaggaatacatacaaaaacctgggtgaatcttcagagaattaggctaagtggaaaactctaatcccaaaaggtttcatgctgtatgattctat

SEQ ID NO: 184131 - DNA, 201 bp, Homo sapiens
tcaggctcacatgtctcaggcccgtgtctcagatacttggtgtcttaacaaggatcacctggcctcactcctgctcaccagtgtggagacttgaccaaccrgggggacaaaccttctcagctgctgctttgcacttgcattctctaacctcactgtcttctctgttggcaggtccgatgcaggagactgtaaaggactttt

SEQ ID NO: 184132 - DNA, 201 bp, Homo sapiens
gatacctgactaattaaaagcttctgcatacctaagtgatttcaaaagccaacaaaaaaactggcgaaaatatatttgcaacctatgcaagaaagcttacrtccttaaaatgaaattacaatgacgagcccataagacaaagatgagcaaaaatgaagagccatacaggaaaatgagcacaaggtatagataatttgttca

SEQ ID NO: 184133 - DNA, 201 bp, Homo sapiens; identical to SEQ ID NO: 32274

SEQ ID NO: 184134 - DNA, 201 bp, Homo sapiens
atttcaggaagggtatcacctgggcaaaagcctagcagcagggacatgcgtaggatgtttgaagtgtgtattagtttcctattgctgctgtaacaaattaycacaaatttagtggccgaaaccccacacattttaatctggacatcagaagtcctaagtgggtcacactggggtacattcaaggtatcagggctgcattct

SEQ ID NO: 184135 - DNA, 201 bp, Homo sapiens
ttagatcctgtttaaaatacctataatggaagtatgcactctgaagtataggaacaacaattcagaagtgcctgtttcctggacattagtgaaagccatgyagggaaagtgatatttaagtagtttaatgaaggaccatggctgagctgggtggcgtggatttcaggaagggtatcacctgggcaaaagcctagcagcagg

SEQ ID NO: 184136 - DNA, 201 bp, Homo sapiens
catcacatcatcattggaaggaccagaagaagtatgctgggtaaaaagtctttattttcacttttgcttttgtttgggaggtcaggagggatgcaagcttrtgtaggggttgcatgtagtttacatgttagtctgctttgtctccataatcttttgcctcttctctccccctgctcagtaccccttccctcgcctgcagtt

SEQ ID NO: 184137 - DNA, 201 bp, Homo sapiens
agccactcgctccctattctcatctgcttgtcagtcattttgcatcctgcgtgagccaggccagttcaggcattggtaacgcagaggtgagtgggacagabctggccttggggtggtcagggtggactgttgtcatttggtgtgaggttaagcccctgttcccttctttacaacagcaggaacctatgaatgaaagtggct

SEQ ID NO: 184138 - DNA, 201 bp, Homo sapiens
gcgcaaggccagctaactccagggagttgatgatcactccttgccatcaaacacaacgtgcccacatgtggtgtgcagcctagcagctaaatgagaattayaacttcctaggtttgaatcctggctctgctaccagctgtgtggccttgaaaaagtcacttaagctctctgtttctcagttttcccaactgtaaaagaaga

SEQ ID NO: 184139 - DNA, 201 bp, Homo sapiens
ttatttggtagttattatcgctatataggcccctgaaattaaggactcacccagctttggttcaactggactttaaactcagtccctttccctggaaaacsgtgctatgtggcactctgtagatttagtaaattcactcacaatgaagtggagtttatcacaatgaggggcccactctaccactcttggaattctattcca

SEQ ID NO: 184140 - DNA, 201 bp, Homo sapiens
ttctctttactcttaatatggcagcagcttgacaactgacttaatttttgttcgttctttccattctttacccctcttcctgcatgaaccagctccccagygcaaggccagctaactccagggagttgatgatcactccttgccatcaaacacaacgtgcccacatgtggtgtgcagcctagcagctaaatgagaattata

SEQ ID NO: 184141 - DNA, 201 bp, Homo sapiens
gtgtcattttacacaattacattcatagattattaccatttttacttcctctttttgtgaattacctgttgaagtcatttgccactttttaatttgaatgrtttgggtttttttttttgttgattctcaagagtcctttacacataaaaaaggatattttcatattagctgacataggtattacaaatattattctcaacc

SEQ ID NO: 184142 - DNA, 201 bp, Homo sapiens
gttatggcggcttcagggaacccattcagctcattgcttccctggcagttgtcagcactagagctgcctctacttcctgattttgtcttgttctctttccrtctgggtctaggttctactgcagggcttggtggaactgacagagacagtatctttggtggtctagagtgcagagaccacttgactggatgaggtggacag

SEQ ID NO: 184143 - DNA, 201 bp, Homo sapiens
ttagacaaatgtgtagaatcatatatccattactctagtacatacagaagagattcagccctccaaagaaattaacatctgggaaaaggaaaaagggtggwggggtacggtgaattaaagaataaaagattgatcagattattggaagagaaaccccatcatatcccacaacctgaataacatttgcattgtttcggattt

SEQ ID NO: 184144 - DNA, 201 bp, Homo sapiens
tggggcagaatgccacatttcagtgcattgctggtgggaagtggtctcagcatgacaagctttggctccaggtaagcatgagagaagcctctgctcagacycgttaggatgagaaagggaaaagaaggactggaaggaagcagctctatggcaacacaagtgtattgaacaaagacatgcagagggggacaacagctagca

SEQ ID NO: 184145 - DNA, 201 bp, Homo sapiens
tcagtttaatgattctaaaagttgaaagtggatacatagctcttccattattcttactgtgtaaattgtttcattgcaaaaccaaaccgtgtgctaggatyatatttccttttctgctggactcgagcatatcttctctacctctcaaaggagaatgctcctacctttaaggttgaagggattctctcttttacttacacc

SEQ ID NO: 184146 - DNA, 201 bp, Homo sapiens
tgcttctttacctcctgcctgaaattgtctatcggaagctattaatagctatagtttattttccaaatctctttagggaaccaacatttatctcagacagkcagaaatcttaattgtggagtttttaagccagaagttccttggaagggaatataatccacatgcttatttagcaggtgaagatttagggatcccggaagt

SEQ ID NO: 184147 - DNA, 201 bp, Homo sapiens
caagttccacaggcttaacaggaagcatggcttggaggcctcaggaaacttacaatcatggcagaaggcgagggggaagcaggcaccttcttaccagggcrgcatgagggagtgtgactgtgcaagaaaaaactgccacttttaaaaccatcacatctcatgagaattcactcactatcatgagaacagcatgggggaaac

SEQ ID NO: 184148 - DNA, 201 bp, Homo sapiens
gtaattgcttctttacctcctgcctgaaattgtctatcggaagctattaatagctatagtttattttccaaatctctttagggaaccaacatttatctcaracaggcagaaatcttaattgtggagtttttaagccagaagttccttggaagggaatataatccacatgcttatttagcaggtgaagatttagggatcccg

SEQ ID NO: 184149 - DNA, 201 bp, Homo sapiens
ggtcattccctgcccccgcccccaccaagtcatacggtgaacttagccagaaaataacaagacaggggatggctcttgggtcaacagtcaatactgactgktgtgtgtgtgtgtgtgtgtgtgtgtgtgtgtgtgtgtgtgtgtgtgtgtttgaaaattgtacttttcacggtatccaggctatcactttccttactgtta

SEQ ID NO: 184150 - DNA, 201 bp, Homo sapiens
accacactgtacctgaatccatcagcatacgaaggccgggtgtggcatgagatgtgcactgtgtaattgcttctttacctcctgcctgaaattgtctatcrgaagctattaatagctatagtttattttccaaatctctttagggaaccaacatttatctcagacaggcagaaatcttaattgtggagtttttaagccaga

SEQ ID NO: 184151 - DNA, 201 bp, Homo sapiens
cagcagaggccgtggtgggagcagtcagtccctggctttgagaaacaaaattccccaagggaactgcagaaccacactgtacctgaatccatcagcatacraaggccgggtgtggcatgagatgtgcactgtgtaattgcttctttacctcctgcctgaaattgtctatcggaagctattaatagctatagtttattttcc

SEQ ID NO: 184152 - DNA, 201 bp, Homo sapiens
ccatgggcatggcccctgttctttgtatacctgagggagtgctctgccccaaatctttctgctcccctcaatagcaacctattacacctgccatattcttrctattgctcaactctaaattcaggccaccagaggttatcacccttgccaggtttctttggagaaatgacaatttgagatgctaccatctgccacatttac

SEQ ID NO: 184153 - DNA, 201 bp, Homo sapiens
ttggtaggcttgcctccctgaacccggggtatgttttcatcacaaaaagatttgaaaaacactatgatttctaattactggtgctttcctattattactgygactgcaatgaccgccaatgctacttcatatgtattttatgggagtgaagtgaaataatgaatggaaagtgcctagcacagtgcctggcacatagttggc

SEQ ID NO: 184154 - DNA, 201 bp, Homo sapiens
tgggattacaggcaggagccaccacacctggccctacatgtttcttcttataagagcactaatcccgttcatgagggttctatgctcatgatcgaaacgtyttccaaagtcccaacctcctaataccatcacattgggggctaagattacgacatggattttgggagggatgaaaacatttagtccgtaacagtaacccaa

SEQ ID NO: 184155 - DNA, 201 bp, Homo sapiens
  misc_feature (1)...(201): n = A,T,C or G
gccgagcccgggcagaaagctcctagctggcattctagggcaaatattcttcctgaggtggaggtggctggacctcagggccctgaccccaccagccagcnccccctgcttctgatctactagtcccaaggacctttgttcccctgcaggctctggtccaaacctagacacaaggtgggctcttggctccttttctcatac

SEQ ID NO: 184156 - DNA, 201 bp, Homo sapiens
atatatgaatatattcactttgtaaaatttataacatcaggtaatactatgtccatttaaactcgtggctgttctccaccattccagaatactgctcttamcagtgtaatgtatatatttgcaggcttcatccaatgcacttccaacacgtatatatatctgtaaaacctattgtcattttcgagttttttctttgaccta

SEQ ID NO: 184157 - DNA, 201 bp, Homo sapiens
agtgatagttgcatggattggtgacatttgaacctcttgttggaaaatgaataggagtttgccaaaatgcaacaaagattcaggaggatacattacagtgyacaaacaacatggagaaatgagtgggagtatgaatgtgtccaatgtggagagtgggcaggaagaagttctagctggactggaagtggcagattactatta

SEQ ID NO: 184158 - DNA, 201 bp, Homo sapiens
ttttacaaattgaaggtttgtggcaaccctgaatcaagcaagtctataaggcactattttttttaacagcatgtgctaactttatgtctctgtgttacgtwtcagtaattctcttaatatttcaaacgttttcattactattagatctatgacagtgatatgtaataagtgatctttgatgttgtaattgtttggggatgc

SEQ ID NO: 184159 - DNA, 201 bp, Homo sapiens
tgaggtcagtcttttcaaaaccagctaattattctccctctcaaacaggtggtgcatgcacatgttaggcaagtcaaagagcttaaaggaggttaaacacrcagacacatagagatgcacacacagagcttcagggccaccacctgcagcaaaaattcttctccagaggaagcaaacctcaggctagagttcaggaagatg

SEQ ID NO: 184160 - DNA, 201 bp, Homo sapiens
tttcctcatttgaaaataatgcatctattcccttctgtgactataaagtctctaaataatatatttttttttcattttacagtgtttctatcacatatacrtatagaaagtttatgtcactcagactaattaaggaaagagataacttacaaggatatagaaaataattttagtatttcttggtgtccatgttagcaagtt

SEQ ID NO: 184161 - DNA, 201 bp, Homo sapiens
tcaacctcagtgttgaggcagcttaagcataaacttcccagaaagcatgatgtgaagaccccataggagtggctggaattggaaaaaatttcacttaactrtatggacaaatactggcaatgtatataatgcctgaggtatatccacagctcacgaatcatgtggagttgagtagggcctagcaaagtccctttcctaagg

SEQ ID NO: 184162 - DNA, 201 bp, Homo sapiens
tacccatcttctgaggcctacttctgtcaattcatctgtctgatcctccatccagttttatgcttgtgatggaacgacgttgcagtcgtttggaggaggaraggcactctggccttttgtgttttcagcatttttttgttgattctttctcatattcgtgagtttgtttagttttcgtttttgaggctgctgacccttgaa

SEQ ID NO: 184163 - DNA, 201 bp, Homo sapiens
cactaaacatacatgtgcatgtgtctttatagtagaatgatttgcgttcctctgggtatatacccagtaatgggattgctgggtcaaatggtatttctggytctagatccttgaggaattgccatactgttttcaacaatggttgttacattcctaccaacagtgtaaaatcatttacatttctccacagtctcactagca

SEQ ID NO: 184164 - DNA, 201 bp, Homo sapiens
caccctgccacccctcaacaggccctggtgtgtgttattcccctctgtgtgtccatgtattctcagtgttcaactcccacttataagtgagaacatgcggygtttggttttctgttcctctgttagtttgctgaggatgctggcttccagcttcatccatgtccctgcaaagcacatgatctcattcctttttatggctgc

SEQ ID NO: 184165 - DNA, 201 bp, Homo sapiens
ttattgtggctttactaggtatttaattcttaataggacattctcttctagttacactttatgaaaaaaaacaaaacaaaacaaaagagagagagactctktgtgtctcctttcaaatgatctttagaattattttgccaagttccagaaaactcctcttgggttttattcgaattgaaaatattgctcaaattatttttg

SEQ ID NO: 184166 - DNA, 201 bp, Homo sapiens
attccaccaggagcacccagctccttcccttcttctttcccctgcggagaattggcaccctgggacacctctttgttggagctgttgcttgcatccctgtrgtttcttcctctacctgctgtactttgccatccccttgtcatcactgccatgttctttcctttgccttggagaccactgggtctcagaatcccattgttc

SEQ ID NO: 184167 - DNA, 201 bp, Homo sapiens
aatcttagcttatttgataagaaatgacactgcatcctattgacctggtttttccttattatatagccaaatatattttatgttttgtcctctgtgaattrtctgttcataaacatttttatattttccatatatgtatattataagcttttttatggagaaaggatattattctttacctggtacttacattttttcagt

SEQ ID NO: 184168 - DNA, 201 bp, Homo sapiens
gatgcttaccagaccttgggtctcagtgagcaggtagactgaacatctgcatcagaatcaccgagggtatttttaaaaagcagattcctgggtcctatccyaacatgtggcactgggatggggcccaggaaacagcaggcaattttagtacattgatcttgagaaccactgggtgtttgggaagctaggaaaggggtcaag

SEQ ID NO: 184169 - DNA, 201 bp, Homo sapiens
tgattcacaacttgataatgtgatacgtattatcaaattgctcctcagaaaatcattgagacaactggtagtccaagcatcaggtaattactcatttactrtttgctaatattaggaattatcactgtttcaaaatcttagcttatttgataagaaatgacactgcatcctattgacctggtttttccttattatatagcc

SEQ ID NO: 184170 - DNA, 201 bp, Homo sapiens
tttgaagttctgtgactctagccaagccacgtgggttccatttcctcatctgtatattacacacatacctatagaggtgtgctaaaaatggccaggatgcwcatgcagagaccctacctctgtgcccacaatactgggttcttagcaagtgaaagtgttggcccagtgtttgatgcttaccagaccttgggtctcagtgag

SEQ ID NO: 184171 - DNA, 201 bp, Homo sapiens
cttttttttctcatttagaattctatcattaacatttttatgtcattaaatattcttgaatgcttggacttttacatcaattaaattatatcatattgccrtattattacttatttaattacgtccttacacttgggtgttgaaattgctttcagtctttcagtacagtaatactgtcgtgagatttttcacctaaatatt

SEQ ID NO: 184172 - DNA, 201 bp, Homo sapiens
gagattctggtatgttgtatctttgttctcattagtttcaaacaacttcttgatgtctgccttaatttcttttttttatccaaaacttattcaggggcatrttgtttaattttcatgaaattgcatggttttgagcaatgtttttagtgttgacttctatttttattgcactgtgatctaagagtgtgtttggaatgattg

SEQ ID NO: 184173 - DNA, 201 bp, Homo sapiens
ctcaatgaggtagacactataattaaagatgcagaaaatgaggcacagagcagtaacataacttttccaggactactaactagcaagtggcacagccaggrcttgaacctaggcacttggaacaagagtttaagcactgtactatcttccttcttaaagtaagataaagattgaaaatatctacttgattaagcaattaga

SEQ ID NO: 184174 - DNA, 201 bp, Homo sapiens
atataccaaccaaataaaaaattctaccaactagccagatgcagtagctcatgcctgtaatcccagcactttgggaggccaaggcggatggatcacctgargtcaggagttcaagaccaccctggccaacatggcgaaaccccatctctactaaaaatacaaaaatgagctgggtgtgatggtgcatgcctgtaatttcag

SEQ ID NO: 184175 - DNA, 201 bp, Homo sapiens
catgattgtaagtttcctgaagcctctccagccatgcagaactgtgagtcaattaaacctcttttgtttataaattacccagtctcaggtagtatacttayagcagtatgagaatggactaatataccaaccaaataaaaaattctaccaactagccagatgcagtagctcatgcctgtaatcccagcactttgggaggcc

SEQ ID NO: 184176 - DNA, 201 bp, Homo sapiens
aggctacagctgccatagatattgattcctctgatggatatgggcaaaataaatgggaaaccttcaggaaaggattcgccattctagatgccattaaggayattcatgattcatgagaatgtcaagatattaataataacaggagtgtgggagaagttgattctaaccctcacagatgacttcgaggggttcaagacttca

SEQ ID NO: 184177 - DNA, 201 bp, Homo sapiens
ggaaactgtgcctttttgatggaatgcggcctggtggtacggagcaggcagttattggcagagcagctgatcatctgttctcagtgagggaaagcctcctstttgagttaatcagcggcaaaatgtgctctgtggtttgttcttttaatctcttctgcacgtgagtgaggaactgctgggaccccagcaagacagggctgc

SEQ ID NO: 184178 - DNA, 201 bp, Homo sapiens
tggccagttgctacttccttgttccactgcagctttttgagaggtcctccctaagttgcctgcctgcctgcctgtctgggacagtgttttttgttttttgytttttgttttcttcatccttgaatgcactgtgctagggagagccttcttgcatcattcttggacctttctaccagccttctcctcctgggtgctaattac

SEQ ID NO: 184179 - DNA, 201 bp, Homo sapiens
cctgggttgtctctccaaacatgagagagaagttgagggagggatatgtctgctctcaaccagcaaacactttttgcagtaaatcaagcataacttagggkctctttcaggaccttcccatactccccagagatgagggagttattactttaaccagcattcatatctttttctctgtgaggaatctatggatacgtttat

SEQ ID NO: 184180 - DNA, 201 bp, Homo sapiens
taggggctctttcaggaccttcccatactccccagagatgagggagttattactttaaccagcattcatatctttttctctgtgaggaatctatggatacrtttatagagatggactttcaccacataaatgtgtgcctccatgaacttggcttataggatgtggtgagaacatggagtgtatgattctgaaatcagactg

SEQ ID NO: 184181 - DNA, 201 bp, Homo sapiens
cattttcttctgtggggggcttaggttgttgcagtgctgaacattagggtgggcagaataacccacccccacccccgataaaaaatgtctatgtccgtgtyctaatccccagaatctgtgaatatgttgccttacactgcaaaaaaggactttatagattaagttaattaagttaattaaagcaattaagttaaagatctt

SEQ ID NO: 184182 - DNA, 201 bp, Homo sapiens
tccatatgtacacattatttagctcccactgtaagtgaaaacatgcggtatttgactttctgtttctgggagttttttgcttaagataatggcctccaggyccatccatgtatccatgttgctgcaaaagtcatgatttcattattttttatggcttagtagtattccatggtacacatatatatgtatatacacacacca

SEQ ID NO: 184183 - DNA, 201 bp, Homo sapiens
agtctctttgctaaagcataacaaaagtcacgtttgctccacttcccaacaagttcctcatctccatctgagaccatctcaacctggacttcattgttcayatgactatcagcattctggtcaaagtaattcaacaagtctctaggatattctgcactttcccagattttcctgtcatcttctaaatcctccaaactgttc

SEQ ID NO: 184184 - DNA, 201 bp, Homo sapiens
attttctgcttcctcttgaatgctttgccacttagaaattttttctaccggataccctaaattatctctctcagtttcaaagttccatacatctctagggmaggggcaaaatgccaccagtctctttgctaaagcataacaaaagtcacgtttgctccacttcccaacaagttcctcatctccatctgagaccatctcaac

SEQ ID NO: 184185 - DNA, 201 bp, Homo sapiens
tcaggacacgaagttcctaggctgcccacagcaggggtccctgggcctggcccacaaagccatttttcttcctagtcctctgggggaggggctactgtgarggtctttcacgtgccctggagacattttcccccttgtcttggtgattaacattcggctcctcattactaatgcaaatttctgcagcaggcttggatttct

SEQ ID NO: 184186 - DNA, 201 bp, Homo sapiens
ggctgaggcggatggatcacatgagttcaagacaagcctggccaacatggcgaaaccctgtctctactaaaaatacaaaaacagcagggcgtggtggtggrcacttgtaatcccagctactcgggaggctgaggcaggagaatcgcttgaacccaggaggcagaagttgcagtgagccaagatcatgctactgcactccaa

SEQ ID NO: 184187 - DNA, 201 bp, Homo sapiens
tacccagaggggcaagggctcataatatggtttgtccttagacaacagactggctttttatctgtggtttcattttatcaacagtttttgggctgagcgcrgtgactcacatctgtaatcccaacactttgggaggctgaggcggatggatcacatgagttcaagacaagcctggccaacatggcgaaaccctgtctctac

SEQ ID NO: 184188 - DNA, 201 bp, Homo sapiens
gcttcccagatccccgttccagcctggctagctcagtctggagcctctgattaaaagggtacccagaggggcaagggctcataatatggtttgtccttagrcaacagactggctttttatctgtggtttcattttatcaacagtttttgggctgagcgcagtgactcacatctgtaatcccaacactttgggaggctgagg

SEQ ID NO: 184189 - DNA, 201 bp, Homo sapiens
gcggaggttgcagtgagccaagattgcgccactgcactccaacctgggtgacagagcaagactctgtctcaaacaaaaaataaagtctctactctcgtggmgagtgatggttctgggctggtaggaaggtgacatatcaaagatagttcaagaaggctagttctctgtggaggtgttctttgagtgaggtttgaatgcctt

SEQ ID NO: 184190 - DNA, 201 bp, Homo sapiens
ttcctaaaactgaatgtcctggtgctttggggagagtataggagaagcactcaaaccactgggatattcttgatattcttatgtgttttagttcattttaygattattgatttatttagcttttccatgtgttttcagtcaaatttgttcatttgtggtttcttggaaatccatccaggttttcaaataaaatggtggtag

SEQ ID NO: 184191 - DNA, 201 bp, Homo sapiens
tgctaggaggagaggcaaagccaccttgagctctgtgcttgtatagggagtggaacaaagcaaaggctggcctcagactggactccagagtttccattcaygttctccacaagtcctcagaagtaaagaggagctggagggctatatcacccagtgatcagagagcaggcatggtatcagagagcctgggctaacatctgg

SEQ ID NO: 184192 - DNA, 201 bp, Homo sapiens
agacaccaatctgccactgtttatctaggacttatcagatgccagaactgtgagaaaataaatttctgttgtttataaattacccactctcaagtattttkttatagcagcagaaggcagaccgagatagttagataatctttttccttataatttcatttttgtattgcaagatggattggtctgttatcaggtttaatt

SEQ ID NO: 184193 - DNA, 201 bp, Homo sapiens
gcctctgccacatctacctgtgttcctgcttcttactttgtgctggatgcttggactttagctttctagtaggtgacagctggcttttcccaagggaaaayagcatgagtctctctacctggatcccagaactttgtgctctaatgggaattttcatctccgtcctgatgcccaaccttgacacctgtctcttaccctagc

SEQ ID NO: 184194 - DNA, 201 bp, Homo sapiens
gttttttattgcccaggctgatctcaaactcctcggctcaaacaatcctcccacctctgtctcccgaagtactgagattacatgtgtgaggcaccaagccwggccttttttttttttttttttttaacaaatcctattagttggcttttggattacataagccaaaactcaattttcttgtttttttttctttgcttttcc

SEQ ID NO: 184195 - DNA, 201 bp, Homo sapiens
atgaaaagattctaaacatcactaatcatcatggaagtgcaaatcaaaaccacagtgagatatcacacactggctaggatagctattattttaaaaacaaraagataagtgttggtaaggatgtggaaaacttgcacactgttggtggagatgtaaaatggagctatgaaaaaatagtatggagttctctcaaaagattaa

SEQ ID NO: 184196 - DNA, 201 bp, Homo sapiens
gagcccagaatgttgccccagatctcactaggactgttttatgggcccatattacttgtctaaaaacccaaactgttctgaattctgagctgtgtttgtcstgagtgttgtgatcagaaatgagggcatggattatcatctgtgttttaaaggtggggaaacagagcttcagagaggttaagtgatttgcccaaggatgtt

SEQ ID NO: 184197 - DNA, 201 bp, Homo sapiens
ttttagaggcgaaagtgggcagattacttgaggtcaggagttcaagaccatactagccaacatggtgaaaccccatctctactaaaaatacaaaaatttgytgggcatggtggtgcacttctgtaatcccagctactcggggggcggaggcaggagaattgcttgaatctggggggcagaggttgcagtgagctgagattg

SEQ ID NO: 184198 - DNA, 201 bp, Homo sapiens
acttttagaggcgaaagtgggcagattacttgaggtcaggagttcaagaccatactagccaacatggtgaaaccccatctctactaaaaatacaaaaattwgttgggcatggtggtgcacttctgtaatcccagctactcggggggcggaggcaggagaattgcttgaatctggggggcagaggttgcagtgagctgagat

SEQ ID NO: 184199 - DNA, 201 bp, Homo sapiens
gtcatactaggcctgactagatgggttctgtggtctaggtgttcgtatctccctcttccaaattcgtatgttgccaccgaatccccaatgtgataattttragaagcggggcttttaggaggtgattaagtcatgagggtggagcccttgtgaatgggatttgtgtccttataaaagaggcttgagggaccccctctgttc

SEQ ID NO: 184200 - DNA, 201 bp, Homo sapiens
caggggttggcaagcagttttctatgcatcaaatgtggcccactgcctagtgttgtaagttttctcggaacattcacgctacaacggtagagttgagtagrgtgaatgttccaataaacagagcctgcaaagcctaaaatgtttactgtctggtcctttacagaaaatatttgtctgcccctgggttaggtgcaaagcact

SEQ ID NO: 184201 - DNA, 201 bp, Homo sapiens
ctttgcagccatgcctcagcctgccattctaccggtttttaactgagccctgccactttgcctggctggctcttcacagccttctcctctgggaaaatggyccctcttcttccttctctgtccagctgtagctctgctaacacttgacggtccttccaaaaccttgaccttgctttcaccgggccacaggatcacttgctg

SEQ ID NO: 184202 - DNA, 201 bp, Homo sapiens
ctgaaatcctggtcctggaaaccaatgaaatcacctgagcaaggactatgactctcatagaaaggaccccttaattctgatggtaatgtggatgctatggyggtgggagctttggcatcaggctcatatctaaagatgagtttataggagttctcatttttctcttcatgccttttgaatttggtaggcttgcctccctga

SEQ ID NO: 184203 - DNA, 201 bp, Homo sapiens
attgcctgtgtcaaaaatcatgatggcagtgattgaatggtggagatatgtttggaaaagctgtgttccctgttgtagcagaacatgtaccccagcttccygatggtctcttcagaacccttgtttcttgcctgcatgttttgcagatccggtacatggcccacagaacgtggaaatcgtagacatcagagcccggcagct

SEQ ID NO: 184204 - DNA, 201 bp, Homo sapiens
ggcagttgtcccaggtttttggaaggctgaggcaagaggatcgcctgaacctgggaggtcaaggttgcagtgagccatgatcacaccactgcattccagcytgggtgacagagtgagactctgccttgaaaaacaaaaatgtttttaacagcttttttgagatctaattgaagaacaataaactgtacaatttgataaatt

SEQ ID NO: 184205 - DNA, 201 bp, Homo sapiens
gttgacagtggggtgttaaagtctcccattattattgtgtggagatttttcagtttgtgatggtgtgaaagtaatatacattcagtagaactgtgctttcmgtgcccatacaatcgttctttccctttcagtactatattcagtaaactatatgagacattcaacactttgttataaaataggatttatgctctcttttgt

SEQ ID NO: 184206 - DNA, 201 bp, Homo sapiens
ctcctaatgctatccctccccactccccccaccccacaacaggccctggtgtgtgatgttccccttcctgtgtccaagtgttctcattgttcgattcccasctatgagtgagaacatgcggtgtttggttttttgtccttgtgatagtttgctgagaatgatggtttccagcttcaaccatgtccctacaaaggacatgaa

SEQ ID NO: 184207 - DNA, 201 bp, Homo sapiens
aggtatatctcctaatgctatccctccccactccccccaccccacaacaggccctggtgtgtgatgttccccttcctgtgtccaagtgttctcattgttcrattcccagctatgagtgagaacatgcggtgtttggttttttgtccttgtgatagtttgctgagaatgatggtttccagcttcaaccatgtccctacaaag

SEQ ID NO: 184208 - DNA, 201 bp, Homo sapiens
ctgatattttcttggtaattcataccaataattcagatggcttctttaggccccagcttaaaaaactagtaataaatggtcattgccatggatgataacaraagggtcctggattcctaagtcttacagtcttactacctgtcaggtagcaaaatatttttatatcttcttcacattatttgaagtaatggttcctaagag

SEQ ID NO: 184209 - DNA, 201 bp, Homo sapiens
taaatatagccctcaaattgtttttcaattaagaaatttagcatttttcttagctggaaatttcgatgacttttgagctagacattttgtagaaaactgtkggaaatattttggcatattctagtgttttttaaaacattataccactatattaaggtgagttcttgttaaacatggcttgaacaaagaataaacaatttt

SEQ ID NO: 184210 - DNA, 201 bp, Homo sapiens
aaatttccccctcctgcccttcctttttttttttttttttcctggtctccaggcaaccagtaatctgatttttgttattatagattaatttgcattttctrgagctttatataagtgaaatcatatagtgtatattcacttgttctgttttttgccttcgttcactcagcataattattttgagattcatccacattattg

SEQ ID NO: 184211 - DNA, 201 bp, Homo sapiens
ctccaggcaaccagtaatctgatttttgttattatagattaatttgcattttctagagctttatataagtgaaatcatatagtgtatattcacttgttctsttttttgccttcgttcactcagcataattattttgagattcatccacattattgcacttatcgctagtttattattttttgttgccaagtatcaggttgg

SEQ ID NO: 184212 - DNA, 201 bp, Homo sapiens
gagtctgtacattttaatgtagttatgtttctttttaaaagtttaatgtatttgtatttaaaatcattatgccaagattatgtgagatttttgtttctatrttatgtttatgcagttctttactaagaaagggatgaatgacttcagggtttcctggaagctcatctcttaaaatattcatctatcactattaaaatatgt

SEQ ID NO: 184213 - DNA, 201 bp, Homo sapiens
tcctctctcttcttcacccctggtaaccactattctattttctgaatttgtgagtttgcatattctgtataccttatatgattcaaaccatacaatatttktctttttgtgtctgacttatgtcacttagcataatgttttcaagttttatccatattataacatgtcagaatgtcattccttttaaggctgaataatgtt

SEQ ID NO: 184214 - DNA, 201 bp, Homo sapiens
cggagtgggacactgtctcgaaataaataaataataaaagcaattctaatttttagaattttgaatagtctcctctcctcactttcagttcttattattgytttttgtccttaatgtctcttactgaagtattttcggttgtagaatacaaaaggaaaacacactttatagcagaattggcataacatgtaagaccttagt

SEQ ID NO: 184215 - DNA, 201 bp, Homo sapiens
ttgcaaaaatatctcctctaagattctttcgttgtagtacttattctaatgaagattcaaaagaacctccgaatttgaattttggtcttatcagtaggctrttcgttaagtcatctattggatgattaataaaatgatgaattttaagggactcgaagccaaccctttatacactcagggcagactcacagaggtttgtca

SEQ ID NO: 184216 - DNA, 201 bp, Homo sapiens
ttgctggatcaaatggtagttctgttttacgttctttgagaaattgccaaactgcttcctacagtggctgagctactttacattcctcccaagtgtagaakcatttccttttctccatagacttgccagtatctgttgttttttgactttttaaataatagttgttcttactggtgtgagatggtatttcattttggtttt

SEQ ID NO: 184217 - DNA, 201 bp, Homo sapiens
gaagtaaagataggagtatgtgtattaaactttttaaaaagtttggttatgaagaggagtaaaaatgaagcataagttgggggataagggagagtttaggrcttatttaaatgctgatggaaatgagccagcagatgtctgagatgctgaagatgttgggggtgggggttgggagaggaagaaaggattgattggtggccc

SEQ ID NO: 184218 - DNA, 201 bp, Homo sapiens
tgctggatcaaatggtagttctgttttacgttctttgagaaattgccaaactgcttcctacagtggctgagctactttacattcctcccaagtgtagaagyatttccttttctccatagacttgccagtatctgttgttttttgactttttaaataatagttgttcttactggtgtgagatggtatttcattttggttttg

SEQ ID NO: 184219 - DNA, 201 bp, Homo sapiens
attagggcaataatggtttcagggaatgatttagggaggattccctctttatcttttggaatagtttcagtaggattggtaccaactctttgaatatgtgrtagaatttagctgtgaatccatctggtcctggactttttttgttggcaattttttttattactatatcaatctcactacttgttattggtctgttcagag

SEQ ID NO: 184220 - DNA, 201 bp, Homo sapiens
gtaggagctgacttccctcggcgggtggagcaagacttttccttggctatctgtccctttgctactagtactgctgcagcctgtcctcttagccactgtgrggggtctaaaactagctgcaaccaagtatctatgtatggtaactggtctgggtgtcctgatttatcagttactttgtgccatacctttgaaactagggac

SEQ ID NO: 184221 - DNA, 201 bp, Homo sapiens
gggagcctctcttcttggtaaggaggggcaccattggtgccatttctgccatgcatcctctgatgtggggtcggacagaaccgtaggagctgacttccctyggcgggtggagcaagacttttccttggctatctgtccctttgctactagtactgctgcagcctgtcctcttagccactgtgaggggtctaaaactagctg

SEQ ID NO: 184222 - DNA, 201 bp, Homo sapiens
attctcctgcttcaacttcctgagtaactgggattacaggcacctgccaccatgcctggctaatttttgtatttttagtagagacggggtttcgccacatyggtcaggctggtctcgaaccgctgaccttaggtgatctgcccacctcccaaagtgctgggattataggtgtgagccaccacacctggcctggtatagact

SEQ ID NO: 184223 - DNA, 201 bp, Homo sapiens
tagagacaagttctcactatgttgactaggctggtcttgaactcctggcctcaagcagtcctcctgccttggcctcccaaagtgctgggattatagatgtragccaccacacctggcctattggtatggacttaagaataaagttgacccatgaataatgcaagggcactgactcccttgcagtagaaaatctgcatataa

SEQ ID NO: 184224 - DNA, 201 bp, Homo sapiens
taataggttttgggaaacaggtggtgtttagttacatagataagttctttagtggtgatttctgaaattttggtggaccccatcaccagagcagtgtacamtgtacccaatgtgtagtcttttatccctcaccctcatcccacacttccccctgagtccccagagtccattatatcattcttatggctttgcattctcaca

SEQ ID NO: 184225 - DNA, 201 bp, Homo sapiens
cctggcctcaagcagtcctcctgccttggcctcccaaagtgctgggattatagatgtgagccaccacacctggcctattggtatggacttaagaataaagwtgacccatgaataatgcaagggcactgactcccttgcagtagaaaatctgcatataatttttgactcccccccaaacctaactactaatagcttactgtt

SEQ ID NO: 184226 - DNA, 201 bp, Homo sapiens
tttaattcttctgcatatggttagccagttttcctagcacactttatcgaatagggagcccttttcccattgcttatttttgtgactttgttgaagatcgrttagttgtaggtatgtggctttatttctgggttctctattctgttgcatttgtctgtgtgtcttttttttgtaggagtaccatgctcttttggttactgt

SEQ ID NO: 184227 - DNA, 201 bp, Homo sapiens
cagtcctcctgccttggcctcccaaagtgctgggattatagatgtgagccaccacacctggcctattggtatggacttaagaataaagttgacccatgaayaatgcaagggcactgactcccttgcagtagaaaatctgcatataatttttgactcccccccaaacctaactactaatagcttactgttgactggaagcct

SEQ ID NO: 184228 - DNA, 201 bp, Homo sapiens
taaaattcaagattagaattatactagactagaattaacttccatgctagttgcttgaaatcaatccattattctgtttgatattctgtgagatttttttyccccctgactttgatggttggtttcgaaatccattaagtggatctcaatcaggtttgtttgtttgtttttgttttaatgaaataaagtagaagagaaaat

SEQ ID NO: 184229 - DNA, 201 bp, Homo sapiens
gaagaggactagaatatccattttacaccagagtggaggaagcatgactatatgcaaatttagcaccaattagatggtaggatttgaaggactgtggtccstggaatattccaaaagcaaaaatggaaatgatagtgataacatctgaagtgtggtggcaagacagttaaaacagtgctaatttggagcctctgggcacag

SEQ ID NO: 184230 - DNA, 201 bp, Homo sapiens
catcaggatggccactatgaaagaacaaaaagtttaaattagagcacagtaaacaatgggcgtcaattttttttaaaaaaaaaaggaacaaaaactaacargtgttaaggatgtgacattggaacccttgcatactgttagtgagaatgtaaattgatgcagccattatggaaaacaaaggggtcctcaaaagattaaaaa

SEQ ID NO: 184231 - DNA, 201 bp, Homo sapiens
gatgttattccagctgacattaatctcatcatagggagaacattgtgataaatgtgtgattcatttgagattggtttaagacatgtattgctttgtatggrtaccagccacgatagtaatactgtgttcttctttaaggtctggattccctggagcacagcctgtttccatggacaagcaaaatattaaacttttagacct

SEQ ID NO: 184232 - DNA, 201 bp, Homo sapiens
cctgccaccatgctgggctgattttttataattttaataggggtggggtttcacagtgttggccaggctggtcgcaaactcctgacctcaagtgatccacstgcctcggcctcccaaagtgctgggattacaggtgtgagccaacatgcctggccagaaggttctggtttgttaaccaggtaaggtctgcacatttaaaac

SEQ ID NO: 184233 - DNA, 201 bp, Homo sapiens
tcgggtgtctcggaccccggtgtgcaccggaccacggggaggcggctccaaaggcgcggtgaacgttggtgagggagggcagctctgcgcagccccaagasatggctcacaacaagatcccgccgcggtggctgaactgtccccggcgcggccagccggtggcaggtaacctggactggggggcgttcgaatccccacact

SEQ ID NO: 184234 - DNA, 201 bp, Homo sapiens
ccaaagtgctgggattacaggtgtgagccaacatgcctggccagaaggttctggtttgttaaccaggtaaggtctgcacatttaaaactgagaaatgctarcttcctagcaagcagaatggaatatatagaattgactgcatggtctcctttacttcctatcggaaaagtctttttactctgctgactagagtgtatgtgt

SEQ ID NO: 184235 - DNA, 201 bp, Homo sapiens
ttctctgcttatgcatttataacaacttggttttcggttacatcatgattcatagacataaaacatcaactcagagtcaatcatatggtaacctttgtcarttcctccaatctttggtccatgctacatgccctctgtaggatatttcagatggtattcaaagataagattatgttcataagtaagcaaatttaagtttta

SEQ ID NO: 184236 - DNA, 201 bp, Homo sapiens
cagtaaaacattctgtaaacagatgggatgtcatccaggcttttgttgttcgttgatagagcacagacagagtagatttagcataattcttaagggccctagtattttcagaatggtaaacgagcactggcttcaacttaaagttaccagctcctaacaagaaagtcagcctgtcctttgaagctttgaatctaggcattg

SEQ ID NO: 184237 - DNA, 201 bp, Homo sapiens
acttttaaataatagtatgccacttcctagttggggttcttacctcatttccttttatacaatttgtttttacatatgttataaatcctacaatacattgktaatatttttactttaattagtcaattatattgtaagaaaagaaagaggaacacagatttcttatatttattctagtttttaaccattccaatgcccttc

SEQ ID NO: 184238 - DNA, 201 bp, Homo sapiens
ttatcaaggtctgggtagaggggaaggggggcaattagtgtttagggagtatagcatttcagtgttgcaagatggaaaagttctagacatacacttagcaktgctgaactgtacacttaaaaatggttaagatggaaaattcaatgtttttttaccacagattttaaaaagcaatgtttcattgcctaattttatatttgg

SEQ ID NO: 184239 - DNA, 201 bp, Homo sapiens
gaggtgctaatgctcttttgcgcaattgtcctcctcagtttagccatgtgtgaacataatttcctgtcactccagccttctcaccataatagaaggactgwtaacattttttgtttcttaagaatttctcccagagtccatctctgacgtaccttgatttcatcctgattaaaagtatcttttctgttcttgccctttgca

SEQ ID NO: 184240 - DNA, 201 bp, Homo sapiens
aaaaatgcagtatctgtgaattacagtaaagcaaagtatgcctgtaatactagtttctctcataaacaactgcccaaaactcaggagttccaatcaaactrtatttcttgctcatatcggaatgtgttgtatcaggcaactttcccaggctactcttctctgattagcaactcgctagagtctttccatctttgatgctgt

SEQ ID NO: 184241 - DNA, 201 bp, Homo sapiens; identical to SEQ ID NO: 32316

SEQ ID NO: 184242 - DNA, 201 bp, Homo sapiens
actacaggcgcccaccacctcgccaggctaatttttttgtatttttagtagagacggagtttcaacgtgttagccaggatggtctcgatctcctgacgtcrtgatccgcctgcctcggcctcccaaagtgctgggattacaggtgtgagccaccgcgcccggcctctgcaataattctttaggctttctttcataactttg

SEQ ID NO: 184243 - DNA, 201 bp, Homo sapiens
ctccatcagtgatatacatgttgagttcttcaaaataataaaaatctgtgaaagagatacattaaaactacgtaatcagtcagaattaattagagggtatrgggtctataactctgttgatatggcattgaaaaaactgttagttgtatttttcacggtgtattctttgcaatgaaattctctgcttggaaaaatataaaa

SEQ ID NO: 184244 - DNA, 201 bp, Homo sapiens
agagcgacacttggtctcaaaaaaaaaggttttaagaaggtgatatttgagaattgttaattatagaattttaatctgaaacatttccttttatggaaatkattacctatctgtgttgtttaggaagattcttacctctgaagacaatgttaggaccaagatatgatagtcaagttgctgaagaaaatcggttccatccca

SEQ ID NO: 184245 - DNA, 201 bp, Homo sapiens
tcccagcactttgagatgtctgaggtgggcatagtgcttgagtccaggagtttgagaccagcctgggcaacctggtgaaaccccatttctaacaagaaatmcaaaaaaaaaaaaaaaaaaaaaaaaaagctggccatgatggcacatgcctgtagtcccagctacttggaggctaaggtgggaggaacacctgagcctggg

SEQ ID NO: 184246 - DNA, 201 bp, Homo sapiens
tttcctttgagattacaaaaggaaagatgaaagaagaacagattattgatggcaatgatttaaaaagctatcatgatatgttaacttgtcatgtaactgtrtgtgtaaacttcaaataatttttgaaacagatatgatatgagctagttgttttaggtcttttaaaaacattcttaaaagaaatgcctttccattgcatat

SEQ ID NO: 184247 - DNA, 201 bp, Homo sapiens
aagaagaacagattattgatggcaatgatttaaaaagctatcatgatatgttaacttgtcatgtaactgtatgtgtaaacttcaaataatttttgaaacasatatgatatgagctagttgttttaggtcttttaaaaacattcttaaaagaaatgcctttccattgcatattttaaatatatttgaacagaactgattagc

SEQ ID NO: 184248 - DNA, 201 bp, Homo sapiens
atactttctgctgaatgcatgttgcttgtacgtcaccatagtgttgaaaaattgtcatttcaactgtcgttaagtcaggaaccatctgtactccaaccttsttttggttagttttaacttggtacgtatttctccatctcttttcacttacctgcatctttatgtctaaaatgggtttcttatagaaaatattagttgggt

SEQ ID NO: 184249 - DNA, 201 bp, Homo sapiens
agtaacaacacaaccaaagttaggagaggtacagcagaagtgtcatcaattctgtggctgggaagggtaataaatatttttaaatttttaaataaaatttrctcttattttacaacacttaatacaagcattgacatatcttcttggctccttgaagttagtatgtttgcaatagaatactttaaaggtgtcagatttcgt

SEQ ID NO: 184250 - DNA, 201 bp, Homo sapiens
taacacctgagctctacctcctgtcagatcagtggcggtattagattctcataggagcacaaaccccatcgtgaactgctcatgcaagggatctaagttgygtgctccttatgagaatctaactaatgcctgatgatttgacatgaaattttccccaaagcattcccccacccacatttgtggaaaaatcatcttacataa

SEQ ID NO: 184251 - DNA, 201 bp, Homo sapiens
taagttttctaaatttctagatttctcttcttcctcaggaacaccagttattcttatgtttggtcattttaacataatcccaaatttcttggaggctttgwtcattttttttttttaattctttttctctttgtctttgtctgattgggttaattcaaaagcctgtcttcaagctctgaaattctttcttctacttgttct

SEQ ID NO: 184252 - DNA, 201 bp, Homo sapiens
tattatttctgagggctctgttctgttccattggtctgtatctctgttttggtaccagtaccatgctgttttggttactgtagccttgtagtatactttgragtcaggtagcgtgatgcctccagctttgttcttttggctgaggattgtcttgacaatgcaggctcttttttggttccatatgaactttaaagtagtttt

SEQ ID NO: 184253 - DNA, 201 bp, Homo sapiens
taagtacttgggtttctcaggtgatcgcggggtcatagaggtcccaagagtttatgtcttttgtctttgcctaccagggcgggtagagaaaaaccatcagrtggggcaggattgggcagatctgagctcagactctccttgagcagggcttaatgcagacactgtgggacatagcaggtgattcttaggccagtggattta

SEQ ID NO: 184254 - DNA, 201 bp, Homo sapiens
tcagcacatgagattctagaactttgccttgaatgcttagaatagaacttagtcatgctacggaggttgaactccctcatactttatgttaacttttaacktttagttgaacaatgcatatatctaggataagtgtagttatttataaacaaaaaacttaagactgacaatatagccttctagttaatcgcttttaaattt

SEQ ID NO: 184255 - DNA, 201 bp, Homo sapiens
tcatggcacatgtgtactgatgtaacaaacttgcacattctgcacacgtaccccggaacttaaaataaaagttggaaattttaaaaaaaggaaaaaaaatktgctttatggaatacactttttaaatttacatcccactagaagattcaaagagtaatgtagaccttatcaatgatatgcattttcttaagttgaagatgg

SEQ ID NO: 184256 - DNA, 201 bp, Homo sapiens
cttattatactatgcagaggaatctcttaaagaatagtttcatctacttctttccattaatagggaccttatccaaatttttattttgggagcttacaacrtaaatatatagtgttaagttctcctgaatatacatgtaatacatattcagaaataggtgaactgtaatgtcacagctttgtcatggtcatttgtaactgg

SEQ ID NO: 184257 - DNA, 201 bp, Homo sapiens
tgcatatccagcggacatctctctctgtgggttaatgaagctgcttccgtccacatacagctcccagtctacagacatccaaggtttgtcccggaggtccrgtctgctagaataaacttagtccaacacctctacacagttatgttcaactgggctctctgataccagaagcagtggcggggttcattgttacaaacttca

SEQ ID NO: 184258 - DNA, 201 bp, Homo sapiens
tcctgctcattcaacagggaggtgctggagatattcttaatggtagaagaattgtagttggtttctttctgatataaatgcactcccaggtggtggtaagkgaggttctgttgattcatcagaatatgactgcacagtagcaggagctgaagaaatacttgttgtataaatgacctatatctcttaaaaaggaggatatgc

SEQ ID NO: 184259 - DNA, 201 bp, Homo sapiens
cattgtgcaagtgggggctacgtgactgagagctacatgcatcagtgatgggggctagcagaacagaacagaaagtttcacaagtcttcctcatacaatgkctggaatccacaagcggttaggtcaggagttgatgtttaactaccaggcacggttcttggcaccaagccatctggctattgatctcacttcttcttttaa

SEQ ID NO: 184260 - DNA, 201 bp, Homo sapiens
atcttgatttcattgttgacccaaagatcattcaggagtagataatttaatttctatgtatttgtatggtttggagggttccttttggagttaattttcarttttattccactgtggtctgagaaagtacttgatataatttcagttatcttaaatttattgagacttgttttgtgacctatcttatggtctgtcttggag

SEQ ID NO: 184261 - DNA, 201 bp, Homo sapiens
tttcttggaggctttgttcatttttaaaattttttttctttgtttttgtctgattgggttaatttgaaagctttgtcttcgagctctgaagtactttcttytacttgttctagtctattattaaaattttccagtgcattttgtatttctctaagtgtgtctttcatttccagaatttgtgattgttttttctttatgatc

SEQ ID NO: 184262 - DNA, 201 bp, Homo sapiens
tttaggttaaaatgggcttgttggtggacctgacaaatacttcaaggttctatgaccgaaatgacatagaaaaagaaggaatcaaatatataaaacttcartgtaaagggtaagttatatattaagattctttaatattgaaacctttcatcacaatttgtaatctcttttttcaaaaaaactttttctatattactagac

SEQ ID NO: 184263 - DNA, 201 bp, Homo sapiens
aacagtaccaggaggcgatccactgtgtcttctttggcagctggcagctggcagacaaagcaaataatgagtctttggcttgttacttttcaccattccayagttttctccaattttgaataaacccccaaaacaaacatccttcctgcattgtcgttttactgtagcagaccctcatatagcaagtgtgctactggccca

SEQ ID NO: 184264 - DNA, 201 bp, Homo sapiens
aaagaaactttagcagatactgtgctgggttcaagccaatgtattatgcccttctgccctcatcagtcatatatcactttgtctcccacctttagactctyccaagtgaaatgtaatccttggaaataattacataaattactgttttaaatacttaaatactcaagaggtaaaattgtccataagtgtagtctacctttt

SEQ ID NO: 184265 - DNA, 201 bp, Homo sapiens
ggaaataattacataaattactgttttaaatacttaaatactcaagaggtaaaattgtccataagtgtagtctaccttttcctcctttaatattttctcamcctagagcctagattcttagcggaaagaaggacatagatttttgattcatgaagacctagaattcaaattttgttaataaaacaaatcagctctgtatcc

SEQ ID NO: 184266 - DNA, 201 bp, Homo sapiens
tacacctcttgggccccccacaaacagtgtaccctattattaacatggcacatttattacaattaatgaaccaatattggtatgttattatttatttattwatgttttgagacggggtctcactctgtcacccaggctggagtacagtggtgccatcttggctcactgcaacctctgcctgccaggttcaagagattctct

SEQ ID NO: 184267 - DNA, 201 bp, Homo sapiens
catcttatttttgtagatatgttctagtttaatagtttacattttacaccagttactctgtgttgttttctagagcatgtcaaagtctagtaaaaatcttratgctaattctttaggtttctcattatgaaagcttcacttaccagccagaatccataaaaaccaagaaggattgaagcctctcaagatcacatttaatca

SEQ ID NO: 184268 - DNA, 201 bp, Homo sapiens
tgtatatatacatatttacatacatactcttttaaaaattaatctatccaccgcctatgtgcacagacataaaatgacattttaggttgtttgatgatccrtaatttcttcttaatagattttagtattttacatcagatttgctttctaagtgttattagccagtaaaagcaattatctagtggaaatttggtttaaaat

SEQ ID NO: 184269 - DNA, 201 bp, Homo sapiens
ttatagttcttgaaccctttctgagttctgcttgtatgccaaaattatcctagtccactgactggactaagtgacttgaccaaagggatgtggttttaacracaaagaccaaaatagagaatcgttgtgttgttgttgttgttttttttttaacataaaaagagatgggagtataaagagagctcaaagttataatctcac

SEQ ID NO: 184270 - DNA, 201 bp, Homo sapiens
cgcttcaactagtaatttttatggtgtccaactcctgtcactgtctttccctaaaaatgtaaaatattccacaatgctcttgtgaatttgctgtagctctmtggggtgcctcattgcagtttgcaagctgtggactcagagcattattccaagactttttgttttccatttaaatatttatttcttacgttttgtacctct

SEQ ID NO: 184271 - DNA, 201 bp, Homo sapiens; identical to SEQ ID NO: 32318

SEQ ID NO: 184272 - DNA, 201 bp, Homo sapiens; identical to SEQ ID NO: 32319

SEQ ID NO: 184273 - DNA, 201 bp, Homo sapiens; identical to SEQ ID NO: 32320

SEQ ID NO: 184274 - DNA, 201 bp, Homo sapiens
ttgcctaacagtagctttatttctctttctcttgcattttactataagccataaggagtaaccaagcttctcttttaatactttgtttaggtatctcctcytaaatgatggagacacctaaacaaagtattagagaagttagttatcattctcctgagtgaatatccaatttcattgactgcgagttctacattgcacaca

SEQ ID NO: 184275 - DNA, 201 bp, Homo sapiens
tctcatagaatgagttaggaagtatcctctctgcttctattttctgaaacagattatagaaaattgatgtcatttcttaaatgtttgtataatacacccastgaaaatatctgggcctagtgctttatttttggaaaggttaattataggttcaatttttaaaataaatattggccttgttagattatctgtttctccttc

SEQ ID NO: 184276 - DNA, 201 bp, Homo sapiens
attatcctagtccactgactggactaagtgacttgaccaaagggatgtggttttaacgacaaagaccaaaatagagaatcgttgtgttgttgttgttgttktttttttaacataaaaagagatgggagtataaagagagctcaaagttataatctcacctctgctgctcatttagtcatgttgagtgtttatcttccttag

SEQ ID NO: 184277 - DNA, 201 bp, Homo sapiens
ctgtgtaaattttagaatgttcgtgtaaccaaataacagctacatgttttctaaaatctctggattttgtattttcaaatatgtgtgaacacacataaacwtcgcatatacatgtttatcatatacataatacatatacttgtaagcatacatacataagcacacacacagcccaaacacagaaaacaatacaaaggaatg

SEQ ID NO: 184278 - DNA, 201 bp, Homo sapiens
atcccattagagtaacataactctctctgttaaaaaagaaagaactattaataataacaataatgtataatacttcattttaaccttgtttggattttctrtcatttttctctccacattgattacaacatttccattttcactcacatattaaatatttactagtacttcatcttttatattttttaagttatattttat

SEQ ID NO: 184279 - DNA, 201 bp, Homo sapiens
tagtctggctagagatttatcaatttataaaaatcttttcaaataaccaaggctttggttttattgatattctctgttgttcctgttttcaagttcattgrtttctgccctaatttttattatttctttttttctgagtgctttaaggttaaattgctcgttctctagaattttcaaaaatagaagcttgtttctggtttt

SEQ ID NO: 184280 - DNA, 201 bp, Homo sapiens
atttgtgtgttttctttgtcagcctcattcagaatcaattcaattattgtcttagaaggaatagtttttagtgtttttgatactctccagtgtgttttccrtttcatgaatttctgctaattgttatctctttgcttctatttttgttgggtttcagttactgtcatttttctaatttcttgaggtggatacttaactcat

SEQ ID NO: 184281 - DNA, 201 bp, Homo sapiens
tttcaatttcacatgtaagtgagaacatcatgcagtatttgtctttctgtgcctgtgttatttcacttagcataacatcctcaagattcttccatgttgtyacaaatgacagaatatctttctttaaaggctaaatagtattccatttgtttatgtataccacattttctttatccattcatctgtcaatgaacatttagg

SEQ ID NO: 184282 - DNA, 201 bp, Homo sapiens
gtttttgatctattttttttccagtagttttacagtttcagatcttacatttaagtctttgtcttagtttgtttgtgcgctataacaaaataccacagacygggcaatttataatgaacacaaatgtatttctcagagttccagaggctgagaagtccagagcagggggctggtgtgttaatcaaggggctagtatgtgat

SEQ ID NO: 184283 - DNA, 201 bp, Homo sapiens; identical to SEQ ID NO: 32311

SEQ ID NO: 184284 - DNA, 201 bp, Homo sapiens
tactgcatgtactttctagctctgaccattcagatgctctccacaatgatctcagtttcctatgtcagatttagcctatgcttatcctctctttgatgatctagactcttagtgcctggatctgttgaaagttcctgtaaaatcaatatgcttttactttgctcacattgttgtttttttgactgatgttttgctgcagag

SEQ ID NO: 184285 - DNA, 201 bp, Homo sapiens
agtacatatgataaaattttcttgacagctgttttcaaagtcagccttcctatgtcatcatggttcctttagtaaatttacttctaaggttttttttttttaattaagcagtgtttcttgctgaaagaaatcaaagaagatacaaataaatagaaagacattggtgcttgtggattggaagacttaatattgttaaaacat

SEQ ID NO: 184286 - DNA, 201 bp, Homo sapiens
attttcttcctttctttttgttgaattacttattctggtaattatgcttttgtcaatagtacatacattcttgttctctgcctgtaccttttcatgacaamttgttcttggtttatggttgtgatagcttcttgaatctctatgagaatactagttaaaagcatatttaaagttatctttctcttccttgaatcatctttc

SEQ ID NO: 184287 - DNA, 201 bp, Homo sapiens
ttttgatatattgttattttgctatttggttgaagacatttcataatttcaattatgattttacctctgatctatgggttatttataagtacacttctgtmtttacagacatggagatttttctggttacttatatgttattgatttctagctgagttatgttctgaggctatgatctgcattattttatttgttcaaaat

SEQ ID NO: 184288 - DNA, 201 bp, Homo sapiens
ctgcttctacaagagtttccttatcacttactgaatacccattgtgtctttttccttcagtcacccaggaggaaccatctatcctcctgtcctgaagggarttcctcctaggtttggtcggacctttgtatggtaattaagatttagatcccatgttaggaaacctgctgggttaagggaattttcagtggttaatgttaa

SEQ ID NO: 184289 - DNA, 201 bp, Homo sapiens
tgcttctacaagagtttccttatcacttactgaatacccattgtgtctttttccttcagtcacccaggaggaaccatctatcctcctgtcctgaagggagwtcctcctaggtttggtcggacctttgtatggtaattaagatttagatcccatgttaggaaacctgctgggttaagggaattttcagtggttaatgttaaa

SEQ ID NO: 184290 - DNA, 201 bp, Homo sapiens
tgcagagaccataaccattaccatttttttatattagacctctatttggtttgatttttattttcatgtttattgttttataagaaataagtacatctttyaatatgactccatattgcgtgcaaaataaaatatatgccatttgaaattcttcatggttaatttgaaacttcgagttctcatctccaactaaattatttc

SEQ ID NO: 184291 - DNA, 201 bp, Homo sapiens
aatggtgccaatgacacaactgcctgcccattgatcaggtagcttggcataggctctatgtccacatatccagtatagtctagctggagccgtccagtccyggtgagactctggatgggcccaaacagtttgcaacttagtaaacttactaaatgggttcttctcaatatggtttagaccccaccaggtgactgttcttct

SEQ ID NO: 184292 - DNA, 201 bp, Homo sapiens
ttaagtgttattttgaagatgacagattctatttaatttttatgagttttggaaagtcttaagtggcagttatactctttgtatcatgccatctccatctmcatttaacatgtagttaccttaaaagatatatatggagaaaagaagtggagcagatacaacctattttcattattaggtgactataatgatattttaaca

SEQ ID NO: 184293 - DNA, 201 bp, Homo sapiens
acttgctaagatttgtgagaacaaactaatttatctctcagtctcttctttgtaaatgaatttgaactctaataaaatatttttctttcccttatttttcwtattttttttttaaagggcgctattttcttggaaggtgttactgttaaaggtgtaactcaagtaacaacacaaccaaagttaggagaggtacagcagaag

SEQ ID NO: 184294 - DNA, 201 bp, Homo sapiens
ttgccagattggtgttttgaggatgatgaagacgaagatgaggatgaggatggaaagaaggaatcagaacccgggtcaagtgcttcttttggcaaaaggagaaaagaacggttaaaactggtaatgtttaaaaatattataataggttttttttttcctttttctgcaagcttattgagatttataaaaatggaatattgg

SEQ ID NO: 184295 - DNA, 201 bp, Homo sapiens
acctctatatagttttccatatggatgtactaacttacattcccaccaatagtatacaaaaggtttcttttttccttgcaaaaactggttatcttttgtcrttttgaaaatgtggtggtaggtatgaggtggtatctcattgtgattctaatttacatttccctaatgcttagtgatattgaacaatttttcatatacctg

SEQ ID NO: 184296 - DNA, 201 bp, Homo sapiens
ctatcttctttccagaccccttttctccaaactagtattgaccaacacatggcacttgaggctcatggttttgggattttttttcttcacatgcagcctatgtttcttatttctattctagaagattatattacattaaactcagcatgacctatgagagttcacatgtctctcctttagtttatggtgactgcaaaggat

SEQ ID NO: 184297 - DNA, 201 bp, Homo sapiens
cctatcttctttccagaccccttttctccaaactagtattgaccaacacatggcacttgaggctcatggttttgggattttttttcttcacatgcagcctatgtttcttatttctattctagaagattatattacattaaactcagcatgacctatgagagttcacatgtctctcctttagtttatggtgactgcaaagga

SEQ ID NO: 184298 - DNA, 201 bp, Homo sapiens
agtcagaacatttgcaaagtgatgtttcttgactcttataccacagatgacttcagatgtgttagtaccagctaaggatgtaataccacagcatttaaaamttttgcatgaatacctctggtttctttttcttgaactaaattaaggaagaattttaggaagctgttaagcttcttcattacatatttctatttatgcttc

SEQ ID NO: 184299 - DNA, 201 bp, Homo sapiens
tttttctaactttcagattgctgcttggaaccctttaaattacagaatcatattaatgtgcctatgttacctgatatctgacaaggaatctattagtgctsttccttatagtgccagttctttgtatccctaagttatttatataaaatagataaatttacagtgtctttttttcttcccactagtcatgtgttttatcta

SEQ ID NO: 184300 - DNA, 201 bp, Homo sapiens
aaagtatatggtccactgcaggcaaacagatcttctgaatgaaataaggggcataaaaacacatgggatggtacctgcatcatagggccttaaaaaaaaaatgtagagttgagaaaatgttgctcaagatctcagctcctgcactggccaccatcatatgggctacttgtcacaaaagcgaggaagtcatgagagggaggg

SEQ ID NO: 184301 - DNA, 201 bp, Homo sapiens
aaagttgtttcactttattttaagcttccttgatatttgcttaagttacatttttaccttgtgaaatagttggaaacaagcatgccattttcaggtattayagtagaattctatttgaaaaagtgctagtcgaaagagttttttttctaactttcagattgctgcttggaaccctttaaattacagaatcatattaatgtg

SEQ ID NO: 184302 - DNA, 201 bp, Homo sapiens
gcttctacaagagtttccttatcacttactgaatacccattgtgtctttttccttcagtcacccaggaggaaccatctatcctcctgtcctgaagggagtwcctcctaggtttggtcggacctttgtatggtaattaagatttagatcccatgttaggaaacctgctgggttaagggaattttcagtggttaatgttaaat

SEQ ID NO: 184303 - DNA, 201 bp, Homo sapiens
agtttgccttttttttttttttttaatgttagggaagctatgaagtgtgcttattattgccaaattcacctactcaaggctactttatgcatagtgtgtgrcattcacccatgagtttcaggcagggaaacaggcactgacattaaggatcccagacagtttgctactttgaagcattaaatgggtagttacctgttcaat

SEQ ID NO: 184304 - DNA, 201 bp, Homo sapiens
aacttgcaggactggaagttgctctgggtaagtcagtgagtggtgagtgagtgtgaaggcctatgacattactacatactcctgtagattttataaacacwgcacacttcggctacactaaatttatttaaaagttttcttcaacaataaattaaccttagctcactataacttttttactttacaaacttttaggatttt

SEQ ID NO: 184305 - DNA, 201 bp, Homo sapiens
cttttgactcttttgtaaaaagagttaggttaaaacccaaacacggctgagcgcggtggctcacgcctgtaatcttatcactttgggaggctgaggcaggyggatcacctgaggccaggagcttgagaccagcctggccaacatggtgaaatcccgtctctactaaaaatacaaaaattagccgggcatggtggggcgtgc

SEQ ID NO: 184306 - DNA, 201 bp, Homo sapiens
ggcttaaagaagggaaccaacttagaaaaggggaagaactttgagggtttaagataataacctgtataggattacactggtttagcttacagttgggggayagctgtccctctagtaaaatgaatgtatggttttaggaaattacaaaaaccagttggagcagtctattcttgctctttagtggtccacagaactttggac

SEQ ID NO: 184307 - DNA, 201 bp, Homo sapiens
tgctttatgatgtctttttttttttttttttctttttctggttgatgaaatgccagggtaaaagggatagccaattggactaaagcataagtgccactttrgttacttgacagtgtccagtaaaggtccatcataataccactacacatctactcagggatgaataaggactgattggtaagcttttgaaaatttttaagc

SEQ ID NO: 184308 - DNA, 201 bp, Homo sapiens
cttggcttagttgttctgcttgattttccaaaagaagcttctctggataaggtggaggacagttaaggaaggttttagtaagtgccatttttatgagcctstgcaccaacccacagatgcatggtgtgacacagcacctgacaagaataaatacacccattacagctgcgagggaaggaagaattgaggatattattcttt

SEQ ID NO: 184309 - DNA, 201 bp, Homo sapiens
tttcaacctactgatgagcctatcataggcattcttcatttctcttgcagtgaatttgacttactgtatttcctttcttcatttttttgttagtgtggtamaatataaaaactgtaaaatttagtatcttaatcatttttaagtgtacaattcagtagtagtataaatacattcctaatattatgccaccatcacaaccat

SEQ ID NO: 184310 - DNA, 201 bp, Homo sapiens
gaaaagtctttttactctgctgactagagtgtatgtgtgtgtgtgtgtgtgtgtgtgtgtgtgtgtgtatttcttttgcttcaattcattaaaaaaaaaaatagaatgagctgggtttggaagctgaggcaggaggattgcttgagccctaggagtttgaatccagcctgtgcaatacagcaagatctcatctctgggaaa

SEQ ID NO: 184311 - DNA, 201 bp, Homo sapiens
gactgcatggtctcctttacttcctatcggaaaagtctttttactctgctgactagagtgtatgtgtgtgtgtgtgtgtgtgtgtgtgtgtgtgtgtatttcttttgcttcaattcattaaaaaaaaaaatagaatgagctgggtttggaagctgaggcaggaggattgcttgagccctaggagtttgaatccagcctgtg

SEQ ID NO: 184312 - DNA, 201 bp, Homo sapiens
tgactgcatggtctcctttacttcctatcggaaaagtctttttactctgctgactagagtgtatgtgtgtgtgtgtgtgtgtgtgtgtgtgtgtgtgtatttcttttgcttcaattcattaaaaaaaaaaatagaatgagctgggtttggaagctgaggcaggaggattgcttgagccctaggagtttgaatccagcctgt

SEQ ID NO: 184313 - DNA, 201 bp, Homo sapiens
ttgactgcatggtctcctttacttcctatcggaaaagtctttttactctgctgactagagtgtatgtgtgtgtgtgtgtgtgtgtgtgtgtgtgtgtgtatttcttttgcttcaattcattaaaaaaaaaaatagaatgagctgggtttggaagctgaggcaggaggattgcttgagccctaggagtttgaatccagcctg

SEQ ID NO: 184314 - DNA, 201 bp, Homo sapiens
agatgaagaaatagacgttacctcctctaaaataaaaaaagttattcatggatgcatcatctgttgattctaccaaatgtctgttctaatatttgctgtastaaagtgacatctttgacatcatttttgaaatgtattaccatatttaactgaaaaaaacagagtaacagtcaaaattggtaataattttaaattttgttt

SEQ ID NO: 184315 - DNA, 201 bp, Homo sapiens
aaaacctcagttttgaatcttcagctgcctactgggcagttaaattgacaatttcaacatcacctcagatccagttatttttgttgctcttttttttttttcttttcttttttttttttttgagacaaggtctcactctgtcacccaggctggagtgcagtggtgtgatcatagttcactgcactatctcccaggctcaag

SEQ ID NO: 184316 - DNA, 201 bp, Homo sapiens
attgactgcatggtctcctttacttcctatcggaaaagtctttttactctgctgactagagtgtatgtgtgtgtgtgtgtgtgtgtgtgtgtgtgtgtgtatttcttttgcttcaattcattaaaaaaaaaaatagaatgagctgggtttggaagctgaggcaggaggattgcttgagccctaggagtttgaatccagcct

SEQ ID NO: 184317 - DNA, 201 bp, Homo sapiens
aattgactgcatggtctcctttacttcctatcggaaaagtctttttactctgctgactagagtgtatgtgtgtgtgtgtgtgtgtgtgtgtgtgtgtgtgkatttcttttgcttcaattcattaaaaaaaaaaatagaatgagctgggtttggaagctgaggcaggaggattgcttgagccctaggagtttgaatccagcc

SEQ ID NO: 184318 - DNA, 201 bp, Homo sapiens
agcacggagctcatctgtggtacctgagtgtttatggtatataatcatgcttacagtatatttcagcttcaccatggttaattttttttttttttttttttaagacagagtctcactctgttgcccaagctagagtgcagtggcgccatctcagctcactgcaacctccgcctcatgggttcaagtgattctcctgcctca

SEQ ID NO: 184319 - DNA, 201 bp, Homo sapiens
tattactgaacagtaactacatttcttagaatatgcagtgtatgtttgagcaaatagactggattgtataaattgtcaagattggaactaagctcttcackagtatctaattcttggtaaggtgtcttcaggtgttcctaaataattggaagatgtaattatgagaaaagttataaatgaataataactaagtatgtactg

SEQ ID NO: 184320 - DNA, 201 bp, Homo sapiens
atatgtttgtgcacgctgtgcactgaataactccagaggatgctgtttacacagactattatgtacattgtggcagccttgataattatgctgataaaatrgttgttagtgttgaaatttaactaattctttatttaattcagtcacagcccgttggagattgtgattttaatgttcgtctgcagtgtatagaacgagaaa

SEQ ID NO: 184321 - DNA, 201 bp, Homo sapiens
gaattgactgcatggtctcctttacttcctatcggaaaagtctttttactctgctgactagagtgtatgtgtgtgtgtgtgtgtgtgtgtgtgtgtgtgtgtatttcttttgcttcaattcattaaaaaaaaaaatagaatgagctgggtttggaagctgaggcaggaggattgcttgagccctaggagtttgaatccagc

SEQ ID NO: 184322 - DNA, 201 bp, Homo sapiens
cagcacggagctcatctgtggtacctgagtgtttatggtatataatcatgcttacagtatatttcagcttcaccatggttaattttttttttttttttttttaagacagagtctcactctgttgcccaagctagagtgcagtggcgccatctcagctcactgcaacctccgcctcatgggttcaagtgattctcctgcctc

SEQ ID NO: 184323 - DNA, 201 bp, Homo sapiens
agtgcctaccacacaataggtgctcaaaaaatgagtaaatgggtgaatgagtgaactaacaaatgctccttactgcctgtccatttaatagtttatccgtktaggtatttatcagtatggttgctatgttcatgtatttgcagttactaaaaattcttaaactccttagcggtaaaggctgactctctgcaagtgggcgtg

SEQ ID NO: 184324 - DNA, 201 bp, Homo sapiens
tagaattgactgcatggtctcctttacttcctatcggaaaagtctttttactctgctgactagagtgtatgtgtgtgtgtgtgtgtgtgtgtgtgtgtgtgtgtatttcttttgcttcaattcattaaaaaaaaaaatagaatgagctgggtttggaagctgaggcaggaggattgcttgagccctaggagtttgaatcca

SEQ ID NO: 184325 - DNA, 201 bp, Homo sapiens
ttaattcttcctatgtttgaagtcccatagtatttgattattagcatttattttattttgccttatatgagctgtttacttgatcctcacagtgtgtaatkaagtgttttacactttgcctattctcaagtacatgttttagattaaatttatccccctaaaggaaagatcaacatgtgacccctttctgatatctggtcc

SEQ ID NO: 184326 - DNA, 201 bp, Homo sapiens
tgctagcttcctagcaagcagaatggaatatatagaattgactgcatggtctcctttacttcctatcggaaaagtctttttactctgctgactagagtgtrtgtgtgtgtgtgtgtgtgtgtgtgtgtgtgtgtgtatttcttttgcttcaattcattaaaaaaaaaaatagaatgagctgggtttggaagctgaggcagg

SEQ ID NO: 184327 - DNA, 201 bp, Homo sapiens
tagttcttttaattgtgatgttagggtgtcaattttagatctttcctgctttctcttgtgggcatttagtgccatacatttccctctacacaccgctttawatgtgtcccagagattctggtatgttgtgtctttgttcgcgttggtttcaaagaacatctttatttctgccttcatttcgttatgtacccagtagtcatt

SEQ ID NO: 184328 - DNA, 201 bp, Homo sapiens
tttattataccttttatttcccgagtccaaattaattcttcctatgtttgaagtcccatagtatttgattattagcatttattttattttgccttatatgwgctgtttacttgatcctcacagtgtgtaatgaagtgttttacactttgcctattctcaagtacatgttttagattaaatttatccccctaaaggaaagat

SEQ ID NO: 184329 - DNA, 201 bp, Homo sapiens
ctgtacatggttgtagtagtattgcaataccttctttaaggggatctggcctcccacttgtattgggaggcttaggtatttttgttgttgtttgtttgttttgagatagagacttactctgttgcccaggctggagtgcagtggtgcaatctcagctcactgtaccgtccacctcccgggttcaagcgattctcctgcttc

SEQ ID NO: 184330 - DNA, 201 bp, Homo sapiens
ctcacatggcagagagaaaggaagcaagtgttattgagtctcatataaaggcattaatcccatcatgaggattctactctcatgacttaattgcatcacaraggccccaccacctcataccatctctttgagggttagggtttgaacacatgacttgagggaacacaaacatgcagcccataacatatagatatagtttct

SEQ ID NO: 184331 - DNA, 201 bp, Homo sapiens
ctttgttcgcctggggtacaagaggcatagttgggtaggtgcagaggtttgtatagggagataataggatgtgaagaggtaaattggtgttagaattttttattattattattattattattataatactttaagttttagggtacatgtgcacaatgtgcaagtttgttacatatgtatacatgtgccatgttggtgtac

SEQ ID NO: 184332 - DNA, 201 bp, Homo sapiens
cactttagtgtggagaaggaagcattagagaatatttacatgagagctgaattttgaaggagaaataggaatttatcagacagacttggtaggaaggtatktccaggcagactagaatatttaaaggcagtggagacttgaaacaacatggagtaatttgaagattgtaggtggcttgttatttttggaccttagactgta

SEQ ID NO: 184333 - DNA, 201 bp, Homo sapiens
gctttgttcgcctggggtacaagaggcatagttgggtaggtgcagaggtttgtatagggagataataggatgtgaagaggtaaattggtgttagaattttttattattattattattattattataatactttaagttttagggtacatgtgcacaatgtgcaagtttgttacatatgtatacatgtgccatgttggtgta

SEQ ID NO: 184334 - DNA, 201 bp, Homo sapiens
tctagatttctcttcttcctcaggaacaccagttattcttatgtttggtcattttaacataatcccaaatttcttggaggctttgttcattttttttttttaattctttttctctttgtctttgtctgattgggttaattcaaaagcctgtcttcaagctctgaaattctttcttctacttgttctagtctattgttgaaa

SEQ ID NO: 184335 - DNA, 201 bp, Homo sapiens
ccccttagtttaaatgcatttaaatatttatctaaatacagtgtcagattgggctgctataataagaataccatagactgggtaacttaaacaacagatayctacttttcatagttttagaggatgggaagttcaaaattagggtgccagcatggtcaggttctggtcctggtttccatatggcagccttcttgttgtacc

SEQ ID NO: 184336 - DNA, 201 bp, Homo sapiens
catttttaaaccttttaaaatcatcccacagttcttggaatatgctattcttttttttgctctttgcatttgggacatttcttttttcttttttttggagsgggggtggggggtgaagacagagtctctctctgttgctcaagcttcagtggcacagattaggttcactgcagcctcaacctcctgggctcaaacaatcct

SEQ ID NO: 184337 - DNA, 201 bp, Homo sapiens
tctaaaatgggtttcttatagaaaatattagttgggtctttttaaaaaaaatcttctctgacagtctctgttttttaattaatatgtttaggtccttaacrgttgaagtgaattttgatatcgttggattaatatcaaccatgtttatatctgttttttatttgttgtacttgttcttttcatttttaaaatcttctcttt

SEQ ID NO: 184338 - DNA, 201 bp, Homo sapiens
tctgctcagataatttcgtagtctctttactgagtggtagtacaggcacaaccttggtgttctcctcagaaagccctcatcttttgaaatatgaacagacmgaatttgccacatctttaagttctggttcttttttgcctaacagtagctttatttctctttctcttgcattttactataagccataaggagtaaccaagc

SEQ ID NO: 184339 - DNA, 201 bp, Homo sapiens
tgacattttctcatactttccgcgtttttaatgacattgccagttgtgagaagcactgctcaaatgtattataggatgctcctcatttagaatttgtctcttgtttttctcataatcagacttggggtatgggtttagggaaagaagatcacagatgaagtgcgatttctatcacactgtatcaagagtacatactatgaa

SEQ ID NO: 184340 - DNA, 201 bp, Homo sapiens
taattatttatacatcattcattttaaaatttcttttatgtgaatgcattatttcttcctgttttggaaggggggtgtgtgtgtgtgtgtgtgtgtgtgtrtattttatttatagactttagtttccagaacagttttaaatttacagaaaaattgagtagatattaatagaacagaaagttcccatatacacctcttggg

SEQ ID NO: 184341 - DNA, 201 bp, Homo sapiens
tgtcttaccagcttgttaataataagaatagtatcatttgtgtgtttaatgcttctaatatgcttgatttcccttgtatgtagtttatatacattatctcrtttaatcaagctttttaatgatttctgttggctacagtgaaaatttgagaaagtttttttatcttctttatataattgcatcacatacattaataacata

SEQ ID NO: 184342 - DNA, 201 bp, Homo sapiens
tcccttgcttgcctcaaaaaaacacttaccagctggaagtgtttaaactgtgaattgctgggtattggcccaacatgaagaatcctctaatttaataagcwtcttagaagagttcttggttccataaatttgcttcaccttttgtcttaccagcttgttaataataagaatagtatcatttgtgtgtttaatgcttctaat

SEQ ID NO: 184343 - DNA, 201 bp, Homo sapiens
ccagctcttttgtaagatcactaatcccatgcatgagggcagagcccttgtggcctaatcacctcctaaaggttccatctctcagtactgttgcactggarattaagtttcaccatgaattttcaaaccgtagcacttggttatattttaacttgttgaatttttgaatttttaaattttatttaactttttcctgagctt

SEQ ID NO: 184344 - DNA, 201 bp, Homo sapiens
gatttgggagccgctatctgtagtgcctcatggaacaaaatttaaaaatcagtgacccaattcaaagtagtatttagccagctattgagttaagaacatayctgagaatttctctgttagttggtggagacccacataaaatgcttattatacagcactcaatgcatattagttattgttgttataactgaagactgtttt

SEQ ID NO: 184345 - DNA, 201 bp, Homo sapiens
actgtacatggttgtagtagtattgcaataccttctttaaggggatctggcctcccacttgtattgggaggcttaggtatttttgttgttgtttgtttgttttgagatagagacttactctgttgcccaggctggagtgcagtggtgcaatctcagctcactgtaccgtccacctcccgggttcaagcgattctcctgctt

SEQ ID NO: 184346 - DNA, 201 bp, Homo sapiens
tactgtacatggttgtagtagtattgcaataccttctttaaggggatctggcctcccacttgtattgggaggcttaggtatttttgttgttgtttgtttgttttgagatagagacttactctgttgcccaggctggagtgcagtggtgcaatctcagctcactgtaccgtccacctcccgggttcaagcgattctcctgct

SEQ ID NO: 184347 - DNA, 201 bp, Homo sapiens
gtactgtacatggttgtagtagtattgcaataccttctttaaggggatctggcctcccacttgtattgggaggcttaggtatttttgttgttgtttgtttgttttgagatagagacttactctgttgcccaggctggagtgcagtggtgcaatctcagctcactgtaccgtccacctcccgggttcaagcgattctcctgc

SEQ ID NO: 184348 - DNA, 201 bp, Homo sapiens
catgatctgagctccccaaagtaaagattcctgtcccttttaagggcttacaactctgaggggtccatgtgaaagggtcatgatacattgtgcaagtgggsgctacgtgactgagagctacatgcatcagtgatgggggctagcagaacagaacagaaagtttcacaagtcttcctcatacaatgtctggaatccacaagc

SEQ ID NO: 184349 - DNA, 201 bp, Homo sapiens
ccgcaggttgtatttgtggacataccgtcacacttagatttaaacttgagccagtaatccatttatcacctgattaccctaagctctccatttaacttacrgactgcagtggcattttgggttcctggcaattcgtgtctgtttaaagtaagtgtctggtaatcccctagtggtctgggtgttctttcttttggattataa

SEQ ID NO: 184350 - DNA, 201 bp, Homo sapiens
aaatcattatcatatctcctgtttcatatgtagcgtaataaaaagcccgtaatacaagacaataattttaaaaaaatattttcttgttaagaaatatggcrgttatttgaaaataaacaattccatttaattttttacaatgtaaagaaaaatgtgatacgtatataacaaacataaatatagtacatatacttgtcatta

SEQ ID NO: 184351 - DNA, 201 bp, Homo sapiens
aagaaaacatagtagaaaattgtaatgactttaggaaaatattccttaaataggtcacaaaaagcacaaattatataatttttaaatggataattttgacrttactaaaataaagaactttggtcttcaaaagaaattatttagaaaatgaaaaagccaaagacttgtagaaaatatttgtaatacatatatccaaccaag

SEQ ID NO: 184352 - DNA, 201 bp, Homo sapiens
cccttggagatatgttactgcttttggtttatttccctggtagggaaggctggttgaaggggcttttatttggcctttcctagcataatgacccttattcygtgggtcagacagccaatgtggaaattcgttttccaagtatttctcttccagttatacatccagtaactggaaaataaccgcaggttgtatttgtggaca

SEQ ID NO: 184353 - DNA, 201 bp, Homo sapiens
tctgtgggttaatgaagctgcttccgtccacatacagctcccagtctacagacatccaaggtttgtcccggaggtccggtctgctagaataaacttagtcyaacacctctacacagttatgttcaactgggctctctgataccagaagcagtggcggggttcattgttacaaacttcagtggttatatggggattttcaca

SEQ ID NO: 184354 - DNA, 201 bp, Homo sapiens
tggcagctgcacttggtttaacatgattaaatttatgataatcaaaaatcattctaaatctctgatggtggtactaatttttgtatttcccttggagataygttactgcttttggtttatttccctggtagggaaggctggttgaaggggcttttatttggcctttcctagcataatgacccttattccgtgggtcagaca

SEQ ID NO: 184355 - DNA, 201 bp, Homo sapiens
aggcagcgatttggcttcaataacagtgtccaaggtttaccactgcatatccagcggacatctctctctgtgggttaatgaagctgcttccgtccacatayagctcccagtctacagacatccaaggtttgtcccggaggtccggtctgctagaataaacttagtccaacacctctacacagttatgttcaactgggctct

SEQ ID NO: 184356 - DNA, 201 bp, Homo sapiens
agagagcagaaaagcagtatgctgtggctgcaagatatactattggtcattctaggcaaaggcagatgtcttctgatagtaccacagattggtacagagaraaaagtatttgccaacttgtatataagattttagaggctacattgattggtttcgttaaagacagcacatctgaaatggcagctgcacttggtttaacat

SEQ ID NO: 184357 - DNA, 201 bp, Homo sapiens
ccagtgatggtgagcattttttcatgtgttttttggctgcataaatatcttcttttgagaagtgtctgttcatgtccttcggccactttttgatggggtcgtttttttttcttgtaaatttgtttgagttcattgtagattctggatattagccctttgtcagatgaataggttgcgaaaattttctcccattttgtaggt

SEQ ID NO: 184358 - DNA, 201 bp, Homo sapiens
caggtctcaggtgctgtgggtttcacgtggctgtggtggatccaggccggaattccttctaccttcatggtggtgggagtggtcaggatgatggtctggcrtcctttccaccgtggccacaaaggggctatgttccagtctttgatccacactcgatcacctggggagaaagggtaaactggggagaataagctaatgggg

SEQ ID NO: 184359 - DNA, 201 bp, Homo sapiens
tatctatagtggctgcaccatttcacatttctatcagcaatgtgcatgttctgatttatccacattctcaccaacacttgttagtttctgtgtttttttttctaaattatagtcaccctagttagtatgaagtggtatctccatttgattttgattgcatttgtttaatgattaatgatagtgaacatcttttcatgtgct

SEQ ID NO: 184360 - DNA, 201 bp, Homo sapiens
caggtgtgactggagcagggcttgttgtctttttcagagtcactttgtagggattgtccgggcttggtctcacctcccaggtctcaggtgctgtgggtttmacgtggctgtggtggatccaggccggaattccttctaccttcatggtggtgggagtggtcaggatgatggtctggcatcctttccaccgtggccacaaag

SEQ ID NO: 184361 - DNA, 201 bp, Homo sapiens
ctcagcagttcctctgagtatataccaaaagaaatgaaattagtacctcatagagaaatgtatgcccccatgttcattacagcattatttccaacagcctrcatatggaaaccacctaaatgtccttcagtgggtcaatgaattaagaaattatggtatatttatgcaacagaatattattcaggcttagaaaaaaagatc

SEQ ID NO: 184362 - DNA, 201 bp, Homo sapiens
atatgtgtatacatttatatatatgtgtatatatatgtgtatacatttatatatatgtgtgtgtatatatgtgtgtgtgtgtatatatatgtgtgtgtgtrtatatatatatatgtatatacattttctcctactctgtgggttgtctgttaattctgttgattatttcttttgttgtacagaaactttttagtttaatta

SEQ ID NO: 184363 - DNA, 201 bp, Homo sapiens
gcttcagcttctacatctgcgtatctcactggactcttgtacagattaaattagatactgttttacttagtagggatacaatatgcttcttcaccatttastgtctattaacccctgatcaaattatataactcctctatgcctctgtttccctctgtgaaatggggatattaatacctacttcatagggttgttgtgagc

SEQ ID NO: 184364 - DNA, 201 bp, Homo sapiens
agaggttgaggtgcatagatcacaaggtcaggagatcgagaatatcttggccaacatggtgaaacctcatctctactaaaaatacaaaaattagccgggcstgctggtgcgcgcctgtagtcttagctactctggaggctgaggtgggagaatcgcttaaacccgggaggtggaggttgcagtgagccaagatcaagccac

SEQ ID NO: 184365 - DNA, 201 bp, Homo sapiens
tgtcatttcaacatcagtgtaatatgtatcaccccatgtgtcttttccctttgctgattttctgtgcatccttttgttgtaataacttgtaactgtgagtrcaacatctgagtcctttgagttcttctagggaatcctcgaacttgattcccaatacctcgatttggctttgtctggtactttctcataattagattgagg

SEQ ID NO: 184366 - DNA, 201 bp, Homo sapiens
ataatttaaagcatatacttgtggcaaaactacagggtctttctgcaaggggacctggcctccccttgcatcaggggcctttgggtgttgggactgacttrtatctgaaaactgggtaagaggggagtggcaggccacagctggaccacagggagcagccagttggttgtgaagaaacttgctggaaaatgttggaaaatc

SEQ ID NO: 184367 - DNA, 201 bp, Homo sapiens
gaactgctcatgcaagggatctaagttgcgtgctccttatgagaatctaactaatgcctgatgatttgacatgaaattttccccaaagcattcccccaccmacatttgtggaaaaatcatcttacataaaactggttcctggtgccaaaaaggttgaggaccgctgctctagtagatagcaataggcccttctggggatga

SEQ ID NO: 184368 - DNA, 201 bp, Homo sapiens
catctttaggatttactaaaggataaaaaggtcccttaaatagcagtttctttaatcaaatcctaagtatgagagttactactagttaatagagatactgwctttgaaatggtatttaaaaataaaaaccaaccaaatttattacctattaccaaaatctgctagagaactcttagagctgagcagatacagataaaactt

SEQ ID NO: 184369 - DNA, 201 bp, Homo sapiens
cataggagcacaaaccccatcgtgaactgctcatgcaagggatctaagttgcgtgctccttatgagaatctaactaatgcctgatgatttgacatgaaatyttccccaaagcattcccccacccacatttgtggaaaaatcatcttacataaaactggttcctggtgccaaaaaggttgaggaccgctgctctagtagata

SEQ ID NO: 184370 - DNA, 201 bp, Homo sapiens
attttgccaggcaaaggaagttcctagagcttttctttatctctttctactataatgacccttaacccatgtgtaagagagtgcctatggggattctgccrgttattaagtatgtctattccaattatacattcaggaataggagaaagtaccacagggtgagtctgtggactgactgggtctgctatgggtcaaacttgt

SEQ ID NO: 184371 - DNA, 201 bp, Homo sapiens
aaggcctaactcttataataaactcctgattctatatcactggatggttctgcttcctagattaaagcgtaagtggtatattgagctgacagatttgagaragaggagccatgattaattccatagggaagaatgtgggatgagtggtttgggaaaaaggttgaggtttataattgttcacagccatttgagatttatatg

SEQ ID NO: 184372 - DNA, 201 bp, Homo sapiens
ctatactattagagtaagtaaggttagtgaaggagcctagacaattttatatattccacatataaaacagaaaaaatgtaaggtaaaatatgaaaacattktcattgttagtaataggaccaagaaggttccagagaagatggttcacttgaataaaactttataaatatgtaggaatgacattcaagacagaaagcatag

SEQ ID NO: 184373 - DNA, 201 bp, Homo sapiens
acagagatttacccatatatttattgacagcaagccagtgatgagcattgtttctatagattatagattaactaaaagtattccttatgggaaacaaaggratgggccaaaataaagggatgggtctggctagttatctgcagcaggaacatgtccttaaggcacagatcactcatgatattgtttgtggtttaagaacgc

SEQ ID NO: 184374 - DNA, 201 bp, Homo sapiens
tattacctattaccaaaatctgctagagaactcttagagctgagcagatacagataaaactttgattgcaaacataggtgcaaccctaactcagaattttyagttggccaggttctgggggcagcaaacatgtgaagctttgaaagattaaaacaaatgaatttttcgttaatattttcaaacattttttcccctatatag

SEQ ID NO: 184375 - DNA, 201 bp, Homo sapiens
gcaaccctaactcagaattttcagttggccaggttctgggggcagcaaacatgtgaagctttgaaagattaaaacaaatgaatttttcgttaatattttcmaacattttttcccctatatagagctgggctactggacccaaacaaatgagaaacaaggaatacaggataaagagattgaatttgtctctttgttcattca

SEQ ID NO: 184376 - DNA, 201 bp, Homo sapiens
gccaaggtgggtagatcacctgaggtcaggagtttgagaccagcctgaacaacatggagaaaccccatctctactaaaaaaaagaagaaaaaaaaatgcawaattagctgggcctgctggcacatgcctgtaatctcagctacttgggaggctgaggcaggagaatcacttgaacctgggaggcggaggttgcggtgagct

SEQ ID NO: 184377 - DNA, 201 bp, Homo sapiens
tttcagtaaatgatgttggggaagcttgaatatccatatacaaaagaatgaaattggacccttataccatacacaaaaatccacttaaaatagatcaaatrcctaactgtaacacttgaaactgtaaaactcctagaagaaaacatagtggaaaagctccttgatgttggtcttggcaatgatctttttgatgttacatca

SEQ ID NO: 184378 - DNA, 201 bp, Homo sapiens
taaaatttgtaggggactaaaaaccctgaaaaagccaaagcaattttgagaaagaagaacaaagttggaagcatcacacttcctggtttcaagttatattrctaagctccagtaattaaaatggtgtagtactgaaatagaaacatacacatagaccagtggaccagaatagagggcccagaaataaacccaagcatgtat

SEQ ID NO: 184379 - DNA, 201 bp, Homo sapiens
ctcctttctccccttactttttttgaccctttactactgtaatgagccactgttacttaaaggcctgtgacttttctgtcaaataagctttactaggaaaatgactatattttatcagattctcttcactaatgggttgacaatgggaaaatgttgcagtttcaacattccaaaaaaactttctaaagagatttatttgtg

SEQ ID NO: 184380 - DNA, 201 bp, Homo sapiens
catcactgcaatcaagataattaacattcatcacttcagaaagtttccttgtgcccctttgaaatttccccctcctgcccttcctttttttttttttttttcctggtctccaggcaaccagtaatctgatttttgttattatagattaatttgcattttctagagctttatataagtgaaatcatatagtgtatattcact

SEQ ID NO: 184381 - DNA, 201 bp, Homo sapiens
cttgggcctattctctcttgctgacactcctttctccccttactttttttgaccctttactactgtaatgagccactgttacttaaaggcctgtgacttttctgtcaaataagctttactaggaaaatgactatattttatcagattctcttcactaatgggttgacaatgggaaaatgttgcagtttcaacattccaaaa

SEQ ID NO: 184382 - DNA, 201 bp, Homo sapiens
cagcaccaagtttatattcatggagcgggaagcagaactgagatcttgacccaagctacaagtctctccactgagaaagcaagcagggctctcaggcctcrccccttcccacctgcctgcaccatcagctgcagtttctgtgctcatatctgtattttccatttgcctccccaccccctgattctgtttaggaaaacttgt

SEQ ID NO: 184383 - DNA, 201 bp, Homo sapiens
tgatctttgcagcacaccatcatggcacatgtgtactgatgtaacaaacttgcacattctgcacacgtaccccggaacttaaaataaaagttggaaatttyaaaaaaaggaaaaaaaatttgctttatggaatacactttttaaatttacatcccactagaagattcaaagagtaatgtagaccttatcaatgatatgcat

SEQ ID NO: 184384 - DNA, 201 bp, Homo sapiens
tcttgggcctattctctcttgctgacactcctttctccccttactttttttgaccctttactactgtaatgagccactgttacttaaaggcctgtgacttttctgtcaaataagctttactaggaaaatgactatattttatcagattctcttcactaatgggttgacaatgggaaaatgttgcagtttcaacattccaaa

SEQ ID NO: 184385 - DNA, 201 bp, Homo sapiens
tctcattattttttcatgtattaagataaattttactgtaaacaagaactgtctcttctcataaatttatttatattggtatagactttttttttttttttgagacagagtctcactctgttgccccaggctggagtgcaatggcgcgatctcggctcactgcaacctccgcctcctgggttcaagtgattctcctgcttc

SEQ ID NO: 184386 - DNA, 201 bp, Homo sapiens
gacgtttacatttattatgtttttgactttacaatggcaatggatatcttgggttatattggtaattacgtttacacctaacatatccccagtttttttttgacagctcacctcatacaatcagatttatttctataaactaagtattgtatttatcagttaactatagctctgataattattttaacctagatacatgct

SEQ ID NO: 184387 - DNA, 201 bp, Homo sapiens
gggtgtgttgataagctttaatactggtgatagttaaccataattacttggttaaggttatttgcagtgtttctctaaagttgctattttttttttttttrtaattgttacgtgtttttctggggagaaactttgagactatgcaatataatgtttctcactaaactttcattttctaattttaataccttttgatgtttt

SEQ ID NO: 184388 - DNA, 201 bp, Homo sapiens
ggggtgtgttgataagctttaatactggtgatagttaaccataattacttggttaaggttatttgcagtgtttctctaaagttgctattttttttttttttgtaattgttacgtgtttttctggggagaaactttgagactatgcaatataatgtttctcactaaactttcattttctaattttaataccttttgatgttt

SEQ ID NO: 184389 - DNA, 201 bp, Homo sapiens
ctccatatcgagtgatcttccttaatctctagtgctttctccttgttctcaggttaaccaacatttctcaggaaaccaacattagatttggagccagtttrcttttttctttatcatattttgccttttggtttccctgtgtgttttgctgttgattcaaaaataactttaatgttttttatttaaaggtggcttaattat

SEQ ID NO: 184390 - DNA, 201 bp, Homo sapiens
agtcttgagctcctggcttcaagtgatcctcccaccttggtctcctcaagcgctaggattataggtgtgagccactgccctcgaccaatttttttttttttaattttaaaataattctagacttacagaaaagttgcaaaaatatttcatagagtattcctgtatatctttcacgtggtttcccccatttttaatatctta

SEQ ID NO: 184391 - DNA, 201 bp, Homo sapiens
caaataagtgagtctctttcttggatgtctagtataggcagttgatttgtcattccgttccctttctagtaaccatactttttttttttttttttttttttgagatggagttttgctcttgttgcccaagctgaagtgcaatggcgcaatgttggctcactgcaacctctgccttctgggctcaagggattctcctgcctc

SEQ ID NO: 184392 - DNA, 201 bp, Homo sapiens
cagtcttgagctcctggcttcaagtgatcctcccaccttggtctcctcaagcgctaggattataggtgtgagccactgccctcgaccaatttttttttttttaattttaaaataattctagacttacagaaaagttgcaaaaatatttcatagagtattcctgtatatctttcacgtggtttcccccatttttaatatctt

SEQ ID NO: 184393 - DNA, 201 bp, Homo sapiens
tacataaatataactgtattagtttgttcttgcacttaactgtattggttcgttcttgcattgctataaagaactacctaagactgggtaatttataaagrggtgtaattgactcacagttgtgcagacggtacaggaagcatgcctaaggagggctcagaaaacttacaatcatggtggaaggcaaacaggaaggaggca

SEQ ID NO: 184394 - DNA, 201 bp, Homo sapiens
aggtgtgagccaccatgcccagccaactttttcatctttcaaaactgaaactcattaaagactaccccccaagcctctggcaattactgatctaatttctrtctcagtgtcagaaaggaacattaaaattttaaggaaatatagatttttaaactcaaatttgaactgccctcagtttagagaaattatagattttgaagg

SEQ ID NO: 184395 - DNA, 201 bp, Homo sapiens
tttgatttctccagatatacaattgatatttctgtcacccaaatcatgctttttgttattaaatcatgtacttctttttattgcttttaatcctaaattcrtcctagcttgatactaatactacctgtcctgcttgcttttccttgaatttgttgtggatcttttctcccattcatgtatctccatcctttttgtttcact

SEQ ID NO: 184396 - DNA, 201 bp, Homo sapiens
catataagagatacttgaagccttacattataattaagtttgctttgcatatttaatacctttgtatttagatactaggtttgatttctccagatatacarttgatatttctgtcacccaaatcatgctttttgttattaaatcatgtacttctttttattgcttttaatcctaaattcatcctagcttgatactaatact

SEQ ID NO: 184397 - DNA, 201 bp, Homo sapiens
aatatgtcagtttcatcaaacaaaatctgaggaatttttacttaaaatatacataatttcagatggtcaaaaactacctggagcaatagacacctttcgaygaaagtataatagctctgaggcttgccttgtgtacttgactatccccttcttggttgagcgttagttcatttattcctttctgtgtaccgggcactggag

SEQ ID NO: 184398 - DNA, 201 bp, Homo sapiens
ccaatatgtatatagctgacatttaatatatgttatgtatctggggttctgttattcctcttcaatctgaagaactgcttttaggattttttttttttttwaatttagttctttttttaaaaaaaattgagatacaatttacatactatgaaattcactattttaagatgttcaatctagtggtttttagtcttttccaca

SEQ ID NO: 184399 - DNA, 201 bp, Homo sapiens
atttctctaagttaccttttatgttataaaaagcttgttacctggtggatattatatagattaaatattagttaaattcctactttgaatcacattgaagktggtgggggggaaaatgaagtaacttaggaacataggatttgaatgcagaccctcatgagagatgagatgggaagaactgcaaacaaatcttgaactcct

SEQ ID NO: 184400 - DNA, 201 bp, Homo sapiens
ttactaaatagaagtatatatcacctttgttttataatttgattctttggaatttaattttcatattcattttaacactattctttacattagtacctttygcttatgtgatttttctcaattaatatatattttcattaattgcaatttctctaagttaccttttatgttataaaaagcttgttacctggtggatattat

SEQ ID NO: 184401 - DNA, 201 bp, Homo sapiens
caattttatgtttttttcttgtgcgcacatgaaaatttcgctaggacagttgttctcattcttggaatgtaattacctgggaagtgtttttaaaaactctrttccgtcattagtgtatcatggagatggtgattaaatcagcagcttcagctatattatctgcattgctaaatttctctcagaaatagttgtttcagtttg

SEQ ID NO: 184402 - DNA, 201 bp, Homo sapiens
gattgattactgctgtgattgccacttttccttaaaacaaattgctcattatgaaagattttatttatatctaaatacatgtaatactaaaatgagcaccyatctgtttttcactcagcttaagaaataagcatttttggtcgttacatttcaaagaaaccagtcttttaatataattagttattaaaaaataattttcta

SEQ ID NO: 184403 - DNA, 201 bp, Homo sapiens
caacataaaatgtagcttaaatatggtatttttatttctttgggggaaaaaaggtgaagagtaccaacaaaatgtttttaggctttatactaagccatttwtatttatcatttcaattcatcatactaaacctataaagtagatgttgttgctatcttcattaaaaataagtaaactattggcatggctgctgtggaaaac

SEQ ID NO: 184404 - DNA, 201 bp, Homo sapiens
gattgagtcatggaggtcaggagcattagatggtttgttagcatacatttttttttttttttttgagacagtcttcctctgtcacccaggctggagtgcartggcatgatctcagctcacagcaacctctgcctcccgtgttcaggcaattctcatgcctcagccttccgagtagctgggaccacaggcgtgtgccactac

SEQ ID NO: 184405 - DNA, 201 bp, Homo sapiens
atataaattcaacataaaatgtagcttaaatatggtatttttatttctttgggggaaaaaaggtgaagagtaccaacaaaatgtttttaggctttatactragccatttttatttatcatttcaattcatcatactaaacctataaagtagatgttgttgctatcttcattaaaaataagtaaactattggcatggctgct

SEQ ID NO: 184406 - DNA, 201 bp, Homo sapiens
cacaaagggggaagggaaaaaggggcaaaaggtcactcactcaccaagcaattcacactaaaatcaaagtatggataaggaattactcattcatcaagcartttgagccaagtcagagccgaaatcatagccagaacagttcaaatccaaaagtcaatagtgaaatctaaaccaaaacagttcaaatctagtcaaaatgaa

SEQ ID NO: 184407 - DNA, 201 bp, Homo sapiens
gacagtcttcctctgtcacccaggctggagtgcagtggcatgatctcagctcacagcaacctctgcctcccgtgttcaggcaattctcatgcctcagcctyccgagtagctgggaccacaggcgtgtgccactacgcccagctaatttttgtatttttagcacaaaaatacaaatacatgaggttttgccatgatggctac

SEQ ID NO: 184408 - DNA, 201 bp, Homo sapiens
agccagattgaacaaggctccttcgtccttgtctggggtcttttgctctgaaccaccttgcttttctttcagctgagggcacttatctttccaatgtcctrtctctttacaataggcgcactggttacgttgcaagcgtggacggtcagactgggtatttttcctggagcccccattcccttgtcctttcagggggacccc

SEQ ID NO: 184409 - DNA, 201 bp, Homo sapiens
atgtgatatgtgattggcatctgtctgtcttctagccccccttgccaaacaaagaacagaaatatcttctgtggttaagggaggaggagagggaggaggasatggaggagcactagaggttagggacggaaatggaagaaaatactattttaggaaaattaaagttgaatcttttagttctaatatattccagtctcccta

SEQ ID NO: 184410 - DNA, 201 bp, Homo sapiens
gagcacaggagtttgagagtagcctgggcaacatgacgaaaccccctctctaccaaaaatagaaaaattagttgggcttgttggcacatacctgtggtccyagctactcgggaggctgaggtgggaggattgtttgagcctgggaggcagaggtagcagtgagctgagactgcaccctgctgcactccagcctgggtgaca

SEQ ID NO: 184411 - DNA, 201 bp, Homo sapiens
ccaagataggcagattgcttgagcacaggagtttgagagtagcctgggcaacatgacgaaaccccctctctaccaaaaatagaaaaattagttgggcttgktggcacatacctgtggtcccagctactcgggaggctgaggtgggaggattgtttgagcctgggaggcagaggtagcagtgagctgagactgcaccctgct

SEQ ID NO: 184412 - DNA, 201 bp, Homo sapiens
ttattttggttgttgtagttaggactattgtttagaatatctagcctgccaaggaatggaaatttgtgtgtgtgtgtgtgtgtgtgtgtgtgtgtgtgtgtctgtgtgtgtgtattcaaatcttacgatgtattaacttagattcctttagacctatccctttctcttattttgtatttcagttcttataacttatatatt

SEQ ID NO: 184413 - DNA, 201 bp, Homo sapiens
tgaaataatactgtttgtgtaaggcttcaccttttacagggtatttcatatatactttacaatactttaaagaaagaaactaaaatactttattttacaaratattttacatatatacttatacaacaatttcgttttcagagattactcctttgacctgtgtcagctaacatatagcagtttcctttaaagtttactgat

SEQ ID NO: 184414 - DNA, 201 bp, Homo sapiens
atcagttggcagtaagtatgtggcgttatttctaggttctctgttctgttccattggtctacctgcctgtttttataccaggaccatgctgttttggcaaytatatccttgtagtatagtttgccgttgggtaatgtgatgcctccagatttgttgtttttgcttaggcttgctttggctttgcaggctcttttttttatt

SEQ ID NO: 184415 - DNA, 201 bp, Homo sapiens
attattttggttgttgtagttaggactattgtttagaatatctagcctgccaaggaatggaaatttgtgtgtgtgtgtgtgtgtgtgtgtgtgtgtgtgtgtctgtgtgtgtgtattcaaatcttacgatgtattaacttagattcctttagacctatccctttctcttattttgtatttcagttcttataacttatatat

SEQ ID NO: 184416 - DNA, 201 bp, Homo sapiens
ttatcccagcactgtttgttgaattaggtgaatctcagcactttttcccactctgttttcatttgttttgtcaaagatcagttggcagtaagtatgtggcrttatttctaggttctctgttctgttccattggtctacctgcctgtttttataccaggaccatgctgttttggcaactatatccttgtagtatagtttgcc

SEQ ID NO: 184417 - DNA, 201 bp, Homo sapiens
tctttgcaatgaaattctctgcttggaaaaatataaaaaagacacaaaaaaaccccaaagtaagattaaaaacattctctaagggttcttggaaaacacartgtatttatggattataatctccatgtttgagctggtttgtggttacaaattcttgcccccaagcaagtttgtttgtagctttggactataatcttcatg

SEQ ID NO: 184418 - DNA, 201 bp, Homo sapiens
tgctgtcttattgaggttttgatttgcatttccctgctgattagaaatgctgagcagcttttcaataggtctgttggccatctacgtttcttattttgagragtgtctattcagggcccttacccatttttaacaggttatttgtatttttaatattgagttgtatgattttatatattggatattaacccctgtggatgt

SEQ ID NO: 184419 - DNA, 201 bp, Homo sapiens
ttatcatgattggaaaaggattgccatcagtctctctagattaggaaaaagtggtctcagaatggtggattttttacagtttgccttttttttttttttttaatgttagggaagctatgaagtgtgcttattattgccaaattcacctactcaaggctactttatgcatagtgtgtggcattcacccatgagtttcaggca

SEQ ID NO: 184420 - DNA, 201 bp, Homo sapiens
ggaaactaccatgttaacttgccataaatgatgtacctacaatacaagtagagcaaatgaaagattaaaggttacatttttttaaccttttttttttttttgaaaaaagagattattgtggtatttggtttttattgcatcattgctcagcagaaatgctatgaatttagttttttttttttttttttgagatggagtctc

SEQ ID NO: 184421 - DNA, 201 bp, Homo sapiens
tcgaatcaactgcttttttgaaaggtcgccagtcatctcctttaattaaaaaatcaagataattttcacccttttttactggatcatttagcattagtctrtattctgttcactctttcttgaaatactttcttttatggcatctgtgacaccacatgctcctgattcctcctagtcttttgccattctttgcggtccctt

SEQ ID NO: 184422 - DNA, 201 bp, Homo sapiens
gttgtgtcataaatatgagatataaccttttaaaaatggagactgctttgcttttcttaagaacatattggttgttgatttttaaaattaaatcaggataygaaattgttcacttgatcatggaggaaaagacattctcattcattaacatcacaggacttaagttcctcagtgtgggtggcttggtgttggaggcagtgt

SEQ ID NO: 184423 - DNA, 201 bp, Homo sapiens
cattttccttctttatattctctctctcagcctcggtccagtttgagagctgttagtgttccagcataagattcttttcttaatcctccttttttttttttgaagactgagtctcactctgtcacccaggctggaatgcagtggtgcaatcttggctcactgcaacctcctccttccgggttcaagtggttctcctgcctc

SEQ ID NO: 184424 - DNA, 201 bp, Homo sapiens
tggaaactaccatgttaacttgccataaatgatgtacctacaatacaagtagagcaaatgaaagattaaaggttacatttttttaaccttttttttttttttgaaaaaagagattattgtggtatttggtttttattgcatcattgctcagcagaaatgctatgaatttagttttttttttttttttttgagatggagtct

SEQ ID NO: 184425 - DNA, 201 bp, Homo sapiens
ccaccacaatatcaacatttttaaatgaaaaatcttatcttagttaccatagcattagcacctctttaaataactccattaatttaacctaaatctaaacrttctctaaagttcatcattaggatcttgaattatggaacctcttgacttttctagttccttaaataatgacaagtattcaagtacatttttgtcttccat

SEQ ID NO: 184426 - DNA, 201 bp, Homo sapiens
tattgtgaattggaaaggatttccagttccactcaagaaaacatttaagtccattagtaatgtctggccttttaattttaagccaagaacaatttactaargatagtctaactttaaaaaaaatcactgtgaaatatgtttcttggtttacaattttgagtgtttggaaagctatataatttttttcttacctcatacaaa

SEQ ID NO: 184427 - DNA, 201 bp, Homo sapiens
ggtattttattctttttgaagcaattgtgaatgggatttcactcatgatttggctctctgtttgtctattattggtgtataagaatgcttatgatttttgyacattgattttgtatcctgagactttgctgaagttgcctgtcagcttaaggagattttgggctgagacaatggggttttctagatatacagtcatgtcat

SEQ ID NO: 184428 - DNA, 201 bp, Homo sapiens
tggcattgaatctataaattaccttgggcagtatggccattttcacgatattgattcttcctacccatgagcatggaatgttcttccatttgtttgtatcytcttttatttcattgagcagtggtttgtagttgttcttgaagaggtccttcacatcccttgtaagttggattcctgggtattttattctttttgaagcaa

SEQ ID NO: 184429 - DNA, 201 bp, Homo sapiens
gcataaatgtcttcttttgagaaatgtctgttcatatcctttgcccactttttgatggggttgtttgtttttttcttgtaaatttgtttgagttcattgtmgattctggatattagccctttgtcagatgagtaggttacgaaaattttctcccattttgtaggttgcctgttcactctgatggtagtttcttttgccgtg

SEQ ID NO: 184430 - DNA, 201 bp, Homo sapiens
ttaaaatcttacccctttcataatacgtacacaagtctaatcaacttttaaacttctctaacagttttttatgttttcattttataaaacctcttgtgaatacagcctatgtatttttctacctaacctataacctatggttataacctagccttaccagcttatttttatagattcttgcactgtgttattcattttata

SEQ ID NO: 184431 - DNA, 201 bp, Homo sapiens
acccagtaatgggatgactgggtcaaatggtatttctagttctagatccctgaggaatcaccacactgacttccacaatggttgaacgagtttacagtccyaccaacagtgtaaaagtgttcctatttctccacatcctctccagcacctgttgtttcctgactttttaatgattgccattctaactggtgtgagatgata

SEQ ID NO: 184432 - DNA, 201 bp, Homo sapiens
gtgcacaacatgcaggttagttacatatgtatacatgtgccaagttggtgtgctgcacccagtaactcgtcatttaacattaggtatatctcctaatgctrtccctccctgctccccccaccccacaacaggcctcggtgtgtgatgttccccttcctgtgtccatgtgttctcattgttcagttcccatctatgagtgag

SEQ ID NO: 184433 - DNA, 201 bp, Homo sapiens
ctttaaaacatctacttatgacctcactggagtcaaattacttatttttacttgttaatttactaaatagaagtatatatcacctttgttttataatttgrttctttggaatttaattttcatattcattttaacactattctttacattagtacctttcgcttatgtgatttttctcaattaatatatattttcattaat

SEQ ID NO: 184434 - DNA, 201 bp, Homo sapiens
tgtagtagtattgcaataccttctttaaggggatctggcctcccacttgtattgggaggcttaggtatttttgttgttgtttgtttgttttgagatagagwcttactctgttgcccaggctggagtgcagtggtgcaatctcagctcactgtaccgtccacctcccgggttcaagcgattctcctgcttcagcctccagag

SEQ ID NO: 184435 - DNA, 201 bp, Homo sapiens; identical to SEQ ID NO: 32313

SEQ ID NO: 184436 - DNA, 201 bp, Homo sapiens
agtatcaatggtgtaccatttgttataaagtttccatttaaaatatatattttttagatttttagagtgaactattttaaagaaaaatataataatagttatggtattttgatgtgacagaaatcctgggccgagcatggtggctcccgcctgtaatcgcagcactttgggaggccaaggcgggcggatcacgaggtcagg

SEQ ID NO: 184437 - DNA, 201 bp, Homo sapiens
gtgccaccatgcccggccatggcatttttatacagctattattggttaggtatacccacatatttaccctttctgctgctctttctttcatgtatttttgkggttccattttggatagttttccttctaactgaagagcttcctgtattatttccttccatgtgggtatgctgttgcacattcttttagtatttgtgtgaa

SEQ ID NO: 184438 - DNA, 201 bp, Homo sapiens
ctactctggaggcagaggtaggagaatctcttggacccaggttgcagtgagccgagatcgcaccactgcattccagcctgaatgacagagtaagacgtctycaaaaagaaaaaaaaaaaaaaaggaaaacaaacgtgttttcaatttattgcagggtcctttttgttggcgtcttgtttatatgtgttttctttcaaagca

SEQ ID NO: 184439 - DNA, 201 bp, Homo sapiens
actcataaattctctttatgactttaaaagaaagaatacttaagatttttctcacttcttttgtgcttatacattgtcatcaatttcctttttaccagttsaaatagcctttttctgattgctgtttgtatattcaaaggaaccaccttaattttccttttcacctgcactaggtcttatttgtaaggaggaagtaagaag

SEQ ID NO: 184440 - DNA, 201 bp, Homo sapiens
gtagctggaactacaggtgcatgctacatgcctggctaattttttgtggagatggggtttcaccatgttgtccaggctggtctcaaactcctggactcaartgatccacccatctcagcctccgaaagtgccgggattacaggtgtgagccaccatgcctggccaccacaatatcaacatttttaaatgaaaaatcttatc

SEQ ID NO: 184441 - DNA, 201 bp, Homo sapiens
tttggttttgcaatttcaacctccgattctcctgcaaaggctgattttttcctatttttagtttatcctcagtttaggccaccatcaccagagtggtcttrtgtattccactttcagacttttgatttgccaaagccccagattaaacctgtacttagctcttatgcagagatttatgacttttctacctctttaaaaaaa

SEQ ID NO: 184442 - DNA, 201 bp, Homo sapiens
gctcaggtgatcctctcacctgagtctcccaggtagctggaactacaggtgcatgctacatgcctggctaattttttgtggagatggggtttcaccatgtygtccaggctggtctcaaactcctggactcaaatgatccacccatctcagcctccgaaagtgccgggattacaggtgtgagccaccatgcctggccaccac

SEQ ID NO: 184443 - DNA, 201 bp, Homo sapiens
cctactattttttttggtaaatattctaaagggtattctaagtataaatatatattaacggtgccatccagaataggctccagttttgcataaatccattygggtagcaggaggcaattttctctctcaaatgcaaaatttcattatattgaattgtgtagcctttgttattttttccttattttggttttgcaatttcaa

SEQ ID NO: 184444 - DNA, 201 bp, Homo sapiens
aaaattctttctgccaataacctggtgaaaatttactaagtaatgaatttttaataaaagaagaaactcttttattttagtttcctaaaaataatttatgytttaaatggcaagttagacaattaaaataaactagacttcttatgaagtttgatagtatgactattacatgactgtattctattgatttttttctcctgc

SEQ ID NO: 184445 - DNA, 201 bp, Homo sapiens
tttgtattttttatgctattataaaagttttcttttaaatttttttttactcaccctgacacttgggcaggatttaattttaatttctgattgtttaatgrtagttgctagtctgtaaaaagctgattgtttttttttttcttttcatgtattggctttaaactctatgatcttatactcgattattagttcagtagcttt

SEQ ID NO: 184446 - DNA, 201 bp, Homo sapiens
tttaaaatcttacccctttcataatacgtacacaagtctaatcaacttttaaacttctctaacagttttttatgttttcattttataaaacctcttgtgaatacagcctatgtatttttctacctaacctataacctatggttataacctagccttaccagcttatttttatagattcttgcactgtgttattcattttat

SEQ ID NO: 184447 - DNA, 201 bp, Homo sapiens
gaattagatctttccttccatgacagcctaggtcctgatcatcaacctgtaccttctacttctctgatatggagatttttcagttctctggtagcagctghtctcattctgaggccaccagtctaagagagatgagatcttagattcctgtgcacactctgtgtcttcattgctctccattccataggatttgtgggagat

SEQ ID NO: 184448 - DNA, 201 bp, Homo sapiens
gctagaagttttatacttttaagttatacatttaggtttattgtccatttgaggtaatttttatagaagagtcaagtatggattgatgttctttttttttktcatcttttttttccagaatgttactctcaaacatatttttttccaagacgtggatatatagatgttccaaaaagcactttcgaaaagaataaagacctt

SEQ ID NO: 184449 - DNA, 201 bp, Homo sapiens
ttttaaaatcttacccctttcataatacgtacacaagtctaatcaacttttaaacttctctaacagttttttatgttttcattttataaaacctcttgtgaatacagcctatgtatttttctacctaacctataacctatggttataacctagccttaccagcttatttttatagattcttgcactgtgttattcatttta

SEQ ID NO: 184450 - DNA, 201 bp, Homo sapiens
ttttcttctccagcttgcagaacaaaataagattacatttctttattcaaatgcaataggcaggctcctacactccttccccttccaaatcatagtgcatkgcagtattgcgagggtccctttttttatttttatgttcttcccttttaaaattgtgctttgagttgtttatttcttgttttttgtttgtttgtttgcttt

SEQ ID NO: 184451 - DNA, 201 bp, Homo sapiens
ttacaaataaagctgctgtgagcatttgtgtacgagttttgcatagacttatgctttcctttctcttgggtaaatatctaggaggggaatggctgggtcaygtggtagttgtattacatttccgtaatgactgagattcttcgtgtactttttttccatctgaatctagtgaaatggatgttcatatcttctctagtgaag

SEQ ID NO: 184452 - DNA, 201 bp, Homo sapiens
attaggaatatttttggttattataattattaatatttctttctttaaactctccaaaagaactgtttactttttatcaatgcagtcaaatatataaggtycatttttcatttgaaggcattctttctgaagccttccattctttagtcctgctgcatagccttttcttcttagagtttcttttcactatttcatccagga

SEQ ID NO: 184453 - DNA, 201 bp, Homo sapiens
caagtatcaggttggtgtaaaagtaattgtgtttttttgccattagtagtatggctatagcactgtttgattatcctttcacctgctgatgggcatttgcrttgtttctagcttggggctattacaaataaagctgctgtgagcatttgtgtacgagttttgcatagacttatgctttcctttctcttgggtaaatatcta

SEQ ID NO: 184454 - DNA, 201 bp, Homo sapiens
gagaatatgagtgtgtgtgtgtacacgtatgtgttgtgtgtatatttagtgtatttatatctacacctccccccactttttttttttttttttttttttttacttatttttttgtagagacaggatctgactttgttgcccaggctggtcttaaattcctggcttcaagcggtcctcacaccatggcctcccaaagcgttt

SEQ ID NO: 184455 - DNA, 201 bp, Homo sapiens
ggttagcagcacaaggtagggtccttcccgggctgactcgagttttccttctttccaccctttgatgagaacgtgatcctcaggctggtgctagtttaccrgaaattctaggggtggtacctctgctaaaagatttttagttttgaggtaaaggccaagtggcagataaaccaagtatataatttctaagaaactgacctt

SEQ ID NO: 184456 - DNA, 201 bp, Homo sapiens
tgtattttatacataatctgcttactttgtactgtggaagaataggattgagccctctaattccactaaccccctccacacccctttctccttctgtcatyctattgtaattacatcacatatttggtcaaattaatattcaatttttatatttttatggtgacataaatattgttcctatctgggtcaaatagtatacaa

SEQ ID NO: 184457 - DNA, 201 bp, Homo sapiens
gctttcttgactcgggtgtgatgagtccatcccctttccactataggaacagcattatcggtggttagcagcacaaggtagggtccttcccgggctgactygagttttccttctttccaccctttgatgagaacgtgatcctcaggctggtgctagtttaccggaaattctaggggtggtacctctgctaaaagattttta

SEQ ID NO: 184458 - DNA, 201 bp, Homo sapiens
tgccttgttgccgaggctggtctaaagctcctgagctcaagcaatccgcctgcctcagcctcgcaaagtgctgggattacaggtatgagccactgtacccrgccaatttttctcattttttatattcagaataatgaaggtaatattttttattgttgaaaaaattatgtaagttgcacataatccatggtaatgcctatc

SEQ ID NO: 184459 - DNA, 201 bp, Homo sapiens
agactcctggttgacactggggtctttatcaaaatctccccggattaaatggtcccaattctctaatgcccagtctgacgagagtcaggagggacagaggwacttttctgaagtagagagctgtctttgccttggcaagtccccacagggtataacaaggcaagcattaaatgcaaaagtttgaagcaaaattgacttggt

SEQ ID NO: 184460 - DNA, 201 bp, Homo sapiens
gtactccccttgggactctaattgtgtctaaatagatgtgagagtcaaaagacccataaggggcttcttttgctttatgatgtctttttttttttttttttctttttctggttgatgaaatgccagggtaaaagggatagccaattggactaaagcataagtgccactttagttacttgacagtgtccagtaaaggtccat

SEQ ID NO: 184461 - DNA, 201 bp, Homo sapiens
ttttttccatctgtaggttgccttttgccctgtcgatggtatcttttggtgaatacatcttaaaatctttctgtgaagtccagtttgtttattttttattrttgtatattttcttttcattcattcttagagtttccatctctctgctgacattaacaatttgttcttgcatactatctatccattagagttcttgacata

SEQ ID NO: 184462 - DNA, 201 bp, Homo sapiens
aaggctgggtgtggtggctcacacctgtaatcccagctctttgggaggccgaggtgggaggatcacttgaggtcaggagtttgagaccagcctggccaacrtggtgaaaccccgtctttactaaaaatacaaaaattagctgggcgtggtggtggacgcctataatcccagctactctggaggcagaggtaggagaatctc

SEQ ID NO: 184463 - DNA, 201 bp, Homo sapiens
aattttggcaagtttgtattttcattttaatttagttcaaaatattttaacatttctcttgactgctttttctttttctttctttctttttttttttttttaacactcgtgttattctgaagtaagttgtttaatctccaaatattctgggattttccagcgtctttctgttactgacttctagttgaattccattatcat

SEQ ID NO: 184464 - DNA, 201 bp, Homo sapiens
tacttcgagcagagccagtcttactaaaagtaaaatatagaaaacttgtgtgttattattgaattattgcaataaaattttaaaatactttgagaaattasttcagtgaagccgttaaactcgtaggtttaagttaacttctctaaggcatgagtgtgaagacaaatgcatgaaaacaaactgtaaatcacagatatgatt

SEQ ID NO: 184465 - DNA, 201 bp, Homo sapiens
tttccctgaaatcactgctttgactgcatcccacaaattttggcaagtttgtattttcattttaatttagttcaaaatattttaacatttctcttgactgmtttttctttttctttctttctttttttttttttttaacactcgtgttattctgaagtaagttgtttaatctccaaatattctgggattttccagcgtctt

SEQ ID NO: 184466 - DNA, 201 bp, Homo sapiens
cattaattttaaagtaatttttatagtatattatatatatatatatacacacacacatatatatatatatatatatacacacacatatatatatatatatwttttttttttttcttttgagacagggttttgctcttgttgcccaggctggagtggaatggtgtgatattggctcatcgcaacctctgcctcccaggttca

SEQ ID NO: 184467 - DNA, 201 bp, Homo sapiens
attaaacaatgttagtttagataaatggagcatgtgttaacatatatatatatatatatatatatatatatatatatatatatatatatatatatttttttcacaccagttacacgggagaaatatatcctaattccaaagtgtgaaatttgaactgacagaattataaacatttttaacattttaaagtattttcaatct

SEQ ID NO: 184468 - DNA, 201 bp, Homo sapiens
aattaaacaatgttagtttagataaatggagcatgtgttaacatatatatatatatatatatatatatatatatatatatatatatatatatatatttttttcacaccagttacacgggagaaatatatcctaattccaaagtgtgaaatttgaactgacagaattataaacatttttaacattttaaagtattttcaatc

SEQ ID NO: 184469 - DNA, 201 bp, Homo sapiens
aaattaaacaatgttagtttagataaatggagcatgtgttaacatatatatatatatatatatatatatatatatatatatatatatatatatatatttttttcacaccagttacacgggagaaatatatcctaattccaaagtgtgaaatttgaactgacagaattataaacatttttaacattttaaagtattttcaat

SEQ ID NO: 184470 - DNA, 201 bp, Homo sapiens
gaacacccaagataaaagtagtagtctgtttataatctaatctaatctagcccaagaggtgacatacaatccacttctgccatattctatttgttgtaacrtataagtctagcccaaacttaaaggaggggaattaagctccatctcttgaggttaagagtgtcaaataattttgtggactttcaggacatatttttcagg

SEQ ID NO: 184471 - DNA, 201 bp, Homo sapiens
gcccagctgtcattcttgccacaagatcttggaggaaggattcagaggctccagacaattgatatactgggttataaggcccaagtggcagagcagcttayactatagcatgaacttgctgcagagccatcttttgttctgatttcaacttaaaaatggtagcctaacaggttccttggtcaatgagttggagtactgctt

SEQ ID NO: 184472 - DNA, 201 bp, Homo sapiens
ttgaagaattgtctgttacgaaagaactgaagagatgaaaaagtcttgcagaggaagcaagcactgcaggaagcgtctaccatgcagcgaactggggtaaygaagaaatgagggtagattattaaaatttagaagattggaggaggccttatagggttcataagaagccagttgctgcccagctgtcattcttgccacaag

SEQ ID NO: 184473 - DNA, 201 bp, Homo sapiens
tatagtaggcactccagaaatattcagtgatggaatgtatatacaaacaaataagaatatgtaaaagtatgtgtataataattttattgaagcatcattayaatagtgagaaactggaaatattcaatgtctttttcactgtaaaagtcttttgtaaaatatagttgtatacatgtgtcttcctgtatgtgtttccaggaa

SEQ ID NO: 184474 - DNA, 201 bp, Homo sapiens
gtggtcttgttaacttaacctacctaaccttcctcatctgtaaaatgtccacaggaataatgtttattttgtagattggttgtgctgaagatttatgtatrctcaatatttaattgcatgggtaaacaaagtaaatataagtctgcctttatagaatttacaagctaatgggctaagatgaaaaaataatactactttatc

SEQ ID NO: 184475 - DNA, 201 bp, Homo sapiens
aagttccactacttatttgctgtgtggtcttgttaacttaacctacctaaccttcctcatctgtaaaatgtccacaggaataatgtttattttgtagattkgttgtgctgaagatttatgtatactcaatatttaattgcatgggtaaacaaagtaaatataagtctgcctttatagaatttacaagctaatgggctaaga

SEQ ID NO: 184476 - DNA, 201 bp, Homo sapiens
tccaactttctgtgtgaatcatttcctatttgattccaatctctgttaattttctcttttaaaatgcatatatctttagcttttttgtgtaatttgtcatmactgttaaacacctggagagcaagagcacagcaaagtcagtaacttttcattatagaggtttttgtaacaagtctcttaaaataaccttgacagtatata

SEQ ID NO: 184477 - DNA, 201 bp, Homo sapiens
tatatgcaccaggatagattcatctcaaaaatcttacataaagtgtttctttattttttatttttaaagtatttcttatgtagctagaaaaggtacaactrtagtcgtagaaagcagatcactgttgccagaatgctgacggagggaattgactgcaaatggtagcaagaaattttttcacatccttgaaatgttcaatat

SEQ ID NO: 184478 - DNA, 201 bp, Homo sapiens
ttgcccaggctgatctcgaactcctgggctcaagctgtcctcacacctctacctcccaaagtgctggaattacaggcgtgagccaccgtgcctaaccctaytgtaagtttttaaaaatgtcctttccttttttttcttttgatttttattgctggtgtatagaagcaaaactgaatttttgcgttgataatttcaccaaaa

SEQ ID NO: 184479 - DNA, 201 bp, Homo sapiens
cctgtctctacaaaaagaaaaattttttgtcattagccaagttcagtggcatgtgcctatagtcccagctactctggaggctgaggtgggaagatcacttragccccatgagtttgaggctgcagtgagccgtgatcacaccactgtactccagcctgggtgacagagtgagaccctgtctcaaaaaaaaaaaaaaaaaaa

SEQ ID NO: 184480 - DNA, 201 bp, Homo sapiens
tgttggcctcctgtatgttggaggttatgaaagaccctttgcacaaatcaaggtatgtttgttcattttcagtgtacttttcctggatgttctcttatctrgaatccatcaaaaccttgctaataataatcaacatataaaaatatcgtgttccagcactttgggaggctaagacaggtggatcacttgagcccaggaggt

SEQ ID NO: 184481 - DNA, 201 bp, Homo sapiens
tctataggaaagagtttatttcatgtgcaaccacctcatcatatgctgctttttttcttcaccaactcttcttttagtaattagagtataagctagttgakaatttatatatggagacatcagactgggtgcctggggtcaaagaaagggaactaataatttgaacacagtgtattaaatactgtacaggttgagtatctc

SEQ ID NO: 184482 - DNA, 201 bp, Homo sapiens
ttattttctgaaatataaaattatttattttctggttactatctcatagtgtgaaagataagaataattacacagttattacttttctcacagcatccatytaatatattttatagtatatctatattatatctattattcaaattttgataattatacaaccttatttataagaaggagtattttataaataatgctttt

SEQ ID NO: 184483 - DNA, 201 bp, Homo sapiens
gtagaggaggattagcaccacccaggaagtttcacagatgcagctcagccccacacctattgagtagaaactctggggatggagtttagcggtttgtgttwtgacaagttctccaagtgattctaatgcatgttcaagtatgagagctacttactctataggaaagagtttatttcatgtgcaaccacctcatcatatgct

SEQ ID NO: 184484 - DNA, 201 bp, Homo sapiens
ataggtatttgtcaggttttcctgttagattttggtacgatatatttaggtttatattatctcctgtacagtgcatagtggtggtgcatcatcatacaggycttcatccttgttatcttcacgttgactaggctgagaaggaggaggaagaggggttagtcttgctgtctccgtggtggcagaggcagaagaggtggaaga

SEQ ID NO: 184485 - DNA, 201 bp, Homo sapiens
aatgtggcctgtagaggaggattagcaccacccaggaagtttcacagatgcagctcagccccacacctattgagtagaaactctggggatggagtttagcrgtttgtgttttgacaagttctccaagtgattctaatgcatgttcaagtatgagagctacttactctataggaaagagtttatttcatgtgcaaccacctc

SEQ ID NO: 184486 - DNA, 201 bp, Homo sapiens
tgttttataagaaataagtacatctttcaatatgactccatattgcgtgcaaaataaaatatatgccatttgaaattcttcatggttaatttgaaacttcragttctcatctccaactaaattatttcttactctgtccatacttgtgccctctttatctcaaatctttttctcaggacattgtgtaagtttctccctttg

SEQ ID NO: 184487 - DNA, 201 bp, Homo sapiens
tgatggaggtatttagttccagcacattaattttaaagtaatttttatagtatattatatatatatatatacacacacacatatatatatatatatatatacacacacatatatatatatatatattttttttttttcttttgagacagggttttgctcttgttgcccaggctggagtggaatggtgtgatattggctcat

SEQ ID NO: 184488 - DNA, 201 bp, Homo sapiens
tgaaaagatttgtgataaaagaaagatgagatatatctacatttaggtcagttaaacacaagaatatttaattatgtccttcctataccctgtaccactaycagttccttacatactccacaagcacagttataatgatagtatttcttcattctcaatgtttcattgcatttaagagagatgggcatattagaactgtgg

SEQ ID NO: 184489 - DNA, 201 bp, Homo sapiens
ttcactttgtttttgcttctatgtctttcttccttttgtgctggcttaggaatacatttaaaaatatgttttcagtgctttattcattattttggttgttrtagttaggactattgtttagaatatctagcctgccaaggaatggaaatttgtgtgtgtgtgtgtgtgtgtgtgtgtgtgtgtgtgtctgtgtgtgtgtat

SEQ ID NO: 184490 - DNA, 201 bp, Homo sapiens
atgatggaggtatttagttccagcacattaattttaaagtaatttttatagtatattatatatatatatatacacacacacatatatatatatatatatatacacacacatatatatatatatatattttttttttttcttttgagacagggttttgctcttgttgcccaggctggagtggaatggtgtgatattggctca

SEQ ID NO: 184491 - DNA, 201 bp, Homo sapiens
ccattaacttttaatgttgagactctgagaagtgacgttgcatagttcctctgggcaaggaatatgggcagtttttttcttcttctttatgtgtaatcgtrttcagactggagttgtatccatttattcacaatgtccattatgaaaagatttgtgataaaagaaagatgagatatatctacatttaggtcagttaaacac

SEQ ID NO: 184492 - DNA, 201 bp, Homo sapiens
ggtatgtctttattagcaagtgtgaaaatgaactaatgcacctagctctgtgaaagtatgttttgttctcttccccaaaatgcagaaattcatgtttcagrcctccatcagtgatatacatgttgagttcttcaaaataataaaaatctgtgaaagagatacattaaaactacgtaatcagtcagaattaattagagggta

SEQ ID NO: 184493 - DNA, 201 bp, Homo sapiens
ctgttggtcattgttgaaatgatggaggtatttagttccagcacattaattttaaagtaatttttatagtatattatatatatatatatacacacacacayatatatatatatatatatacacacacatatatatatatatatattttttttttttcttttgagacagggttttgctcttgttgcccaggctggagtggaa

SEQ ID NO: 184494 - DNA, 201 bp, Homo sapiens
caacagtatgtttcaaattatgatgtcatcacttacattccaaatgtaagaaaaactttttgctaagttggcttaattcagaattgtatttagcagctatwaatattctcttagtgaccctttaatactttgtaggcttttttttttttttttgagatagagttttgctcttcttgcccgggctggagtgcaatggcgtga

SEQ ID NO: 184495 - DNA, 201 bp, Homo sapiens
aaaattaaacaatgttagtttagataaatggagcatgtgttaacatatatatatatatatatatatatatatatatatatatatatatatatatatatttttttcacaccagttacacgggagaaatatatcctaattccaaagtgtgaaatttgaactgacagaattataaacatttttaacattttaaagtattttcaa

SEQ ID NO: 184496 - DNA, 201 bp, Homo sapiens
tatgtgtcgaggaatttatccatttcttctagattttctagtttatttgcatagaggtgtttatagtattctctgatggtagtttgtatttctgtgggatyggtggtgatatctcctttttcatttttttattgtgtctatttgattcttctcacttttcttctttattagtctggctagtggtctatctattttgttaat

SEQ ID NO: 184497 - DNA, 201 bp, Homo sapiens
acatataaatgtgtttattagtgctgaattaatgctttactctgggaatttaaaatgtgtgattgctatattgtatataagcaccgtgcatgatgaagtgktacatattacttgactataattacatatacaatttgttaaaataatttttgaaagttaaaagtatttaaagaaatccattttaaaagtgagaatttgtgt

SEQ ID NO: 184498 - DNA, 201 bp, Homo sapiens
taataaaattaaacaatgttagtttagataaatggagcatgtgttaacatatatatatatatatatatatatatatatatatatatatatatatatatatatttttttcacaccagttacacgggagaaatatatcctaattccaaagtgtgaaatttgaactgacagaattataaacatttttaacattttaaagtattt

SEQ ID NO: 184499 - DNA, 201 bp, Homo sapiens
tgttgaattttatcgaaggccttttctgcatttattgagataatcatgtggtttttgtcattggttctgtttatgtgatggattacatttattgatttgcrtatgttgaaccagccttgcatcccagggactaatccgacttgatcgtggtggataagttttttgatgtgctgctggatttggtttgccagtattttattg

SEQ ID NO: 184500 - DNA, 201 bp, Homo sapiens
ggggtctatgatacaatatctcataaggggaatatcctgttcttttagaaggagtacacctgattttaaacaatactgtggggagagcctgtacccatttsttgacacactttccctaagcctaatcctgtttcttgacacactttccctaagctattttttatagtccgattcattcactccacctttccggaactccaa

SEQ ID NO: 184501 - DNA, 201 bp, Homo sapiens
gtgaagttcttttaaatgtttattctattacctgacaagttctactttcttttatgagaaacttttctggaaacaattttggggctttcttttcagaatasatattggttaatgtttgtgtttggaaaattgaaagcaaaatggatattagtcttgcctattaacttctaaagctgtgataaattgtttttgtccaacaat

SEQ ID NO: 184502 - DNA, 201 bp, Homo sapiens
ataataaaattaaacaatgttagtttagataaatggagcatgtgttaacatatatatatatatatatatatatatatatatatatatatatatatatatatatttttttcacaccagttacacgggagaaatatatcctaattccaaagtgtgaaatttgaactgacagaattataaacatttttaacattttaaagtatt

SEQ ID NO: 184503 - DNA, 201 bp, Homo sapiens
gtcaaccagtacttgtagcttgggataacatctgcagttataatctcatgtatgatttgaagaatgctgtaaatcagagacagcagcaggaaaaataatgkaaactggctaaatgacttaaaagttggctctaatgatgaagatactgatatatggaagatggccgtaacaagtttggatactttttttttttaagaattg

SEQ ID NO: 184504 - DNA, 201 bp, Homo sapiens
tataataaaattaaacaatgttagtttagataaatggagcatgtgttaacatatatatatatatatatatatatatatatatatatatatatatatatatatatttttttcacaccagttacacgggagaaatatatcctaattccaaagtgtgaaatttgaactgacagaattataaacatttttaacattttaaagtat

SEQ ID NO: 184505 - DNA, 201 bp, Homo sapiens
gcctcggcctcccaaagtgctgggattacaggtgtgagccaccatgctctgtcaaaagatgttattggcctccaaaataattaagaggcagttactttgcytaaatctgatcaattaattgttctgtgattgtgaatttgctgcaggttaacaaagccataggattgacatagatcacatgactgtattcacattcagctg

SEQ ID NO: 184506 - DNA, 201 bp, Homo sapiens
ggtataataaaattaaacaatgttagtttagataaatggagcatgtgttaacatatatatatatatatatatatatatatatatatatatatatatatatatatatttttttcacaccagttacacgggagaaatatatcctaattccaaagtgtgaaatttgaactgacagaattataaacatttttaacattttaaagt

SEQ ID NO: 184507 - DNA, 201 bp, Homo sapiens
tgcacagattttcattgtatcagtatgccataacttagctaacatcatagtcatagacatttgggttatttttagtctgttgacatggtttttttttttttgcatatagatattcagttgtttctataccagttgaagagactatccttttctcattgaattacttttgcacattcataaaaaatgaagtttgttgtgtat

SEQ ID NO: 184508 - DNA, 201 bp, Homo sapiens
ttggtataataaaattaaacaatgttagtttagataaatggagcatgtgttaacatatatatatatatatatatatatatatatatatatatatatatatatatatatttttttcacaccagttacacgggagaaatatatcctaattccaaagtgtgaaatttgaactgacagaattataaacatttttaacattttaaa

SEQ ID NO: 184509 - DNA, 201 bp, Homo sapiens
ttgcacagattttcattgtatcagtatgccataacttagctaacatcatagtcatagacatttgggttatttttagtctgttgacatggtttttttttttttgcatatagatattcagttgtttctataccagttgaagagactatccttttctcattgaattacttttgcacattcataaaaaatgaagtttgttgtgta

SEQ ID NO: 184510 - DNA, 201 bp, Homo sapiens
gagggtgatggcttccagcttcatccatgtccctgcaaaggacatgatctcattcatttttatggctgcatcttattcttattcttttcttttttctcttyctttcctttcttgtttttttgtttttttgagacagggtgtctgttacccaggctggagtgcagtgatttgatcacagctcactgcagccttgacctccca

SEQ ID NO: 184511 - DNA, 201 bp, Homo sapiens
tcagatctagctttgggaaatatagcgtatcttcacatttggaaattgtaggactagccctgtaatgcctatttcttctgagacattgcttctgtaatccrtatctttttctccagatgaaaggtgacgtcttaaactgtgacttagcaagccacctatgcatttgccttgcatgtaaatataaataataggggtaacatt

SEQ ID NO: 184512 - DNA, 201 bp, Homo sapiens
aatttttgtgaagaatgcttcaatgaacattgacatacaagtgtctgtttgagtagctgttttcaggtttttggagtgtgtacctagaaatggaccttccrggtcatgtggtaattctgtgtttggctttttgaggtactgttaaccttttatctatagtggctgcaccatttcacatttctatcagcaatgtgcatgttc

SEQ ID NO: 184513 - DNA, 201 bp, Homo sapiens
tgtctttaccttttaatttttgtgaagaatgcttcaatgaacattgacatacaagtgtctgtttgagtagctgttttcaggtttttggagtgtgtacctasaaatggaccttccgggtcatgtggtaattctgtgtttggctttttgaggtactgttaaccttttatctatagtggctgcaccatttcacatttctatcag

SEQ ID NO: 184514 - DNA, 201 bp, Homo sapiens
tttggcagcacgtatcaaaacttcattcctttttatatttggataatatatgtatatacaaccttttgtttatctactcacctgttgatggagacttgtaytgtctttaccttttaatttttgtgaagaatgcttcaatgaacattgacatacaagtgtctgtttgagtagctgttttcaggtttttggagtgtgtaccta

SEQ ID NO: 184515 - DNA, 201 bp, Homo sapiens
tttttttctattttaaatatttcatgtaagtggaatcatacaatattttccttttgtgtctggcttatttcgcttagcataatgcttttgaggttcatccrtttggcagcacgtatcaaaacttcattcctttttatatttggataatatatgtatatacaaccttttgtttatctactcacctgttgatggagacttgta

SEQ ID NO: 184516 - DNA, 201 bp, Homo sapiens
aacacaattatttacaaagcttttgtttattaaaataatttttataatctctaattacatggacagtgttgtacaaccacctccactgtctatttccaaarccttttcatcatcccaaacagaaatcatttaaccactaagcagtaacttccattttcttccatactgtagccctgggtgacctctaatctactttcggtc

SEQ ID NO: 184517 - DNA, 201 bp, Homo sapiens
gtcatttattgctgattttaagagaagttaattttattaaaactgttctcagtatgtatcacaaatttatttttctcttgttgattatggcttttgcagcmcaattacaaaacattttaaactgggtttatcatactcgtaatgaattggtagttaatttcatagccttattttatcagtaactgtgcattcatctttagc

SEQ ID NO: 184518 - DNA, 201 bp, Homo sapiens
ttcattacagcattatttccaacagcctgcatatggaaaccacctaaatgtccttcagtgggtcaatgaattaagaaattatggtatatttatgcaacagratattattcaggcttagaaaaaaagatcctgtcatttataacaacatggatggagctggagggcattgtactaagcaagatcagccagacacagaaagag

SEQ ID NO: 184519 - DNA, 201 bp, Homo sapiens
tgtttgagctgggtgcaatggattgcacccttcgtctcagctactcaggaggctgtggtgggagaattgcttaaactcaggagttcaaggctgcagtgctrtgactgcacctgtgaatagccactgcattctagcttgggcaagatagcaagactccatatctaattttaaaaattaaattaaaaatttgttagaatgcaa

SEQ ID NO: 184520 - DNA, 201 bp, Homo sapiens
tgctgtgtaaaaacagaagagttgatacatgttgttttcttattagacaaaattgagtcttgatttccaggcaagagaatgtgaatgatatttaatatctrttatataaataaaattacatattaaagctttttagaatttatcattaggtacctattaggagatattttaaaactataccatcattcaacttttctagat

SEQ ID NO: 184521 - DNA, 201 bp, Homo sapiens
gaacaacagctgggtcttcatgagacagagaacagacaaaagttttcctaatgcctacaacactgccatgggtgagtatgacaacttaccagtgcttattmtatttaaaacaaaaattaaggtgttagacccaaagtgtgctgcctttgttgttttgcttaatggggcatagtcatttggacttcatccttgtttgatggg

SEQ ID NO: 184522 - DNA, 201 bp, Homo sapiens
atctgcttttttattatcatcagtgtagaagcagcattctcttactatttttcacatcgtaaatgaatgaggaactttttcttaaaccaaccttttaaagrtatcttcaaagagcaaagcacttctaagattatgaacatagatctatggaatgaatgaggggaaaaagcattttcttaacattagtcaaccagtacttgt

SEQ ID NO: 184523 - DNA, 201 bp, Homo sapiens
tataaacaatggagaacaaagtaaacgaaaaccatttaaaaagacaaaatctgctatgctattcttcagagtgttctttgggtacaatatgaatgctttgsgaattcagaatagtaagtttctttcatggggaacaacacaaattaattgaagtttataaggtataccactaccagtagcagttgttgttctggattgcat

SEQ ID NO: 184524 - DNA, 201 bp, Homo sapiens
tttctgtgtttgatgtatcatcaatattgggtgagtgaagttcttttaaatgtttattctattacctgacaagttctactttcttttatgagaaacttttstggaaacaattttggggctttcttttcagaatagatattggttaatgtttgtgtttggaaaattgaaagcaaaatggatattagtcttgcctattaactt

SEQ ID NO: 184525 - DNA, 201 bp, Homo sapiens
ttgcatagggatattttgtcaggaccaagtctttctgctttttatcaatataatatcattggtccaagtctgtctccagcttcttgtatagctgcatatgratttattcccaggtaacttttgcatcatatcaagaagggtttggaaagcaggagggttttaacgtctgtgcccaaccaaggtgggggcattctcatgttt

SEQ ID NO: 184526 - DNA, 201 bp, Homo sapiens; identical to SEQ ID NO: 32314

SEQ ID NO: 184527 - DNA, 201 bp, Homo sapiens
gttggctgctgttacttgtatttattgtaatgcctagagtataaaagggttttctcctggtgtttctgtttcacgtttagctttcagtaggctctgctccyctgtaccacagagtgttctattttcatacttctagtacttttccccatatgtaaacaactgtttcttgccgctcagtgccagacttgtgaagactgtgga

SEQ ID NO: 184528 - DNA, 201 bp, Homo sapiens; identical to SEQ ID NO: 32317

SEQ ID NO: 184529 - DNA, 201 bp, Homo sapiens
cctgggtgatgggatgatctttgcagcacaccatcatggcacatgtgtactgatgtaacaaacttgcacattctgcacacgtaccccggaacttaaaataraagttggaaattttaaaaaaaggaaaaaaaatttgctttatggaatacactttttaaatttacatcccactagaagattcaaagagtaatgtagacctta

SEQ ID NO: 184530 - DNA, 201 bp, Homo sapiens
tgtctgcttctgttgactgccttatctttgaatataggccatttatttttcctttgtgtatgtgtgtgtgtgagacagaatttttaaattagacgtctttcgtggatttttctttcctatatgaacaaaagagactgaggtaagtatctttatgcttggtaacaggcatacttcttttagtttgttaataggcttcatttg

SEQ ID NO: 184531 - DNA, 201 bp, Homo sapiens
ttatgattttacctctgatctatgggttatttataagtacacttctgtctttacagacatggagatttttctggttacttatatgttattgatttctagcygagttatgttctgaggctatgatctgcattattttatttgttcaaaatttgctttatgtgggaggaaggagaggatcaggaagagtagctagtggatgct

SEQ ID NO: 184532 - DNA, 201 bp, Homo sapiens
gttctgtctttggctgtagtctcccagctctttgattctcagcactgtttcttttttccctctttttttctttttgtatttcagttggaaaaagtgccacrtacgtttcttctttaagtttagtgacttttctcttctgtgtccagtctgtggataatctcattgattatcattcccactgattaacattctttttctctg

SEQ ID NO: 184533 - DNA, 201 bp, Homo sapiens
gctaattgttatctctttgcttctatttttgttgggtttcagttactgtcatttttctaatttcttgaggtggatacttaactcatcaatttctataaagyatttcttctttttcatatatatattttggattgtaaatttctttataacttggatttaactgcaacctacaagttttgatatattgttattttgctattt

SEQ ID NO: 184534 - DNA, 201 bp, Homo sapiens
caaatattgacatctaatttaattcattatgatcagagaatatactttgaaatgtgttgtacgcatttaggaaaaaaaagcattttttcctggtttgggtrgagtatttttataaatgtcaattaagtcaggttgttttatagtgatctacgcttccatatcctcactggctttctgtctgcttgtgttctgtaagtcttt

SEQ ID NO: 184535 - DNA, 201 bp, Homo sapiens
ttttgttgttttgcttttcctcatatattttcgaatgagcttataaagtttctcatacaaattctgtcaggagtttttagattgcatttaatatataaatygggttgtgaacattttatgtggtaacagtgttgtaatttcctacctatgaacatgttgtattctttcatttacttaggttttcttaaatttcttgcaata

SEQ ID NO: 184536 - DNA, 201 bp, Homo sapiens
aaattctttacagttctccttactttcttaaagtggaagttgaggtcgttgatttgtaacctttttcttaattttttttattataaaaatgggtaaaaaawttttttttgcttttgttaggcgatatctaattctgttgcccaggttggagtgcagtggtgcaatcaggactcattgcagctgcaacctctggggctcaaa

SEQ ID NO: 184537 - DNA, 201 bp, Homo sapiens
ttagtaactactgccaaattcctttccaaataaagcaattttgtctccagcagatgagagagctcattttcccattgccagcactctttttttttttttttgatctgtaggcaaggcagtgtattgtaatgggaaggtgagtatgagttttttgttttgttttgttttgttttgttttgaggcagggtctcactcttgctc

SEQ ID NO: 184538 - DNA, 201 bp, Homo sapiens
gtcccttttctgtggtatatgttacaaatattttctcccagtttgtcagttatcttttgactttgtttatggtgtttttttgccatgccatttaaaaaaawttttacatagtatgatttaccaacattttctcttatttccttgttatatcaagattgaagaggaatttactcaggttttcttttaatacttgtaaggttt

SEQ ID NO: 184539 - DNA, 201 bp, Homo sapiens
tggttaatgaaagagccaacaatagtattgcaaaagcgatttatattttgattagctaacttgaatgacatagttgtttaggcactattggtaaatagtgrcaatcaagtcattcttttttaaaagaagataatgatgttggctttgtgatgagcaagaaggatgacttgtaggattattatttactgattagaaggacat

SEQ ID NO: 184540 - DNA, 201 bp, Homo sapiens
aatgaaaatcattaggcctgctcctacacatcctgaaggtaaagtgtttggtacgtactcttattaaaaagatacatttatatatatgtgtatgtatatctatatatacagatatatatatagatatatatacacacacacatacattgaaggttttcttttagtatttttgttgtttccacttaaaatgaatcatatact

SEQ ID NO: 184541 - DNA, 201 bp, Homo sapiens
aattatctttttaatgtgtttttcccatttcttctcaatgtttaagagttctttatatattaaagttagtagtcccttttctgtggtatatgttacaaatrttttctcccagtttgtcagttatcttttgactttgtttatggtgtttttttgccatgccatttaaaaaaatttttacatagtatgatttaccaacatttt

SEQ ID NO: 184542 - DNA, 201 bp, Homo sapiens
tttaagctactttctcctaaattactcatcttgtttagtatatgttataataacaatgcattgaaattctttgtcttattaagaatcaacctcatatcatagcataaaaaactattcatatgtaatagcagaaatcaggttttctagaggaaaagagctaatgtaatgattagttttctcttcttctattgtcttctgtat

SEQ ID NO: 184543 - DNA, 201 bp, Homo sapiens
gaatgaaaatcattaggcctgctcctacacatcctgaaggtaaagtgtttggtacgtactcttattaaaaagatacatttatatatatgtgtatgtatatctatatatacagatatatatatagatatatatacacacacacatacattgaaggttttcttttagtatttttgttgtttccacttaaaatgaatcatatac

SEQ ID NO: 184544 - DNA, 201 bp, Homo sapiens
gtgcatgtgtagttttgccaaatttccctccagacgggttatactagtttgcatttccaatagtagtatacgagagtgtctgttttccacagcctggccascagaatgtgtggtccataccttttaattttgccaatctggtaagtgggaattgtatctcagtgttgttttaatttgcatttttctagttacaagtgagtt

SEQ ID NO: 184545 - DNA, 201 bp, Homo sapiens
ttttaagctactttctcctaaattactcatcttgtttagtatatgttataataacaatgcattgaaattctttgtcttattaagaatcaacctcatatcatagcataaaaaactattcatatgtaatagcagaaatcaggttttctagaggaaaagagctaatgtaatgattagttttctcttcttctattgtcttctgta

SEQ ID NO: 184546 - DNA, 201 bp, Homo sapiens
tcgtttggtatatgaaacattgtaatggttctaagtcctaactgtataaaaagatactctcatagatatgtcactcttcactcatcctgctgccctatttytattcccccatgatttctacctgttttcacctatccctcatgggaaaccagtctctttagtttctgttttagccttcctgtaattcctttgtacaaagaa

SEQ ID NO: 184547 - DNA, 201 bp, Homo sapiens
attttaagctactttctcctaaattactcatcttgtttagtatatgttataataacaatgcattgaaattctttgtcttattaagaatcaacctcatatcatagcataaaaaactattcatatgtaatagcagaaatcaggttttctagaggaaaagagctaatgtaatgattagttttctcttcttctattgtcttctgt

SEQ ID NO: 184548 - DNA, 201 bp, Homo sapiens
atcaaagtatataaatattttagaaaaggtgagcatttcattgtgatttgattatagacatattcaggagagttttcccaggaaaaaaagggctttaaaarctatactaaggcaacttggactatagacagtgaagggcattcaaatatttttagatatgaccatgacacacaacaaattgtttgttttagaaagtcagtg

SEQ ID NO: 184549 - DNA, 201 bp, Homo sapiens
gattttaagctactttctcctaaattactcatcttgtttagtatatgttataataacaatgcattgaaattctttgtcttattaagaatcaacctcatatcatagcataaaaaactattcatatgtaatagcagaaatcaggttttctagaggaaaagagctaatgtaatgattagttttctcttcttctattgtcttctg

SEQ ID NO: 184550 - DNA, 201 bp, Homo sapiens
agattttaagctactttctcctaaattactcatcttgtttagtatatgttataataacaatgcattgaaattctttgtcttattaagaatcaacctcatatcatagcataaaaaactattcatatgtaatagcagaaatcaggttttctagaggaaaagagctaatgtaatgattagttttctcttcttctattgtcttct

SEQ ID NO: 184551 - DNA, 201 bp, Homo sapiens
gtttgtatttcttctattatagcccacaataccttattatttttgttacatacagtcaatatttgattgcttttcctacatatttacaacttcttttgctrtgtgttccttctattacttcagattttctgccagtagttacattctttaacatttcttttggctctgctggtagcaagttcagttgttttagtgacagtc

SEQ ID NO: 184552 - DNA, 201 bp, Homo sapiens
cacatgtatacatatgtaacaaacctgcacattgtgcacatgtaccccagaacttaaagtataataaaaaaataaataaataaaatacagcaaaaataaawaaaaaagaataatcaatggatgctaagtctgggagggaaatttttataagatattttcatggttgtaaatgtctttctgtggattgcttataacttgcaa

SEQ ID NO: 184553 - DNA, 201 bp, Homo sapiens
ttaccttttatgttataaaaagcttgttacctggtggatattatatagattaaatattagttaaattcctactttgaatcacattgaagttggtgggggggaaaatgaagtaacttaggaacataggatttgaatgcagaccctcatgagagatgagatgggaagaactgcaaacaaatcttgaactccttttttattagg

SEQ ID NO: 184554 - DNA, 201 bp, Homo sapiens
gggtttggaagctgaggcaggaggattgcttgagccctaggagtttgaatccagcctgtgcaatacagcaagatctcatctctgggaaaaaaaaaaaaaaatcgttttctcatgcttatttgaattagtgttactctttttgagaaggaaattgtggtggtaaaatatttttctgaatgttgaagaactgttcttatataa

SEQ ID NO: 184555 - DNA, 201 bp, Homo sapiens
tgggtttggaagctgaggcaggaggattgcttgagccctaggagtttgaatccagcctgtgcaatacagcaagatctcatctctgggaaaaaaaaaaaaaaatcgttttctcatgcttatttgaattagtgttactctttttgagaaggaaattgtggtggtaaaatatttttctgaatgttgaagaactgttcttatata

SEQ ID NO: 184556 - DNA, 201 bp, Homo sapiens
aattaatatgaatgatttgatgtgcaatgagatgaggagttacttaagtttctgaattattgctgtgtaaaaacagaagagttgatacatgttgttttctyattagacaaaattgagtcttgatttccaggcaagagaatgtgaatgatatttaatatctgttatataaataaaattacatattaaagctttttagaattt

SEQ ID NO: 184557 - DNA, 201 bp, Homo sapiens
aatttgctggtgaatttgctagaccttttgcttgctttgtggagtaatttaaaattgtttatgggagacatctaagattttctatttttttcttgtgtcarttttagtgcattatatttttctaggagtgtctctattctgacttttgaaacttgttgggataaaagtatttataatatcctcttattatttattactaca

SEQ ID NO: 184558 - DNA, 201 bp, Homo sapiens
ttatttcataatctcagatatttcatttttaaattaagtgtacctgagacagatatttttgtagtaagttttgaaattctgtatttttaattattttattmaagtatttgagcattttactaggtgttttgtaggcacaaaattgatgtgattttttctgaagtagaattacattctaatgggtatttcaatatattttac

SEQ ID NO: 184559 - DNA, 201 bp, Homo sapiens
cactttgaacttgcttaaaataattacgttagtagaggcaaagagggactaaatacgttgctcctttgccgttactaatgctagcttcatttacatcaggktttctcagccttggcaccattgacattttgggctagaattctttgttgtgggcagctgccctgtgctttgtaggatgtttagtagcatatctagccttta

SEQ ID NO: 184560 - DNA, 201 bp, Homo sapiens
tctttaaaaataaatgctgtaataaaactaatattatagtaaggacagggatctttcttagcttcagatgtgatctttgtgaagaaggcattatgtctcargttttactgtagaacctggtgataactactcacattttactagtggaaataatagaataacataagcctgcaaggtgtttttagatatctctggtctaga

SEQ ID NO: 184561 - DNA, 201 bp, Homo sapiens
ataatgtgtaacagtgaaaagacaaataatagattcttgaagaatgtgcgttcataattgattccattgttttactgtctctagtagcattactgtctagratttctaaagttttctttaaaaataaatgctgtaataaaactaatattatagtaaggacagggatctttcttagcttcagatgtgatctttgtgaagaag

SEQ ID NO: 184562 - DNA, 201 bp, Homo sapiens
tataatgtgtaacagtgaaaagacaaataatagattcttgaagaatgtgcgttcataattgattccattgttttactgtctctagtagcattactgtctakgatttctaaagttttctttaaaaataaatgctgtaataaaactaatattatagtaaggacagggatctttcttagcttcagatgtgatctttgtgaagaa

SEQ ID NO: 184563 - DNA, 201 bp, Homo sapiens
taaatgtttaatccatttgagttgatttttgtgtatggtgtgcacctttttgtctttccattcaccccgtacaatgtggtagttagtatatattttggaawctggaataaaatacttgggttcaaatatcttttctaccaatttctttatgactctgttttgtgatccatgagaaaagggtactatgttagattgaactac

SEQ ID NO: 184564 - DNA, 201 bp, Homo sapiens
ttcagggcccttacccatttttaacaggttatttgtatttttaatattgagttgtatgattttatatattggatattaacccctgtggatgtatagtttgmagattattttttctcatttcataggtgacctttcactttgttcattgtttcttttgctgtgcagaaggtttttagtttgatatagtcccacttgtctatt

SEQ ID NO: 184565 - DNA, 201 bp, Homo sapiens
aattcttcacagttttttgtaactgcttattatttgtctgaaacccccattatctttatcttactgtcctctagcacagaggttgacacaggcttagcagytgatcaataggtactggtttaaaaaaaaagaatgaatgcatactttagatcagtgattctcaactggcatgattttacttcccaaataacatttgacagt

SEQ ID NO: 184566 - DNA, 201 bp, Homo sapiens
aaactgttagatgttgactcatcttacatctgtatagaagaatgattttaaaatgatgtgaataggccgggcgcggtggctcacgcctgtaatcctagcaytttgggaggccgagacgggcggatcacgaggtcaggagatcgagaccatcttggctaacacggtgaaaccccgtttctactaaaagtacaaaaaattagc

SEQ ID NO: 184567 - DNA, 201 bp, Homo sapiens
agtcaattaacatgtattttgtagttacatgtgttatacactatattcttataataaagctagagaaaagaaaatattaagaaaataacaaggaagagaamataaatatgctattcattagacttgagtggatcatcctaaaagtcttcatccttgtcatcattgtgaaggctgaggaagaggaggggttgttcttgctgt

SEQ ID NO: 184568 - DNA, 201 bp, Homo sapiens
actgtatatttcaaaattaaattttctaataatttgctgtttattgaattatgaactgaaagaaagtaggttgaagatattaaaggactagtattattatytttattgaaactgtgatgtggatataattttacctatcagcaaacaaatatgtttaacagaagtctttttatttattatgacataaatgtatggtcacat

SEQ ID NO: 184569 - DNA, 201 bp, Homo sapiens
tgattaaattacacactgggctaacattttcctgattgtctcatagttagctgtcaactctgctgctttggcaggtcattgtcagccttggttaatgcagrtgggccccttccctcacctgactgatgtcaggtgaccactctgcagtatcaggaaggtggtagtggagcagactctgagcaggggccacctggtctccag

SEQ ID NO: 184570 - DNA, 201 bp, Homo sapiens
tttcttgtgataagttcagtcctcagaaagcaccactcttgtggcatttcagggcttaaattcttaatactctttgcttggttttccaagtctaaaacacygttccacatatgattctgtacaatctcatatctagtcatattgcagtgctgagaattgtagttccagagaggcatgtgtggagatagggttttgagaatg

SEQ ID NO: 184571 - DNA, 201 bp, Homo sapiens
gctagcctcagataagtcatccatcatcatcatcatcatatcatcatcatcagtaatatattgttaaaattagactttttcactgggtaattggtaggagyctataggttttcttgtgataagttcagtcctcagaaagcaccactcttgtggcatttcagggcttaaattcttaatactctttgcttggttttccaagtc

SEQ ID NO: 184572 - DNA, 201 bp, Homo sapiens
caggctggtctcgaaccgctgaccttaggtgatctgcccacctcccaaagtgctgggattataggtgtgagccaccacacctggcctggtatagacttttwaaaaaatgtacttgtttattttttatagagacaagttctcactatgttgactaggctggtcttgaactcctggcctcaagcagtcctcctgccttggcct

SEQ ID NO: 184573 - DNA, 201 bp, Homo sapiens
ttttctaatacagatttttatatgtagttgttatgttatccctaagtatttcatttttggagggtgctaatgtaaatgttattgtattttaaattttgaawttcacctggtatataggaaagtgattgatattttttctgtataccattgctggtatgtgggaaagtgattgagttttatatatttgtgtcctgaaacctg

SEQ ID NO: 184574 - DNA, 201 bp, Homo sapiens
aaatttattttctgagaaaacaagatagcagaataaattaggttaggtatacctctggcacatgtttcctcagcattctttggatatttaggtagttggaycttgggtttaggagaagaatatggattgaaagtacagatttgggagacaatagtatgtgatagtaaagacagggatgtggacaggctgttgagtagagga

SEQ ID NO: 184575 - DNA, 201 bp, Homo sapiens
tttagcacataaacatttattactcatttcttcattatgaattttattatcgaaatcagttgacaccattttttctttcagtttgcttaggcatattttayacagaaatattaatttcttttattttgcttttgtttactttgaattttgcttaatcgtattttgcttagaaatattaatataggtttgcataatatttaa

SEQ ID NO: 184576 - DNA, 201 bp, Homo sapiens
aatattatgccctgtttctggtccaggatccagtccaggatcacgtgtttcattaggttgccatgtctcttcttttttctgcaataattctttttttttttgagacggagtctcgctgttgcccaggctggagtacagtggcgcgatctctgcttactgcaggctccgcccgctgggttcacgccattctcctgcctcagc

SEQ ID NO: 184577 - DNA, 201 bp, Homo sapiens
tcaagtgattctcctgcttcaacttcctgagtaactgggattacaggcacctgccaccatgcctggctaatttttgtatttttagtagagacggggtttcrccacatcggtcaggctggtctcgaaccgctgaccttaggtgatctgcccacctcccaaagtgctgggattataggtgtgagccaccacacctggcctggt

SEQ ID NO: 184578 - DNA, 201 bp, Homo sapiens
tgcctacggtattcagtacagagtatagttacatgctgtacaggtttgtagcctaggagcaataggctgtatattgtatagcctagtgtatagttggctgkaccatctaggtttgtgtaagagcagtcggtgatgtttacacaatgacagaatcacccaacaatgcatttttttcagaagacactcctgttgttaaatgat

SEQ ID NO: 184579 - DNA, 201 bp, Homo sapiens
gtggttttaaatttcagtttggtaaatattttaaatattggtgaatttaaatttttctcattattttttcatgtattaagataaattttactgtaaacaaraactgtctcttctcataaatttatttatattggtatagactttttttttttttttgagacagagtctcactctgttgccccaggctggagtgcaatggcg

SEQ ID NO: 184580 - DNA, 201 bp, Homo sapiens
gagggaactagatttttaatgtcatttaatttaaattttagtagccacatgtggccattgaatagcacagttttaatatatagttgtgtgccacttaacartgttttggtcaactttggactgcatatataatggtggtcccataaggttataacaaagttgccctatacaggtgtaccattttttatcttttatacataa

SEQ ID NO: 184581 - DNA, 201 bp, Homo sapiens
aagcagtgaatgccatgacttgaaaatatctttcagacatttcgtagtggattcaggagagcatacattgctcttatctgttgctctcaggtcttggcctrtggtcatttctgctgatcattggtatctgtggcagagaactgtaatacagttgaatgtaaggaaaaaggattattgttaattcctaatataaattcctaa

SEQ ID NO: 184582 - DNA, 201 bp, Homo sapiens
agagagtgcccaaaccccttgtgcttcccaggtgaggtgatgccccaccctgcttcagctcaccctctatgggctgcacccactgtctaaccaatcccaaygagatgagccaggtacttcagttagaaatgcagaaatcaccgccttctgcattgatctcgctgggagctgcagactggagctgtacctatttggccatct

SEQ ID NO: 184583 - DNA, 201 bp, Homo sapiens
ataaaaagtaaaactaatatgtcggtctcctgtggatctttttttaagttttttttctcgtgtccttttgatatctagtcaattatagtttttttttttttgcatatttgagtatttttgattgaatactagacattgtttatgaaaaattatgtaaataatttgaggctctggtcatgttatctttctttagagaggatt

SEQ ID NO: 184584 - DNA, 201 bp, Homo sapiens
attaatgtaatttgaactgcttttcattttagatatggttaatctttatactaccattacttggtgtgtgtgtgtatgtgtgtatgtgtatatatgtatgytttgttttgttctttgagacaaggtttcctctgtcatccaggctggagtgtagtggtgtgatcatggctcattgcagcattcacctcttgggatcaagca

SEQ ID NO: 184585 - DNA, 201 bp, Homo sapiens
tcaagttagatgtgcttccttgaggaagcctggttgtataggtgagcatgactctcccctgtgcctccacagtattcccattggcctcaaagcacttaacrtgtattaatttttagttatttaaacattaccatttctcttactagattgtaagtaccatgaagacagagaccatctctgtctcattcacagtgatatttt

SEQ ID NO: 184586 - DNA, 201 bp, Homo sapiens
tgacttgtgaatatgaaataccagtatttgttatgttcacttttttcccattaagctaaatgtgatgataatatgttgtgtcataaatatgagatataacyttttaaaaatggagactgctttgcttttcttaagaacatattggttgttgatttttaaaattaaatcaggatatgaaattgttcacttgatcatggagga

SEQ ID NO: 184587 - DNA, 201 bp, Homo sapiens
atgtgttacttttattgaaaaatataattttccaaggaattgtaatagcaaagtgccaagaaagaaaatataccttattttatttttttttccttgttcawcttttagagcacagcaaaatattcttagcttgctttgtgtaaggaagaaaaagcaaaacatcattttcaagtttttaaaataaatatttacttttttttg

SEQ ID NO: 184588 - DNA, 201 bp, Homo sapiens
tttctcaaaatgtgttacttttattgaaaaatataattttccaaggaattgtaatagcaaagtgccaagaaagaaaatataccttattttatttttttttycttgttcatcttttagagcacagcaaaatattcttagcttgctttgtgtaaggaagaaaaagcaaaacatcattttcaagtttttaaaataaatatttac

SEQ ID NO: 184589 - DNA, 201 bp, Homo sapiens
tttctggcaggctgcaaaagtgtcattctatcttttctcaaaatgtgttacttttattgaaaaatataattttccaaggaattgtaatagcaaagtgccargaaagaaaatataccttattttatttttttttccttgttcatcttttagagcacagcaaaatattcttagcttgctttgtgtaaggaagaaaaagcaaaa

SEQ ID NO: 184590 - DNA, 201 bp, Homo sapiens
gattttacttttatcatctggagaaactatgtttctagacaagaattgtatgccattaatctatcactatgaaataaaaacagaatagtggattgtataaytgaagtaagaataaaaatcttgaaaatatttttgttttatatttagaaaaatggcttttcttgttgtacccactaactctactatggttagtaaaacata

SEQ ID NO: 184591 - DNA, 201 bp, Homo sapiens
atctcttgaccttgtgatccgcccacctcggcctcccaaagtgctgggattacaggcatgagccaccacgcctggcccaatcttttcttctctccatatcragtgatcttccttaatctctagtgctttctccttgttctcaggttaaccaacatttctcaggaaaccaacattagatttggagccagtttacttttttct

SEQ ID NO: 184592 - DNA, 201 bp, Homo sapiens
atggtctggatctcttgaccttgtgatccgcccacctcggcctcccaaagtgctgggattacaggcatgagccaccacgcctggcccaatcttttcttctytccatatcgagtgatcttccttaatctctagtgctttctccttgttctcaggttaaccaacatttctcaggaaaccaacattagatttggagccagttta

SEQ ID NO: 184593 - DNA, 201 bp, Homo sapiens
attgaagtttggtgtttctcggggctcagtgcaccagatttcattctttctcatgccctactctttctagtagtctcatccatacctatgaatttagttcwtttttatcagcatgttactcagacttcagatttctatgtaagccccaaatttggttatctttttgcccactctgatactgccttttgaatttctcaaaaa

SEQ ID NO: 184594 - DNA, 201 bp, Homo sapiens
tatatctttcacgtggtttcccccatttttaatatcttacataaccataggacatttattaaaatctgaaaataaacattggtacaatgctatcaacttaygtacatttattgttctaattttgccagtttccccaataatatactttttctcatctaggatccactctaagatcctatattacatttagttgtcatggct

SEQ ID NO: 184595 - DNA, 201 bp, Homo sapiens
caggaagcatgcctaaggagggctcagaaaacttacaatcatggtggaaggcaaacaggaaggaggcacatcttacatggccagagcaggaggaagagagmgcaaagggggaggtgctacacacttttaaacaaccatgtctcgtgagaactcattcactattatgagaacagcaagggggaaatccattcccatgagctg

SEQ ID NO: 184596 - DNA, 201 bp, Homo sapiens
agtattcttaaaataccattttctagattaattaattaatttatttatttgagacagagtctcaccctattgcccaggctggcgtgcagtggtgtgatctygactcactgcaacctctgcctttcaggttcaagcaattttcctgccttggcccccccaggtggctgggactacaaacatgcaccaccatgcctagctaat

SEQ ID NO: 184597 - DNA, 201 bp, Homo sapiens
aggtagtcatctgtaaaattagtgtttgctgttgcgtgattttgatccttacataaatataactgtattagtttgttcttgcacttaactgtattggttcrttcttgcattgctataaagaactacctaagactgggtaatttataaagaggtgtaattgactcacagttgtgcagacggtacaggaagcatgcctaagga

SEQ ID NO: 184598 - DNA, 201 bp, Homo sapiens
atattttactcatagaatctgtgtcattgttgaatctacattcaataactgggagctacagtattcttaaaataccattttctagattaattaattaattwatttatttgagacagagtctcaccctattgcccaggctggcgtgcagtggtgtgatcttgactcactgcaacctctgcctttcaggttcaagcaattttc

SEQ ID NO: 184599 - DNA, 201 bp, Homo sapiens
catttatttagggcaggggctggcaaataaccagagagcaaatattttagggtgtataggcttgcattcttctttcttgcactgtggtctgaaagctccasgtagtaagccagagtagtcatgggctgcacttcatttgcctcctctctttcagttatcactggcttgctctacctgttgttcagtttctgaaaaccatca

SEQ ID NO: 184600 - DNA, 201 bp, Homo sapiens
gtgaaattgtttattttattttttattttttaaaatttggaagtggtggtcttgctctgttgcccaggctagcctcaaactcctgggctcatgtgatcctyctgcctcagccttccaaagtgctgggactacaggtgtgagccaccacacccggcctagatgtgaaatatttcgatcaacttacagtagaattgtgccact

SEQ ID NO: 184601 - DNA, 201 bp, Homo sapiens
ttgagcccaggaggtcaaggctgtggaacctgatcatgctactgaactccagcctggttgacagaatgagatcctgtctctaaaaaaaaaaaaaaaaaaaagatacagcttaaatattaggatatcctttaattaaatagaaataacaggaaaagcttcattttgaagactgtaggagagtcagcaatattgtcatgtttt

SEQ ID NO: 184602 - DNA, 201 bp, Homo sapiens
gtctcaaggtaattttttgattgccctttttatttagaattatttgcagacttatttcgctgtatggtctgtgaacagctgtagattttcttttatatatrtatattttaaacaaaatttgagagatgaagtctgtattgtttacaggtttgaggaataattgatttataataaactgcacatatttaaagtttgcaagtt

SEQ ID NO: 184603 - DNA, 201 bp, Homo sapiens
tgtttcagtaggattggtaccagctcttctttgtatctctggtagaattgggctgggaatccatctggtctagggcttttttttttttgttttttttttttgtttttttttgagacagagcttcactctactggccaggctggagtgcagtgctgcaatcttagcccactgcaacctctgcctcctgtgttcaagcaattc

SEQ ID NO: 184604 - DNA, 201 bp, Homo sapiens
ttatttgtataaatttccctcttagaactgcttttgctgcatctcatcagttttggtgtgttgctttttgtttgtctcaaggtaattttttgattgccctktttatttagaattatttgcagacttatttcgctgtatggtctgtgaacagctgtagattttcttttatatatatatattttaaacaaaatttgagagatg

SEQ ID NO: 184605 - DNA, 201 bp, Homo sapiens
ttccccccaacagtgtataagcattcccttttctctgcagcctctccagcatctgttattctttgactttttagtaataaccattctgactggtatgagayggtatctcattgtggtttttatttgcatgtccctggtaattgatggtgagcattttttcattcttgttgggccacttgtatgtcctcttttgataactgt

SEQ ID NO: 184606 - DNA, 201 bp, Homo sapiens
gtatccgttgtaatatctcttctttcatttctgatttcatttatttgaatctttttttctcagtctaggtaagggtttgccaattttgtttatcttttcaraaaatcaattcttagtttcattgatttattcttctattttctagtcactaatttttaaatttctgctttgatctttattgtttccttctttctgctaact

SEQ ID NO: 184607 - DNA, 201 bp, Homo sapiens
aaaacagcaacaaaacaaaagagaaactgattatgagctgttgaatgggtaataaattgcagtattaattcaggattgcattaatccaggttattaaaagrcatttttttctggacatttttaatgcacacatctaattttttgattgaaattctgtatttaaaacaaagaacttcaaatttaagagcctcagggccagaa

SEQ ID NO: 184608 - DNA, 201 bp, Homo sapiens
tttagctccagcttataagtgagaacatgtgataggtggttttctgtttctgcgttaattctcttgggataatggcctccagctgcatccatgttactgcragggatgtgatttcattcttttttatggctgcatagtattctatggtatatatgtactgcattttatttacctagtccaccattgatggacacctaggtt

SEQ ID NO: 184609 - DNA, 201 bp, Homo sapiens
ttcaatctccttacttgtaattggtttgttctaattttctatttcgttatgattcagttctgataggttatgtatgtccaggaatttacccgtttcttctrttatctaatttattggcatatagttgttcataataatctcttatgatcctttgtatttctaaggtatccgttgtaatatctcttctttcatttctgattt

SEQ ID NO: 184610 - DNA, 201 bp, Homo sapiens
atcaagaccatcctgactaacatggtgaaaccctgtttctaataaaaaaatacaaaaaattagctgggcgtggtggcggacgcctgtagtcccagctactygggaggctgaggcaggagaatagcatgaacccgggaggtggagcttgcagtgagccgagattgcgccactgcactccagcctgggtgacagagcgagact

SEQ ID NO: 184611 - DNA, 201 bp, Homo sapiens
taatgttctgtctggcattggtatcagggtaatgctggctttgttaaaagaatttggaagtattttctcctcttggatttttgggaagagtttggtagtatattagttctttaaatgtttggtcaaaatcagcctgaagccatcaggttctgggattttctttgatgagagactttttattacagattcaatctccttact

SEQ ID NO: 184612 - DNA, 201 bp, Homo sapiens
atataggagaaaatagtaaatatttatttaattctggagtaaacaaagaaggatattccatgtatatcaccaaagacagaatccataaatgagtatttttyttttaggagtgctcctggactgcctgtatcagaaccacttgaagatacttgttagaaatgtatgttttagggcctatcctggacctacgtaatcaaaatg

SEQ ID NO: 184613 - DNA, 201 bp, Homo sapiens
tgatagagcacagacagagtagatttagcataattcttaagggccctagtattttcagaatggtaaacgagcactggcttcaacttaaagttaccagctcstaacaagaaagtcagcctgtcctttgaagctttgaatctaggcattgacttctctctagctatgaaagtcctagataccattttcttctaatagaaggct

SEQ ID NO: 184614 - DNA, 201 bp, Homo sapiens
cactcgaacccgggagatggagattgcagtgagccaaggtcgcgccactgtatttcagcctgagtgacagagtaagaccctgtctcaaaaaaaaaaaaaaaccaaaaacagttatttatttatatttttttgagacagtatctcactgtgtcctccaggttggaatgcaatggcatgatcatggctcactgccgcctcgaa

SEQ ID NO: 184615 - DNA, 201 bp, Homo sapiens
gaagtggtgaaagtagcatccttgtcttgttccagttcccagggggaatgctttcaacctttccccattcagtatagtgttggtcatgtgtttgtcatagrtgccttttattatgttgaggtatggctctattaccttgaggtacgtcccttctgtgccagttttgctgaaggttttaatcatgaagggatactggatttt

SEQ ID NO: 184616 - DNA, 201 bp, Homo sapiens
taaatagccgctatacctggagctgatgaggaaaatttaaataaatccatcatgaatgtttttcaaggagtgcatagagacacaaaatgaaactctagggmtctgagcaatgtgattatcactctgtacttacgtaatgcctttgtcaataacttcaagatttctttctcaaagtagaagaaatatagttgttgagaaagc

SEQ ID NO: 184617 - DNA, 201 bp, Homo sapiens
tgtagaaaaagactgttacatcaaaaaaacctgttaattcaataaagttgtgggatgcaaagttaacatacagaaatcagttacatttctttacaccaatsgataacagcctatctgaaaagagaatgaagaaaacaatctcatttacaatagcatcaaaaagaataaaatacctaggaataaatttaaccaagatggaag

SEQ ID NO: 184618 - DNA, 201 bp, Homo sapiens
agaatgaatggtaatgatggaagagacctttgaataaaacaataacccaaagagaggtatttaagtcctgaggtagtttagaggagaaataaatcacatcyagttagttaggaactaaatatgttttgtgtaggagttggcattagaaacagaaagatttctatagaaagatttttgatggacgtgggctgagggcattct

SEQ ID NO: 184619 - DNA, 201 bp, Homo sapiens
tggagaaatttgttaaagatatgtaaagggtgttaaatgagtgctctggtcaaatatgtatacatatggatagttatataattttgcatgaagagaaacawatgttacatgtggttagtaacttgtctttttccccacacttagcaatgtgttttggacatctttttcacataaatgtctgaatggtttaccattgtgtat

SEQ ID NO: 184620 - DNA, 201 bp, Homo sapiens
cttgtaatgttctgtctggcattggtatcagggtaatgctggctttgttaaaagaatttggaagtattttctcctcttggatttttgggaagagtttggtrgtatattagttctttaaatgtttggtcaaaatcagcctgaagccatcaggttctgggattttctttgatgagagactttttattacagattcaatctcct

SEQ ID NO: 184621 - DNA, 201 bp, Homo sapiens
cagtttgtgaggtagttgcttctttttaaagaatctggctgctttcagggactttggagtgatgtggaaatatttccacattccttacatgaaatagctcmttactttttgttagtatcgcataacaaaagaacatatgatttggaatgactggagttcaaactaaaaatcatagctcaggaacttgtgttccaaagcctg

SEQ ID NO: 184622 - DNA, 201 bp, Homo sapiens
caaaattgccttggctattcagggttttttgtagtcccataggaattttagaatttttttttctatttttgtgaaaaatgtcattgtaatttcgatagggrttgtattgaatctgtaatcactgggtagtatggactttttaacaatattaattcttctaatccatgaacaaggagtatctttccatttacttgtgtcttc

SEQ ID NO: 184623 - DNA, 201 bp, Homo sapiens
tccctaatgcttagtgatattgaacaatttttcatatacctgttggccatttgtatgttgtcttttgagaaatgtctattcaagttctttgcccatttttsaatcagattgttttcttgcttttgagtttttttgagttccttatatattttgggtattaatcccttatcaaatgtctcgcttacagatattttctccaaa

SEQ ID NO: 184624 - DNA, 201 bp, Homo sapiens
ttttagtttttggaggaacctctatatagttttccatatggatgtactaacttacattcccaccaatagtatacaaaaggtttcttttttccttgcaaaawctggttatcttttgtcattttgaaaatgtggtggtaggtatgaggtggtatctcattgtgattctaatttacatttccctaatgcttagtgatattgaac

SEQ ID NO: 184625 - DNA, 201 bp, Homo sapiens
ctttctgtgcctgtgttatttcacttagcataacatcctcaagattcttccatgttgtcacaaatgacagaatatctttctttaaaggctaaatagtattycatttgtttatgtataccacattttctttatccattcatctgtcaatgaacatttaggttgattccataacttggctattgtgaatagtgctgcagtaaa

SEQ ID NO: 184626 - DNA, 201 bp, Homo sapiens
tgtttgctttgtcaaagatcagttggctgtaagtgtttggctttctttctgggttctctattctgttccatgggtctgtgtgcctatttttataccagtactatgctgttttggttactatagtcttgtagtataatttgaagttgggtaatgtgatgcctttacatttgttcttttttgtttgcttaccttggctatttg

SEQ ID NO: 184627 - DNA, 201 bp, Homo sapiens
ttggtcaccaccaaccattcaactctcgtctataagttagattcttttcaatttcacatgtaagtgagaacatcatgcagtatttgtctttctgtgcctgygttatttcacttagcataacatcctcaagattcttccatgttgtcacaaatgacagaatatctttctttaaaggctaaatagtattccatttgtttatgt

SEQ ID NO: 184628 - DNA, 201 bp, Homo sapiens
gataatgacttattttcttctgggtagatacccagtagtgggattgctggatcaaatggtagttcttctagttcttcaaggaatcaccatactgttttccmtagtggttgtaataatttacattcccaccagcagtgtaaaagtgttaccttttccccacattcatgccaacatctaatattttttgatattttaattatg

SEQ ID NO: 184629 - DNA, 201 bp, Homo sapiens
gaagtgtagactacactgttattaactgtagtcattatgctgtgcagtgtatcccaaaaacctttttcttcttgtctaattgaaactgtacgctttgatcmacatctccctgtttcccccatcccctaacctttggtcaccaccaaccattcaactctcgtctataagttagattcttttcaatttcacatgtaagtgaga

SEQ ID NO: 184630 - DNA, 201 bp, Homo sapiens
aattgtgctgctgtaaacatgcctgtgcaagtggctttttcagataatgacttattttcttctgggtagatacccagtagtgggattgctggatcaaatgrtagttcttctagttcttcaaggaatcaccatactgttttccctagtggttgtaataatttacattcccaccagcagtgtaaaagtgttaccttttcccca

SEQ ID NO: 184631 - DNA, 201 bp, Homo sapiens
ttttgggaataatctaattaatttcaccacgagggtaagtgagactttaagtcacttataaagagtgatcctagtcagctatgtaattgtttatactcatsattttaagacattttagagttatgcgtactacataacattgccagcgctgtgcactgagagttactttattaatggacatctcatgctttctcctgttat

SEQ ID NO: 184632 - DNA, 201 bp, Homo sapiens
gcctcaagcaatcttcttaattcagcctccaaaaatgttaggattacaggcatgagccaccgtgaaaaatttattattgatgggcatatgggttgtttctrccttttggctactgtgaataatgctacagtgaacattggtgtacaaaataatcaattttaaaactacagtaaaaatcttttatgaaattgctgttttaat

SEQ ID NO: 184633 - DNA, 201 bp, Homo sapiens
agtaactcctcattcctctctcttcttcacccctggtaaccactattctattttctgaatttgtgagtttgcatattctgtataccttatatgattcaaaycatacaatatttgtctttttgtgtctgacttatgtcacttagcataatgttttcaagttttatccatattataacatgtcagaatgtcattccttttaag

SEQ ID NO: 184634 - DNA, 201 bp, Homo sapiens
attatgtttattgattagcgtatgttgaaccagccttgcatcccagggatgaagcccacttgatcatgatggataagctttttgatgtgctgctggattcrgtttgccagtattttattgaggatttttgcatcagtgttcatcagggatattggtctaaaattctctttttttgttgtgtctctgccaggctttggtatg

SEQ ID NO: 184635 - DNA, 201 bp, Homo sapiens
ccaggcacagtgcctcactcctgtagtcccagcactttgagatgtctgaggtgggcatagtgcttgagtccaggagtttgagaccagcctgggcaacctgstgaaaccccatttctaacaagaaatacaaaaaaaaaaaaaaaaaaaaaaaaaagctggccatgatggcacatgcctgtagtcccagctacttggaggcta

SEQ ID NO: 184636 - DNA, 201 bp, Homo sapiens
agctttgttcgcctggggtacaagaggcatagttgggtaggtgcagaggtttgtatagggagataataggatgtgaagaggtaaattggtgttagaatttwttattattattattattattattataatactttaagttttagggtacatgtgcacaatgtgcaagtttgttacatatgtatacatgtgccatgttggtgt

SEQ ID NO: 184637 - DNA, 201 bp, Homo sapiens
gaaggtacttagaacagtacctggctctgagtgtggctgctgtcttcatcatctgtatcgtcatcattaatcattcattcaggttttcaaataaacatctrttgagcacttacaaagtactaggcatttttcagtattgtggtgggattcagaaatgaaaatcataaaaatctatccttccaaggagatatgtatacaaat

SEQ ID NO: 184638 - DNA, 201 bp, Homo sapiens
caattctgctggctgccttccccaaggacctctctcagataaggctaacaatggcttccctgggctcaagctggagaccaggagtgcctacagggctcttsctgctgcttcttctactttagtattttcctcagctctctaaatccatttcagctctaagtgaggttaaatccttctcccatgatctggattttcaggttt

SEQ ID NO: 184639 - DNA, 201 bp, Homo sapiens
tcaagagaccagctgtggtagtaggaggggaatataatcttgccctacattggccaggataagtacttgggtttctcaggtgatcgcggggtcatagaggkcccaagagtttatgtcttttgtctttgcctaccagggcgggtagagaaaaaccatcagatggggcaggattgggcagatctgagctcagactctccttga

SEQ ID NO: 184640 - DNA, 201 bp, Homo sapiens
ctgttaagattatttcctttatcttgactttagataacctgatgactatgtgcctaggcaatcatctttttgtgatgaacttcccgggtgttctttgagcrtcctgtatttggatgtctagatctctagcaagaccagggaagtttttattgactattccctcaaataagttttctaaatttctagatttctcttcttcct

SEQ ID NO: 184641 - DNA, 201 bp, Homo sapiens
gctacgtgactgagagctacatgcatcagtgatgggggctagcagaacagaacagaaagtttcacaagtcttcctcatacaatgtctggaatccacaagcrgttaggtcaggagttgatgtttaactaccaggcacggttcttggcaccaagccatctggctattgatctcacttcttcttttaaccttttgctttctcat

SEQ ID NO: 184642 - DNA, 201 bp, Homo sapiens
catgtgaaagggtcatgatacattgtgcaagtgggggctacgtgactgagagctacatgcatcagtgatgggggctagcagaacagaacagaaagtttcasaagtcttcctcatacaatgtctggaatccacaagcggttaggtcaggagttgatgtttaactaccaggcacggttcttggcaccaagccatctggctatt

SEQ ID NO: 184643 - DNA, 201 bp, Homo sapiens
tcctgtcccttttaagggcttacaactctgaggggtccatgtgaaagggtcatgatacattgtgcaagtgggggctacgtgactgagagctacatgcatcrgtgatgggggctagcagaacagaacagaaagtttcacaagtcttcctcatacaatgtctggaatccacaagcggttaggtcaggagttgatgtttaacta

SEQ ID NO: 184644 - DNA, 201 bp, Homo sapiens
gcatcctttccaccgtggccacaaaggggctatgttccagtctttgatccacactcgatcacctggggagaaagggtaaactggggagaataagctaatgrggcatctctcatttacccaagctgaaattgtttgtgtaactttttctaaagcctgtagctgtcattgcagctcaatttctcctagctcctgaggagtgcc

SEQ ID NO: 184645 - DNA, 201 bp, Homo sapiens
ggcatcctttccaccgtggccacaaaggggctatgttccagtctttgatccacactcgatcacctggggagaaagggtaaactggggagaataagctaatkgggcatctctcatttacccaagctgaaattgtttgtgtaactttttctaaagcctgtagctgtcattgcagctcaatttctcctagctcctgaggagtgc

SEQ ID NO: 184646 - DNA, 201 bp, Homo sapiens
ttagtattcattttctataaatttatatcagtggaaacatacaatatgtgttttattgaggtagtgtgtctggcttctttcaatattacattcatccatgytgtcacatttatcaatagccctttttttttttgctgagtattattttgttgtatgactatatcaccatttacttatccatttactagttgatggacattt

SEQ ID NO: 184647 - DNA, 201 bp, Homo sapiens
ccgttatacagcttttgccctaggcaattgagcttcctacggggatggtgaagtcttttccttctctagctaagcagtattgcccaataattgaggttttkaagacccaaaagttaccagtgtgggccttctggactggaattatatcaggaactggatccatgggcactaattctcgggcctcccaaggccattggtctc

SEQ ID NO: 184648 - DNA, 201 bp, Homo sapiens
gccgttatacagcttttgccctaggcaattgagcttcctacggggatggtgaagtcttttccttctctagctaagcagtattgcccaataattgaggtttytaagacccaaaagttaccagtgtgggccttctggactggaattatatcaggaactggatccatgggcactaattctcgggcctcccaaggccattggtct

SEQ ID NO: 184649 - DNA, 201 bp, Homo sapiens
agaaagtgaagtttgattaccagttgtacttacaatctgtgtgcctttagataaattggtcatttccattagcttccatatctattaaatgaatataatcrtgggacctaattcatggcattctttaaaaagattaaatgacaatcctaaattcataatactaaaagaatattcaaattaaattaatagcagagagaaaag

SEQ ID NO: 184650 - DNA, 201 bp, Homo sapiens
actatccctaaatgtttgtggcttaatttacaattgggacttaatggcaaaaagttgttagaacaattatctggaacccccaagaatatattgagctctayatgagtctgattataatccaaggatagataaatttgaggctataggaatagctggaatacacacacaggaatgactttcaggatagtttcaaaaatgtct

SEQ ID NO: 184651 - DNA, 201 bp, Homo sapiens
ataaatgtttcaaaaattatatatttttggttttgctagtgttctaagctgtatagcacaagttatctctcattctgctaaatttttggtttcagagcttrgctagtttaacataaatctataactagatgttaagtttgaaagtgtttttctcttaatgatatggtttttggtatgtctgctgcccactgccttgttttt

SEQ ID NO: 184652 - DNA, 201 bp, Homo sapiens
caatactttacctacttaggtatttacagtgcagtcagtggacctcctattttgatgaaaggaactagcatggtacttcttatcctgttgttttctttaaycagtattttgcttctaaaaagaagtagttctcttacttgaatttcagagacactaataaccatgtaaatataaaagattatgtaaaaatccctattgctg

SEQ ID NO: 184653 - DNA, 201 bp, Homo sapiens
ctgataaataatgccacagtttcggatctagattcatattaaatgtctagaagttatgcattttacttattacagaaaggagaaaaatcattccttcagcraatactaatccattataaaagagtgttctcttgtcctcttgcctaataaagtctcaaaaaacaaaataactctccctccatccttaccctaaatgcaggc

SEQ ID NO: 184654 - DNA, 201 bp, Homo sapiens
tacttcccttttggaaataataatctttgacattattttcaaggttagacatttgcgttgagatcaaagataattttttcaaacttagctctggcataaayaattacatgactttaattgtactaggtatagaagaaaaagtatttttataaataggcaaaataaatcatttttattgagcacatattatgtgcctaagac

SEQ ID NO: 184655 - DNA, 201 bp, Homo sapiens
gtgactgttcttcttgtgccgttatacagcttttgccctaggcaattgagcttcctacggggatggtgaagtcttttccttctctagctaagcagtattgyccaataattgaggtttttaagacccaaaagttaccagtgtgggccttctggactggaattatatcaggaactggatccatgggcactaattctcgggcct

SEQ ID NO: 184656 - DNA, 201 bp, Homo sapiens
accccaccaggtgactgttcttcttgtgccgttatacagcttttgccctaggcaattgagcttcctacggggatggtgaagtcttttccttctctagctawgcagtattgcccaataattgaggtttttaagacccaaaagttaccagtgtgggccttctggactggaattatatcaggaactggatccatgggcactaat

SEQ ID NO: 184657 - DNA, 201 bp, Homo sapiens
gttacccaggctggagtgcagtggcacaatcacaactcactgcagcttactgcagcgttggcctctcaggctcaggtgatcctctcacctgagtctcccargtagctggaactacaggtgcatgctacatgcctggctaattttttgtggagatggggtttcaccatgttgtccaggctggtctcaaactcctggactcaa

SEQ ID NO: 184658 - DNA, 201 bp, Homo sapiens
gcgattcttctgcctaagcctcctgagtagctgggattacaagcatgcgccaccacgcctggctaatttttgtatttttagtagagacggggtttctccaygttggtcaggctggtctcaaactcctgacctcaggtgatcccccctcctcggcttcccaaagtgctgggattacaggtgtgagccaccacgcctggcctg

SEQ ID NO: 184659 - DNA, 201 bp, Homo sapiens
tagtttttggaggtacatcttcaaggacattgtcagaaggaagatgactgggtcaaaagctaagtgcatgtgtagttttgccaaatttccctccagacggsttatactagtttgcatttccaatagtagtatacgagagtgtctgttttccacagcctggccagcagaatgtgtggtccataccttttaattttgccaatc

SEQ ID NO: 184660 - DNA, 201 bp, Homo sapiens
cccaccaacagtgtaaaagtgttcctatttctccacatcctctccagcacctgttgtttcctgactttttaatgattgccattctaactggtgtgagatgrtatctcattgtggttttgatttgcatttctctgatggccagtgatgatgagcattttttcatgtgtcttttggctgcataaatgtcttcttttgagaaat

SEQ ID NO: 184661 - DNA, 201 bp, Homo sapiens
tattttacattaagaattttaatttagtaattatttatacatcattcattttaaaatttcttttatgtgaatgcattatttcttcctgttttggaaggggkgtgtgtgtgtgtgtgtgtgtgtgtgtatattttatttatagactttagtttccagaacagttttaaatttacagaaaaattgagtagatattaatagaac

SEQ ID NO: 184662 - DNA, 201 bp, Homo sapiens
ttgatccctttaccattatgtaatgcccttctttgtctcttttgatctttgttggtttaaagtctgttttatcagagactaggattgcaacccctggtttktttttttttttttttttttgctttccatttgcttggtaaatcatccctttattttgagcctatgtgtgtctttgcacacacataggagctgggtctcctg

SEQ ID NO: 184663 - DNA, 201 bp, Homo sapiens
atacctaacaattccatttattaagcagatagatccaaataactaagtgtttatgtccaaacaacttagcatgtgttaaagagcatacaacttctcaaacyttggaatcagattggacaccacaactacatgtcctgttacaccttgatttttttgcacaatatgtggttttaatcaaaataactgccccagacccagctt

SEQ ID NO: 184664 - DNA, 201 bp, Homo sapiens
tcctgaatggtattgcctaggttttcttacagggtttttatgggtttaggtcttatgtttaagtctttaattcatcttgagttaatttttgtataaggaakgggtccagtttcagttttctgcatattgctagccagttttcccaacaccatttgttaaatagggaatcctttccccatttcttgtttttgtcaggtttgt

SEQ ID NO: 184665 - DNA, 201 bp, Homo sapiens
ttttttttttttggaaatcaggtaaagagtgtggtaagagactattttccatagtgatacagaaggcagggaaatgaacactctgaggaatagttgctgtrgcagtggaagaggaagcacttcacctacttatgtgactggaggaagaaaaaggttgtgatggcacagaaagctaagcctaaggggctttcccagccggag

SEQ ID NO: 184666 - DNA, 201 bp, Homo sapiens
tttgttttaatgaaataaagtagaagagaaaatagcacaaagaaaggaaataaattgctttatgaaatgtacgtgtgtgtgtgtgtgtgtgtgtgtgtgtstgtgtctgtgtgtctgtgtgtctgtagttggttgctatataaactgtttttcttgcattagataaactggatcaaacttaaatgactgtaagtaaacatt

SEQ ID NO: 184667 - DNA, 201 bp, Homo sapiens
ctttcttctctgatagatttccctacttttttgactttatcttttctgcttttttgatttgagtgatcttgaaaacctaatgctgtacaaactggtccttrtacttatggagcttttgtttcagctgtaaactgaacatgttattttcagtggtctctaatctgttctacaattttatggctctgacttagccccaaattt

SEQ ID NO: 184668 - DNA, 201 bp, Homo sapiens
ttactaaatgggttcttctcaatatggtttagaccccaccaggtgactgttcttcttgtgccgttatacagcttttgccctaggcaattgagcttcctackgggatggtgaagtcttttccttctctagctaagcagtattgcccaataattgaggtttttaagacccaaaagttaccagtgtgggccttctggactggaa

SEQ ID NO: 184669 - DNA, 201 bp, Homo sapiens
attttttgcaaaaatatctcctctaagattctttcgttgtagtacttattctaatgaagattcaaaagaacctccgaatttgaattttggtcttatcagtmggctattcgttaagtcatctattggatgattaataaaatgatgaattttaagggactcgaagccaaccctttatacactcagggcagactcacagaggtt

SEQ ID NO: 184670 - DNA, 201 bp, Homo sapiens
cttgaaagcattcctggcaagcatatcatttacctgatatataatttcattaagcaccaagattgtgctagttactttctagagaaaagatgaaaagctayctaccttaattatcctcagacttaatttcatatacccagaaaacaactttccagaaaatagtggtaaccacagctacctaatttagaatagatcctctga

SEQ ID NO: 184671 - DNA, 201 bp, Homo sapiens
tagttgggggatctaagtttgtcttaagttggccagggttagtattctggtttctcaggcaataggtggggcataaagctcccaagaatttctgtcttttrtgttcagcaaccagggcaggtagagaaataccatcaggtaggggaaggattaggtggatatgggctcagactctccttgggtggggcttgctgtagccac

SEQ ID NO: 184672 - DNA, 201 bp, Homo sapiens
ccccaatggggaatgtgtgttcagaggcaggttttatcccccctctcacactttgggagctcatggtttttcgcctgtctcgtggaatttacagcactgtstggcttctttcaacggatctgtttggctgtggcaagttcttgaaatcagagagcaatgaagtttgctacatagattgactcttcatgaaagatttctctg

SEQ ID NO: 184673 - DNA, 201 bp, Homo sapiens
ttatttatatttttttgagacagtatctcactgtgtcctccaggttggaatgcaatggcatgatcatggctcactgccgcctcgaactcctgggttcaagygattctcccatccccgcctcctgagtagctgggactacaggtgtgtgctactatgcctggctaactttcaggctccacttctaattctagttcttttgct

SEQ ID NO: 184674 - DNA, 201 bp, Homo sapiens
aaaaaaaactttttttaaagatggggtttcactgtgttgcctaggctggtcttgaactcctgagctcaagcagttctcccaccttggcctcccaatgtgcyaggattacatgcatgagacactgcaccccacctgaatcctaacatttttatggaacctgaaatgagcctgaataaccaaagcaatcttgagcaaaaggaa

SEQ ID NO: 184675 - DNA, 201 bp, Homo sapiens
caaagatgtgaatagacatttctcaaaagaggacatacaaatggccaacagatatatgaaaaaatgctgaaaaaaagctcaacattactaatcatcaggargatgcaaatccaaaccacaatgaaatatcatcttgcaccagttagaatggctatttatgactaggtacagtggctcatgtctgtaatcctagcactttgg

SEQ ID NO: 184676 - DNA, 201 bp, Homo sapiens
agaaaagagaactcatatgctgttggttggaacgtaaattagtacagccaccatggaaaacagtatggaaatttctcagaaaactaaaagtagaactgctrtacgatctagcagtttcactactgagtatttatccaaaggaacagaaataattttatcaaagggtggatgaatggataaagaaaatgtggcatatataca

SEQ ID NO: 184677 - DNA, 201 bp, Homo sapiens
caagattatgtgagatttttgtttctatattatgtttatgcagttctttactaagaaagggatgaatgacttcagggtttcctggaagctcatctcttaamatattcatctatcactattaaaatatgttaatatatcaattaatattataccccttgtttaggagtcaatctgtctctcttactgattgcttatgttggt

SEQ ID NO: 184678 - DNA, 201 bp, Homo sapiens
ttgggtgatgtaaaaggcagtgactgtgagaataatcaagaaaaggttcccagggtggttatagtttagcaaaagaatgaatgaagtaaagtaacatgcaygtaatataggtcattagatgtcactaaatggagatatgcagagaggaatagccacacaaggaaaaagtagaaattatattagtgaggaaaagttactatt

SEQ ID NO: 184679 - DNA, 201 bp, Homo sapiens
tggtcacctcccaccaggcccctcctccaacattggggattacaatttgacatgagatttgggcggggacacaaatccaaaccacactttgctctttgacrtgtagcttcttttgttcagtattaggattttgaaattcattcatgatgttgtatggaattcattccttttcattggtgtataatattatatataggcact

SEQ ID NO: 184680 - DNA, 201 bp, Homo sapiens
aatccttttgcctttctcagaatatcatatagttggatcatacaatgtttaggcttttaagattgacttcttatactgttactttcctctgtgtcttttcrtggcttgatagctcatttatttttggcattgaataatattgcattgcctgtgtgtaccatcatttattttcacctattcaaggacatcttggttgcttcc

SEQ ID NO: 184681 - DNA, 201 bp, Homo sapiens
ctcaggactcagcatatggttgtactcataactcagatttatacagcaacgtactaaggatatacagctcaatcataagagacaaagacaagtagagtctsgggggagttaatgtgtaggctttcttgtgctctctttttctcatgaggggtcatcctgagctcactcttcctgcagcaatgtatttgtgatgtttctgtc

SEQ ID NO: 184682 - DNA, 201 bp, Homo sapiens
tggaactcaggcactggaatgtgccagattttaggacaatattggaacctggacctggaaagttacttagaacctagtttctgctctttcttcttaatatygcatctctgcttttgtccctttatttgtatcagtcttctcattgtctctgtctctcaagattggctcttcctgattcctgattttcctgggagatcatta

SEQ ID NO: 184683 - DNA, 201 bp, Homo sapiens
aatcatcacagggtcctgaggccacatacatcctcagcttacgaagatgatgggattaagagattaaagtaaagacaggcataggaattttacaatttatrttcttctgccatggcttcagccggtccctctgttaggggtccctgacttcccgcaacaatggttgacttattgagatgggattaagcctccagtaatatg

SEQ ID NO: 184684 - DNA, 201 bp, Homo sapiens
gaaaggtaaagtttaatttttttttaaattagtgctaataatgtctcataattcagcttacaagatgaatatgaatgacattttgctgcccagttgtcttsactttgtcagaaaatactcgaattgggtatagcgctgttttggccaaacatggtacgactcctaggctttttctcttgaataagattctcagtggtggca

SEQ ID NO: 184685 - DNA, 201 bp, Homo sapiens
ggctatgtggagagagaacatggtggtatttctcaagatccttaaaagtgtttctcttgactcatcaagactacgaacttattttaaggaagtagtcagaratggacataaagagttatgtgaaaggaatttcaccacagcttcccttggtaacaaaaaaacaacctggaaacaacaatcatcaatggtcagtaaaatcat

SEQ ID NO: 184686 - DNA, 201 bp, Homo sapiens
ttcattcgtgttagagtactaggaatacccttacttggtccactctccttgaggcctggtctctccttcagtcagcactgttggccaggacagttaacatycacctcttctgaatgccctgggctgggtccacatcactttcctcctgaaaaccttacactctatagtctttattttgggtatcttgatactctagcacaa

SEQ ID NO: 184687 - DNA, 201 bp, Homo sapiens
ttcttttccgtagttgttatttcaggtattttcatcgttgttttgtgtcttaagagtttaaaatcaagcctaagtctgttagacttacttttcataagagratttgattcaggaaaaatagaacagattgattggttaagtttgttcagggcatgtttttcgttccctcccctcctccctctctcccttcctcccttcctt

SEQ ID NO: 184688 - DNA, 201 bp, Homo sapiens
tttctattctaaaccataagttctcacttattttgaggctgtcccacaccctgaaagataaagtttcaaatgagtcaggtgatcttttcacaaatggaatragtgctcagtttacattttttttaattatactttaagttttagggtacatgtgcacaacatgcaggttagttacatatgtatacatgtgccaagttggtg

SEQ ID NO: 184689 - DNA, 201 bp, Homo sapiens
agtaaacaatttataatttagaggaggaaagataaaaagtattatattgaacaataacctcagtcttttaggattgttacatgaaattcattttggatgawcatttatcttttaattcttctagtgctgtagattaaatgagtctggtgttgtattactacactatagctcctttgtggagccagtggaggctttctattc

SEQ ID NO: 184690 - DNA, 201 bp, Homo sapiens
gttctaccaaattaattttcaaatcaacaatttctacacctttagtaaacaatttataatttagaggaggaaagataaaaagtattatattgaacaataayctcagtcttttaggattgttacatgaaattcattttggatgatcatttatcttttaattcttctagtgctgtagattaaatgagtctggtgttgtattac

SEQ ID NO: 184691 - DNA, 201 bp, Homo sapiens
ccagtctgaaatacatgagacaaaaagaaaacccaaagtattgatcatcattttgttccttggatcctgagctcccttgtcagactgccaccttctctccwtcttctgaaaacagttttgcaggaacatataatttaatttacaaaagttatattatgcataacctaagaagagttgacactgtagttgctcactaattac

SEQ ID NO: 184692 - DNA, 201 bp, Homo sapiens
ggatatgttagggacattacagtgggatttcatcataggcacattaaacctccttacatttagctgtatatattgaggcaaaaacaacaacaacaaaaaamccattaacatgttttttttttttttaagttaaaaaaaaaatagagatgtggtctcactatcttggccaggctagtcttgaactcctggcctcaagtgatt

SEQ ID NO: 184693 - DNA, 201 bp, Homo sapiens
ttgtagttggtttctttctgatataaatgcactcccaggtggtggtaagggaggttctgttgattcatcagaatatgactgcacagtagcaggagctgaaraaatacttgttgtataaatgacctatatctcttaaaaaggaggatatgctcccatttctgtaccaaagaagagaaggctgagaaccctccatgactagca

SEQ ID NO: 184694 - DNA, 201 bp, Homo sapiens
aggctgcccgcttcctggatagagagggcatgcttttcttggggcttttcttttctgggtctcctccattggcgtttttgcgttgctggtgtctccagtayccagtctgaaatacatgagacaaaaagaaaacccaaagtattgatcatcattttgttccttggatcctgagctcccttgtcagactgccaccttctctcc

SEQ ID NO: 184695 - DNA, 201 bp, Homo sapiens
aatgtggcattccttcattaagtaagcatttattgataccttgcagtattctaggcagagggattgaagaaggctaaccatgatgacctctctaaggctaytgaatttgccagtaatacacttacactaagtggtcctagtgaacctaaatctcaagtctgctattttcttaatgcccattttcttatccaaataacttgt

SEQ ID NO: 184696 - DNA, 201 bp, Homo sapiens
catttggaatgcaggtattaaagtactgtaatcaagttggaagaagcagtataaatctgaaattttctcagtaaccagttgaatacatttagactagagartgaatcatttatttcagttcaaagttgcagtgtctgagttgaaccacagaaggaataaaaaagtccacatttgtttaagaatagcagataactgaattcc

SEQ ID NO: 184697 - DNA, 201 bp, Homo sapiens
tagataaaatttaaattgagttctttagccaagctgaataaatgtacaaggtaaaaatgcaatctcttcataagtttcacagagtaaacactggaagttgyaataataaatatgtaaagtatttgtttttattacaaatgtaaaggattagaggtagtttaacatttggaatgcaggtattaaagtactgtaatcaagttg

SEQ ID NO: 184698 - DNA, 201 bp, Homo sapiens
tgaatgctttgtaagtgaattctgactataaccaatgcaatggaaacatgttagactaggagttgagctcaaccaaggttttagttctcctctaaaccgcyagccacagagtagggatgtgtttttattctttactgtgcaccaaatgccagcctggagatgctcaacacttcttggacgatgaaatgagtagatgtactg

SEQ ID NO: 184699 - DNA, 201 bp, Homo sapiens
caaaaaggttggggatcactgtcctagatggtataacctaccacacacctaggctatatggcatagcggattgctcctaggctacaaatgtgtacagcatrttactatactaaatattgtaggcaattgtaacacaattgtatttacatattataacatatctaaacaagaaatcgtacagtaaaaataaggtacaaaaga

SEQ ID NO: 184700 - DNA, 201 bp, Homo sapiens
tccctagtcctgactaaggaatgctttaccgcccctgcggtttctctctccttggtatgtcttaaccaaggaatgctttaccaccctgcagctttttcctyagtcccaaccaccaaggaaatacttcaccatctgcaacatccttccttggtctgtacacagaatcatcatggcagtatatgaggatcctttaagctaggt

SEQ ID NO: 184701 - DNA, 201 bp, Homo sapiens
gaagaaaggaaaggggggttctgaatatttttcttactaccggaggtttgtgtgaggttcaacccccactcatggggatttctcacctctttttgagattyaactccccctcatggggatttctcacctctttctgaggttcaacaccccgccccccatggggatttctcacctctttctgagtttcaaccccctcctgaa

SEQ ID NO: 184702 - DNA, 201 bp, Homo sapiens
tgacaaaatatcagtcttttaggaggcttgcattcctgggctgtgaccttagtgtttcttaggttttttgtttgtttgttttggcctcttagatgagacaraagactagacagggctggaggtggttactttcccttccctcagatcagataagccattgttatattagtttcccttgagggcaggcctttgttatgttga

SEQ ID NO: 184703 - DNA, 201 bp, Homo sapiens
atgaattaattttccagcttttgacggaattgaattctaaaaccatccacatacatatgacaatcacgtctaaaaagtaattagcttgctataaatacaaragatttcctgtgagaaaattgctcatactatctaaccaatagagaaatttggcagattagagaaaaactatatgttatctgaaagaatagaacccttcag

SEQ ID NO: 184704 - DNA, 201 bp, Homo sapiens
agaaacacgacttatccatatgctgcctacaagaaactcatctcaactgtaaagacacacatagactgaaagtaaagggatggaaaaagtgttccatgcamatggaaaccaaaggtgagcaggagtagctaaacttatatcagataaaacagactttaagtcaaaaacagtaaaaggagatcaagaaggtcattatataat

SEQ ID NO: 184705 - DNA, 201 bp, Homo sapiens
aggattgcttgaggccaggagtttgagaccagtgtgggcagcatagggagaccctgtctctacaaaaaattaaaaaaaaaaattagccgggcatggtggtrtgtgcctgtagtcccagctacttgggaggctgaggtgggaggatcacttgaacccaggaggttgaggctgtagtgagccatgattacccactgcagcctg

SEQ ID NO: 184706 - DNA, 201 bp, Homo sapiens
tttacttgtatctttcatgagtccccaccagtcctcagttcttaatcttatttcaaaaactgtggtcataggaggctcagacaggttgtaagacacatgargttggtcattccctgggctacacacattatactgagtggcattatataagcagatccctttcaaaattcctagacattcataataactataaaacagaaa

SEQ ID NO: 184707 - DNA, 201 bp, Homo sapiens
gaccagtcagcttccaggtgtgactggagcagggcttgttgtctttttcagagtcactttgtagggattgtccgggcttggtctcacctcccaggtctcargtgctgtgggtttcacgtggctgtggtggatccaggccggaattccttctaccttcatggtggtgggagtggtcaggatgatggtctggcatcctttcca

SEQ ID NO: 184708 - DNA, 201 bp, Homo sapiens
aggaatttcaccacagcttcccttggtaacaaaaaaacaacctggaaacaacaatcatcaatggtcagtaaaatcattaagtaaaatacaaaatggaaaamtttataacagaagaaatgagcagccaccacttgaacccacttatgttagtaccactaaaagtgggacagccaaacattatgtgcttgctgatgtggtatg

SEQ ID NO: 184709 - DNA, 201 bp, Homo sapiens
aatacaattatatattggataactgcagctttagcttgcgttctaaaaggagttcagatgttgtacctgttttggcctcattttccttctttatattctckctctcagcctcggtccagtttgagagctgttagtgttccagcataagattcttttcttaatcctccttttttttttttgaagactgagtctcactctgtc

SEQ ID NO: 184710 - DNA, 201 bp, Homo sapiens
atacaattatatattggataactgcagctttagcttgcgttctaaaaggagttcagatgttgtacctgttttggcctcattttccttctttatattctctytctcagcctcggtccagtttgagagctgttagtgttccagcataagattcttttcttaatcctccttttttttttttgaagactgagtctcactctgtca

SEQ ID NO: 184711 - DNA, 201 bp, Homo sapiens
tggtcagaaggtctcagtgagactttgcattgacttgaggtacagacttgtaagaaaggaatcctagaagtttgtttgctcaggtgagtccagatcaccaygagaacattttttgctaaactaaagagttctgtgtttttagtctaatggttcaaggctgtgtgagtctgtggtcttcggtgcctgtaagtgccactaagg

SEQ ID NO: 184712 - DNA, 201 bp, Homo sapiens
tctcagagacaacaccttgctttacctcattttaccaccaaatacagagttatttcttttctaccaaaaaaaagcacttcaatgcattgatgacatacttrtctcattgatgcatattcattctaagacttgtctcatgatgcttgcttgctgctgctgatttgcttatcttaattttttcttaaagtcatgagaacaatt

SEQ ID NO: 184713 - DNA, 201 bp, Homo sapiens
aacaagaatagatgccatcttagtcactcagaaatagagtacaaatgcatgatattcattcttgtgtcaaagggaggatatttaagtcttaaaaccttttrttttgtttttggggaggtggggaaggagtaagaaggagaaagggaggcagagaaaagcttagagataatactagcctcctttacttaaccagctatcaac

SEQ ID NO: 184714 - DNA, 201 bp, Homo sapiens
ttaaaaatcaagatagctagcaatttttcatttctaataatgataattcaatacctaccaaaattcatatatatttcatatatatatttcatatatatatsatatatatgaaatatatatatcatatatatttatatatatatttcatatatatatttcatatatatatgatatatatatttcatatatatcatatatatt

SEQ ID NO: 184715 - DNA, 201 bp, Homo sapiens
tctcctgacctcgtgatccacccaccgcggcctcccaaagtgctgggattacaggggcaaaattcatattttaataaaagggatgcatatctaatgtttastaatgaattattcaagttaaaattaatagtcactatagtaaagaccaatttaacttatattctgtaagtgagactgaggtgattctttgtattttgatta

SEQ ID NO: 184716 - DNA, 201 bp, Homo sapiens
agaccacaatgagatagcacctgacaccatcaggatggccactatgaaagaacaaaaagtttaaattagagcacagtaaacaatgggcgtcaatttttttwaaaaaaaaaaggaacaaaaactaacaggtgttaaggatgtgacattggaacccttgcatactgttagtgagaatgtaaattgatgcagccattatggaaa

SEQ ID NO: 184717 - DNA, 201 bp, Homo sapiens
gttcctttagtaaatttacttctaaggttttttttttttaattaagcagtgtttcttgctgaaagaaatcaaagaagatacaaataaatagaaagacattsgtgcttgtggattggaagacttaatattgttaaaacatctatactactaaaatgcattccacccctatcaaaatcccaatagtattttttgcagaaatta

SEQ ID NO: 184718 - DNA, 201 bp, Homo sapiens
gcaagccattcttgtaaagtacatatgataaaattttcttgacagctgttttcaaagtcagccttcctatgtcatcatggttcctttagtaaatttacttstaaggttttttttttttaattaagcagtgtttcttgctgaaagaaatcaaagaagatacaaataaatagaaagacattggtgcttgtggattggaagact

SEQ ID NO: 184719 - DNA, 201 bp, Homo sapiens
ctagacataaatctgtgtgtaggttttagagataggatcagaaaggatgaatgaaaaggacttaggccagaggctagcaaatgtgcttggttcatgttgcytcatacacagcacctccaagccaaaagaaatacctaacaattccatttattaagcagatagatccaaataactaagtgtttatgtccaaacaacttagca

SEQ ID NO: 184720 - DNA, 201 bp, Homo sapiens
tgatttctttctttcatcagtattttgtagttgtcaacatgcagatcctgcacagattatttttagatttatacctatttcatgttttttagttgtgttaytataaattatactttaaaattttaaatttccaactgttcattgttggtatatagaaattcaattggttttagtattcttatagtctgcatccgtttatgt

SEQ ID NO: 184721 - DNA, 201 bp, Homo sapiens
cacataaatcaggttgttgatatccattaaaaaatcctttggggattttgcttgtgattatgttaaatctatagatcactttgggaagaattgacatcttwacaatattgaatctttcaatccatgaacatggtgtatatctctttttatttaggttctccttgatttctttctttcatcagtattttgtagttgtcaaca

SEQ ID NO: 184722 - DNA, 201 bp, Homo sapiens
gcttcttcaccatttactgtctattaacccctgatcaaattatataactcctctatgcctctgtttccctctgtgaaatggggatattaatacctacttcmtagggttgttgtgagcattaaataaataatgcagaacccttagaacagtactctacatctagttagtattccataattattaaccagtggattgacaaat

SEQ ID NO: 184723 - DNA, 201 bp, Homo sapiens
ttcatgaagacctagaattcaaattttgttaataaaacaaatcagctctgtatcctcatgcaaattacttaaactctctggcttcagcttctacatctgcrtatctcactggactcttgtacagattaaattagatactgttttacttagtagggatacaatatgcttcttcaccatttactgtctattaacccctgatca

SEQ ID NO: 184724 - DNA, 201 bp, Homo sapiens
tgtgctgtgagatttgctctaggaagcctcagctacatatgtgtaggcacaaagaagtcaggtggttaagttcattgaggtctggatttttctcaggtgartgtgactgggtaatgggggcagagcaaggaggttaagggtatttacaggggactaattatgttgatccactgtgggctctgatgttggataagaaggaaa

SEQ ID NO: 184725 - DNA, 201 bp, Homo sapiens
tttgcccattttataaacttctgttgtactttatatggagccttgaatataataagtgagtttttgataagcctgcataaatagaggatagcgaggaaatygcatggtgtttgtttcctatagtatcgaagcagcagttgctacttttgcccaagccagaccaccaggaatctacaagggtgattatttgaaggaactttt

SEQ ID NO: 184726 - DNA, 201 bp, Homo sapiens
gatttttgattcatgaagacctagaattcaaattttgttaataaaacaaatcagctctgtatcctcatgcaaattacttaaactctctggcttcagcttcyacatctgcgtatctcactggactcttgtacagattaaattagatactgttttacttagtagggatacaatatgcttcttcaccatttactgtctattaac

SEQ ID NO: 184727 - DNA, 201 bp, Homo sapiens
tttattttttcagcattttggtttactcccacataaccacattagatctatccagaggacagttctcttgaggtctctctgtcctgtaagaaaggcagagktgaatagttgagtttaaaatgggtgagaaaggagatagttatatgtaaccagcacacatttctaaaagaatgataaaaaaagagaacactattggatcca

SEQ ID NO: 184728 - DNA, 201 bp, Homo sapiens
ttatttattttttcagcattttggtttactcccacataaccacattagatctatccagaggacagttctcttgaggtctctctgtcctgtaagaaaggcakaggtgaatagttgagtttaaaatgggtgagaaaggagatagttatatgtaaccagcacacatttctaaaagaatgataaaaaaagagaacactattggat

SEQ ID NO: 184729 - DNA, 201 bp, Homo sapiens
tttaatcactggagcctgctaaaaatgtaaataatgctgataaatcagtaaaatttttgtatattactcaaccgaattgcacttaatccccatttcacagrcccagtttaggacacttagaactttcttcgtcttcttgtccacaccttttccctacccacttttgagatttctcctactttgtttgtcctatcttctttc

SEQ ID NO: 184730 - DNA, 201 bp, Homo sapiens
agtgtgagaatatcctgtaaaatactcaccacttgaaagcattcctggcaagcatatcatttacctgatatataatttcattaagcaccaagattgtgctrgttactttctagagaaaagatgaaaagctacctaccttaattatcctcagacttaatttcatatacccagaaaacaactttccagaaaatagtggtaacc

SEQ ID NO: 184731 - DNA, 201 bp, Homo sapiens
tggcacacgcctgtagttccagctgctagcaaagctgaggtgggagtatcacttgagcctgggaggttgaggctgcagtgagctgtgagcgtcccacaccrctctagcttgggcgacagagcaagaccttgtctcaaaataataaataaagagttggcctaggtggacttggtactctttcagaagcagttggctataaaa

SEQ ID NO: 184732 - DNA, 201 bp, Homo sapiens
aacactatctgtgatctcatggtagcatatatctgctcatttttacaagtttgatctagtttatcataggagtgatatattaagtagcaaaaataaattgraattactctaaaacagccttccttataccacagaattcagaacaagttaaatccacaggagactacaaccaaactggcttccctaaaagaactgcatcaa

SEQ ID NO: 184733 - DNA, 201 bp, Homo sapiens
ctatcttggccactctggtctcagactcctgaccttgtgatccacccgccttggcctcccaaagtactgggattacaggcatgagccaccgcacccggccrgtcgtcttaacacagcagtattaatatgaactgggagctttttatccaactggaaacatggtaatggcagattctagggagtctcatagaagaaatacat

SEQ ID NO: 184734 - DNA, 201 bp, Homo sapiens
tctgaaacagattatagaaaattgatgtcatttcttaaatgtttgtataatacacccagtgaaaatatctgggcctagtgctttatttttggaaaggttawttataggttcaatttttaaaataaatattggccttgttagattatctgtttctccttctatgacttttggtagcttgtgcctttcaaagaattgatccac

SEQ ID NO: 184735 - DNA, 201 bp, Homo sapiens
agtaatcagcgagtcagggacaaatgtaaaataaaacttttgggaaaattcttttgatcttttcttttcatgaagatggattactttataaaaattaaaaygttgtttacatgcctctgtgataggtagtgctgcccagaatacgttaagtggcttttaaattttattccatatcaaggtaaatctttagagcaataaatg

SEQ ID NO: 184736 - DNA, 201 bp, Homo sapiens
accttggaagagatcaatgacagtcatgccatcgtgtctacatctgtgggctcaggacactacgccaacattctttcatttgtagacaaggatctgctggmaactggctgctcagtcctgctcaatcacaaggtgcatgccatgagaggggtgctgatggatgacgtggatcccctggtcacagtgatgaaggtggaaaag

SEQ ID NO: 184737 - DNA, 201 bp, Homo sapiens
cctcccaacaattctgtaaatgatcaatcatctatcataaatccctttctgctttaatgaatgagggtgcattctgccgtttgttctctacctgaatcaayacatcagcaaagttgtatttgtacatactaagcagcccaacaattgttttcctaggtatagaccctaaagaaactcttatgattcctcaaggatctagaa

SEQ ID NO: 184738 - DNA, 201 bp, Homo sapiens
gaataaaaataaaacctagatattaatgtataagcaaagactctgatatttatcaaatagtgatcttctctgagagcactactcaagtatgcaccccagcmaaacaacaaaggagtgcaagaaagtgacagacacagtagtgttaacccaggagagcgtgaaaagatactctagggtgatcgctgtgcaacagctagatcc

SEQ ID NO: 184739 - DNA, 201 bp, Homo sapiens
gatccagcattgcagatcagaggggctatccatatagaaaaaaaaaaagtgaaaatggatttctgtcccataccatacataaaaatcaatttcaggtgtakcaggaaccaaaacagggaaaacaaaactttaaaacacttagagaaaatacaaaagaatattctaatgatctgtgagtagggaaagatttttaatcaagca

SEQ ID NO: 184740 - DNA, 201 bp, Homo sapiens
gagatccggaaatggcacccatatacttgaaaaggttattgccagtgtttgcacaaacatttcagcaaactatgctgccttcaataaggtagttattcatrctatttgatgtgttagtcaaattacaccaattatatggttttatttatctcccttttccagaagtatttgaggtttattttaatgttaaaaaggtgtggt

SEQ ID NO: 184741 - DNA, 201 bp, Homo sapiens
tgctctggtggcagcagaattccagagaactgacttgggagcttggctttgtgatgataattttccagatgatgaatctcgtcacgtaagaatatttctcmttttgtgacttgagttgtgactctgctttcaaaagtgttaaaaataggttatgtgttcagagcataagccaggtttctgactctacttttattattgaat

SEQ ID NO: 184742 - DNA, 201 bp, Homo sapiens
aagcatatagaaaggttttggggggatgcagtgcattgctcttctgtaatgacagtaatttacttcaagacattgcaggagaaggggttaaaggagtaaargggaggaagagaaggattcatttcatgcctacctgtacagagacactttcttgctttctacttttttttttttttttttttttgagacggaatctcactc

SEQ ID NO: 184743 - DNA, 201 bp, Homo sapiens
ctcaagagttaaataaatgagctgaacacggtggctcatgcttgtaatcccgatactttgggaggctgagtcaggtggatgacttaaattccggagtacamgtccaacctggccaacatggcgaagaaaccccctccctactaaaaatagaaaaattagcagggtgtggtggcacattcctgtaatcccagcttctcagga

SEQ ID NO: 184744 - DNA, 201 bp, Homo sapiens
ataaccattcttctgagtgttgaacatgtgtttcgtttttactgtttattttacatttgtatttacagttttgaactccagtaataagtaattgaaaactctgatgtttctttattcattttaatgctattttaaggtaattagtagaaaatgtttgagatgttgacctaaaaaatttggtataattatcctaatgtgttt

SEQ ID NO: 184745 - DNA, 201 bp, Homo sapiens
cctggcccggcggcctcctctcgggcacgaaggcttgctgctgcttctccagaacttcccttcctcgtagacacaggtagttaacttagcggggtttggtrctggggaaccacagcgcgggggccagcgcctctcagcgcccggctcggccgggccccgggtgtggggtcaaccccgctggtcgccgccgttgggtgccca

SEQ ID NO: 184746 - DNA, 201 bp, Homo sapiens
agctgctgtaccaggagttatttttagctcagcaataccaagaaagtcaaggctgggagcagaggcaaaaatggaatatgaaatggatcaaaagatgttgygttatttattgtctttaagaaaccagatgtgttcaggtttttcagttaaaatatttcatttttttaaaatgaagtgcctgatttacagactattttataa

SEQ ID NO: 184747 - DNA, 201 bp, Homo sapiens
tttttctgtttaaagttttattgatttctgttctttattattgctttctgctttggttttgggtttaatttgctctttttccctctgttttctttctttcttttttttttttttttttgagacagagtctcgctctgtcacccaggctggagtgcagtgacagggatgttggctcactgcaagctccaggtcctgggttca

SEQ ID NO: 184748 - DNA, 201 bp, Homo sapiens
tgataagtaaacatcttaggagttagtataaataactggacaaagattgagtctcctttgcagcaaactagatctttatgaggaccttttgaaaaaaaaattttttttttgagacagagtcttgctctgtcacccaggctgcagtgaagtggcgtgatcttggcttactgcagcctccgcctcctgggttcaagtgattat

SEQ ID NO: 184749 - DNA, 201 bp, Homo sapiens
caatcccattactgggtatatacccaaaggattataataatcatgctgctataaagacacatgcacacgtatgtttattgtgtcactattcacaatagcaragacttggaaccaacccaaatgtcgatcgatgatagactggattaagcaaacgtggcacatatacaccatggaatactatgcagccataaaaaatgatga

SEQ ID NO: 184750 - DNA, 201 bp, Homo sapiens
ctcccaggctcaagtgatcctctcaccttagtctcccaagtagctgagactacagatgcatgccaccatgcctggctaaacacctggctaattaaaatagtttttttttttttgtagagatgaagtcttgctgtgttgcccagactggtctcaaactcctgggctcaagcgatcttccgacgtcagcctcccaaagtgttg

SEQ ID NO: 184751 - DNA, 201 bp, Homo sapiens
tccacctgccttagcctcccaaagtgctggggttacaggtgtgagccaccatgcccagccagtagtcttttttccagtgggccttcttgtgaggattaaargagagaatgtatgttaagtgttttgagtaaagtgggctacccactgatgccatcattaataaatatctaattttgaattttattttagcactttattcca

SEQ ID NO: 184752 - DNA, 201 bp, Homo sapiens
gtttacaggcgtgagccaccgtgtgtggtctggttttcttttcttgctttccgtgtgtgtgtgtgcgcatgtgtgcgtgtgtgcgtgtgtgtgtgtgtgcktgtgtgtgtgtgtgtgtcaggatcttaccctgctgctcaggctggagtgcagtggcgtgatctcagctcactgcagcctcagcctcctgggctcaagcag

SEQ ID NO: 184753 - DNA, 201 bp, Homo sapiens
ttggaattacaggtgtgagcccctccagaacctctgagcaaaagaaaatatacttgaatgtttatcagaccttgataggaagaatggctttttctttttctttttttttttgagacagagtcctgctctgttgcacaggctggagtgaagtggcgccatctcagctcctgagtagctgggattacaggcacacaccaccat

SEQ ID NO: 184754 - DNA, 201 bp, Homo sapiens
gagtagctgggattacaggcacacaccaccatgcccggctaatttttttgtgtttttagtaaaaatggggttttgccatgttggctgggctggtctcgaaytcctcatctcgggtgatctgcctgccttggcctcccaaagtgctgggattacaggcgtgatccaccacacccagcctggctttttgtttttctttttcct

SEQ ID NO: 184755 - DNA, 201 bp, Homo sapiens
actcctcatctcgggtgatctgcctgccttggcctcccaaagtgctgggattacaggcgtgatccaccacacccagcctggctttttgtttttctttttcctttctttctttcttttttttctttttttttttctttttttttgagacggggtgttgctgtgtcacccagactggagtgcatagtatgatcacagctcact

SEQ ID NO: 184756 - DNA, 201 bp, Homo sapiens
ctcctcatctcgggtgatctgcctgccttggcctcccaaagtgctgggattacaggcgtgatccaccacacccagcctggctttttgtttttctttttcctttctttctttcttttttttctttttttttttctttttttttgagacggggtgttgctgtgtcacccagactggagtgcatagtatgatcacagctcactg

SEQ ID NO: 184757 - DNA, 201 bp, Homo sapiens
tataactttttattttctattattttgttaatattttgctgttaagaatttaataaccctagatgtaatatgatttctttcactacagatgtcctcctcgyactttcttaccagccctttgcaaaatttttcttgatgaaagtgctccagacaatgtattagaggtgacagcccgtgccataacatactacctggatgtat

SEQ ID NO: 184758 - DNA, 201 bp, Homo sapiens
tttgaaacaagtattttgtctttatagaaagccgaagtgaattcttagagaagttacaaagagctcgaggccaagtaaagccatctacttcaagtcaaccyatactgtcagcaccaggacccactaaacttactgtaggaaattggtcactgacatgtttgaaagaaggagaaattgctattcataattcagatggtcagc

SEQ ID NO: 184759 - DNA, 201 bp, Homo sapiens
tttttgtatttttagtagaaacgaggtttcactgtgttagccaggatggtctcaatctcctgaccttgtgatccacccatctcagcctcccaaagtgccgsaattacaggcgtgagccaccgcgcccggccggctctccactgtttgtacccattttgacagtgtctttctgaagttcaacgaatataacttcttctatga

SEQ ID NO: 184760 - DNA, 201 bp, Homo sapiens
tgtgacctttttttttttttttttttttaaattagatggagacaaggtctcactaggttccccaggctgatctagaactcctgagcttaagtgatcctccygccttggccttccagagtgctgggattacaggcgtgagccaccgtgcctggccaagaaaggggaagtggtttttcctagagctaggaaggatgagtaagg

SEQ ID NO: 184761 - DNA, 201 bp, Homo sapiens
aaacaaagatgaagaagaatgtaatgagcccaaaggagatccggaaatggcacccatatacttgaaaaggttattgccagtgtttgcacaaacatttcagsaaactatgctgccttcaataaggtagttattcatactatttgatgtgttagtcaaattacaccaattatatggttttatttatctcccttttccagaagt

SEQ ID NO: 184762 - DNA, 201 bp, Homo sapiens
ctggtagaaagaataaatgtttttaaaactgcctttagtgaaaatgaagatgatgaaaggtaaaatctcaaatttctttgaatttgatgtttgtaatgttyacacagttggtatacttcctctaaaataagtctagtgtaacatttatgcacacaaaagaaactcttaataagaaagtaacatgttatacatgtataataa

SEQ ID NO: 184763 - DNA, 201 bp, Homo sapiens
cacaatttgcctacaatactagtggaaatcactgcaactgtcctggatcaagaggtccgtttctttttcaaaactctttagcattaatttcctttagctartagtctgaaataaaatttttgttttaatttcagtaaatcatgttgtgcaaattactgcatttctctactcctggcaactaaacttatttttattttttat

SEQ ID NO: 184764 - DNA, 201 bp, Homo sapiens
tcctcatctcgggtgatctgcctgccttggcctcccaaagtgctgggattacaggcgtgatccaccacacccagcctggctttttgtttttctttttcctttctttctttcttttttttctttttttttttctttttttttgagacggggtgttgctgtgtcacccagactggagtgcatagtatgatcacagctcactgc

SEQ ID NO: 184765 - DNA, 201 bp, Homo sapiens
tcatgtaaccaccactataattgaaatgcagaacatttccatcactttgaaacatcatctagtgctgtccctttgaactcaaaccctttccccatcccaaygcctggcacttggtggcctgttttctgttgatatagttttgacttttctagaatgtcatgtaaatggaatcatatatacaatacgtagttttttgagtct

SEQ ID NO: 184766 - DNA, 201 bp, Homo sapiens
gatctgcctgccttggcctcccaaagtgctgggattacaggcgtgatccaccacacccagcctggctttttgtttttctttttcctttctttctttcttttttttctttttttttttctttttttttgagacggggtgttgctgtgtcacccagactggagtgcatagtatgatcacagctcactgcaaccttgaattcca

SEQ ID NO: 184767 - DNA, 201 bp, Homo sapiens
aaaggcagttcagtagaaaaaggatagttttttttgtgatgctgaaacaattggatatccatatgcagtaagtttaactttgatactatctcacactatakatatttttaaaaacccagatgaatcatagatctagttgtaaaacctaaaactataaaacttctagaagaaaacataggagaaattcattgtgaccttgcg

SEQ ID NO: 184768 - DNA, 201 bp, Homo sapiens
atctgcctgccttggcctcccaaagtgctgggattacaggcgtgatccaccacacccagcctggctttttgtttttctttttcctttctttctttcttttttttctttttttttttctttttttttgagacggggtgttgctgtgtcacccagactggagtgcatagtatgatcacagctcactgcaaccttgaattccat

SEQ ID NO: 184769 - DNA, 201 bp, Homo sapiens
tctgcctgccttggcctcccaaagtgctgggattacaggcgtgatccaccacacccagcctggctttttgtttttctttttcctttctttctttcttttttttctttttttttttctttttttttgagacggggtgttgctgtgtcacccagactggagtgcatagtatgatcacagctcactgcaaccttgaattccatg

SEQ ID NO: 184770 - DNA, 201 bp, Homo sapiens
gttttctccatgttggtcaggctggtctctaactcccaacctcaggtgatccgcctgcctcgacctcccaaagtgctgggattacatgcgtgagccaccaygccagcccttctctgttttcttaagtgaaagctggggtttgatttttgaaagctggggtttgaggcctgaagcatttaatgccataaatttttctttata

SEQ ID NO: 184771 - DNA, 201 bp, Homo sapiens
ctgcctgccttggcctcccaaagtgctgggattacaggcgtgatccaccacacccagcctggctttttgtttttctttttcctttctttctttcttttttttctttttttttttctttttttttgagacggggtgttgctgtgtcacccagactggagtgcatagtatgatcacagctcactgcaaccttgaattccatgg

SEQ ID NO: 184772 - DNA, 201 bp, Homo sapiens
ccaggctggaatgcagctcactgcagcctctacctcctgggctcgagtgatcctcctacctcagccctctaacccccatccggtagctgggactataggcrtacaccaccatgcccagctaattatttaaaatttttgtagagatgggatctcgctatgttgcccaggctggtcttgaactcctgggctcaagcaatccca

SEQ ID NO: 184773 - DNA, 201 bp, Homo sapiens
tgcctgccttggcctcccaaagtgctgggattacaggcgtgatccaccacacccagcctggctttttgtttttctttttcctttctttctttcttttttttctttttttttttctttttttttgagacggggtgttgctgtgtcacccagactggagtgcatagtatgatcacagctcactgcaaccttgaattccatggc

SEQ ID NO: 184774 - DNA, 201 bp, Homo sapiens
ctgccttggcctcccaaagtgctgggattacaggcgtgatccaccacacccagcctggctttttgtttttctttttcctttctttctttcttttttttctttttttttttctttttttttgagacggggtgttgctgtgtcacccagactggagtgcatagtatgatcacagctcactgcaaccttgaattccatggcaca

SEQ ID NO: 184775 - DNA, 201 bp, Homo sapiens
tgccttggcctcccaaagtgctgggattacaggcgtgatccaccacacccagcctggctttttgtttttctttttcctttctttctttcttttttttctttttttttttctttttttttgagacggggtgttgctgtgtcacccagactggagtgcatagtatgatcacagctcactgcaaccttgaattccatggcacag

SEQ ID NO: 184776 - DNA, 201 bp, Homo sapiens
gattacaggcgtgatccaccacacccagcctggctttttgtttttctttttcctttctttctttcttttttttctttttttttttctttttttttgagacrgggtgttgctgtgtcacccagactggagtgcatagtatgatcacagctcactgcaaccttgaattccatggcacagtgtatcctcttgcctcagcctctt

SEQ ID NO: 184777 - DNA, 201 bp, Homo sapiens; identical to SEQ ID NO: 32350

SEQ ID NO: 184778 - DNA, 201 bp, Homo sapiens
tggaagtggattcagttgtttgtgttgtgggaaagttgggggcaggtgggtagagtgaggtgggtgaccctgtgggaattgggccaggatgaagttgtgtrtggagggatgggggtatatttgtgagggattgggcatgtgtggtggagttcattaagggagctgaaggaattcttttcatttggcttctcattctggatg

SEQ ID NO: 184779 - DNA, 201 bp, Homo sapiens
atggcaaaactgcatctctacaaaaaaatttttaaaaactagctcggcgtgttggcatacacctgtggtcccagctacttgggaggctgaggtgggaggarggttgagcctagaaggttgaggctgcagtaagccatgattacaccactgcactccagcctgggcgacagagcaagaccctgtctggaaaaaaaaaaaaga

SEQ ID NO: 184780 - DNA, 201 bp, Homo sapiens
tatgtggcatgtcttctgatgaaaggaaagcattcttgcagtttaccactggttgttcaactctacccccaggtggactggctaacctgcatcccaggctyacggttgtacgcaaggtacaagctctctggctaatggggaatccaaatgaaatttagttactttacttttgaaagaaagaagtatttaaactcatggtct

SEQ ID NO: 184781 - DNA, 201 bp, Homo sapiens
ttattttctattattttgttaatattttgctgttaagaatttaataaccctagatgtaatatgatttctttcactacagatgtcctcctcgcactttcttrccagccctttgcaaaatttttcttgatgaaagtgctccagacaatgtattagaggtgacagcccgtgccataacatactacctggatgtatctgcggaat

SEQ ID NO: 184782 - DNA, 201 bp, Homo sapiens
tttgaaatgattttgcaagtgcatcctgtgtttttatgatttgctgactttgttgcagaatagatggaccccatacactgtcagtattttttagttcttasaatttgtaagttcaagacagtctttgagggatttttatttttatttttgagatggagtttcgctcttattgtccaggctggaatgcaatggcacaatctc

SEQ ID NO: 184783 - DNA, 201 bp, Homo sapiens
aatgtacccgaaggattgttggggtagatggagctataaaagcactttgtaatcgtttggttgtagttgaacttaacaacaggactagcagagacttagcygaacagtgtgtaaaggtaagtattacttattggctcattacttatttttctcagacctctcagggatgagtattggctcatttaaacatcacttagagac

SEQ ID NO: 184784 - DNA, 201 bp, Homo sapiens
gagatagtcttgctctgtctcccaggctggagtgcagtggtgcagtctcagctcactgcaacctctgcctcctgggttcaagcggttctcctgccttagcytcctgagtaggtgggactacaggcgcgtgccaccatgcgcggctaattttttgtatttttagtagagatggggtttcaccatgttggccaggctggtctc

SEQ ID NO: 184785 - DNA, 201 bp, Homo sapiens
aaaatttttttttagttttgtgtatgcaggttataaaaaatttttttagtcagccacaaattctttaaaaagtaaaggtttttttaaaggagcaaattacmaattatttcaaattttaaaaaccaacatgtgttttgtatttgtgcaatttttaaggcaaagtcccatttaaaggtgggaaatttttactgtattttctac

SEQ ID NO: 184786 - DNA, 201 bp, Homo sapiens
gtatagatttactgtagtaatcagcatattgcaggtgctcaaatggtagctgctattattgtcatctttacactacaacaacattttcaataacaggttcrtagctttctagcctgtgaaggatggtctcttcaagcctgaattctatttgtttgaattggttagtttttagagagaatgatgcttctaagggtgactaat

SEQ ID NO: 184787 - DNA, 201 bp, Homo sapiens
aacttggtaattggcagtatataggaggcgatgtcattgattgccagatcataaattaaacagtacctctctttaaagaaattgggaggcagagtttgatrgagaaggtgacatgttaagatggaatatacttaatttgagatgatgataaataaccaagtacaattaattcataagtttttcaagttacgataggctgct

SEQ ID NO: 184788 - DNA, 201 bp, Homo sapiens
attaatcataaatcattaatgttatgagtcaaatcaatagcgtacatttaaatgtttcgtttttaacttgttctcttgactactttttttcctttgatttsttgattcttgtaatgaactgttgagttaatatgaaagttagtttattttttctacaggtctctgttatataaaaaatctttcccatcttgaatttctttt

SEQ ID NO: 184789 - DNA, 201 bp, Homo sapiens
gctcactgcaacctccacctcccaggttcaagcaattctcctgccttagcctcctgagtagctgggattacaggtgcttgccactatacccggctaattattttgtatttttagtagagacgggatttcatcatgttggccaggctggtcttgaactcctgacctcaggtgatccacctgcctcagcctcccaaagtgcaa

SEQ ID NO: 184790 - DNA, 201 bp, Homo sapiens
ggtaaaatctcaaatttctttgaatttgatgtttgtaatgttcacacagttggtatacttcctctaaaataagtctagtgtaacatttatgcacacaaaakaaactcttaataagaaagtaacatgttatacatgtataataagaggaaaatttttgaagttttttttaatctaatggaataaaaagaaacattgaaatta

SEQ ID NO: 184791 - DNA, 201 bp, Homo sapiens
aatatagttaaagaatatcagaatactctctatccaaattcactagttattaacattttgccccatttcctttaacattttttcagacacatgtatctgtktgtgtgtgtgtgtgtgtgtgtgtgtgtgtgtgtactttttttttgagatggagtttcgctcttgttgtccaggctggagtgcaatgttgtgatctcagct

SEQ ID NO: 184792 - DNA, 201 bp, Homo sapiens
ctaatcagcttatatactcttgtgcaaaactggttttcatttggtatgatatctgtacgttaaacctggcggataaggaaagttgaaaaactgcattaagyactcttacgtccaaacgtacttaggagtcttttttaattgctaggaggacactatgaaaatttggttctagcagatgtaaaggaagaaaaatttaagccc

SEQ ID NO: 184793 - DNA, 201 bp, Homo sapiens
tgtgtctgtttaccctgttggttatgataacttggatcacttgcttaagtttttctcttccaggtttctctactgtaaagttgtaaagttgctcttttcctttttttttttttttgagacggtatcttgctctgttgctgaggctggagtgcaatggcatgatctcggctcaccgccccctccaccttctgggttaaagcg

SEQ ID NO: 184794 - DNA, 201 bp, Homo sapiens
gtggttcccagcaagatttatttctaatatttagtgaatgcttactgtgtgttaataacagggtagtaatatttttgaaaaaaatggtggtatatgagttaataattgtagaatcccgagggtggtgaaagagagagtgtgtatgtgttacccaaatctgtttaatcgtcagaattactgggggatttaaggaaaaacaaa

SEQ ID NO: 184795 - DNA, 201 bp, Homo sapiens
aagcatggaaccgttgaataatctgactataaatcacctacctcaagagttttttggaatatctaatatgtcgtattaaccaaccaaatctagactacagratactgaaatttcataacacaaactaaaaaaaatcagtgaggacattgtctcaatcctgtattctcattaaaaaaaaaaaaattatggagggtgtggagt

SEQ ID NO: 184796 - DNA, 201 bp, Homo sapiens
tttatgtcagtggttagagtcagattgcccaagtcttcactattcctatcaatcacatggtttcatagcctcttttccttccctcctcctccccatacagwtatatatatatatatatctgtatataatatgtaacttcctatttacattctcattcattcaattattcttttctttagtagctgggatctagatgcaaac

SEQ ID NO: 184797 - DNA, 201 bp, Homo sapiens
caagatccaaagagaggaaggccaggaatgtgctctctggtaattttgctgtctaaaactaccgaaatgcacatataaatctttaattgtttttataggaattagttaagatttatacagaaatgaatctacctaaaattgctagtcctgtgcttgttgcttactaaaatgtattggattaaaaactattttgcatctttt

SEQ ID NO: 184798 - DNA, 201 bp, Homo sapiens
aagatccaaagagaggaaggccaggaatgtgctctctggtaattttgctgtctaaaactaccgaaatgcacatataaatctttaattgtttttataggaattagttaagatttatacagaaatgaatctacctaaaattgctagtcctgtgcttgttgcttactaaaatgtattggattaaaaactattttgcatctttta

SEQ ID NO: 184799 - DNA, 201 bp, Homo sapiens
agatccaaagagaggaaggccaggaatgtgctctctggtaattttgctgtctaaaactaccgaaatgcacatataaatctttaattgtttttataggaattagttaagatttatacagaaatgaatctacctaaaattgctagtcctgtgcttgttgcttactaaaatgtattggattaaaaactattttgcatcttttaa

SEQ ID NO: 184800 - DNA, 201 bp, Homo sapiens
atataaggtatatattggcatcaaaacactattttgattgcaaatggcttcgtgctttgttttgcagctttggaagcttcttaaggaacagcagttcattsagacataattttaaaaatgaggttgaattaacactgttaatgcacaaattctaaaatttcaaatatggctggtagcattggatctgaatgcagactttga

SEQ ID NO: 184801 - DNA, 201 bp, Homo sapiens
ctgtaagaagccttgtttcatttctatagcagttttaaagcaagtcagtttatatttttattaattttattaattaattttatagatggtgatgaacagcytcagtttacttttccaccagatgaattcactagcaaaaaaattacaacaaaaatattacagcagattgaggtaataaaatcagacagctgaactcttcat

SEQ ID NO: 184802 - DNA, 201 bp, Homo sapiens; identical to SEQ ID NO: 32358

SEQ ID NO: 184803 - DNA, 201 bp, Homo sapiens
actggcaaaagaggcagaaaactgaaatctaagttagaaaaaacaaagcaaaaggtatatctgttggatgtgctttattcttgtcttttatactgatttgktaaattttcagtggtaaagtataagcactgaaaaaaattgagccatagaacataagcagccctaatataatatatttttagtttttctattttctgtgtt

SEQ ID NO: 184804 - DNA, 201 bp, Homo sapiens
tttgatggagaaggtgacatgttaagatggaatatacttaatttgagatgatgataaataaccaagtacaattaattcataagtttttcaagttacgatargctgctttgtattgttttttgagatggagtttcactcttgtagaccaggctggagtgcaatggttcaagcgatcttggctcactgtaacctctgcctcct

SEQ ID NO: 184805 - DNA, 201 bp, Homo sapiens
ataatttttggaacgaagtggagtatccaaaattatcttcttaatttgttattgagcacattgaagttactagtgctctttagtattcttataagcatcaytgaaacaatgttctaatttcagtgtatttgttaattagagataattattatttgaagttggatatatcttaaggtttttttccttgaaagcaaaagtttc

SEQ ID NO: 184806 - DNA, 201 bp, Homo sapiens
gcttttgatcctagacctggtcgtactaatgtccagcagacaactgatctagaaataccacccccaggtacagaatgttttggttttgtgatttaattttratacatactaaatcagatatgaaaagtagggtgttgcttttgtatgcacgttattaaaaatttttttttagttttgtgtatgcaggttataaaaaatttt

SEQ ID NO: 184807 - DNA, 201 bp, Homo sapiens
tctacagtgtatccatagcttgctatttcttttcatcttttgctagtcagtactctgatccaaactaccaaagggtttgaccactgcagtagcctccttarttaatcattctgctttttctctcttgctcctttacaatgtttgtacatattaggctgaattatatatgtagatgtgtgcgtgtatatatatttttaatta

SEQ ID NO: 184808 - DNA, 201 bp, Homo sapiens
atccaaagagaggaaggccaggaatgtgctctctggtaattttgctgtctaaaactaccgaaatgcacatataaatctttaattgtttttataggaattagttaagatttatacagaaatgaatctacctaaaattgctagtcctgtgcttgttgcttactaaaatgtattggattaaaaactattttgcatcttttaaag

SEQ ID NO: 184809 - DNA, 201 bp, Homo sapiens
tgaactcataacttttctgaagttggctaatgaaaaagttttcagtgacacttttgttaataggggttaatatattcaggtcatggctgaaagggggcatrtatgggtcaaataattagacatgtatctcttgggattgttttattttagattctgagacgcccatccctgcaacgtcgagctggctcccgctctgatgta

SEQ ID NO: 184810 - DNA, 201 bp, Homo sapiens
aataaactaaagaaatactctgtgattattaatagtgaggtgctttggttgtgggactttttatttttctttatatttttaaatgagcatttgttttttgtttttgttgttgttgttgttttgttttgagacagagtcttgctctgttgccaggctggagtgcagtggcacaatctcggctcactgcaacctccgcctccc

SEQ ID NO: 184811 - DNA, 201 bp, Homo sapiens
ataaactaaagaaatactctgtgattattaatagtgaggtgctttggttgtgggactttttatttttctttatatttttaaatgagcatttgttttttgtttttgttgttgttgttgttttgttttgagacagagtcttgctctgttgccaggctggagtgcagtggcacaatctcggctcactgcaacctccgcctccca

SEQ ID NO: 184812 - DNA, 201 bp, Homo sapiens
actaaagaaatactctgtgattattaatagtgaggtgctttggttgtgggactttttatttttctttatatttttaaatgagcatttgttttttgtttttgttgttgttgttgttttgttttgagacagagtcttgctctgttgccaggctggagtgcagtggcacaatctcggctcactgcaacctccgcctcccaggtt

SEQ ID NO: 184813 - DNA, 201 bp, Homo sapiens
caaaacacacaaaaattagctgagtatggtggcgcatacctgtagtcctggctactcgagaggctgaggtgggaggattgtttgagcctgggcggtcgagrctgcagtgagctgagattgtgctgctgcactccagtctagatgacaaagtgagatgctgtctcaaaaaaaaaaagtatttccttactagtaaaaagcaaa

SEQ ID NO: 184814 - DNA, 201 bp, Homo sapiens
tattttaatttcttatgtttttctttatcttgttagtctcacaccataatttttatggtatcataaatcatatagaagaaaaaggattaacatttttactrttttttaataatgcatggaacaagaaacattgtctctttatctgttagtagattattattatttcaaagtgtttcttagcctacctgctttttggggagg

SEQ ID NO: 184815 - DNA, 201 bp, Homo sapiens
ttttgtatcagtttttggcattaaaaaaagtaaaaatgtttatattctcaacttacaccacatatatatatccacatatatgtgtgtgtatatatatgtattttttttttttttttgagacagagtctcgctcttgttgcccaggctggagtgcaatggcgcaatatcagctcactgcaacctctgcttcccaggttcaag

SEQ ID NO: 184816 - DNA, 201 bp, Homo sapiens
catcaagttatgcctttgagtctctatgtcagagagggttcttagctttcaaatacttaaaccaaccatttctaatgatggatagtcattactgactctatttttttttttttttggtttatcttttgggtgtagaaggagttgagagagtatgttttttgggccaattaatataatacaaaagttacttttatttgagat

SEQ ID NO: 184817 - DNA, 201 bp, Homo sapiens
tagagagcggtggtgtgatcatagctcatggcagcctcaaactcgtgagctcaagtgatcatctcgccttagcttcccaagtagctgggactacagatgcktaccaccatgcctggctaatatttccagtttctaatttagttttattgtttaaaatttatattttaataggtctttttttcctaagagaaaatacatgtc

SEQ ID NO: 184818 - DNA, 201 bp, Homo sapiens
tagtagtacattcagctgttaacgtatgctgcagctcatagatatttttctatttcagagcaatagtatggttacagaaccgacgtgaagccactgtggarcgaacgagaaccacaagcagtgttaggcgagatgaccctggagagtttcgagttggtcgtctcaagcatgaaagagtaaaagttccacgtggcgagtcac

SEQ ID NO: 184819 - DNA, 201 bp, Homo sapiens
aaggcaccagaatcttttgaacctgggaggcggaggttgcattgagccacgattgtgccatttgcattctagcctgggcaacagggcaagactctgtctcaaaaaaaaaaaaaaaaaagttagaactactgattgacttttaaattttgttgttaggtttgactagccttaaaaaaatttattgttggccgggcacagtgg

SEQ ID NO: 184820 - DNA, 201 bp, Homo sapiens
tagtcccacactttgacatttgtagtcctggctacttgggaggctgaggtaaaaaatcacttgggtccaggagttgcaggctgcagtgagctataattgcrtcactgcactccagcctgagccacagaatgacacaaacacacacacacgtacacacgtgtatgaacttagtgcagtggctcgtgctgccatgagctataa

SEQ ID NO: 184821 - DNA, 201 bp, Homo sapiens
tgagataataaaacccacctcataggttttgttgtgtgggttaaatgaattatgtttttaaagtacataaaaaggttactgctcatgatggctcagtataygagagagagatagataaataacatataaacattctaatacattgttaattgaaataagtcatgatataaaactaatagttaaattctggtatttacagtg

SEQ ID NO: 184822 - DNA, 201 bp, Homo sapiens
tccttctatcattcacctcaagggtaatgatatctgcagcttagtgcctagaacattgttagatacttagaaaatatttgttaaatgaattgattattggmtcttacataatagacaagccttttttttgtttgtttgtttttgtttaagacagagtctggctctgtcgtccaggctggagtgcagtggcacgatcttggc

SEQ ID NO: 184823 - DNA, 201 bp, Homo sapiens
tcgctctgtcacccaggctggagtgcagtggcgcgatctcggctcactgccagctccgcctcctgggttcacgccattctcctgcctcagcctccccagtrgctgggactgcagacgcctgccaccatgcctggctaattttttgtacttttaatagagacagggtttcaccatgctagccaggatggtctcgatctcctg

SEQ ID NO: 184824 - DNA, 201 bp, Homo sapiens
atcttgagaaggggagataatcctggatcatccaagtggacacagtgtaatcacaagaggcaggagacagagaagaacatgtgactaaggaaacaggagtyagagtgacgacgagcagtgagccaaggaatgtgggcagctcctagatgctagaaaaggcaaggaaacagattcttctctagagcctctagaaagaatgaa

SEQ ID NO: 184825 - DNA, 201 bp, Homo sapiens
ttgtatataaatgtaatagccaaagcaacctggaaaaggagcagcgtagaaggatatacatcaatttcaactcttttataaaactttggtaatcaagaaartgtgacaatagtgtaaagatagatgaatgacccactacacatatggccaattgattttcaacaaaagtgctaagaccaccaagaaaggatgatcttttca

SEQ ID NO: 184826 - DNA, 201 bp, Homo sapiens
tagaaagaatgaagccctgcaaatccattttaggcattcgacctctagaactatgagataataaatttgtggtagtttttttttttttttttttttttttycccttgagatggagtcttgttttgtcacccaggctggagtgcagtggcacagcctcggctcactgcaccctccgcctcccaggttcaaacaattctcctg

SEQ ID NO: 184827 - DNA, 201 bp, Homo sapiens
atatccactgataaggctgggaggatacaaaaagacaactgacagcaggccgggcgcggtggctcacacctgtaatcccagcactttgggaggctaaggcrggcggatcacttgaggtcaggagtttgagaccagcctggccaacacggtgaaacctcgtttctactaaaaatacaaaaattacctgggcgtggtggcaga

SEQ ID NO: 184828 - DNA, 201 bp, Homo sapiens
gcaacatggtgaggtgagacccagtctctatttttttttttttttgagatggagtctcgctctgtcgtgatctcagctcactgctagctctgcctcccggrttcaagccattctcctacctcagcctcccgagtagctgggactacaggcgcccgccacaatgcccggctaattttttgtatttttagcagagacagggtt

SEQ ID NO: 184829 - DNA, 201 bp, Homo sapiens
gtttagaaatgttactgtggacattgttggttttatttcatatacacagtattccctatatgaggaagagtggaaatacgtctcctgtcacaggggtgaakccaactggtttgtttttaacttttggatcataaactaattgcaagaaatatgatacatctctagaagatgtccaaggctttacatctttcactttatata

SEQ ID NO: 184830 - DNA, 201 bp, Homo sapiens
tgggaggccgaggcaggaaaatcgcctgaacccgggaggcagaggttgcagtgagctgagatcgtgccactgcactccatcctgggcgacaagagtgaaaytgtctcaaaaaataaaaattaaaaagtggaagagtctaggctttggtgtcacacagagacacacaaaagtctgttcaccatcatttcttcaagcaaatga

SEQ ID NO: 184831 - DNA, 201 bp, Homo sapiens
agtgttgtttggaggagcaaagttataagcctacctaagcatatcataaagctgttcaaaaataactcagactcagtcttgtggatggaaatgtagcgctygagtcacattctgcttaaagttacaacaaatacagatgagttaaaaggaaaaaagtttaggaagtttatgtgaaaatttgataaatatttgctaataacc

SEQ ID NO: 184832 - DNA, 201 bp, Homo sapiens
acagagcaagactcattgtaggtgctcaataaatattttgttgaatgattgtttaccttaagtactcttccaaaatagttgtaaaaaaaaagttataattyaaactgtttgttttcttccctgatagttacatttttgtaccatttaatgccatttacaaagcatttatatacatagaactataggcatgttgtgataact

SEQ ID NO: 184833 - DNA, 201 bp, Homo sapiens
agcactttgggaggctgaagcaggaggatcgcttgagcccaggagttccaagaccagcctgggcaacatggcaagaccccatctctacaaaacattttttwaaaaattagctagatgtggtggcacgtgcctgtggtcccagctacctgcaaggctgaagtgggagaatagtttgagcctgggaggctgaggctgcagtga

SEQ ID NO: 184834 - DNA, 201 bp, Homo sapiens
tctgcattctactgcatggaatagtttcttttgaataatagcctttaatgagtgattgaggatctatatatgccaaagcaatgcaaagctaacaaaacttsccatacctctgagaacccaatactgttatcagtgccactagactcccaaactagagtacttatttagggagttttacagtgcagtagttgcacctgatat

SEQ ID NO: 184835 - DNA, 201 bp, Homo sapiens
ccactgataaggctgggaggatacaaaaagacaactgacagcaggccgggcgcggtggctcacacctgtaatcccagcactttgggaggctaaggcgggcrgatcacttgaggtcaggagtttgagaccagcctggccaacacggtgaaacctcgtttctactaaaaatacaaaaattacctgggcgtggtggcagacgcc

SEQ ID NO: 184836 - DNA, 201 bp, Homo sapiens
gtgtttgcagctcaaaaataaagatgtattaaggggggaaaacctggtctaagtgcaaggcacacttacagcgagttttactttcggttgtattttctttktatattataaacatttatttaacttgttgccgtttgaagtaaaaaatttccaaaatgtatgctcaacaataatcattaaaatgtttgcagcgtacagaac

SEQ ID NO: 184837 - DNA, 201 bp, Homo sapiens
ggccaaggtgggtgtatcgttagaggctaggagttcgagaccagcctggccaatatggcgaaacccagtctctactaaaaatacaaaaattagctgggcayggtggcacatgcctataatcccagctacttgggtggctagggcaggagaatcgcttgaacccaggaggcagaggctgcagtgagccgagatcgtaccact

SEQ ID NO: 184838 - DNA, 201 bp, Homo sapiens
gtgatattcttaatttaacaaaagaacaacctcaggccaaagcaggcaatggacagaactcttgtggagtagaagatgtccttcagcttctgcgtattctrtatatagttgcaagtgacccttattcaagaatatcccaggaaggtctgtaagaagccttgtttcatttctatagcagttttaaagcaagtcagtttatat

SEQ ID NO: 184839 - DNA, 201 bp, Homo sapiens
agttattcagtgtgataaaaggttgacacgtcattggcccagaatatgtggttttctctgagtatggatacttttagttttctcatttataaaaaaaattkttttttgagatggagtctcgttctgtcacccaggctggagtgcagtggtgtgatctcggctcactgcaacctccactcccaggttcaagtgattctcctg

SEQ ID NO: 184840 - DNA, 201 bp, Homo sapiens
acaaagtggcaccccttcgatattctcccctatccctgtgcataattatgtaattatcagcttggttcttggtgaaacctgaataaatgcttgttgaatgrgtaaaacttctataaagtttgaaatttctgttttattacctgaaggagatcttataaattctaaggttttctcaagattgataggaactgatgtgaatga

SEQ ID NO: 184841 - DNA, 201 bp, Homo sapiens
tctggattcgaactttatggcactgtaaatggagtatgtgaagatcagctaggtaaagagatgatacgaggcttttctaacttactaaaacaattactttkgtaaaaagtgatttggtttttatttctccaatttctacctgacagggaaagcagctaaagaagcagaagctaatcttagacggcagagacgtctagtacg

SEQ ID NO: 184842 - DNA, 201 bp, Homo sapiens
aacatagacccccatctttaccacccctacatccccaaaattagccaggtgtgatgtcatgctactgagaaggctgaggtgagagggttacttgagccctgaagttcaaggccccagtgagctgtgatcatgccactgcactccaacctcagtgacagggctagaccctatctctgaaaaaatatttttttttaaattgca

SEQ ID NO: 184843 - DNA, 201 bp, Homo sapiens
tgctgcacagtttagcaaagtcatccacttaataaattgctattaactttaaagcaattatagtggctaattattttcttcaaactataaggctgacttaytagcagataatttgcctaaatggcagtgggtttgttttcatcaattttgtatcagtttttggcattaaaaaaagtaaaaatgtttatattctcaacttac

SEQ ID NO: 184844 - DNA, 201 bp, Homo sapiens
ggtttttgtccatactcttcctgttgcaaaaatgatttaaagtgtctttaactcagaaataagcagaagaggcgaggcgcagtggctcatgcctgtaatcscagcactttgggaggctgaggtgggtggatcacctgaggtcaagagtttgagaccagccggaccaacatagtaaaaccctgtctctactgaaaatacaga

SEQ ID NO: 184845 - DNA, 201 bp, Homo sapiens
tacagcaacaacagttttatcagttggtcaatctttaagtaacactttaaccaccagcctcacatcaacttccagtgagagtgacacaggtcaggaagcakaatattccttatatggtaagttgtaatttaaaatgaaagtatttagatactttcataatgatgcttttattatgttttctcctgatattttaaacttttg

SEQ ID NO: 184846 - DNA, 201 bp, Homo sapiens
agtagtttagagagatacgtttttttctgttgcattagagttatgctgggtttgtttgggattaaaatggcattaggtgaatcctaaatttacattacttragcatatatttttaaataatatcatgtactaaatttcatcagacccagaacatacataggttgtttcctcaaataactgtaacttcgagagctcatttgt

SEQ ID NO: 184847 - DNA, 201 bp, Homo sapiens
atgaagaaatgtatgtatctatacatgtttaggttagctcattttgggtttaagaaatatggctaaggaaatgcagtagttctaaataacacattgctttkgcaacaatgaaattttgcatcttattatgtttgtgtgtgaaattttattttgataggaagaagaagagtacgaaactaaaggaggacgccggagaacatg

SEQ ID NO: 184848 - DNA, 201 bp, Homo sapiens
atgcacaaccatgcccagctaattttatttttaatttttagtagagacgaggtttcaccatgttggccaggctggtcttgaactcctgactgacctcaagkgatctgcctgccttggcctcccaaagtgctaggattacaagcatgagccaccacaccagtattaattattaatactgttttataaagagatagtttcttc

SEQ ID NO: 184849 - DNA, 201 bp, Homo sapiens
aggaaacaggagtcagagtgacgacgagcagtgagccaaggaatgtgggcagctcctagatgctagaaaaggcaaggaaacagattcttctctagagcctytagaaagaatgaagccctgcaaatccattttaggcattcgacctctagaactatgagataataaatttgtggtagttttttttttttttttttttttttt

SEQ ID NO: 184850 - DNA, 201 bp, Homo sapiens
atatgtatgaatatttgaaattgaaattattttccatgtttaattgaataattctacacatttaggaagatgaaccacaggaagatgctaaagaattgcarcaaggtaaaccatatcattggagagactggtcaatcattaggggaagggactgcttatatatttggagtgatgcagcagccttggaattatctaatggca

SEQ ID NO: 184851 - DNA, 201 bp, Homo sapiens
ggggggaaaacctggtctaagtgcaaggcacacttacagcgagttttactttcggttgtattttctttgtatattataaacatttatttaacttgttgccrtttgaagtaaaaaatttccaaaatgtatgctcaacaataatcattaaaatgtttgcagcgtacagaactgtgtcatgtgactatttcaatgcagtcatca

SEQ ID NO: 184852 - DNA, 201 bp, Homo sapiens
atcctggtgatctatgaggattttctactctggctgtttggaatgcaaatgtctggctacttgtatgatctcttataactttccagttgttctttgcccartcttatgcagtatcaccccgtatataagtgtagtactcagtggaaactactttgcagatttctggagaggctttttctctttagttccgtaatagtgaac

SEQ ID NO: 184853 - DNA, 201 bp, Homo sapiens
cactccagcctgagccacagaatgacacaaacacacacacacgtacacacgtgtatgaacttagtgcagtggctcgtgctgccatgagctataattgcatyactgcactccaacctgagccacagaatgacacacacacacacacacacatgcgcgcacacacacgaacttagccagtgcagtggctcatgctgcagtgag

SEQ ID NO: 184854 - DNA, 201 bp, Homo sapiens
gtgtggaaggggtgagaggagggagctaccaaacagttacacaaagaaacttcccctactggttgggtttcatattctatatagaatccatgattgctgtkacataatgcatgcaggagtttaatgcttgaaacccctttacgttgctttgggtaatagtaaacatacattaaaatggttaatatatggtatctaagattt

SEQ ID NO: 184855 - DNA, 201 bp, Homo sapiens
ctttatgtatattaactaattctttccaacaaaacaacctttttagggttattgttagccctaattttcagatgaagtaattgctaaaagtcatacatgtwatagtagttttggttccaggatgcaaacccaaacattctgaaaccagagctgtcaaatgtcagtttgtttcagttaagtgtttaaaccaaactgtggatg

SEQ ID NO: 184856 - DNA, 201 bp, Homo sapiens
tacaatcttggctcactgcgtcctctgcctcctgggtttgagcgattctcctgtctcagcctcccaagtagttgggattacaggcatgtgccaccacaccygcctaatttttgtgtttttagtagggatggggtttcaccatgttggccatgctggtctcaaactcctgacctcctcccacctcggcctcccagagtgctg

SEQ ID NO: 184857 - DNA, 201 bp, Homo sapiens
ttgatgtttgtaatgttcacacagttggtatacttcctctaaaataagtctagtgtaacatttatgcacacaaaagaaactcttaataagaaagtaacatrttatacatgtataataagaggaaaatttttgaagttttttttaatctaatggaataaaaagaaacattgaaattacatgtctggtatgaatgcagctgat

SEQ ID NO: 184858 - DNA, 201 bp, Homo sapiens
ggttccaggatgcaaacccaaacattctgaaaccagagctgtcaaatgtcagtttgtttcagttaagtgtttaaaccaaactgtggatgtgcacgtgtgtwcttacatgctgtctgcctcatagtaatttaaagcaactccccagcattttatttggtatataagtaattcagtacaaaatgtaatttacgttttaaaaac

SEQ ID NO: 184859 - DNA, 201 bp, Homo sapiens
ccaacacttagcatagcacttggtgtagaaaggcattcaatagatgtgttgaatgaattgcagtcaaatttgtatgtgtattttaattggagaaaagcaarcttacatcttataattggactttaccccctttttctttgcaagggaaaaccacaattttcagctgctgtaccaggagttatttttagctcagcaatacca

SEQ ID NO: 184860 - DNA, 201 bp, Homo sapiens
aaacaagtattttgtctttatagaaagccgaagtgaattcttagagaagttacaaagagctcgaggccaagtaaagccatctacttcaagtcaacctataytgtcagcaccaggacccactaaacttactgtaggaaattggtcactgacatgtttgaaagaaggagaaattgctattcataattcagatggtcagcaagc

SEQ ID NO: 184861 - DNA, 201 bp, Homo sapiens
gagatggagtcttgttttgtcacccaggctggagtgcagtggcacagcctcggctcactgcaccctccgcctcccaggttcaaacaattctcctgcctccrcctcctgagtagctgagattacaggcatgcaccaccatgcccagctcatttttgtatttttagtagagacggggtttcaccacattggccaggctggtct

SEQ ID NO: 184862 - DNA, 201 bp, Homo sapiens
ttgtaaagaatattgggttttggccaggtaccttggctcatgcctgtaactccagcactttgggaggccgaggcggacaggtcgcttgagcccacgaattygagcctagcctaggtaacatggcaaaactctgtctctacaaagagtacaaaattgtcattgcatggtggcagaatagcttttactctagggaacttcacc

SEQ ID NO: 184863 - DNA, 201 bp, Homo sapiens
agaagcattgcatttattttggattataggaacagaaaagattttgtttttattctgttggcttacaggaacagataatagtgtttgggactcttggtgtrgaatgattaagttttagaagtagaaggacatttacagtctatactagcttcttacgtaattgttgaaaagagcgtcatttgaattctttgtctaagatcg

SEQ ID NO: 184864 - DNA, 201 bp, Homo sapiens
tggtctcgaactcgtgacctcaaagtgatccaccgcacctggcctctttatttatttattgtttaattaaaaaaatatttattttatttttgtagagatgygggtctcacaatgttgccaaggctaggttggtttttggcctcaagttatcctcctgccttggccttccaaagtgctgagattacaggtgtgagccactgt

SEQ ID NO: 184865 - DNA, 201 bp, Homo sapiens
cttggtgtagaatgattaagttttagaagtagaaggacatttacagtctatactagcttcttacgtaattgttgaaaagagcgtcatttgaattctttgtytaagatcgtgtatgagtactaactatcttctttctgttcttgattttgggggtgtgtgggttaacacctgcctttctttgtacaaataatcatcaatgac

SEQ ID NO: 184866 - DNA, 201 bp, Homo sapiens
aacaaaaatattatccgagtttattttctggaactctctctctcaagaaataggttacagcaatcccaaccaagatcccagcagtctttttgtagaaattracaaggagattctaggctgagtgcagtggctcatgcctgtaatcccagcactttgggaggccgaggcagggagatcacctgagatcagaagttcgaaacc

SEQ ID NO: 184867 - DNA, 201 bp, Homo sapiens
cactcctgatcattgttatttctatccttctttccatctagacacagagaacctgtttcttatcccattgtatttttacaacagttatagccatgtgctaygtaacaacttttcagtcagtgatggaccatgtatgacaggggtcccataagattataaaaccacatttttactgtaccttttttatgtttagatacacaa

SEQ ID NO: 184868 - DNA, 201 bp, Homo sapiens
agctggggaaagagggccctaggttggcctacattcgttcggatccgtaacctgctggtccattgcatttacttttagcctttccttttttaatttttttatttttttaacttttaagaatagttgccaagactgccaaaattcctaaccaactctttattcatagataaatcttgtatataattgtcgtttgtatttgga

SEQ ID NO: 184869 - DNA, 201 bp, Homo sapiens
aacccgggaggcagaggttgcagtgagccaagatcacaccactgcactccagcctaggtgacagagtgagactctgtctcgaacaaaaaaagacacctgtwttaaatatgaaagtaagtatactcggttgtataaatgttctttggggaggatagatagactgaatcaaggtgttctaaggtcccttcaaaaaggaaaatc

SEQ ID NO: 184870 - DNA, 201 bp, Homo sapiens
ctaaggtcccttcaaaaaggaaaatcttgtttctttggatctcagagaaaaaaaatgaattataaaaaaggaaaacacattctagagagtataaataggcrcaaactttttgtagagctctctgccagtatattttgtatcttctgacaaagtgttgttgccattggtaattttaaatattagctctgtaccccgttttgt

SEQ ID NO: 184871 - DNA, 201 bp, Homo sapiens
gtttctttggatctcagagaaaaaaaatgaattataaaaaaggaaaacacattctagagagtataaataggcacaaactttttgtagagctctctgccagyatattttgtatcttctgacaaagtgttgttgccattggtaattttaaatattagctctgtaccccgttttgtacacataggtgactgtagaagtatttat

SEQ ID NO: 184872 - DNA, 201 bp, Homo sapiens
gcaatgcttctgccttagccttctgagtagctgggactacaggcgcacaccaccatgcccagccaatttttgtattttttagtagagacagggtttcaccrtataggccaggctggtctcgaactcctgacctcgtgatcctcccgcctcggcctcccaaagtgctgggattacaggtgtgagccactgcgcccgacctgt

SEQ ID NO: 184873 - DNA, 201 bp, Homo sapiens
ccaatttcagatcaaccatcttttactatgtacaaaaattgcttcaattgtcctgtaatggcaatgtgaaatcagataaacttaggcgtatttgggagccmacatacacgtaagaaattttaacttaatgttttggtagataatgtcctagtgtagagccaagaagcattgcatttattttggattataggaacagaaaag

SEQ ID NO: 184874 - DNA, 201 bp, Homo sapiens
aatttcagatcaaccatcttttactatgtacaaaaattgcttcaattgtcctgtaatggcaatgtgaaatcagataaacttaggcgtatttgggagcccamatacacgtaagaaattttaacttaatgttttggtagataatgtcctagtgtagagccaagaagcattgcatttattttggattataggaacagaaaagat

SEQ ID NO: 184875 - DNA, 201 bp, Homo sapiens
ttaatgttttggtagataatgtcctagtgtagagccaagaagcattgcatttattttggattataggaacagaaaagattttgtttttattctgttggctwacaggaacagataatagtgtttgggactcttggtgtagaatgattaagttttagaagtagaaggacatttacagtctatactagcttcttacgtaattgt

SEQ ID NO: 184876 - DNA, 201 bp, Homo sapiens
atttgaacataagcactcctgatcattgttatttctatccttctttccatctagacacagagaacctgtttcttatcccattgtatttttacaacagttayagccatgtgctacgtaacaacttttcagtcagtgatggaccatgtatgacaggggtcccataagattataaaaccacatttttactgtaccttttttatg

SEQ ID NO: 184877 - DNA, 201 bp, Homo sapiens
aacatagggaagcaaaactaagatgaaaaataaataagtttaaacactgaactgtaaaaactatgtatgaatatattctagtttttaaagggtcaaattayataaaatcagcctattttcttcctgcaggtaaaagaaatgcccaaaatatcactggcttaaaaatcaacatgaaagaagttccctggctgactatcccag

SEQ ID NO: 184878 - DNA, 201 bp, Homo sapiens
ccctaaatattttcacattgctttgcccacagtcattttccaaaaatgttctccaagaaagatgtctctctctctctctcaacttacttgctctgcttgtkctttgcaatttggtagtaataagtgcttttatataaccttcaattccagcattcaaggaatagattcttggctatatactgcctgaaaaaaaaaagtctc

SEQ ID NO: 184879 - DNA, 201 bp, Homo sapiens
tttgatcaatgggagaaaagcaatgtgatacaaacagagcattggagggctggcacaatggcttgccatctatcttgctgtgccaggaaccctggatcacyatgtgaatgagtcctaatttgctcgctgaagagtgaggagccatgcagaagataacagaagtgctgctactgagtcacaacagcaacttggcaatgaaat

SEQ ID NO: 184880 - DNA, 201 bp, Homo sapiens
tctttccaaatacatttcaagtaaactggtaaactgattttgtgaaatagcatttattcttcccagaaagaaactaggttgattgagaagaaaaaaataarctaagaatgcctgtacttttgctttctctctgtaccttctctaccaaaagcaccagggaagatttatcagaaaagaatggccttcttcaggagtcatcac

SEQ ID NO: 184881 - DNA, 201 bp, Homo sapiens
agtgaacattttaattttcactttttaacctaatcctttttctgtatttggaggactgaatattaaagacccatttaaaaatatttagtttttcagaaacrtcactaatctatacaactatttgcaataactacaggggaccggttgcactatttcctgtgtcaacagaagatctgaccttgttttccgatagcttagaga

SEQ ID NO: 184882 - DNA, 201 bp, Homo sapiens
aaccaggcagggagtgacatatgtcagagaatttaggaagcctcctggtgtctccgcctccaagtacatgcgccatttcttccaccaagggttctgatttwttatttccatttcgttttctccctctattctcctcaatgactagaataaataggtttagatcatgggcttcctacactaaaaatttagggcaggttcaag

SEQ ID NO: 184883 - DNA, 201 bp, Homo sapiens
tacttcctcttaaaagactgtatttttattggaaatatcaccagttccaagtcaattgcctatacatggacactgtcattgatttattctctttttcatarggtttataagccttttcttcatttatttttaatcagagcataaagatgctctcagtgtcttttaatgaattcaccttttcattgttagcaagtggaagaa

SEQ ID NO: 184884 - DNA, 201 bp, Homo sapiens
acaaaaatgcacgtctaacaaacattgtgttacttgtttgttttaatatcactaagaatgagccacattttacaatatcataacagaaaagaaaatataamaatgtactattttatatgaaaatggctcttaataagactgtttagctaatacttaaaatttaaaaataaattgataagaatatatctgtagatttttgtt

SEQ ID NO: 184885 - DNA, 201 bp, Homo sapiens
gagtaattaattttaattgtacacaaattcttcatgaagttagaaaaaagcaagacactattcaatccattttataaagaaagcacaactttgataacaamacctgacaaagttattccaataaaaggcaattataggccaatctttcacatgattgtagattcaaaaggtaaataaattagcaaacggagaactgcataa

SEQ ID NO: 184886 - DNA, 201 bp, Homo sapiens
ataccagcagttaagtttattttaccagacccaataccataaaatatttctgatgagcagatatgaaaaatgctaaattaaaaattaaaatcaaattaaaygggtgctggttaccacacataaaccttacatgctgattttaacttaacttttaagtgccaattgctataactcatattagaactaaattgaattttatta

SEQ ID NO: 184887 - DNA, 201 bp, Homo sapiens
tatataggagaatatatccacaagtttgggtagaaaaggatttattaaacacagcataaaatgcattaacacaaaagaaaagattgataatttgactgcartaatacttcatagttaaaaagataccataaagagagtgaaaagacaagccacagtagaagatatttataatacatatacctaacaaaaaatcatcaataa

SEQ ID NO: 184888 - DNA, 201 bp, Homo sapiens
gagacctctacatgaaaaactataaaactatttttgagtaaaataaaggaagattcaataaatgaagatatagcatgttcattgattgagagacttaatastgtaaagatataagttctcctcaaattgatctatagattcagtcagtgaattcccaattaaaaatcccaggttgtgtgtatgtgtgtgtgcacaagtaaa

SEQ ID NO: 184889 - DNA, 201 bp, Homo sapiens
aatagattagacaaaaatgcacgtctaacaaacattgtgttacttgtttgttttaatatcactaagaatgagccacattttacaatatcataacagaaaakaaaatataacaatgtactattttatatgaaaatggctcttaataagactgtttagctaatacttaaaatttaaaaataaattgataagaatatatctgta

SEQ ID NO: 184890 - DNA, 201 bp, Homo sapiens
tttatttcactcatgccagatgctcccatttaaaaattaaatctatattttaatatcttatttataatatctttattccactaggcttttctcattccttyacttcctttgaattccctgatttcaaatatttttaattatattgctaaaagatttgtaaaatagattagacaaaaatgcacgtctaacaaacattgtgtt

SEQ ID NO: 184891 - DNA, 201 bp, Homo sapiens
acaaaaatgtatttgtttatttctttttctgttctcatttccagtatctgtcaaaactacctttgtaaatgttaatgataaaaataagactatatcttcasaacattgatataagtttcaaaaacaatggaggaatatgtcccaaacacttattgactcccagaatacttcccatcacatgtattgtttctactacgtagc

SEQ ID NO: 184892 - DNA, 201 bp, Homo sapiens
gggactatcagaatgcttgtaccctgttgttgggattgcaaattggttcagtcaatcattctgataaatgatctctgaaaactaacgtatgcatatcttaraatacagaaatttcccccattaggtacatacccactagatgaatgtacataccaagagacagaaatgtttgtagaagcattgtcataatagtctaaactg

SEQ ID NO: 184893 - DNA, 201 bp, Homo sapiens
tttagtttcatcctatatgcatatccagtggattttgaacacttaccattcagacgtgcaaacatgtattcttatgaccacatgtattttttttaacttcytgcctgtgtacagctgacatactctgggaaactcaatctgtctattattacttgtttaatctcatgtaagaatgaaagtcttagccactgtccaatttaa

SEQ ID NO: 184894 - DNA, 201 bp, Homo sapiens
cagggtttcaccatgttagccaggatggtctcgatctcctgacctcctgatccacccaccttggcctcccaaaatgctgggattacaggcgtgagccaccrcgcccagccagcacctgcttgttctatcatttaaatttagatttaaaaatattttctcaaaatcacccttcaattttttagtgtctcttaggaaacagct

SEQ ID NO: 184895 - DNA, 201 bp, Homo sapiens
ccactactaaagtgatattgaatgttttttctttttttgtatgtgatttcattttcagccattcttttgggaattactctagctcttcagaattaattggrtaacttttatgaaatgtcttaatcatttggcctactctttcctgaaattaagaaaacaggcaggagataacattattaatttgtttgtaaacaaataaca

SEQ ID NO: 184896 - DNA, 201 bp, Homo sapiens
aatgatgaatattgaaggattaaacaatatggctgattctatctcttgccgtggcctttggaaacagtgaggaaaaaataactataatgttctgtgccgaytttgtgtcatgaatacagttctaatagttttatatccatgagttcttttaattttctcaaacacctgatgaagtcagtaattattatctggtgaactgag

SEQ ID NO: 184897 - DNA, 201 bp, Homo sapiens
ctgccaattaaatatcacctgcaaatttagaaaattgctcctacagccattcactaagtcatttgcatctacataatttatttcctttcacagatctctcrttatccttttccttcattagtgttaaaatccttccttatcaacaacaaatatttttggccatgttttcctcttgtacttatatacaaacaggttgtatga

SEQ ID NO: 184898 - DNA, 201 bp, Homo sapiens
ggtaattggttctaggaaattttttatattaaaacagtgtgaaattttgctgtttaaactgtactatttacattataacaagaccatattagtatacgtaycatggatctacaattattaactgaatggtattaaacttaataacgctatatgaaaatgaacttgcagaaaaatattgctttcaaactcatatatgtattt

SEQ ID NO: 184899 - DNA, 201 bp, Homo sapiens
cttcttcaattttctaagaggccatctgaaggctgcttatgggcaaagaatacaggagcaatcgctgactgaaatgcccaaactgcaaatacacatttcartcaaatgcaaatcaaggataaaagaactagaattgagtgaatttttatcttcattatagtaaaattttcaatcattgtagaattcacttaatgtagctat

SEQ ID NO: 184900 - DNA, 201 bp, Homo sapiens
ctctatcaatttctacccttactcttctttacattcgcattcttggtccttctctttctagttctccatataccccatgatctactatttcaatcaatatstacatcaaaatgatctacaatcatttgtcttgttatccctttttttacatatgtcaattatctgccgctgagtctaattcattgttttatttatttagta

SEQ ID NO: 184901 - DNA, 201 bp, Homo sapiens
tttttaatactgccttatgctaaatttaaggtcaaataaaattttaaaaatatttttaaaataaacactatcaaactagtagcccacaaagtcttatgcarttgaagcaaatgttagattttatatttgtctctttaatttcattctttggttcttttgtatttttcacatctactgtaatctatacttctcattcattat

SEQ ID NO: 184902 - DNA, 201 bp, Homo sapiens
attcacttgggttccagatgctcactgactaattgttcctagacaattccatgagaatgttcctcaggtaccacaaaatcaaaatgcctatagccaaattstgtgtccctgttgcccttttccaatctgcttttccttctgcatcccctatttttgttgtggagtgtccatctgctcattttcctctgctaaatttctcac

SEQ ID NO: 184903 - DNA, 201 bp, Homo sapiens
tcatttgtggataattttagtgttttatttgagactataatctaataaacaaaatattgcagctaacctccatgctttatttagttaagtatttagcatcyattcattaaatttatcaatatgaatttattaaatgcctaacatgtacaaggcacttaactataagcaaagagactacacagattaaatagtacactatct

SEQ ID NO: 184904 - DNA, 201 bp, Homo sapiens
cttgcctgccctgcatcaatactatgagaatatcaaaataaaaaatgaaatttcagcatcatcatcatcattttagctggaaaaagcccatatggtttcasactgccatcagtggcagtttgtgaacattgcttagtttagaaactagccttcctgtaatgtttatacttaatattgtgctattttagttgcagatctcga

SEQ ID NO: 184905 - DNA, 201 bp, Homo sapiens
agtataaagcccacttataaaagtttacaccaaatagtatgacattaagtatctattagggcaaatatattgtcatgggtggtaagatttcagatttgggrtttaatgtgctgacttgatacttgggcagggggtggtagtaattcattagattggctaattaaagaatgaaccaaaaatgcatgaaatttgaaaataacc

SEQ ID NO: 184906 - DNA, 201 bp, Homo sapiens
tgaaccttcttgttattggaagcaacctctcaccacttctgagggaatcagccttcttctgcacaaatgcttttcaataacttgacataggaaatttcacrgatctcttctggactcaccacgttactccttattgactccatgctacaaattaggtcccaaaataattgagtcaaagaagtataaagcccacttataaaa

SEQ ID NO: 184907 - DNA, 201 bp, Homo sapiens
ccataaaaatgagattctgagattggattgctcccatatctctgtagcacatattgatgggaaatggaactgtgacaatttacagcctgtggttacattayaattgtttaaataaccaccagagttggcatggaatgaagtgcaggtggaatgcaaggccatggcaataatagtgattttgaagattatggttccagctaa

SEQ ID NO: 184908 - DNA, 201 bp, Homo sapiens
tacaacaactcagtggggacattacagataaatttctttttggtttagtgagttttaagtcatttgtggataattttagtgttttatttgagactataatytaataaacaaaatattgcagctaacctccatgctttatttagttaagtatttagcatccattcattaaatttatcaatatgaatttattaaatgcctaac

SEQ ID NO: 184909 - DNA, 201 bp, Homo sapiens
agaatgtggttactgaaatactataattttctgttgattgctattcccctcccttttcttttctccccaatccccaatcatccgtctatctctcaaacatstgtatctattcaactatttattctgacagtacataatgggacagactcaaggcaaagatttccttttaagtatgactcttttttttcttccttttcacag

SEQ ID NO: 184910 - DNA, 201 bp, Homo sapiens
gtttaaacactcacaacatttttaatttgtaatctggaatggtgggattattttataaattataattagaaaaaaatgggagaaaactaataccttttttwaaaaaataaacattcctttttcaagagttggatctttattggaaacaggttactaacaaaatggctaaaaactcatagtaaatagaaaattttcattatt

SEQ ID NO: 184911 - DNA, 201 bp, Homo sapiens
agatttacaatagcaagtgttggcaaggacatgggactatcagaatgcttgtaccctgttgttgggattgcaaattggttcagtcaatcattctgataaaygatctctgaaaactaacgtatgcatatcttagaatacagaaatttcccccattaggtacatacccactagatgaatgtacataccaagagacagaaatgt

SEQ ID NO: 184912 - DNA, 201 bp, Homo sapiens
caacttagtatgtatttgacccagttgcagtacgctaaatagcaggatatctgtgaattccatgttcgtggtgtcttgtgtttcctcagcatgacaattgygattctatgatggagctgcatgcttcctagtttgtgtcacttgtgtattctaagctccatgaaaacagccatcatgctgtcttattcacctctgtgacta

SEQ ID NO: 184913 - DNA, 201 bp, Homo sapiens
tattttcttatagtgaaacaaaatggattaagacagccagtctgccacatgtcttccttaaatttcccattatttttatatgcaacaaaaatgtatttgtktatttctttttctgttctcatttccagtatctgtcaaaactacctttgtaaatgttaatgataaaaataagactatatcttcagaacattgatataagtt

SEQ ID NO: 184914 - DNA, 201 bp, Homo sapiens
tttcccattatttttatatgcaacaaaaatgtatttgtttatttctttttctgttctcatttccagtatctgtcaaaactacctttgtaaatgttaatgayaaaaataagactatatcttcagaacattgatataagtttcaaaaacaatggaggaatatgtcccaaacacttattgactcccagaatacttcccatcaca

SEQ ID NO: 184915 - DNA, 201 bp, Homo sapiens
tagggtttataagccttttcttcatttatttttaatcagagcataaagatgctctcagtgtcttttaatgaattcaccttttcattgttagcaagtggaakaatagcagcttttcaaagatgaagtagctaatcatatgcgattcagcattatctgtcattataaatttgtataaatgtacaatcaacctgcaggctgtgc

SEQ ID NO: 184916 - DNA, 201 bp, Homo sapiens
acttcccatcacatgtattgtttctactacgtagcattttgtcaaaaccacacacatatatttagaaatatcttcagcttttgtattcacgctcttatatstgttccattttgatattttagaagttttgttaaaaaataaaaaggagaaaccaagtagcctcattctttctttcctggtttggctttagatatgctagat

SEQ ID NO: 184917 - DNA, 201 bp, Homo sapiens
tttatccgtgaggtttgtttcattttatttcactcatgccagatgctcccatttaaaaattaaatctatattttaatatcttatttataatatctttattycactaggcttttctcattcctttacttcctttgaattccctgatttcaaatatttttaattatattgctaaaagatttgtaaaatagattagacaaaaat

SEQ ID NO: 184918 - DNA, 201 bp, Homo sapiens
gcctatacatggacactgtcattgatttattctctttttcatagggtttataagccttttcttcatttatttttaatcagagcataaagatgctctcagtrtcttttaatgaattcaccttttcattgttagcaagtggaagaatagcagcttttcaaagatgaagtagctaatcatatgcgattcagcattatctgtcat

SEQ ID NO: 184919 - DNA, 201 bp, Homo sapiens
gcaattataggccaatctttcacatgattgtagattcaaaaggtaaataaattagcaaacggagaactgcataaataaacagatagggtttattataggamagcaagattggtttggcattcaaaaatcaatcattgtaattcgctactttaggaccaaaagagaaaaattatatgatcttggcagatgaagaaaaggtac

SEQ ID NO: 184920 - DNA, 201 bp, Homo sapiens
ataaaattggaggctgtatcatttttattaggtgatttttaatactgccttatgctaaatttaaggtcaaataaaattttaaaaatatttttaaaataaayactatcaaactagtagcccacaaagtcttatgcaattgaagcaaatgttagattttatatttgtctctttaatttcattctttggttcttttgtattttt

SEQ ID NO: 184921 - DNA, 201 bp, Homo sapiens
ttttcacttcaattggattgtcatttgcaaccaaagacacctaattaatttagcttagaatacatgagcaggttattttcaagatagagaataccttttttaagaaatggggaaggagcaaagaatttgaaagagactgaaaataaaagagaagtagggataaagaaaggtagaggggcaatttaaacttcatctatatgc

SEQ ID NO: 184922 - DNA, 201 bp, Homo sapiens
tgtatttggaggactgaatattaaagacccatttaaaaatatttagtttttcagaaacgtcactaatctatacaactatttgcaataactacaggggaccrgttgcactatttcctgtgtcaacagaagatctgaccttgttttccgatagcttagagattaagtgcagccctaatagaagaactgtacatcattttcaaa

SEQ ID NO: 184923 - DNA, 201 bp, Homo sapiens; identical to SEQ ID NO: 32390

SEQ ID NO: 184924 - DNA, 201 bp, Homo sapiens
ttttaacctaatcctttttctgtatttggaggactgaatattaaagacccatttaaaaatatttagtttttcagaaacgtcactaatctatacaactattygcaataactacaggggaccggttgcactatttcctgtgtcaacagaagatctgaccttgttttccgatagcttagagattaagtgcagccctaatagaag

SEQ ID NO: 184925 - DNA, 201 bp, Homo sapiens
ttgctaaaaaagtattgcaaaaattaggctgatacttcatgacacttcagagtgtgcaaaggtctgactctgaagttgggtatttggattcctatagcccytgataagtttaaagtgctctgctaaagcatgaaaaatttttattttccaaaggacccctctgttttaaggaaaatcctcttgaccagattttcattttga

SEQ ID NO: 184926 - DNA, 201 bp, Homo sapiens
tatcttcgtagtcttctgtctccctaaatattttcacattgctttgcccacagtcattttccaaaaatgttctccaagaaagatgtctctctctctctctcaacttacttgctctgcttgttctttgcaatttggtagtaataagtgcttttatataaccttcaattccagcattcaaggaatagattcttggctatatac

SEQ ID NO: 184927 - DNA, 201 bp, Homo sapiens
ttatcttcgtagtcttctgtctccctaaatattttcacattgctttgcccacagtcattttccaaaaatgttctccaagaaagatgtctctctctctctctcaacttacttgctctgcttgttctttgcaatttggtagtaataagtgcttttatataaccttcaattccagcattcaaggaatagattcttggctatata

SEQ ID NO: 184928 - DNA, 201 bp, Homo sapiens
tgagttctactcagatttcagacaatactattttaaagaatctatagcacctgcttgtttttgtttttgtttttgagatggagtcttgctgtgtcgcccasgctggagtgcagtggcacaatctcggctcactgcaagctccacctcccaggttcacgccattctcctgcctcagcctcccgagtagctgggactacaggt

SEQ ID NO: 184929 - DNA, 201 bp, Homo sapiens
ttgatataggtattttatcttcgtagtcttctgtctccctaaatattttcacattgctttgcccacagtcattttccaaaaatgttctccaagaaagatgtctctctctctctctcaacttacttgctctgcttgttctttgcaatttggtagtaataagtgcttttatataaccttcaattccagcattcaaggaataga

SEQ ID NO: 184930 - DNA, 201 bp, Homo sapiens
tataaagtgttactttaaaaagccttctctgcgacattaacatatattaagtgcttctacacctatgatctcctaacagtctatgcttatcctaccacagractttctacccacaattgtaatcctgtgtttacatgtttgtgtctcattagacttctgttgtggcgcaatgatggcaaagaccttcttgctcaccatcat

SEQ ID NO: 184931 - DNA, 201 bp, Homo sapiens
cttgatataggtattttatcttcgtagtcttctgtctccctaaatattttcacattgctttgcccacagtcattttccaaaaatgttctccaagaaagatstctctctctctctctcaacttacttgctctgcttgttctttgcaatttggtagtaataagtgcttttatataaccttcaattccagcattcaaggaatag

SEQ ID NO: 184932 - DNA, 201 bp, Homo sapiens
aagatttatcagaaaagaatggccttcttcaggagtcatcaccacaaatacagctgggaatgagacgtatctcttgatttacttgttaacatgtgttccawaatggataaccatatgtgtctgatctgcagagtagaaaacattatggctagatcttggagttaaagttttttaaaatgtacgatggctgggtatattttg

SEQ ID NO: 184933 - DNA, 201 bp, Homo sapiens
gttaacatgtgttccaaaatggataaccatatgtgtctgatctgcagagtagaaaacattatggctagatcttggagttaaagttttttaaaatgtacgayggctgggtatattttgcaaccagcatgtatctacctaaacatgtatacatttgtatacctataaaatataatcatgactcctttagatacaaatctacat

SEQ ID NO: 184934 - DNA, 201 bp, Homo sapiens
tttatgctctgaagaactcagacttctaaactgtgggcattgggaagccaagaaaataactgaagaatgggaattatgtgtttatctttccatggcatggrtaacttgggtatatatgcaagtatgtgaatcgtatatttgcaggagacaacactggaagaagaaagacttatgagactcctatagttcaggtgaaaaatg

SEQ ID NO: 184935 - DNA, 201 bp, Homo sapiens
tcctctgttcactagggtcagtaaacaacagagctagtcaatgtcatttttattatattcaaattgaatgtgaaatattaggtaacaatataaagaaatgrctttagctactgcattccaaggcttgaatcctttgagagtttgtaaataggacattggtaagtttcatatatttgatatctacactattaaaattgatgt

SEQ ID NO: 184936 - DNA, 201 bp, Homo sapiens
accagatgatagagtcactgccaataaactaaacataagagacttctaaaaatcaaatccagtttcacttaagaatattaattgaaaggagatgtatgtasacatggagataacggaggacataaaatgacaacaaaagttgtataaaattggtctctcattcgtgcattttacaacctaattcacaagctcttaatgttc

SEQ ID NO: 184937 - DNA, 201 bp, Homo sapiens
aaaacctttacttattttaaagcctgccattacaaaattaccaaattacaaaaagaaaactcaggatcattgagacttagaacaactgaaatctgaagtayccaaatggcaggcaagagtaagtccgcagttatctttcaaggtatggctcgtggctctgcttccaaatattcattctgaatatttgtatgtcaagttaaa

SEQ ID NO: 184938 - DNA, 201 bp, Homo sapiens
gctgactatcccaggtttatcacgcttccagagctaagaaccaaacttattttacttattttctcttgttgctctgtgctcctcagtacatagcttccaaytcatgtctttagagggctgcttgaacacaagtcatcctattaacattccagccagaagaaaggaggaagataagaataagaataaaaatccttcctttaa

SEQ ID NO: 184939 - DNA, 201 bp, Homo sapiens
agatacaattgaagttgagatttgggcggggacacagccaaaccatatcatcaactttaaggacaggtatgatttttatgagtgtattttgttattgttayagtgaagcacactgattttgtgtgtgtgcccatctgcatcttgaacctttctatgtatatatgcatatatttttggttttaccttatgaggacttttaaa

SEQ ID NO: 184940 - DNA, 201 bp, Homo sapiens
taggggatctctctgaagttttttggttctataatgtaaaggttgtcgtgtttacagtttttttccacatcacgagttcaggacatgataacataataaaygaggttttctacaaagccaaggatctgaatgacaaaggaaggacaactagagattagggatataaaagtgacttccaggaatcttttcatttagtgtatt

SEQ ID NO: 184941 - DNA, 201 bp, Homo sapiens
gcagatagcacatgggagtcctggggggaaaagggcacatgagatgcagaaggcagccaagaacacggcagctcaaggaccaagggggaggctgtgtaaastgatgattgttgggtagtgatgtgtttccagggccaggtgggcctggaacctgcaaggtctcagacttggaattttaccctaattgtagtgggaagctat

SEQ ID NO: 184942 - DNA, 201 bp, Homo sapiens
tatgtgagaaagaaatttccaggagtttccatgttgatactagaagtctagttatttacatttgaagagaaggaaaaatattggaacaagactgattgctragtactaattgatatgccaaaggcatgtgacttgtaattttttcccattcttttttagtacaagttgagtatcccttatccaaaaaatgcttggggccag

SEQ ID NO: 184943 - DNA, 201 bp, Homo sapiens
agtgcaaaagcagtcacagataaaatataaacaaaggagcctggttgtgttccaatgaagctttgactacaatatcagacagtggaatgtgaatttggccyatgggctgtaggttgctaacccttgatttgggggagggggatacatgaagttttttttgaagactctgactcccaaattccaaaaccctctactgggaga

SEQ ID NO: 184944 - DNA, 201 bp, Homo sapiens
gccagaagtgaggtagggagggtgggaaattttatatggagaaagccacttagtgtgtttaagaaacccagtaggctgggctggcctgaacctacagaacrtcggaaagaggtagaagcttttaggaattggaggctttctcctggggcagtggggagccacaggatggtttttaccaccaccgctggttaagcacctaaa

SEQ ID NO: 184945 - DNA, 201 bp, Homo sapiens
atagatgttcaggttagaagaaaatggcgttttgttccagccagtcatttagaaccttctcccagagggtctttgccacttaatctatgggccacttaacrtgcagaagagttcttgtagttctaaacttaatgtaacaaaaaatagaatggtgattacctgtagggaaggggaccaggttgccatgtcctttgacatctt

SEQ ID NO: 184946 - DNA, 201 bp, Homo sapiens
ataccccacctgggccccgagtccacatgaccttcactgtccagcaatcagcaccaacttcaagtcccttgtgttattctgatggtctcaacaaagggacyggattagcccaactcaacttttcctgctagatcagaggcagttggtggatgggctccacttgagtcagatgctgcccagggtctagttagccacgtgggt

SEQ ID NO: 184947 - DNA, 201 bp, Homo sapiens
tctgctggccagtctgtatcctctacttccccaccatacacacattaacatctcttctctttctacattacctgcagtcttttctagccagtctgcttcaytatccagtgcaaattctggagggaaatagcctgactgactgagctaaacaccatcatgcctttcaggcagatccccttgcatcaggctgcctcctggggt

SEQ ID NO: 184948 - DNA, 201 bp, Homo sapiens
gccctactcgccagagcaggaagccctcggcagagcaatttcaacctggagggctcatcagattttttacaccgccttcctctttctccgacctgccaccrgtcagctccatgtgtagaactctgtgtaactgcagcttattgttggctcattcttagcttttattctctatttgcatttaaacttttctaggctattcca

SEQ ID NO: 184949 - DNA, 201 bp, Homo sapiens
caccttggggaggacacagtgttcgtcccttttgtcctttgtccctccgccatgtgaggatgagtaagaggagccaactatgaagtggagagagacagccytcaccagacaccaaatctgctggcaccttgatcttcgacttcccagcctccagaaccgtgagaaatgcgtttctattgtgtattaattactcaatctaag

SEQ ID NO: 184950 - DNA, 201 bp, Homo sapiens
ctccagcctgggtgacaaggcgtgactttgtctcaaaaaaaaaaaaaaaaaaaaaagagagagagagagagagagaaaaaatcttagtgccaggtgtctgwatttaattagtctcaggtcgaagactctggaatcagtggaatgtaagcttcattagggcagggaatttttttggttttgatcactatggtattcccagtt

SEQ ID NO: 184951 - DNA, 201 bp, Homo sapiens
ctccgccatgtgaggatgagtaagaggagccaactatgaagtggagagagacagccttcaccagacaccaaatctgctggcaccttgatcttcgacttccyagcctccagaaccgtgagaaatgcgtttctattgtgtattaattactcaatctaagctactttgtatagtggcaggaacagattaagacaatagctcatt

SEQ ID NO: 184952 - DNA, 201 bp, Homo sapiens
ggagccaactatgaagtggagagagacagccttcaccagacaccaaatctgctggcaccttgatcttcgacttcccagcctccagaaccgtgagaaatgcrtttctattgtgtattaattactcaatctaagctactttgtatagtggcaggaacagattaagacaatagctcattttcgtcttcctgcaatgtttatatc

SEQ ID NO: 184953 - DNA, 201 bp, Homo sapiens
atgcgtttctattgtgtattaattactcaatctaagctactttgtatagtggcaggaacagattaagacaatagctcattttcgtcttcctgcaatgtttrtatcagtggagggagacttactacataatgcttgctggatggttaactagtgcttcttccttccttagaggaactgttattcaatgactggaaatagttt

SEQ ID NO: 184954 - DNA, 201 bp, Homo sapiens
agatgtgtgatgttgggacttttggagccttagtttcctcatctaccaccaggagtaatgtcatccataaatggtagctaggaaaactagatgacactatmtatgtgaaatgctttgaaaatttcagacagtttccaaaaaacgagttagctattagagtaaaaagccagtgtcatagtcaatctaacttgtactttaaaa

SEQ ID NO: 184955 - DNA, 201 bp, Homo sapiens
gagccttagtttcctcatctaccaccaggagtaatgtcatccataaatggtagctaggaaaactagatgacactatctatgtgaaatgctttgaaaatttmagacagtttccaaaaaacgagttagctattagagtaaaaagccagtgtcatagtcaatctaacttgtactttaaaataaagaataacctcagtacaactg

SEQ ID NO: 184956 - DNA, 201 bp, Homo sapiens
gctactcaggaggctgaggcaggagaattaattgaagccaggaggcggaggtcgcagtgagcttagatcatgccactacactccagcctgggtgacagagygagactgtgtctcaaaaaaaataaataaataaaataaagactttgtaaagtggcatcgatgctggtcagcagagttatatagccagtctgggtgttctct

SEQ ID NO: 184957 - DNA, 201 bp, Homo sapiens
attgtttcatcctggatcatttcttgagatcaagagttcatctgaaatagctttaacaaataatgttgctcaaaatctgcctccaaacccagttcaacccwcatcccaagaaaactcccattgctacccctttctgcttccctcacccctcctacccactctcacctctcccctcggcttcccatcactatccctgctgtg

SEQ ID NO: 184958 - DNA, 201 bp, Homo sapiens
ggagcgtcatacctggaagagaaacattgagcctgtgaattacagctatagcagtagaaattcaaggggggaaatagattctggagacctgggcaagtagwactgacgggacccagagatcagcggataaaatggatgctgtgaagggctaagggaagtggaaaggttgaagacaggcacctgaagcccgcctaatcatat

SEQ ID NO: 184959 - DNA, 201 bp, Homo sapiens
ggtcttattcctctggacagagccaaataagtgcagttatctgaacttaaagatagcctagcgctgaaaagccaatgacagctaatcttgagagagccatsggtacagggagcttgtcagaagttgtgtctccttgaaattggcagcatgcagtaccaaggggatggccagacactgccaggcctctttaaaactctcctg

SEQ ID NO: 184960 - DNA, 201 bp, Homo sapiens
cttccttttcttttccatttttattgtaatgctggtgatgtgggtataagaacttttgttgtggtggttcagacagccgaaaaagcaattctcacaaactrtttttagcctggatatctgttttccccttcttcctttctctttcctccttccccaagctttcttttaacagcttacgatgggtgcatctcattcccatca

SEQ ID NO: 184961 - DNA, 201 bp, Homo sapiens
ccttccccaagctttcttttaacagcttacgatgggtgcatctcattcccatcacatagcagccctgcttgacaccagcattagatgaattaaatcacagkttgttcagtccccaaacaccttgttcctccttgttgccctgcacatcaccatttgcctaaagattcttcgggattcccttcagtgctgtcctggcaggga

SEQ ID NO: 184962 - DNA, 201 bp, Homo sapiens
tgacaccagcattagatgaattaaatcacagtttgttcagtccccaaacaccttgttcctccttgttgccctgcacatcaccatttgcctaaagattcttygggattcccttcagtgctgtcctggcagggacccaggagtagtgtctctgcagagagaagggcagaggcagagagactgcttgctcaacagcagctaggc

SEQ ID NO: 184963 - DNA, 201 bp, Homo sapiens
gaaatggggtagggtggggcggccccgcccccgccccctcattttgggcagttatgagtgacactctgaattgttcgaggtttttaaacttgtgccctcckttcacaagatcacttctttctggctaccacccaaattcgatgtccagagccagcatgggagtctgcccctcatccccgcctaactcactgtccatccacc

SEQ ID NO: 184964 - DNA, 201 bp, Homo sapiens
acgaatgagggaatccctgttttctagtgggaactacctcaaggaaaaggcactcatcagacacgtaggaaatgagttctcagactcagacatccccagcytgcaggtccagatgagggtacgtaataatgttcatactcagatatcccaagtgcatcgccacctacctgctgtcatggatcccagtatcccgcagagccc

SEQ ID NO: 184965 - DNA, 201 bp, Homo sapiens
ttctaccagccttgcaaagcccctctcccacatcctccttaggctttccctccaggtaaacccatgcaaataaaggtttggatatttcacctcagacctgrttagatctcagttttgactaatttcttttccatgggagcacagttcagagatgaggacaaaatcaacaaaattccagttacctaataatcttttgtgaac

SEQ ID NO: 184966 - DNA, 201 bp, Homo sapiens
gtatcattaatcgcttccctgtctcttgccagttactgagggttccataaacacagtgcttccccatgctgcaggagtccttccccgaaagatatgagcgyttcttcttctgcatatgccatagcacattcgtcattttcttacatgttcatattttatagtcattgctaatttttgtttccattgtaatcttaccctctt

SEQ ID NO: 184967 - DNA, 201 bp, Homo sapiens
ttccctgtctcttgccagttactgagggttccataaacacagtgcttccccatgctgcaggagtccttccccgaaagatatgagcgtttcttcttctgcayatgccatagcacattcgtcattttcttacatgttcatattttatagtcattgctaatttttgtttccattgtaatcttaccctctttctcgctagtccct

SEQ ID NO: 184968 - DNA, 201 bp, Homo sapiens
cagtgcttccccatgctgcaggagtccttccccgaaagatatgagcgtttcttcttctgcatatgccatagcacattcgtcattttcttacatgttcataytttatagtcattgctaatttttgtttccattgtaatcttaccctctttctcgctagtccctttaacacccactgcttctgtactcaccagatatcacagg

SEQ ID NO: 184969 - DNA, 201 bp, Homo sapiens
actatatttgggatatagaacagagtaagtactcaatacgtatttttgatgaattaatgataaagagaaagaaattccatcaacaacgtatgttatattgktttttctccagaggtaactaacctaacttgatatataggccacaacttaacctcagttggcagtgttttccagctaggtgaccagaactctttactatcc

SEQ ID NO: 184970 - DNA, 201 bp, Homo sapiens
atgatttcaaacaggggtagcaccttactttgccttatatactcaagaaatgtttgcggattgtggttcagctgaatcttgaaaaacaaataggaatttgrtatggaaggggcctagaaatttcaggtagaatgtatatgtctgtctttgtacatgttgcccacgtatacagacagaaatgtaagagtgaagtagtgtgag

SEQ ID NO: 184971 - DNA, 201 bp, Homo sapiens
taggaatttgatatggaaggggcctagaaatttcaggtagaatgtatatgtctgtctttgtacatgttgcccacgtatacagacagaaatgtaagagtgawgtagtgtgagcagcataatagggaggatgggagagttgggaaaacgaggctgaggagatgaggggctagatcctaaagcctgtattcccttataaaaatg

SEQ ID NO: 184972 - DNA, 201 bp, Homo sapiens
gtattcccttataaaaatgtgggctttcctggtagaaaatgtggagagtcattaaataatcctactatgtgcagtttttaaatgattacctatcttaactwtgttggccaagggtaaggttggtggttggaaaacaggtcaaggaaaaatttaataaatagtctgagtgacaggagatgagagtctgggctgagttagtgc

SEQ ID NO: 184973 - DNA, 201 bp, Homo sapiens
aacaggtgaagagcaaggtgaggaaaggacccgagggaacaccaaggtttaaaggatggtggagacagtgagtgaggaactaagaagggagacccaagagrtggaagtcaaagagcagaggctgggaatgaaagccattggaaggtacagtctcttgcaggagtgagactgtagtgtcatcagaaaacaagcgcagaccac

SEQ ID NO: 184974 - DNA, 201 bp, Homo sapiens
attaaagttagataaaacgagccataatttcaaactttgtatttgtttatcagttgggcttttgaattaagttttaaaaatcactttttcaccctatgccycaataaaaattcagaaactgtatctgttaaaatgtcccgtaggtgtattctgtggaaaaatagatccaaaaaattcatagcagattataggaggagaatc

SEQ ID NO: 184975 - DNA, 201 bp, Homo sapiens
gttagataaaacgagccataatttcaaactttgtatttgtttatcagttgggcttttgaattaagttttaaaaatcactttttcaccctatgccccaatamaaattcagaaactgtatctgttaaaatgtcccgtaggtgtattctgtggaaaaatagatccaaaaaattcatagcagattataggaggagaatctcttca

SEQ ID NO: 184976 - DNA, 201 bp, Homo sapiens
aacgagccataatttcaaactttgtatttgtttatcagttgggcttttgaattaagttttaaaaatcactttttcaccctatgccccaataaaaattcagmaactgtatctgttaaaatgtcccgtaggtgtattctgtggaaaaatagatccaaaaaattcatagcagattataggaggagaatctcttcacaggcgaga

SEQ ID NO: 184977 - DNA, 201 bp, Homo sapiens
gctgacaatgcttcagtcttatggcttcaatttttcctaactgagggagtagttaggagcaaatagcatcatttctgttttattgagacctggagagtccmtagatttatccaagtagcaaagatagccagacctccaaaaaaaaactgtgcccttgaacccaacccaacccacttgccccaagcaaaattactttttcgc

SEQ ID NO: 184978 - DNA, 201 bp, Homo sapiens
atgtttaacttttgggggagtgtgtgtgtttcaagtccctttttcctttaatcatttgagggaacttttgtcaggtgtgtgtgtgtgtgtgtgtgtgtgtgacctgagaaaacgcgcacacatgcctggatgcacacgtgtacacacgtacttgcacatgccattgagtgcccattctgtatgaggtcccgtattatgtac

SEQ ID NO: 184979 - DNA, 201 bp, Homo sapiens
atgtgacattttgtatttgcatttggaattcagtgagctgctgatttgatgatggaagcaaataccaagcagtcactgtcagtgttcatgaaataagagaygtcagccatatttctaggatatgacacttttgtattatctattggtatttcaaaaaaaatgttatggtaaaaaaaatttccaaaacacataagctactag

SEQ ID NO: 184980 - DNA, 201 bp, Homo sapiens
tgacccgtgcagcgttcctggctgcctttcctttatgaggccacaggtaaagcagctcgcccagggagccacagcctgtaagtgacagagacagcatcgcmctcagcagtcaaaatccaggaccatattcttaccaaatttctatgttgcttccagcgtattgatttaatcacttgtgagcctcttcttttcataaaaacc

SEQ ID NO: 184981 - DNA, 201 bp, Homo sapiens
gctagggctgcataataaacaccacagactgacttaaacagcagaaatttatttccttacagtcctggaggctggaagtccaagatcaaggtgtgggcagrgttaatttctcctgaggcctctcttgttggctggtagatggtgtcttctccctgtatcctcacatgatccccgctccgtatgtgtctgtgtcctccactt

SEQ ID NO: 184982 - DNA, 201 bp, Homo sapiens
gatgcttctcaaggctacttctttagaaaagctttcatgatgcccctgttctccacggtcatcatccttggtggtcaccgtacctacatgtaggtccatcrgaaagctgctgtttgacacttactgactttatgtccctctcactagactgttaactccttgagggtaggaaatctgttgatgttatccttggtacttacc

SEQ ID NO: 184983 - DNA, 201 bp, Homo sapiens
cactgaggagtaattaccttacacgtgcttcactctgagctgtgattagaaacaagatgtgggctcagaagggcagacgacgaatataaggagaaaaaccycagataggagccaaaacgtgcaggctgtgagatactgaataagcatggaggtctgctccagggagtgatgccgacattcgttcattcactcggtaaacat

SEQ ID NO: 184984 - DNA, 201 bp, Homo sapiens
atggagtttcaccatgttgctcagactggtcttgaactgagctcaagcaatctgcccaccttggcctcccaaagtgctgggattacaagagtcagccaccrtgcctggcctgttgtttccttttaacccttgttttcagacagctgcaagaatgccagcagatctactctcatgaccttaaaaacatactcagcatcttta

SEQ ID NO: 184985 - DNA, 201 bp, Homo sapiens
cttcaaagagtgaggcatttttacatgttttttacttagtttaacggaggtagggactagaatgatgccaggaagccatcctgtttttaggactgaagggrcatttttctgtgtaagtctcgtatggtttggtggagtgagataaggatgagttttcttagcataagaagctagaactgacatgacagagagggagcagca

SEQ ID NO: 184986 - DNA, 201 bp, Homo sapiens
tgtttagggaataatgtcaagaaaaagtctgtacatgtttagtatggaccaaaccatctttttcttttttcaaatatttttgatccacagttggttgaatmcatggatatggaacccatggatatggaggaccaactatattttgcttttcctagctccttgtaaagattttcatcagagaatatctagtaaggtgagatg

SEQ ID NO: 184987 - DNA, 201 bp, Homo sapiens
ataatgtaaaggttgtcgtgtttacagtttttttccacatcacgagttcaggacatgataacataataaacgaggttttctacaaagccaaggatctgaaygacaaaggaaggacaactagagattagggatataaaagtgacttccaggaatcttttcatttagtgtattaagtatcacatgtctgtcagatttctttaa

SEQ ID NO: 184988 - DNA, 201 bp, Homo sapiens
aagtagggctaacacaggactgtcgattgaaaatgtgtttgaggagcagaaccctcgattttctcctcactgacgtgtagcaaaaggaccactctgccaaycaccaacaggccttcatcttggtagaagtctggagatttattctctggagatgataaaagcaaggtgtttccaccaaaacgagaagtaagctaagacaag

SEQ ID NO: 184989 - DNA, 201 bp, Homo sapiens
gtagcaaaaggaccactctgccaatcaccaacaggccttcatcttggtagaagtctggagatttattctctggagatgataaaagcaaggtgtttccaccraaacgagaagtaagctaagacaagatccacgaagtaagagttgcaacaaaaaaagcaaggcaagaaccatcccaaagcctcagctgcgcggtcatcatca

SEQ ID NO: 184990 - DNA, 201 bp, Homo sapiens
aaatctgttttatcttcctaggaactcggtaaatgttagtttttctctttcctttttctttcaaaggacaagttcccatcccaggcagaaatgaaggcccrgtgcggcgcagccgctgatggctcacctctctcagaatggcccgactgcccttcaggccttcatttctcgcttgccaacttccagggaaggacagaaaag

SEQ ID NO: 184991 - DNA, 201 bp, Homo sapiens
atctgttttatcttcctaggaactcggtaaatgttagtttttctctttcctttttctttcaaaggacaagttcccatcccaggcagaaatgaaggcccagygcggcgcagccgctgatggctcacctctctcagaatggcccgactgcccttcaggccttcatttctcgcttgccaacttccagggaaggacagaaaagca

SEQ ID NO: 184992 - DNA, 201 bp, Homo sapiens
cagtgtctgactgctcccgaggcgctagcaaaggtgccctcctggctgcaggtaatgggggagctgccccagacagtctgtaaggcagtgatcgtgtccasgatcctaagagtttccttttagccacctccaactagggcaagaggccagtatcttgaaaggcagagtttggggcttgtgtgtatgcaggagagagagaca

SEQ ID NO: 184993 - DNA, 201 bp, Homo sapiens
taatccatttccacttagttaatagtaaatgtgtattttcttattttcttagtaacattttcttttctctagcttacttgattgtagcagtatagtatatratacatacgacatacaaaatatgtgttaaccatttgtgctgttggcaaagctcttggtcaaaagtaggctatgagtagttaagtttcaggggagtcaaag

SEQ ID NO: 184994 - DNA, 201 bp, Homo sapiens
gttggtggccccaactcccatcctgttcgagggtccaccgtatatgcttttctctccttgagaaaaaatttctagccaaattttgtcttccttaaactctrtagagcttgagcttccagcttgtggtctgagaaacctctctttccttggtgtttgagcagtaatcctttttagcatgattgatttttttttcattccttt

SEQ ID NO: 184995 - DNA, 201 bp, Homo sapiens
gaaaatttctctcagttctttaaaacagttgggaaatgattaaattgtctttgcagtgattgtggcttattactctgaaaactggacttgaactccaggtrtgttgggtatcatcctagggaaccactaacactctagaaaaaccagtatcgccatttttcttggaaactctcctttcatctccaagtacaatggaagaca

SEQ ID NO: 184996 - DNA, 201 bp, Homo sapiens
gcagtgtattaggagagggctctgatgctgttctgtggtattataggcccaagtcaagagctcccaaatcctgccctgctagtcatttggcctcctgatgkcaaagagaggtcctgagattcggagagtgaagcggagtggctgccggcaccaccttctcacctgcaagagcacccagagccttgtccggagttgggctta

SEQ ID NO: 184997 - DNA, 201 bp, Homo sapiens
attgtacaagctgcacatttggtcactagtctttacatttaggtctttgctgtatcttgaatggatgtatgtgtgtgctgtgagataggagctctgcctgyttctggccactccttcaacacaatctctgctgctgttaccctggcttactggccatttcccaaatgtatatacactcatgtctgtgtacttgtatgttgt

SEQ ID NO: 184998 - DNA, 201 bp, Homo sapiens
ggagtatcttagccagcttggcacaaataaaacctctttccttttcagctgttttaaacatttagcagtcagatcagatgattgaactttcaaaaaaattyttcccaatatctgtttggatggaatcatttgccgtaaagatctggcattattcaaagctgctctgtgctcccttaattgaaaagccctgacattgacatt

SEQ ID NO: 184999 - DNA, 201 bp, Homo sapiens
tggtgaaggagaagaggctgagttggcttaagcaccccttctgcctgcctctaaccccacaccttcagatccctttagctgcttgcacagctcatgacctrtgaacgggggtggggaagaagtaggcagaatggagtctgacatgagaaaagtgtcaataacatcccatttcttgtgttgattcttgatttctgttcatat

SEQ ID NO: 185000 - DNA, 201 bp, Homo sapiens
ttgtcattggtgaagttctgtaatatatgaatgttggctgggcgcagtggctcacgcctgtaatcccagcactttgggaggccgaggcgggtggatcacarcgtcaggcgttccagaccagcctggccaacatagtgaaaccctgtctctaccaaaaatacaaaaaattagcagggtgtggtgatgggcacctgtaatccc

SEQ ID NO: 185001 - DNA, 201 bp, Homo sapiens
gtcccgggcttcctctcgagttggagatgtcccgggcttcctctcgagttggagatgtcccgggcttcctctcgagttggagatgcagacaagaggccacrtgcagaagcactgtgctttgggctttcctttgcaaatgcttccctctctgacgctgtagaggcagagcttgtagagccagctgctgcttagaagggtcgc

SEQ ID NO: 185002 - DNA, 201 bp, Homo sapiens
catgcagaagcactgtgctttgggctttcctttgcaaatgcttccctctctgacgctgtagaggcagagcttgtagagccagctgctgcttagaagggtcrccctgtgggattagaatctttcaagttctaagataaattttgttactgtcctttcacactgataacttctcactgtcctcttttctattgccattctcct

SEQ ID NO: 185003 - DNA, 201 bp, Homo sapiens
atctgaaatacttgggacagaagtgttttggatttgggttttttttttttttttcatattttgaaattctttttttttttccccgagacggagtcttgctytgtcacccaggctggagtatagtggtgcgatctcggctcactgcaacctccacctcccgggttcaaggaattctcctgcctcagcctctgagtagctggg

SEQ ID NO: 185004 - DNA, 201 bp, Homo sapiens
actcagcactactgtgcgcacctgggctgcactggtgtctttactgcaggcagaaaggatggatgcacgctggccagggccatggactgcaggtgcttaartggccccacagtagatggctgtgttcacagctcagatctgtggcccccctggcctcctcagcccctctgaacagtatcccactgttagcagctctgcagt

SEQ ID NO: 185005 - DNA, 201 bp, Homo sapiens
agctctgcagtgaaagtgcaatctgaacacaaattaagtggcagctttggggttttaaagaaaaaggaaaactttttcattttagaaacagaaagcttaaygtctcctgtgtcagttcattctatgctccctgaaatggtttcatctctatgctaattttatgctgaaaataggaattcccctgtgctggagaggagagaa

SEQ ID NO: 185006 - DNA, 201 bp, Homo sapiens
gttccactaacttggttcttcctatttctggccatcatccacatatcatggtactgtctcatgttaatagtttaatgctgtcttgtttcaatagttcctcrttacttaaggaatagatcttgagttccttagcacaatatcgaaaatatttgttcactaaatgtttcttcctatccagtctgcctcgccccctgctccctt

SEQ ID NO: 185007 - DNA, 201 bp, Homo sapiens
tcattttagaaacagaaagcttaacgtctcctgtgtcagttcattctatgctccctgaaatggtttcatctctatgctaattttatgctgaaaataggaaytcccctgtgctggagaggagagaaagggcttggaagtcaaagactatccaagtggctgagaatcaagtggacccccttgactcatttccacttagaaaat

SEQ ID NO: 185008 - DNA, 201 bp, Homo sapiens
aagactatccaagtggctgagaatcaagtggacccccttgactcatttccacttagaaaatgctttcaaggcagccagtgttacaccgagggtcctgccargggagccgaggcctttgcctgtcaccctgggagctggcttccaggccttgggcatggatccctcgcccagagtctgcttggtcttgcaccaatgatttca

SEQ ID NO: 185009 - DNA, 201 bp, Homo sapiens
gcttcctcagcgtaggcatataactgtgatctctgaagattcctatgggtctatcattcagtagctcaagggcagctggacggagaagagattagaagtcytgttcctgctccttaacttgttcacaaagatacttcatttttattattttggtcctgccagttctcttcatctggtttcctgtatcctttcatatacagt

SEQ ID NO: 185010 - DNA, 201 bp, Homo sapiens
cacatgggtcacagctgcaagaatgctggggtatgctgactaggcaggtgtgcggaggtcacgatgcagctccatcttcaaaacaggaagcatttctcggrgctgtagtctcacagactctagagagatttgagaggagactgtcagagagacacagaggcctgggtgtgtgtggatgaggtgatttctaaccggttgata

SEQ ID NO: 185011 - DNA, 201 bp, Homo sapiens
tttcaactaattcctttgaggtttaactgtatagtattgcctttttcatcctttcacaaaacagaccctggaaggactcaaattggtaagtgagaagccakttactaccaactactgggcagcttcttggcaggaggtgagagctttctgcttcctttttaggacaattccacccttccttgagtgggaggagttggtgag

SEQ ID NO: 185012 - DNA, 201 bp, Homo sapiens
caggcactggcattgaagagaccccgggaagggaagtacctctggctccatggcaggatctggagggaggaagggaagattcatagcatagcaggtctagsgtaccgcacttgaaaagactatggtatttattggttcattgaactcaactaaacccaaaatactgggtacctcatgtgtgcagttcttagtgccaggaat

SEQ ID NO: 185013 - DNA, 201 bp, Homo sapiens
caatccatattatctttcaattattttggcagaattatttttttctagtggtaaattacacagcatcttattatctctgatttgatgcaatatggtttaartgaccaggactgttactggattaaatgaagtaaggtgaggcatgcggaactctacaaatgcccacttaatgtttttgagagtgggccctttttcctgagg

SEQ ID NO: 185014 - DNA, 201 bp, Homo sapiens
agctatagtttagttaataccatttgttaaaaacaaaaataaatgattttgttgagatgctaaaaaacatgaaggatgattttgatatttttgtgtaagasagagagagaaagccagagtatgtattgtgctttttccatttattgagaggatttttttccctgatatgttttggaaagcattggtacaaatggatattgg

SEQ ID NO: 185015 - DNA, 201 bp, Homo sapiens
tttggggggccaaggtaggcagatcacaaggtcaggagttcgagaccagcctggccaatatggagaaaccccatcgctactaaaaatacgaaaattagccwggtgtggtggtgcatgcctaaagtcccagctgctcaggaggctgaggcaggagaatcgcttgaacccaggaggtggaggctgcaatgagccgagatcacg

SEQ ID NO: 185016 - DNA, 201 bp, Homo sapiens
ttcaattattttggcagaattatttttttctagtggtaaattacacagcatcttattatctctgatttgatgcaatatggtttaactgaccaggactgttrctggattaaatgaagtaaggtgaggcatgcggaactctacaaatgcccacttaatgtttttgagagtgggccctttttcctgaggttcattaatggagag

SEQ ID NO: 185017 - DNA, 201 bp, Homo sapiens
caggtgtggtggtgcatgcctaaagtcccagctgctcaggaggctgaggcaggagaatcgcttgaacccaggaggtggaggctgcaatgagccgagatcaygccactgcactccagcctgggcaacacagcaagacaccgtctcaagaaaaaaaaaaaagattaagattatattctttgttgaatataacaaagtgaatat

SEQ ID NO: 185018 - DNA, 201 bp, Homo sapiens
aagacaggtgctatttcctcaaacaatattttggctgctggtgatcgactcttagagcaagagaaacactttctaacattgatgtgggattttgtgtgtgrtgtgtgggtttcctgagctgctgagcttttccacaatctcctgctctattacttcgtagcccactttcctttaatacccaccgtcagagaggttctcttt

SEQ ID NO: 185019 - DNA, 201 bp, Homo sapiens
gaggacattcagtggccaaagttggctagagttgctttggtccttgatcaagtcctgtttagatttctccacccaaataagttacatcaatactgactagmtaatacatattcaacaggcagtacaccccctgatcattgtggatatcacaattcaggaaatcatttacttactaaacatttttacttactaaacatttac

SEQ ID NO: 185020 - DNA, 201 bp, Homo sapiens
cctcttcttgcattaagcccagagcagttcattaggaaaaccgtatagagtcatgagaccctaagtctcatgatcagaatttcatcttctcttcccttttkttttttttttttttttttaacatagagaaggtaaagggggaaaatgatttacttagtttccagaccacttatttaaatcctgcccaatctgacttccact

SEQ ID NO: 185021 - DNA, 201 bp, Homo sapiens
agagcatgacgtaagagttactcccactctgtctctgctcttcctgtccccagagctggatgggtttgttcatgaaagtgattggctaatgagctcttcargcataggattaatgtggtgtagcaagaggaagtctcagcgttgagctggggctctgctcagttctctcctctgtttctgccggaacttcctggtgttaca

SEQ ID NO: 185022 - DNA, 201 bp, Homo sapiens
ggacaggagatcagctctcctgagctatttactccagcctagggcacttctgcgaaaaccatctgagagtatctctggaagactggggcatctgaaaccayggctttaaaacagtcttgccagagagtaaacttagtttccataggttgtgatctgaaccatcatgttaatgttgctagcttctcacatccacttccttta

SEQ ID NO: 185023 - DNA, 201 bp, Homo sapiens
ttgccattccacatgtacccaatacagtgttaaaaagagtcctgttcagctaggataaatcacagaacaagtatagtaagaacatcaccaagtaattatayagtatgtctttgagatttgtgtctccaagtttctgaatatttcattttgaaagagtaacttagaaaacgtaaagagaagttccacagaagtgcctgggag

SEQ ID NO: 185024 - DNA, 201 bp, Homo sapiens
aaaggcttaatttagcacagcccatttatgtacgcaagaagcttttcttaaggacactcaaagatgtcagctccagtcctaaaggaaacacacttgaaccragcgtgagatgaatgaagggattctgctcttgtcttttatagatgatttcatttatttgattcttctctttcctcctacattctcagattaggcatggcc

SEQ ID NO: 185025 - DNA, 201 bp, Homo sapiens
tgagatgaatgaagggattctgctcttgtcttttatagatgatttcatttatttgattcttctctttcctcctacattctcagattaggcatggccttcarttggattttgtattcgttaaatacaaacagtacacatattagactggatacatatttgcaaatttggatttatataatctattttaaaattatgagacta

SEQ ID NO: 185026 - DNA, 201 bp, Homo sapiens
tctgtgtggtgggtaggttctgtggtattagagtgctgtgtttcagtgatagtgtagcctgctcgatctctaaagtctctgcttagtgttgtttctatatwaaaaaaaaaaaagaaactgtggctaccaaccaacttataaacaagttgattggaggcaatccttatttactgtgaggtaagccatgtaataaaatatttt

SEQ ID NO: 185027 - DNA, 201 bp, Homo sapiens
gtgatctttttgagctttatattctttgttggtaaagtggtacgaacaatacttacatcacagaactgttgaagggatgaaatggaagaacaatgtattartagaagtatgaatgtcgttggtcttatcctcctgggtctcttatgtatttccagatgatatatttcttatagagaaattcgatagaggtagaaggaaagg

SEQ ID NO: 185028 - DNA, 201 bp, Homo sapiens
gatgaaatggaagaacaatgtattaatagaagtatgaatgtcgttggtcttatcctcctgggtctcttatgtatttccagatgatatatttcttatagagmaattcgatagaggtagaaggaaaggaagtcacttctcagatagaagtgggaaggctctcctagtcatccatctctctctgttagagatagtaacagaaag

SEQ ID NO: 185029 - DNA, 201 bp, Homo sapiens
ttaagatatctttaagtctcctccctgatttcttgaaaatctcatgtctgttattgtttattattattttttaaacaggatagcaaaacttctattacttyctggttggtcaggtcattgagcaaatctagcctctgctttattgaaaggacttttttgagttttccctttgctatttcttaaaggatccaagaccaaggc

SEQ ID NO: 185030 - DNA, 201 bp, Homo sapiens
aacactttcaaatctctcattcttgaatatatggcatttattagcaaagaatagtattgatagtcatttctcaatcgaattatagtgatgaaaagataccyttttttttttttttttttttttttttgatatggaggcttgctctgtcacccaggctggagtgcagtggtgcaatctcggttcactgcaacctccgcctcc

SEQ ID NO: 185031 - DNA, 201 bp, Homo sapiens
ttctcactcataggtgggaattgaacaacgagaacacttggacacaggatggggaacatcgcacaccggggcctgtggtggggttgggggaggggggaggkatagcattaggagatatacctaatgccagcatggcacatgtgtacatatgtaacaaacctgcaccttgtgcacatgtaccctagaacttaaagtataata

SEQ ID NO: 185032 - DNA, 201 bp, Homo sapiens
aggaaatgcaatcagagaacaggcagaaaaactatgattataatggtttgtatttttcttgtctcagattcttttatttatttatttttattgatacataatagatgtacatatttttggggtacatgtgatactttaatacattcatataatttataaagatcaaattagtgtaattgtgatatctatcaccttaaatat

SEQ ID NO: 185033 - DNA, 201 bp, Homo sapiens
ggaaatgcaatcagagaacaggcagaaaaactatgattataatggtttgtatttttcttgtctcagattcttttatttatttatttttattgatacataatagatgtacatatttttggggtacatgtgatactttaatacattcatataatttataaagatcaaattagtgtaattgtgatatctatcaccttaaatatt

SEQ ID NO: 185034 - DNA, 201 bp, Homo sapiens
gaaatgcaatcagagaacaggcagaaaaactatgattataatggtttgtatttttcttgtctcagattcttttatttatttatttttattgatacataatagatgtacatatttttggggtacatgtgatactttaatacattcatataatttataaagatcaaattagtgtaattgtgatatctatcaccttaaatattt

SEQ ID NO: 185035 - DNA, 201 bp, Homo sapiens
aaatgcaatcagagaacaggcagaaaaactatgattataatggtttgtatttttcttgtctcagattcttttatttatttatttttattgatacataatagatgtacatatttttggggtacatgtgatactttaatacattcatataatttataaagatcaaattagtgtaattgtgatatctatcaccttaaatatttg

SEQ ID NO: 185036 - DNA, 201 bp, Homo sapiens
ctttctctctgtttgatctgtcatcatggcccaggaagaagatgttgagagatcataattttaaagttgacagcagaatgggtgaagttttctcctacttyacatggtggttgtcatgagaaccagttcacaccagaatggggtgttttttgttgttgtcattgtgctttttgccttgacacatgcagatatttaatttcc

SEQ ID NO: 185037 - DNA, 201 bp, Homo sapiens
attctcattcatagccacaagtacaatgaaaatcaaaataaatattatatttcatctctgaaagattgatgtgtttggacctgaccaatgtagcctggtgwccatgtagcctggtgtaaattatgttctcaagtaaggattttactctgtctccaaaaggttaaataggtcactgattagaattatagataaaagagtact

SEQ ID NO: 185038 - DNA, 201 bp, Homo sapiens
agctgaccgaatgcggaaatacctgctgtgtgcttcctggagattttccccactgtctgttttatgacctggtgaattaggctgcagtcttgtcttgatcsagaagtggtgccccttggatcagaaggaatgtctgaaacacattgatttgtggctggaatagtaagctaagctctaggaacatcctgccagaggcttgtc

SEQ ID NO: 185039 - DNA, 201 bp, Homo sapiens
cagaggaaccctcacttcccccacccccaccccccaacgcacacatttccttcataacaacaccctagagtgagatccttttactttccgttttacttccyggttcctgagggcattacttttcataagaaaattcatcaaagtgttttcctaaagagttgttctccctctaaagttgaatttcatcctccaacccaatat

SEQ ID NO: 185040 - DNA, 201 bp, Homo sapiens
cgtatatggaagatggtttattgttacctttttattaggctgcttctagaaaattcagcaagtacccacagtcctaccacctaatccataacccctggtcracattttggtatatttccttctaattttgttttcatgcacctcttgtttgttctgcaaaaagtacagacgttgtcttttttttttttttgcttctacaaa

SEQ ID NO: 185041 - DNA, 201 bp, Homo sapiens
tcaaagaaatgtaatttaaaataatgattccatttttcatctacagttaaaaatataaaaacaataatatctgcttccgatgaggaagtagtgacataatygccctcatagaaggccgtgttgagtgtaaatctccaagtttgtgttttgtcaacacgaatcagcctggaagtgcccatacccttgatctggtaattctgc

SEQ ID NO: 185042 - DNA, 201 bp, Homo sapiens
aactgaatgcccaaaggaggagactacaaaaagcaaattatagtacatcaccttgatggaatattacctagctgttaaaaatgacaataactaggttgcascatcaaaaagtattaccaaagaaaaacaggaaacaaattaatatctatatatagttacaacaatgtaaaaatatacatttgtattggaaggaaatagagg

SEQ ID NO: 185043 - DNA, 201 bp, Homo sapiens
cagtgaagaaaagtaaaggagtgtgtggggcagagagtgaagtgaaaagcagtaactcattttaaggagagtcagggaagactcctgagaaagcagggaaktaagggaccatggaaaggctggggacatagcgggaacagcacgtgcaaaggcactgaggcagaaccgagtttgacatggctgtgggaagaaacgtgttca

SEQ ID NO: 185044 - DNA, 201 bp, Homo sapiens
agcacgtgcaaaggcactgaggcagaaccgagtttgacatggctgtgggaagaaacgtgttcagagagggaagcaggggctgggacatgtagggctgtgtrggcctcagcctggggtctaagtgagatggagggttttaaggggtgggacagatttactcatttagcatgtgatctgacttattgagagaatggactgtca

SEQ ID NO: 185045 - DNA, 201 bp, Homo sapiens
gatatttgtcctaatgctctccctccccttgccctctacctctcgacaggccccggtatgtgatgttccccttcctgtgtccatgtgttctcattcttcarttcccacttatgagtgagaacatgtggtatttggttttctgttcttgtgttagtttgctgagaatgatggtttccagcttcatctgtgttgctgcagaag

SEQ ID NO: 185046 - DNA, 201 bp, Homo sapiens
accctagagtaagccagctgtataaacaaaaagctgcaacaaggagctagcttcaccctccaagcactgcttagtgcttccagtcaggaagcttctttctstctcttaaataccatctcaaaaatcccagtacctgtcacctaaaggagacatcttacacattgagtggagaggtggaatggatgttgaaaggacaattta

SEQ ID NO: 185047 - DNA, 201 bp, Homo sapiens
ggccaggcagacgggggcacagctgttcacctctctgagggggcctggactcctggggctgtgtttgtgctagttttcaggaacccctgtgaaaaagccasattagacactgtgggtgttctggagacctgaagaggccccggaggagccctccctgggcactcagttggtggagaggagagaggctcttcctcccaaaga

SEQ ID NO: 185048 - DNA, 201 bp, Homo sapiens
atttcagttgaagctcagccaaaagcccttttgaaacaactctgacaaaataacgccataagtgaataaaaccagagagttcctgggtatctttgaaaatrtctcccatgatgacagtctcagacaaaggtgctgtgcacagcttctaagaagcaatcacacacaagcacagccattcaacttgcagctagatttcctcag

SEQ ID NO: 185049 - DNA, 201 bp, Homo sapiens
gtttgactaaataccctgatccttcaaaacttctgaggcattaacaaagggttgtatagctgcactcatggctttctctccaaagcacttttctttcagcraaacccctaactttttgtctttttcagtatagataggctaagaatttcccaaattatctaatcttgctcctctttgcatagcagttctcttaatttgtct

SEQ ID NO: 185050 - DNA, 201 bp, Homo sapiens
gtggatagtttaattattctttctatcatttggccaaataatgaattacatgttttctttcaatattagagaagaatttattttatttaattatttatttrtttatttttttgagacggagtctctctctgtcccccaggctcgagtgcagtggcatgatctcggctcactgcaaactctgcctcgcgggttcatgccatt

SEQ ID NO: 185051 - DNA, 201 bp, Homo sapiens
ttaagtttgtgaatgtaaattatttgtgaacaatgggatgtgacatctcaagactctccttattgggatccctgagtgagtttaaaactggcttctgtggsagtgggaagaagacactgtgtgagtggttcacagccctttgcggttgtcttattgaactctttcaataccttagagttttgccagttatacttaggtcct

SEQ ID NO: 185052 - DNA, 201 bp, Homo sapiens
gctgttcttttgcgactctgtgataatacagtaatagcttagccttacacaaaaaggccatccgtgctggatctcgggggatctcaaatgagcattctcaytacttggaatagctgactattttccaagttaggaaaaataatgattaataaggatatagatttattagggaactaatatgagatgaataaagacaggtca

SEQ ID NO: 185053 - DNA, 201 bp, Homo sapiens
ttcttttttgtttttgtggttttaaggagcagaaagtttaataggcaagaaggaagggagaggaaagaaggaagaagctcccccgtacagagacagagggaggggggctccaaagccaaaagaggaggtccccacctgccacgtataccagccaggtatatatgcagaggctggaggaggcagtgtttgatttgcataggg

SEQ ID NO: 185054 - DNA, 201 bp, Homo sapiens
tgtgtgtgtggttcagcttacagcaccatttggagtttgattgcttcttggtgagaagaaacaatttgagttatagtattgagtatacagggtccaaataycaatacaagatatataagcaagaaagtgcttaataaaggggttaaccaattccataaagaagactggaatttattaaagagagattgtagcccctcaggg

SEQ ID NO: 185055 - DNA, 201 bp, Homo sapiens
caactattatccctgctgtaagggtaataattaagcaaaatactacagcaatggaaactctctgtccaatatttcagttagaaggtgctaccctgtataamcctgttgcaaatagtagagtgaggacagcaattcccacaagtgtggtgtgggtaggtaatttccatctaaaattttacttgctaagatatagaattctcc

SEQ ID NO: 185056 - DNA, 201 bp, Homo sapiens
gagtggggatgtttccttatcttccaggtggtcaagagcatgcttctctgatttataactactatcagccatcccttacagtgtattttctacctagttattacacaccaaaactctcacaatgcgaagtaatttctgatacccccaaaactcaaaaccatcagataacacaagcaaaacagaacagagccgttgattttg

SEQ ID NO: 185057 - DNA, 201 bp, Homo sapiens
ttttattgagttgtttgtgctcattatatattctggttattaatcccttgccaggtggatggtttgcaaatactttttcctattctgtgggagattctggrttgtgttttcactttgttgattgtttcctttgcttacagaagcgtttttgcttgatgtaatctaatttttctctttttgctttggtggcctgtacttttg

SEQ ID NO: 185058 - DNA, 201 bp, Homo sapiens
aggtcaacaggtaagataaaggaaagcttcctccagaaaagaggactgcattaacaggggttggggagagaggtagaagacggatgtcagggtcaggcatacagtgtttcttccctgcctgcccaacatgctggactctttaaggatccttcaattcttgaaccttgcttaaggacaggttatgtaaatgctagtcatcag

SEQ ID NO: 185059 - DNA, 201 bp, Homo sapiens
gtgactgaagaagaagctgaatgaaggcacagatagcgagtgcagcgtcatgtcacacaaagcttttgcatttgtcagcaggggctggttcacagttttgttttttttttttcttttcttttcccagattaattgttacttgtcacatgtagatatttgacttcttgaaagacttaaaccaaaacattaaataaagtagca

SEQ ID NO: 185060 - DNA, 201 bp, Homo sapiens
ggtcaacaggtaagataaaggaaagcttcctccagaaaagaggactgcattaacaggggttggggagagaggtagaagacggatgtcagggtcaggcatacagtgtttcttccctgcctgcccaacatgctggactctttaaggatccttcaattcttgaaccttgcttaaggacaggttatgtaaatgctagtcatcagc

SEQ ID NO: 185061 - DNA, 201 bp, Homo sapiens
aatggagttgagtgagttgctgagtgtattcgtttggctagtttctctctataaataaatatagaaaaaataaaaaatataaatgtgtgtgtgtgtgtgtrtatatatatatattttatatatatataaaataaggaagacgagatctgtagttggcaacctggagacccaggagagcacatggcataagtttcagttcag

SEQ ID NO: 185062 - DNA, 201 bp, Homo sapiens
aggtatattttaaggtttagttaagaagtatgtaggggtagaagatcttatgtttttagtgacattttatgatttactattggcattgtattttccttccrtttttaatttttgatttatattattttaattgtattctgtcagattggctggagctatcctggactttagtttgagggatgacactttggggagtaaaga

SEQ ID NO: 185063 - DNA, 201 bp, Homo sapiens
gcaactgttgtcttatgactacatagcatgtattggtcatagagtctaaaagcttcttaaacaaagcatgggatttaagaaagaagaattagcagattaarccttaataatatataaatactttacaagtgaaggtaagacttaaaaagatttaatagcataaactttaataattcatgtattagaggcatcaggtttaaa

SEQ ID NO: 185064 - DNA, 201 bp, Homo sapiens
ggcaatcagctctttggggccattttcgaggaattaatactgtatgagagggagccattcctaatagtctttcttgacagttttaggttagtctttactaygttgctaattcagacttaaagagacaactggccctccatgtcccagctccacggtgatgggtgtgtttctcagcttctcaaggaactgcatctctgatac

SEQ ID NO: 185065 - DNA, 201 bp, Homo sapiens
tgtatgatgaaaactttaaaacacaaagagatttgctagaagagttaaatggaaaaaggaacaggttagaaaggaagacaatattgaaagatatcaattcttataaattaatccaataatcaatgaaatcctaattcaaagggcaacagagttttgttgctcttgttgtgcagaggaatttggtacagtgttacaaaattc

SEQ ID NO: 185066 - DNA, 201 bp, Homo sapiens
gggatgatcctgggagattgtttccttgtttctgcaggggtcattctaccagacctgctgaaccaaggtgaccaagttacactagtttctcctttcaggaggtagctgagaaaatccgtcagttgtttgctgagcacttaccttttaggataaactgcctatggtctgttttcttccaggcagaggtgatgtcttgttcct

SEQ ID NO: 185067 - DNA, 201 bp, Homo sapiens
ggtggagcttgcagtgagccaagattgcaccactgcactccagcctgggcgacagagtgagactccgtctcaagaaaaagcaaacaagcaaaaaaaaaccaaaaaaaaaaaaaaaaaaaaccctacaagataatgaggaaaatcttggtggaaggtcagtgctggagtccatcttgtctttagctggctggatctggtcag

SEQ ID NO: 185068 - DNA, 201 bp, Homo sapiens
gaatggctatagcaaagtctcgcttcaaatgccacaaacagccaggtctcccagcccctgattcacttgtatgctaacagcaaggatcactgccagagtgsaacagaacagacgggttctgcgatgagttagaaacatgctttcccctggatcccagatttttgtctgtcctcaccagagattgacacagaagcgctagga

SEQ ID NO: 185069 - DNA, 201 bp, Homo sapiens
taaagagaatgtgtctttacaatattcattcagcatttattgtgtacctagcatgccctaggctctagagcagcattctcagaccactagttttctagatygcctttacattcataagtctcaagattattaaatttaaatagcctcaagatcccctttacattcttaaaaattattgaggaccccagagagtttttgttt

SEQ ID NO: 185070 - DNA, 201 bp, Homo sapiens
cttaggcttgcttgatcccttaaatactctaatgggaaataggaaacttctcacatgatgcagttcttaacgttgtcttcatactgttaagatttaaagtrggggggactgggcttgaaatcctttttcctggggggcagtgactgtggggctaagagtatagctctcaggccgggggccgcagactttctctgtaaagag

SEQ ID NO: 185071 - DNA, 201 bp, Homo sapiens
cacagggctaggagaagcgaattcactcccctacttacaaagctggaaagcggcagagccaagcttccagctaaggcacgtctgatcataaagcctgcagyctttctgctgcagcacctgcctgtcttccagctccctccccacctgtcccagtccttgccgtccttgctttgtaatcctgaacagcttggcctagggagc

SEQ ID NO: 185072 - DNA, 201 bp, Homo sapiens
gatctgggcaaaagaagtgcagggtgcccagtaagaataccttcctttgccatgtccctccagcgacctctactgacaaagtttagcattttgccagctgkcaaaggaaaatatttcaaggactcaactcagttttcacagagcaggcaatgaaggattgattgttttgtgtaggtgataagtgacagagtcagcttgctc

SEQ ID NO: 185073 - DNA, 201 bp, Homo sapiens
gtaacatttagtgaacaatctcagggaagtagaacattttcagttaaagtgtattttctatggtctgtgacctaatgtatttgctcaccaaaataatggtraaaattggaaaaatgtttagcctgccatacattaaaggctggcaaactttttccaaggaacacttcaacggcagcatttgtatttaagtagtgaatatgc

SEQ ID NO: 185074 - DNA, 201 bp, Homo sapiens
tacatgagttgctagggaaagtcatatttatggaggcaaaatatttgttcttaattcaaatttaatatttctgaaaacaattaggtaatgggaaagctctmtagttattcgatcttagtagatggaatacatagagaatagaggatgttctcaagggtaaaagcttgtgctcctgaaccaataatagcatccaaagaaaaa

SEQ ID NO: 185075 - DNA, 201 bp, Homo sapiens
caagtccggtagttggccctgtggaacctgcatatacaaaatgtcagcttctgtattctaggatccagggaatactatatattccgtttacgtttgattgaaaaaaaaaatccacatataagtggaccagtgaagttcaaacccaagttgttcaagggtgagctgtgtgttgttggttcattaacattgaactcttgacca

SEQ ID NO: 185076 - DNA, 201 bp, Homo sapiens
gggctaggttctaagggtatacacctatataaaaacccatggaaatgtgcgttatgatttagacatttcatgtatataaattttaccagaaagagactgtaaaaaaacaatgaatcctagccaggagggtacttttaaaataatggtgtgggtgagcaattctgaagttaccttctattaattctagcttgagcagaagag

SEQ ID NO: 185077 - DNA, 201 bp, Homo sapiens
agactgtggaatctctgataaacatagatccggaaagtgggatataccaatatctagcagtagctttggagtaaacaataattggattgccattgtatcttttatttatttatttatttatttattcatttttatttattttttgagagatggagtctcactctgtcgcccaggctggagtacagtggtgcgatctcagca

SEQ ID NO: 185078 - DNA, 201 bp, Homo sapiens
gactgtggaatctctgataaacatagatccggaaagtgggatataccaatatctagcagtagctttggagtaaacaataattggattgccattgtatcttttatttatttatttatttatttattcatttttatttattttttgagagatggagtctcactctgtcgcccaggctggagtacagtggtgcgatctcagcac

SEQ ID NO: 185079 - DNA, 201 bp, Homo sapiens
actgtggaatctctgataaacatagatccggaaagtgggatataccaatatctagcagtagctttggagtaaacaataattggattgccattgtatcttttatttatttatttatttatttattcatttttatttattttttgagagatggagtctcactctgtcgcccaggctggagtacagtggtgcgatctcagcaca

SEQ ID NO: 185080 - DNA, 201 bp, Homo sapiens
ctgtggaatctctgataaacatagatccggaaagtgggatataccaatatctagcagtagctttggagtaaacaataattggattgccattgtatcttttatttatttatttatttatttattcatttttatttattttttgagagatggagtctcactctgtcgcccaggctggagtacagtggtgcgatctcagcacac

SEQ ID NO: 185081 - DNA, 201 bp, Homo sapiens
ataggttgccaaaaaccacatttgtttagtatgaacgataaacagaacctttgggaaagttgtctattcattggttctggaaagttttccctctgtgtgcrtgaaattaagaatttggaattcacagcagcatgacagagcttacaggaagctgacgaggcccatggttgttgttttgaaggcttgcagccttaaaggtgt

SEQ ID NO: 185082 - DNA, 201 bp, Homo sapiens
ggactgtgcaggggtgaagaggtaagagtgttcagacagggatatttgcactaagctttgttgtatctacttcatccccattcggtaggtgtcttctatgtttaattcatatcctagcgtcatttttcatccatatagaaatgtaccatataaagtgcttaaaagattgtctctacaatcaaatctggttaaatgtgggaa

SEQ ID NO: 185083 - DNA, 201 bp, Homo sapiens
taactcatcctaagataaatggacaaaccccaaaggagactggcccaatatggctgaatgcagcgttatttatttcctgtgctgtcagtggagagcctgctttgcctcctgttccctctgatgtgcaactcactggatttagggcttattcatagccccagagcaagctcaaggtacctggctagtgactgaaaggacatt

SEQ ID NO: 185084 - DNA, 201 bp, Homo sapiens
taatgtgcaactgaatttaatgtactagtattttgctgaggatttttgcatccatgttcattagaaatatttgtctgtacttttctttctttctttctttyttttgtagtacccttgcctaatttaggaatgagataatgcttgtctcataaaatgagtttggaagtgctccttcctctttaaatttttgggatagtttga

SEQ ID NO: 185085 - DNA, 201 bp, Homo sapiens
gcttggtgtgcctgctccgagatccacctacaggtatttagccagggcaggtctggtctcccgccctgactggcaccagccaggattagagactgagtggcctggggctccctcctgtgtcaccttcgttaaagcttcgagttccaggagcagcagccttctccttccacccccttcaggaacaccactggagcctggtgg

SEQ ID NO: 185086 - DNA, 201 bp, Homo sapiens
ctcatctgtgatccccgggcaacctggcattacagccttcagttctgtttttcatcctaaggccacgcctgcctgtctttctacacctttgtctatattcwcatcatcgccataggcaatcagctctttggggccattttcgaggaattaatactgtatgagagggagccattcctaatagtctttcttgacagttttagg

SEQ ID NO: 185087 - DNA, 201 bp, Homo sapiens
acagttattattctactttaattctgctattcaatacaaaatctacattgtttgtcaaattggtttatgaagagttgaaacatctaggaaaggctatactrtagattttggagattatgtgaagcttgcctgatatggttgggctgtgtccccacccaaatctcatccctaattgtagcccataatccccacgtgtcatgg

SEQ ID NO: 185088 - DNA, 201 bp, Homo sapiens
ttctgtgtggtgggtaggttctgtggtattagagtgctgtgtttcagtgatagtgtagcctgctcgatctctaaagtctctgcttagtgttgtttctatattaaaaaaaaaaaagaaactgtggctaccaaccaacttataaacaagttgattggaggcaatccttatttactgtgaggtaagccatgtaataaaatattt

SEQ ID NO: 185089 - DNA, 201 bp, Homo sapiens
ctttttgttgccgtggcatggttgatgtgctttcaacctgtttttttgttttgttttgtttttaataaaacttgtgacaacaaatgtatgagtttttaaattttttttatgtcaaccaatcatccaagtctctgggcaccaactgagtgttctacaattcagttcagacactgtctggggttagcccagaccccacaggct

SEQ ID NO: 185090 - DNA, 201 bp, Homo sapiens
gtttttcaacactattttgtatgtaatttattccttctacattggtttatgagattatatatgtatgtgtgtgtgtatgtgtaaatatatatgtaatatgwatatatatatatatggagagtgagaaagaattaaaatatcagagtttgtttgctgtgtcaagtcttgtgttagttttcattattgtggctctcattgtcc

SEQ ID NO: 185091 - DNA, 201 bp, Homo sapiens
tctgattatctcaggtatgagttcttggatttgcagggcacttcatggcattctctatggcatttagtagtctgtagctttcattctgtgtatgtgagacrtgtttacagtttggcacagttttcatggctatatcacattctccgtgaatctgcagtgcttagcatcacccttgtttgttgaacgagtgagtgcagggct

SEQ ID NO: 185092 - DNA, 201 bp, Homo sapiens
tctctttttgtctctgcactcactgacatctgatgtaggtacgtggctttaatactcagggcctcctctggaaaatgaatggtttgaccagactgctccaragacctttggtcattgacataccgtggtttttttagatcctgcagtcatcagacccctcagtggctttacttgcttacgtcacctggtctccatgaggac

SEQ ID NO: 185093 - DNA, 201 bp, Homo sapiens
ctgcactcactgacatctgatgtaggtacgtggctttaatactcagggcctcctctggaaaatgaatggtttgaccagactgctccaaagacctttggtcrttgacataccgtggtttttttagatcctgcagtcatcagacccctcagtggctttacttgcttacgtcacctggtctccatgaggacacatgctccatgt

SEQ ID NO: 185094 - DNA, 201 bp, Homo sapiens
acagccaagagaggctgaggaggcatgacaactaaatgcagtgtgggatcctggacaggaagaggacagcaggggaaaagtgagggaatctgaataaagcrtggatgctggtgaaaataatgtagtgacgttggttcactccttctgactaacatactcgtgtaccaggctaatgtgtgatgttaatatcaggggaacctc

SEQ ID NO: 185095 - DNA, 201 bp, Homo sapiens
gtaggtacgtggctttaatactcagggcctcctctggaaaatgaatggtttgaccagactgctccaaagacctttggtcattgacataccgtggttttttyagatcctgcagtcatcagacccctcagtggctttacttgcttacgtcacctggtctccatgaggacacatgctccatgtgtgtggcatgtggaaaggctc

SEQ ID NO: 185096 - DNA, 201 bp, Homo sapiens
gttgttccaactgaggttgtggcgaggggatagagataactcagcagatcccaaaataaataaaacccaaaatttctacagcttgctacttagttgaacaygagggaagagggatgatgctgattatggaaccagatggatgatgctgccattgttgttaaggacacaactggttgagatttaggtttgaacacgtttgcc

SEQ ID NO: 185097 - DNA, 201 bp, Homo sapiens
gtggtatcctgctaagagtctggttgctgagattggacagagataagcagcaaaatgctttatgaaaataagtgctgaatatataaccttttggtaaatcwtttccaagtagatattttatttttctctattttatggataagtatgtgtcaactagctgtttgtgcatagatacagagcacattaaaaaattgaatattc

SEQ ID NO: 185098 - DNA, 201 bp, Homo sapiens
tactgaagctggccagcactttaattttttgagggaagagatattttgctccatttttgcatttggcctatcatgtcttatgttataaacatttttaggcytttccctttctctaaatttcaaactcctcttgaagaatacctacatcttacttattttaaatttcctaacagctcattgctttgcacattgtaagcttag

SEQ ID NO: 185099 - DNA, 201 bp, Homo sapiens
actgagcctctaccccagactctttctttgtttattggatttatctagtgcctttgctttagagctgagaggacatatgctaggcacctggagagatcccrtatttcaaaacaaccgatagccagtaagaatggggaaggcagcagacaccgtctctgatgttgatataccctgctttgtctcccctcgctttcccttagc

SEQ ID NO: 185100 - DNA, 201 bp, Homo sapiens
agtaacaggcgtatccatgcaaggttttccagctcacgcaaagccgtgtctcttggaaggttacccctatggctcctccatgaaggaactgcacctcccgccccccccggcctctgctggcgcctttccaaacacagaggtgcacggccgtacccagtaaacagttatcttcacagtgcaggggcaaagtgatacctgtaa

SEQ ID NO: 185101 - DNA, 201 bp, Homo sapiens
caggcgtatccatgcaaggttttccagctcacgcaaagccgtgtctcttggaaggttacccctatggctcctccatgaaggaactgcacctcccgcccccmccggcctctgctggcgcctttccaaacacagaggtgcacggccgtacccagtaaacagttatcttcacagtgcaggggcaaagtgatacctgtaagagaa

SEQ ID NO: 185102 - DNA, 201 bp, Homo sapiens
aaggttttccagctcacgcaaagccgtgtctcttggaaggttacccctatggctcctccatgaaggaactgcacctcccgccccccccggcctctgctggygcctttccaaacacagaggtgcacggccgtacccagtaaacagttatcttcacagtgcaggggcaaagtgatacctgtaagagaaggtgcagcaagagaa

SEQ ID NO: 185103 - DNA, 201 bp, Homo sapiens
tgtcaagtaaggacaatggtgaggctccgcaaaccactttgaatccttgggttatttggggaggaagttattgaaaaaaatagcccataggaaaatgtttsattcgattttattcaggctcaggcgaattttttatggcatttcggggcagtggagaagccatggggacaggaagatggtcggagagtcctgtgccagtca

SEQ ID NO: 185104 - DNA, 201 bp, Homo sapiens
tgtttttatgggtgtcatatgtggctattggtgaaaacgagttgaaactaaagtttatatttttatatggctttttcatttcaaacattaaaaaacattamaaatacaccaaaaggatcagaaaaaatgcaagatgataaaaatacaactgtggccaaagccaggactttgtgtccagtggcatggctatactactctgtc

SEQ ID NO: 185105 - DNA, 201 bp, Homo sapiens
cctttctataatgtaatattgatctttaattatgatgatgactagatgagacaatgtatgtgaagtgcctggttggcgactaaagaaataatagtataataaaaaaaaaacgccattataattatttttattatgcgtctgttcttccaccagatgttttgctggaggtgttagtaagaaggtaatcagcttttagagatg

SEQ ID NO: 185106 - DNA, 201 bp, Homo sapiens
cctagttggcagttctcttctgacatcgctgagtattttttgggtggaagggaaagaaacttgagggcatgtaggcctaggatcttttctttgcagggatggggacccttcagtgtagggcatagtacttggagagtgttttcttgttgagtatcacaagaggagagggagctggtacctttgaagttcccctcgatgagc

SEQ ID NO: 185107 - DNA, 201 bp, Homo sapiens
ctctttccttacttgccaattactggtctttttagggattgtggtattattgtgggaaagagactatttgctttttttttttttttttttttttaaccaaracgttggttacaattccatcctactattctgggaaaatgtggatccccccacctttcaaccatcatccctttattttctcacttattggtctgcttcttg

SEQ ID NO: 185108 - DNA, 201 bp, Homo sapiens
cagtgagatgccttgatacatatacattgtgtaatgatcaaatcagggtatttagcatttctgtcatctcacacattcatttgttctttgtagtgaaaacmttcaaaatcccttcttctagatattttgaaattatatcatacaatattgttaatgataatcacccttctgcacagtagcacaccagaacttatttttcct

SEQ ID NO: 185109 - DNA, 201 bp, Homo sapiens
caaacacggttaccttccatgacatgaaggaggcacacgcgggttgacccctgaccctgtctgcttgttagaatcacgtcgggaacctgggacaggcttakaagcccaggtcccacctcccacctgctgaatccaaatctccagagcgtggcctgggaaatcaaatttgtcagcttccttcccaggggactttgatacatc

SEQ ID NO: 185110 - DNA, 201 bp, Homo sapiens
ctaagcaccccatgtcatcatcagccgtatcaccattgggcaagaacccagaccaccaagtcaactccattctgtgtgaggggttcgagcagaggaaccakaaaaacctctgagcagggagggtgatcagcaagagaacattcacaattatctcccatgcaggccaagcctgcccacccaaattccatgccacgtgaggaa

SEQ ID NO: 185111 - DNA, 201 bp, Homo sapiens
gttcagagggaaagcttcagaaatgcttcccgtgattattagagtttgataagtgagtattcctggacatctgattaccctctttgttattgatcaatgcktggattcttctgattagtttcatcatttcacagcgatagctcccatcttcagtccttaccaaaaacaattgttttatttgaaagctttcttttggaagca

SEQ ID NO: 185112 - DNA, 201 bp, Homo sapiens
atacaataaagaattgtgaccacaccagaatgagaggtcatatacctttcaaacaccccaagaacattgattatattgctactttttacttgggcatgtattttttttttttttttagtttccaaatatatgaattttatgacttttaacaaatatctttttatcgtgaacttcaaatttaattgcattgatgtcggaaaa

SEQ ID NO: 185113 - DNA, 201 bp, Homo sapiens
tccctgatgatttatgatgttgaacagtttttcatatatctgttggccatttgtatgtctcttcagatttttttacctgtttttaaattgtaatatttggkgtttttttttttttttttttttttgctattgagttgtttgagcttcttagatattctgaatattaaccccttgtcagatgtacagtttgcagacattttt

SEQ ID NO: 185114 - DNA, 201 bp, Homo sapiens
aatttacttctttctattttcatatttttaattttattttgcttcccttttactgtttgaacccaaaggataattttactttttttaggttttcctttttkttttttttttttttttgagacagtctcactctgtcacccaggcgtgatctcaactcactgcaacctctgcctgctgggttcaagcagttctcctgcctca

SEQ ID NO: 185115 - DNA, 201 bp, Homo sapiens
ttttaacctcaaaataagcacttgaggcgctttcatgggcatttacagagatgtgcacaacagggggaataaatctgacttgcccgatgcgcacgttcccrgctgaggttgaacacggtgatgttctgccttgttcagctctcaaactgtaaacaagtgtccttttcatggtctatgtagtgtcacatttcacgcctttct

SEQ ID NO: 185116 - DNA, 201 bp, Homo sapiens
attgcactccagcttgggtgacagagcgagactctgtcaaatgataggtagatagatgatagatagatagattagatagattagacagatagacctgaccraagtgctgtatagtgtctctaagtgcaagaaggctgtgatgtgccttacagagaaaacatgtatgttaagagcttcatttaggtatgagtgatagtgcta

SEQ ID NO: 185117 - DNA, 201 bp, Homo sapiens
tgtattatttcttatatgctttgcaatttcaactaaatgattttgtgtattgctaatccttacaacagacctacaaaggttatagagaagtggagggctatttttttttttttttaaacgggaattttagcagagagcacagtatgatggggctgtttggggttaatggaactccgatatgtaggcctgaattccactctt

SEQ ID NO: 185118 - DNA, 201 bp, Homo sapiens
gtattatttcttatatgctttgcaatttcaactaaatgattttgtgtattgctaatccttacaacagacctacaaaggttatagagaagtggagggctatttttttttttttttaaacgggaattttagcagagagcacagtatgatggggctgtttggggttaatggaactccgatatgtaggcctgaattccactcttc

SEQ ID NO: 185119 - DNA, 201 bp, Homo sapiens
cacatatgctaagtgcattttaaaggcagacctgaatttatcactttttgagaaatgtattagtccttgttcaataggaatgatataactagggtaaaccrtcattattttattcagggtgcctaaagcagtagaagtgtgtggagctattgcagctcagctctgttcatgagtgttttatgtccagttctaaatcctatt

SEQ ID NO: 185120 - DNA, 201 bp, Homo sapiens
ctggacaaacccagatgaaagatggcttgttgaaatgaaggcatctcttccactgtgctgcactgattagattgaccaatcaagcttagaataggaaatgrcatggaagatcagatgcgggaaatcattgaaatatttgccctcctgttacaggatcactgaagtccacttattatgagacccagaggtttcccctctgaa

SEQ ID NO: 185121 - DNA, 201 bp, Homo sapiens
tgaattccttggcgcaaagtataaaataactgtatgaaatctttaaagaagtagaaaatacaatctcaaatacgtataagtaataaaaatggtttttaacraaagatcatacatgagttattaatcaatgagaagacatgggggaaatgtacatgcatattactcatgaaggaagacaaactgaaaaggctccatactcta

SEQ ID NO: 185122 - DNA, 201 bp, Homo sapiens
tttagaaaaaataataatagaaagtaccctttattattgttcagcttccacccccctcacagttcagaagactgatccttgtatctttcaagctggaagcstttatctaaacgagggcctgtgagtttaaatttctctggacaaacccagatgaaagatggcttgttgaaatgaaggcatctcttccactgtgctgcactg

SEQ ID NO: 185123 - DNA, 201 bp, Homo sapiens
cttatttctttgtgacttactatgtgatcaatttttgttaatattctctgggcccttgaaaataaaatgtatttttcattatgaagggagtaagtttaatrtgtgtgtatgtgtgtgtgtgtgtgtgtaaaatatacgtatacatatttatgtatacacacatgatttcatttcctaattatgtttttaggtcttttatct

SEQ ID NO: 185124 - DNA, 201 bp, Homo sapiens
tgtccaagtcacatgcctggtaggaaaactttaaatttgggatcacacatttttgcctatgccatttctattcattaggttcatagctgtttcttgtttastgccttggttagacctgtgatgagacagagcactgctgatggtgggtacctagtcatcagtttaagttttctgttttgagtgaaatatccatttaatcaa

SEQ ID NO: 185125 - DNA, 201 bp, Homo sapiens
caaacaggaatctctattgtgttggtattaagaaacgaggcctttgggaaatgattaagtcatgagggctctgccctcatgaatgggattcgtgcccttayagaagaggcttcagagagctgcctgctccttccatctcttccaccttggggaggacacagtgttcgtcccttttgtcctttgtccctccgccatgtgagg

SEQ ID NO: 185126 - DNA, 201 bp, Homo sapiens
aggcggatcacgaggtcaggagtttgagaccagcctgaccaatgtggtgaaaccccgtctctactaaaaatacaaaaattagccagacgtggtggcacgcrcctgtaatcccagctactcaggaggctgaggcaggagaattaattgaagccaggaggcggaggtcgcagtgagcttagatcatgccactacactccagcc

SEQ ID NO: 185127 - DNA, 201 bp, Homo sapiens
tgaggcaggagaattaattgaagccaggaggcggaggtcgcagtgagcttagatcatgccactacactccagcctgggtgacagagcgagactgtgtctcaaaaaaaataaataaataaaataaagactttgtaaagtggcatcgatgctggtcagcagagttatatagccagtctgggtgttctctgggtcctgtgttgg

SEQ ID NO: 185128 - DNA, 201 bp, Homo sapiens
gagaattaattgaagccaggaggcggaggtcgcagtgagcttagatcatgccactacactccagcctgggtgacagagcgagactgtgtctcaaaaaaaataaataaataaaataaagactttgtaaagtggcatcgatgctggtcagcagagttatatagccagtctgggtgttctctgggtcctgtgttgggaaaatgc

SEQ ID NO: 185129 - DNA, 201 bp, Homo sapiens
attaattgaagccaggaggcggaggtcgcagtgagcttagatcatgccactacactccagcctgggtgacagagcgagactgtgtctcaaaaaaaataaataaataaaataaagactttgtaaagtggcatcgatgctggtcagcagagttatatagccagtctgggtgttctctgggtcctgtgttgggaaaatgctgtg

SEQ ID NO: 185130 - DNA, 201 bp, Homo sapiens
ttaattgaagccaggaggcggaggtcgcagtgagcttagatcatgccactacactccagcctgggtgacagagcgagactgtgtctcaaaaaaaataaataaataaaataaagactttgtaaagtggcatcgatgctggtcagcagagttatatagccagtctgggtgttctctgggtcctgtgttgggaaaatgctgtgg

SEQ ID NO: 185131 - DNA, 201 bp, Homo sapiens
tgagtttttaaatagttctttactgccccttccaaagaggcagccttctttgttttgtttttgctgaccaatttccttccattcttttctttttcttcctrtttctcttcttcccgcgtcttccacccagcatcacatgtagtgctagattatgggcatacgatgataaatataagagagagaggagagaaagagtatgtg

SEQ ID NO: 185132 - DNA, 201 bp, Homo sapiens
tgtacgtttccccactgtcaacttgtcacctgggacttaagcaactcagctttgagccccgcctttctaccagccttgcaaagcccctctcccacatcctccttaggctttccctccaggtaaacccatgcaaataaaggtttggatatttcacctcagacctggttagatctcagttttgactaatttcttttccatggg

SEQ ID NO: 185133 - DNA, 201 bp, Homo sapiens
tctctggagattgccaccacaggtggcacattcttgtctctggagagctgagagaattctcctcctcctcctcacaactgttgcctctaaaaagaccagcscaaatagggcaagcagcccttcagaataaggttatgtccacattgattctaagacatgtcacctgattattttttggattgtattcaagtgcaaaagctc

SEQ ID NO: 185134 - DNA, 201 bp, Homo sapiens
atttccattacccagaggaagccgcatacccatttagcccacccactcttccttccttcccttcttcctttcccttcctccttcccccttcccccttcccrcttcttccttccttcctttcctccctccctccctcccttcttccttccttccttccttcctcccctttcttaccatcctaatgagtgtgaagtggtgtct

SEQ ID NO: 185135 - DNA, 201 bp, Homo sapiens
cacccactcttccttccttcccttcttcctttcccttcctccttcccccttcccccttcccacttcttccttccttcctttcctccctccctccctccctycttccttccttccttccttcctcccctttcttaccatcctaatgagtgtgaagtggtgtctcatcgtggtttcaatttgcatttccctgatgactaaatg

SEQ ID NO: 185136 - DNA, 201 bp, Homo sapiens
gtataatctcaattagataaaatagaagttaagggaggtccttgcagagataccatttgaacttaacaatcttggacctttgattgagaagtatactttctttttttttttttttttttttttttttttagtgaggcagagtctcactctgtcacccaagctggagtgcagtggtgcaatcctggcttactgaagcctgaa

SEQ ID NO: 185137 - DNA, 201 bp, Homo sapiens
gccttttcccaactccttgcgtctgttagatgttatcctaatatgttgtgtgcatctgttagatgttatcctaatacgttgtgtgcatctttttttgttgttttttttttttgcaaattctgaaatccctaaaagcttgattccatttcctaaaaacttgccataccacttgtccctcactcatgttttaaaaaccatctc

SEQ ID NO: 185138 - DNA, 201 bp, Homo sapiens
aattcaggattccttcctatcactgttcatcattatgtggtaaattctagcttatgcagtaagccagaaagagaaatagaaggcataagcattggaaaacatagataaaactgctttatttgtagaggatttgatgctttacctagaaaaagaatatacagatcaactattagaacttacaagacaattcaacaaagttgt

SEQ ID NO: 185139 - DNA, 201 bp, Homo sapiens
attcaggattccttcctatcactgttcatcattatgtggtaaattctagcttatgcagtaagccagaaagagaaatagaaggcataagcattggaaaacatagataaaactgctttatttgtagaggatttgatgctttacctagaaaaagaatatacagatcaactattagaacttacaagacaattcaacaaagttgtt

SEQ ID NO: 185140 - DNA, 201 bp, Homo sapiens
ccaggatttttctgtcgtgtacacacatgtgcaggcaatacttcctcctgaatttaagacgattcataatgagccttcttttcttccagattctgtctccattattattattattatttaaaattctaaatgcctcttgttttcttaaattttatacaagaatgtgcatatctgtttcttgtccttcttgctagtagttct

SEQ ID NO: 185141 - DNA, 201 bp, Homo sapiens
caggatttttctgtcgtgtacacacatgtgcaggcaatacttcctcctgaatttaagacgattcataatgagccttcttttcttccagattctgtctccattattattattattatttaaaattctaaatgcctcttgttttcttaaattttatacaagaatgtgcatatctgtttcttgtccttcttgctagtagttctc

SEQ ID NO: 185142 - DNA, 201 bp, Homo sapiens
aggatttttctgtcgtgtacacacatgtgcaggcaatacttcctcctgaatttaagacgattcataatgagccttcttttcttccagattctgtctccattattattattattatttaaaattctaaatgcctcttgttttcttaaattttatacaagaatgtgcatatctgtttcttgtccttcttgctagtagttctca

SEQ ID NO: 185143 - DNA, 201 bp, Homo sapiens
tcaggaactgagctaagcaccccatgtcatcatcagccgtatcaccattgggcaagaacccagaccaccaagtcaactccattctgtgtgaggggttcgascagaggaaccataaaaacctctgagcagggagggtgatcagcaagagaacattcacaattatctcccatgcaggccaagcctgcccacccaaattccatg

SEQ ID NO: 185144 - DNA, 201 bp, Homo sapiens
atgtattatttgaagacaggccatgttagattttgtcagtggcacatttccttgatggctgttttatcagcatgtttttttttaaccttccatagatatgyatctgcccccaaatagcgtttaatgaagaggtcttcgaaataaatctctgaaaacaaaagctactttattcatcatctgcatggagagcagccatggaaa

SEQ ID NO: 185145 - DNA, 201 bp, Homo sapiens
tttaactttgttcttagtaaaagtattctttaactattgcctatgcaataatcagtatattctactttcctctttgctgctttcttccattgtttagttaygttatttctactttgtcagaacatataacaattggatattagtctttcaatgtaatccccagcttttagtctgaaatctgtaatttttatgtattaacat

SEQ ID NO: 185146 - DNA, 201 bp, Homo sapiens
attattgcagttccaggagagaatgaaaggaatggcagagaagtagggctggaatttttcagaattggaacaagacgtgaaccctctgattgagagcgctstcagagtactgagcagaataaataaagataaatgcagacccagcctcatcagagtcaaattgcagagccttggggataaagctacaccgcttccaaactg

SEQ ID NO: 185147 - DNA, 201 bp, Homo sapiens
ttttttatttttattttttaattttttacccctggcttcatgcttcctgtagagttcagtcactcctctctatctcggttttacttcttcaatgctgttargaatttctgtatttttttcagtagcatttatcaggaagtttggttctaattatcaaaaccaacattactagaaatggcagctgactcattcttttattaa

SEQ ID NO: 185148 - DNA, 201 bp, Homo sapiens
ttatgtagaaagcaataagaaagtataataaaaatgttccatattctcagaaatttaaaaatatacaagtatagcttcatgggttaaagagaaatattagyaataaattacaaattacttatcactgaccagcaatgaaaatactttgaactgctcaaatgtggggaaccatagtcacttcattatggagaaacttggtat

SEQ ID NO: 185149 - DNA, 201 bp, Homo sapiens
ttcttttccctaggagtgagggaaaggcaattatctaatgataattcttcaaaggggtcatgtttccaagaacatgatgaattcttagtttttaccaatayagcataaaggagagtgatgagaagactggtctcactgtttcacagtctgcccagcctctattctttttagcctttggaacctctactgacaatagataat

SEQ ID NO: 185150 - DNA, 201 bp, Homo sapiens
ttgtaaaagttgtattcccaagataatgtttaacttttgggggagtgtgtgtgtttcaagtccctttttcctttaatcatttgagggaacttttgtcaggkgtgtgtgtgtgtgtgtgtgtgtgtgacctgagaaaacgcgcacacatgcctggatgcacacgtgtacacacgtacttgcacatgccattgagtgcccatt

SEQ ID NO: 185151 - DNA, 201 bp, Homo sapiens
ggtaccgatgtcaaagtgggccacatttctttttttttttttttttttgagacagagtctcaaaagcacccaaagaaatgttccttaaaatatatgtacakcatggaagagagatatatgcacagaacaaacagatgctaactatataccttttcacatcagccataattctgcaaggctcattaattcaaggagatttac

SEQ ID NO: 185152 - DNA, 201 bp, Homo sapiens
gacatcagcaacataattttggaagctgaaaagcagatggagaagtggagcagttaggtttcagtagacccaagaaagctgaaatccaagttggcaggggracaatcaagaagcaatccagcttgaactacaaaaccccccaaaagattcaggagttagtagtacaagcttcctcttgaagtagggctaacacaggactgt

SEQ ID NO: 185153 - DNA, 201 bp, Homo sapiens
ctctggctccatggcaggatctggagggaggaagggaagattcatagcatagcaggtctagcgtaccgcacttgaaaagactatggtatttattggttcattgaactcaactaaacccaaaatactgggtacctcatgtgtgcagttcttagtgccaggaatgatgggctgtgtaaggaagaatccagtaactccctcaac

SEQ ID NO: 185154 - DNA, 201 bp, Homo sapiens
ggcaggagaatcgcttgaacccaggaggtggaggctgcaatgagccgagatcacgccactgcactccagcctgggcaacacagcaagacaccgtctcaagaaaaaaaaaaaagattaagattatattctttgttgaatataacaaagtgaatataaacaaaatgaaaatttgggggaaaagtaaaatatcatttggcatta

SEQ ID NO: 185155 - DNA, 201 bp, Homo sapiens
gcaggagaatcgcttgaacccaggaggtggaggctgcaatgagccgagatcacgccactgcactccagcctgggcaacacagcaagacaccgtctcaagaaaaaaaaaaaagattaagattatattctttgttgaatataacaaagtgaatataaacaaaatgaaaatttgggggaaaagtaaaatatcatttggcattaa

SEQ ID NO: 185156 - DNA, 201 bp, Homo sapiens
gcttgaacccaggaggtggaggctgcaatgagccgagatcacgccactgcactccagcctgggcaacacagcaagacaccgtctcaagaaaaaaaaaaaagattaagattatattctttgttgaatataacaaagtgaatataaacaaaatgaaaatttgggggaaaagtaaaatatcatttggcattaaagataacccct

SEQ ID NO: 185157 - DNA, 201 bp, Homo sapiens
ttgaacccaggaggtggaggctgcaatgagccgagatcacgccactgcactccagcctgggcaacacagcaagacaccgtctcaagaaaaaaaaaaaagattaagattatattctttgttgaatataacaaagtgaatataaacaaaatgaaaatttgggggaaaagtaaaatatcatttggcattaaagataacccctta

SEQ ID NO: 185158 - DNA, 201 bp, Homo sapiens
ttgctgtgtaaccctgtgaaatcactagcctctctggacttcgttttcttacatgtatggagtagggattggaatagccttgctattgcagttgttgtaaraattaaatgaatggatatatgaatgtctagtgcatggtaagtccacaagaaatacctgctattataatcaccattgctgttgtaaaaagtaatcaaggga

SEQ ID NO: 185159 - DNA, 201 bp, Homo sapiens
gtccctgaggaagacattatgtttatcattctggtgagggaacaaaccagctttctgctccagagggagagactaaccatcttccagtgctatttggtgtrcaagccaccacaagttttatgaaaactccatagagcactgtcccccaacaaagaggtggaaaacaagaaaaaatatggaatttaaaaatatttttaactt

SEQ ID NO: 185160 - DNA, 201 bp, Homo sapiens
tgctctgcacagagcacattgcttaagtgcgccatttgtcacttctgtgtttttagttgatgactctagtgttgatactataggaatcagtataagattayttaaaatgaagccttacaaggtgttcagcattcagaatattttgtcatcgagagggaggagctttgggaaattagtgaatttgctctacctaaaagcttg

SEQ ID NO: 185161 - DNA, 201 bp, Homo sapiens
gtattaggagagggctctgatgctgttctgtggtattataggcccaagtcaagagctcccaaatcctgccctgctagtcatttggcctcctgatgtcaaasagaggtcctgagattcggagagtgaagcggagtggctgccggcaccaccttctcacctgcaagagcacccagagccttgtccggagttgggcttattgga

SEQ ID NO: 185162 - DNA, 201 bp, Homo sapiens
tactggcaacagcccaaactgccaactttcttcatttattgacattcttaaaaagttaacttcctgtcgaggatgtttttgacagggatattaagagaaaracttgttggtcagatgtaggttccagctggccacactgtaaaggccactgggaatcggaaccttggcagatccatgcagaggtaatagtttggaagttgg

SEQ ID NO: 185163 - DNA, 201 bp, Homo sapiens
tcagtcactcctctctatctcggttttacttcttcaatgctgttaagaatttctgtatttttttcagtagcatttatcaggaagtttggttctaattatcmaaaccaacattactagaaatggcagctgactcattcttttattaaaacattttttatgtttgattatgggactttgggtgggaagaatgatacattcatt

SEQ ID NO: 185164 - DNA, 201 bp, Homo sapiens
gcagtgagccaagattgcaccaccgtactccagcctgggcaacagagcgagactctgactcaaaaaaaaaaagaaacttaaattttagaatagcagtgaasttgtagcttctttcatttcggcatatgttgctttattgttttaaaaatattgtcagcctagacttttggtagtcagcttttattacagatcgatgttgct

SEQ ID NO: 185165 - DNA, 201 bp, Homo sapiens
tgaacccaggaggtggaggctgcaatgagccgagatcacgccactgcactccagcctgggcaacacagcaagacaccgtctcaagaaaaaaaaaaaagattaagattatattctttgttgaatataacaaagtgaatataaacaaaatgaaaatttgggggaaaagtaaaatatcatttggcattaaagataaccccttaa

SEQ ID NO: 185166 - DNA, 201 bp, Homo sapiens
caacataggtggtcaataaatatttggtgaagaaggtgtttgataaagttgcatatatttacctcttgagtcaataaaaatgcgttatatttgcagatagmcacacacacacacacacacacacacacacacacacacggtgctatgtagtagctggtaaccacatgtgtgctgtcagtccatacagggacttgattgtca

SEQ ID NO: 185167 - DNA, 201 bp, Homo sapiens
ccacctaatccataacccctggtcaacattttggtatatttccttctaattttgttttcatgcacctcttgtttgttctgcaaaaagtacagacgttgtcttttttttttttttgcttctacaaagtactgttacagtagctccaacaaccagtgaaaacaaaatttgttctaatagaaaaatgagcagcagctcaataaa

SEQ ID NO: 185168 - DNA, 201 bp, Homo sapiens
gtaatgggatggctgggtcaaatggtatttcagttctagatccctgaggaattgccacactgacttccacaatggttgaactagtttacagtcccaccaayagtgtgaaagtgttcctatttctccacatcctctccagcacctgttgtttcctgactttttaatgatcgctattctaactggtgtgagatggtatctcat

SEQ ID NO: 185169 - DNA, 201 bp, Homo sapiens
gtgaaaccagacactgtgggctgcaggatcgctagccgggaggtggaaacagaggcttagctctggtggcagtaagactaaatgtgccaggccagagcatgtactctgcttgaaagcgggcagggtagtggtcctgtcctctgatctagaagggaggcccgaatcactgcctgccctaacctctagcctatagaaagcttt

SEQ ID NO: 185170 - DNA, 201 bp, Homo sapiens
atatcctttgcccactttttgatggggttgtttttttcttgtaaatttgtttgagttcattgtagattctgggtattagccctttgtcagataagtagatkgcaaaaattttctcccattttgtaggttgcctgttcattctgatggtagtttcttttgctgtgcagaagctctttagtttaattagatcccatttgtcaa

SEQ ID NO: 185171 - DNA, 201 bp, Homo sapiens
ttttgctgtgcagaagctctttagtttaattagatcccatttgtcaattttggcttttgttgccattgcttttggtgttttagacacgaagtccttgcccrtgcctatgccctgaatggtattgcctaggttttcttctagggtttttatggttttaggtctaacatttaagtctttaatccatctcgcattaatttttgt

SEQ ID NO: 185172 - DNA, 201 bp, Homo sapiens
ttttctcaggtttgtcaaagatcagatagttgtagatatgcggcattatttctgagggctctgttctgctccattggtctatatctctgttttggtaccartaccatgctgttttggttactgtagccttgcagtatagtttgaagtcaggtagggtgatacctccagctttgttcttttggtttaggattgacttggcaa

SEQ ID NO: 185173 - DNA, 201 bp, Homo sapiens
tctcaggtttgtcaaagatcagatagttgtagatatgcggcattatttctgagggctctgttctgctccattggtctatatctctgttttggtaccagtaycatgctgttttggttactgtagccttgcagtatagtttgaagtcaggtagggtgatacctccagctttgttcttttggtttaggattgacttggcaatgt

SEQ ID NO: 185174 - DNA, 201 bp, Homo sapiens
gagtgggctcggcgggaaaggaagggccgccccagtgggttacacgggaggccgctccaggcaagggttttcaatttcagttcccttttccccacactgcrtggtttcacttctctgatggggcttagaatctgcgccattaggcagcttccacagcttagacgcctttcctaaggaagggttggcacagggctgtcagcc

SEQ ID NO: 185175 - DNA, 201 bp, Homo sapiens
tctgtagatgtctattaggtccgcttggtgcagagctgagttcagttcctggatatgcttgttaacttcctgtctcgttgatctgtctaatgttgaccgtrgggtgttaaagtctcccattattattgtgtgggagtctaagtctctttgtaggtctctaaggacttgctttatgaatctgggtgctcctgtattgggtgc

SEQ ID NO: 185176 - DNA, 201 bp, Homo sapiens
gtgtctctgcacgtgagatggtttcctgaatacagcacactgatgggtcttgactttttatccaatttgccagtctgtgtcttttaattggagcatttagyccatttacatttaaggttaatattgttatgtgtgaatttgatcctgtcattatgatgttagctggttattgtgctcgttagttgatgccgtttcttccta

SEQ ID NO: 185177 - DNA, 201 bp, Homo sapiens
tgttccaggggcagcagaagaacccctgtgctgagcatggtgaggagggggaagcgcagggagagaaatggtcagtgaggctgtcaagggctacactgatsgggcctgaggaaccaaggtgagagctggattttattctgagtgcaacgaggatgtccttggaggggtgtgaagcaaggtgaaaggtcatgtccaccttgt

SEQ ID NO: 185178 - DNA, 201 bp, Homo sapiens
gcccaggcttgatggcaagagctcacagggaatgttccaggggcagcagaagaacccctgtgctgagcatggtgaggagggggaagcgcagggagagaaawggtcagtgaggctgtcaagggctacactgatcgggcctgaggaaccaaggtgagagctggattttattctgagtgcaacgaggatgtccttggaggggtg

SEQ ID NO: 185179 - DNA, 201 bp, Homo sapiens
ttgcaattttgaatggatcattcactctttcatgattgtgtgaaatcgtgcatcattcaattagaaatattggttcagtgagttatgtaactcttttaagygtcgacacatttcattatctaagatcaaaaaatcacattcattagtatcatcaccaatcctatcaggaatgccttaagtattgggaaatatggagacaca

SEQ ID NO: 185180 - DNA, 201 bp, Homo sapiens
ggactggaccaaggaaaatgctggacactttggtgactaagggcttggagctttggaggaagacagctccaggcccactcctgactccatccgctccatcrctccttgctgcctgggtccttgacctctcggggcctccgtttctctcgaggctgttgtgaggatcagatgaaagaaagatgtgaagtgtcagcacataag

SEQ ID NO: 185181 - DNA, 201 bp, Homo sapiens
cctccgtttggggtccctgacttcccgcaacatactgtccctcttcaatggctgaagctataggatgcgatgcctgagagcattgaacaatcatgtttctyaactttgcacttgaggagcagaggtagccagtctgcaaacagaaaaggaagacagcagatgcagaatgaaaacagtatgtttgatatccagggtgtggtt

SEQ ID NO: 185182 - DNA, 201 bp, Homo sapiens
aaccttgactctcaagatttgtgaatgccccactgttggtccaacattcaaatgggcagctagagagagtggggctgggcacagcctcttaaccaccgaawtgtcttctgtttacaattctgcaggctccttccccatgttttggttgggatcagtgcagaagcttccctggtttgtctctagcacctcccaccactgcct

SEQ ID NO: 185183 - DNA, 201 bp, Homo sapiens
aagattttagttttgaaaatagtttctgaataagagtgattatatagatccatgattatgagaaaaccagtttgtcagtcaataaatagacatttcaaaayaatataattttaattatttgtggtacctactttcactctcagaagtgtcttggtgtgaatgataaattatatggctattttattaatagcttttgtgaat

SEQ ID NO: 185184 - DNA, 201 bp, Homo sapiens
agatggtttcctgaatacagcacactgatgggtcttgactttttatccaatttgccagtctgtgtcttttaattggagcatttagtccatttacatttaargttaatattgttatgtgtgaatttgatcctgtcattatgatgttagctggttattgtgctcgttagttgatgccgtttcttcctagcctcgatggtcttt

SEQ ID NO: 185185 - DNA, 201 bp, Homo sapiens
ctctgttttttccccatctttgtggttttatctacccttggtctttgatgatggtgacgtacagatggggttttggtgtggatgtcctttctgttcattarttttccttctaacagtcaggaccctcagctataggtctgttggagtttgctggaggtccactccagaccgtgtttgcctgggtatcagcagtggaggctg

SEQ ID NO: 185186 - DNA, 201 bp, Homo sapiens
ttttggtgtggatgtcctttctgttcattagttttccttctaacagtcaggaccctcagctataggtctgttggagtttgctggaggtccactccagaccstgtttgcctgggtatcagcagtggaggctgcagaacagcggatactggtgaacagcaaatgttgctgcctgatcgttcctctggaagttttgtctcagag

SEQ ID NO: 185187 - DNA, 201 bp, Homo sapiens
gggagtttgagatcagcctggcaacatagtgagaaccccccacacctctacaaaaaaaaaaaaaattagccaaacttgctggcacgcacctgtagtcctgrccattggggaggctaaggtgtgaggatcgtttgagccctggaagagttcgaggccgcagtgagctatgctcacactattgcactacagcctgggtgatag

SEQ ID NO: 185188 - DNA, 201 bp, Homo sapiens
agcatgggttgaagtagacagcagaagtgaaagccaaataatgatgtctgattctcgctcgctgtgatatgggaggacaagggaagaaaagataaagcacyacagccagcagcactgatttaggaaatatcttactcacaaggtttattagactcttcttgcactgctataaagaaatacctgagactaaataatttataa

SEQ ID NO: 185189 - DNA, 201 bp, Homo sapiens
gcagtggctccacctgtaatcccagcactttgggaggctgaggtgggtggatcacgaggacaagagattgagaccatcctggccaacatggtaaaaccccrtctctactaaaaatagaaaaattagctgggcgtggtggtggccacctgcagtcccagctacttgggaggctgaggcaggagaatcacttggacccaggag

SEQ ID NO: 185190 - DNA, 201 bp, Homo sapiens
acaaatcacctgagaatctctgtgaactcacccaacagaagtgtgtttctcactctggccatgtgtgggtggggtgccctctgcatcattctcacacacasagctggtctgtgggggatcttctctctcggttgttcctggggctgctgggctgcagggaaccaagccacaccacctgcgtgtcctgccaactgctaaggg

SEQ ID NO: 185191 - DNA, 201 bp, Homo sapiens
gcacttatgcctagtactgggtctcaaatttggcagcacagttgaattatctggaaggcttcaaaaactgccaattcccagtttccaggtctggactgggrccttgcaccgagatcttttaaagctctcaggtgactatcatgggtgagaatttgagaactctggagtttaggaactcaggggacactcccaaccacctat

SEQ ID NO: 185192 - DNA, 201 bp, Homo sapiens
gcacactgtagctccattttccaaatacatgatctgtttaagtaaagcattctagagctgtaaggcaaatatgaaaggattcaaaaagacttgaaaatccrtttctgtcctcaaggaattcactagatagttgggggaccatgatattgaaacatcaaaagttaattgaatacaaggttaccagaatgattgttccatatg

SEQ ID NO: 185193 - DNA, 201 bp, Homo sapiens
gactattagcagaagtcaccaggcattgtacatgctgccttctcatgactggagagggcctaggatgactgcatctaaatttttcattgaaaatgccacgrctacaagtcacggagacataaatacatgcattcactcaattgtacatttagttttccttattagtaaaatgtaaggcttgattcatccagatgacagctt

SEQ ID NO: 185194 - DNA, 201 bp, Homo sapiens
accgggctctgcccctagcagcccccggagagttagggccccgtgtgcacatctctgcaaaggctgttggtcaaacacatgaaaagccggtgttagtggtrtctgcctgagccaccgtaaatcacctctccctctgggctgccactgcaccttgtctgtgcacagtctggaggcgtggggcgtgtgtcattgggggaagca

SEQ ID NO: 185195 - DNA, 201 bp, Homo sapiens
gacagaatagaaaagagaagttctctgtatttcttctgtcaatatatttattcattttttgttttcatgaaaacgtttgcaagattaatttacctgctatrcaattcacccatttaaggtctgtaattcagtggtgttttttagtatattcacagatatgtgatctccacagtcaattttagaacattttcatcaccccag

SEQ ID NO: 185196 - DNA, 201 bp, Homo sapiens
ctgtaagcacttgcttgttctcactcacttctattcttccatatgtgcttttcctgcattcttttattagagacctgttggatatcatcatcttgttgccrtatttgccgaaaggaatgaatgtgtccgtgcagtttcctgttgatccctgtctggagttagcagcatggacctaccccaagccgagctggcaatgagggt

SEQ ID NO: 185197 - DNA, 201 bp, Homo sapiens
atcgtcttctctctaggtgctgcctctgattctgcctctgattctttcctttaccttctcttcccattcagtgcctcctggtagctagcttgtggtaaagyctccatttactacatcatatccaattacattctgggtagcaaagaccatttaaaaacttaaggttcactctttctataattagtgatgaatgggaactgc

SEQ ID NO: 185198 - DNA, 201 bp, Homo sapiens
tctggggatagttttgcccactacctatgcgagacctgtcttagctctgtaaccgataacccgtgaattatgaggttttccccttggctgttgagaactgrcactattcctggtcctgtgtgagctccaactttattccctctaatccttttgtgtggtttgttccctgacctcaggtagatttttcaacacacatgatca

SEQ ID NO: 185199 - DNA, 201 bp, Homo sapiens
cccacagacttgctcacagtcacccagaatactctggaggaaagccaaaactagagctcaagtctgtatgggtctagtttaggactccgggcagcatcagkctccctctcatttcacattttccaacactagtatccttgtgagtggagcatgaataataccttttctgcctccccaggaggggaagggcaaatctgagca

SEQ ID NO: 185200 - DNA, 201 bp, Homo sapiens
acacgtaagaagcaaaataaacaatagagtgctggattataacacaaagtataaaataaaaatccatccgattataccaatataaatgaatgcgggatggdtgaatgaatgaatgaatgaatgaatgaagagagaaatctcccatgcacaggaattccaagtaattcatactcttcccccaacaagatggaacataactcc

SEQ ID NO: 185201 - DNA, 201 bp, Homo sapiens
agaccatgacgatacagaaaagaaatgcaatggaagatctacacagatgggcaaacctcctgcaaatattttacgtctgagaggaaaaatagagtgtgacrgtaatgccgcctccagaaagactagttatttaaccgaaaaaaatgaacgtaaaagattaagtgtttggtaagttctgaagatgagatagagacagaatag

SEQ ID NO: 185202 - DNA, 201 bp, Homo sapiens
agcatggatgctggtgaaaataatgtagtgacgttggttcactccttctgactaacatactcgtgtaccaggctaatgtgtgatgttaatatcaggggaasctcagtgggggaaatatggggactctgcagtatctttccaatttttctgtaaatctaaagcttctaaaataaaaagtttattaaaaagtaattatataaa

SEQ ID NO: 185203 - DNA, 201 bp, Homo sapiens
gtaagcatgattaactgggagaaattataaccaaaaccatacgtgagttcacttaaagtacatgatggcacaagaccatgacgatacagaaaagaaatgcwatggaagatctacacagatgggcaaacctcctgcaaatattttacgtctgagaggaaaaatagagtgtgacggtaatgccgcctccagaaagactagtta

SEQ ID NO: 185204 - DNA, 201 bp, Homo sapiens
gatgctggtgaaaataatgtagtgacgttggttcactccttctgactaacatactcgtgtaccaggctaatgtgtgatgttaatatcaggggaacctcagkgggggaaatatggggactctgcagtatctttccaatttttctgtaaatctaaagcttctaaaataaaaagtttattaaaaagtaattatataaacttaat

SEQ ID NO: 185205 - DNA, 201 bp, Homo sapiens
ctgcagagaaaaaacagaaacagtgttaattctttagcactatggaggtcaggaagaaatcgaaaacatgtagtatcaaagcatctggccccaaaggaccmctagaccaggacatgggggtaggggtagggtgaggaagaaaggaggaaggtcagattcaagggggtccagtctgtaaaaggccttccttctgtgagattt

SEQ ID NO: 185206 - DNA, 201 bp, Homo sapiens
atctgagacctaaagtgccccaatgttgtaacaaaagactgtaacaaaggtcgtgggagttatgagccaggaaccgtggatagaaacatagatatgtatakgtgtgtgtgtgtgtgtgtgtgtgtgtgtgtgtgtgtgtgtctatgtgtatctctctcacaaccccctctctagccattctgttgtttttgaagaaactgg

SEQ ID NO: 185207 - DNA, 201 bp, Homo sapiens
tcataactctagtaaatgcctcctaagaatgcaacagtgctttttctaccatgccctagttccctcatattgcaaaggcatgaaaatgagaaggtatcagcatatatatatatatatatatatatatacagagtctcactctgtcgcccaggctggagtacagtggcgtgatctctgctcactgcaacctccatctcccag

SEQ ID NO: 185208 - DNA, 201 bp, Homo sapiens
cataactctagtaaatgcctcctaagaatgcaacagtgctttttctaccatgccctagttccctcatattgcaaaggcatgaaaatgagaaggtatcagcatatatatatatatatatatatatatacagagtctcactctgtcgcccaggctggagtacagtggcgtgatctctgctcactgcaacctccatctcccagg

SEQ ID NO: 185209 - DNA, 201 bp, Homo sapiens
ataactctagtaaatgcctcctaagaatgcaacagtgctttttctaccatgccctagttccctcatattgcaaaggcatgaaaatgagaaggtatcagcayatatatatatatatatatatatatacagagtctcactctgtcgcccaggctggagtacagtggcgtgatctctgctcactgcaacctccatctcccaggt

SEQ ID NO: 185210 - DNA, 201 bp, Homo sapiens
ctaagaatgcaacagtgctttttctaccatgccctagttccctcatattgcaaaggcatgaaaatgagaaggtatcagcatatatatatatatatatatakatatacagagtctcactctgtcgcccaggctggagtacagtggcgtgatctctgctcactgcaacctccatctcccaggttcaagtgattctcaaacctc

SEQ ID NO: 185211 - DNA, 201 bp, Homo sapiens
aagaatgcaacagtgctttttctaccatgccctagttccctcatattgcaaaggcatgaaaatgagaaggtatcagcatatatatatatatatatatatakatacagagtctcactctgtcgcccaggctggagtacagtggcgtgatctctgctcactgcaacctccatctcccaggttcaagtgattctcaaacctcag

SEQ ID NO: 185212 - DNA, 201 bp, Homo sapiens
tagtgattttgaggattttttttcacatacctattgaccatttatatgtcttcttttcagaaatctttattcagatcctttgcccatttttctttctttctttttttttttttttttgacatggagtctcactctgtcgcccaggctggagtgcagtggcgcgatctcggcccactgcaagctctgcctcctgggttcaca

SEQ ID NO: 185213 - DNA, 201 bp, Homo sapiens
cgtactctaggatgtgcttctttgactaggaaatgtagctcagagcttgcctgggagccccagtgatgcccttttcactgaattggatttatgtcctcctrtgttttttagttttccctaatcctgcttctcatccacaccaggcctctggtatttccattactgtaataaaaataaaggctttggcaacttctctcaagc

SEQ ID NO: 185214 - DNA, 201 bp, Homo sapiens
aaaataaaatagaacttccccgcttcagccttgccaaaagtctttatttggaatttattatatttgtcaatttaagttatttgtttttgctggttgcgaakcactgggatattttctttctttttcttcttaaacagatgcatttgttacatgtacacaaggccaagcttttttgcactgaaggacattggtatatgaggg

SEQ ID NO: 185215 - DNA, 201 bp, Homo sapiens
tagagaaaatttccatctcctggaaaagttctcttatgtcctaccaatctgttatctgtctctatagtttcgccttgtctagaatgtcatgagaattgaaytcatattgtagataatctttagtgactaatctctttttgttaaacataattcttttgagattcatgtattttgttctgtataggaataagttatttttat

SEQ ID NO: 185216 - DNA, 201 bp, Homo sapiens
gtcgggaggctggtacacagagcaggcgaggtacagtgctgccttccccatccctgtggcaggtaatgtcctgctggagttgagacaggcttagaattctygctatacctcttccatttgggctcatgtcactgtcctggaggtatttctacttatttctgaagtcccacttgagtgattgcttctggactttgggctctc

SEQ ID NO: 185217 - DNA, 201 bp, Homo sapiens
ggttaagcctaatgaatggccttcccagtttcttgcatgtaattaacactcaggaaactttgattgacttgaaatggaaggtacccatcatccagggctgyagattcagaggaaagaggccttcagtctgggaaagtttaccaaggaaaccgaatagcaagctgtgtatgtctgtctcccttctaatcccttatgaatggg

SEQ ID NO: 185218 - DNA, 201 bp, Homo sapiens
gtttctccatcatgaaaatgttgcaaattttagggctgttgtaaacatatatagctgtagatcaagtcatttattctaggttgaatttctaagatattcarctctcaacattagaatcattaagaatattactcctacatttactacactttcttcacaatcagcatgcccttagagtgggagaattttgatgattgattt

SEQ ID NO: 185219 - DNA, 201 bp, Homo sapiens
gaatgcaacagtgctttttctaccatgccctagttccctcatattgcaaaggcatgaaaatgagaaggtatcagcatatatatatatatatatatatatakacagagtctcactctgtcgcccaggctggagtacagtggcgtgatctctgctcactgcaacctccatctcccaggttcaagtgattctcaaacctcagcc

SEQ ID NO: 185220 - DNA, 201 bp, Homo sapiens
atgcaacagtgctttttctaccatgccctagttccctcatattgcaaaggcatgaaaatgagaaggtatcagcatatatatatatatatatatatatatasagagtctcactctgtcgcccaggctggagtacagtggcgtgatctctgctcactgcaacctccatctcccaggttcaagtgattctcaaacctcagcctc

SEQ ID NO: 185221 - DNA, 201 bp, Homo sapiens
cttcccaagggcaggcactaggtctgtcttgctagttctcagtgcccacccacccccaactgggcccatggtgggatcttgctaagtagttgttgagtaartgaatcaggtacttgttactgtataccctttttgaagatttcctgtgatacaactgttggcggcatttttgctgatagcttttcaacaacttccctattt

SEQ ID NO: 185222 - DNA, 201 bp, Homo sapiens
atttagttatgctcatctgaagtaaaggctgcctgactgggtgcagtagctcatgcctataatcccagcactttgggaggctgaggcaagaggatagcttragcccaggagttcaagaccagcccgggcaacaaggtgagatcccctctctacaggaaatttaaaaattagctgggtctggaggcacacacctatggtccc

SEQ ID NO: 185223 - DNA, 201 bp, Homo sapiens
ggtctggaggcacacacctatggtcccagctacttgggaggctgaggtgggaggatctcttgggctgaatggtcaaggctacagtgagctgtgatcacacyactacactgcagcctgggtgacagagtgaggcaagaccctgtctcaaaaaaaattaaaaaaaaaaaaaaaaaggaagaagaaagaaaaagaaaggaaaga

SEQ ID NO: 185224 - DNA, 201 bp, Homo sapiens
agttagttgcattgtgaaatctgaaattatatcaatgactgatataatttttcacttgttacattgaaatcgattagtctatcttgcaattttgaatggahcattcactctttcatgattgtgtgaaatcgtgcatcattcaattagaaatattggttcagtgagttatgtaactcttttaagcgtcgacacatttcatta

SEQ ID NO: 185225 - DNA, 201 bp, Homo sapiens
ggtgtcattcacagtagggcacagtagaggcctgactttaaaagactaggtatgctgccaccttcctcaaaacggcacctgcactgtgttcactcacatargtagaaacctggctctttttttctttttagaatctttttttttttaatcctcacttgggattaatcacctccagaaggccctcatcaggggttacaatac

SEQ ID NO: 185226 - DNA, 201 bp, Homo sapiens
tgtgcatgtttgaggccatgctgcccacgcgtagacttggggaaggaatttgcagcgcctcactccctcaccagcaggcccagtgccagggggctcctagrtgatggctggagcccgccagtatgatgctaagaatgaagactctgctgcagcatgggcaaatatttaggcaatgatgataaatgaaataaagcctgaaac

SEQ ID NO: 185227 - DNA, 201 bp, Homo sapiens
gtttgtttactgaatgtttaataattgttcatttattcacctatctgcttacccattgatctgtccatctgtccatgtagctgagctgcccaatatccatcctgggacagcagtgccttgggagctaaacatactcaaactgtgagcctttctagaaagagagagagacagcgagagagcgcaattgattgattgaggata

SEQ ID NO: 185228 - DNA, 201 bp, Homo sapiens
atggtaaagacagaggaaaatgttttggtcacagggaagatcacttaccgagtcctagatctatttatgtagaaaaaggattttctagattacaaagaggtttttttttttacaactagaactgtttttcttagatttattttccaaagatgtgtcacaaggcagtaattcaccatcatcagttaatatgtccgagcccag

SEQ ID NO: 185229 - DNA, 201 bp, Homo sapiens
gctgatgttctcaaagagcaatagtctagactagaggggaaattaactttcatggaataatcacacatgtagatgtgagtgacagctgaaataagcatctrcaacttgatgctttaagagcagtgagcaggctgggcgccatggctcacaggcccgtaattccaatactttgggagactgagattggaggataacttgggc

SEQ ID NO: 185230 - DNA, 201 bp, Homo sapiens
tcatagacagcagctaagaaggaaaataaatgcaattaaaacaaatcaattaaagaaaaatctgccttctcctgtggaatctgggccataggaaagcctcsctgtgtttgataattacactcttgtctaatgtttgactctcaaaatatcttttttgatgggcaggcaattatgttttaactgtcaagagctgggttttgg

SEQ ID NO: 185231 - DNA, 201 bp, Homo sapiens
atgatgccaggaagccatcctgtttttaggactgaaggggcatttttctgtgtaagtctcgtatggtttggtggagtgagataaggatgagttttcttagmataagaagctagaactgacatgacagagagggagcagcagggagataagagagggagcagcagggagatacagggtaaaaatggtgagatttgcttgagg

SEQ ID NO: 185232 - DNA, 201 bp, Homo sapiens
tcaagagctgggttttggggccgagtgccgtggctcctgcctataatcccagcactttgggagtttgagtcaggaggattgcttgaggccagaagttcaasaccagcctggtcaacacagcgagacctcatctctaaagtaaaaaaagtagagaaattagccaggcatgatgacgcgtgcttgtagtcccagctactcaga

SEQ ID NO: 185233 - DNA, 201 bp, Homo sapiens
gggaggccaaggtgggtggatcacgaggtcaggagtttgagaccagcctggccaacatagtgaaaccccgtctccactaaaaatacaaaaattaactgtaygtggtggcatgtgcctgtagtcccagctactcaagaggctaaggcagaagaattgcttgaacccaggaggcggaagttgcagtgagccaagattgtgcca

SEQ ID NO: 185234 - DNA, 201 bp, Homo sapiens
caaagaaagtacagaaagttcctgtataatccatattcagtttatcctattattatcatcttatattagcatggtacatttgtcacaattggtgaaccaatttttttttttacattattacctgtattcatttttgttcttttgtttctaaactctcttgctatgaccttttcagttatctttggcagtgggagaagcact

SEQ ID NO: 185235 - DNA, 201 bp, Homo sapiens
atatggtaacagcaagaagagttggttacgagtcacgaagctagtcagatttctttccaacagttaaaataaaaaaacttaacacagaccatacatttagaaaaaaaaaatgcagtttcaagactcctgaaagcataaaactttaaccaaagagttgcgtgtgtatcgttgtcggtttttttcattttctagaacgtaaga

SEQ ID NO: 185236 - DNA, 201 bp, Homo sapiens
agtaccagcccctcctgctgtcatgggcgtactagggaacagtcctttgctcagccggctcctgggtttctgcaggacctcagcaggctgctaactcccgratgtgagctggttgagggcagatactgggtccccttcatgtgcttctctgtgtccaactcagtgactgaaacatgctgtttgttgaataactaaaggaat

SEQ ID NO: 185237 - DNA, 201 bp, Homo sapiens
ctaatcttgtgtgcctttcatgtttcttcgcacatagctttctatacatatttgttgaattaatgagtcaagagaaaaggaagactgtctaagatgggtcrattgatgccaaagtgtttgcagacaatacattttgtagatgctcatatttttatatggctgctctagccttttaaaatatgccatatttggctgagcgcg

SEQ ID NO: 185238 - DNA, 201 bp, Homo sapiens
ctggcatgtccactcggatgacctgttgtgtttcacattcgacataaaactcattcatctataccatggcatgtggagcttgaaggaacctcagctttatytcccagggtttgctgatggaaatgctgacccatttcttctcgccccgaggatcctttcccttcccactcctgccattatacaatcatcaactcacatagc

SEQ ID NO: 185239 - DNA, 201 bp, Homo sapiens
tgcagtatagggctttagtgcatttcttcccctgtgctcatctctgtaacttgattaattggcatgtggtgcattacagaaaatccaggcaatggcaaagstggttcaatatcaattagttaaaacagggagggacttcccatagagaccttaggacagagttgtatttaactgggcccttgaaacacaagtcttcccgaa

SEQ ID NO: 185240 - DNA, 201 bp, Homo sapiens
acggggtttcaccatgttggccaggatggtcttggtctcttgacctcgtggtctgtccgccttggcctcctaaagtgctgggattacaggtgtgagccacmacgcccagctgggtgtttctatggtaagaaatgtgagtgtgcttatgtttagcagtgattcttatttctctgtatgtgaaccaaggattaataagcagta

SEQ ID NO: 185241 - DNA, 201 bp, Homo sapiens
agagtctcaggcacccagccagcccggttgagagcccttcagctctggcacagtgctccacagttactgaggtcatagctaccagctgtaccttggtgtcrtctagcacagaggtgttcgttgtttgatgagggacaggctgggaatgtgagcattcattcagatccatccccatctctgagaaaaatattcccagcatag

SEQ ID NO: 185242 - DNA, 201 bp, Homo sapiens
attgcctttgtgtttggatgccacacattcttgggaagctcgtcctaaaccagattgctgtaaaataagatattgactaagtgttgttcctatatatatakagagagatgaagtataaactctgctccccacagtcagcataatggaagatacagtcaaggcacggaagagggagagctctattcctgggggtaataatag

SEQ ID NO: 185243 - DNA, 201 bp, Homo sapiens
ttaggagattattacaatcgtccgagagaaccagtgcaggctaagccaaggaaatggcagggatgatcgataagaaaggatgtaaaagaggtggaattaaytggattttatccctctacatggggaagtgagggaaagggaaaagcaattaaaactaactcctgggttgcttttttggtgccattcacagagttaggggtc

SEQ ID NO: 185244 - DNA, 201 bp, Homo sapiens
aggaaaaggtgggatcataagctaatagacatctatacatgaaatactgttttcaaaaatgtaaggtttgcaaataattgatttggcttagaaaatccacrttgctcaacccataattacaagttttcattcatcttgctttagaagccatctttccaccacagcatatttcatgctgtgtttctggcaaagttttcatga

SEQ ID NO: 185245 - DNA, 201 bp, Homo sapiens
agagaaatgtgttttggggtagggacaggagagagacttgagtctgagacatgtttaggtttgggatttgcaagtagaaatgcccccttggcaggtgcatstgtgtatctgggcctggcacagtcgcctggggtggaggtggagatatgtgatctatgggcatatgatgatagttggagctatcagtttagctgcattcat

SEQ ID NO: 185246 - DNA, 201 bp, Homo sapiens
tggcgtacaaatatttagtgacagtggaaggaagggaagcgtgaagaagaccaaaaaagagctatcaacctaactgtatttgtgagaggggatagttgcarcatggtctggggctggagggagttttgttggtttgttggaccgtttgtttaaaggaaagaatggaatatattcatagaggagaaagagcctttggagaga

SEQ ID NO: 185247 - DNA, 201 bp, Homo sapiens
gaatatgtaaaacagtaaatgtcaaaatatcctatacatatgtgagattattttttattatcttgctatgtttgaagtgttagagtcaccgttcatagaayttcagattaatagaatcataacaacaggatttattttaattgagattttaggttagtgaggaaaaggtgggatcataagctaatagacatctatacatga

SEQ ID NO: 185248 - DNA, 201 bp, Homo sapiens
atgctgaactcattcagaggagtatattgtctctatattaaattttgcaataaatgtttaatttcagaatagttctaggtttacagaaaaattgcaaagamagtacagaaagttcctgtataatccatattcagtttatcctattattatcatcttatattagcatggtacatttgtcacaattggtgaaccaattttttt

SEQ ID NO: 185249 - DNA, 201 bp, Homo sapiens
gaactcattcagaggagtatattgtctctatattaaattttgcaataaatgtttaatttcagaatagttctaggtttacagaaaaattgcaaagaaagtayagaaagttcctgtataatccatattcagtttatcctattattatcatcttatattagcatggtacatttgtcacaattggtgaaccaattttttttttta

SEQ ID NO: 185250 - DNA, 201 bp, Homo sapiens
cctgctctcccttccttcttcctccctgcaccctgctcttcccctctctttacttttcttcattcccttctcttttaaaagagaacttccaagaaacaatrtaattgatgactcccctttaaggttcttatagagaatcaggtgagtgctaaaataaccagaaaacaaagaaactgatggagcaatgatagtggcagacat

SEQ ID NO: 185251 - DNA, 201 bp, Homo sapiens
attagattgctaatttgaaaagtcagtgaagacattttattacacatttaagcaactgtggcatatatgtgtttttatgtgtggaacacagctcttttaartggcttgtagcattttactttatttcttcttccttaagtcgtagtgtcttcaccgttgatttctggatccttagactgagtgattgtgatgtgagtggtg

SEQ ID NO: 185252 - DNA, 201 bp, Homo sapiens
aacctgcatctgatagttccaatgtctggatcgtcctgtgattgacttttgttaagaattggtgatattttcctggttgtttgtaaacaaattttggattktatattgcactttctgaatggcatcctgtcatctgtggtgactgttgctgttttagtagggtgatcaacctggtgagctctaggctttgagtgggacctg

SEQ ID NO: 185253 - DNA, 201 bp, Homo sapiens
ttgggactataagcatatgcccccatgcccggctaatttttgtatagtttttgtggagatggggtttcgccacattgtccatgctgagctcaactgatccmcgcacctcggcttcccagagtgctgggattacaggcgtgagccaccgtatttgagcaggaatataaaaatgtgaatttaaacaacttcattgtggtggtg

SEQ ID NO: 185254 - DNA, 201 bp, Homo sapiens
gggactataagcatatgcccccatgcccggctaatttttgtatagtttttgtggagatggggtttcgccacattgtccatgctgagctcaactgatccccscacctcggcttcccagagtgctgggattacaggcgtgagccaccgtatttgagcaggaatataaaaatgtgaatttaaacaacttcattgtggtggtggt

SEQ ID NO: 185255 - DNA, 201 bp, Homo sapiens
acaattggtgaaccaatttttttttttacattattacctgtattcatttttgttcttttgtttctaaactctcttgctatgaccttttcagttatctttgrcagtgggagaagcacttatctactaatgcttcagaaacctgagatgaaccaataatttgaagcatcccctttcttgtgtctttgggattatcttatctta

SEQ ID NO: 185256 - DNA, 201 bp, Homo sapiens
tgggagaagcacttatctactaatgcttcagaaacctgagatgaaccaataatttgaagcatcccctttcttgtgtctttgggattatcttatcttaaacsctatgtcttcttatttcaaaaatcatacacttggcaggggggaaatggttgcagagaaaaagtaaatatcaactgggattttatcaagttcatatgaccc

SEQ ID NO: 185257 - DNA, 201 bp, Homo sapiens
actctgtttttacttcactctcagcaaaacacagaattaagaccctgttttagttcctgtaagagtccagccattacaaaatcattcatgagtgatctagkatttgctgatgaattcataaggaagagagcatttgtatcatgtaacctatatggaatcattctgaaaaatatttaatggatctgtattttctccaagtgc

SEQ ID NO: 185258 - DNA, 201 bp, Homo sapiens
actttttactcagagagtaagatttttccttcctaattaagctgctaaacttttctgtcagatcctttctaatagaatcatacagctaaatgaaacagttaaaaaatatcggcttgcagaaatattttatggctttggacatagcgtcattcttggacaatgcaaaaatgccttgtagtttgaaaatgttacatcagttga

SEQ ID NO: 185259 - DNA, 201 bp, Homo sapiens
cctaattaagctgctaaacttttctgtcagatcctttctaatagaatcatacagctaaatgaaacagttaaaaaatatcggcttgcagaaatattttatgrctttggacatagcgtcattcttggacaatgcaaaaatgccttgtagtttgaaaatgttacatcagttgaccactgtgttaggcgagtactattgttgagt

SEQ ID NO: 185260 - DNA, 201 bp, Homo sapiens
cttgcagaaatattttatggctttggacatagcgtcattcttggacaatgcaaaaatgccttgtagtttgaaaatgttacatcagttgaccactgtgttakgcgagtactattgttgagttctccaagctgctactgttcctcctcccctcccttgccatcttctctcttgtgtcctgtctctctctctctcctctttatt

SEQ ID NO: 185261 - DNA, 201 bp, Homo sapiens
tagttatgacctcctttctttcatgtactcaatctgtctactgaaacgattttgtttggctgcattacctagcaagatttttctattagcattctcttggrtcatctcttcactgctcaagtcacttgtacttgcgtttggtattgtgcagagcaagaatgtcctgtggtgtatcccatcagactttacctttttggtcta

SEQ ID NO: 185262 - DNA, 201 bp, Homo sapiens
gaaattggtgatatggtagtggctaactgacttaccacctgcttgaaaatttcaaatgcagttgaagtgacattattatatttgtcttaatgttacaatgsaaaaatgcctgtagtttgaaaatgttacatctgtttctgattttcctctctgaaacaaagctttctgaattctgctcctactacagtttttttgtttttg

SEQ ID NO: 185263 - DNA, 201 bp, Homo sapiens
aaagatcaggcgagagccagatcacatgggcttgtagccactgaaaggatggcctctactctggaggaagtgggaagacgctagaagattttcaggaggarggatgtgatgtgccttgctttagcagcattactttggctgctataaggaggcaagggtggaagcagggtgcccagttagaccattgcaaaaatgtaaaca

SEQ ID NO: 185264 - DNA, 201 bp, Homo sapiens
cagatggagactgggaagagcattctagacagagggagcagcggttgcaaagggtatggcggcatcatgccccaagtttgaggaacaggcagtggtaccayggacaccagccaagagaggccacagcagttagagcagggtccatgatgggcttcgcaaagagataaggtcacaaagatcaggcgagagccagatcacatg

SEQ ID NO: 185265 - DNA, 201 bp, Homo sapiens
agagcggggagagggatgacaattctgaagaattctagtaggttgttttttattaggcactcagtatttttttccccattatatgtagtaccttctaagcyctgacttcaatgagaatttcactggtagaaagcttttagagttggagacttttgttgttttttctgtacaaagtttcctcttattttttatctggcagag

SEQ ID NO: 185266 - DNA, 201 bp, Homo sapiens
aataatcttccttctaaaccttcttctgtagtccttgctttgaatccaggaggacagtgggtgaggggttcccctacccagaacggtaggtcaggcaggayggtgcctagtgccgccacaaggtcacacagcctttgtgagcaaaggcaggggagttgacctgggtctacatccagaccctcttcttggagcctgtcatgt

SEQ ID NO: 185267 - DNA, 201 bp, Homo sapiens
gtagcaattccttactatcatttttttttaattttgaacctcttatcttcccagatttggccactgggagccctttccagctgcctcctatgtccttttgrtgtctccatgattcttagacagtctctgtatttcctgagggtgttggaaatgctctgtatcttgatggggctaggttctaagggtatacacctatataaa

SEQ ID NO: 185268 - DNA, 201 bp, Homo sapiens
tttataaggaagagcttttcctctcccaactttatgtattcattcagtaatttgtattaatatcaaaaggacttttgaagatagtaaatacctaaataaayagaattttattcaatgagtagcaattccttactatcatttttttttaattttgaacctcttatcttcccagatttggccactgggagccctttccagctg

SEQ ID NO: 185269 - DNA, 201 bp, Homo sapiens
tttaaaggcagacctgaatttatcactttttgagaaatgtattagtccttgttcaataggaatgatataactagggtaaaccgtcattattttattcaggktgcctaaagcagtagaagtgtgtggagctattgcagctcagctctgttcatgagtgttttatgtccagttctaaatcctattcatctgaccctattgccc

SEQ ID NO: 185270 - DNA, 201 bp, Homo sapiens
tggggttgaatttgtattctgggtcatttggatttgcacaaggacagttaggaaaatgtcagagaaatagaagcagtcctagtggaaaataaattatacaractgttgggtgcgattaatggaaattaatttaatttcaatactgtggtatctcccaaacataaaggtaagtgagaggcagatacttagaggtccctggaa

SEQ ID NO: 185271 - DNA, 201 bp, Homo sapiens
ttgtccctttaagaatattatgtacacggagtcacactgaatgtgaccttttgagatgggccttttgcactcaacataatgcccttgggattcatccaagytgttgcatgtatcaaaaaatgaagaatcctggccaggtgcagtggctcatgcctgtaatcccagtgctctgggaggccaaggtaggaggattgcttgaga

SEQ ID NO: 185272 - DNA, 201 bp, Homo sapiens
attaatttaatttcaatactgtggtatctcccaaacataaaggtaagtgagaggcagatacttagaggtccctggaatcaagggtgagattggtcctggaytgatgtctaattggctgagtgatcttaccctctctgggtctttacctttctgagtttcctatccttatatggcattggttaatggactacagtctcttcc

SEQ ID NO: 185273 - DNA, 201 bp, Homo sapiens
atttagaaaaaaaaaatgcagtttcaagactcctgaaagcataaaactttaaccaaagagttgcgtgtgtatcgttgtcggtttttttcattttctagaaygtaagacaaaatcttggaacgcttaggggttatattcataatatttaacagccagcgcagcctggacaatgactcgttagaacaggcatcagtcatgcca

SEQ ID NO: 185274 - DNA, 201 bp, Homo sapiens
ataatctctgcctttgattagtcttgttcttctgtgttgtgttgtgcacatggccttatgaactgctgcttttccttatttcagggttttgaaaactttastgtgttttacagttatattttggtcatacccatatagtgcatgtatgattagatcttaataattttctaaaaatagccttaaagtgactgacctcttttg

SEQ ID NO: 185275 - DNA, 201 bp, Homo sapiens
ttaggttaaggtgatgcacaccgtgtttctctaccacaaacttacccttttcccctttacacattataattaagttatttatggagtggtactttaaaacrattgagtctcatcacattctattcactggttttagcatccattaatgttttctgtaaggtatttataattctgatggttaatactgattgtcaacttcat

SEQ ID NO: 185276 - DNA, 201 bp, Homo sapiens
tgtggaataacttgcatcccatctcactcatctctcttctgtctccaccatgcccattagcacgtgagtttgctcccttcctctcgccctccacactaagscagattattttggatgaaaacattcatttaaatttactctactttcccttcaccctatgaattaatgtaaggaaatgaaatcagacttcacaggtaccat

SEQ ID NO: 185277 - DNA, 201 bp, Homo sapiens
ctcctccatggagcatggcaaataatgatttggaggttacaaataaatgttcacaagtagatgaattagtgcacgcagaatctgggcatcatgaggatcasctgtgtatctgtacctccctcttccacccaatatttgagagcaaatgggagacacataccctcttctcctaaatgcatcatgtgttttctaagatcaaga

SEQ ID NO: 185278 - DNA, 201 bp, Homo sapiens
gaataccccttttttaatccagaagggagagttatctaagagtgatgggtaagtacatggcaaaccaatttactgcctcagctgctgtaatgtggaataayttgcatcccatctcactcatctctcttctgtctccaccatgcccattagcacgtgagtttgctcccttcctctcgccctccacactaaggcagattattt

SEQ ID NO: 185279 - DNA, 201 bp, Homo sapiens
tatagatttgtagactaggcacaataggctatacttcatagcctaggtgtgcatagtgggctataccatctaggtttgcgtgactacactccatggtgttygcacaatgacaaaattgcgtaatgaagcatttttcagagtgtatcctcttccttaagtgacacatgcttgtgtgtgtacatatatgtacatataaaaatt

SEQ ID NO: 185280 - DNA, 201 bp, Homo sapiens
ctgtgtctgtcacacagatagaaaccgttagtgtagtacactgtatctagctgtaggtagttaattcttcttctcacaactgctgcatccagaaagaccamcccaataaactaagcagctttctagaagattcactccgcgtttattgccagatgtgtcacctggtcattttgtggattatattaaaatgcaaaacagtat

SEQ ID NO: 185281 - DNA, 201 bp, Homo sapiens
aactctgctgtttttcttgtaccttctgtaagtgacatggagtaggggctgtttgttttctctttcaagtgtcactttgaaacatctgtgttgttagtaarggacagtgtttttttttaaaaaaaaagcatttggtgtccttaaataactgcaatataaaaagattttttttcttgatgctcgttaacttttgacgtcaca

SEQ ID NO: 185282 - DNA, 201 bp, Homo sapiens
aaattgacacaaaatgaggacagttcattagagcctggagagttcttctgtaaataagacggaaagatagatggttgtttgatttgtagatagatagatasatacatacatacatacatacatgcatacatacaatctgaatctatagtgtagatagaaactgtgtctgtcacacagatagaaaccgttagtgtagtacac

SEQ ID NO: 185283 - DNA, 201 bp, Homo sapiens
tgtaccttctgtaagtgacatggagtaggggctgtttgttttctctttcaagtgtcactttgaaacatctgtgttgttagtaagggacagtgttttttttwaaaaaaaaagcatttggtgtccttaaataactgcaatataaaaagattttttttcttgatgctcgttaacttttgacgtcacactcattttgccattcga

SEQ ID NO: 185284 - DNA, 201 bp, Homo sapiens
atccccattatcctgagaaagaaagccacagccagctcttgtcccataggaaagagctggtcttctttaggacttcaagcacatgggagaaggaagcaggscttgtgctttcagtcttgtttccactgtgacataaagcaaggagagggtgtcaggaggggccatgcatctgtgggcaccgtttcaacacatggccagctt

SEQ ID NO: 185285 - DNA, 201 bp, Homo sapiens
ctttcaatgtcagaccacacagattgtgttcagcaaatgaataaatgaccatgaatgaaatgaatgttgggcccatcgagagagaattagagaacttggaragaagagtggacattctcaatgaggagggagaaaaacagcacagtgccaaggggcggagcccgggagcaagagccctgatccccggacacatcaagcttt

SEQ ID NO: 185286 - DNA, 201 bp, Homo sapiens
ccccttggattagaagccatgggcgccattctttgagcacttttcacacaccggagtatggtttttaatgaacagttttattctgttgtaccctttgatcycctgtgtactcctctatgagtagcaccatgtcatagcagggcagaagccagggcgtatcgtgtacttggagctcaaagtccctttgcagtgaaattccac

SEQ ID NO: 185287 - DNA, 201 bp, Homo sapiens
ttagtggtaccttatttaaattacagttgttcctcagtgtactcagagaattggttccaagacctcttgcagataacgaaacctgtacatactcaagtccrgtagttggccctgtggaacctgcatatacaaaatgtcagcttctgtattctaggatccagggaatactatatattccgtttacgtttgattgaaaaaaaa

SEQ ID NO: 185288 - DNA, 201 bp, Homo sapiens
ttgtaggcctctctcttttttttgccgtttcttagtttagccaggcttattctgcaaggccctgctctagttctcttttctagctgaatgaccgtcaacaytgtgctgattggttttgagacagagtctcgctctgtcacccaggctggagtgcaatggtgtgatcttggctcgcttcaacctctgcctcataggttcaag

SEQ ID NO: 185289 - DNA, 201 bp, Homo sapiens
ggggtctttctggccctgatcagttatttatatttttgtttagtagggatgacactctctacctggagccacattttgaccaagaacacctcatttttctytgtaccattactagtgaaatattcccctccatttcatcttattagttctcctctccttattctccactaattaacgtgttctgggagtagtttccatctt

SEQ ID NO: 185290 - DNA, 201 bp, Homo sapiens
ataaattccagtgatgctaaagttgctcaaatattgttagagttgtgtttaatttcaccgttatatattgtcattggtcctcagccttcatcccttcagakatttgttttttgcataatcatttgtaaaaaatcatttggctacaaggctggaatttggggttgtcaagcggagtaataatactgttttgattaagaacaa

SEQ ID NO: 185291 - DNA, 201 bp, Homo sapiens
atttgatatcatccagcctaagatcaccacacacaaaccatcctgtgtgaaaatcagcagaaatcacacccagttgcttcagctatttgaattccttggcrcaaagtataaaataactgtatgaaatctttaaagaagtagaaaatacaatctcaaatacgtataagtaataaaaatggtttttaacaaaagatcatacat

SEQ ID NO: 185292 - DNA, 201 bp, Homo sapiens
cgggggcgggcgcaggcagggctcggggcagctaagggggcggtgctgggagggagatgcctccgccccgccccgatcccgcccccgcccggaggctcggracccagcagccgctccacgcggcgggagggcggggaaataagaggactggccgcccgtgcatccagccaagctcctggcggacggatatcggaggcccag

SEQ ID NO: 185293 - DNA, 201 bp, Homo sapiens
gaaatcacacccagttgcttcagctatttgaattccttggcgcaaagtataaaataactgtatgaaatctttaaagaagtagaaaatacaatctcaaataygtataagtaataaaaatggtttttaacaaaagatcatacatgagttattaatcaatgagaagacatgggggaaatgtacatgcatattactcatgaagga

SEQ ID NO: 185294 - DNA, 201 bp, Homo sapiens
tgcccctggaatgggggcgtggacgtcccagagagcaggggctgaggacactggagtggggtcactggaggaaatgggcaaaggcagctgagtagacacayaccttagaggctagggagcttgtccagaaaaagcagcctgcacctggccgtaagattttccaaagatgaggtttatgctcattgtatttttctcttggaa

SEQ ID NO: 185295 - DNA, 201 bp, Homo sapiens
gtaataaaaatggtttttaacaaaagatcatacatgagttattaatcaatgagaagacatgggggaaatgtacatgcatattactcatgaaggaagacaarctgaaaaggctccatactctatgtttccctctatatgatattctggaaaacacaaagctagggaaacagtgaaaagagcagtgatgatcaggggccagtg

SEQ ID NO: 185296 - DNA, 201 bp, Homo sapiens
gggcacttaagcaaagcaggcatttagtcccaggtggaatcaatcttcctgctgcaggaaagagccaggccctgggcagctggtgtttggagttggtcttsagtgtgtgttgactcaccttcctctcgaggtaaaggaaatgaatagctcgtgctaatgaatgaggtgtccccagagcatcgtcagtctctggaggtgtcc

SEQ ID NO: 185297 - DNA, 201 bp, Homo sapiens
atgtttctcaacttgacatgattttgtattttctcatggtgaaattcatattctacatttttgacaaaaatgccatggagattttgttgtgcccttagtgmgttctatcatgaagaacgtggtggtgatatgttaactctgatcactcggtaaatgtggcatccattaggattctccaccattattattttcccctttgta

SEQ ID NO: 185298 - DNA, 201 bp, Homo sapiens
accccattattggagggcaaagcatgatttggaggaccgtttggagagagacccctttttctgtggcacagggcttttgcagataattagtctttggctaygacaagatggaaactattaggctcttagtctgagactcatcactgccttgtagcagttttgcccatgacccttactgggctttcagcaactcactgcctt

SEQ ID NO: 185299 - DNA, 201 bp, Homo sapiens
ctataaggaggagctgctacccttaggactaagacggggacccagagaagagccccttcctccttcccgcagctgtggttcactgagtggctcagaagtgstagtagtggtgccatgctggtgaaattgcttgatatccacgctctggaatgtaccgaaatctgctttcttgggtgtggggaaagttaatttgggagactt

SEQ ID NO: 185300 - DNA, 201 bp, Homo sapiens
ccagagaagagccccttcctccttcccgcagctgtggttcactgagtggctcagaagtggtagtagtggtgccatgctggtgaaattgcttgatatccacrctctggaatgtaccgaaatctgctttcttgggtgtggggaaagttaatttgggagacttgtcttgtgggaagcactatgctatgaaaatgatcaaatggg

SEQ ID NO: 185301 - DNA, 201 bp, Homo sapiens
ctggtttctgtttagaaagctggtgaggcggacagatagccaaagagcagactctgggacagtgggcagcatgggtcctgcggggagcagatcttgccatscatctggtaaacactggcccttggaatcttgttatgtgttggactttagatagcgtgtgtgtattctttaaggtttatgagctatgcttaaatcaagcag

SEQ ID NO: 185302 - DNA, 201 bp, Homo sapiens
aaagagcctttggagagattactggtacaagagagatggcatgatttctaagtgacatctttgaggagacagagtgacgggatagggtatatccaagacgygaggagatggattagtaacacctgccgcctgaccaggggaaggcacccttttcctgttgttacaaaggtaggaatgaaggattgaagcatggctgcagaa

SEQ ID NO: 185303 - DNA, 201 bp, Homo sapiens
ttgcctccctcctgccccaagcccacagtgtgccatcctgcaggaggcaggctcctggttcttcttggttgtggaccccaagcccagcaggctcactttawcctctcttcctgttttgcttctggcctgtggaggtttacattttgtattagtccattttcacattgctgataaagacatacccgagactggaaagaaaaa

SEQ ID NO: 185304 - DNA, 201 bp, Homo sapiens
ttccccatccctgtggcaggtaatgtcctgctggagttgagacaggcttagaattcttgctatacctcttccatttgggctcatgtcactgtcctggaggwatttctacttatttctgaagtcccacttgagtgattgcttctggactttgggctctcctcattcttgaacaaactcaacatccttattcagaggagaaat

SEQ ID NO: 185305 - DNA, 201 bp, Homo sapiens
aaaatattgatagggaattgttggtcccaaagatgggcagggatacaggtgtataaatcccttcttctcagaatacagtcccaaataagcagtggctctgygtgtctgagcttccacacagaaaagtcgactactcaggggacgtggggacagttctccaacggcctgcaacaagaccagcttttttttcccagttagaaa

SEQ ID NO: 185306 - DNA, 201 bp, Homo sapiens
gtgtcgggaggaccctggaagcaaaggctctggactcaggtggcatcaatgggactaccagtttccagtgaatatgtgggagtggcctaggtccagctcartcagaagcccatttgttcaaggccctggtattactgaaggcccagccctgtctcacctgccagaaagcacgtggcctctccctggctaggctaagggctg

SEQ ID NO: 185307 - DNA, 201 bp, Homo sapiens
gaaaagagcctttttccagaaaaacaagattcaagaagagaaaaacatgaaggacttttaaatatacctataacttgagtatctacttttagttaagctgrgcactctttaagaaaatccttttaaatcccttgttacttgactttagccacaccaagcatttaagatgttccgcttttgaactttacaaaaagtcccctt

SEQ ID NO: 185308 - DNA, 201 bp, Homo sapiens
tttatattattttattattattattattattattattattattattattattattatcatcatcatcatcgagacggagtctccttttgttgcccaggctrgagtacagtggcatgatgtaggcgcactgcaattcctgcctcccgggttcaagtgattctcttgtctcagcctcccaagtagctgggatcacagacgtgt

SEQ ID NO: 185309 - DNA, 201 bp, Homo sapiens
ttctgacaacagttaactaataagctatgctccccaaatagtaaattgcatgattttgaagttgctaaaaattcatttcaaataaatcattctgcctaacrtagaatgaaagaactgaaacaaaatgaaacaaatacatagcaaacaaaactttatttgttctgtagttacctctaaggaagggctatgccaccatgtgtg

SEQ ID NO: 185310 - DNA, 201 bp, Homo sapiens
tgaaatgaaaattattatcagaatatcctgggaactcaaatactgggaaagagttcatgggtccattcgctaggtatacagcttactacaggcccgtcatygacagaaggcagctagtgccttacaagaaaacagacaaaacctcattaaaatctacatcactcatttctgccctaatctgtatgaaatgaccattgatat

SEQ ID NO: 185311 - DNA, 201 bp, Homo sapiens
tgccctcttctgttagtgtagcaatgcacactttagtggtttatttatttatttttggtgtgggttagagaatggttttgtaaatcctctaattttttagytgtgctttatctttcacaaccttgaattttctcatttgcatcttttttctcttcctactcaattgaaaaggttgtctttcgctttgtattaactcctttt

SEQ ID NO: 185312 - DNA, 201 bp, Homo sapiens
tgtaactatggttttgggatcctctcacttcaaattgggcatgcttttacaccacttttctgtggtccctgctcaggcctactaggacactttttaaaggmttttcacacttagtgtaacttacactttctgggtttctaaggtcaaccttagcacctcactcattctcctctctttctcttattttttccagcttgctct

SEQ ID NO: 185313 - DNA, 201 bp, Homo sapiens
tcttcaatgctgttaagaatttctgtatttttttcagtagcatttatcaggaagtttggttctaattatcaaaaccaacattactagaaatggcagctgaytcattcttttattaaaacattttttatgtttgattatgggactttgggtgggaagaatgatacattcatttgctcagttatcccttttgagccaatcttc

SEQ ID NO: 185314 - DNA, 201 bp, Homo sapiens
gttgcattttcttggctgtgaagcttaaggaaataaatatataagaactttctatttatagatagcatattaaaccttaaatcttgccaacagtctataaratttgacaaattaggtgtaatatattttaggaatcatctatctgactgaagaagttttggcactctgtggaatcagagggatacttttatactgcacaga

SEQ ID NO: 185315 - DNA, 201 bp, Homo sapiens
cgcctggttaattttttgtatttttagtagagacagggtttcaccgtgtttgccaagatggtctcgatctcctgaccttgtgattcacccgcctcggcctyccaaagtgctgggattacaggcgtgatccacggcgcccggcccagtggagcaaggttcttaaccatgtgaatgaaccagtggaaaactttacgtattgcc

SEQ ID NO: 185316 - DNA, 201 bp, Homo sapiens
aaaataattattttgaaattcatccatatcatagtgtatatgagtagttgattccttttgttaatcagtatcccattccacgatttgtttatccatacatycgttgataggtatctgggtagtttccagttttttgctattatcagtaaagcgtctatgaacattcatggatcagtctttctgggtcgtacgttttcactc

SEQ ID NO: 185317 - DNA, 201 bp, Homo sapiens
accgtgagtgtacaaggtatttttaaaggagtgataggcagcttttgaaactgtcattgcaaaactgtcactgagacagtgaaagagatttgacccaaacracttcattttgtttccagccccaaagctgtccttgcccatgtctgggcgtaggccgaaccaactttgggaagagctgggtttacagtctatagtctaaaa

SEQ ID NO: 185318 - DNA, 201 bp, Homo sapiens
aaggaaagaagaggcaaggggaagaaaaatgattgacagtagactcttatgaccatggagaaacggtagtgtagaatcagaaaacttaaaatgaagctccygttcatccccttactctgaagtcctgaacaggtcacgtagcatttcaggtctcagttttctaacttttaaaagttgtgatgatacttgcttcactcaaga

SEQ ID NO: 185319 - DNA, 201 bp, Homo sapiens
aatttatgcaatatatgacttttctgactgtgatgcctgtcctgacatggtgggcatgatcctggccaagaattaagaatcttaaatttgggccaggcgcrgtggctcacacctgtaataccagcacttggggaggccgagttgggtagatcatgaggtcaggagatcaagacctcctgtctaacatggtgaaacccccat

SEQ ID NO: 185320 - DNA, 201 bp, Homo sapiens
tggaggctgggtttagagtactagaagtggcaagtccagccttgagcctcccgcggtcgggtttcttcagaaaataaccaggtactctcccgatgtgagcygtggatttgggtgaaactttcctctctcagccactgcgctggcctccctcggcaaccctacgttgcagggactgcctgccccgaaaccctgcctgagctc

SEQ ID NO: 185321 - DNA, 201 bp, Homo sapiens
cattcacacacccttgccatgccctggtgtgtttctgccggttgtgttgccacgagctgttgttgtagaggtgtgtgagcttgtccccgaccgtgtttgcygtgtttgtgacgtccgctgtattgcctctcaggggagatgtgaagtgaagtgggaaggtgactggaacctgggcccatctgatgaactagaagagtgaga

SEQ ID NO: 185322 - DNA, 201 bp, Homo sapiens
agtaaccaaggtggggatttaggatttctaacttttaaatttctctttctgtccttgagtttccagcctttctttggcacagtttctttgctaaacattgscatttccctttctaaaggattggccttgtagcacagtttagattaattagtgtgaaggagagatggattgggacccttgggggagtcatgtcttgtcttt

SEQ ID NO: 185323 - DNA, 201 bp, Homo sapiens
cattcttttggtctttgtatgtctgagaatgtcttcatgttactcccattcttgaatggcagtttaacaaggcataacattctggaaaggtagtcattctmccttagctctttgaagatgctatttctgccttctggaaaagtctaatattaatcaaagtgttgtttctttgtagataataatgccttttattttgagtga

SEQ ID NO: 185324 - DNA, 201 bp, Homo sapiens
ttgttactgtagatatttttatgaacagatggtcacttatgaaatggatgatagggggtactggaaaaactgttgcagcctacaatctatcttctgctgastaatgcttgaaatctccccttagagctcgcctcctttagtttaatgctttaatcctagttaaacataacatgttccttttgcatagaactggctgtgcct

SEQ ID NO: 185325 - DNA, 201 bp, Homo sapiens
gacctgcggaaggctttggccagagctgtagagtgcatgagggtgagaacggggagatcccgtgaaaaggtaatacatcggctttcatatgttttaggcaygagatgagctgaatcctgatatgatttgagttagtcttcccatgacctgatggaagagctgttatctccatttaagaaaagtgaagctgcccaggtgtgg

SEQ ID NO: 185326 - DNA, 201 bp, Homo sapiens
ctcctgacctcaggtgattcacccacctcggcctcccaaagtgttgggattacaggcgtgagccaccgctccctgcctaatttgtgttttcttagttgatratgatgctgaatattatgtacttatttgcattcatataactatttggcaaagtattcaaatattttgcccatttgttttctttcttttttttggtcttgc

SEQ ID NO: 185327 - DNA, 201 bp, Homo sapiens
tgaggtctaagaaaaaacaatcatgacctgcggaaggctttggccagagctgtagagtgcatgagggtgagaacggggagatcccgtgaaaaggtaatacrtcggctttcatatgttttaggcatgagatgagctgaatcctgatatgatttgagttagtcttcccatgacctgatggaagagctgttatctccatttaag

SEQ ID NO: 185328 - DNA, 201 bp, Homo sapiens
ggcactattcctggtcctgtgtgagctccaactttattccctctaatccttttgtgtggtttgttccctgacctcaggtagatttttcaacacacatgatsagtgttcagttgaatgctgaaggggttcttctgcagatctccagagttcttcgcgcagctctcttctctcctttactctgccctgagaattctagctatc

SEQ ID NO: 185329 - DNA, 201 bp, Homo sapiens
gacagtatttgacttccttctggcaccgtcatggagcttatcccatcccagcctctgacttgaagctttttgcctccctcctgccccaagcccacagtgtrccatcctgcaggaggcaggctcctggttcttcttggttgtggaccccaagcccagcaggctcactttatcctctcttcctgttttgcttctggcctgtgg

SEQ ID NO: 185330 - DNA, 201 bp, Homo sapiens
tcccagcctctgacttgaagctttttgcctccctcctgccccaagcccacagtgtgccatcctgcaggaggcaggctcctggttcttcttggttgtggacyccaagcccagcaggctcactttatcctctcttcctgttttgcttctggcctgtggaggtttacattttgtattagtccattttcacattgctgataaaga

SEQ ID NO: 185331 - DNA, 201 bp, Homo sapiens
cccctcaagtagccattataaagtattctatacaccattaagtaaagaaaacaaagatgtattgaaagaactaaggtataaaatattctataaattattcyattttttgtttgtatgaacatgtaaacctttgtgcataggaaatatctataaagatagaaaggaaatcattaacaattatctactgaggactggaattga

SEQ ID NO: 185332 - DNA, 201 bp, Homo sapiens
acaaggcagcaggcaagaaaagagagcttgtgcagggaaactcccatttttaaaaccatcaactcttgtgagacttattcactgcaacaagaacagcatgrgaaagacctacccccatgattcaattacttcccactgtgcccctcccacaacacatgggaattcaagatgagatttgggtggggacacagccaaaccata

SEQ ID NO: 185333 - DNA, 201 bp, Homo sapiens
ttatatttttgctctggatctcatgtgtagccagtagagatatgaaattaaatattccacaataggtatggcccctcaagtagccattataaagtattctrtacaccattaagtaaagaaaacaaagatgtattgaaagaactaaggtataaaatattctataaattattctattttttgtttgtatgaacatgtaaacct

SEQ ID NO: 185334 - DNA, 201 bp, Homo sapiens
gtttcatatggctggggaggcctcacaatcatggcagaaggtgaaaggcccatctgacatggtggcagacaagagaagagagcttgtgcagggaaactccygtttttaaacccgtcagatctcatgagacttattcactatcacgagaacagcatgggaaaacctgcccccatgattcagttacctcccactgggcccctt

SEQ ID NO: 185335 - DNA, 201 bp, Homo sapiens
aaggaaataaatatataagaactttctatttatagatagcatattaaaccttaaatcttgccaacagtctataaaatttgacaaattaggtgtaatatatyttaggaatcatctatctgactgaagaagttttggcactctgtggaatcagagggatacttttatactgcacagaatcacctaaactgtacatttaatagt

SEQ ID NO: 185336 - DNA, 201 bp, Homo sapiens
tagtagcttaaaacaacatgtatttattattttacagttctagaggtcagaaaaccaaaatccacccaactgggctaaagttaaggtgtcagcagggctgrctccttctgtaggctcttgggggaatccaccttcttgacttttctggctttttttttttttaaattatactttaagttctagggtacatgtgcacaacgt

SEQ ID NO: 185337 - DNA, 201 bp, Homo sapiens
gtctgctccagtggagggcagcatggggctgtgctgtcccacacacctggttctgatcctggcatttactctctactgtaaactgagattagatacgtgakctgttgcagtcacatttccctcatctgcaaagtgggaatgagagtaacgattgttcagtgtatatgccagcctcacatcagcgtaagcatgaagtgagag

SEQ ID NO: 185338 - DNA, 201 bp, Homo sapiens
agtaactggcctgaggtcactcagctgcaagtgataaagctgggatttgcttctagatctgtgctggctcttagatccaggctgtcccccacccgaccagctttgtggaggctggtgtgtgagccttctgtttacaatgcctctctgtgtagcctgcagggatctgaagatagtttccttcgagaacaggttgacgaggag

SEQ ID NO: 185339 - DNA, 201 bp, Homo sapiens
atgcaggaatctttggtaggagtaagaaaaggactgagggcgtgctctatgcattcatgtggagaggcctccagacacatcattcagtgaaaaaagcgtgrtgccgaataaagtacacactatgctgcttgttatataacaaaggaaggaaaatagaaacagatatttgtattggcttaacatctggcagtaaaaaggaaa

SEQ ID NO: 185340 - DNA, 201 bp, Homo sapiens
cgtctacttaaatgtttatagtatgtcagacagagtgctcaggcccttcagggattggtgggaagagaccaaacacacacacacacacacccgccctgcamgtgtccctggctggtcttgccaaaggtgcagaagtcgggaggctggtacacagagcaggcgaggtacagtgctgccttccccatccctgtggcaggtaat

SEQ ID NO: 185341 - DNA, 201 bp, Homo sapiens
caagaaataatttcactaccaatgatttttttaaaaatctctgttaatgtgtcaatgtaacaattaattaatttatttatttgagactgaaccttactctstcacccaggctggagtgcagtggcgcaatcttggctcaccgcaacctccacctcccaggttcaagcaattttcgtgactcagcctcccaagtagctggta

SEQ ID NO: 185342 - DNA, 201 bp, Homo sapiens
gagtgacattttaatacatgtatacaatgtgtgatgatcgaatcagggaaattagcatatccatcatgatattctcttcaataaatgattctgggcaagtsctgtctttctcaccgtatacaaacccaactcaaaatggtttgaagacttaaatgtaagacccgaaaccataaaactactagaagaaaacagatgaattac

SEQ ID NO: 185343 - DNA, 201 bp, Homo sapiens
tgttttccgcttacgtgccaagagttataaaaaaagaaagatagaaattattttgtctgtcagtccttctgcactcacttccatgtcccaagacctcacayatttctgtttgttagcaggattgtctctggtgctttttacaaaaatattgatagggaattgttggtcccaaagatgggcagggatacaggtgtataaatc

SEQ ID NO: 185344 - DNA, 201 bp, Homo sapiens
gacatatgatgtttagagaactgtggataatctgaggtggtgggcccagcaccaggtgtgaggggcctttggtgctgttgttaggggttatattttctttyccagtcataattctcagcttgcagtctgcagattcctagggggtctatggatcagcacttagaatatgtaagagtttgctatggaacgtcttaactttgt

SEQ ID NO: 185345 - DNA, 201 bp, Homo sapiens
caggtgggtaggattacaaaggggcatgagaaagctgggaggtgatgtttatgttcattgtcttgattgtggtgacagtatcatgggtgcatatctgtgtsaacatttgtcacattatacactttatatctgtgcactttaatgtttgtctatttaacacagagaaaataagagggggaaatattgtattactgttgtaaa

SEQ ID NO: 185346 - DNA, 201 bp, Homo sapiens
aaaaagaattccgggcaagtccgcagtgtaaagtgaaagcaagtttattaagaaagtaaagaaacaaaagaatggctactccatagacagagcagtggcaygggctgttccactgcataatacttagggttatctcttgattatatgctaaacaagaggtggattattcatgagttttccaggaaaggggcaggcaattcc

SEQ ID NO: 185347 - DNA, 201 bp, Homo sapiens
ggcaattatgttttaactgtcaagagctgggttttggggccgagtgccgtggctcctgcctataatcccagcactttgggagtttgagtcaggaggattgmttgaggccagaagttcaacaccagcctggtcaacacagcgagacctcatctctaaagtaaaaaaagtagagaaattagccaggcatgatgacgcgtgctt

SEQ ID NO: 185348 - DNA, 201 bp, Homo sapiens
ttgattatatgctaaacaagaggtggattattcatgagttttccaggaaaggggcaggcaattcccagaagtgagggttcctcccccttttagagtatatrgggtagtttccagacattaccatggcatttgtaaactgtcattgtgctggtgggaatgtcttttagcatgctgatgcattaaaattagcatataaccagc

SEQ ID NO: 185349 - DNA, 201 bp, Homo sapiens
tagccaggcatgatgacgcgtgcttgtagtcccagctactcagaggctgagccaggaggattgcttgagcccaggagtttgcagttacaatgaactatgaytggggagccactgcagtccagcctgggtgacagtgtgagatcctatcaaacaacacaaaacaaaaaaacaacaagagcaagagcaggggttttggagttg

SEQ ID NO: 185350 - DNA, 201 bp, Homo sapiens
tgctggtgggaatgtcttttagcatgctgatgcattaaaattagcatataaccagcaatgaggaggaccacaggccacttttgtcgccatcttggatttgrtgggttttggcctgcttctttaccatatcctgttttctcagcagggtttttgtgacctgtatcttgtgataccacccctgctgacctcctatctcatcct

SEQ ID NO: 185351 - DNA, 201 bp, Homo sapiens
ttggatttggtgggttttggcctgcttctttaccatatcctgttttctcagcagggtttttgtgacctgtatcttgtgataccacccctgctgacctcctrtctcatcctgtgactcagaatgcctcacctcctgggaatgcagcccagcaggtctcatccttattttacccagctcctactcaaggtggagtcactctgg

SEQ ID NO: 185352 - DNA, 201 bp, Homo sapiens
taatctgtatgaaatgaccattgatatctccttacagttaataatggtagtaataatttattttaccgattagagatggtactactgctgacaaaactgtwgtttattactgtagacaaaactgtacatttcatttatttatctatttatttatttagagatggaatttcgctctcgttgcccaggctggagtgcagtggc

SEQ ID NO: 185353 - DNA, 201 bp, Homo sapiens
atgttatccttctagagctctttcctcattctttcatgttggttacaaatcatggttgcttgtcttctctcacgataagagactgaagtgttgttcctggrgctgcaatctgtctatagcatgctgaactcattcagaggagtatattgtctctatattaaattttgcaataaatgtttaatttcagaatagttctaggtt

SEQ ID NO: 185354 - DNA, 201 bp, Homo sapiens
tagatagaagccatttttgtcattatttttatttgcttcacattttgattcccacaagatttaacatgcaggtagtttggggtgagaacatatggtatttkaaattcacaagagggcatgttcatattaccatggagaatcgagtcctttagcaaagtgttgcctaaaaaaagaagaggtcggcacaggaagggaaaggga

SEQ ID NO: 185355 - DNA, 201 bp, Homo sapiens
acactacttatttgtttctttggcaactttgcagagctggagataagatgggtagactgctacttcccttttacacatccttcctttgagatggagatcarctttcatggagaatggctggaagttcttggctgcggggtgatggaacaacaactggtcaattcaggtaaaaaagaatcccacattttatttacacgtgct

SEQ ID NO: 185356 - DNA, 201 bp, Homo sapiens
cgttgcacacttgtagatatttacatacttctatgcgggcagcggcatcactggtctctcttcagattcccctctagatttgtctttgatactaagccctrgaaaaacttatttctcacatccgtatttgcaaaggctctttgtctttggagatccaccttgtcagcacttggctgctggatttgtactttgtgatttcgt

SEQ ID NO: 185357 - DNA, 201 bp, Homo sapiens
ctgggattacaggcacacgccaccatgcctggctaaattttgtacttttggtagagacggggtttcactgttggccaggctggtcttgaactcctgacctygtgatctgccagccttgtcctcccaaagtgctgggattacaggcgtgagccaccgctcctggccaagttttttatgttttaggaaaacattaaatgcaag

SEQ ID NO: 185358 - DNA, 201 bp, Homo sapiens
tgcccccgctgggttcaagcgattcttgtgcctcagcctcctgagtagctgggattacatgcaccctccaccacacctggctaatttttgtatttttagtrgggattggagttcaccatgttggccaggctggtctcgaactcttgacctcaggtgatccacccaccttggcctcccaaaattctaggattacaggcatga

SEQ ID NO: 185359 - DNA, 201 bp, Homo sapiens
cagacatttgtaagtgcagctaaattttctgttttttgagttcttatggcgtggagaaagaccgaataggtatactttatcccactcgtgcagttccgctrttctttccatctcttcttctatatttgctcccctgctctcccttccttcttcctccctgcaccctgctcttcccctctctttacttttcttcattccctt

SEQ ID NO: 185360 - DNA, 201 bp, Homo sapiens
cgtggagaaagaccgaataggtatactttatcccactcgtgcagttccgctattctttccatctcttcttctatatttgctcccctgctctcccttccttyttcctccctgcaccctgctcttcccctctctttacttttcttcattcccttctcttttaaaagagaacttccaagaaacaatataattgatgactcccct

SEQ ID NO: 185361 - DNA, 201 bp, Homo sapiens
agattttacatgggccaagagggagaagaagcttgatagttgaaaatatctttttaaaagtgaaattaccttccttacctttttgtcaaaatttaaaaatyggctctttggggaaaaccttataaataggtacatgaacagcttccggttttgaaggatcattattggcttgcttatcaaatatttcttcaaagtccttct

SEQ ID NO: 185362 - DNA, 201 bp, Homo sapiens
tgatagttgaaaatatctttttaaaagtgaaattaccttccttacctttttgtcaaaatttaaaaatcggctctttggggaaaaccttataaataggtacrtgaacagcttccggttttgaaggatcattattggcttgcttatcaaatatttcttcaaagtccttctaaggctatagcgaagtgaatcagcattgctcct

SEQ ID NO: 185363 - DNA, 201 bp, Homo sapiens
atggaatattgatgcgatagatatttgaaatgtgcatcccagagttagttaggttcttgtttgcaaggagggatatactttctctttgcttttcctatatyagcatgaatctatttccagtctgtccctgtctctggtagttgatctctatagcctctacacatacttaacatggttcactgttgttgatctcagttggtg

SEQ ID NO: 185364 - DNA, 201 bp, Homo sapiens
tatatcagcatgaatctatttccagtctgtccctgtctctggtagttgatctctatagcctctacacatacttaacatggttcactgttgttgatctcagytggtgaatctgtaatagcatggaccaaggctgtactggtaataaacatgccttttatataattagtgtcttttgtgtgcaaggcactgtgctggacagag

SEQ ID NO: 185365 - DNA, 201 bp, Homo sapiens
gtagagacttcataaaggagatggtctttgaattgggccttaagtggtcattctcagatgtgtgactagtaattacttggagaggttatttaaaatgtctrttcatagagcatcagagtctggaggtctgggatggagatcaagatatgcatattaaacaaataccctagataattcttacgaatgactcacattcagacc

SEQ ID NO: 185366 - DNA, 201 bp, Homo sapiens
atctttagaaacatcatgtccctggtttgtttgtttttttcaaagcagtatgcctagtacttttatcagtgccatttggggttactaagttctccctccattttttttttttttttagacccatggacatgcctttctgctgtcacttgtgaatgctgtcaaataatccttacatcctaatttacatttgcttatttcaaa

SEQ ID NO: 185367 - DNA, 201 bp, Homo sapiens
tcctaaaccagattgctgtaaaataagatattgactaagtgttgttcctatatatatagagagagatgaagtataaactctgctccccacagtcagcatartggaagatacagtcaaggcacggaagagggagagctctattcctgggggtaataatagaaggtgtcccaaagaatctcagacaaaacattatagttgtac

SEQ ID NO: 185368 - DNA, 201 bp, Homo sapiens
acatcatcgccataggcaatcagctctttggggccattttcgaggaattaatactgtatgagagggagccattcctaatagtctttcttgacagttttagrttagtctttactatgttgctaattcagacttaaagagacaactggccctccatgtcccagctccacggtgatgggtgtgtttctcagcttctcaaggaac

SEQ ID NO: 185369 - DNA, 201 bp, Homo sapiens
tgagtagtcttctagtagtcagttcaatggtagaaaaatactttggatgatcatgtttctttaaatatcccacccgttgtgtctttacttgtatttattcyacaaatgttcataactagagaatacttgatttaatggatttatgcaaagggttggtgtctcatggagcaagcaaaacgtcctgactctggaaaccagacc

SEQ ID NO: 185370 - DNA, 201 bp, Homo sapiens
catttttaagcaactgtgaaaaatagctattatgatctgttggtatgcttccttgagtggctaataattttgttagatcatgatttagttctttttcatcrgtaaatatgaaaattaaagttagataaaacgagccataatttcaaactttgtatttgtttatcagttgggcttttgaattaagttttaaaaatcactttt

SEQ ID NO: 185371 - DNA, 201 bp, Homo sapiens
ctcccttcctctcgccctccacactaaggcagattattttggatgaaaacattcatttaaatttactctactttcccttcaccctatgaattaatgtaagraaatgaaatcagacttcacaggtaccatacattagcaacacagatgaccctgcgtgaagggagatcacacagttacttccatcagaagtaaaactgagcc

SEQ ID NO: 185372 - DNA, 201 bp, Homo sapiens
tatcctgggaactcaaatactgggaaagagttcatgggtccattcgctaggtatacagcttactacaggcccgtcatcgacagaaggcagctagtgccttmcaagaaaacagacaaaacctcattaaaatctacatcactcatttctgccctaatctgtatgaaatgaccattgatatctccttacagttaataatggtag

SEQ ID NO: 185373 - DNA, 201 bp, Homo sapiens
aatctgtttttaacctcaaaataagcacttgaggcgctttcatgggcatttacagagatgtgcacaacagggggaataaatctgacttgcccgatgcgcaygttcccggctgaggttgaacacggtgatgttctgccttgttcagctctcaaactgtaaacaagtgtccttttcatggtctatgtagtgtcacatttcacg

SEQ ID NO: 185374 - DNA, 201 bp, Homo sapiens
tgttaataaaatattttgatgacacacttaacatgtaacatgaatcaaattccagatttaagccaaaactcaagggattacatttgagttttaatgcttaraagtttgagtactctatgctttctaccagtgctccaaagactggaaataatagaattgcttgtttatttgccaaatcaggcactggttttgttactggag

SEQ ID NO: 185375 - DNA, 201 bp, Homo sapiens
atattaatgcttacgtggaggataaggttttgtggggattagtgagtttcaatacacataaaattcttagcacagtacatgacatatagaaaacattgccytaactattatagctataaacgtccatgttagtttattaaataaatgctttacatgtatttaagtgagtatattaaggcttgtgtataaacttcttcttgc

SEQ ID NO: 185376 - DNA, 201 bp, Homo sapiens
atatatttttgaaagttaaaaaagcaaaagaatgattgggaatcactacaattccaaatacggtgatatctttagacacttcagattaattttgcagtgtytttggtctgtagtcattctcttatgtattcatttaattacagattttaaccttttgacttaggacagcaaaacggatttcttttggaactaagtactatg

SEQ ID NO: 185377 - DNA, 201 bp, Homo sapiens
caaatatgattccaaactcagcagattagcaaaatttgataatcctcacaataccaaaggcctagaggaactgtccatcttatagccttctattgggagtrtatatagttactgccactttggagggtaatttggtagtttccaatgaaaacaaaaattgtatgctatgtgatttggcatttttttctttaagtgttaaaa

SEQ ID NO: 185378 - DNA, 201 bp, Homo sapiens
aaatagttgtctcctccttttgtgttaagtgttgatccatctgagcattgtcaatgtcaattatgtatcttgtgggttgtcctttttagttctgatctactttttttttttttttaaagcctttgctgtcttttctgttccttcccgtggttgactgattagtaatgtgtcttctgtcaccttcctatagaacaggtgatg

SEQ ID NO: 185379 - DNA, 201 bp, Homo sapiens
aaactagcttggtcgcaataaataattgaatcctgtaatgcacaggtagactctcaggattattataggctaaccatggaatcctggaaaagatactcccacagatttggattccatgtgtgtaaaggagtggtggttatggtgtcagtggcagcagtggagggtctgggagtgacgatgcagtggctcatgtagaagatg

SEQ ID NO: 185380 - DNA, 201 bp, Homo sapiens
agtcatgtcgtggctgctttgtaggctgcactttgcctgctccaaacacacagcagtgacagatcaaaatctaaaaagcgaaaatgaaaaagtcataatcrtgccccctactcccctaaaaaagatatatcactacagaccagagacaaacgcaaagcagagtgtgaaaccagacactgtgggctgcaggatcgctagccg

SEQ ID NO: 185381 - DNA, 201 bp, Homo sapiens
ctttgtcagaacatagggcctatagaaagaaagggtaggccgggcgcagtggctcatgcctgtaatcccaacactttaggaggcctaggcaggcggatcaygaggtcaagagttcaagagcagcctgatcaacgtggtgaaactccatctccactaaaaatacaaaaattagccgggcgtggtggtgcgcacctgtaatcc

SEQ ID NO: 185382 - DNA, 201 bp, Homo sapiens
tttaggaggcctaggcaggcggatcacgaggtcaagagttcaagagcagcctgatcaacgtggtgaaactccatctccactaaaaatacaaaaattagccrggcgtggtggtgcgcacctgtaatcccagctactcaggaggctcaagcaggagaatggcgtgaacccgagagatggaggttacagtgacccgagagcatg

SEQ ID NO: 185383 - DNA, 201 bp, Homo sapiens
cttccggttaattcctgatgcgcttttctaaatggtcacggtaacatacttccggttaattcctgatgcgcttttctaaatggtcacagtaacatacttcyggttaattcctgatgcacttttctaaatggtcacagtaacatacttacggttaattcctgatgcgcttctataaatggtcacagtaacatacttccggtt

SEQ ID NO: 185384 - DNA, 201 bp, Homo sapiens
aacatacttctggttaattcctgatgcacttttctaaatggtcacagtaacatacttacggttaattcctgatgcgcttctataaatggtcacagtaacawacttccggttaattcctgatgtgcttttataaatggtcacagtaagatacttccggttaattcctgatgcgcttttctaagtggtcacagtaacatactt

SEQ ID NO: 185385 - DNA, 201 bp, Homo sapiens
ttacggttaattcctgatgcgcttctataaatggtcacagtaacatacttccggttaattcctgatgtgcttttataaatggtcacagtaagatacttccrgttaattcctgatgcgcttttctaagtggtcacagtaacatacttccggttaattcctgatgcgcttctataaatggtcacagtaacatacttccggtta

SEQ ID NO: 185386 - DNA, 201 bp, Homo sapiens; identical to SEQ ID NO: 32397

SEQ ID NO: 185387 - DNA, 201 bp, Homo sapiens
cttccggttaattcctgatgcgcttctataaatggtcacagtaacatacttccggttaattcctgatgcgcttctataaatggtcacagtaacatacttcyggttaattcctgatgtgcttttataaatggtcacagtaagatacttccggttaattcctgatgcgcttttctaagtggtcacagtaacatacttccggtt

SEQ ID NO: 185388 - DNA, 201 bp, Homo sapiens
ttcatcattagaccagtgacaccctctaaacaaacatcttaccagtcaatggataagtggtccctgtgtccaatacataattctcatgcttaaaattaaamagttattgtaaaaacaaaatggtcactatgcctaatatatcactgttcttccttagcaattagaacctctaaaatgagtgaaattagaataaagaagaac

SEQ ID NO: 185389 - DNA, 201 bp, Homo sapiens
tcttccagagaaacatggctgccatttacattactaataaataaaattgttccctaacagaaaccagctcactcaacctgcctatatttacaattagagtsgtttgtttgtttaacagatccttaagccttacttccaggtactgttctaagcattttatgtattttttaaaaacctattacatagatattgttactattc

SEQ ID NO: 185390 - DNA, 201 bp, Homo sapiens
tgttccatcccgggcacaggcaactggctattctcactggggaagtctgttttgcaagggtccttctttgtgtgcctgaatgtgatgcattttgcacttayttcctgagaaaactattgctgtttcttaaaggttcaatggcttttttatccaatttgtgatggaattcaaaaacagaaggaaggatttttccaggaggta

SEQ ID NO: 185391 - DNA, 201 bp, Homo sapiens
gcactttgcctgctccaaacacacagcagtgacagatcaaaatctaaaaagcgaaaatgaaaaagtcataatcgtgccccctactcccctaaaaaagatayatcactacagaccagagacaaacgcaaagcagagtgtgaaaccagacactgtgggctgcaggatcgctagccgggaggtggaaacagaggcttagctctg

SEQ ID NO: 185392 - DNA, 201 bp, Homo sapiens
gaaaaagtcataatcgtgccccctactcccctaaaaaagatatatcactacagaccagagacaaacgcaaagcagagtgtgaaaccagacactgtgggctkcaggatcgctagccgggaggtggaaacagaggcttagctctggtggcagtaagactaaatgtgccaggccagagcatgtactctgcttgaaagcgggcag

SEQ ID NO: 185393 - DNA, 201 bp, Homo sapiens
gaaagggtggattcactgatgcccctaacccgattctgctcatagactcactccttgttccggggactgctggcctgccacttcctgctcacagtcgcagrtggggcttcctgagtctgtgcactgtcagtcagagctgagatgctagaggtgagctcctccctcaaccccaggtcactaaaggggcctctcagttctctt

SEQ ID NO: 185394 - DNA, 201 bp, Homo sapiens
ttgttcaaacacaattaatgatggccccacagggtagcaggtggctgaacacacagcagctaaatccctggctaagggtctgtggaaggagtgtttccacktggcaggcatggggacaggcacctccagtcctgttccatactccttcacccttcctgacattgattcccaggtccctcacctagttggcagttctcttct

SEQ ID NO: 185395 - DNA, 201 bp, Homo sapiens
cccacagggtagcaggtggctgaacacacagcagctaaatccctggctaagggtctgtggaaggagtgtttccacgtggcaggcatggggacaggcacctscagtcctgttccatactccttcacccttcctgacattgattcccaggtccctcacctagttggcagttctcttctgacatcgctgagtattttttgggtg

SEQ ID NO: 185396 - DNA, 201 bp, Homo sapiens
agtgtttccacgtggcaggcatggggacaggcacctccagtcctgttccatactccttcacccttcctgacattgattcccaggtccctcacctagttggsagttctcttctgacatcgctgagtattttttgggtggaagggaaagaaacttgagggcatgtaggcctaggatcttttctttgcagggatggggaccctt

SEQ ID NO: 185397 - DNA, 201 bp, Homo sapiens
agatctcaggaaaattattgccatttacattctacatttgttgttgaaggctaagagggcctcattaggtttaccaaatccaaataattacagttagagayggtgtttttttctactagctgaagtgatgtgtgaaaatagcaaaaatattttcacagagaaattatgctctttaacagtaaacttcacgccttgctagga

SEQ ID NO: 185398 - DNA, 201 bp, Homo sapiens
gggctggagaaggcattttaaattctacctggagtagataaagcgtacgaggtttttgctttaggcctagggggctggacgctggggtaaggggaacatgstataccctctcttggaccagctaccataggcctcacccaggaccagagctgaggccgcactcaagggcttcctagaagaggcccatattgggccccttcc

SEQ ID NO: 185399 - DNA, 201 bp, Homo sapiens
aatggggtgttttttgttgttgtcattgtgctttttgccttgacacatgcagatatttaatttccatgtaatttgtgtgcagcttccttgctttgacggaytgaaatttctgattctctgtagaggccagagcttggcaggaatattaatctacttccttttctcctaggagagcccctgagagaagaaaagtgctggaaa

SEQ ID NO: 185400 - DNA, 201 bp, Homo sapiens
tcagtgtagggcatagtacttggagagtgttttcttgttgagtatcacaagaggagagggagctggtacctttgaagttcccctcgatgagcagaggattygtgcctgaagcacctttgtcattccctgagcaacttatcaacacccttgttccttcagttctttgtttaaatttatgttgtgaattggtttttctgtgtt

SEQ ID NO: 185401 - DNA, 201 bp, Homo sapiens
aagaatgtcctgtggtgtatcccatcagactttacctttttggtctattacctcaggcaaagattgacttatgaagctagaattagtgaaattggtgatayggtagtggctaactgacttaccacctgcttgaaaatttcaaatgcagttgaagtgacattattatatttgtcttaatgttacaatgcaaaaatgcctgta

SEQ ID NO: 185402 - DNA, 201 bp, Homo sapiens
tataaatacattttcaaaaagtgcacatcaacttcaggataatgtttttctaggaagtgggaaatggtattagggaggggtggaaaccatgtttcaaatgkatttataatgtttttttttttaaactaaagttaaatatgacaaaatgttatggtttgataaaactgaataatgagtatatgggtggttgctattttctct

SEQ ID NO: 185403 - DNA, 201 bp, Homo sapiens
tgacaaaatgttatggtttgataaaactgaataatgagtatatgggtggttgctattttctcttcctgtctctaggtttgatatatttcattaaaatggcrtaatataatagtgaaataggtttcaaatagaaattgctgatgtgaaaaacctatgatagccagcatctctttgctttcatgataaaagaaaggaattgtg

SEQ ID NO: 185404 - DNA, 201 bp, Homo sapiens
aaggcgttggaccagctgcagtgggtataatgacgagtaaagcaggctcagcccttagctttttgcattttattttgaaaaggaaaatcctaagaactaastgaccacaatacaagtctgacgagactggtgtatgagaggaacaagcaggcccctcctgggggatcggaggggaagacatctcatttcagggatcaggaa

SEQ ID NO: 185405 - DNA, 201 bp, Homo sapiens
ctgtggcaccgtagccttattggtgctgatggtggctttcatatctgcaccaggagatattttaaaaagtaagccatgtgctggcctctgtatagattatrtaagctgtccaaggtgtttcaggatatatatctctctgaaaatatggtcctagactttcctttgtattattttttatatttgtatttgcgtagctttcaa

SEQ ID NO: 185406 - DNA, 201 bp, Homo sapiens
caaggtgtttcaggatatatatctctctgaaaatatggtcctagactttcctttgtattattttttatatttgtatttgcgtagctttcaaatgcagatgkcaggtttccttacaaaaaacaatttatgcaatatatgacttttctgactgtgatgcctgtcctgacatggtgggcatgatcctggccaagaattaagaat

SEQ ID NO: 185407 - DNA, 201 bp, Homo sapiens
tgcacaacatgcaggtttgttacatatgtatacatgtgccatgttggtgtgctgcacccattaactcgtcatttaacattaggtatatctcctaatgctcyccccccccgctgcccacaccacgcaacaggccccagtgtgtgatgttccccttcctgtgtccatgtgttctcattgttcaattcccacctatgagtgaga

SEQ ID NO: 185408 - DNA, 201 bp, Homo sapiens
ttttaagataggtaaaaccctgactgtggtgggaatgggaggtgggagaaggctggaatcactcatgggctagtggtcctttctggcctttaactccccartgaaggtgacagctaggcctcttcataatcgagtttccccttactgtaaaacatgggtccttgttctaccccaaggcagccatattccctcctcttctta

SEQ ID NO: 185409 - DNA, 201 bp, Homo sapiens
gcaggggatgcaaacatgttaaggggcccagggtgaagggcgggggaagtggtgtgggcgtgggcagcagggcattgccagcctcttctcctcgggaccaygctgtggcctcctggaagcccaaggccaatctgccttgacttttattttttaaaaagataagttagaaatctggaaggtgttaacattcctgatttttct

SEQ ID NO: 185410 - DNA, 201 bp, Homo sapiens
atagatgaccagtggccttttatagagcgagataaacacattgcatgaggctggtagcagtgtttccccatgcaccgtatgtgtccaagttctctgtggarctttcagaggagactgatgcccagcactattcctggagatgtagattcacttgcatagagtctcaggcacccagccagcccggttgagagcccttcagct

SEQ ID NO: 185411 - DNA, 201 bp, Homo sapiens
ttctaccctctaaaatatccttcttttttaaagttcttttatttatttatgaggccaggtcttgctctttcatcaggctggagcccagtggtgccatcacrgctcactgcaacctccacctcccaggcttacatctcagcctcccgagtagctggtactacaagcacatggtaccacacccagccaattttttgtgttttt

SEQ ID NO: 185412 - DNA, 201 bp, Homo sapiens
ctggagcccagtggtgccatcacggctcactgcaacctccacctcccaggcttacatctcagcctcccgagtagctggtactacaagcacatggtaccacrcccagccaattttttgtgtttttagtagagaaggtgtcttgccatgttgcccaggctgttcttcaactcctgggctcaagcagtctgcctgccttggcct

SEQ ID NO: 185413 - DNA, 201 bp, Homo sapiens
acactttcacaatcaacccagacttctgtttattggacctttggggatggatgagggaatcttttggtgttaatgccattgaatcttagataagaaaaccytaccatttcatcttttttgacaaagttataaattaatttcctggaacttagagaaaagaataccatacttaaatgaagtttaggtgtctgaaagtcacac

SEQ ID NO: 185414 - DNA, 201 bp, Homo sapiens
acatagcccctcactctgtgatcctcccaacagatcatgattgcgctttggattcccatagtactgtgtttgtacttcattccttaaattagtgtaaccartgtttaaattaaatatttaaattaatttaacccatacttacttccccatcactttgtaaatttcttgtggaaaaagagtatcttactaatcttgtgtgcc

SEQ ID NO: 185415 - DNA, 201 bp, Homo sapiens
tctgcacccactgtccgacactgcccagtgagatgaacccggtacctcagttggaaatgcagaaatcacccgtcttctgcatcactcatgctgggagctgyagactggagctgttcctattcggccatcttggctccaccccccttctatgaatttcttaggctgtttaaaatttatctcaacctcagctgccaaagtaat

SEQ ID NO: 185416 - DNA, 201 bp, Homo sapiens
gaaattatttctataatgtataaaaatcgataatagatgctggtgtgaaaatacatgtaatgacgaatgtattgaatttgtagcctgtgaacatgtgggayatgatgtgtgtgcgtcactatttttatatccttgtatgttggtcaagatatttaaaaggtgtcagaaaggccaaatcaggggtgctgtcaccaagcccac

SEQ ID NO: 185417 - DNA, 201 bp, Homo sapiens
aggctcaggcgaattttttatggcatttcggggcagtggagaagccatggggacaggaagatggtcggagagtcctgtgccagtcagaatgtagggctgtrttttctggctcattgctattgttcaaacacaattaatgatggccccacagggtagcaggtggctgaacacacagcagctaaatccctggctaagggtctg

SEQ ID NO: 185418 - DNA, 201 bp, Homo sapiens
gaggacaagccaagcaggtgtctctgagctcagaggagggacccgtggggctgggacccacctccaaggacaggggctgtgctggcatctctgaggagggsttcgatgaggccgatgctgtgatgttgggaaaactgtgatgtgaatgaagcctctgctcctggttgccagtgtataggagccgtgttgctgagcccctga

SEQ ID NO: 185419 - DNA, 201 bp, Homo sapiens
agaatgctgcctaacttgggtatgaccagatgtcagttattagaatgattggagattgagaaccaagtcaggagttcagagtcagaggcagtgtaggaacmggaggctgggttggatgtgttgggggaaaccaagggaaaagtggaaagtctctctccgagggctgggagcattcctaagttgtggtcatttctggaccag

SEQ ID NO: 185420 - DNA, 201 bp, Homo sapiens
gatcctcctggggagctgctggcctagctgaagggcagtttgcagagtccaacccagtctcccaccgtagagtgcaggaagggggtttggagctgagaggscacagcttaattactgctttattagcccaagagcaaagccgaaggtcctttctgtcttgtagctttgagccctgcactttttcttcttgtttcttcctct

SEQ ID NO: 185421 - DNA, 201 bp, Homo sapiens
gagcccctccatggcctggacattatatcttgaaaatgtttgtttttatagcagtgcttgttattctccagaataacaccagcttttgagctagcgaaacragaggcaaatcctggctgtgcaactcagcctctggtgaccttagataagttctttaacgttaacactctgaacttcagcgtccataactaaaatgaggac

SEQ ID NO: 185422 - DNA, 201 bp, Homo sapiens
cgatacgcttaccaacgctgacacctttaatccccactggcaacaccatgacagacgactggaatcatccctctttttgtagatgggagattgggcgattraggaaacgcccaaggtcacaaaaactagcaagtagcagagctgagttgtagcggctgagtgacctcccccttagacctcatttgaagatgagataaagta

SEQ ID NO: 185423 - DNA, 201 bp, Homo sapiens
cctgcagaatcagggtctggatcttaacaggatcacaggagatttttttttttttttgaggtggcgtctcactctgtcgtccaggctggagtgcagtggcrcgatctcggctcactgcaacctccgcctgctgggttcaagcaattctcctgcctcagcctcccaagtaactgggactacaggcacacaccaccatgcctg

SEQ ID NO: 185424 - DNA, 201 bp, Homo sapiens
taggaggtgttcagctaatggtcgctgccctgcccatccccttctgtgtatcttacaaatagttgtctcctccttttgtgttaagtgttgatccatctgarcattgtcaatgtcaattatgtatcttgtgggttgtcctttttagttctgatctactttttttttttttttaaagcctttgctgtcttttctgttccttcc

SEQ ID NO: 185425 - DNA, 201 bp, Homo sapiens
gctgaacaggagatttgggagtcacacgcacctctgctttgatcccagctctcctctcgctcattaaccgtgcacccctgagtgcagttgcttctgcaccscctttccccgtccacaaaatctggacaacaccatctgccttgctccattgtgagaatgggtaagtgaaagttgaaaacctttttgtcatatgtaggtacc

SEQ ID NO: 185426 - DNA, 201 bp, Homo sapiens
ggaggactcaaggttaagaggcagggatggggtactctttacagaggggagagagacactttctttagacttggcaggattgtgtgagattcttgttagtsttgaacttttatcttttagagacatgatattctaatttcataaaagcaaaatgattaacatcctgatgcagatttgaaatgaatttccctgatgacatgg

SEQ ID NO: 185427 - DNA, 201 bp, Homo sapiens
tttggagaaagaagacatccctaaatttggtttcctgactagtgctgtgtatggaaccattattcattttgcataagggaaattaatcattaaagggcttrgaattttagctcttaattgatgattttgcttgttcatagcctcagcgacattgcataggatttatttgatggaacactaaaaagctacttttccagattc

SEQ ID NO: 185428 - DNA, 201 bp, Homo sapiens
tcttttcagtttacaatgtaggaaggacaaactcacttataatctttgttaggtttcccctgcctaacttggttaaatccagcatgtctcagaggtacttracaatggcccagggttttcacagtccccctcgtgacaccctgtgggatagttttggtcaggtgacagtgtgtgaggtgctgagcacccgcttttgcagat

SEQ ID NO: 185429 - DNA, 201 bp, Homo sapiens
ctttgagcttcttgatttatcttgtgtgactgaaatctaaacgtcagtattgcatcaactccggggttgtttttcctcctttctttccagaacccctcacycccaatctgatgagcacatttggttgtgtagttgagattctgaagctaaatgcattaatagtgagggaagtattcacagtgaatgtcgaatgaaatgact

SEQ ID NO: 185430 - DNA, 201 bp, Homo sapiens
cttggttaaatccagcatgtctcagaggtacttaacaatggcccagggttttcacagtccccctcgtgacaccctgtgggatagttttggtcaggtgacartgtgtgaggtgctgagcacccgcttttgcagatgaggaaacctggatgcagaaagctggcagtttgtgcctggtcagggagaagaaggcctggcgctggc

SEQ ID NO: 185431 - DNA, 201 bp, Homo sapiens
agtttgtgcctggtcagggagaagaaggcctggcgctggcactgctgccctggacggaaagcagctgctccagaaagcactcagtaccttcttcttctccmtgctaagtttggcatttgacccaacagatggccaaaaacttgtaaatattcacccatgttttgttatttgaatggactgatcttactgagacttttgctt

SEQ ID NO: 185432 - DNA, 201 bp, Homo sapiens
tttgtgcctggtcagggagaagaaggcctggcgctggcactgctgccctggacggaaagcagctgctccagaaagcactcagtaccttcttcttctccctrctaagtttggcatttgacccaacagatggccaaaaacttgtaaatattcacccatgttttgttatttgaatggactgatcttactgagacttttgcttgc

SEQ ID NO: 185433 - DNA, 201 bp, Homo sapiens
cctacctgtaacacacagatccgtcgtacaaattatgctttgtttgctgaaaagcctcctgaagctgaatgggtttactttggcatcagcggaggccatgwttgagggcggagatgagacattggatcgctcttgtgtggcttccgcatggccgtcgtggttcctctgcccagccctctcctgcgagggactcgatcagct

SEQ ID NO: 185434 - DNA, 201 bp, Homo sapiens
ccaggctcatggcacatctttttggagatggtaagtgctcaaacacaggttgacgatctcttatctgaaatacttgggacagaagtgttttggatttgggttttttttttttttttcatattttgaaattctttttttttttccccgagacggagtcttgctctgtcacccaggctggagtatagtggtgcgatctcggct

SEQ ID NO: 185435 - DNA, 201 bp, Homo sapiens
ttaaatatctgaaaatatttttaaaatttattaaaatatatgtaaaataagttttcacaatggaatgtgtgctgcattttgggaattatcagtgggttttkgatttattgcttcaaccattccctaatatgtccctaatatttttcatatgtacctacatggatatactagtatttctgattgatctattgaaactagctt

SEQ ID NO: 185436 - DNA, 201 bp, Homo sapiens
gcgcaccaccatgtccagctgatttttgtatttttagtagagacggggtttcaccatgttggccaggctggtctcgaactccggactttgtgatgcacccrcctcggcctcccaaagtgctgggattacaggcgtggccacaactgcttttcattactctcactgcttcacctccacctgtgatcagtgacacacgtttga

SEQ ID NO: 185437 - DNA, 201 bp, Homo sapiens
cttttcagtgttacgggatccttctgcttcaaagtaaaactaggtctgaaattttcaagctcaaaaacttccataggtaaaacttttaatggaaacaaatwactttttttaaaattgaaacatttgtcaaaagcaaatatagctgccaagcctgtggattatacattttggttccaaagagtgatgaacctctggtagcca

SEQ ID NO: 185438 - DNA, 201 bp, Homo sapiens
ctgatgtttgagttctgcaggccaccgcctgagctcagagccggccatttctccagcagcactccaaactcacagcactctgctaaccaaggcattgcagsggcccgctgtgaactttggcgtaggctttgttggactcatttgaatttggcccaaaagaaaataacatttcacatttctccctaacgtggagaaattgaa

SEQ ID NO: 185439 - DNA, 201 bp, Homo sapiens
taatgggacacttcctcccttgtcgtgaacaacagtaaacaggtcttgaagaagctccatgtctgaaacaaggagttccacggtcatttatggttgcttcrctaattagaagtcttttttaatgaggagaaacattttcatttctcgaagggctttgttgctttgggtgggccagaaggtgtggttggtgggaggtgtgga

SEQ ID NO: 185440 - DNA, 201 bp, Homo sapiens
tttgtgcatgtgtattaatgttggaagtatattttcagggtaagtagttagaaatggaaggactgggtcaagagatcaacaaatatgtagttttgttgggygttgtcaaattcatctccaaaagggttctaccagtttccattttcaccagcaaagtatgactgtacttattttccaaagcctcagcgtattcaaaagaat

SEQ ID NO: 185441 - DNA, 201 bp, Homo sapiens
gatgtttgagttctgcaggccaccgcctgagctcagagccggccatttctccagcagcactccaaactcacagcactctgctaaccaaggcattgcagcgrcccgctgtgaactttggcgtaggctttgttggactcatttgaatttggcccaaaagaaaataacatttcacatttctccctaacgtggagaaattgaact

SEQ ID NO: 185442 - DNA, 201 bp, Homo sapiens
actgagcagaggcccgggggcattcccagccctattctccaccttccacccttgttagccaagtgggttttcaagctcttggtgagtgctcatattaaccwgcacttcttagcttgcccaggatgagggggatctcctgtgaaactaatcgttctcctgggctcttgaggctacttgtgctgccacgcatatcacttctat

SEQ ID NO: 185443 - DNA, 201 bp, Homo sapiens
cctgatgatttatgatgttgaacagtttttcatatatctgttggccatttgtatgtctcttcagatttttttacctgtttttaaattgtaatatttggtgkttttttttttttttttttttttgctattgagttgtttgagcttcttagatattctgaatattaaccccttgtcagatgtacagtttgcagacattttttt

SEQ ID NO: 185444 - DNA, 201 bp, Homo sapiens
actggctgtggattttgtgcttagttggactgctgattaccagcccatcggtttctctagaattttgtttcatcagctttaaatataccctaaatgatgtmatctcacaataaaacaaacaactaccattatttgatgatccatctttctctggaaacttactgtccttttcagctacagtttatgaaatataccttccaa

SEQ ID NO: 185445 - DNA, 201 bp, Homo sapiens
atgagtaagtaagtatgtaagtaaataaataagtggtcatgtttagcttttttgtcttctctccatttctaccctgtaattgagagttgatgttagactaytttctggaagtatcaatcaataaatgttttcagaagtaatcaactcagcataaccactttccctgggtatttctgtcaccaaaaggggtacaaaacaatg

SEQ ID NO: 185446 - DNA, 201 bp, Homo sapiens
ttaaccagcacttcttagcttgcccaggatgagggggatctcctgtgaaactaatcgttctcctgggctcttgaggctacttgtgctgccacgcatatcayttctatgggccattttcatttaaaacccatggtggctgctggccaacgcagacccttgtctcctgagatgagtggttgggcctgcccagcagccctccct

SEQ ID NO: 185447 - DNA, 201 bp, Homo sapiens
aacatattattttgaaaataatgtttgttttatttctaaagcgtatattgatttctctttctttctttctttctttctttctttctttctttctttctttyttcctttctttctttcttttttttggggagaagaaggaatagaggacagcagaatacctaacgcatttgtgatgcgctgcttataaatgcatgttcagag

SEQ ID NO: 185448 - DNA, 201 bp, Homo sapiens
aaagtgtacaatttgataacttttgacataattatacacacactaaaccatcaccacaatcaagatatactcatcaccccaaaacgtttccttgtgctccytcaccgtccctctaccacctcttctgcccactctccctacccaccaggcctaggtaactagtgatctgctttctgttactataggttggttaccattttc

SEQ ID NO: 185449 - DNA, 201 bp, Homo sapiens
tgagggggatctcctgtgaaactaatcgttctcctgggctcttgaggctacttgtgctgccacgcatatcacttctatgggccattttcatttaaaacccrtggtggctgctggccaacgcagacccttgtctcctgagatgagtggttgggcctgcccagcagccctccctgcagccaccttctgatggtcctggaaagc

SEQ ID NO: 185450 - DNA, 201 bp, Homo sapiens
gtctccattttatagatgaagaaactgaggcatattggcctcagtcatgtgtcaagcccacggcacaccagtcagggccaaggcctgaccgatttcggctrgtaaagatacaaggggccactctgttttttattgtgttattttttgacacagggtctcactctgttacctaggctgtagtgcagtggtgcgatctcagct

SEQ ID NO: 185451 - DNA, 201 bp, Homo sapiens
gttctggaggctggaagtcttaagaccaaggtgttggcagggttgattccttctgaggatctgttttgtgcctccttcacctccagtggtttgctggcacrctttggcattcctgggcttgcaggagcgttatcccagcctctggcttcatctgcaggtggtgtgctccctgtgtgcatgcctgtgttcagacctccccag

SEQ ID NO: 185452 - DNA, 201 bp, Homo sapiens
cagggttgattccttctgaggatctgttttgtgcctccttcacctccagtggtttgctggcacactttggcattcctgggcttgcaggagcgttatcccascctctggcttcatctgcaggtggtgtgctccctgtgtgcatgcctgtgttcagacctccccagtttgattaggataccagtcatattgcattagggtcca

SEQ ID NO: 185453 - DNA, 201 bp, Homo sapiens
tcctgtctttaagtaagctcgtattctgaggtactggggtttaggactcccacattatctttttttgggaggggaacacaagtcaatccataacagagccrgtgattacaatgccagctgtgacatagcccattgcagagaagccagttaaaggctgcagctcagaggttttatattctatggtaccattccaaggaggga

SEQ ID NO: 185454 - DNA, 201 bp, Homo sapiens
cttttgtttcaaatcatgactttgaatcctatattccagaggcactgaaatgttatttatttacctgtgcattcaagagatagctggcagcctagcaattyaagttactgttgttgtggtaacttgagggcaatatataaatcaaacactgatcctgttttccagaagtttatactttaaatgcatttgtatatgattaaa

SEQ ID NO: 185455 - DNA, 201 bp, Homo sapiens
tatagtggctacaccatttaatattcccaccaacagtgcacaagtgttccagtttctccacatcctcgccaacgagttatttttgtttattttaataatgrccatcctaatggtgtgaggtggtatctcattgggattttgatttgcatttctctaatgactagtgatgttgagcatcttttcatgtaattgttggccatt

SEQ ID NO: 185456 - DNA, 201 bp, Homo sapiens
tccataacagagccggtgattacaatgccagctgtgacatagcccattgcagagaagccagttaaaggctgcagctcagaggttttatattctatggtacyattccaaggagggaagccagagagcctcacaccccttcagaacctgggaggtgaggagaaactgcctcatgacagcctcccagggaagtagggaggtgga

SEQ ID NO: 185457 - DNA, 201 bp, Homo sapiens
tattccagaggcactgaaatgttatttatttacctgtgcattcaagagatagctggcagcctagcaattcaagttactgttgttgtggtaacttgagggcratatataaatcaaacactgatcctgttttccagaagtttatactttaaatgcatttgtatatgattaaaattaggtattaggttggtgaaagtagctgca

SEQ ID NO: 185458 - DNA, 201 bp, Homo sapiens
cattccaaggagggaagccagagagcctcacaccccttcagaacctgggaggtgaggagaaactgcctcatgacagcctcccagggaagtagggaggtggrtaggagatggctcctagcagctccttaaaggcctggaacaccagaggatcacaagactttatcctttcaagacacagatgagctgcggttcaagtctttg

SEQ ID NO: 185459 - DNA, 201 bp, Homo sapiens
atgataacataataaacgaggttttctacaaagccaaggatctgaatgacaaaggaaggacaactagagattagggatataaaagtgacttccaggaatcytttcatttagtgtattaagtatcacatgtctgtcagatttctttaattggctctttcagctgtgtggaggtcgtagtgggggaaacatgccagtaggaca

SEQ ID NO: 185460 - DNA, 201 bp, Homo sapiens
aatgactgaaagttgggatttataattagaagggaagcagagtgtaaaagtttggaagatttgcactctgccctctgcccatgtgggaaagaaacaaaaarcaagtgctttccagaagatgttctttagaacacacaatgcttgggataatgccacttgataaatagatcccaaggtcaagttggtgcaggaaatgcaaat

SEQ ID NO: 185461 - DNA, 201 bp, Homo sapiens
ttcattgtccatatcactatcagcttttggtcaaagccattcaacaagtctctagggaatttcaaactttcccacatttttctgttttcttctgagctctycaaactattctaacctcttcctgttacccagtttcaaagtcacttccacatttttggatgtcttttcagcagcgccccactctgctggcaccaatttact

SEQ ID NO: 185462 - DNA, 201 bp, Homo sapiens
caggcccgctttctgtcaaaatggcagcgcccagcgtgcgcgggtatctctgaagttggggtttaagattcttgcccgtgagagcgaacgagcctgccgtrcttctgattttgaaacacctgggtctgggcttcccgggcgagcggtgggtgagtgccggcctcattgcagcctggggtacgacgtgggcggttggtgttg

SEQ ID NO: 185463 - DNA, 201 bp, Homo sapiens
gttactgttgttgtggtaacttgagggcaatatataaatcaaacactgatcctgttttccagaagtttatactttaaatgcatttgtatatgattaaaatwaggtattaggttggtgaaagtagctgcagttttgaccgttacttttaagggtgaaaacagcaataacttttctaccatcctgtacaaagggctgctgaag

SEQ ID NO: 185464 - DNA, 201 bp, Homo sapiens
ctcttcttgcattaagcccagagcagttcattaggaaaaccgtatagagtcatgagaccctaagtctcatgatcagaatttcatcttctcttcccttttgktttttttttttttttttaacatagagaaggtaaagggggaaaatgatttacttagtttccagaccacttatttaaatcctgcccaatctgacttccactc

SEQ ID NO: 185465 - DNA, 201 bp, Homo sapiens
ggattaaaaacttcctggtctcattagacacaacttttaccagtctgtgttttctgttttagttactatggtagtatcaatagattctgctccattaaatygttcgtgtttatcatcttggtggattctgaaaaacatcggctaacgtccctgcttttcttgctttgctatctgtagttttcactgtggagcagttaccca

SEQ ID NO: 185466 - DNA, 201 bp, Homo sapiens
cccatggtggctgctggccaacgcagacccttgtctcctgagatgagtggttgggcctgcccagcagccctccctgcagccaccttctgatggtcctggaragcaagtaggaaggcctttggctttcagagcctctcagtctaatgcattcccattttgcaccaccagcaacctcatatgtgatagagacagatgagcgcc

SEQ ID NO: 185467 - DNA, 201 bp, Homo sapiens
ggcctttggctttcagagcctctcagtctaatgcattcccattttgcaccaccagcaacctcatatgtgatagagacagatgagcgccgctgtacaacgcwgcatggtccaagccacatccctcccttggtcaggagattcactgtgggtcactgactgtgatgagactacttagcatcccaggaaagtcagtctcattgc

SEQ ID NO: 185468 - DNA, 201 bp, Homo sapiens
ctttggctttcagagcctctcagtctaatgcattcccattttgcaccaccagcaacctcatatgtgatagagacagatgagcgccgctgtacaacgctgcrtggtccaagccacatccctcccttggtcaggagattcactgtgggtcactgactgtgatgagactacttagcatcccaggaaagtcagtctcattgctaa

SEQ ID NO: 185469 - DNA, 201 bp, Homo sapiens
ccatcttaaacaactaaaaactaggcaaaataagtgcaacaagggttttcagacattggacatagagtagtccaggacggtggtcgctgagagggacagcratggaggtgagccctgcggcttcccccgctcacttccccggggggcttcctaggccacagcacggggaggggaccccacacaaagcccaggagtctctca

SEQ ID NO: 185470 - DNA, 201 bp, Homo sapiens
caggtagatttttcaacacacatgatcagtgttcagttgaatgctgaaggggttcttctgcagatctccagagttcttcgcgcagctctcttctctccttyactctgccctgagaattctagctatcctgacttgtccagactcccggctctgtctcctcaaatcaaggagacttttgggctctcccatgttctccttagg

SEQ ID NO: 185471 - DNA, 201 bp, Homo sapiens
tcaagacacagatgagctgcggttcaagtctttgcttggtggcttatgcggatatgtgcgaggttgccagggggccctgacagagccgttcctctgtcatygctcgtaggatggggcagattctgagccaggtctgccacactcccatctacactccttgaggcttgctgtttccctggacaccaattcttatgtcgactg

SEQ ID NO: 185472 - DNA, 201 bp, Homo sapiens
gaacacatcagtgaattgtgctttcatgtatctcttaagatatctaaaacacacttattttaaagtctcagattgtttcataaaaataatctcaactgagktaagttaatgtttgattatttgttctgctggctgtattacttagcattagatttgtccatatgttttagaattttgggttgcagggtcatattcagagga

SEQ ID NO: 185473 - DNA, 201 bp, Homo sapiens
ctgccgtgcactcactaccaggccctcggcggaccccaggcgtctctgaaaccacagaactgtgagctgcaggcaggggtttctcttctagcccataaaargcagactttttaaatttaaataaacatgctgcattgaaagtagttaccacaagacaaacaatgattgcctttatgtatgattttatcataaagtatatat

SEQ ID NO: 185474 - DNA, 201 bp, Homo sapiens
ttcaatcttcacatagaaggaatatctcctttttaaattccaattttcttttgtggtttcttataaagtcttgtgacttgtttcacataggcccctttatrtatttgttattgtaaaggatgtttttcattattcgctatttactgttggtaattgctgggatttaagctgttgatttctcaaaattgtaagttaattccc

SEQ ID NO: 185475 - DNA, 201 bp, Homo sapiens
ggagagcctctgttttcctctcaaagccaggtttttctgtctcgctgcgttttggtgcctgaaaggcttgggtgggcatggtacctggagtactgttgttyggagcacaaagtgaggagaaaagaccactctactttgtgggaggtccttggggcagtttgggcagcagtgcctcccccaggagtcagggtccccacccca

SEQ ID NO: 185476 - DNA, 201 bp, Homo sapiens
gggctgcaggatcgctagccgggaggtggaaacagaggcttagctctggtggcagtaagactaaatgtgccaggccagagcatgtactctgcttgaaagcrggcagggtagtggtcctgtcctctgatctagaagggaggcccgaatcactgcctgccctaacctctagcctatagaaagctttgatcctgggaagagcac

SEQ ID NO: 185477 - DNA, 201 bp, Homo sapiens
ggaagtctcccctcaccccacttccacctccattcttctctagggggccacgactgggtttgaaactctaaaccctagttatgaagttgtaaatataagtraaaaagaaaatcccaaaagattacatacagcatggtattcattttataaaataaacaacttactaaaacctcagagctatctacaaaggaagtcaaggga

SEQ ID NO: 185478 - DNA, 201 bp, Homo sapiens
gtttatcattctggtgagggaacaaaccagctttctgctccagagggagagactaaccatcttccagtgctatttggtgtacaagccaccacaagttttaygaaaactccatagagcactgtcccccaacaaagaggtggaaaacaagaaaaaatatggaatttaaaaatatttttaacttaaaattagctgttgagttaa

SEQ ID NO: 185479 - DNA, 201 bp, Homo sapiens
ccatcttccagtgctatttggtgtacaagccaccacaagttttatgaaaactccatagagcactgtcccccaacaaagaggtggaaaacaagaaaaaatayggaatttaaaaatatttttaacttaaaattagctgttgagttaatttattgttttacctgtgattttgtttagaagatgaaactctagacaagaataacc

SEQ ID NO: 185480 - DNA, 201 bp, Homo sapiens
tttgcatactccccagaaacacacacacacacacacacacacacacacacacatacacacacacacacacagatgcagaattttttatatagtttaaaggkttttataggcttattagttaaagggttttatgggctactggattagattatgaaatttgaagtcagggtcaaggagatagtttttgcttttaataggtaa

SEQ ID NO: 185481 - DNA, 201 bp, Homo sapiens
tcttcttgcattaagcccagagcagttcattaggaaaaccgtatagagtcatgagaccctaagtctcatgatcagaatttcatcttctcttcccttttgtkttttttttttttttttaacatagagaaggtaaagggggaaaatgatttacttagtttccagaccacttatttaaatcctgcccaatctgacttccactcc

SEQ ID NO: 185482 - DNA, 201 bp, Homo sapiens
cgagaggcaaatcctggctgtgcaactcagcctctggtgaccttagataagttctttaacgttaacactctgaacttcagcgtccataactaaaatgaggacaactcttgagtggtggtgaatgagcctgccacgctcctgacattaggaggtgttcagctaatggtcgctgccctgcccatccccttctgtgtatcttac

SEQ ID NO: 185483 - DNA, 201 bp, Homo sapiens
gagaggcaaatcctggctgtgcaactcagcctctggtgaccttagataagttctttaacgttaacactctgaacttcagcgtccataactaaaatgaggacaactcttgagtggtggtgaatgagcctgccacgctcctgacattaggaggtgttcagctaatggtcgctgccctgcccatccccttctgtgtatcttaca

SEQ ID NO: 185484 - DNA, 201 bp, Homo sapiens
tctagtatagcaccctgacagccagtattttgttcagctgcctggcagaagttgtttctcagccaccaatgtatttttgtagcatctttcaccacagaatactgactgtttcacatctcttcccattaatccactggcacaaagtctcattgcaaggagaggaaatgagacaagcagcagggagaaaataaagtctgcttt

SEQ ID NO: 185485 - DNA, 201 bp, Homo sapiens
ctagtatagcaccctgacagccagtattttgttcagctgcctggcagaagttgtttctcagccaccaatgtatttttgtagcatctttcaccacagaatactgactgtttcacatctcttcccattaatccactggcacaaagtctcattgcaaggagaggaaatgagacaagcagcagggagaaaataaagtctgctttt

SEQ ID NO: 185486 - DNA, 201 bp, Homo sapiens
tagtatagcaccctgacagccagtattttgttcagctgcctggcagaagttgtttctcagccaccaatgtatttttgtagcatctttcaccacagaatactgactgtttcacatctcttcccattaatccactggcacaaagtctcattgcaaggagaggaaatgagacaagcagcagggagaaaataaagtctgcttttt

SEQ ID NO: 185487 - DNA, 201 bp, Homo sapiens
agtatagcaccctgacagccagtattttgttcagctgcctggcagaagttgtttctcagccaccaatgtatttttgtagcatctttcaccacagaatactgactgtttcacatctcttcccattaatccactggcacaaagtctcattgcaaggagaggaaatgagacaagcagcagggagaaaataaagtctgctttttg

SEQ ID NO: 185488 - DNA, 201 bp, Homo sapiens
ccaatccttcctccaaagtgatttgaatacttaatatttgctgaaatgctttagttggatttgaataatgtaattgaatttgcttgctgcatttgggggaratgaaggcttgggagtttcttttctttttttcttttcttttttttttttgagacggggtcttgctctgtcaccaggctggaatgcagtggcatgacctcg

SEQ ID NO: 185489 - DNA, 201 bp, Homo sapiens
gatttgaataatgtaattgaatttgcttgctgcatttgggggagatgaaggcttgggagtttcttttctttttttcttttcttttttttttttgagacggrgtcttgctctgtcaccaggctggaatgcagtggcatgacctcggctcactgcaacctccacctcccaggttcaagcgattcttctgcctcagcctcccaa

SEQ ID NO: 185490 - DNA, 201 bp, Homo sapiens
tttcttttttttttttgagacggggtcttgctctgtcaccaggctggaatgcagtggcatgacctcggctcactgcaacctccacctcccaggttcaagckattcttctgcctcagcctcccaaggagctgggactacaggcatgcactaccatgcccagctaatttttttttgtatttttagtagagacggggtttcacc

SEQ ID NO: 185491 - DNA, 201 bp, Homo sapiens
aactctaaaccctagttatgaagttgtaaatataagtaaaaaagaaaatcccaaaagattacatacagcatggtattcattttataaaataaacaacttaytaaaacctcagagctatctacaaaggaagtcaagggagcaataaacaaggattcagaacagtgattccctgagagagggcaggcaggaggatgagttggg

SEQ ID NO: 185492 - DNA, 201 bp, Homo sapiens
aatcccaaaagattacatacagcatggtattcattttataaaataaacaacttactaaaacctcagagctatctacaaaggaagtcaagggagcaataaamaaggattcagaacagtgattccctgagagagggcaggcaggaggatgagttggggaagactccacagatggacaaaagtcctcatccgagttccggttct

SEQ ID NO: 185493 - DNA, 201 bp, Homo sapiens
ttttgttagaaaagggaaaagtgtgttaatagacttttgagaaaattgtggctattcattctttgacactctaccaaaaccggaaaagtagtagttttttraaagttagttgcattgtgaaatctgaaattatatcaatgactgatataatttttcacttgttacattgaaatcgattagtctatcttgcaattttgaatg

SEQ ID NO: 185494 - DNA, 201 bp, Homo sapiens
cctgaaaagaggcttcagggctttgggccaaactgtgccttgaaatgaattttagaagcggccacagcaggcggtctctgttgtgaggggcccagctagtracaggcacactcccccaagacagaggaaacaccctgcagagcggtggccacgctgggctgtccaccgcacaggggctgtcagagaaagagtgggctcggc

SEQ ID NO: 185495 - DNA, 201 bp, Homo sapiens
atggttgcacatgagccagggccgtaaagaaacacagataaacagtggcactcgtgttaagatgggcagcgcaggagcacatgaattgttttcctttaatrtttctgcaattgtcttaacgatatttttaaagtagaaaaagtaaaggagggagcatgtgcccaggatccctctatgcctcggagaccacaactgcagagc

SEQ ID NO: 185496 - DNA, 201 bp, Homo sapiens
cactgtgaattccaggaaaataatttgggtagagcggcattttatactattcaatcttcacatagaaggaatatctcctttttaaattccaattttctttygtggtttcttataaagtcttgtgacttgtttcacataggcccctttatgtatttgttattgtaaaggatgtttttcattattcgctatttactgttggta

SEQ ID NO: 185497 - DNA, 201 bp, Homo sapiens
aggggctgaaagtagcatccttaggctatcccattgatggtcttggttaaaacaagcacagttcaaataccttcgtgaccgctgtcaactgcaaatggtayggccttgggtcagatacttggcctcattgagcttcacttccaccgtctgtaaaggagcaatgcctctgcagtacctaccttcctcaccgggctgttactg

SEQ ID NO: 185498 - DNA, 201 bp, Homo sapiens
tgatttcttttcttttggatatattcccagcagtggaattgctggacatatggtagttctatttttagttttttgaggaacctccacacagttttcctgtgtggctatactaacttatatttccaccaacagtttacaggggttcccctttctccacatctgtgccggcatcttttattctctttttgataaaagccattt

SEQ ID NO: 185499 - DNA, 201 bp, Homo sapiens
ttatgagctctgtactttctttatttcaatattacaatctttaaagctattaaaaacctgcatttgagaacacctgttaaagtccttaatatagcttgatkataaactgtcttttgagaaggaacaaagcaagacaacaattgtttgtgaatgacaaatttccaggacagttatagttaaaaatatgactgacaagtttat

SEQ ID NO: 185500 - DNA, 201 bp, Homo sapiens
atataagggacctgaggattttggtagctgtgggggccctggaatcaatccccctcagatactgagggacgactatatgcagttatctgataaaactagtraaatagtcatccttctgttaagaaaagaaataagaaaacatgaataatattgtacgtaatcgaaggtccctttggattctaaaattccacaattctatgg

SEQ ID NO: 185501 - DNA, 201 bp, Homo sapiens
ctttggattctaaaattccacaattctatggttgtgggttatcaagtgcccaccaggtggctttgcctgtccagcttcagcctctctgccattccacgtgrttgctaaaccctaggacaatccagggatggaggcaacgctctgtgtcccaccgacgtggtatgtccactagctcacgcagttagaagagaaaacacagct

SEQ ID NO: 185502 - DNA, 201 bp, Homo sapiens
ggcatgcactaccatgcccagctaatttttttttgtatttttagtagagacggggtttcaccatgttggccaggatggtcttggtctcttgacctcgtggyctgtccgccttggcctcctaaagtgctgggattacaggtgtgagccaccacgcccagctgggtgtttctatggtaagaaatgtgagtgtgcttatgttta

SEQ ID NO: 185503 - DNA, 201 bp, Homo sapiens
gctctgtgtcccaccgacgtggtatgtccactagctcacgcagttagaagagaaaacacagctgaatgcactgactgtactgtagtcattgctcacagcasgtggctctgtaatgtgctcctctaggctctagaatacctgcaatgtaacagggactgtgcacagtaaggagattccagaggtggagacagagatgcacac

SEQ ID NO: 185504 - DNA, 201 bp, Homo sapiens
gctaatttttttttgtatttttagtagagacggggtttcaccatgttggccaggatggtcttggtctcttgacctcgtggtctgtccgccttggcctcctwaagtgctgggattacaggtgtgagccaccacgcccagctgggtgtttctatggtaagaaatgtgagtgtgcttatgtttagcagtgattcttatttctct

SEQ ID NO: 185505 - DNA, 201 bp, Homo sapiens
aaaatgttacatctgtttctgattttcctctctgaaacaaagctttctgaattctgctcctactacagtttttttgtttttgtcgttgttgttgttattgtttgtttttgtttgtttgtttttttcctgagagagggtgtctctctgtcacccaagctggaatgcagtagcatgatctcagctcaccgcaacctctgcctc

SEQ ID NO: 185506 - DNA, 201 bp, Homo sapiens
agtggagatggggtttcaccatgttggccaggctggtcttgaactcctggcctcaagtgatccacccatgtcggcctcccaaagtgctgggattacaggcrtgagccactgcacccagcctctactacagtttttttgttccagtacttaccttgcttgtttaggttattcagaaagtgagtactattgctttctttccct

SEQ ID NO: 185507 - DNA, 201 bp, Homo sapiens
atgttagcagaggaatatgaaattatttctataatgtataaaaatcgataatagatgctggtgtgaaaatacatgtaatgacgaatgtattgaatttgtarcctgtgaacatgtgggatatgatgtgtgtgcgtcactatttttatatccttgtatgttggtcaagatatttaaaaggtgtcagaaaggccaaatcagggg

SEQ ID NO: 185508 - DNA, 201 bp, Homo sapiens
atattatatatatgtatatatacatatgtgtgtgtatatattatatatatgtatatatacatatatgtgtgtgtatatatatatacacataaaatatattkattttaaatatctgaaaatatttttaaaatttattaaaatatatgtaaaataagttttcacaatggaatgtgtgctgcattttgggaattatcagtgggt

SEQ ID NO: 185509 - DNA, 201 bp, Homo sapiens
tcagtagcagtggcaatttcttttttttttttgagatgaagtcttgcgctgtcacccaggctggagtgcaatggcacagtctcagctcactgcgacctccmcctcccgggttctcctgcctcagcctcccaagtagctgggaatacaggtgcgcaccaccatgtccagctgatttttgtatttttagtagagacggggttt

SEQ ID NO: 185510 - DNA, 201 bp, Homo sapiens
gaaactagcttggtcgcaataaataattgaatcctgtaatgcacaggtagactctcaggattattataggctaaccatggaatcctggaaaagatactcccacagatttggattccatgtgtgtaaaggagtggtggttatggtgtcagtggcagcagtggagggtctgggagtgacgatgcagtggctcatgtagaagat

SEQ ID NO: 185511 - DNA, 201 bp, Homo sapiens
tctattaggataactctatttcatatataactattctttaaagaaaattgttattgcttgctaatttaatctgttgtatttactaaattcattgttcttaaagaagaataatgttcatgaaacctggaattcatataaactgcttcccaagagctccatgttgcatgtatattatgtttaaaaggtactgagagattttta

SEQ ID NO: 185512 - DNA, 201 bp, Homo sapiens
ctattaggataactctatttcatatataactattctttaaagaaaattgttattgcttgctaatttaatctgttgtatttactaaattcattgttcttaaagaagaataatgttcatgaaacctggaattcatataaactgcttcccaagagctccatgttgcatgtatattatgtttaaaaggtactgagagatttttaa

SEQ ID NO: 185513 - DNA, 201 bp, Homo sapiens
tattaggataactctatttcatatataactattctttaaagaaaattgttattgcttgctaatttaatctgttgtatttactaaattcattgttcttaaagaagaataatgttcatgaaacctggaattcatataaactgcttcccaagagctccatgttgcatgtatattatgtttaaaaggtactgagagatttttaaa

SEQ ID NO: 185514 - DNA, 201 bp, Homo sapiens
tccttttcttccacaagagtctaacctccttgaaggtaggaccatgcttaattcctactggttagtggctgcagtattatactgaagaaacggtaagtcckgtttcagcaggccgagatgtggaggagacggtttggggtccagagtggcctaagggaattatttgaatcaggccaagagcatgagtttacttcgagtctt

SEQ ID NO: 185515 - DNA, 201 bp, Homo sapiens
agcacatgtgcctgggcattcataacattaagccctgttaggaatcccacttacacccttggcttctgcgtactgtgagagctgggctggatgataattacagtcagctttcatttgtagagcccaggtcttcaaataatttccaagtaaactatcccagattaatacgtttcaggacataagtgtggttcgctagaactg

SEQ ID NO: 185516 - DNA, 201 bp, Homo sapiens
taaaaacatgtcctttttctggactagaattcaatctaggattacatgttatatttttcacgtgtccatctcctttattaaattgggatagttactcagtcttcctttgtttattatgactttgatgtatttgaaaggtactggccatatattgttactcagtctttctttatcatgactttgatatgtttgaaaggtact

SEQ ID NO: 185517 - DNA, 201 bp, Homo sapiens
aaaaacatgtcctttttctggactagaattcaatctaggattacatgttatatttttcacgtgtccatctcctttattaaattgggatagttactcagtcttcctttgtttattatgactttgatgtatttgaaaggtactggccatatattgttactcagtctttctttatcatgactttgatatgtttgaaaggtactg

SEQ ID NO: 185518 - DNA, 201 bp, Homo sapiens
aaaacatgtcctttttctggactagaattcaatctaggattacatgttatatttttcacgtgtccatctcctttattaaattgggatagttactcagtcttcctttgtttattatgactttgatgtatttgaaaggtactggccatatattgttactcagtctttctttatcatgactttgatatgtttgaaaggtactgg

SEQ ID NO: 185519 - DNA, 201 bp, Homo sapiens
tctgtgcagcattccttccccctgggatgaggcagggccccttcagaaatggggaacttataacctacagtcagacaaggtagataagagaaatgtggggrtagattagagtcctgccttggggagaaaaaggagcagggaaaaagaaggtagaaggtcagagagagattctgttttctaaggcctgcatctgagacctaa

SEQ ID NO: 185520 - DNA, 201 bp, Homo sapiens
aaacatgtcctttttctggactagaattcaatctaggattacatgttatatttttcacgtgtccatctcctttattaaattgggatagttactcagtcttcctttgtttattatgactttgatgtatttgaaaggtactggccatatattgttactcagtctttctttatcatgactttgatatgtttgaaaggtactggc

SEQ ID NO: 185521 - DNA, 201 bp, Homo sapiens
agtggctgtcatttatttagaataaacttctgtccatcattactgtttgtattccatttgtgttcttcccacctctgggtagattttatattattttattattattattattattattattattattattattattattatcatcatcatcatcgagacggagtctccttttgttgcccaggctagagtacagtggcatga

SEQ ID NO: 185522 - DNA, 201 bp, Homo sapiens
atctgttttataagaatatgtcctatatttgatttttccaggttctttttcacaggtacccattttatctggtattagttctgctccattgtttttttttcccctctttaacggactccaattatataaatgtaattccttctttgcctgtgttccatttctaccactttctttctgattcttctttctttattttaccat

SEQ ID NO: 185523 - DNA, 201 bp, Homo sapiens
tcatctgaatttttccattgccaaactatggagagaattttttttagcatcctccttatttatgtcatcctacatatttctataatcaaatgatttgctgttggtgaggtttagaagctggatttgcaccctgttgcaggcatcacaatattgaataagctagccatactccctgtcttcaaagagccatggagccttgga

SEQ ID NO: 185524 - DNA, 201 bp, Homo sapiens
atgacaatccccccaaatccttctacacccccacacacccttccctcactttatggtttttagagacagggttttgctcttttgcccaggctggagtacagtggcactatcatagctcactgtagctgtgacctcctgggctcaagccatcctcccacctcagcctcctgagtagctgggactacaggcatacaccaccac

SEQ ID NO: 185525 - DNA, 201 bp, Homo sapiens
ctgaactctgaagaaaagtgctttgttcgtttttgtgtttttttgtttttttttttttgagatggagtctcactctgtcatccaagctaaagtgcagtggygtgatctcagttcactgcaaactctgcctcctgggttcccgcgattctcatgcctcagcctcccacgtagctgggattacaggcgtgcgccaccacacct

SEQ ID NO: 185526 - DNA, 201 bp, Homo sapiens
cattattatagttctcaaaattattattattaatataaaacacagccatctctctaagcctatcaggtttttccagaatgaattaaaataacagtgctttrttacggaaatgctacatttggtcattcaagatggagaaatggccaaaattgtggcagtaccatgaatagttgtaaaagttggtccaagttacaatctgac

SEQ ID NO: 185527 - DNA, 201 bp, Homo sapiens
gttttctttcttttttttggtcttgctcttttgcccaggctggagtgaagtggcatgatctcagctcactgcatccttgacctcccaggtcaagcgatgcrcccacttcagcctcccaagtaatggggattacaggtgctcatcacaatgccagttaattttgtttatattttgtagagatggggtctcactatattgtcc

SEQ ID NO: 185528 - DNA, 201 bp, Homo sapiens
cttttcttctccattttcttgtttaatttctgtctgattttgtttcctaatttcttgcttttaaaaatggttgttactttgtttagtaatttgaatatctkcagtatacttgttttaaagcctttagctattctgtattattttttatctaaaatgagttcatattcttgttgttgatttaattggttgtgtttcttcata

SEQ ID NO: 185529 - DNA, 201 bp, Homo sapiens
aaataatgcgtaaatcctagaactcaagacatacgcaagaggtaataattaagcttctactgtgcctgtggattgtgaatctacaagagtcatgattttayaaaagcagccccaaaaggaaaatacaaataggaaatataataaggaacatctgaagattcgaacttatttgcactgcagaggcactgaactctggccttt

SEQ ID NO: 185530 - DNA, 201 bp, Homo sapiens
tcacatttcaaaaccaatcatgccttctcaacagtgccccaaagtcttaactcatttcagtgttaactcaaaagttcacagtctcaaatctcatctgagayagggcaagtcatttttgtctatgaccctgtaaaatccaaagcaagttagttacttcctagatacaatgggggtactggcattgggtaaatacagcctttc

SEQ ID NO: 185531 - DNA, 201 bp, Homo sapiens
ttgaagggttttactggctctcttctgaggccacagactataatatttctaatcctgaatggagtctcaaatacttatcactgcaacaggagtagatgagratggatgggtagtggctgcaaacctatgatactacactctatccaagatgataatactggtagttagtagttaatacttacttcagccttactctgtgtc

SEQ ID NO: 185532 - DNA, 201 bp, Homo sapiens
ctattgcttctaggccacaaacctgcacagcatgttactgtattgaatactgtagggagttgtaacacaatgttaagtacagtatctgaacatatctaaasatacttcataaaagtggcagcgtagtaggtttgttcacaccgcatcaccacaaatgcatgagtaatgtgttgctctgtgactttacactgatgataatgt

SEQ ID NO: 185533 - DNA, 201 bp, Homo sapiens
ggaggcccaggcaggtgaatcacgaggtcaggagatggagaccatcctggctaacacagtgaaaacccgtctctactaaaaaaatacaaaaaaaattagcyggatgtggtggtgggtgcttgtagtcccagctactcgagaggctgaggcaggagaatggcatgaaattgggaggtggagcttgtagtgagctgagatcgc

SEQ ID NO: 185534 - DNA, 201 bp, Homo sapiens
cttggtcacggttgtgttctcatctgctttagtgtatttggttttgaaacgatatacctgctgtatgtctaaacaactttatattttcaggaacttttctktttccttttcttttttttgagatggagtctcgctctgtcgcccaggctggagtgcagtggcgggatctcgggctcactgcaacctatgcctcccaggttc

SEQ ID NO: 185535 - DNA, 201 bp, Homo sapiens
actggcccttggaatcttgttatgtgttggactttagatagcgtgtgtgtattctttaaggtttatgagctatgcttaaatcaagcagagaaagatttacrtttgacaaatgacaaggaacgatttctcaccataaagattctgagtgagagaatgagtttcaagggaacttgggttaaccttctccagggtgatgcttct

SEQ ID NO: 185536 - DNA, 201 bp, Homo sapiens
cgtgtgtgtattctttaaggtttatgagctatgcttaaatcaagcagagaaagatttacatttgacaaatgacaaggaacgatttctcaccataaagattytgagtgagagaatgagtttcaagggaacttgggttaaccttctccagggtgatgcttcttaatatttttatgctgtggatttccagataaggtaaaagac

SEQ ID NO: 185537 - DNA, 201 bp, Homo sapiens
ctgagcattgtcaatgtcaattatgtatcttgtgggttgtcctttttagttctgatctactttttttttttttttaaagcctttgctgtcttttctgttcyttcccgtggttgactgattagtaatgtgtcttctgtcaccttcctatagaacaggtgatggaatttagatggggcctttgtcctgttatattttgcccac

SEQ ID NO: 185538 - DNA, 201 bp, Homo sapiens
attccagctgagcaagccttttggttctcccttcctttgctgggactgcctgggcacatctgatgaccctgtgacccactccagtagcacctgcatgtctygttcacagcaggcatcaccactgtagtaaaccaattgtgattatgtctttatttaatgtcattgattctagcttccccttcccaagactgcaagtgccct

SEQ ID NO: 185539 - DNA, 201 bp, Homo sapiens
gcccacagtgtgccatcctgcaggaggcaggctcctggttcttcttggttgtggaccccagacccattctggggtctggaggggtctggaggacggcgtcyttctcacagctccactaagtggtgccccagcagggattctgtgtgggggctcctacccaaaatttcccttctgcactgccctagcagaggttctccatga

SEQ ID NO: 185540 - DNA, 201 bp, Homo sapiens
ctgaggcaggagaatcacttgaacccaggaggcggaggttgcagtgagccgagatcgctatactgcagccagcctgggcgaaagagcaacactcagtcttaaaaaaaaaaatatatatatatatatatatatatattatatatatataatatattatatatttatatattatacattatatatattatgtattatatataa

SEQ ID NO: 185541 - DNA, 201 bp, Homo sapiens
gagaatcacttgaacccaggaggcggaggttgcagtgagccgagatcgctatactgcagccagcctgggcgaaagagcaacactcagtcttaaaaaaaaawatatatatatatatatatatatatattatatatatataatatattatatatttatatattatacattatatatattatgtattatatataatatataata

SEQ ID NO: 185542 - DNA, 201 bp, Homo sapiens
gccgagatcgctatactgcagccagcctgggcgaaagagcaacactcagtcttaaaaaaaaaaatatatatatatatatatatatatattatatatatataatatattatatatttatatattatacattatatatattatgtattatatataatatataatatattataaatataatatataaaatatatattatatatt

SEQ ID NO: 185543 - DNA, 201 bp, Homo sapiens
tataaatataatatataaaatatatattatatattatatatattttttatatataatatatattatatatattttttatatcccaatcatatatatatatattttttttttcagagtataaatcctccaaaaaaaaaagggaaagttggtttggattgggcatttgagctcactacataagcagtgagcaccaaattggat

SEQ ID NO: 185544 - DNA, 201 bp, Homo sapiens
ccagaatgatcgaaacatctcttagatcccagagtgacttaagatccatgctaggaattaatcctgcttcctaggaagttacacaacagcagcatttgtgrcagtgccacagcaagccagggactggcccacgggcggtacgctgtcattcccagtgctttctctgccttccagagaaacaggaatttgccacatgtctgt

SEQ ID NO: 185545 - DNA, 201 bp, Homo sapiens
taaatataatatataaaatatatattatatattatatatattttttatatataatatatattatatatattttttatatcccaatcatatatatatatatwttttttttcagagtataaatcctccaaaaaaaaaagggaaagttggtttggattgggcatttgagctcactacataagcagtgagcaccaaattggatag

SEQ ID NO: 185546 - DNA, 201 bp, Homo sapiens
atattcagcacgaccttcaaccaggtgtatatatttctctctatgttctaaaggactcagcaatgtgtagtgcctatgagttctcatttgaaaaaggaggmatcctatatggaatgccatgtaacggccaggtgcagtggctcatacctataatcccagccctttggaggcctaggcaggaggattgcttcaggccgggag

SEQ ID NO: 185547 - DNA, 201 bp, Homo sapiens
tggaatggcaaagtgaaaaagacacctaagtcgtaaatatgtttcagagattcgcagtgatggtaggatgtgctttgagttttggggaaactgtacacataaaaatgaattaattaattaattaatttttgagacagagtctcgctctgttgcccaggctggagtgaagtggcgtgatctcagcccactgcaacctctgcc

SEQ ID NO: 185548 - DNA, 201 bp, Homo sapiens
tcattattggcttgcttatcaaatatttcttcaaagtccttctaaggctatagcgaagtgaatcagcattgctcctgcttttgaaaatatcacagcatacaatacacagacatacaaacaaatgattacagtaccatgtggtaagtattcataacaggggtaccgtgggcacaatgtgtggggaagagaaggattagagaa

SEQ ID NO: 185549 - DNA, 201 bp, Homo sapiens
cattattggcttgcttatcaaatatttcttcaaagtccttctaaggctatagcgaagtgaatcagcattgctcctgcttttgaaaatatcacagcatacaatacacagacatacaaacaaatgattacagtaccatgtggtaagtattcataacaggggtaccgtgggcacaatgtgtggggaagagaaggattagagaag

SEQ ID NO: 185550 - DNA, 201 bp, Homo sapiens
attattggcttgcttatcaaatatttcttcaaagtccttctaaggctatagcgaagtgaatcagcattgctcctgcttttgaaaatatcacagcatacaatacacagacatacaaacaaatgattacagtaccatgtggtaagtattcataacaggggtaccgtgggcacaatgtgtggggaagagaaggattagagaagg

SEQ ID NO: 185551 - DNA, 201 bp, Homo sapiens
tacactgatgataatgtcactgggtgataggtagctttcagctccactataatcttatgggaccatcattgcatatgcagtctttctttgactgaaatgcygttgtgcagtgcatgactgtattttataagatgagcctaatttgtgttatacttctcgggaatgaaggcataccctgcagtaggttttggattctgtgtt

SEQ ID NO: 185552 - DNA, 201 bp, Homo sapiens
ataatgcttgcacaattagaatattcactgaatgaataagatctccttagccaaggactcacactaatactacataggtgcatacatacatatatgtatgkgtatatttgtgtgtgtctgtatgtgtgtgtgtatgtctgtatgtgtgtattataacacatgcatatgtgtatatgtatctgcatacacaatacatatttt

SEQ ID NO: 185553 - DNA, 201 bp, Homo sapiens
tgaataagatctccttagccaaggactcacactaatactacataggtgcatacatacatatatgtatgtgtatatttgtgtgtgtctgtatgtgtgtgtgwatgtctgtatgtgtgtattataacacatgcatatgtgtatatgtatctgcatacacaatacatattttagacgcatgtagcttatcattttgggaggaat

SEQ ID NO: 185554 - DNA, 201 bp, Homo sapiens
taaagtaaaatttgtatagtagtagtaacttacgatattatttagaaattgttcagctgggcatggtggctcacacctgtaatcccagcactttgggaggytgaggcaggtggattgcttgagcccaggagtttgagaccagcctgggcaacatggcaaaaccccatctatacaaaaaatacatcatagcgaaacctcacc

SEQ ID NO: 185555 - DNA, 201 bp, Homo sapiens
agaaattattctattctacaccacacatgaatccaagtattatacattgatccttcattttaatagaacacgaaggggaagggggaagaccttagatatcwactcattcatttgtacagatgaacaaactgaagactttttcctcattcgttcattccttcagcatttattgaacacttcctaagtactataggttatggt

SEQ ID NO: 185556 - DNA, 201 bp, Homo sapiens
tatcagcatgaatctatttccagtctgtccctgtctctggtagttgatctctatagcctctacacatacttaacatggttcactgttgttgatctcagttggtgaatctgtaatagcatggaccaaggctgtactggtaataaacatgccttttatataattagtgtcttttgtgtgcaaggcactgtgctggacagagga

SEQ ID NO: 185557 - DNA, 201 bp, Homo sapiens
atcagcatgaatctatttccagtctgtccctgtctctggtagttgatctctatagcctctacacatacttaacatggttcactgttgttgatctcagttggtgaatctgtaatagcatggaccaaggctgtactggtaataaacatgccttttatataattagtgtcttttgtgtgcaaggcactgtgctggacagaggaa

SEQ ID NO: 185558 - DNA, 201 bp, Homo sapiens
ccgtctctactaaaaaaatacaaaaaaaattagccggatgtggtggtgggtgcttgtagtcccagctactcgagaggctgaggcaggagaatggcatgaarttgggaggtggagcttgtagtgagctgagatcgcaccactgcactccagcttgggagacacagcgagactgtctcaaaaaaaaaaaaaaaaaaatcgcca

SEQ ID NO: 185559 - DNA, 201 bp, Homo sapiens
accccgtctttacagagcaaataaaaataaattagctggacatggtggtgcacctgtggtaccagctgcttggttggccaggcaggaatattgcttgagcyggggaggtcgaggctgcagtgagctgtgatcatgccactgcattccagcctgggcaacagagtgagaccctatctcaaagcaaacaaacaaaaaaacagt

SEQ ID NO: 185560 - DNA, 201 bp, Homo sapiens
ggtgttgtgtactgtctgtggcatgatttctagatataagaaacatctggaaagccgagattctgtcctgtatgttcatttcaatgtctaaggtcttgtaygcttgccagatatataaagcactttccatttaactttccagtttccccccatcaatgtggacttaattttccattttaaactgttatcctttttcctgtt

SEQ ID NO: 185561 - DNA, 201 bp, Homo sapiens
cacgccagcctgggcaacagaacaagcctccgtctcaaaaacaaaaacaaacaaacaaaaaaagtattggcataaagctgttggtaatattctcttaatayattgatttaaagaaacactattttaaattagtcaacagttaagcataattattaatattttatcaaattttacacacactgttttttttggcatatcaaa

SEQ ID NO: 185562 - DNA, 201 bp, Homo sapiens
gtgtgtgtgtatgtgtgcatgcacgcacgtgcatatgttcgcaatataatctttttaaaattttagcgcaggctgggtgcaatggctcaagcctgtaatcygagcactttgggaggccaaggtgggcggatcacaaggtcaggagttcgcgaccagcctgaccaacatggtgaagccccgtctctactaaaaatacaaaaa

SEQ ID NO: 185563 - DNA, 201 bp, Homo sapiens
aataaattaaatcaaatggtatattgtggtttttatttgaatttacctggttattactgttaagtttgaacacaattttatatatttatttaacatttatwgtttttcttttgttcatttttgggtgaggctcatttctgtcttctaaaactggcaggaattctacatttatatcggttactaatcatttgtcatttctat

SEQ ID NO: 185564 - DNA, 201 bp, Homo sapiens
gggctgtggtggtggttctgaaaaccagacagggattggtggtgggaatgtcctctacatgggaggtttttgaaaagccactgatatatggaagatcctcgtgtgtgtgtgtgtgtgtgtgtgtgtgtgtgtgtgtgtatgtgtgcatgcacgcacgtgcatatgttcgcaatataatctttttaaaattttagcgcaggc

SEQ ID NO: 185565 - DNA, 201 bp, Homo sapiens
tataaattagatggatggctgtgtgggtgggtggaccccccactcctcatcccaatgttcgttattctttcttcaggctcatggaaacagtaaaatggggvggggggaactgacctaatttttgaagcttgctcgtggctctttctgccctcagctgctcagtacaattcccagtttccaaggatgggcagtgggaagcac

SEQ ID NO: 185566 - DNA, 201 bp, Homo sapiens
ggctgtggtggtggttctgaaaaccagacagggattggtggtgggaatgtcctctacatgggaggtttttgaaaagccactgatatatggaagatcctcgtgtgtgtgtgtgtgtgtgtgtgtgtgtgtgtgtgtgtatgtgtgcatgcacgcacgtgcatatgttcgcaatataatctttttaaaattttagcgcaggct

SEQ ID NO: 185567 - DNA, 201 bp, Homo sapiens
gaaatttttttttacctcgaggcatgccttcaatacaaagggaagtagctgatactaacataagtaattcagaacatccatttatcattttagattatttktctgtggagccctggaaaccaagggtttgtgggcttcaaaggcattaggaagaaaaaaagctctcaaaatccattatatgtatttgatactccatttagt

SEQ ID NO: 185568 - DNA, 201 bp, Homo sapiens
gctgtggtggtggttctgaaaaccagacagggattggtggtgggaatgtcctctacatgggaggtttttgaaaagccactgatatatggaagatcctcgtgtgtgtgtgtgtgtgtgtgtgtgtgtgtgtgtgtgtatgtgtgcatgcacgcacgtgcatatgttcgcaatataatctttttaaaattttagcgcaggctg

SEQ ID NO: 185569 - DNA, 201 bp, Homo sapiens
catttatcattttagattatttgtctgtggagccctggaaaccaagggtttgtgggcttcaaaggcattaggaagaaaaaaagctctcaaaatccattatrtgtatttgatactccatttagtagaatcagccttccctcttttcttccatccctgaagcaaacttttaagtatctgtgtggtaggaaccatacccacatc

SEQ ID NO: 185570 - DNA, 201 bp, Homo sapiens
ctgtggtggtggttctgaaaaccagacagggattggtggtgggaatgtcctctacatgggaggtttttgaaaagccactgatatatggaagatcctcgtgtgtgtgtgtgtgtgtgtgtgtgtgtgtgtgtgtgtatgtgtgcatgcacgcacgtgcatatgttcgcaatataatctttttaaaattttagcgcaggctgg

SEQ ID NO: 185571 - DNA, 201 bp, Homo sapiens
agctatgtaggttgcacccaagcttttgaactcttaagtctgaagtgtctataagacatctaggtaggaacatctaggagatagttgcacgtgaaagatcrgagagcgtaagagagctctgtaagagattttgaattcatcagtgaagttaaaagtcactggccgggtgccgtggctcacgcctgtaatcctagcattttg

SEQ ID NO: 185572 - DNA, 201 bp, Homo sapiens
ttcatttcaatatttgctgaatacctggtagtacagattgcatatctcttatgttaaatgcttgggacaagaaatgttttaggttttggattttgtgtgtrtgtgttttggaatatttgcattatacttactgatttagcattcgtaatccgaaaactcgaaatcagaaatgttccaatgagcatttcctttgagcatcat

SEQ ID NO: 185573 - DNA, 201 bp, Homo sapiens
atccgaaaactcgaaatcagaaatgttccaatgagcatttcctttgagcatcatgtgggccctcaaaaagttttggattttggagcatttaagatttcagrtttttcagatttgagatactcaagctgtaccaattaatgacgaaaatatggtcatcccttggtatacatgtgggattgattccaggactcctgagtatac

SEQ ID NO: 185574 - DNA, 201 bp, Homo sapiens
ccagcttgcttcctaccttcatggaccttacaggatttaattcctcgacactgtgggatggtcagggatgtaattttagaatatgaaagcgattcactagwatttccactagaattgaggataatgtctcttgttgggaactgactataagttcatgcaaatcaaaaacagattagcaaagatcagaagagtgtcttaatt

SEQ ID NO: 185575 - DNA, 201 bp, Homo sapiens
tgcttttgcagattgcctggggttatttatgtcctcctgcctcctccagctctaaattctggcttcaagaccctcctccatcacccctctgtcaacactcmctgggttgttaacatgtccacaatattgatcgccttacctccctcttttcccagggtctcctaaacagtacaatgcctttcaaaagaaataatggagagg

SEQ ID NO: 185576 - DNA, 201 bp, Homo sapiens
gcttgtccagccaggccccgagccaccctcctccctttcccctacatatgtccacgtcagtgggcaagctggcagcccggtgtctccagcacatggggtgyaccctgtctcatctgcaggccattgtgtgtgtgttcacagttcagaagctgactcactatctctgcctgccaacatcctccaccacacccacctcccacc

SEQ ID NO: 185577 - DNA, 201 bp, Homo sapiens
tcttgttgaattaatgatgggtttttcttttttctttccaaaaaataataataaccactatcttatgcggaaatgatatcacgaacagttgcattatcaartcaaggaggaaatgcaatcagagaacaggcagaaaaactatgattataatggtttgtatttttcttgtctcagattcttttatttatttatttttattga

SEQ ID NO: 185578 - DNA, 201 bp, Homo sapiens
gcatgcacgcacgtgcatatgttcgcaatataatctttttaaaattttagcgcaggctgggtgcaatggctcaagcctgtaatccgagcactttgggaggycaaggtgggcggatcacaaggtcaggagttcgcgaccagcctgaccaacatggtgaagccccgtctctactaaaaatacaaaaattagctgggcatggtg

SEQ ID NO: 185579 - DNA, 201 bp, Homo sapiens
gcacgcacgtgcatatgttcgcaatataatctttttaaaattttagcgcaggctgggtgcaatggctcaagcctgtaatccgagcactttgggaggccaakgtgggcggatcacaaggtcaggagttcgcgaccagcctgaccaacatggtgaagccccgtctctactaaaaatacaaaaattagctgggcatggtgtcag

SEQ ID NO: 185580 - DNA, 201 bp, Homo sapiens
tagtgtaattgtgatatctatcaccttaaatatttgtctttatgctagaaacattcaaattgttttcttctagctattttgaaatatgcgatagattattrtaatctatagtctcccggtgatccatcagacactaagtcttatctcttctatcaagctgtatttttacttgctagtcaatgtctctgcatccctcctgcc

SEQ ID NO: 185581 - DNA, 201 bp, Homo sapiens
cgggaggcagaggttgcagtgagccgagattgcgccattgcactccagcctgggtgacaaggcgtgactttgtctcaaaaaaaaaaaaaaaaaaaaaagaragagagagagagagagaaaaaatcttagtgccaggtgtctgtatttaattagtctcaggtcgaagactctggaatcagtggaatgtaagcttcattaggg

SEQ ID NO: 185582 - DNA, 201 bp, Homo sapiens
ggaggcagaggttgcagtgagccgagattgcgccattgcactccagcctgggtgacaaggcgtgactttgtctcaaaaaaaaaaaaaaaaaaaaaagagaragagagagagagagaaaaaatcttagtgccaggtgtctgtatttaattagtctcaggtcgaagactctggaatcagtggaatgtaagcttcattagggca

SEQ ID NO: 185583 - DNA, 201 bp, Homo sapiens
tatataaattagatggatggctgtgtgggtgggtggaccccccactcctcatcccaatgttcgttattctttcttcaggctcatggaaacagtaaaatggkgaggggggaactgacctaatttttgaagcttgctcgtggctctttctgccctcagctgctcagtacaattcccagtttccaaggatgggcagtgggaagc

SEQ ID NO: 185584 - DNA, 201 bp, Homo sapiens
taaaaggaaggagggaaacataattaattaatactatctacagtgtctgcaagataaaaacgtgctcatcctttttcagagaaagcacaatattcttgacmgagaaaactgagaaaaaatttcccctcatctatgaggcggaatgtgttccaaacagttgaatttcaaaatgagctttctgacattccttagtctcttctt

SEQ ID NO: 185585 - DNA, 201 bp, Homo sapiens
gagaaagcacaatattcttgaccgagaaaactgagaaaaaatttcccctcatctatgaggcggaatgtgttccaaacagttgaatttcaaaatgagctttytgacattccttagtctcttcttactagtataataggatttgatttgctctgtttaacatatgatgaagttaattgtgaaagatctctagaatccaaatct

SEQ ID NO: 185586 - DNA, 201 bp, Homo sapiens
catgtctgtttttctgtatcctttaagttttttaatgcaaatacaaatatgtattctttttctttcttcttaaaaaccaaagcagcacacattttttctgtttttttttttttcacttacagtgtattttagagatgtttgcacgttagaaagcattcccatttctattcacagctgcatggtattgcattgtgtgtatga

SEQ ID NO: 185587 - DNA, 201 bp, Homo sapiens
ataggatttgatttgctctgtttaacatatgatgaagttaattgtgaaagatctctagaatccaaatctgcaaattatttccaaaactctgttttttatcttttacaccagtcgttctactggtgagtcaatacttgcagctcctgtgtgtgtggcaggttgccaggtgccccagatggtaccaaggtatgtaggaatttt

SEQ ID NO: 185588 - DNA, 201 bp, Homo sapiens
gcaggagaatcgcttgaacctgggaggcagaggttgcagtgagccaagactttgccactgcactccagcctggctgacagagtgagtaagactccatctcaaaaaaaaaaaaaaaagaaaaaaaagaaaaagaaaactcatagacttaagattttttatatatgtgtatatatgaaaattattataaagaaagaagagaaa

SEQ ID NO: 185589 - DNA, 201 bp, Homo sapiens
ccagtcgttctactggtgagtcaatacttgcagctcctgtgtgtgtggcaggttgccaggtgccccagatggtaccaaggtatgtaggaatttttgaaggmgctcacagtgccagtgggtagtctaggcataaacacatggaaagtatgttaaatgcaggagttgaataatgaggaaccgtacgggagagcccacgaagcc

SEQ ID NO: 185590 - DNA, 201 bp, Homo sapiens
caggagaatcgcttgaacctgggaggcagaggttgcagtgagccaagactttgccactgcactccagcctggctgacagagtgagtaagactccatctcaaaaaaaaaaaaaaaagaaaaaaaagaaaaagaaaactcatagacttaagattttttatatatgtgtatatatgaaaattattataaagaaagaagagaaag

SEQ ID NO: 185591 - DNA, 201 bp, Homo sapiens
ttctcattgctctgagggtaaaggtccaaatctgtagtgaatgtgtcctccaaggcaatgcctactctgctttgctctgaccagctctctggccatgcggwcccgccttcaccgtcattccagctgagcaagccttttggttctcccttcctttgctgggactgcctgggcacatctgatgaccctgtgacccactccagt

SEQ ID NO: 185592 - DNA, 201 bp, Homo sapiens
cattgctctgagggtaaaggtccaaatctgtagtgaatgtgtcctccaaggcaatgcctactctgctttgctctgaccagctctctggccatgcggacccrccttcaccgtcattccagctgagcaagccttttggttctcccttcctttgctgggactgcctgggcacatctgatgaccctgtgacccactccagtagca

SEQ ID NO: 185593 - DNA, 201 bp, Homo sapiens
ccagattgtgagagtgttagtggagtaatgtctgatgtagtttactgagcaatttcaaagcagagtaatggaggtaatctcagaaattctaagcagcagcrttgtaaatgcacagagagagagtgttgctttcatttcattgacctgaaatcagcttgtttcccccatcctacttctaatttgtttttattaccttaatat

SEQ ID NO: 185594 - DNA, 201 bp, Homo sapiens
tgaatgtgtcctccaaggcaatgcctactctgctttgctctgaccagctctctggccatgcggacccgccttcaccgtcattccagctgagcaagcctttyggttctcccttcctttgctgggactgcctgggcacatctgatgaccctgtgacccactccagtagcacctgcatgtctcgttcacagcaggcatcaccac

SEQ ID NO: 185595 - DNA, 201 bp, Homo sapiens
tcattgacctgaaatcagcttgtttcccccatcctacttctaatttgtttttattaccttaatatcctgtgtcatggaggttctaaacatctttagaatamaattctttggagatctataaactgctgctttctaatttcattgctcttaattataggtcattgaaaatgcaaaaaacagaagtaatgtaggatagtagaa

SEQ ID NO: 185596 - DNA, 201 bp, Homo sapiens
actgtagtaaaccaattgtgattatgtctttatttaatgtcattgattctagcttccccttcccaagactgcaagtgccctgaggacaaggaccttgttgrtcatagactgctgacccaccagcatctagcacgatacctggcacagagcgggtggtcacgtgtacttgtttttgatgtcattgtgaggagatttcctttt

SEQ ID NO: 185597 - DNA, 201 bp, Homo sapiens
ctgtagtaaaccaattgtgattatgtctttatttaatgtcattgattctagcttccccttcccaagactgcaagtgccctgaggacaaggaccttgttgaycatagactgctgacccaccagcatctagcacgatacctggcacagagcgggtggtcacgtgtacttgtttttgatgtcattgtgaggagatttccttttc

SEQ ID NO: 185598 - DNA, 201 bp, Homo sapiens
tcttggcctgagagtctcttcaaggcagacagctcctctgcttccgtgcaaaggtggacacaggggcttttcactagggccccagaagctccagctcttgmtgttcagtccgtcctgtatcccagagctctcccacagaggccctgccacccttggaaaaggctgtgcaggcctgggttcctggcttctccttctcttagg

SEQ ID NO: 185599 - DNA, 201 bp, Homo sapiens
gaaaaatgtttagcctgccatacattaaaggctggcaaactttttccaaggaacacttcaacggcagcatttgtatttaagtagtgaatatgctaattgcrtgtgcttctcaactacttctttattaaaatcactaggagagtctttttgttttgttttgttttgagacagagtctcactctgtcatccaggctggactac

SEQ ID NO: 185600 - DNA, 201 bp, Homo sapiens
actgatttcttttcttttggatatattcccagcagtggaattgctggacatatggtagttctatttttagttttttgaggaacctccacacagttttcctrtgtggctatactaacttatatttccaccaacagtttacaggggttcccctttctccacatctgtgccggcatcttttattctctttttgataaaagccat

SEQ ID NO: 185601 - DNA, 201 bp, Homo sapiens
tttaaagcctttagctattctgtattattttttatctaaaatgagttcatattcttgttgttgatttaattggttgtgtttcttcatattataatttttckatgtttcaaagtctgactttgcaagcttattttgaatacatgctcatttccccccatttttgattatcaccacttgtccatcttgtctaccaacttttta

SEQ ID NO: 185602 - DNA, 201 bp, Homo sapiens
cctccacacagttttcctgtgtggctatactaacttatatttccaccaacagtttacaggggttcccctttctccacatctgtgccggcatcttttattcyctttttgataaaagccattttaactggggttagatgatatctcattgtggttttgatttgcatttctctgatgattagtgatgttgagcatttttcatgt

SEQ ID NO: 185603 - DNA, 201 bp, Homo sapiens
tgcatttggcatgcacagcttcaagagaatttccttttaaatttctcactggtcgtttgagcttatccagccatttttccctgggaatttggggtgtcagyatgcattctgacagggatacttaggcggattggaatggcaggctgttaaaaagacccccccttacttccagatccactctcgtggtctgctctgtgatgc

SEQ ID NO: 185604 - DNA, 201 bp, Homo sapiens
ttttgctctgttgcccaggctagttttaaacttctggcttcaagcagtcctcctgcctcggcctcccaaagtgttgggattacaggtgtgagcctggcccwacatatttcaatatagtgccaaaaataaaatagaacttccccgcttcagccttgccaaaagtctttatttggaatttattatatttgtcaatttaagtta

SEQ ID NO: 185605 - DNA, 201 bp, Homo sapiens
aagacttgaggaggaagacaccacattagtaagcatctctcctggatgactgaagggaaatcaaggccagccacaccagcggagggtggggcaaggccagrcgcctcagatgcagcttgcagaggagaggcctgtgcagttaccttcagtgtttttcatcagagcaggtaaactgcaggcctgtctggtaccaggtgctgg

SEQ ID NO: 185606 - DNA, 201 bp, Homo sapiens
cttgagcctggaggtcgaggctgcagtgagctgtgattgtgccactgcattccagcctgggtgacagagcaagaccctgtctcaaaaaaaaacaaaaagcaaaaaataaacaaatatttattgtatgcctactatgtgccaggtactctcccaggtgcttgagatacagcagagtacaaacaaagccgtgttcttgtcctc

SEQ ID NO: 185607 - DNA, 201 bp, Homo sapiens
tgattaaaggctgtggctggagaatatgttgaataaagagatgggcagggttggccaggcacggtggctcacgcctgtaatcccaacactttgggaggccraggcaggcggatcacgaggtcaggagttcgaggccagcctggccaacatggtgaaaccccacctctactaaaagcacaaaaaattaaccaggcgtggtgg

SEQ ID NO: 185608 - DNA, 201 bp, Homo sapiens
gggttggccaggcacggtggctcacgcctgtaatcccaacactttgggaggccaaggcaggcggatcacgaggtcaggagttcgaggccagcctggccaayatggtgaaaccccacctctactaaaagcacaaaaaattaaccaggcgtggtggtgcgtgcctgtaagctcagcctcatgaggctgaggcaggagaattgc

SEQ ID NO: 185609 - DNA, 201 bp, Homo sapiens
aagctattagaaatggtatttaagattatttattatctcagtttatactccctccatgcatcaagcttcatttgttcacttaacaaacaaggctgggcgcrgtagcttatgcctgtaatcccagcactttgagaggccaagtcaagcaaattgcttgagcccaggagtacaagaccagccagggaaacgtggtgaaaccct

SEQ ID NO: 185610 - DNA, 201 bp, Homo sapiens
gaggccaaggcaggcggatcacgaggtcaggagttcgaggccagcctggccaacatggtgaaaccccacctctactaaaagcacaaaaaattaaccaggcktggtggtgcgtgcctgtaagctcagcctcatgaggctgaggcaggagaattgcttgaacctgggaggcggaggttgcagtgagccgagatggcattattg

SEQ ID NO: 185611 - DNA, 201 bp, Homo sapiens
ggccaagtcaagcaaattgcttgagcccaggagtacaagaccagccagggaaacgtggtgaaaccctgtctctccaaaattacaaaaattagccaggcacrttagcgtgcatctgtagtccagctacttggagggctgaggcaggaggattgcttgagcctggaggtcgaggctgcagtgagctgtgattgtgccactgca

SEQ ID NO: 185612 - DNA, 201 bp, Homo sapiens
acatgtgtattcgttgctattcaaaatagcaaagacatggaatcaacctaaaggatcatcaatggtagacgagataaagaaaatgtggtacatatgcaccrtggaatactatgcaaccatacaaaagaatgcgatcatgtcctttgcagaaacatggacagagctggaggacattatccttagcaaactaacacaggaaga

SEQ ID NO: 185613 - DNA, 201 bp, Homo sapiens
agcctcatgaggctgaggcaggagaattgcttgaacctgggaggcggaggttgcagtgagccgagatggcattattgcactccagcctgggcaacacagcragactccatctcaaaaaaaaaaaaaaaaaaaaaagagatgggcagggtcattagcaggcaggattgaaaagattggaaagtgaggctccatcttaccttg

SEQ ID NO: 185614 - DNA, 201 bp, Homo sapiens
tgcagtcctggcttggcaggaaaggggtttgtgcaagagctggctgtacctgtgtctgaaacacctgaggcccttccagggctagggatgcaagaagcctrggctggcaaagctggccttcctgccagggctgaggagcactggagccctagaaggggactgctgtccagccccttggccagccagagcaagggccactgt

SEQ ID NO: 185615 - DNA, 201 bp, Homo sapiens
aaatgttggtattttcacaactcttttggacagagttcgttgttagtggttgcttcaaactttttttccagatcttttatctctaaaaagcaatttatgatttttttttttgaccctagtatactgggatgtcttttcgatttgattttcttatattattctggctccacttttgtgggaacttctttcctttcctctttt

SEQ ID NO: 185616 - DNA, 201 bp, Homo sapiens
tatttctgaaatgctctgtgtacctctctccggtgccattgtcatgcctgtgtcatttcttggtctccttcctgttgcccccactagatgctgagctcctyaaaggcaagagccatgtcttagtcagctctatattcccaggcttagctctgaaaacataataaatgtttagtggaagaagataaggaaatatgttgtata

SEQ ID NO: 185617 - DNA, 201 bp, Homo sapiens
tccagggagaaattcagcaatagaagagcattgtaatattagaaagcttccagatctccccactcaggagtatttcctacctgtaacacacagatccgtcrtacaaattatgctttgtttgctgaaaagcctcctgaagctgaatgggtttactttggcatcagcggaggccatgattgagggcggagatgagacattgga

SEQ ID NO: 185618 - DNA, 201 bp, Homo sapiens
gttgtgacacgaatcagcacaagcaaaacctcatgctttgtaactcacgcatgttggatacactgtgtgcattaagaataccctgctcctggccaggcgcrgtggctcatgcctgtaatcccagcactttgggaggccgaggtgggtggatcacgaggtcaggagattgagaccatcctggctaacacagcgaaaccccgt

SEQ ID NO: 185619 - DNA, 201 bp, Homo sapiens
catggctcacaggcccgtaattccaatactttgggagactgagattggaggataacttgggcccaggaatttgagaccagcctgggcaatatagtgagacmcccatctctacaaaaaattaaaaaattggctgggcatgattggtgcatgcctttagtcccagctacttgggaggctgaggtggggggatcccctgagccc

SEQ ID NO: 185620 - DNA, 201 bp, Homo sapiens
catgtggccagcatggagggaaacatgattcctctgagagcagtctaataatccgtgtcttggacctgcattacttctaagaaaaacaaattagtttaacrtatttctagaaatggaaactcttggatacatcagaaacaaatttgaatttaggcaatctaattaacctttagctaaaaatgttggtattttcacaactct

SEQ ID NO: 185621 - DNA, 201 bp, Homo sapiens
tagtccccgctacttgggaggctgaggcaggagaatggtgtgaacccgggagatggagcttgcagtgagctgagattgtgccactgcactccagcctgggygacagagcgagactctgtctcaaaaaacaaaaaaaaaacaaaaaaaaaaaacaaaagaataccctgctcctgattcaggagagggcatctaaagctttag

SEQ ID NO: 185622 - DNA, 201 bp, Homo sapiens
tggctgtccccatcttttctctgcttgttcacatggttaattatggattcatcaaatgttagagctgggaaaaagatcttggagatcatctggtgctattktctcattttcagtccagagaaacaacgcttttccagccaagtgtaaccccagtcgttagtgcaagggcttagtctagactttgattcgttctgtaactac

SEQ ID NO: 185623 - DNA, 201 bp, Homo sapiens
aaagtttagtgccaagccccagcagtctcctgtatgcctttcccttttccccacctccctccaccttcctatttcttcctccttagaggctgccagtttcractgtttgacatctgagtctttggaatcattctctgtatctctaagtaacatgttcgtattgctgctccttgatttctttccgctttaaatattctcctt

SEQ ID NO: 185624 - DNA, 201 bp, Homo sapiens
cagtgattccctgagagagggcaggcaggaggatgagttggggaagactccacagatggacaaaagtcctcatccgagttccggttctgggggtgagtggkgttttgtgggtgtttgtgatcttattaagtaagggtgagtgagtgaaggtgacaggccatgaatgggccactcgcgagtgtgtcgggagccgtgggtcat

SEQ ID NO: 185625 - DNA, 201 bp, Homo sapiens
tgagagttcggctctggctgtaccctagcttgtgtgatctgtgagtaaatgaccttttcctcctttactttcttcagtctaaagcagaactgaaataacckattctctcctcacccctagggacattgcaaagattcagaacatattctcattagtgcgctttggttttctgcaataaggagggtgtgtagacagagcttg

SEQ ID NO: 185626 - DNA, 201 bp, Homo sapiens
cacataatgtttaaccaaatatctgggcaccccaaggcccagtcatgttgacgtaagactaaccgttacactaggcaaaggcattgaaaacacctagtttycccttagtcctgtcttttgaaggctaggggtgtttttggtcctctatctatgagctgtctgtggagcagtgacagtgctgtggctgcatggcagccagct

SEQ ID NO: 185627 - DNA, 201 bp, Homo sapiens
catgcttgaggaaaacaccaccatcatccatttttcagaacttcatcatcccacactgaaactctgtactccttaaacagcagctccccattctcccaccycccctgcccccggtaaccactattctgtgaatttgatgatattttaaaattgttgtccacagtgattgtccgaaccaatatatagtaatgatatctctct

SEQ ID NO: 185628 - DNA, 201 bp, Homo sapiens
caggagaatggtgtgaacccgggagatggagcttgcagtgagctgagattgtgccactgcactccagcctgggcgacagagcgagactctgtctcaaaaamcaaaaaaaaaacaaaaaaaaaaaacaaaagaataccctgctcctgattcaggagagggcatctaaagctttagaaaacattgaattatatttacatacat

SEQ ID NO: 185629 - DNA, 201 bp, Homo sapiens
tttcaaaaaaaaaaaaaaaaaaatcagaaggcataaatacatacaggatgaaaaatcagcttctctcctgtctctgtccttcagctcttacctggtcttaracattttcttatatatgcatgtatatgcataaactacatttatatcgcatttctaaaaggtgtcaggtaccattcacactattcttgtttttatccttta

SEQ ID NO: 185630 - DNA, 201 bp, Homo sapiens
tgtgaacccgggagatggagcttgcagtgagctgagattgtgccactgcactccagcctgggcgacagagcgagactctgtctcaaaaaacaaaaaaaaamcaaaaaaaaaaaacaaaagaataccctgctcctgattcaggagagggcatctaaagctttagaaaacattgaattatatttacatacattgtttttcttc

SEQ ID NO: 185631 - DNA, 201 bp, Homo sapiens
atttaataatatcatagatattcacttttatttaaagagtcttgttagaaaacaaattagaaactccatgtacgattttttttgttgtcgttgttcatcartgagaaggtttgtttaaattatatccctgtcattggcattttggaacttgaggacaacagaactgttacaacaggaattttagagccaattttgaccaca

SEQ ID NO: 185632 - DNA, 201 bp, Homo sapiens
gtgaacccgggagatggagcttgcagtgagctgagattgtgccactgcactccagcctgggcgacagagcgagactctgtctcaaaaaacaaaaaaaaaamaaaaaaaaaaaacaaaagaataccctgctcctgattcaggagagggcatctaaagctttagaaaacattgaattatatttacatacattgtttttcttct

SEQ ID NO: 185633 - DNA, 201 bp, Homo sapiens
agaggagcagcaggagcagagaccttctgtggaaaccacggctgccccatcccagccgggtcataggtcagtgtggtctgctttaatgggacataacatcmtttctggaccaccctacttgccacatccatgggtttcctcctggcagactgtggggtcggatgcctcttctccaattatctctgttacagtattcactga

SEQ ID NO: 185634 - DNA, 201 bp, Homo sapiens
tatcagaatatcctgggaactcaaatactgggaaagagttcatgggtccattcgctaggtatacagcttactacaggcccgtcatcgacagaaggcagctrgtgccttacaagaaaacagacaaaacctcattaaaatctacatcactcatttctgccctaatctgtatgaaatgaccattgatatctccttacagttaat

SEQ ID NO: 185635 - DNA, 201 bp, Homo sapiens
gtctcctgtatgcctttcccttttccccacctccctccaccttcctatttcttcctccttagaggctgccagtttcaactgtttgacatctgagtctttgsaatcattctctgtatctctaagtaacatgttcgtattgctgctccttgatttctttccgctttaaatattctcctttgaccatgcaacgtgaaatatgag

SEQ ID NO: 185636 - DNA, 201 bp, Homo sapiens
tgagggatttgcactattggaattataaaataacacatccccaaccttcattcattgattcatttacccattcaacaattgtgagtgcctgttacctgtcrgatgctcctctggaccctggggatgcaccaaagcaaagctcaccttcatggagtgcagggaagagaatagtggagaagggcaggctgcatcttcgtggag

SEQ ID NO: 185637 - DNA, 201 bp, Homo sapiens
ttctctttcacataactttttcttcagtctttttttgtctgcttagttttctgtatgcttttcaataatgcaaacacatactctctgcaaattgcctgaaytgactctcaatacattcacatacatcgctctttttgtttgatcttttggagatgtctgtcccagagcctctgacctgcccctgcctaggcaggctgttct

SEQ ID NO: 185638 - DNA, 201 bp, Homo sapiens
gcactttactgaataccgtaggcaattgtaatgtgacggtacatttttgtatatctgagcatatctaaacatagaaaaggtacaataaaaatacagtactrtttttttttttttttttgagacagtctcactctgtcgccccggctggagtgcagtggcatgatctctgttcactgcaacctcttcctcctggattaaagc

SEQ ID NO: 185639 - DNA, 201 bp, Homo sapiens
aagaattgaagaaaaaatgttttaccaattcagacccacaagtatttattgtgcacctactacatggaaggcgttggaccagctgcagtgggtataatgaygagtaaagcaggctcagcccttagctttttgcattttattttgaaaaggaaaatcctaagaactaagtgaccacaatacaagtctgacgagactggtgta

SEQ ID NO: 185640 - DNA, 201 bp, Homo sapiens
tactttacattttcctcttgaataatcatgttaagcatcttttcatatgcttagtagccatttgtatatattttctgattaaatacctattcaaatattgygcccatttttaattggattatttgtcttattattcagttgtaagagttctttatatattctagatataagatctttattatatgtatgattgcttatatt

SEQ ID NO: 185641 - DNA, 201 bp, Homo sapiens
ttcactgcaacctcttcctcctggattaaagcagttctctacctcagcctcctgggtagctgggattacaggcacccgccaccacgcccagctaatttttrtatttttagtagagatgggatttcaccatgctggccaggctggtcttgaactcctgacctcgtgatccacccacctcggcctcccaaagtactgggatta

SEQ ID NO: 185642 - DNA, 201 bp, Homo sapiens
aatttatatttatatcagagcttggcaaacttttttctgaaagggctaggtagtgaagaattatttttgtaagccctgcagtctctgccacagctattcawctcggctattgtggtgagaaagtagtgtggacaatgggctgtgttccagtaactatttacgaaagctggaggccggaccctgggcctctgacttgatcat

SEQ ID NO: 185643 - DNA, 201 bp, Homo sapiens
ccagagtggggactgggtctcatgaaacggagaggaaagaagccgaggaaacatgcttcctctttcttagaaacctcaggtttttattggataagtaaatrgtaatatctatctcataggattgccagcttacatctttttttttttgaatcagatggaaaataaataaatgccacatttcaaaaagtctaggaagcacaa

SEQ ID NO: 185644 - DNA, 201 bp, Homo sapiens
ctatttaaaagcaaaaagaggagaaaaaaatctgcttttaatagttaatttttgtgtagttgtattaggatgcaaactgaacttgtgctcttcatcttcarcaactgtctgttaagcctacatcatttgaaaaagtaaaaacagaattctgagagcacggttagcaaggtggttggttggtgatgtgcatactttttattt

SEQ ID NO: 185645 - DNA, 201 bp, Homo sapiens
ggactgggtctcatgaaacggagaggaaagaagccgaggaaacatgcttcctctttcttagaaacctcaggtttttattggataagtaaatagtaatatcyatctcataggattgccagcttacatctttttttttttgaatcagatggaaaataaataaatgccacatttcaaaaagtctaggaagcacaatccctcctc

SEQ ID NO: 185646 - DNA, 201 bp, Homo sapiens
aacatggctaacttcagaatgtcattaaatagaatatatattggtgcaacgtttattattcattttcctgactgagaggctgaggccagtagtaaaaactkatagccaccaaatatcagagttggaagggacctgagagagcatcttgtctgtccctgctttcagaaagtggtgatattctcaacccaagagttatggtga

SEQ ID NO: 185647 - DNA, 201 bp, Homo sapiens
gactgggtctcatgaaacggagaggaaagaagccgaggaaacatgcttcctctttcttagaaacctcaggtttttattggataagtaaatagtaatatctrtctcataggattgccagcttacatctttttttttttgaatcagatggaaaataaataaatgccacatttcaaaaagtctaggaagcacaatccctcctca

SEQ ID NO: 185648 - DNA, 201 bp, Homo sapiens
gtaaaagtaaaaaaaaaaaaaagaaagaaaaaaagttagccatataatgaaagaaaaggagaatttgtgtgacggtgatgttgtatcttattacaataatygaattccctttaatattttcatcaagtgcttcatatttagggaaagaattatttaaggataatccataatattatagaaagaatacttatgttttaaaat

SEQ ID NO: 185649 - DNA, 201 bp, Homo sapiens
aatacaaaaattaaccaagcttgattgtacatacctgtagtcccagctactcaggaagctgaggcaagagcattgcctgaacccaggaggcagaggttgcrgtgagccaaaattgagtcattgtactccagcctgggtgacagagtgagactctgtctcaaaaaataaataaataaataaataataaaaatgaataaataa

SEQ ID NO: 185650 - DNA, 201 bp, Homo sapiens
cttgttggctcatattatgtggtgattagagctgggcttcaatcagctggatgattccccaaggcagggtcttgtcccaccagtgcacatggtgcgccccrtctgacaccagggcgacttgagaattgagcccagggaagctgcagtgtggtgcagcagatgcgtactggtggttgccatggagatcgctaatactgctga

SEQ ID NO: 185651 - DNA, 201 bp, Homo sapiens
tggtcattgacataccgtggtttttttagatcctgcagtcatcagacccctcagtggctttacttgcttacgtcacctggtctccatgaggacacatgctccatgtgtgtggcatgtggaaaggctcagtaagcattgatgagcagactgacttccatattatcctgtgttgtaggggcatggaagctggactctggggct

SEQ ID NO: 185652 - DNA, 201 bp, Homo sapiens
ttgtgtgaaaggccagctaaccaacttggatgagaatattctccccaccttcaagggtgcttaagtttttattgggttacttctgcaaagcttctacccakcagtaaatattagccaccttggaaacagtacacagaatgacagtcattctccctctggtgtaaaattaggcactggacaagagtgcatttacctgcttgc

SEQ ID NO: 185653 - DNA, 201 bp, Homo sapiens
cagggctttgcatggatgccgccttctcattactcaggtgcagctcagagagtccctcttccactctttgcctgtctcccaacctccaattcccctctctrtgtcccagtctcaagtggcttgctgtcatggacgccggtcgttgctcccctgatgttgttttctcccatgattttgctccattagccattctgtaactca

SEQ ID NO: 185654 - DNA, 201 bp, Homo sapiens
ccccggcgaacgggagagaaccaggatatggatggaacatgcccacacctagacttcttgttttgtgagatgttatctccttctcaagtccctttgagtcrcgttttctattacctgagtgggaagcatactaattgatgttttcttttatatcactctgctttattttcttcatggcatttgtcagttggtgaattatcc

SEQ ID NO: 185655 - DNA, 201 bp, Homo sapiens
caaaagtcctcatccgagttccggttctgggggtgagtggtgttttgtgggtgtttgtgatcttattaagtaagggtgagtgagtgaaggtgacaggccaygaatgggccactcgcgagtgtgtcgggagccgtgggtcatgacagacccaagtacgtgcccctgggtttgatataaaaagagaataagggtagaaaagaa

SEQ ID NO: 185656 - DNA, 201 bp, Homo sapiens
attagcatggtacatttgtcacaattggtgaaccaatttttttttttacattattacctgtattcatttttgttcttttgtttctaaactctcttgctatraccttttcagttatctttggcagtgggagaagcacttatctactaatgcttcagaaacctgagatgaaccaataatttgaagcatcccctttcttgtgtc

SEQ ID NO: 185657 - DNA, 201 bp, Homo sapiens
cacagaattaagaccctgttttagttcctgtaagagtccagccattacaaaatcattcatgagtgatctaggatttgctgatgaattcataaggaagagakcatttgtatcatgtaacctatatggaatcattctgaaaaatatttaatggatctgtattttctccaagtgcctttttctgttgtcggtgggcagttgtcc

SEQ ID NO: 185658 - DNA, 201 bp, Homo sapiens
gagcatgattgattgggtgattagaattctttttaaagcaaattagaggtggcaggtctgccacaggtgagaagtactgcaaagaaatgaatctcattatyagataaaacttcttagatcatcaaaaaagaagtttaatgtttaaacttaaacacacacacacatacacacacagcacgaatgacctgcatgtgaattcct

SEQ ID NO: 185659 - DNA, 201 bp, Homo sapiens
ggctgcatggccttgtgaaaatagtgctgcccctggatgatgctggtctgctgggcctgtgtgtcacttcatgtcactgtctgtctccactgcttcttgtwttgttgtcagggagatgccccttgaaaatacagacttagtggcttcctggaccctgcctcatcggggttgcattttatggctgggaagcctggttgtaca

SEQ ID NO: 185660 - DNA, 201 bp, Homo sapiens
ttgaaaatacagacttagtggcttcctggaccctgcctcatcggggttgcattttatggctgggaagcctggttgtacatggtcctcagccccactcctgrggttgggggtgggtggcttgtacagtgcaccatcttagctggtggttttagacaaacacttgctttagacaaatgcttcttgtcccagcatatcaagggc

SEQ ID NO: 185661 - DNA, 201 bp, Homo sapiens
ccatcttagctggtggttttagacaaacacttgctttagacaaatgcttcttgtcccagcatatcaagggcccatgatcttgcaaagaggaactctgattyggaaggtatctttagactaatctctaattcggtggttcccagctatggcagtacactgcagtccacctggggagcttagaaaaacaatgatgctagagtc

SEQ ID NO: 185662 - DNA, 201 bp, Homo sapiens
tgattggattactctggtggttgaggacaagaacttcttacctgctccaaaaccttttttgatataggtagaacagagacatatgtgtctctgtgtgtacmtgtaagtatatataacataagcatgtccaaatgttatgtctgtttatagtcatacacagctgctgattcagagtgacatagtggaaattcttcctgacct

SEQ ID NO: 185663 - DNA, 201 bp, Homo sapiens
ctgccattctgatccatatgcctagggtagaggtttaaggttgttaagggagcatgaactttgagcttcttgatttatcttgtgtgactgaaatctaaacstcagtattgcatcaactccggggttgtttttcctcctttctttccagaacccctcacccccaatctgatgagcacatttggttgtgtagttgagattctg

SEQ ID NO: 185664 - DNA, 201 bp, Homo sapiens
tgcttatgtttagcagtgattcttatttctctgtatgtgaaccaaggattaataagcagtagacctgccaagtatgtgaggctgtattcatcacagttacrgcctgtgtctgtcactctgcagatgactggcttatccctggggctcaggggtcgcctgcttagtgacaggttttggttgaaccgagttggatatagattg

SEQ ID NO: 185665 - DNA, 201 bp, Homo sapiens
tgacagttttaggttagtctttactatgttgctaattcagacttaaagagacaactggccctccatgtcccagctccacggtgatgggtgtgtttctcagyttctcaaggaactgcatctctgatacctttataatcccaaggcctgtcacacagcctggtccatagggaggaggtggtaaaaagccaagagctagagcca

SEQ ID NO: 185666 - DNA, 201 bp, Homo sapiens
cctgctcattccatggtggcttgaggccccttgaaattgatgtgaacctcgtaagctgtcagcagttacagctactgggtaatcaggtttggaatttatgrgtatttacatttcagagggcctttactatgtttctggaattttggattagaaatgcttgtccttgatataacagtattttatgcacgctgctggagtgtt

SEQ ID NO: 185667 - DNA, 201 bp, Homo sapiens
tgaagtacaagtctagaaattacagcacaaggactgtggtcaataatattatatcatatactagaaattgctaagagtagattttaggtattcttaacacacacacacacacacacacacacacacacacagagagagagagagagagagagagataactgtgtgagatgatggctatattaatttgcctggctgtagtaa

SEQ ID NO: 185668 - DNA, 201 bp, Homo sapiens
tgataaatacgaatttgttctgaaaaactaaaaaaaaaatggagaaattgagagaaaacttatctaagacccctccaacagaatgcaaaccacttaggacrtttaatttttctttcattcttttttaatgcataatttttatgtagttgtaatctgtttatgaaaatctggtattttaaaaattattacatatgtttttct

SEQ ID NO: 185669 - DNA, 201 bp, Homo sapiens
gaagtacaagtctagaaattacagcacaaggactgtggtcaataatattatatcatatactagaaattgctaagagtagattttaggtattcttaacacacacacacacacacacacacacacacacacagagagagagagagagagagagagataactgtgtgagatgatggctatattaatttgcctggctgtagtaat

SEQ ID NO: 185670 - DNA, 201 bp, Homo sapiens
tacatatgtttttctttgttattatatatttttcctacagaagcttcattttccattgaggggcatttgttaaaatctttacttgctctttccacatgttrtccaatggctcagtcctttacttatcagtggggtgtgagtgggtaatggcactgtccatcagtaattatgactgatgagttggctgtctcttcactcagt

SEQ ID NO: 185671 - DNA, 201 bp, Homo sapiens
cccggcgaacgggagagaaccaggatatggatggaacatgcccacacctagacttcttgttttgtgagatgttatctccttctcaagtccctttgagtcaygttttctattacctgagtgggaagcatactaattgatgttttcttttatatcactctgctttattttcttcatggcatttgtcagttggtgaattatcct

SEQ ID NO: 185672 - DNA, 201 bp, Homo sapiens
caaggactgtggtcaataatattatatcatatactagaaattgctaagagtagattttaggtattcttaacacacacacacacacacacacacacacacasacagagagagagagagagagagagagataactgtgtgagatgatggctatattaatttgcctggctgtagtaatcacttcactatacatttgtatattaa

SEQ ID NO: 185673 - DNA, 201 bp, Homo sapiens
gctacttgtgaggctgaggtgggaggatcacttgagcccaggaggtcgaggctgcagtgagccatgattgcaccactgaactccagcctgggtgaaagagsgagaccctgtctcagaaaacaaacaaacaaacaaaaaacaaaccagtaacaatgacccgcccccaccaacacacatacaataaaacacttagtgcttggc

SEQ ID NO: 185674 - DNA, 201 bp, Homo sapiens
tgccacatctccgaggggatcatcccccacgtggattcctctcatcagaatctttcttgtagtctttgtcctaatttattttttgttaccattggaatctrtaagatgagcagataattcagcaagaaacaagctcaagtgagtgaacacatgacagcagggactgaaccagagggcagaatgcagagaggccaggaggga

SEQ ID NO: 185675 - DNA, 201 bp, Homo sapiens
agaggttaagtgtccttaataactcatggcagaagcatgagtagagcatgagcctcctgtttcccagaccctggctggagctccccatctgttcatcccartctatgctaccaatgaacatagaatacatgtccagatgcccaggcaagataagcgttcaaaccaccatgattctctcacatcgactgagtgcccctgtct

SEQ ID NO: 185676 - DNA, 201 bp, Homo sapiens
tacagcataaaggagagtgatgagaagactggtctcactgtttcacagtctgcccagcctctattctttttagcctttggaacctctactgacaatagataatgaatgtaccacttgacattctactcctattcacatctttagagatagcagtgttacctatgggaaggaaatattaaggcgagcaatccataagacact

SEQ ID NO: 185677 - DNA, 201 bp, Homo sapiens
tgtccagatgcccaggcaagataagcgttcaaaccaccatgattctctcacatcgactgagtgcccctgtcttgcaagtgcggaacaaccagcaccaccaytaaaatggtggttcgtccagggtgcttccctggcttcccccaaattagtgctcttcgggctgtgtatacctagtctgagctgccatgagtggccagatgg

SEQ ID NO: 185678 - DNA, 201 bp, Homo sapiens
acagcataaaggagagtgatgagaagactggtctcactgtttcacagtctgcccagcctctattctttttagcctttggaacctctactgacaatagataatgaatgtaccacttgacattctactcctattcacatctttagagatagcagtgttacctatgggaaggaaatattaaggcgagcaatccataagacacta

SEQ ID NO: 185679 - DNA, 201 bp, Homo sapiens
tataaaattccacagcgatttaaaaaaatcattctggtttgaattattttattaactccacattacaacttaattgtatggttaggtaacaactttaaagyagttaagccaaaacccacacagccacacctgaatataccagtctcagggagacaccagctagctatattgatgcaccctgttctagcacaaccctctgct

SEQ ID NO: 185680 - DNA, 201 bp, Homo sapiens
cagcataaaggagagtgatgagaagactggtctcactgtttcacagtctgcccagcctctattctttttagcctttggaacctctactgacaatagataatgaatgtaccacttgacattctactcctattcacatctttagagatagcagtgttacctatgggaaggaaatattaaggcgagcaatccataagacactaa

SEQ ID NO: 185681 - DNA, 201 bp, Homo sapiens
acagagtctcgctctgtcacccaggctggagggcagtggtatgatcacagttcactgcagccttgaccttccgggctcaagcaagcctcctgtctcaaccycctgaatagctgggaccacaggtgtataccaccatgcccagctaatttttgttttttggtttttttgtagagatgaggtcttgctgtgttgcccaggctt

SEQ ID NO: 185682 - DNA, 201 bp, Homo sapiens
tgtctctccccgctggaaagagaaatattctggcacaagcatcttctcgtctcggttcagaacgggtaccacctgcctccagagcccaggggagccctccktgtgttcctgcccaggcacaccacatggaaatgtggacacagtgccaggcggacgtgttaataggcagggaagggggaggggatgtgtaaagcactgcaa

SEQ ID NO: 185683 - DNA, 201 bp, Homo sapiens
agcataaaggagagtgatgagaagactggtctcactgtttcacagtctgcccagcctctattctttttagcctttggaacctctactgacaatagataatgaatgtaccacttgacattctactcctattcacatctttagagatagcagtgttacctatgggaaggaaatattaaggcgagcaatccataagacactaaa

SEQ ID NO: 185684 - DNA, 201 bp, Homo sapiens
ttttgagacagagtctcgctctgtcacccaggctggagggcagtggtatgatcacagttcactgcagccttgaccttccgggctcaagcaagcctcctgtstcaaccccctgaatagctgggaccacaggtgtataccaccatgcccagctaatttttgttttttggtttttttgtagagatgaggtcttgctgtgttgcc

SEQ ID NO: 185685 - DNA, 201 bp, Homo sapiens
tttttttcacagtactaacttaaagcttatattaggccaggcctggtggctcatggctataatcccaggccaaggcaggcgggtcacctgaggtcacgagktcaagatcagcctggccaacatgacaaaaccctgtcttactaaaaatacaaaaattaaccaagcttgattgtacatacctgtagtcccagctactcagga

SEQ ID NO: 185686 - DNA, 201 bp, Homo sapiens
ataatcccaggccaaggcaggcgggtcacctgaggtcacgaggtcaagatcagcctggccaacatgacaaaaccctgtcttactaaaaatacaaaaattarccaagcttgattgtacatacctgtagtcccagctactcaggaagctgaggcaagagcattgcctgaacccaggaggcagaggttgcagtgagccaaaatt

SEQ ID NO: 185687 - DNA, 201 bp, Homo sapiens
cagagacagatgtggtgatgagaaaaaatatatgtatgttgttttcctttcagaaagtgacgaacacatgaaaactttcttcaaaattttaaatatctacatcctctgagattttatttttttgtgataaaatgttacataatataaaattagccagttaagccattttaagtgtacaattcagtggcattaataacattt

SEQ ID NO: 185688 - DNA, 201 bp, Homo sapiens
cacagaacatttcccgcactcaggaagttccgtcgggcagccctgctccagaattaggtggaatccaactttgccactgctaaccttggggacttagactrgttattcattatttctgaacttcttttccctgcaactataacgtggaaattatagcattacctctctcaaggatatggcaaggatttaatgaatataaag

SEQ ID NO: 185689 - DNA, 201 bp, Homo sapiens
tgagttctcactctgtggtaatttcatgaaaaatttgtggtaaatctttgttcagcttagtggtggggttagagataaaagttatctcacaggggagaagkctccaccgtcagaacttctgagtaaatgattgctttccctttgcttgtgaggagggatagccagtgctgtattgataagcttctctttcaatactagtat

SEQ ID NO: 185690 - DNA, 201 bp, Homo sapiens
gagggccaccaggtgaatgacgctgttagaggggaagtgttggggtgaaaggtccctgggagcttcgcttaccaccgtgggcacttaatggatgctaaatmattgaaagaataaagtgagagatgagtggatgccgccttgatggcccctcgatgaactaacagggtccgagaacatttgcaaattggtcattaatgtttc

SEQ ID NO: 185691 - DNA, 201 bp, Homo sapiens
atttctcccacttctcaccttgtcagtgctggaagattaaaaaatcaaagtcccccaccagctctgccctggcccctcttcatggggtgtcctgggatgcrtcatgtgcccggaggtggtttagtgaggagccaggctcacttcatatctctgttgtgccgtgcaaagatcccaagaagggaaagtaagtgatttatacga

SEQ ID NO: 185692 - DNA, 201 bp, Homo sapiens
ctgtttctcccccgcccccatcagaaatctgtgcaaaattagagctaaaccatgggacatatttaattaaaagactaatggcaaataaggttctggtggaygttgtctaattgcggtctgttagattttaattactcatggtaaattgtgaaaactaatccacaatgtgtctttgcacactcctgttctttttaatcacaa

SEQ ID NO: 185693 - DNA, 201 bp, Homo sapiens
gagattttgttgtgcccttagtgagttctatcatgaagaacgtggtggtgatatgttaactctgatcactcggtaaatgtggcatccattaggattctccrccattattattttcccctttgtagttaatagtgtttgcaggaagatactttgagactgtgtaaatagttctcataatattttgccctattaactttggat

SEQ ID NO: 185694 - DNA, 201 bp, Homo sapiens
ataaatgaagtgaaagggatcaagagtaagaattagatttataattaattgttagtgctacattcttcctaaatggaatcacatcaaaaattgtaagtgtrtatcactttattaatttttaaatcagctcttttgggctggctgctgttgcctggcttggggagtgttatccttctcagagtactcctagacagcgaagta

SEQ ID NO: 185695 - DNA, 201 bp, Homo sapiens
ggaggcaaaatatttgttcttaattcaaatttaatatttctgaaaacaattaggtaatgggaaagctctctagttattcgatcttagtagatggaatacayagagaatagaggatgttctcaagggtaaaagcttgtgctcctgaaccaataatagcatccaaagaaaaacagattaatattctttacatctcatttctct

SEQ ID NO: 185696 - DNA, 201 bp, Homo sapiens
aatggattggatgtgggagattcaaggagaaggaggactcaaggttaagaggcagggatggggtactctttacagaggggagagagacactttctttagamttggcaggattgtgtgagattcttgttagtcttgaacttttatcttttagagacatgatattctaatttcataaaagcaaaatgattaacatcctgatgc

SEQ ID NO: 185697 - DNA, 201 bp, Homo sapiens
  misc_feature (1)...(201): n = A,T,C or G
tcttcgcgcagctctcttctctcctttactctgccctgagaattctagctatcctgacttgtccagactcccggctctgtctcctcaaatcaaggagactnttgggctctcccatgttctccttaggtctcacccctctggggggtctgtgtccttggtcacctggtgtcctctgttttgagtggtgtgattttatatatt

SEQ ID NO: 185698 - DNA, 201 bp, Homo sapiens
ttcaaggagaaggaggactcaaggttaagaggcagggatggggtactctttacagaggggagagagacactttctttagacttggcaggattgtgtgagaktcttgttagtcttgaacttttatcttttagagacatgatattctaatttcataaaagcaaaatgattaacatcctgatgcagatttgaaatgaatttccc

SEQ ID NO: 185699 - DNA, 201 bp, Homo sapiens
gtattgatgcaagtggttccttcttttatcagactgtagtattgttccaagttcttcacccctccctgtatctgtgcacttggttccctgactttgaagcrctgtctgctatgagaagaatatacttctctgccctgttgatttggagcttgcccctgtaactgctttggctaaagggaaattagcagatgtgacaggaaa

SEQ ID NO: 185700 - DNA, 201 bp, Homo sapiens
gggaaattagcagatgtgacaggaaaagaggcttgaaatgtacttggcagttgtttttttgccctttttagcttctgccattatgaggtgaacatgccctrtgtagcttgctggttccagaacagtaagaagcatgtggagtggacccgaaccaacctcagggcctggagcccagccagtctggaccagctgagccccagc

SEQ ID NO: 185701 - DNA, 201 bp, Homo sapiens
caataaaatgtgttttgaaataggatcttatgacagccaaaataataaaatacctgtggataaatctgaaataagaaatgtggaagatatgtatgatgaaractttaaaacacaaagagatttgctagaagagttaaatggaaaaaggaacaggttagaaaggaagacaatattgaaagatatcaattcttataaattaat

SEQ ID NO: 185702 - DNA, 201 bp, Homo sapiens
cagctgagccccagccccgcagacaggtggtggttgttgcatgccactgagattttgtagtgatttgttgatcagctgtagctggctgataaaacatacaytgtagttgtcatattctttttcagcttaccgagggctcatagaatgcttaagagtctctcttccaaaatcatttcacagaaaattcagctcatttatttc

SEQ ID NO: 185703 - DNA, 201 bp, Homo sapiens
caattataaggagtccaaccgggactcaaataagaatttgagtgcccagtatgtgcaagcactgtagcaagtgctggaggcacagtgttgaatagcaaagrcacagcccttttttttaggcttacatctggggcttcctgttggtgacttgtggtgacggtggacacgttcctgcccccaaagaatctgggggatactgtc

SEQ ID NO: 185704 - DNA, 201 bp, Homo sapiens
agccactgatatatggaagatcctcgtgtgtgtgtgtgtgtgtgtgtgtgtgtgtgtgtgtgtatgtgtgcatgcacgcacgtgcatatgttcgcaatatmatctttttaaaattttagcgcaggctgggtgcaatggctcaagcctgtaatccgagcactttgggaggccaaggtgggcggatcacaaggtcaggagttc

SEQ ID NO: 185705 - DNA, 201 bp, Homo sapiens
ttttttggttttgatcactatggtattcccagttcctagaacaatgcctagcacatagaagacactcaatatccatatataaattagatggatggctgtgygggtgggtggaccccccactcctcatcccaatgttcgttattctttcttcaggctcatggaaacagtaaaatggggaggggggaactgacctaatttttg

SEQ ID NO: 185706 - DNA, 201 bp, Homo sapiens
agagacagatgtggtgatgagaaaaaatatatgtatgttgttttcctttcagaaagtgacgaacacatgaaaactttcttcaaaattttaaatatctacatcctctgagattttatttttttgtgataaaatgttacataatataaaattagccagttaagccattttaagtgtacaattcagtggcattaataacattta

SEQ ID NO: 185707 - DNA, 201 bp, Homo sapiens
caccagctgggctggagatcttgggcaagtcctgtgggtctcagtttcttcatctgtaagatgaggggcctaaattatataattttcagatttcattttarctctcaaatcttcaacagcctagagtttcttaataaaacccatagaggattgtgttttgttgtatagcaccacatagaaaattgcatagcagcaggactt

SEQ ID NO: 185708 - DNA, 201 bp, Homo sapiens
cagatttcattttagctctcaaatcttcaacagcctagagtttcttaataaaacccatagaggattgtgttttgttgtatagcaccacatagaaaattgcmtagcagcaggacttgggtgtatatggttggttaatcagggtttttcttcctcttaaagaaattcttagagacctttaaaaaaaaaagagagaaaaagagg

SEQ ID NO: 185709 - DNA, 201 bp, Homo sapiens
atcatgaaagggtgttggactttgtcagatgcattcactgtatcaattgatatggttatgtgggttttatttcttttatcctattgttacagtatattacattgattgatttttatattttgagccattcttgcttgcactcctggggtaaatccatttgatcatggtatatgatccttttaatgtgctactaaatttggt

SEQ ID NO: 185710 - DNA, 201 bp, Homo sapiens
ctttcaaataaatctcaaagtaaggtatgcataaaaagataacactcagctgatataacattgcttatacagagaaggtttttcatttgtttgtctttcartttccacatccaggtgttgtgctgtttccctggacctccgggttcatcacacagcctctggtgcacctacctgggtgccaacgttgtaggaagaagctgt

SEQ ID NO: 185711 - DNA, 201 bp, Homo sapiens
tcatgaaagggtgttggactttgtcagatgcattcactgtatcaattgatatggttatgtgggttttatttcttttatcctattgttacagtatattacattgattgatttttatattttgagccattcttgcttgcactcctggggtaaatccatttgatcatggtatatgatccttttaatgtgctactaaatttggtt

SEQ ID NO: 185712 - DNA, 201 bp, Homo sapiens
tccataaccccatgactgtacatcctgaagcagagttagggagaaccagtctccaatgaccactgacaaaaacagaatcaaagtgataatagaaccaaccrgcactacaattcctaacatatagtgtgcactcagcaaccatgtggcaggtaccaaggtcaaaaacatacctcaatgatatgtttttatgtttaataccta

SEQ ID NO: 185713 - DNA, 201 bp, Homo sapiens
catgaaagggtgttggactttgtcagatgcattcactgtatcaattgatatggttatgtgggttttatttcttttatcctattgttacagtatattacattgattgatttttatattttgagccattcttgcttgcactcctggggtaaatccatttgatcatggtatatgatccttttaatgtgctactaaatttggttt

SEQ ID NO: 185714 - DNA, 201 bp, Homo sapiens
atacctacaacagccgtgtgtatttggcactatcgttgctattcccatgttacccattacagagtggaggcctagagaagataatttgcctgaagtcgcaygtttcagtcagtggcagagccagattcaaccctagctggtctgagggcagattctgtggtctccccaacacgcatgggttctctttttgtctctgcactc

SEQ ID NO: 185715 - DNA, 201 bp, Homo sapiens
atgaaagggtgttggactttgtcagatgcattcactgtatcaattgatatggttatgtgggttttatttcttttatcctattgttacagtatattacattgattgatttttatattttgagccattcttgcttgcactcctggggtaaatccatttgatcatggtatatgatccttttaatgtgctactaaatttggtttg

SEQ ID NO: 185716 - DNA, 201 bp, Homo sapiens
agatattggtatgtggctttcttgtagtgagcccctgtgaaactatctttactttaaacctctagttttaatttatctttttttttttttttttttgagayggagtctcactctgtcgcccaggctggagcacagtggcgcgatcttggctcactgcaagctccaccttccgggttcacaccattctcctgcctcagcctc

SEQ ID NO: 185717 - DNA, 201 bp, Homo sapiens
ccatcagccttcctttcccccatcaacctttcagtgtggtcctgccaatcatccacttaggccagtgaacatttcttttttttttttgagacaggagtctygctctgtggcccagactggagtgcagtggcacgatctcggctcactgcaagctctgcctccctggttcacgccattctcctacctcagcctcccaagtag

SEQ ID NO: 185718 - DNA, 201 bp, Homo sapiens
tttgcacacctaatcctgaagctccatgaatgttctggttcagctagagcgaatggggatttgtgaaacaattataagggttttctgttgttggtggtggttttttttttttttttctcactctgtggaccaagctggagtgccatggcacaatttcagcttactgcaacctccacctcccaggttcaagcagttttcttg

SEQ ID NO: 185719 - DNA, 201 bp, Homo sapiens
tgttcggatttcttttaatgttttcagtcaattcatgtagtaaatatttattgtgctcttactgtgtcccaggtacatttctaggcactgggtctatagcrgtgaataaaacaggccaaaattctacctttctggagcttacagtatggtgggggtaggcaatccacaaggaaaatgagtaaattatatatctagtgtcat

SEQ ID NO: 185720 - DNA, 201 bp, Homo sapiens
gttaattccaaccatttgattatctagtgttcttttgttgtggttgttttcccttcctaatcatggcttacatatttcctgctgcttcacttgtctttttkttttttttttaattgtgtttgaatggacaaagactgaggtagataaaatttatccccagaaagtcttatgctttctaccttctggctgctaaggtgacta

SEQ ID NO: 185721 - DNA, 201 bp, Homo sapiens
tttgattattaattgctggttattattatagaaagtttttgcattttatgtatagtgaacttacgttggaataaataggttatgaaaattttataaaattktaataaattgccatagttttctttgaagttgaaaagcatataatgccatgcacataataatattttttattacggtattatttacgtaaaataaaagtct

SEQ ID NO: 185722 - DNA, 201 bp, Homo sapiens
cacccaactgggctaaagttaaggtgtcagcagggctggctccttctgtaggctcttgggggaatccaccttcttgacttttctggctttttttttttttwaattatactttaagttctagggtacatgtgcacaacgtgcaggtttgttacatatgtatacatgtgccatgttggtttgctgcacccattaactcgtcat

SEQ ID NO: 185723 - DNA, 201 bp, Homo sapiens
taaattgccatagttttctttgaagttgaaaagcatataatgccatgcacataataatattttttattacggtattatttacgtaaaataaaagtctttcwtttcatgtgcaatttgatgaacttcagtaagtatatagagtcgcgtaggcacaatatcaagatacagagagttctctcaccctaaaaagcctccttgtgg

SEQ ID NO: 185724 - DNA, 201 bp, Homo sapiens
gcctggtgtaaattatgttctcaagtaaggattttactctgtctccaaaaggttaaataggtcactgattagaattatagataaaagagtacttgtctttscaggtttctcaggagagaatgagaaagatcttctcactgtagaagcttctttgaataggcacaagaagttacatctggcttcacttaaacaccacttgcc

SEQ ID NO: 185725 - DNA, 201 bp, Homo sapiens
tgaagcctcctacagaaaactatatgatagagtggtcacgtccttcacaggagtcgccagtattgtcttactgatggaataggccaatgacacaatgcagrggtgcgattcagaagaaataaatcgaaagggaaccaaaacaaaatgttttaaaggtaaaatttgatgcaactcagcaaatggacaccgtatcctttcttg

SEQ ID NO: 185726 - DNA, 201 bp, Homo sapiens
ctcttgttgggaactgactataagttcatgcaaatcaaaaacagattagcaaagatcagaagagtgtcttaattctctaaaaaccccccataccatgtagygtagtgttttcttcagagttgtactaagtgaatgttaatttcattacgtttattgacaggacataatgagtcttattcccacattataactttttagagt

SEQ ID NO: 185727 - DNA, 201 bp, Homo sapiens
ggaaggacaaaagcaggacaaagatgaccaagccagggtgggagagaggggaggagacactggaaggggaggtgaaggggcagactagggaggccaggacyaaggcagactctcatgcaccaggcatattctgcccagccaagggctctggcattcagatgagggagagggagaggaaagaggagagaatccagtgagacc

SEQ ID NO: 185728 - DNA, 201 bp, Homo sapiens
gggattataggcgcccatcaccacacttggctaatttttatatttttagtagagacagggttttaccatgttggccaagctattctcaaacccctggcctygtgatccgcccacctcggcctcccaaagtgttgggattacaggcatgagccaccgcgccaggcctgaaattcttgcatatacataatgagatgtcttggg

SEQ ID NO: 185729 - DNA, 201 bp, Homo sapiens
tcagtttgcctcacaaacacggttaccttccatgacatgaaggaggcacacgcgggttgacccctgaccctgtctgcttgttagaatcacgtcgggaacckgggacaggcttagaagcccaggtcccacctcccacctgctgaatccaaatctccagagcgtggcctgggaaatcaaatttgtcagcttccttcccagggg

SEQ ID NO: 185730 - DNA, 201 bp, Homo sapiens
atgtttcacttgtggctgcagattggcactcagaaacttttagctagagaaagaaaaatgattataacgtttgctaagaatgataatggattaggtcagtstcatcaatggagtgaaaatatacaggctgatttggagtatattattatgttatcattacatgaggacgtgatcagtggagcaaggttctttttttttttt

SEQ ID NO: 185731 - DNA, 201 bp, Homo sapiens
ttgatcagttgacatacaatgaactgcacacgaacatactcgcacagtcttacaagttttgacgtcttgcaagttcatgccatgaagctaccagcagaatsaatacatgaacatcttcattgtccccaggagtttcctcctgctcactggcaatccttcccttctgcccttaccacatctcaccccgggcaacatgtgatc

SEQ ID NO: 185732 - DNA, 201 bp, Homo sapiens
tccaggcagaggtgatgtcttgttcctcctcagtttgagtgggtgtttttttctctaatgattaatcatcttatagctcatttgcatgagacatctgtgaycttgattaaggggaattctcctcacacttgtgacccatgcaggtcctcgtcgatatggggttaccactggctcagtggcctccagagaacttcagatctc

SEQ ID NO: 185733 - DNA, 201 bp, Homo sapiens
aataattattttgaaattcatccatatcatagtgtatatgagtagttgattccttttgttaatcagtatcccattccacgatttgtttatccatacattcrttgataggtatctgggtagtttccagttttttgctattatcagtaaagcgtctatgaacattcatggatcagtctttctgggtcgtacgttttcactcct

SEQ ID NO: 185734 - DNA, 201 bp, Homo sapiens
atttgttctgctggctgtattacttagcattagatttgtccatatgttttagaattttgggttgcagggtcatattcagaggaaggtttttttgttctttwccgtttctctgttttcttcgttcctgtccttctcccccatcccccgtctcttactattcaccctataagtggatttgcaggtgattccacccaattctct

SEQ ID NO: 185735 - DNA, 201 bp, Homo sapiens
atatgaaaagatgcttgtctttattagtaatcagggaaaaacaaaaccacaaagagctttttcaaatgggaaataattttttaaatctaacattttaaatygttgacaaaggtgtagagaaatagagtatagcacaaagttctggccttatgcaggattcatggtcaccgttcttccagctgggacttcagtactcactgt

SEQ ID NO: 185736 - DNA, 201 bp, Homo sapiens
gatgttgatccattgtcttctgcctctatagttctaaagagacatccataatcttttcagtcattcttcacttgtaaatactagtatctttcctttttttwaaaaaaaattattaactataattttttactgtgctgtctttagttactttcaaggcttctacccaccccccgccccccccccatttttgtttttcagcca

SEQ ID NO: 185737 - DNA, 201 bp, Homo sapiens
aaagagctttttcaaatgggaaataattttttaaatctaacattttaaattgttgacaaaggtgtagagaaatagagtatagcacaaagttctggccttaygcaggattcatggtcaccgttcttccagctgggacttcagtactcactgttcttgattcacctctattttttcatactccagatttcccctacttatgcc

SEQ ID NO: 185738 - DNA, 201 bp, Homo sapiens
gtgcaaggagaggtcacttcatccctgatgcttgggccacacctcagaccaacagcagtgctaaggcccaggcttcagataattttgtttaattttttttwaaaattctctccatgattgggtagagccagggctgagaaacattgacctgaaggaattagggggcttcatggaggaggtagtgtttgtgttgggcttgag

SEQ ID NO: 185739 - DNA, 201 bp, Homo sapiens
ttctattaaaattagggttgttaatgaccacttaatgctttgtgaagagaaatttctctaatcataataaacagtgtaacaacaatttactgtccttaagyttaaatatcaaaatgatgtataaagtaaaatttgtatagtagtagtaacttacgatattatttagaaattgttcagctgggcatggtggctcacacctgt

SEQ ID NO: 185740 - DNA, 201 bp, Homo sapiens
ttcttatatcattttttttcaaggttcattcctgtattttaggctggaagcaatgtcttcatgaaatggccatgttgttatgtccgtgaacaaaatgaggyaatgtcatcactaggcaaaatttatgccaggttttaaaattgtgattcttaattggtataattcaagaattggatattactgggtgattctcagaaataa

SEQ ID NO: 185741 - DNA, 201 bp, Homo sapiens
ctaggggaatgaattaacacagccatcatctcacttagtcacccatttcccccgctgtgtcatgaccagctgttggctactcatctgctggtgcagagacrcagggagggagaggcggcactgtgtgtttgggaagactgacgcatggatgtctggattacaccatgaaacatgttacttaggtggaggaggttggaacct

SEQ ID NO: 185742 - DNA, 201 bp, Homo sapiens
ctccaaagaattgtaggtgaattccacagcatgctttttacccccattctctaccttaagctgcctaaatcataatcactagtataacctcttcctcatgrtggagacatttttaaagaacattatccagggaagtggaaactgttaggtgaaggcttttgttacctaagaaggcaaaatgtacaaatgctactcatcatc

SEQ ID NO: 185743 - DNA, 201 bp, Homo sapiens
agacatttttaaagaacattatccagggaagtggaaactgttaggtgaaggcttttgttacctaagaaggcaaaatgtacaaatgctactcatcatccctwccttatcctcaataaatgtttattgtgtttttgacccacatttggttgaaaacagtccatgtagaagtgaacctgtgtagtttattgaggataaaacaat

SEQ ID NO: 185744 - DNA, 201 bp, Homo sapiens
gatgcttggcaagtgaagatgaacaaggcacaactgcccttaaggattgaatggtttgatgagggatgcagtctcacaaatagccccataagcagatatgktatcaggcttggaggcaagtggcctgcagaatcagggaggttatcccagaagaattaccttgaagagtgttcttttaccttcgtcttgaagaatgcatag

SEQ ID NO: 185745 - DNA, 201 bp, Homo sapiens
cattaaggatgatactctacataattaatactttcttttggagtttattatgcatatgtatggtttattcagcaggcattttttgagattctattgttaaygaggtacagcaagagatggaaaggtaacaatcagctggtattagtgtctgttgtgattggttggaccctatttaactggcaaggatcagtttaaatgctt

SEQ ID NO: 185746 - DNA, 201 bp, Homo sapiens
caaagtccgacaactcatttcccactgtattgttactacagtgaagtgattttttggaaacacctatcacatatcatcaccatgtcttttatagttacacratagttaactaaacttatccttttcttccacaagagtctaacctccttgaaggtaggaccatgcttaattcctactggttagtggctgcagtattatact

SEQ ID NO: 185747 - DNA, 201 bp, Homo sapiens
gggtttggaatggggcaccattgaaagtttctaaacagaaatcacgtggtgaggtccacatggccttttggggccttcctgccctggcctttgcctgcctyctcgctttctctcccactcttgcccatgggtactccatgctccaaggaactgttgaatgtgccatgcacactctgttcagcatttcccaaagggaccctg

SEQ ID NO: 185748 - DNA, 201 bp, Homo sapiens
agggacagactgtgcttttgatagtgacttggaacaatataattctttgctaatgcagcttcatatcatgaagttacatattttcttggtatgattgcacrgcccttgaagtaaaacagccacatagttgtatgctttaaaatagcccggtagggaagaattccacattttagaagatggatttttataatttaagtttgt

SEQ ID NO: 185749 - DNA, 201 bp, Homo sapiens
ttcttcgggattcccttcagtgctgtcctggcagggacccaggagtagtgtctctgcagagagaagggcagaggcagagagactgcttgctcaacagcagctaggcagggagagaagccgggcgctgaaggagctgtatcttcaatgttctgctgttgcaatgcacaccttcatgaaatcctttttaactttcacttagcg

SEQ ID NO: 185750 - DNA, 201 bp, Homo sapiens
aagtaagccatgtgctggcctctgtatagattatgtaagctgtccaaggtgtttcaggatatatatctctctgaaaatatggtcctagactttcctttgtrttattttttatatttgtatttgcgtagctttcaaatgcagatggcaggtttccttacaaaaaacaatttatgcaatatatgacttttctgactgtgatgc

SEQ ID NO: 185751 - DNA, 201 bp, Homo sapiens
ctgcttataaatgcatgttcagaggcaaatgaccatgataaactaccatctaggaaactgctttatttaaatgaagtcatttccctcctgctgccttacasggcatcaacaaatgagttgtgcgtgaggaagggagaagcacgtagtgctgatgctcactgtgtcatcttgcaggggcttcgttatggagaggtatgccga

SEQ ID NO: 185752 - DNA, 201 bp, Homo sapiens
cagttttatatttagatttgtgattcctttgaagaattttatggatgatctgaggtacggattgaaattttgttttccatattgatatccagttgttccadcatcgtttgttgaaatgacctttccttctgcactgcaaagtcttcgtaccattgtctggaatcaattaaccatgtatgtctggggctatttctggactct

SEQ ID NO: 185753 - DNA, 201 bp, Homo sapiens
ggcatatatgtgtttttatgtgtggaacacagctcttttaaatggcttgtagcattttactttatttcttcttccttaagtcgtagtgtcttcaccgttgmtttctggatccttagactgagtgattgtgatgtgagtggtgaccgttttcaggctgacttggttgttttttccttagggaggtattttgaggacagtact

SEQ ID NO: 185754 - DNA, 201 bp, Homo sapiens
atgttgatccattgtcttctgcctctatagttctaaagagacatccataatcttttcagtcattcttcacttgtaaatactagtatctttccttttttttwaaaaaaattattaactataattttttactgtgctgtctttagttactttcaaggcttctacccaccccccgccccccccccatttttgtttttcagccat

SEQ ID NO: 185755 - DNA, 201 bp, Homo sapiens
ctaaaagaaaataatcattccgtagctacatctcacttttgcacatcttcattgcggagatgacttaaaaaaaataactcgatttgagattgtaagtagawttgggccagaagctgaagaatggaccttacacatacgtcctttaatagtcattctattctgggttgaaatttttcttagagagtatctgtaaaacaggag

SEQ ID NO: 185756 - DNA, 201 bp, Homo sapiens
tttgatatgtctaggtatggttttcttttatctcacacttatgatagatcttttgattttgtcccaggagaccctgagactctgcttactttttttttttwaatctttgtctttctgtttttcagattggataatttccacagatccatcttcatgttaattgattttgttctctgtcatctccattctgctgccttgatc

SEQ ID NO: 185757 - DNA, 201 bp, Homo sapiens
gcagctcagctctgttcatgagtgttttatgtccagttctaaatcctattcatctgaccctattgccccttttaatactgaagctgaagagagtgatagtrtatattccatcacggaaataaccacagagcctggaagatggggtcatgacttggagattttgggttgaattcaggctccaccatttactatgtcatggta

SEQ ID NO: 185758 - DNA, 201 bp, Homo sapiens
accacattggactgaagcttaagctttaagaccagcttgagcaacatagcaaaacacttgctctaaaatatatatatatacacacacacacacacacacayatgtatatatatgtgtgtatatatacatatatgtatgtgtatatattatatatgtatatatacatatatgtgtgtatatattatatgtgtgtgtatatat

SEQ ID NO: 185759 - DNA, 201 bp, Homo sapiens
tcctcttccttaagtgacacatgcttgtgtgtgtacatatatgtacatataaaaattacagtaaaactatgaaggttttattactcaggttttataatctragtacctaattagaaaatgtcgaactgggtgatatcttatggaaactctgctgtttttcttgtaccttctgtaagtgacatggagtaggggctgtttgtt

SEQ ID NO: 185760 - DNA, 201 bp, Homo sapiens
agtggacctgaactgtagtttgggttgtgaatgcactccaggtgaaaggataattgcgtgacacacatatgtggtactggaaacgtggtggtattggctcyacttgtctatttactctgtcaactttattaatcagaattaagcctggtacatttttgaggccagttagttgagattgtctaagatctgtgaaactctggc

SEQ ID NO: 185761 - DNA, 201 bp, Homo sapiens
gtttctaaacagaaatcacgtggtgaggtccacatggccttttggggccttcctgccctggcctttgcctgccttctcgctttctctcccactcttgcccrtgggtactccatgctccaaggaactgttgaatgtgccatgcacactctgttcagcatttcccaaagggaccctgggcagtcctcatgctcatttttcaaa

SEQ ID NO: 185762 - DNA, 201 bp, Homo sapiens
gtttggatgggtgaatgcattttggcacaaaaccttcacttctggactggaagatagattggatggagcagagacgggaggcagtgagaccaagtggagcrtcatacctggaagagaaacattgagcctgtgaattacagctatagcagtagaaattcaaggggggaaatagattctggagacctgggcaagtagtactga

SEQ ID NO: 185763 - DNA, 201 bp, Homo sapiens
tgggcaagtagtactgacgggacccagagatcagcggataaaatggatgctgtgaagggctaagggaagtggaaaggttgaagacaggcacctgaagcccrcctaatcatatcactagatgttttgcagggtgtgcggtgggcaaaagtaggggtacgggatgggagtggaaaccgttctgtgtaggtccgtttgagaatc

SEQ ID NO: 185764 - DNA, 201 bp, Homo sapiens
tttgcagggtgtgcggtgggcaaaagtaggggtacgggatgggagtggaaaccgttctgtgtaggtccgtttgagaatcagcttaactgaggattaattgycttggtttggaaaactccactactgaagtttgcacaacatagtaaattgtggaggactaaagcatccttcgcttaactattcaatttatttacaaattta

SEQ ID NO: 185765 - DNA, 201 bp, Homo sapiens
tcttactagtataataggatttgatttgctctgtttaacatatgatgaagttaattgtgaaagatctctagaatccaaatctgcaaattatttccaaaacyctgttttttatcttttacaccagtcgttctactggtgagtcaatacttgcagctcctgtgtgtgtggcaggttgccaggtgccccagatggtaccaaggt

SEQ ID NO: 185766 - DNA, 201 bp, Homo sapiens
aaggctgggcgcggtagcttatgcctgtaatcccagcactttgagaggccaagtcaagcaaattgcttgagcccaggagtacaagaccagccagggaaacrtggtgaaaccctgtctctccaaaattacaaaaattagccaggcacattagcgtgcatctgtagtccagctacttggagggctgaggcaggaggattgctt

SEQ ID NO: 185767 - DNA, 201 bp, Homo sapiens
ttaaggggccagcattacattttggatagacagaaatagtttcttatgttgccacccagctgagcttgaggaacaggctgcgactcggcagagcagctggyttgatcagcagctggttccaccatatgtgcaggcttcacactcccacaatggacagtcctgacctggactggccctcaggccagtgtcctccaagtccat

SEQ ID NO: 185768 - DNA, 201 bp, Homo sapiens
tgccacccagctgagcttgaggaacaggctgcgactcggcagagcagctggtttgatcagcagctggttccaccatatgtgcaggcttcacactcccacartggacagtcctgacctggactggccctcaggccagtgtcctccaagtccatcagagcattctgggtggagtcattgggaatcttgggctgtcttctagct

SEQ ID NO: 185769 - DNA, 201 bp, Homo sapiens
ccatctgcatgttggctgacatctggttttagaagttatttataaagaaaggatcgttgtaatcaaaacagccagagaggttttaaatgtcaaatgtactkggaaagattcacttagggtgactggcactgtaggaaggattagcagtttctctaaatgcttgtatgtggggagtgcatttctcctgtgtgtaaatagtac

SEQ ID NO: 185770 - DNA, 201 bp, Homo sapiens
acaaaaatcctacttgtttctggcagagggagggggaaagtaaccattttgaaatatatccacaacaggcttttctctttaacaaaagcctgctctcaaastatttaccaaagcccagcagacttagcttttatcagaatctaactgacccaagggatgggaaatgcccagctcttgccccttctagccttcctgtctcca

SEQ ID NO: 185771 - DNA, 201 bp, Homo sapiens
tggaaaaaggggaagcacacaagtgcttctgcagctcagactctgagttcttggctttcctgtaaacataaattaataccaggccaggctgcgtgtggtgrttcatgcctgtaatcccagcactttgggaggccggggcaagaggattgtctgagcccaggagcttgagaccagcctgggcaacatggcaaaaccccatct

SEQ ID NO: 185772 - DNA, 201 bp, Homo sapiens
ataaattagatggatggctgtgtgggtgggtggaccccccactcctcatcccaatgttcgttattctttcttcaggctcatggaaacagtaaaatggggaggggggaactgacctaatttttgaagcttgctcgtggctctttctgccctcagctgctcagtacaattcccagtttccaaggatgggcagtgggaagcaca

SEQ ID NO: 185773 - DNA, 201 bp, Homo sapiens
acatataggcaggtagaggtggggaacttttcacaccggtgcagttcatgagccacgtgtctcattagcctgttaaatctccacccttgggtctgattttkagtattataacaagataggttgggcgcggtggctcactcctgtaatcccagcactttgggaggccaaggcgggaggatcacgaggtcaggagttagagac

SEQ ID NO: 185774 - DNA, 201 bp, Homo sapiens
ggtgtgttaaaactttaataatacaaattatctgtggatttcatttcttatgcctgtggcataaatatatcaacagcattatgagcagatttgttttcttaaaaaaaaaaaagtgggattaaagcacatagcacatgtcatttttctgttgccctgtgcatgaaaattgcttggtggattctgcatagtgagtcccttaac

SEQ ID NO: 185775 - DNA, 201 bp, Homo sapiens
ggagaggccccctgtgccctcccaggaatgtcaggtgaccatcaggtgatagtcaggaagttgttatactgtctctctaaaataataactggtcactaccrgtgccagggaaaggcagtctcccaatagatagaggacacctgagctgttgaggagcagcttcctgatgggatctcaggagttgggcaagtgggctccagc

SEQ ID NO: 185776 - DNA, 201 bp, Homo sapiens
gctggagatctctatgggttagttgctggtaacgggaagctttctgttacctgacttggatcagcttaaagggagacaagaaggtaggggtgggaaattcytaagcaggaaagcattcaagatgtggccagactgcttctaacaacctatacttagatgtgggaacaaagaaatgactgaaagttgggatttataattaga

SEQ ID NO: 185777 - DNA, 201 bp, Homo sapiens
gagatcaacacaagctagaagcagctggagggaggggctgcagaagtattaatgatgggaggccaaaaacagagtaagaggagctgtccagttgactgagrttcacctctgctgactgcccattcagttgttctgtgctggggaccaaacccttcagctctccaagtgccagctttctgctgtggctgaaaagcacctgct

SEQ ID NO: 185778 - DNA, 201 bp, Homo sapiens
aagagcattaatctcattcatgagggctctgccatttagaccacagcaggaagctggctgaattttgcaagagaaagttacataagattcatctctcaacyatattggaaatgtcagggttaccaatgagggcaggtcatttagaaaggatctgaccttctcttagacatcgaagcaataaaaaaagttatagatttctcc

SEQ ID NO: 185779 - DNA, 201 bp, Homo sapiens
tgtttagtagggatgacactctctacctggagccacattttgaccaagaacacctcatttttctctgtaccattactagtgaaatattcccctccatttcrtcttattagttctcctctccttattctccactaattaacgtgttctgggagtagtttccatctttggaaaaaacagctttatcttcatttgtaggaatat

SEQ ID NO: 185780 - DNA, 201 bp, Homo sapiens
cccctgatttgatatcatccagcctaagatcaccacacacaaaccatcctgtgtgaaaatcagcagaaatcacacccagttgcttcagctatttgaattcmttggcgcaaagtataaaataactgtatgaaatctttaaagaagtagaaaatacaatctcaaatacgtataagtaataaaaatggtttttaacaaaagatc

SEQ ID NO: 185781 - DNA, 201 bp, Homo sapiens
aggaaatacatatacctacttctatttccgtattgatgtatctgcatatatgttacaaaatatgaattcatatgagtacctccaatctaagccaacaccayatggctcattctagccctccccattgcctttgatagtgacagtgagaaacctggttcttcttactcatgacatatttattttcttgttcagtcctggaat

SEQ ID NO: 185782 - DNA, 201 bp, Homo sapiens
atttattgagttattgatatattcgatctgaactttatcataatatattgtggtgttatatatgtcataacatgttacattttatttctctacaatatatrttttattatgcttttgaattgaaattttggttgctctttagaaaggttatatttttgttttaatggttgcttttatacttaaaacttttaaagtccctta

SEQ ID NO: 185783 - DNA, 201 bp, Homo sapiens
ggttagagaatggttttgtaaatcctctaattttttagctgtgctttatctttcacaaccttgaattttctcatttgcatcttttttctcttcctactcarttgaaaaggttgtctttcgctttgtattaactcctttttcttttattgtaactatggttttgggatcctctcacttcaaattgggcatgcttttacacca

SEQ ID NO: 185784 - DNA, 201 bp, Homo sapiens
tacccaaagttgctgaagcagttagtaacatgcctagaactggaactcagctcttctgaattcattgcctgtttttctgtattctgctttttttcatgacrctcctttctacgtgggacctgcttatgacccaaaggggagttttggttccaagaatgctatggagagtggagtcagaagattgtggtgttttctgaattc

SEQ ID NO: 185785 - DNA, 201 bp, Homo sapiens
tcattagcaggcaggattgaaaagattggaaagtgaggctccatcttaccttggctggtgaaaatggctccctcagggcattgctcatgacccccaaaccrtccacagaaggaaaggatattcctgtccctagccctgtccagctaccaaaacaacagcagggaaagggaggccgagggtagcccacttacctcgccttgg

SEQ ID NO: 185786 - DNA, 201 bp, Homo sapiens
actttctatagatttgtcttttcttgacatttttggtaaatggaatcatacaatatgtagtctttggcatgtggcttttttcacttagcacagtgttttgyggttcatcctattagcatgtctcagtagtttgttctttactattgttgaatagtattgtacacattttatttatctatttaccagtcagtgggcgtttag

SEQ ID NO: 185787 - DNA, 201 bp, Homo sapiens
ttacagtcagctttcatttgtagagcccaggtcttcaaataatttccaagtaaactatcccagattaatacgtttcaggacataagtgtggttcgctagarctgtcaagctgtctggatgcccttctgttaactttgtagaagagattccacgtgtgtcaagttacagtgtttgctgaaatttttctgttgtcttgaaagc

SEQ ID NO: 185788 - DNA, 201 bp, Homo sapiens
tgaatagtcacttcccgatttattggttgttgagccctccatttttaagaattagtttgtttaaattagattaaatgtttctatctgtggtttacattttytgactgtatgaatttaataatttattttttatttttatttatttatttattgccacaggtggttacccattcttaaccaatccttaaatgggcattttaa

SEQ ID NO: 185789 - DNA, 201 bp, Homo sapiens
atgcttggccccagacacctcaggcaggaacagtaggtataattatttcatcagcgttaggattaagttagaaagcaatgagtatgtattcttttgcatcscacatgctaaaaatatccttactcagcacccttgatggatcctgccttttatgagtccccaggtaaccacagggactgctcaagtcctactgttacttca

SEQ ID NO: 185790 - DNA, 201 bp, Homo sapiens
aattttgtgcttttctctactttgtcttctctaacgtaaattttatcgtctggccagagtcctctctctcggttatgggaaaccatcaacagtttgggggygcttgtttccaaaaccttagaggagtgagagagcttctggaccaagagtgctcagcagtcctctccgttcatgtcactggccctccttgtgtcatgtcct

SEQ ID NO: 185791 - DNA, 201 bp, Homo sapiens
tattcttttgcatcgcacatgctaaaaatatccttactcagcacccttgatggatcctgccttttatgagtccccaggtaaccacagggactgctcaagtyctactgttacttcaaggattattttgattgttttctatgacacatcatctttcagaattttataaaccgaacaacagtatcacaaaccagtgtcttttct

SEQ ID NO: 185792 - DNA, 201 bp, Homo sapiens
aacaacagtatcacaaaccagtgtcttttctgtgtgaaggctttcttgtgaacagctcctgggtttgagcaatatttctttcccttacagtgtatataagraacatttatttggtcagttctcaaacatattatgcctacatttcttctgctgtttttctttggttctcttctattcccttagtttaagaggaaaggggct

SEQ ID NO: 185793 - DNA, 201 bp, Homo sapiens
tgatcatcttgtctcagcctcccaagaagctgggagtacaggtgcatgccatgcctggctaaatgttttttgttttttgttttttttttcaagagatgggrtcttactgttgcccagactggtcttgaattcctggtctcaagtggtcctcctggttcagcctcctgagtaactgggattacacggacaagccttcaagcg

SEQ ID NO: 185794 - DNA, 201 bp, Homo sapiens
tgtactttcttcatgtaagttcgttctaaacatgttatggccactatggcatgttttgaatgtatctcattatctactacacttaaggacagagaccgtcktttctttccactctgtaacctatattcagtgggctaaatgtttgaatcagagcaagcaaagactacagaaaaatcataactcagttcaggaaccagtgct

SEQ ID NO: 185795 - DNA, 201 bp, Homo sapiens
aggtggttggttggtgatgtgcatactttttatttgtttcttcattttatgttaatactagtttaaagttaacttagtccgggcactatactagtcttacytgcgtattataatttacttgctattttgctcattggcttctaactaaaactagaccagctcagcaccttgcttcagactatatctccaatcgattttctg

SEQ ID NO: 185796 - DNA, 201 bp, Homo sapiens
attggaagttttttttttaatgtaagcatcattagctttttttatttatttaatttgaacttatataacataaagacctcttcatagccatactttttttraaaaaaagaattttttttcaaaaatagtttatcaacctctgtctggattcttcccatgtctataatgcttccactgtaggagaatcaattttatccttat

SEQ ID NO: 185797 - DNA, 201 bp, Homo sapiens
tctgtgtacctctctccggtgccattgtcatgcctgtgtcatttcttggtctccttcctgttgcccccactagatgctgagctccttaaaggcaagagccrtgtcttagtcagctctatattcccaggcttagctctgaaaacataataaatgtttagtggaagaagataaggaaatatgttgtatacctcattggaagtt

SEQ ID NO: 185798 - DNA, 201 bp, Homo sapiens
gcgcttaggggagggagcattcacatcccaggcggacaccaggggaagcgcctgaggttggtggtggtttcagtaggtgctgaaggccacgagccattttrgccggtgcatatggggaagggagacaatcatgacatgggcattcctgataaaggaggccaccggagttgagggttagtggtagggaaaaaaagagcagct

SEQ ID NO: 185799 - DNA, 201 bp, Homo sapiens
  misc_feature (1)...(201): n = A,T,C or G
ctaacaacatttgcccatgaggttttagatgctgaaataagatacaataggtctgaaatgttaataaaatattcttcagtgatctcctttcttagtcaacnttgctatatcctcttcctgtgtcaactcctcagaatgtgggctttccatactgacagtacccccaccatgctacatgttataggtgaacaatctaatttt

SEQ ID NO: 185800 - DNA, 201 bp, Homo sapiens
ggggcttgggcccgtgtggagcactttgataggctaagtggaaccctgattttgtgaaacttaataaactggtgctttagaaaggtgggtccaggaatggygcctagcgtcaatcagagaagataagttatttaaaagggaaagtggttaaaggctgttttaattctccaggaggaagatgctgagggtctctacattatg

SEQ ID NO: 185801 - DNA, 201 bp, Homo sapiens
cttcttctctggacctctgtgtttcctatcagtaaaataaatgtggtcagaccaaaagatgatttctaagatgacttatgccttaccattttatggttctrtgattctagatatacattttgatgattatagatgctcattaccttaagaaagttatcagaagggaatgatgaactatgtttcaaaacatttattttctta

SEQ ID NO: 185802 - DNA, 201 bp, Homo sapiens
atctgtagtaccagggttagctcaagatttcagagcatgccaattagatattttttcccttggctggtaaaagtaaaaaaaaaaaaaagaaagaaaaaaasttagccatataatgaaagaaaaggagaatttgtgtgacggtgatgttgtatcttattacaataattgaattccctttaatattttcatcaagtgcttcat

SEQ ID NO: 185803 - DNA, 201 bp, Homo sapiens
aactcccttttccagctgttatgtgacgggtaaattttgaaaatgtatcttcctgccaatctcagtttaccggattctggtcatttcaagcctgatgagakttgggttcttgaaaagggctcgagactgacatgaatcccttacacagatgtcttcacagaaaccagtgtttagccattgccacttccagcgactgtttct

SEQ ID NO: 185804 - DNA, 201 bp, Homo sapiens
ccaaatgtgatggacaatgtgattaaatccatgtatgtgacaattaactctcctgcaggtttatccaccaaggagggtgccctaggggtgagagcaaaggrgaatgagaaggaggaaaaatgggaaaacaaaaaggagcaggagagaataatgctgcagaatggatcagatacagctggcactattggttttaatctgatc

SEQ ID NO: 185805 - DNA, 201 bp, Homo sapiens
ataccctgctcctgattcaggagagggcatctaaagctttagaaaacattgaattatatttacatacattgtttttcttcttacagcattcctgagggttrttccattgttcttgtttagggtgaatttggtagaagactcagttttttatttgcaggctaaattggattatctttgttacttgcatttttacctgatcta

SEQ ID NO: 185806 - DNA, 201 bp, Homo sapiens
aggaagcactgagcatgttctcattgagtagtttttttttaaccagaatgaaggcagattgtttccattggctgaatttacaattaaatgcattggatgcwttaagtgagggactgaagctttagcatgtattctttttctttttttggtttgtttccttttggttataatagggtgggaagtaaggtgagggtcctggag

SEQ ID NO: 185807 - DNA, 201 bp, Homo sapiens
aaatcattaacgtccagcacacagcagttgtgtcagctctgcagacagaggctggcccatgtggctgctgtccccagggcttggtgtgcctgctccgagayccacctacaggtatttagccagggcaggtctggtctcccgccctgactggcaccagccaggattagagactgagtggcctggggctccctcctgtgtcac

SEQ ID NO: 185808 - DNA, 201 bp, Homo sapiens
cagcacacagcagttgtgtcagctctgcagacagaggctggcccatgtggctgctgtccccagggcttggtgtgcctgctccgagatccacctacaggtawttagccagggcaggtctggtctcccgccctgactggcaccagccaggattagagactgagtggcctggggctccctcctgtgtcaccttcgttaaagctt

SEQ ID NO: 185809 - DNA, 201 bp, Homo sapiens
aaatgtcttttgatgtgtggctagatgaagactgcagtgtatcgacctccaagaggaatggaaagtcaaagtcgcagtctctataggggaccttatgtctrccccggaccaccaagctgggactggagatctaacttctagctgtattgccaactagctctgcgacattggacaggtgacttgatggctcttagactgttt

SEQ ID NO: 185810 - DNA, 201 bp, Homo sapiens
ctgcggcttcacactgcctcgcttctcagcgggctttgaaactctgcgtgtttaggtgtccttgataggttcttattctttttgtatctttctattgctartaagagcaaattttctgtttgcactgtagagacttatttcctacattttgggaaggtggtcctcctgtggaagggcaaactccattattaggttcatgcc

SEQ ID NO: 185811 - DNA, 201 bp, Homo sapiens
tgtgaggttgaacattgtgggtgacgaatgtctgccagagcagagaactttgttgttttccctccttccctctcattgccttcattttcttcccttttagrtaataaaatccttttccaattatggaaactgtagaggtcaaaatgtgactcaggttaaaccctgtgaaaactgtagccgcctgaaattataatgcacatt

SEQ ID NO: 185812 - DNA, 201 bp, Homo sapiens
ttttcattttaatgttacctcattcaaagagtttttgcctgactaatgagttgtagttttaaagtgctatgtgtttagatcttcataatgagagattaacyggagccgtggatcacatctctgggagcattcacatgtcccatgtccagcctgccaagttataccccttgggattccctggccacagggagggatttgaat

SEQ ID NO: 185813 - DNA, 201 bp, Homo sapiens
cgaatgtctgccagagcagagaactttgttgttttccctccttccctctcattgccttcattttcttcccttttagataataaaatccttttccaattatrgaaactgtagaggtcaaaatgtgactcaggttaaaccctgtgaaaactgtagccgcctgaaattataatgcacatttttgcttttgagccaaggtagtgt

SEQ ID NO: 185814 - DNA, 201 bp, Homo sapiens
cattgagttttcacagaaagtcaatgaaatagatattcctgatcccctttagtttcagacaggaaactaaatccctgagaggtcacatgatttgcccaagyctcaggttaaatttgggaagtaccagcgctgagattcagacccaggactgtgtaactttagagacatgctctcatcttgctccagtgatagacactgagc

SEQ ID NO: 185815 - DNA, 201 bp, Homo sapiens
tggtgccatcttggctcactgcaacctccgcctcctgggttcaagcgattctcctgcctcagcctcctgagtagctgggattacaggcatgcaccaccacrcccagcaaatttttgtatctttagcagagatggggtttcaccatgttggccaggctggtcacgaagcggtgcccttttcttgttaaaagaatcttgggcg

SEQ ID NO: 185816 - DNA, 201 bp, Homo sapiens
gagtagccttgatgaccattttgcagataaggacatcgtgattttttaagaggttgaatgaatttgctagtcaagatgcagtcagaatttgagcccaggaytgtttctttcaaaactcctttattttgctggagtgtgctgcttcttccagtttgaaatgactgaactgtaatgaccagctagattataaaacatgaagtg

SEQ ID NO: 185817 - DNA, 201 bp, Homo sapiens
ggttattttctgacttacttattttgagcaatgctatcatattaagtagatattttagatagtatggacatgtctgaggaacctcctaccttgccggacaytgaggatttattcaccttgagcagaggcaggcaggtgtctttctgaattggtggtggctgagtataattgagtttcctacactttaaaaactgtactccg

SEQ ID NO: 185818 - DNA, 201 bp, Homo sapiens
cattgtttttcttcttacagcattcctgagggttgttccattgttcttgtttagggtgaatttggtagaagactcagttttttatttgcaggctaaattgrattatctttgttacttgcatttttacctgatctacccaggcatataaggatagatttgtttgtgatgtaggcagcggtgtctttcaatatagtagaaaaa

SEQ ID NO: 185819 - DNA, 201 bp, Homo sapiens
tgccacatttcaaaaagtctaggaagcacaatccctcctcacatttttatatttctggtatcagtatttgatatcagtacaatccatattatctttcaatyattttggcagaattatttttttctagtggtaaattacacagcatcttattatctctgatttgatgcaatatggtttaactgaccaggactgttactggat

SEQ ID NO: 185820 - DNA, 201 bp, Homo sapiens
agtctaggaagcacaatccctcctcacatttttatatttctggtatcagtatttgatatcagtacaatccatattatctttcaattattttggcagaattmtttttttctagtggtaaattacacagcatcttattatctctgatttgatgcaatatggtttaactgaccaggactgttactggattaaatgaagtaaggt

SEQ ID NO: 185821 - DNA, 201 bp, Homo sapiens
tggcattcacatttagataatttcatgacggttgtggggactgggaatgtagctctcttctcacttttatgcagatttttccccttagttaattactgagktgacaggtgtctgtgtggagatggtgggtggggcaggggacactgttggatgagagagacagattgcttagataacagtcatgggcatctggtcatttcc

SEQ ID NO: 185822 - DNA, 201 bp, Homo sapiens
taggtctcctttacggggcactttacccacagcttctcaggcgcatgtgtaaaacgaagtccacgtgctgtctgttcagaatagaacggagatgagtggtwagagatttagagagcagagtaatttcaggttagtgtttgaatttggtgtttgagagtagcccacaattaaatgctgtaaagtggcacaggaaagtggctt

SEQ ID NO: 185823 - DNA, 201 bp, Homo sapiens
attatcaatctctttactctttacatttaacaggaaaaaaatgtatactggtgttttgttgttattgttttttagaagtggagggggggtgtctcactgtsttgcccaggctggacttgagctcctggcctcgagtgatcctcccacctcaacctcccaagtagctgggagtacaggcatgtgccacagtatccagtttat

SEQ ID NO: 185824 - DNA, 201 bp, Homo sapiens
atctcccaggctcaagctacccttctgcctcagcctcccaagttgctgggactatagtcatgtgctacttatacctggctaattttttttatttaaaaaawttttttttgtagagatggggtcttgccatgttgtaaacatggggtcttgctgtgttttgtagagatggggtcttgccatgttgcccaggctggtctcaat

SEQ ID NO: 185825 - DNA, 201 bp, Homo sapiens
gtactggggaaggttttgtggcatctgacttagtctttgaagaggttcccaattcactcatagccaatggttgaaagactagatttcttggacagttctcraaaagagttggatatgcaggcttgaagagaagtatattttaggcacgtgcaagaatgtgggcgtagtactactttggacataacaaagaaacaacttgat

SEQ ID NO: 185826 - DNA, 201 bp, Homo sapiens
tctggttatttctgaagtcctagaaaatgaaggctgtgcttactgggggtgggagggagtgtttggggggctcttggatcaattggtatgatttttttctwgtctgtagtcttttatttttcttctctataattattattctctggttgttgacctccagggtctggttagttacctatgtcactaagaaaaaggtcaagg

SEQ ID NO: 185827 - DNA, 201 bp, Homo sapiens
tcaggtgcagctcagagagtccctcttccactctttgcctgtctcccaacctccaattcccctctctatgtcccagtctcaagtggcttgctgtcatggaygccggtcgttgctcccctgatgttgttttctcccatgattttgctccattagccattctgtaactcagggaaggtgtgcctatccgttggccaggggcta

SEQ ID NO: 185828 - DNA, 201 bp, Homo sapiens
tattttatctattttttttgagacagagtctcgctctgttgcccaggctggagtgcagtggcgtgatcttggctcactacaacctccatctctcaggttcragcgattctcctgcctcagcctccggagtagctaggaataaaggttcccaccatcacacccggctaatttttgtatttttagtagagatggggttccacc

SEQ ID NO: 185829 - DNA, 201 bp, Homo sapiens
tatgttctttaagtgacttggattttaggaataaatttttggaataagtaacagcctatctgggtattataatgtatataatctactatgtactgttatgmgaatcttggccaaggattaggaagggttaagacccgtttgccccacataatgctaaaatgtcagagaaagggagtcttcttcctttatgtctacactgtc

SEQ ID NO: 185830 - DNA, 201 bp, Homo sapiens
aactccacattacaacttaattgtatggttaggtaacaactttaaagcagttaagccaaaacccacacagccacacctgaatataccagtctcagggagayaccagctagctatattgatgcaccctgttctagcacaaccctctgctcctcaggagaaggagaagggcaggaccattggaagagttagggacctacggcc

SEQ ID NO: 185831 - DNA, 201 bp, Homo sapiens
gcagtggcgtgatcttggctcactacaacctccatctctcaggttcaagcgattctcctgcctcagcctccggagtagctaggaataaaggttcccaccaycacacccggctaatttttgtatttttagtagagatggggttccaccatattggccaggctggtcttgaactcctgacctcaggcgatccacccatcttgg

SEQ ID NO: 185832 - DNA, 201 bp, Homo sapiens
tcctcctcatgacccagctctggtttctgccacagctgcattggaaggaattgctggagctctgactgaccactgctgccagggcccacaaggagccataygcacatctatccacctctgcctgggacttctccagctctgtaggcactccttgggtccatgtacaagagcattatggaatggcagccctcaaataaggag

SEQ ID NO: 185833 - DNA, 201 bp, Homo sapiens
tttaattattcaagttaagaggaaggtaaaaaaaataatttccagttcttacctgagctgaaaaaaatgagataggtaatataagccagttcaaattacaktggaagtaagaaaactcagtttctttgtaaggatctgagtagcccaagtagaatcacatgatcatattggaaagcatcttaaagatcataaagattattt

SEQ ID NO: 185834 - DNA, 201 bp, Homo sapiens
tgctggagctctgactgaccactgctgccagggcccacaaggagccatacgcacatctatccacctctgcctgggacttctccagctctgtaggcactccytgggtccatgtacaagagcattatggaatggcagccctcaaataaggagggatgggagctggtggatagataccccaaactgctgggttctccttcaagc

SEQ ID NO: 185835 - DNA, 201 bp, Homo sapiens
ctttggctctgcttttggagcaacccaaagtaattcagtattgactttttttcacagtactaacttaaagcttatattaggccaggcctggtggctcatgsctataatcccaggccaaggcaggcgggtcacctgaggtcacgaggtcaagatcagcctggccaacatgacaaaaccctgtcttactaaaaatacaaaaat

SEQ ID NO: 185836 - DNA, 201 bp, Homo sapiens
acatgacaaaaccctgtcttactaaaaatacaaaaattaaccaagcttgattgtacatacctgtagtcccagctactcaggaagctgaggcaagagcattscctgaacccaggaggcagaggttgcagtgagccaaaattgagtcattgtactccagcctgggtgacagagtgagactctgtctcaaaaaataaataaata

SEQ ID NO: 185837 - DNA, 201 bp, Homo sapiens
cttgaagcagtgttctttgcttgaagattatttcttttggattttactcttcatcagaaagtagatgttatgatcagctgtgtccttggataaatgtgttytctcctgtgccctggagttcatcttttgctttcgtgttaagcctagacccttttttacctctgtctctctgaatcttccctaacttgatcccaactttcc

SEQ ID NO: 185838 - DNA, 201 bp, Homo sapiens
tgagtagctgggattacaggcatgcaccaccacgcccagcaaatttttgtatctttagcagagatggggtttcaccatgttggccaggctggtcacgaagyggtgcccttttcttgttaaaagaatcttgggcgaggcgtgtatcgatgaaggctgcatctgacctttcactggcagttcactaacttggttctggccaac

SEQ ID NO: 185839 - DNA, 201 bp, Homo sapiens
ccttctttcttctctctgcatacattaatacaaggggcatctgaaatttcagcagaagcaaatgtcaactgtaccaagctgaggtagcaattctaggggtrgtgtcctttccaaatgtgttgttttatgaagatataagttttacatgattcttcgtgtcagcagttttgccacttgccatcgtttaagaagtctattggg

SEQ ID NO: 185840 - DNA, 201 bp, Homo sapiens
actcgtacattgttgatgggagtcctaactggcgcactccctcttaggagatccatttggccctatctgttaaaatgtaaaacgcacaaaccatttgactrgcaattcagctttcagaaatttattctaaaaatgcttgcttctgtatgaaaagacataagtatttcctttatagagttactgattttagcaaaatattgg

SEQ ID NO: 185841 - DNA, 201 bp, Homo sapiens
aaacctcaaagagtttaagtagtatcggtatacctcagccttgtactaaggtaaacaaaggacataaatctaatgaagaaataacacctatttcagagatrtgctcactgtgggcgtattgaaaaagatattgcctgtaaagctcttggcatatgcttcatggtaagttctcaactcttagctgtgttaattacattttct

SEQ ID NO: 185842 - DNA, 201 bp, Homo sapiens
cttggcatatcagccatgtttatcttggggcagtgtagaacaactgcttcccagctccatgtgtaggcaagccctgttttgagaagcaaagctttctatcyataaattaaggttgggatctgatattttgatggtttctatgatggtttgatggtttcttttaagttgatgaaactgaatttggcttctaaggtgtgtcac

SEQ ID NO: 185843 - DNA, 201 bp, Homo sapiens
gtaaacaaaggacataaatctaatgaagaaataacacctatttcagagatatgctcactgtgggcgtattgaaaaagatattgcctgtaaagctcttggcrtatgcttcatggtaagttctcaactcttagctgtgttaattacattttcttaacagagccattaactgataggtgactacacagctcagtttgcccagga

SEQ ID NO: 185844 - DNA, 201 bp, Homo sapiens
aagctttctatccataaattaaggttgggatctgatattttgatggtttctatgatggtttgatggtttcttttaagttgatgaaactgaatttggcttcyaaggtgtgtcaccatctcttgacatttgacctgtgaaagcattagttccctgacagcgtatgactgtactctagaaaggtgttgtctgaatttttacttc

SEQ ID NO: 185845 - DNA, 201 bp, Homo sapiens
ttgcctgtaaagctcttggcatatgcttcatggtaagttctcaactcttagctgtgttaattacattttcttaacagagccattaactgataggtgactayacagctcagtttgcccaggacagtcccagttagtgcctttaaccttcctaattagcattgtcttggggttctcatttttttattttattttatttttatt

SEQ ID NO: 185846 - DNA, 201 bp, Homo sapiens
tctagaaaggtgttgtctgaatttttacttcccaatcagtattctcacttcaggattttcattgctttaagtgactcttgtatttacaaagcccatatccrtttcaattctgctcccatctgattctttgtgatctgtttagcagcccaggcctgaaagaggaacaaacagagagggaaatgagaataagaaatgaattaa

SEQ ID NO: 185847 - DNA, 201 bp, Homo sapiens
ggctgatcttgaacttctgacctcaagtggtccgcccgcctcagcctcccaaagtgctgggattacaggtgtgagccaccacgcccagctggtttctcatkttttaaaataaagtatcattacgggttgcattaaaatatgccagaatgggcttgatagacctttgctttgtcctttgagcttgcctgcccctccagtcac

SEQ ID NO: 185848 - DNA, 201 bp, Homo sapiens
caattacaccctttattttaaaatgtacaattgttactgactatattcaccctattgtgctatcaaatagtaggtcttattcattcttcctattttttcakattagtttttgaaagaaaatatatgcgtgtgtttcctcatgcactgcagatatttcccacaatttctttttcacccttgcaagtttttgatgtttgtaaa

SEQ ID NO: 185849 - DNA, 201 bp, Homo sapiens
atttcttttgtaaaacagtcattcctcacacaaaatcagttaaagaattaccagtattttttatttgtttttctttttaaacaggtaacaaaactctgtayattctattttggcacatgacaggaagtaaatatcacttcttttttttttttacccaaatagtttttcaacactattttgtatgtaatttattccttctac

SEQ ID NO: 185850 - DNA, 201 bp, Homo sapiens
aaaataatgagttcactgattcaaaagtaaaacccaacttttatggatgttgttttaatagacctatagattatatagaataaaatagtttggattttttycactagattcaggtagagttatctttttaaaaaattattcatgtgaatttcctactaactaacttgctctcacgatgtgctgtttttcatttcctgaatt

SEQ ID NO: 185851 - DNA, 201 bp, Homo sapiens
atgtacagatatttatatctttacacagaatgattgaactacagatttttttcaatactgaagttaaatacaaaaacacacctcactgtgggaagaacacrcttgctctctttgcccccgtcattgatcagattttagaaatatgtcagcctttgaaaaacttctttgtatctcactgtaactatgctacactggtaatga

SEQ ID NO: 185852 - DNA, 201 bp, Homo sapiens
tcttatgtggctatgggtggttggcctaaggatatgcccacactgtggcctccgtttgatttttctttaacaataacgatattaatagcaaccaaatactsactgagttcttattaggtgcctttcacatctacttatcacagtgacccagaattgatgttgagtctgctttgctatgcatttgctatgcaatgatgaggc

SEQ ID NO: 185853 - DNA, 201 bp, Homo sapiens; identical to SEQ ID NO: 32398

SEQ ID NO: 185854 - DNA, 201 bp, Homo sapiens
tgtttcatcatattggtcaggctggtctggaactcctgacctcaggtgatccacccgcctcggcctctgaaagtgctgggattacaggcgtgaaccaccgygcctggcctacatttcagttattcttgatgtgttttaaaagtgtgcattccataacagttggatataaaaatatacattttataactagaaattgtacac

SEQ ID NO: 185855 - DNA, 201 bp, Homo sapiens
actctgccttatgccccttggtggaattctttcttctgaggaggaaagaatcgagttgctggagatctctatgggttagttgctggtaacgggaagctttytgttacctgacttggatcagcttaaagggagacaagaaggtaggggtgggaaattcctaagcaggaaagcattcaagatgtggccagactgcttctaaca

SEQ ID NO: 185856 - DNA, 201 bp, Homo sapiens
gtatggtgggggtaggcaatccacaaggaaaatgagtaaattatatatctagtgtcatcaggtcataaatgatagagtgaaaatgaatcagggaaggagamtaggaaattctgagtgtgggagtgggggcaggggtatttcagtttaaaataggacagtcaggctgggtgcggtggctcacacctataatctgagcacttt

SEQ ID NO: 185857 - DNA, 201 bp, Homo sapiens
attctttgcattcaccttaaaatactgatcttaatagatttttgataactaaatgtataccttttgtttttgttgcttttaagtcatttattcatttagartctacatgttagctttggtttatttttaaggaattaggaaaatattttaattttagcaagagaatgctcagtctccctccttgtttacccttacccccaa

SEQ ID NO: 185858 - DNA, 201 bp, Homo sapiens
tagttctgatctactttttttttttttttaaagcctttgctgtcttttctgttccttcccgtggttgactgattagtaatgtgtcttctgtcaccttcctrtagaacaggtgatggaatttagatggggcctttgtcctgttatattttgcccactggcatcatgaatgagctgtttagccacctggagaagaaaatgcaa

SEQ ID NO: 185859 - DNA, 201 bp, Homo sapiens
ggtgcagtgagctgagattgcacctctgcattccagcctgggtgacagagtgaaactccgtttaaaaaaaaaaaaaaaaaaagattgatggtcttattctmcatatttttttgagtctatttctatgatattttcagtattttacttagatgggctttaacagatttaattttctcttttattttgcttggctgtcttaat

SEQ ID NO: 185860 - DNA, 201 bp, Homo sapiens
gtcttcagataggcctaccagtcactagtctcttttgaatttgatttttgattattaattgctggttattattatagaaagtttttgcattttatgtatartgaacttacgttggaataaataggttatgaaaattttataaaattgtaataaattgccatagttttctttgaagttgaaaagcatataatgccatgcaca

SEQ ID NO: 185861 - DNA, 201 bp, Homo sapiens
tcatccatgttgcatgtattaatattttgttctttgtaattgctaagtagcattctattgtgtagatatatcacagtttgtttatccattaatcagctgayggacgtttggattgcttccagtttggggctgttgtgtattaatgctgctgtgagcattcatggacacatctttgtctgcataatgtgttcatttctcttg

SEQ ID NO: 185862 - DNA, 201 bp, Homo sapiens
tgtgagataattaatgtttgttgttttaagcttcaaagtttggggataatttgtttacacatcaatagataaggaatacaaggagagttccatcttctccwtaccctcagcaacattttatattgttggttctctttagcgattctagtagttatgtgatggcacttactgtgtttttgttttgcatttctctgttgactc

SEQ ID NO: 185863 - DNA, 201 bp, Homo sapiens
ttggttctctttagcgattctagtagttatgtgatggcacttactgtgtttttgttttgcatttctctgttgactcatgatgttgagcctatattcatgtktttgatggctatttgtgtatcttctcttgtgaagggtttgtccaaatcttttgcccatttaaaaaattgagtcatttttatgttttcattttgtgttttc

SEQ ID NO: 185864 - DNA, 201 bp, Homo sapiens
agtaagtcttgcggtaactttctagcagcatttcgatcatacttagctttaagttctccatcccctgcattttcctaaagtgacgtcgagttaagaatcaygcgccattgatggtaatcctccagcctgcactcaaaacgttttccgtatcattaatcgcttccctgtctcttgccagttactgagggttccataaacaca

SEQ ID NO: 185865 - DNA, 201 bp, Homo sapiens
catcccctgcattttcctaaagtgacgtcgagttaagaatcatgcgccattgatggtaatcctccagcctgcactcaaaacgttttccgtatcattaatcrcttccctgtctcttgccagttactgagggttccataaacacagtgcttccccatgctgcaggagtccttccccgaaagatatgagcgtttcttcttctgc

SEQ ID NO: 185866 - DNA, 201 bp, Homo sapiens
ctgccagctagaagatattgccgtatttcctcacaaaagcagagtagggagtgacaaattataggatgagggcccaatggtaggtacacaaaatttaattycaaaattgtataatttttccttagaacaactacgttatggaaataattttttcatgagacttctgtattttactggataaatttttattctatatcacaa

SEQ ID NO: 185867 - DNA, 201 bp, Homo sapiens
attaaggtttccgcttctttcagtaggaactctgggagctcccttttgtttccagtcaaggctaagccatcttctgcccttctgcctgggtgctgctatgsttgtaaatgaattggctgttgcggggaggaggaaccatctgcctgggggcttgacagggaatagaagacacaaaatggatgaggaggccgggcgcggtgg

SEQ ID NO: 185868 - DNA, 201 bp, Homo sapiens
gtatgccaagaccaattactatttatattacttttaaatgtttataattaacataaagaatgtaaagaatataaagtttttatattttgccttaatgtatrtggacttttattttttcttttttgacatagggtctttctctctgttaccccggctggagggcagtggcacaatctcggctcactgcagtctttgccacct

SEQ ID NO: 185869 - DNA, 201 bp, Homo sapiens
aaccatctgcctgggggcttgacagggaatagaagacacaaaatggatgaggaggccgggcgcggtggctcacgcctgtaatcccagcactttgggaggcygaggcgggcggatcacaaggtcagaagtttgagaccagcctgaccaacatgatgaaaccccgtctctgctaaaaatacaaaaaaattagccaggcatggt

SEQ ID NO: 185870 - DNA, 201 bp, Homo sapiens
gcttggcttggataactgacatttatccgtcagccaaattcagtggaaaaaagtatggcaattggagttagatctggatttctgatgcttgccagtcccgyttcttcactatgtaaccacagtgcctcgttttctctttctttcttttctcttttttttttttttgaaatagagtttttctctgttacccagactggagtg

SEQ ID NO: 185871 - DNA, 201 bp, Homo sapiens
cagtaaatcttcagtgttgctcttggcaatccagagtttttcacagagagaggctaagaggctaaccatatatttaaagactgccccctttcctggatacrtgtctactgtaaatggctttgatttttcaacataggatgactttttccagttttgcacatttgagtgcatgcacactgctgtttggagttttagatcttt

SEQ ID NO: 185872 - DNA, 201 bp, Homo sapiens
tttctcatttaatgtggagctctttatggtggtgttaactgtaattttagctctacattttgtgaggcccgccagtgttgggctggggattaaggagagtrtcatctggatagatggcaagaaggcagcaccgctagatttttataggacaaccaaaggctggggtttggaggggttttttgtttgtttgtttggttggtt

SEQ ID NO: 185873 - DNA, 201 bp, Homo sapiens
aaagaaataatagtataataaaaaaaaaacgccattataattatttttattatgcgtctgttcttccaccagatgttttgctggaggtgttagtaagaagrtaatcagcttttagagatgttcctctttgatctgctacagaggtgaaaaatcttaaaggcaagctgctatttttgattttgaaaaatctcagaaagaccc

SEQ ID NO: 185874 - DNA, 201 bp, Homo sapiens
gcacactcaccagcgctggccgcgtgagaagcgagtacgtgagtgctgacacagtgatgagcttgaccccatatgtagtagaacgggttcccagccttgtktctgagccccacccacccccctcttgtcctcttgtccttttggggattcactgtcagaggagatgacctcaggaagttaatgagccaatgagagatgagc

SEQ ID NO: 185875 - DNA, 201 bp, Homo sapiens
agaccttatttttcaaatgccttgtcaccagaaaccacgagccattctcattaaaagactctggaggagtactggggatggtggcagggcatggcggtgtkggagagcaggcctggagcagcagtgctcactggccggggcgtcctgtccacctcaccctgactatcagggacgtgcagtcacctagaagtctcttccctc

SEQ ID NO: 185876 - DNA, 201 bp, Homo sapiens
gagctcagaggggactgagcttcccttctctctcaagacacaggagggagaaggagaggccagatggcacaagtgtcccacactttcaccccagattggtycaacgtttagtcaaaccagcacatgaatggtagagggacagaagtaagaacaagaaagaatgatagatgccaagatgaagattttgtacatgagaaggta

SEQ ID NO: 185877 - DNA, 201 bp, Homo sapiens
aagaagacatgagtacgtttttattcactgaggcccatagtacttgggtgaataaaattcatcatcacctccagcggtgattttctgtgtatttgggtgtmattgcatcattggagtcattaaaattattttatatgaagggccagtttatacaataaataaagtagaattgctgtggtttcctcagggactgagccctat

SEQ ID NO: 185878 - DNA, 201 bp, Homo sapiens
cacaagtgtcccacactttcaccccagattggtccaacgtttagtcaaaccagcacatgaatggtagagggacagaagtaagaacaagaaagaatgatagrtgccaagatgaagattttgtacatgagaaggtatttaagggatcttgcaattttcctgcaggagaaaaagagaaaatgaggagaaggaaagcatttgtgc

SEQ ID NO: 185879 - DNA, 201 bp, Homo sapiens
agtttgtgtgtgtgcgtgtgtgtgtgtaatccattttatgaatataccactgtttacccttctgttgatggatatctggactgcatccattttggggctgytatgaataaagttgcagtgaatatacaactctttttcttgtgagtattttttcttggttaaatacctaggattagaattgaatcatgcggtaggtgtacg

SEQ ID NO: 185880 - DNA, 201 bp, Homo sapiens
tttgtgctgtaagaactaacctataaattatacttaaataacttcctcaataagcataaatcatgcagttacataaaatcatattgatttcattatgttcrtattaatacattttaatttttaggtgcacatgcctgaaggcacaaggctcttaaacacataataatcaaaaagctaattaatcacaaatgggcaagtttc

SEQ ID NO: 185881 - DNA, 201 bp, Homo sapiens
tgacttgtaggtttaattcaattcatatgaaaatatcagcaaagtttttttttcttacaaacatcctcgatgatacagttaaaatgattaaacttactaamtttcaacccttgagtactttttagaaatgtatataaatatttcagtaatctttgtattttacacccttgctcttttactaatgtcttcaattagcctggt

SEQ ID NO: 185882 - DNA, 201 bp, Homo sapiens
tgttccttcccgtggttgactgattagtaatgtgtcttctgtcaccttcctatagaacaggtgatggaatttagatggggcctttgtcctgttatattttrcccactggcatcatgaatgagctgtttagccacctggagaagaaaatgcaatctctttctctctgtttgatctgtcatcatggcccaggaagaagatgtt

SEQ ID NO: 185883 - DNA, 201 bp, Homo sapiens
gtctgaaaggcagagcgaggtcaacactgacagaatgggactaaaaacaatgtgtgggaaataattcagcattatcaaagtgaatttcagagagcatcagytgctgcttggggcctggggtcacacctctatagtcgctggtcttggagagagggttttacccctgaacctactgccctactctgaacctattgcccgaca

SEQ ID NO: 185884 - DNA, 201 bp, Homo sapiens
ctttagtttcagacaggaaactaaatccctgagaggtcacatgatttgcccaagcctcaggttaaatttgggaagtaccagcgctgagattcagacccagkactgtgtaactttagagacatgctctcatcttgctccagtgatagacactgagcacccagtgtgcagcaagcagtgggttgtatgctggaaatataaaga

SEQ ID NO: 185885 - DNA, 201 bp, Homo sapiens
gtttggtgaaatcaagttttattggatgattcagtgtgtaagagtgtcataaatgagtttttcactattactggagatttaagtttttggagaaattgtgygaccagtaatcaaaaggtataaaacatttagccaattggaaagtgaaaaattattaacatttgatatgtaaacataggcctcattttaatttagtcatat

SEQ ID NO: 185886 - DNA, 201 bp, Homo sapiens; identical to SEQ ID NO: 32391

SEQ ID NO: 185887 - DNA, 201 bp, Homo sapiens
ctccaattgcagatgcgtgggttgggttggagaggggtggatggcaggctggaaaacctgatggaggctatgggaatatttcctaggggagagggtggacrctatgaggtggcggtggttgggatggagagaaactaggttcacgaaggaatccagaggtcaaaatcagcaagtcctagtgactcatctcatgtgacaggt

SEQ ID NO: 185888 - DNA, 201 bp, Homo sapiens
tgtttggaaagacattgtttctagaataactaaaattttaaaagaggttagtcagtaggatcactttaactgatgttcctatctgctatagcgatagtaaygaaggcactgtggcatttgcgaaaggttagacacagagatcagtggaacagaatagggaatccagaagtagatccccataaatatgcccagtttattttc

SEQ ID NO: 185889 - DNA, 201 bp, Homo sapiens
cacatactttattggctagaatgagtcacgtagccccattagactatagaggggccagaaagtgtagcacaaggaatattcgtgtaacagtatgttctctsccgtgtcatcttggaagtaattgacagcagtagtaacagcaacaacaaccaaaagggtttgcaatagtataggttctctctaatttgtaaatggatttta

SEQ ID NO: 185890 - DNA, 201 bp, Homo sapiens
ataaggtgtttaaactggtgaattttaaatatgagagtcatgaggtcatgtttgcattttacttagctctaggctgtgtgggtgatggtgcaccaggctcyacagcagaggctggggtactggttggaaggctgttgttgctgcatccagggagaaaatatgaggggttgcataagggcagtggctataactgtggtgatc

SEQ ID NO: 185891 - DNA, 201 bp, Homo sapiens
tcccaaagtgctgggattacaggtgtgagccaccgcgcccggcctatgctagtggttttcaagccgtagctggcatgagaatcaccctgaagggttattarggtacagactgatgtgccctgccccagagttcctattttttgggtctagggtagggcttgagaatctaacatcttctctggtgatgtcaatgtcactggt

SEQ ID NO: 185892 - DNA, 201 bp, Homo sapiens
cataagggcagtggctataactgtggtgatcaggatttggagtttggagcaagtagtcaaacgtgactcttggattcctgttttgggtgacaggtgggcasttgtgtcacaaaactgagattttgaatttcagagaagtagactatgtattgggaagaataaagagagagttccattttggaaatgttgatataacttgga

SEQ ID NO: 185893 - DNA, 201 bp, Homo sapiens
agccacatgtagttcagagctgtccagttaggaaagtgcttgtgtcttgctttcttagacttgcatagttatttctttatatttggcagtgtgtgaacaamgtgacctgtcctgttacaggacatactctaaaaattcttattaagaaaaacttcaaacattgcacaaaatatagagaataatataagaaataccctgttc

SEQ ID NO: 185894 - DNA, 201 bp, Homo sapiens
gataattttactttttttaggttttccttttttttttttttttttttttgagacagtctcactctgtcacccaggcgtgatctcaactcactgcaacctcygcctgctgggttcaagcagttctcctgcctcagcctcctgagtagctaggactacaggtgcgtgccaccatgcccggctaatttttttgtaattttagta

SEQ ID NO: 185895 - DNA, 201 bp, Homo sapiens
tccagttaggaaagtgcttgtgtcttgctttcttagacttgcatagttatttctttatatttggcagtgtgtgaacaaagtgacctgtcctgttacaggasatactctaaaaattcttattaagaaaaacttcaaacattgcacaaaatatagagaataatataagaaataccctgttcacatcaccagcttaagaaagaa

SEQ ID NO: 185896 - DNA, 201 bp, Homo sapiens
cactgcaacctctgcctgctgggttcaagcagttctcctgcctcagcctcctgagtagctaggactacaggtgcgtgccaccatgcccggctaattttttkgtaattttagtagagatggggtttcaccatgctggccaggctggtcttgaactcctgaccttgtgatccgtacgcctcggcctcccaaagtgctgggatt

SEQ ID NO: 185897 - DNA, 201 bp, Homo sapiens
tgatgtgctactctaatttgagccaggaataaagtatttacatatttcaagtatttgttagctagaggcataaggagacaaggccagatatgggatcgaaygaaatagaaaggagaagagaactgagtacagacatttgggatgaagggaggagagaaggaaggttgaagtaaaacatagtgataagcattgcattcaatg

SEQ ID NO: 185898 - DNA, 201 bp, Homo sapiens
gtgccaccatgcccggctaatttttttgtaattttagtagagatggggtttcaccatgctggccaggctggtcttgaactcctgaccttgtgatccgtacrcctcggcctcccaaagtgctgggattacaggtgtgagccaccatgcccagcctttttagatttataatgctgttttctgagcagtggtcataatattcac

SEQ ID NO: 185899 - DNA, 201 bp, Homo sapiens
gggaagggtcaggtagggagaagagaagtagggcaaggacaacagagggcttttttgactggtagagttggaatccaccagcatgggtgtgaccagtatayatatgctatcttttttttttttttttctcatgggagtgctttggtggatttcttggagattccccattagtgactttggattggaagcccgggcatgggc

SEQ ID NO: 185900 - DNA, 201 bp, Homo sapiens
atcagctgggtgtggtggtgcacgcctgtaatcccagctactcgggagactgaggcacaagaatcacttgaatctgggaggcagagggttgcagtgagctragatggcaccattgcactccagcttgggtgacagagcgagactctgtcaaatgataggtagatagatgatagatagatagattagatagattagacagat

SEQ ID NO: 185901 - DNA, 201 bp, Homo sapiens
tcagtggtatgcctgtgggctctttctgctgcggtcggctcagccgctgcatcagaccttatgcatagggcacttttcatggaggctcacagacagctgckgcgtgcttgggtgccaatctaggctacagcaaactcacaatttttctactgttacctagcacactttctgtgtgtgcctgtgtgtgtgttttctcagctg

SEQ ID NO: 185902 - DNA, 201 bp, Homo sapiens
aggagcctgcctgaaaatgaatgagaaacaagtggaattcagaatagtcccccagctccttatcccacatggagttttaatttccttttctcctcctcttmctcttcctttttcaaagaatagattgaaaacaaggctgtgttataaagcatgctcagccccctccgacctcattgctgcctgacatatccctggaataga

SEQ ID NO: 185903 - DNA, 201 bp, Homo sapiens
actactttgtcactagatccattatggggagaaaatggagctttggaaatatcactgtgagttaaataaatggtatcttttcttagctaaacagtgatttrgaaatgtataacataaatgttcataatgggtttactccatttgatttggaaaaacattccttttaaggatagacatattgtccaaaacattgtctgaagc

SEQ ID NO: 185904 - DNA, 201 bp, Homo sapiens
aggtgactatcatgggtgagaatttgagaactctggagtttaggaactcaggggacactcccaaccacctatagtgtggctcccaaaccttccctgtgccrtctttcactctaactatatcgactgacctccagtccccgaacgctctatgcttttatataatgtgttttagactattagcagaagtcaccaggcattgta

SEQ ID NO: 185905 - DNA, 201 bp, Homo sapiens
taacagttggatataaaaatatacattttataactagaaattgtacacatttttagttctttggaacatgtaaacccagtgttgaacttctgtacattaartttttatcacctttaacaggaatgtgtcgtgactgaaagtggaggatgagctggtatgacatgggttctgtctagggattctcctgtgggagggagagga

SEQ ID NO: 185906 - DNA, 201 bp, Homo sapiens
gtagtgtcagttttaccacttgagaatttcagaaatgaagtttacctccccagtccctttaaaagataaaaacaaattagctcaaattctaaccacagccrtaagtggtccttgtgcatggcaatggctaagaatgggcactgcctgcttctgaggtgtcctctgtctttgctgtgagcggcgtgacagctgtgccttccg

SEQ ID NO: 185907 - DNA, 201 bp, Homo sapiens
atgggaagatgtgttttgacttaaaaagaaattttatcaagaacttactaggactacatctattgaaaaatgcaaggtaggctaatattcattaggagagrgcaggcaatggaaatagcaggggtggactggaaccaggtaggagtcaggtgaacctggtttgaatcctggtgctgccacttaagtacttttggtcatttg

SEQ ID NO: 185908 - DNA, 201 bp, Homo sapiens
ctgcccagcctctattctttttagcctttggaacctctactgacaatagataatgaatgtaccacttgacattctactcctattcacatctttagagatarcagtgttacctatgggaaggaaatattaaggcgagcaatccataagacactaaaagtagtgagacccataggagagagggaacttggaagaggatgtgtg

SEQ ID NO: 185909 - DNA, 201 bp, Homo sapiens
gaatgttctgaatttagaaaaattgatgtcagtattcaagacatttttagtgaaacagagaagatcaggctagagaatgcttatattacctgaaccaaagragccacagaaactaagcacagttgaaacttggcgagataggacaatggttttaaagtttaatttaaaatataatgaatgtctatttagaatatttggaaa

SEQ ID NO: 185910 - DNA, 201 bp, Homo sapiens
ctcaagtggaaggaaagagttgtctctcagttgcttttcctttgggagtgagatgcagtttgattttctagtttgtttttaaatgtcatcttttaattatrttttggataatgatgaagagagatgcaatttggttatgagaataaatcttaaaaggctcaatgactcctttatctactgcttaaaacaactccctctagt

SEQ ID NO: 185911 - DNA, 201 bp, Homo sapiens
taaaatagaaaataagcaccagggataaattgctatgaaatcttttggctagttcttctcatggtttctaaatatgatatgcatgtgtttataggtaggtrtatatttatagagttaagatcatatcgtacatacaattttatatcctgtttatcactttatgtagttgtatcattcaaactcgttgcaaccattatattt

SEQ ID NO: 185912 - DNA, 201 bp, Homo sapiens
atttcccaacactcacaactctgtacaatgtttcaacagtgtttcctcaaactcctcttatggatatgactcacattataaaaactgatatatgaagaatscacattaagttgaaagtgattatttgaataatgatcattttaatgcacttaaaatatcactcagatttttaaagtcttgcctataaatttgggggaatat

SEQ ID NO: 185913 - DNA, 201 bp, Homo sapiens
gtgtgagtattgcatctggtggttatggattgtgcttgaacacttttgtctagtggtgaccatatatgggttatgcctgctcaccattggctatttccctkaagctaattatgctttagggaaatgatcagtccagtacagtttgtgtactacttaatgttttctttacacagaagaatgagggaggttgaaaggactgtt

SEQ ID NO: 185914 - DNA, 201 bp, Homo sapiens
tggccaggatggtctcaatctcttgacctcgtgatccacctgcctcagcctctcaaagtgctgggattacaggtgtcagccgctgtgcccagcctaagtcrcagtaattatcatttgaatgagtaaatgaatattagagtaaagcagctgaacagactttgcaagataagccactctaatggcttctcacagcctttttaa

SEQ ID NO: 185915 - DNA, 201 bp, Homo sapiens
tgcaaccaccacataaataagcccaagctagctggttggatgatgtaagagaaccaaactgccccagccagcaggcagccaacaccagacatgtgagttcyggcaggccacatatgcatgagtaaacccagctgagagctgaagaactttccacctaagtccaaagggccagccaactttgagctaagtgaatagttgttg

SEQ ID NO: 185916 - DNA, 201 bp, Homo sapiens
actgtgtgctctgatttgtaagcctgcatgccatgaaagaggcaatgaaggctgccaggcacttctagcattttaatggagggaaaatcaaggctgccacrgaagatgggaaataggaagtggataggaaattagccttcaccttgtttcatatttgttttgggtccagtccaatttggtagttagtacaaattactaatc

SEQ ID NO: 185917 - DNA, 201 bp, Homo sapiens
ataatgtataaatatataattaaatatataatttatacatagattataaatattaataaatgtcaatataaatacagggctgctgatctccagctttttgstcctggtcacatgttagctactgcagctccaggcattatattcttgagtgatagcatctgatgtgggaagaaagaaggaagtagttcagaagggcctttt

SEQ ID NO: 185918 - DNA, 201 bp, Homo sapiens
aattagccttcaccttgtttcatatttgttttgggtccagtccaatttggtagttagtacaaattactaatctaaactgatgatgctactatatattctgygtatagttaaaaaattatgctcatgtgtatgtatgtatctaatcttcttatataaggtgcatctgtgttcattgcttcgtttactcctcttaataaaaac

SEQ ID NO: 185919 - DNA, 201 bp, Homo sapiens
ccatgtaaggaggattctcactgcgcaggaccgttgggaattgcttcatgcactgctcattagcacgtgcttcagacactgcagttttctttattaaactycagagaaccaaaatctaggactcaggaaggaaaggggatggtccaaagtgagtttttttgagatggttgtgaaagttttttgcagtaagttgattagaat

SEQ ID NO: 185920 - DNA, 201 bp, Homo sapiens
cctcgcaaggtagatcattttgacttcagccatgaggaatgaggtcccgaaaggtttagtgacttacccaaagttgctgaagcagttagtaacatgcctaraactggaactcagctcttctgaattcattgcctgtttttctgtattctgctttttttcatgacactcctttctacgtgggacctgcttatgacccaaagg

SEQ ID NO: 185921 - DNA, 201 bp, Homo sapiens
atacagctggagaaatgtttcaggcaggagattgatctttgggcagagcttggaaagtcaatcatccggtggcgagtctccgaggaagcagttcaagtatygtgactggaaagcaggggatgaaggactacatgcatggttggaagagaagaaatcggaatttacctagctgtgctgacctttctaggcctgcttctggat

SEQ ID NO: 185922 - DNA, 201 bp, Homo sapiens
ttaacgtgtctcctgaaggaaggatacaataccaactatagagtctcccccaaaatgttggacttgagtctgattaattctctagacccaactaccatatktgtaggacatattcaggctgtgggaaattgtgtagcaggtctactggaggtgtgatctgcagaatgaaataaatagaggactcaagagtaagtactagga

SEQ ID NO: 185923 - DNA, 201 bp, Homo sapiens
aggtctactggaggtgtgatctgcagaatgaaataaatagaggactcaagagtaagtactaggaaatgtttaaccaatgctaagggtttagaaatgtttaygccattgtattcaagcacgttattagtggacttcttttgttgaacagtgtgtgtggatgggttcaagtgtccttaaatactcttggtgtgttgagtgtgc

SEQ ID NO: 185924 - DNA, 201 bp, Homo sapiens
gataacgtgcttgccagcccaacctgcatagggacctatacatggtcccatccagcagaaacattctagggccctgtgttgtgagtgatgtcctggtcagragtgaaatcacttgatcatgtgtaataaggaatcacgtcttccataccttttcatatttttttatccatgaggctctattagtataaatgaagtgaaagg

SEQ ID NO: 185925 - DNA, 201 bp, Homo sapiens
aactattaaaattgaatttccacattgcagttttgacagtttatcagtgattcatcaccataatctcttactctccatccttgccctgtgaatagattcayacctggaagcagccgtctctttagaaaagcttctatcctttcctgatttttcctgagtgcctggtcctcccaaaactcctatcttttttgtcctgactca

SEQ ID NO: 185926 - DNA, 201 bp, Homo sapiens
cttaactttagtgggttgaaaaagacaggtgctatttcctcaaacaatattttggctgctggtgatcgactcttagagcaagagaaacactttctaacatygatgtgggattttgtgtgtgatgtgtgggtttcctgagctgctgagcttttccacaatctcctgctctattacttcgtagcccactttcctttaataccc

SEQ ID NO: 185927 - DNA, 201 bp, Homo sapiens
gcatgggagtctgcccctcatccccgcctaactcactgtccatccacctgtgtctcctgagttcttcccatcccacacatggctcagccttgaatgtaccrtagctcccacagttaatgatattgtcttgaaaacgaagagatttatgaatttggatacatcctggccccttcagagggaccattatcttgactgtagatc

SEQ ID NO: 185928 - DNA, 201 bp, Homo sapiens
ccatgagatttctttacattagcaatgaatatgtggaaaccaaaattccaaacagaatatcatttgtaatcactctcaaggaaatgaaatacttaggtatraatttaacaaaacatattggatctgtatgttgaagattacaaaaacctgatttttgcaaaagcatctaaataaatggagagacacgttgtgctcacaggt

SEQ ID NO: 185929 - DNA, 201 bp, Homo sapiens
aacttactaaatttcaacccttgagtactttttagaaatgtatataaatatttcagtaatctttgtattttacacccttgctcttttactaatgtcttcarttagcctggtacatttgatgcaattaaggaaccactattgttacattattaacgaaatccacacttcattcagattttctcgttttttacctaataccct

SEQ ID NO: 185930 - DNA, 201 bp, Homo sapiens
acccaacattcagaagagaaatctactgttatgtgagcacctacctacacaaaccattttactggctttcgtggaataattatagtcaaccaggaaatcarcaatgacaacatagaaagcacacagatgtcagtagcacttcctgatgttttgaaataccttgaacatagccgtcctcagttaatgtttcagcatgaatct

SEQ ID NO: 185931 - DNA, 201 bp, Homo sapiens
ggcagaggttgcagtgagccaagattgtgccattgcactccatcctgggcaacagtgtgagactctgtttcaaaagtagtagtagtaataataataataakaataagaagaagaagaagaagaagaagaagaatgttaattgctaggttgttttagtgttccttgtagcagttgttttggaaacatgcgagttcattaaat

SEQ ID NO: 185932 - DNA, 201 bp, Homo sapiens
gaaggattttgagacttacatgtttgagaaccactgttctatagcttccaaacgaaatttttagaaaacatttgagacatttagtttgcaaagaatggtgratttcaagtatttggcaggcccaccagaggaaactcttacaaatcctgtgtctatttaatctgattaaaaatgtcagttgaaacatgcatgtgtggacca

SEQ ID NO: 185933 - DNA, 201 bp, Homo sapiens
agaggttgcagtgagccaagattgtgccattgcactccatcctgggcaacagtgtgagactctgtttcaaaagtagtagtagtaataataataataataakaagaagaagaagaagaagaagaagaagaatgttaattgctaggttgttttagtgttccttgtagcagttgttttggaaacatgcgagttcattaaattga

SEQ ID NO: 185934 - DNA, 201 bp, Homo sapiens
ttacatgtttgagaaccactgttctatagcttccaaacgaaatttttagaaaacatttgagacatttagtttgcaaagaatggtgaatttcaagtatttgrcaggcccaccagaggaaactcttacaaatcctgtgtctatttaatctgattaaaaatgtcagttgaaacatgcatgtgtggaccagtgctcagacaagtt

SEQ ID NO: 185935 - DNA, 201 bp, Homo sapiens
ggttgcagtgagccaagattgtgccattgcactccatcctgggcaacagtgtgagactctgtttcaaaagtagtagtagtaataataataataataataakaagaagaagaagaagaagaagaagaatgttaattgctaggttgttttagtgttccttgtagcagttgttttggaaacatgcgagttcattaaattgaaga

SEQ ID NO: 185936 - DNA, 201 bp, Homo sapiens
gattttacaggaaaataaaaaatataagagcaatataccaatttttataaaggtatatttatttattttaaagagctctcctctgttctaggatgatttcsttgccactttcctgagtgttaaaatgcaatttctcttatgaagtgatggtgatagtattttaagcatatgcctgtacttggcaaaataaagcattgccta

SEQ ID NO: 185937 - DNA, 201 bp, Homo sapiens
tctttaaaatattttaggaagcattgtccctgtcaaagacacacttaaattcaaacagcttttcctttttaaaattatttttctctgttcacatgtttacrtagtcctctgtcttgacagttaagtgagaggcaactggtcatagtgaggagtccatggatttgggaaataccccattattggagggcaaagcatgatttg

SEQ ID NO: 185938 - DNA, 201 bp, Homo sapiens
cagtgaagattcataagacaaatcccaagttaaaagcagagcatgttcattgctacttgacgtgttggcatctacacagagctgtctgatgataatacttrcaagtacctttgtaatccttcctttgcaccaggtcctcttctgagccctttccctgtaataactgatttaggccttacagtagctctaggaggtaagtac

SEQ ID NO: 185939 - DNA, 201 bp, Homo sapiens
aagggtgccactctatctctttttgtgcctgatctttctaacccaggattctgcacagaacagcaatgtctccctctttctgggctgtcaactttcactgmaaaaaatgacagctagcactgttaactgcatggcagctcacctatctgcttgtctagttgggtattctcagctataagagcacatgtgtctgttagggtc

SEQ ID NO: 185940 - DNA, 201 bp, Homo sapiens
aggattctgcacagaacagcaatgtctccctctttctgggctgtcaactttcactgaaaaaaatgacagctagcactgttaactgcatggcagctcacctrtctgcttgtctagttgggtattctcagctataagagcacatgtgtctgttagggtccaattctgatatggaaaccgcacagtaacttgatcaaggaaagc

SEQ ID NO: 185941 - DNA, 201 bp, Homo sapiens
cagtaatggaatggcaggagcaactatctcttgtggccatttcaaatgcgaaaaactgaattctcatcatcagcattactcccagtgtgcagcttacctcstcacacaggacagcccaacctcccctcgccgtgttctgcagatgtgatttccagctggcggtgctccctctgctccgtctcaccctgctccattcagaag

SEQ ID NO: 185942 - DNA, 201 bp, Homo sapiens
tttatattagtcagggttctccagagcaaccgaaccaataggatatagcacagatatataataaaaagatggctcaggaggacaaacattatagtttgtcrcaatctgaaggttggagaagcagaagagccaatggagtccaagtctgaagacaggagaagactgatgtcccagtacagggacagtgaagtagagagaatt

SEQ ID NO: 185943 - DNA, 201 bp, Homo sapiens
agcaactatctcttgtggccatttcaaatgcgaaaaactgaattctcatcatcagcattactcccagtgtgcagcttacctcctcacacaggacagcccarcctcccctcgccgtgttctgcagatgtgatttccagctggcggtgctccctctgctccgtctcaccctgctccattcagaagacgtgccacatcagtctg

SEQ ID NO: 185944 - DNA, 201 bp, Homo sapiens
tactgattttttggtcttagtactctatcagttgctcagaaaagagtaagattttctactatgattatggacttggctattttacccttttatctgtcaayttttctttatgtttttttgaagccatattattaggtgcatatattttcatagtagttatgttttcacgaggaattgttccttttatcattgtgaaatgtc

SEQ ID NO: 185945 - DNA, 201 bp, Homo sapiens
agatttctccattgtacagttattcttcccccacccctttctttactttccccaccttttctttactattccctttggaatcagcaaggtttgttcgttcrttctttctttcttgcctgggactacatggtgtgcaccaccatgcctggcaaatttttttttttttttttttgtagagttggggtctcactatgttgccca

SEQ ID NO: 185946 - DNA, 201 bp, Homo sapiens
agttttgtttggaaagacattgtttctagaataactaaaattttaaaagaggttagtcagtaggatcactttaactgatgttcctatctgctatagcgatrgtaacgaaggcactgtggcatttgcgaaaggttagacacagagatcagtggaacagaatagggaatccagaagtagatccccataaatatgcccagttta

SEQ ID NO: 185947 - DNA, 201 bp, Homo sapiens
gtattatttaattacaactgcaggttaatctatagttatgttcaaatgaaaagtttcattaaaataatccccttcaaagctaattcctctggagagctggrgtttcttctagcttgttgtatatttgctcatttagtcatttacatactcatcatttagtaagttgttactttctgccaaattcactgataggttctgaaa

SEQ ID NO: 185948 - DNA, 201 bp, Homo sapiens
accaggaaggagggctgctagggaaaatgaagcttcctgtcttttttagtagctgaatagagacactaaataactttgtgcttggaacaatttattaaagrataatatgtatgtgtgtgtgtgtgtgtgtgtgtgtgtgtgtgtgtgtgtgtgtgtatttcttaaagaagagaaatacaatttactccttacaccaggggg

SEQ ID NO: 185949 - DNA, 201 bp, Homo sapiens
cattatagtttgtcacaatctgaaggttggagaagcagaagagccaatggagtccaagtctgaagacaggagaagactgatgtcccagtacagggacagtsaagtagagagaattctttcttcctcagcattttattctattcaggtgcttgatggattggctgaggcccaccacactggggatggccacatgctttactc

SEQ ID NO: 185950 - DNA, 201 bp, Homo sapiens
ataaatagcctctatttgtacataaaagtataagaataaggaattatgccttttttaccctttaggactgaataaaggactggaacttttggccgctggcytttggagcccctccatggcctggacattatatcttgaaaatgtttgtttttatagcagtgcttgttattctccagaataacaccagcttttgagctagcg

SEQ ID NO: 185951 - DNA, 201 bp, Homo sapiens
attgtcaatgtcaattatgtatcttgtgggttgtcctttttagttctgatctactttttttttttttttaaagcctttgctgtcttttctgttccttcccrtggttgactgattagtaatgtgtcttctgtcaccttcctatagaacaggtgatggaatttagatggggcctttgtcctgttatattttgcccactggcat

SEQ ID NO: 185952 - DNA, 201 bp, Homo sapiens
agttttctcctactttacatggtggttgtcatgagaaccagttcacaccagaatggggtgttttttgttgttgtcattgtgctttttgccttgacacatgsagatatttaatttccatgtaatttgtgtgcagcttccttgctttgacggattgaaatttctgattctctgtagaggccagagcttggcaggaatattaat

SEQ ID NO: 185953 - DNA, 201 bp, Homo sapiens
tgacacatgcagatatttaatttccatgtaatttgtgtgcagcttccttgctttgacggattgaaatttctgattctctgtagaggccagagcttggcagkaatattaatctacttccttttctcctaggagagcccctgagagaagaaaagtgctggaaagtatagtcattgcgatatgtcaggattaataaaagcaggc

SEQ ID NO: 185954 - DNA, 201 bp, Homo sapiens
agcaaatggccagatttccaaaatacccagcagcatttggcagtatttttggggaggccgagttcaggcagctgccgatgccaccccactgagagcactgyggagggcagcctcgccttctgccggccacatggctgtgtggaatcccatgggatggaatctgctgcccttaggatttctattgtccctggcctctggaga

SEQ ID NO: 185955 - DNA, 201 bp, Homo sapiens
ttctactctttgcttcagttagttcaactttttaaagatttctcatgtaagtgagatcatgtactattcgtctttatatgtctggcctatttcactgagcrtaatgtcttccaagttcatctatgttgttacaaatggcaggatttccttccttttgtggctgaataatagtctaatatatataatatcccattatatata

SEQ ID NO: 185956 - DNA, 201 bp, Homo sapiens
acatgattgctgacggggagaacctgattgtttaatagatgctagaactggaacaagaaaagcttttggcagacctctggaaacaggggggtaatctgcastgtcaccacagctgtgcacgcatttccagcttcaaaccacagaagccaagcctgatccgtcaggttctgcacatttctttgtggaagaatcactgagcca

SEQ ID NO: 185957 - DNA, 201 bp, Homo sapiens
ttatgggcaccttactcactttcattacccggcagaatttgcaagataattgcccagaactagcgtattgattcacatttttatgttacccatcccttttktttgtttgtttccaagctgcggaagatcaccacttgattcacaggatcaagcagagttagtctaaaatgtaggcaaaaagcttaaaaacaatgaatgaga

SEQ ID NO: 185958 - DNA, 201 bp, Homo sapiens
aaagtgaagctgcccaggtgtggtggctcacatctgtaatcccagcactgtgggaggctgaggcaggaggatcacttgagcttgggagtttgaggccagcytgggtaacatagcgagaccccatctcaataaaatagaataaaaaaaagaaaaaaaaatgaagctgagagtttatttagccagggtcacacagctggaaag

SEQ ID NO: 185959 - DNA, 201 bp, Homo sapiens
ttatgtcctcctgcctcctccagctctaaattctggcttcaagaccctcctccatcacccctctgtcaacactcactgggttgttaacatgtccacaataytgatcgccttacctccctcttttcccagggtctcctaaacagtacaatgcctttcaaaagaaataatggagaggaaactattaaaattgaatttccacat

SEQ ID NO: 185960 - DNA, 201 bp, Homo sapiens
tcctgagtaatgggattacaggcgtgtgccaccacgcctggctaatttttgtatttttggtagagatgaagtttcaccatgttggccaggctggtctggamctcctgacctcaagagatccacctgcctcagcctcccaaagtgctgggattacaggtgtgagccaccatgcccggccagtatcagctattaaagggccat

SEQ ID NO: 185961 - DNA, 201 bp, Homo sapiens
agcatggagaatggggtatgcatcccctcaatcatttatccttgagttacaaacaatccaattacaccctttattttaaaatgtacaattgttactgactrtattcaccctattgtgctatcaaatagtaggtcttattcattcttcctattttttcagattagtttttgaaagaaaatatatgcgtgtgtttcctcatgc

SEQ ID NO: 185962 - DNA, 201 bp, Homo sapiens
ggcaaatttcttagcctcactgtgcctcagtctcctcagctgtgatgaggggttggtgtgaggattaacagaaagccccaagacagcacttggcaggtagmtagagctgcataaatattgatccttagtggtaaaattagtattcatgtggcaggattgcagtacatgcttatcagaggacagagctcagaaaactagttt

SEQ ID NO: 185963 - DNA, 201 bp, Homo sapiens
agcataatggaagatacagtcaaggcacggaagagggagagctctattcctgggggtaataatagaaggtgtcccaaagaatctcagacaaaacattatarttgtacaggcagagaagaaggggcactgtgtttcaggtggtgtgagtagcagattgaaggaatgaagatgtatgaaggtgacgagtccccggaatgtgta

SEQ ID NO: 185964 - DNA, 201 bp, Homo sapiens
tatttgttcatcttcagataccagctacctgcttttgtagctgatatatataagccattttatgcaaatatgttgaatgattgatttaatgcatgaatacwtgcttttactttttatgagagcagtgagccatatgaccaaacaaagggactggacagggagatataaaactaatttttctttgtttatagattgcaggaa

SEQ ID NO: 185965 - DNA, 201 bp, Homo sapiens
ggtacctactttcactctcagaagtgtcttggtgtgaatgataaattatatggctattttattaatagcttttgtgaatctttaggtttaaaacatggtaraattcaaaacgctgagattagatggaaaaggcttggaggcccagcagctcagtccctgggagcttccttcgctcttccagattgatactttagttcctgt

SEQ ID NO: 185966 - DNA, 201 bp, Homo sapiens
cagggtgggggaaatcagatggattgccataatctcataagccactgttaattcctttatgagctcttctggtatttttttatagcataagacacacctaygtacatacaaaataaagatgatatcatgagatgtgagtaatttttagctgttttatctgtattgtgaccattgcgcaatgtgaaaatacaatctcaattc

SEQ ID NO: 185967 - DNA, 201 bp, Homo sapiens
taacttaaccctgggcaaatttcttagcctcactgtgcctcagtctcctcagctgtgatgaggggttggtgtgaggattaacagaaagccccaagacagcmcttggcaggtagctagagctgcataaatattgatccttagtggtaaaattagtattcatgtggcaggattgcagtacatgcttatcagaggacagagctc

SEQ ID NO: 185968 - DNA, 201 bp, Homo sapiens
tccactattctactctttgcttctgtgagatcaccttctttagctcccgcatgagtgagatcatgtgatttttgtctttctgtgtctttcatttcgtttawcataatgtgctatagattcatccatgttgctgtaaatgacaatttaattctttttatggctgaatagtatttcattgtgtatatattccacattttcctt

SEQ ID NO: 185969 - DNA, 201 bp, Homo sapiens
attaattatgccaacattccccaaatatggaatatgtagagctatagtttagttaataccatttgttaaaaacaaaaataaatgattttgttgagatgctwaaaaacatgaaggatgattttgatatttttgtgtaagagagagagagaaagccagagtatgtattgtgctttttccatttattgagaggatttttttccc

SEQ ID NO: 185970 - DNA, 201 bp, Homo sapiens
tgtgagatgctctcggtacaactgtatattaacattttctcccaggcatttcatgttacttcaaattaacgatttcaaaatgcactgttcatttgtccttrtattggttgaatggtactatgcaacttgttttttcttgagctcactagaaacaattgtagcagtgtggtaagggagccattcattcatttttttcattca

SEQ ID NO: 185971 - DNA, 201 bp, Homo sapiens
tatacatgtctacaggtaattactgcctgggtcatttggcatgaaaaatgtatttctattttaaacatccagcttatttatattgatttcaacaaagctartgggagataggtttgcccggtgcagagttagttccagaatttgtagacccagcatattctgttcttctgtgcatccaagctggcttcctggtgatcttat

SEQ ID NO: 185972 - DNA, 201 bp, Homo sapiens
catacctttttatttttcgcttgctgcttttcattctttagtactcacctctttcccctctaccctggggacctttgcaaatgctgatccagctgcctggwgtgcccttccttcccttgctaattattcttctgatctcagtttaagagatgcttactcaaagctaccttctctaacttgagtacatcttcctctgttaag

SEQ ID NO: 185973 - DNA, 201 bp, Homo sapiens
tcaccttctctccaaaaacctgcagcacttttaggatgaagtctaattccttaacacagcctatgagaccctgacgactatggcgcttacccacttctccmgtcccatgtcatacctttttatttttcgcttgctgcttttcattctttagtactcacctctttcccctctaccctggggacctttgcaaatgctgatcca

SEQ ID NO: 185974 - DNA, 201 bp, Homo sapiens
tgcttttgagagtaaagttggaataattactatatacaattgtttctacctaattatcaaggaatttaatcattaacgtacataattaatgtatctaaatkactcaactttgttgtaatcaaataaaacttttccaaataaatatgtatagtttaaatagtttgggtagcttagtcctctgttagtacgagcaatggttgc

SEQ ID NO: 185975 - DNA, 201 bp, Homo sapiens
agccattctcctgcctcagcctcctgagtggctgggattacaggcgcgcgctacctcgcccagctaatttttgtatttttagtagagacagggtttcaccrtgttggtcaggctggtctcgaactcctgacctcaggcaatccgcccgcctcggcctcccaaaatgctgggattacaggtgtgagtcatcacgcccagcct

SEQ ID NO: 185976 - DNA, 201 bp, Homo sapiens
ttcttcctggtccaggattcaatacaattttatacatgtattttgttgtcatagctctttggtctccttgaatctgaaatagtttctcagcccttctttgygttagttaatcgtgacatttttgaagattacaggtcaacatagtagaatgggctttcatctgaattggcagaaccttcctcatgacataaaattctattt

SEQ ID NO: 185977 - DNA, 201 bp, Homo sapiens
tggctttcttcagaagactgcagcttttttgaatcatcttattaaagtggtggataaagttgcttgttctgatctttgagcatggcactggacgcaggaakcttcagccagtcctagttactgtgtttgcaaagcacttttcttgtttttggaatcttgctttatgtaatcaaccttaggaagaaccacacctttctgcac

SEQ ID NO: 185978 - DNA, 201 bp, Homo sapiens
gttgaatgaatgaatacagtataaaacaacattgtcctgtaatttataatgtctgtgggtcaatagttaaggttgggatttaggagctcctcattattctrttttgacagacttactacaaaatgtcttttcaaagtcaccaaagctcaccatgctgcaatttgttagagggttaatttttaaaattataatggtgcttgg

SEQ ID NO: 185979 - DNA, 201 bp, Homo sapiens
attaccattttatatacttgtagattttgtttgttaatatttctttaggatttctgactttgtgttcaggggtgaactaggcctttaatttcctgtgtttrttacgatcttctcaggttttgatgttaagattatgatatcctcataaaactagtttagaagtatttccattttctagcctctggaataatattttgaaga

SEQ ID NO: 185980 - DNA, 201 bp, Homo sapiens
catggctttcttcagaagactgcagcttttttgaatcatcttattaaagtggtggataaagttgcttgttctgatctttgagcatggcactggacgcaggragcttcagccagtcctagttactgtgtttgcaaagcacttttcttgtttttggaatcttgctttatgtaatcaaccttaggaagaaccacacctttctgc

SEQ ID NO: 185981 - DNA, 201 bp, Homo sapiens
tcctgggtgctagcaacagtctctgattgatgggaccctgagtcctcacctgtgtgactcttttcctgcataccttgaaacccattgtttaaatctagtcrgtaagaaactcaagttaaaatgtgattttaatttttgattttcattttacatattttgaattaagtgctttgcctaccacggctttctttaaccaacctg

SEQ ID NO: 185982 - DNA, 201 bp, Homo sapiens
aaccatggctttcttcagaagactgcagcttttttgaatcatcttattaaagtggtggataaagttgcttgttctgatctttgagcatggcactggacgcrggaagcttcagccagtcctagttactgtgtttgcaaagcacttttcttgtttttggaatcttgctttatgtaatcaaccttaggaagaaccacacctttc

SEQ ID NO: 185983 - DNA, 201 bp, Homo sapiens
ctatgaacttgtggatcccctggccaggaaactctggaagccatttgggaatcctattgtgcaagaagcagaaatttctcttccttggtctccttttaggscctcctaagtgatgctctaggctgtgttggcttctgtggtgtctttctctgtgcggcctccacatcctgtcctgtacatttttctgtccagctgtggggc

SEQ ID NO: 185984 - DNA, 201 bp, Homo sapiens
gcaagttttcaaccatggctttcttcagaagactgcagcttttttgaatcatcttattaaagtggtggataaagttgcttgttctgatctttgagcatggsactggacgcaggaagcttcagccagtcctagttactgtgtttgcaaagcacttttcttgtttttggaatcttgctttatgtaatcaaccttaggaagaac

SEQ ID NO: 185985 - DNA, 201 bp, Homo sapiens
agcctgaactcctgggttcatgcagtcctcctgccttagctccccagtagctgggactgcaggtgtgtgccaccatacccggctaatttattaaataaaawtttttttttttttttttttttgtagagatagggtcttgtcatgttgcccaggctgctctcaaactcctgggcccaagtgatcctttcgccttggccttcc

SEQ ID NO: 185986 - DNA, 201 bp, Homo sapiens
tcctcctgccttagctccccagtagctgggactgcaggtgtgtgccaccatacccggctaatttattaaataaaaatttttttttttttttttttttgtaragatagggtcttgtcatgttgcccaggctgctctcaaactcctgggcccaagtgatcctttcgccttggccttccagagtgttaggatcataggcgtgag

SEQ ID NO: 185987 - DNA, 201 bp, Homo sapiens
ttttttttttttttttttttgtagagatagggtcttgtcatgttgcccaggctgctctcaaactcctgggcccaagtgatcctttcgccttggccttccaragtgttaggatcataggcgtgagccaccacaccctactgagaaatgcacttgacccctggacaactgattaccctccctcagtcagttgaaaattcctgt

SEQ ID NO: 185988 - DNA, 201 bp, Homo sapiens
acctatcacctccccatgtaacatgcatagacatttcatgcctttgtcctatctgttgaaaagggaacagcacgtctgtcttctctctctgctctgttttsatttttcctatgaccagaggttgctgcagagagtgatttttaaaagacaaaaccaaacaggatcattcttcttccaaatcaaatatggtcaacgtagcct

SEQ ID NO: 185989 - DNA, 201 bp, Homo sapiens
accacgcccagctaatttttgtatttttagtagagatagtgtttcatcatattggtcaggctggtctggaactcctgacctcaggtgatccacccgcctcrgcctctgaaagtgctgggattacaggcgtgaaccaccgcgcctggcctacatttcagttattcttgatgtgttttaaaagtgtgcattccataacagttg

SEQ ID NO: 185990 - DNA, 201 bp, Homo sapiens
ttgggttgtagactttggagaataattagagacctttagggctttaggctttctccaagaagcggagcaagttttcaaccatggctttcttcagaagactkcagcttttttgaatcatcttattaaagtggtggataaagttgcttgttctgatctttgagcatggcactggacgcaggaagcttcagccagtcctagtta

SEQ ID NO: 185991 - DNA, 201 bp, Homo sapiens
atgagtgtaaatgctgtatatatgtgatagtaagggagaaaacttgactaagattttgtcgatttggtctcatttcacagctgtatcataggttttttcamatcattttaggtaaattacttaacatttagataatcacataatttatttcctacatcaggacacttgagatcagtgaaagtgggtgctattaaataatta

SEQ ID NO: 185992 - DNA, 201 bp, Homo sapiens
gcggtgggtgagtgccggcctcattgcagcctggggtacgacgtgggcggttggtgttgtagggggtttacattggccgtggattttttcctctttccggwtgtgtttttgcttttgagtgaagagttcccgtggttttgtaacctaataaatgcataaaatgcagcttgggttgtagactttggagaataattagagacc

SEQ ID NO: 185993 - DNA, 201 bp, Homo sapiens
cttgataaaggtagctaggcctgaggagtctgcactgtgtggcaggcaatcagtccagtaatgggaaggagacagaagtgtgagcaaagtcctggaggcgkgagacagccatagtctgtggttcagtgtagggtgtttatagcagagtgtgctgagttagtgtggggaatgtgggcagtggcaaacttagctcgcaaagct

SEQ ID NO: 185994 - DNA, 201 bp, Homo sapiens
ctcttctgattacatggaacccaccaggatattcaggataatcacctcatctgaacatccttccttaattatatctataaagatcttaatgtaggataacrtattctcaggttccagggagtaagagatggatatctgtggaagggggctattatttagcctatcacttgtgccattttatatcctatttcgtcatgacag

SEQ ID NO: 185995 - DNA, 201 bp, Homo sapiens
atctttgagtgtatgatgagacagaagagatctgaaatttagaggccttggaattatttagctagtcgctagctattttcccctgggtcactcacctgacygttctgtcactacattttctcactggtaaaataagttcagatactctcaaaggccactccttattctaggatgctatgaaagtgagtaggattttcctat

SEQ ID NO: 185996 - DNA, 201 bp, Homo sapiens
ttcagacaatagatggaggataaagagttgattctaagagtcttttaaaattctgcccatgtttatgcatatatacgacatacagtcaaatccatccccarcatcatctttgagtgtatgatgagacagaagagatctgaaatttagaggccttggaattatttagctagtcgctagctattttcccctgggtcactcacc

SEQ ID NO: 185997 - DNA, 201 bp, Homo sapiens
gtatgtgagttgcagaccttttcattgtgtctcactttgaaaatgtttttattttgccagtgttctaaaataacagcttagctgggtataattgatgtagrttgacagtttcttggtattattccattagctcctgaactctttgtagctactgagaaagctatttctttgttgttgctttgtaagtcctatttttcttct

SEQ ID NO: 185998 - DNA, 201 bp, Homo sapiens
atccgctctcagtaacactgtgaagcagttggaatcctcactgtaaaacagggctacctaggcttagagccgtgaagggactcgcaccaactcacttctcktacaaagaggagctctaagctgagaatccagtgtctgacctcctcaaccaacctgttttgtgcttgtcttgctgcctttacgctctgcagagcaaggatt

SEQ ID NO: 185999 - DNA, 201 bp, Homo sapiens
tatgtgccatcccctctgtctgggactgcccgccacccgctctcactttctttcactccatcggttcctacatcggtcaggccttagcttgttggtacttycacagggaaccttccttgacttttaatagcccttttgtgtggcctcatggcaccatgtaccttccctccataacttttagcacattgtaatttacatttc

SEQ ID NO: 186000 - DNA, 201 bp, Homo sapiens
ggcatattctgcccagccaagggctctggcattcagatgagggagagggagaggaaagaggagagaatccagtgagaccaatccatgaagtgtcgggaggmccctggaagcaaaggctctggactcaggtggcatcaatgggactaccagtttccagtgaatatgtgggagtggcctaggtccagctcaatcagaagccca

SEQ ID NO: 186001 - DNA, 201 bp, Homo sapiens
ttctttctttccttctctttttgttcttttgtccctctcaattccagctgacagtgttcctgatggtaaatcattctcaaaaaccttgtggctctcccatktatatcatagggattcattccattacacaagaggctcctctgcagatctttcttgaataattcattgctatttctggcttctgctgagacgcctgagggg

SEQ ID NO: 186002 - DNA, 201 bp, Homo sapiens
gctatagtttagttaataccatttgttaaaaacaaaaataaatgattttgttgagatgctaaaaaacatgaaggatgattttgatatttttgtgtaagagwgagagagaaagccagagtatgtattgtgctttttccatttattgagaggatttttttccctgatatgttttggaaagcattggtacaaatggatattggt

SEQ ID NO: 186003 - DNA, 201 bp, Homo sapiens
ggattgcctgagcccaggagatggaggctgtagtgagctatggtcgcacaatggcactccagcctgggtgacagagtgagactgaaaaataaaaaacattrggctaggcgctgtggctgacgcctgtaatcccagcactttgggaggccgaggtgggtggatcacgtcaggagttcgagaccagccttgccaacatggtga

SEQ ID NO: 186004 - DNA, 201 bp, Homo sapiens
taatcctcaagaacctgttgaagtaggtatgatttattaacctcattttatgagattggaaactgaagcatagaaaaattaaagaggcccccaagcagacraggggtacaggtaggatttgaacccaggcagtgggaattcagaggctgttctcttaactagcatctttttttttttttgagacggagtctcactctgtcg

SEQ ID NO: 186005 - DNA, 201 bp, Homo sapiens
aaagaggcccccaagcagacaaggggtacaggtaggatttgaacccaggcagtgggaattcagaggctgttctcttaactagcatctttttttttttttgrgacggagtctcactctgtcgccaggctgtagtgcagtggcacaatctcggctcactgcaacctctgcctcccgggttcaagcaattctcctgcctcagcc

SEQ ID NO: 186006 - DNA, 201 bp, Homo sapiens
actaattatttctctttggtgacaggttttttgcgggaacatacaatgtaaatgggcagtcccccaaagaatgcctccggctgtggctgagcaatggtatmcaggccccagatgtctattgtgtagggtgagtgcttctcttctagtcccctctccatcttcaagcacacagagctgtggttgaaggatgggtcttcacaa

SEQ ID NO: 186007 - DNA, 201 bp, Homo sapiens
tcggctcactgcaagctccgcctcccaggttcacgccattctcctgcctcagcctcccgagtagctgggactacaggcaggcgcccgccaccacacccggstaatggttttttttttttttttttttgtatttttagtagagacggggtttcaccgtgttagccaggatggtcttgatctcctgacctcgtgatatgccca

SEQ ID NO: 186008 - DNA, 201 bp, Homo sapiens
gaggctgagacaggagaatgacgtgaacctgggaggtggagcttgcagtgagccgagatcgcgccactgcactctagcctgggcgaccaagtgagactccrtctcaaaaaaaaaagattagtgttgggctcttctattcctagagcttaaatctcctcatctattggagctcagagttctaggaggcacctatagcactat

SEQ ID NO: 186009 - DNA, 201 bp, Homo sapiens
ggtttctccacgttggtcagacaggtctcgaactcccaacctcaggtgatccgcccatctcggcctcccaaagtgctgggattacaggcatgagccaccgygcctggcttttttttttttttttttttttgagatggagtctcactctgttgtccaggctggagtgcggtggctcaatctcagcttactgcaccctccacc

SEQ ID NO: 186010 - DNA, 201 bp, Homo sapiens
aagaaaaattcaaagtaaacatggagatctgtgggaacaccagacaaacttccagttgaaagtagttcagccgggcgcagtggctcacgcctgtaatcccrgcactttgagaggctgaggcgggcggatcatgaagtcaggagttcaagaccagcctgaccaacattgtgaaaccccgtctctactaaaaatacaaaaatt

SEQ ID NO: 186011 - DNA, 201 bp, Homo sapiens
tttcccctttcctcttggcctgcccccggccaacattatttttaaaatttctctgcagattctgatgttgagattgacttggagctcttcgtaaataagaygacagctacaaagctcaactcgggtgaagacaaaattgaggacattctggttctgcacttggacaggggaaaggattactttttgtctgtgtctgggaac

SEQ ID NO: 186012 - DNA, 201 bp, Homo sapiens
tggagcctgtggagcctcccacctcagcctcccgagtagctgggaccacaggtgcatactaccacacttggctaatttttgaacttttcgtagaggcaggstttcgccatgttgcccaggctaagaatttacaactttaagcaaccaatagagcaggaactcaggagggcctggctcacctgacaaacagtgtggtccctt

SEQ ID NO: 186013 - DNA, 201 bp, Homo sapiens
ctggagtgcagtggtgtgatctctgctcactgcagcctccacctcctgggtttaagcagttctcctgcctcagcctcccaagtagctgagattacaggcakgtgctaacatgtctggctactctttgtattttcagtaaagacggggtttcaacatgttggccaggctgatcttgaactcctgatttcaggtgatctgccc

SEQ ID NO: 186014 - DNA, 201 bp, Homo sapiens
gagcccaggagatggaggctgtagtgagctatggtcgcacaatggcactccagcctgggtgacagagtgagactgaaaaataaaaaacattaggctaggcrctgtggctgacgcctgtaatcccagcactttgggaggccgaggtgggtggatcacgtcaggagttcgagaccagccttgccaacatggtgaaactctgtc

SEQ ID NO: 186015 - DNA, 201 bp, Homo sapiens
ttacaggcatgagccaccgcgcccagcctctattatctttttttccccagtgcagattaattaaagaaaaagattctcaacttagttatgtctttctctgyttatctcctctgtgttctggtctgaggcattctaatttctcttgtagtttgatacccatctctacttgccttcttttctggtctttcctgaagtagttgt

SEQ ID NO: 186016 - DNA, 201 bp, Homo sapiens
aaacagagttaacgcctcttgtcctgcctgccgaggtggaactatctggagcattttggtgttctggaagctgacaggatggtttttcttctccagggagyctagcagggagtgtcttgcagccgagctcttccattctggtgaacctgcagcatcctagtttgtgaggtcgcagcttatgtgtcagtttgtctgctttta

SEQ ID NO: 186017 - DNA, 201 bp, Homo sapiens
aattcaactttacaaagatatagttgcagcttctgagagcatcttgtgctcatttttgtttcttctctttactttatctcatttatctctacaacttcctmtttgtctaaagtcaaagccttagaattttagactttatgataacatacgccacttcttttataaagaggaagaagccactggggccgtgatatctgccaa

SEQ ID NO: 186018 - DNA, 201 bp, Homo sapiens
ggattatatagttctactccaggccaggcacggtggctcatgcctgtaatcccagcagtttggaaggcctagacgggtggatcacttgaggttaggggttygagaccagactggccaacatatagtgacagagcgagactctgtctctcaaaaaaaaaaaaaaaaagttctgctccagagcctgagcccttgcgtgttttg

SEQ ID NO: 186019 - DNA, 201 bp, Homo sapiens
tcaggtcatttctactctccccatattccacaaaaatgtcttccactacttgatggcgtttttgcgagaactgctgaaaaattcagcaaaaaatcatttgsatgagaatattctaggtaagcagccaaatgtctatggaaagcatttctgcaaactgagagactcgtaatgagaaatgaggttgaggagggtcccaggtcc

SEQ ID NO: 186020 - DNA, 201 bp, Homo sapiens
aggcgaaactagactcggcctgggcttgggacttaccgggaggcgcgggacttaggctccctcctgaagcatttcccaatagagacctcagtttggtcacyatagggaccccaccccttctccgtttccatggggatgggtatccagccccccttccctgtttccatggagacccggaccctgcccctctcctccttgctt

SEQ ID NO: 186021 - DNA, 201 bp, Homo sapiens
gcacgagaattgcttgaacccaggaggcagaggctgcagtgagctgagattgccccactgcactctagcctgggtgacagagtgagtgagacgctgtctcaaaaaaaaaaaaaaaaaaaaaattcaaggtaaacatggagatctgtgggaacaccagacaaacttccagtggaacgtagttcagccgggcacagtggctca

SEQ ID NO: 186022 - DNA, 201 bp, Homo sapiens
aggaggaggaggatcaggcctccccggtaccatctccctctgcaaaggcccctccctcctgcccccaacccctctgaggcagctccaccaccccatgcgtracttgttgaccaaagcggggctcctatctcccctcccacagggtgtgtgcgctcagcaggggccagcatggaccagtctgtggcaatccaggagacgctg

SEQ ID NO: 186023 - DNA, 201 bp, Homo sapiens
gcccaacttccctctctctgccacccacagctagaactcacagctagaaccatctgtcatattggctctcctgcccttgaaccctgctgtcactcactgcygctgagaaaatggtctagctttgggctagcagtgaaacgttagtggcctttaggacaaaatttgtttagaatgggacattagcccggcaggtaaaggaga

SEQ ID NO: 186024 - DNA, 201 bp, Homo sapiens
tgggcaacagagtgagacccctgtctctaaaaaataaaataacaggccgggcgcggtggctcacgcctgtaatcccagcactttgggaggccaaggcgggyggatcaccaggtcaggagatcgagatcatcctagctaacacggtgaaaccccgtctctactaaaaataaaaaaattagccgggcatggtggcgggcgcct

SEQ ID NO: 186025 - DNA, 201 bp, Homo sapiens
gtggtttcatacctttgtgatataggttagacacttttgtcattttctgcattttactccagaatctcctgacgtcctaaatgattttttaaaattttgtrtacattaaggttcattctttttttttttttgagacagagtctcacctttcgcccaggccagagtgcagtggcgcgatctcggctcactgcaagctccacc

SEQ ID NO: 186026 - DNA, 201 bp, Homo sapiens
aggatggtctcgatctcctgacctcgtgatctgcccacctcagtgttccaaagtgctgggattgcaggcatgagccactgcgcctggcccagagtccccctttttttttttttttagcagtgagtaagtcgaggcctctgtgattttagaggaaagagaaatgcaaagccagcaattgtttgttaaagaaggtttagaaac

SEQ ID NO: 186027 - DNA, 201 bp, Homo sapiens
tgcaccctccagctgaacttcaactgtccctccagggcagggtctgagtctcctagaataattatcacaatgatagttaatattttttgaacactatattytaaaccctgcacacgtactaactcataatcctcaagatctaaggaggaagtttcttgagaagagacagtttaacatactagtccagatcttgagcctcgt

SEQ ID NO: 186028 - DNA, 201 bp, Homo sapiens
cgggaggatcacatgagccgaggagtttgagattacagtgaactacgattgcagcctgggcaacacagcaagaccctgtctctataaaaaaaaaaacaagaaaaaaaaaacgaacaccatggggtgtgtagaaagtgctcaataaggctgggtgcagtggctcatgcctgtaatcccaacactttgggagtctgagctggg

SEQ ID NO: 186029 - DNA, 201 bp, Homo sapiens
ttttttttttgagacagagtctcacctttcgcccaggccagagtgcagtggcgcgatctcggctcactgcaagctccacctcctgggttcacaccattctyctgcctcagcctcccgagtagctgggactacaggtgcctgccaccgctcccggctaaatatttgtatttttagtagagatggggtttcaccgtgttagtc

SEQ ID NO: 186030 - DNA, 201 bp, Homo sapiens
aggctccaaaatgcatacaaggccacttctgccatgttttattggtagagcaagttgtgaagccagactagattctacaagtggagaaagactccacttcttttttttttttttttttttgagacggagtttcactcttgttgcccaggctggagtgcaatgacgtgatcttggctcaccgtaacctctgcctcccgggtt

SEQ ID NO: 186031 - DNA, 201 bp, Homo sapiens
cagtgatgtaattctttatattgacatatttaatgtctgtctgctttgctatacaacaataataataatagaagcaaataatgagttaatgattatcccaygccagcattgtgctagaagttttacatacaccaaatcacgcttttctcttttttgtttgagacagagtctcgctctgttgcccaggctggagtgcagtgg

SEQ ID NO: 186032 - DNA, 201 bp, Homo sapiens
cacgttggtcagacaggtctcgaactcccaacctcaggtgatccgcccatctcggcctcccaaagtgctgggattacaggcatgagccaccgcgcctggcttttttttttttttttttttttgagatggagtctcactctgttgtccaggctggagtgcggtggctcaatctcagcttactgcaccctccacctcctgggc

SEQ ID NO: 186033 - DNA, 201 bp, Homo sapiens
caacctcctgggctcaagcgatcctcccacctcagcctcccaagtagctgggactccacatctggctaattttttatagagattgggtggcggggggtggygtctcattgtgttttccaagctggtctcaaactcctggctttaagtaatcctcctgccctggcctcccaaagtgctgggattacaggcatgggtcactgt

SEQ ID NO: 186034 - DNA, 201 bp, Homo sapiens
atgttggccaggctggtctcaaactcctgacctcaggtgatctgcccgccccagcttcccaaagtgttgggattacaagcatgagccactgcgcccggccttttttttttttttttttttgagacagtcttactctgtcacccaggctggagtgcagtggcacgatctgggctcactgcaacctctgccgtccgggttgca

SEQ ID NO: 186035 - DNA, 201 bp, Homo sapiens
ttgaacccaggaggcggaggttgcagtgagccgagatcgcaccactgcactgagcctgggcgacagagcaagactccatctcgaataaataaataagtaartaaataaataaataaataaaaacagtggacctggaggcttggtatggtggctcacgcctgtaatctcagccctttgggaggctgagatgggtagatcact

SEQ ID NO: 186036 - DNA, 201 bp, Homo sapiens
ctcctggctttaagtaatcctcctgccctggcctcccaaagtgctgggattacaggcatgggtcactgtgcccagcctagcccacactcttaatcgctctrctaggttgcttctgtttgtctgttagttcagcacatggtttgagtgctcaccatgtgcccggtattgggtatatgctatgaatagggaagccttctacag

SEQ ID NO: 186037 - DNA, 201 bp, Homo sapiens
gtctcgcgggattttacgctggaagaaggtgccacagggggctgggtggtatgaatcctctcctatgggccccccagctcatctttgtccttgatgggggrgcaagggggagtaagctcaattgctaagggcattctcatttccctccccacagtgtccccagatggtgaactctacatccttggtgagtggtcctcttgg

SEQ ID NO: 186038 - DNA, 201 bp, Homo sapiens; identical to SEQ ID NO: 32399

SEQ ID NO: 186039 - DNA, 201 bp, Homo sapiens
gcaatacaggcatttaaaaaattaaaatgaccaggcacagtggctcacgcctgtaatctcggcactttgggagactgaggtgggagcatcacttgagaccrggagtttgggaccaggctgggcaacacagggagaccccctctctacaaaaacatttttaaaaaattagctgggcgtggtgatgcatgcctgtggtcccag

SEQ ID NO: 186040 - DNA, 201 bp, Homo sapiens
ttgcttgaacccaggaggcagaggttgcagtgagccgagatcgtgccattgcattccagcctgggagacggagcaagactccatctcgaaaaaaaaaaaawtttttctcttaaaatacctacagtaagtggggtgacactattaattgctaagttgctcctgctaaaattggtaagaaatggtatcaagcccctcagttct

SEQ ID NO: 186041 - DNA, 201 bp, Homo sapiens
gcctgtaatctcggcactttgggagactgaggtgggagcatcacttgagaccaggagtttgggaccaggctgggcaacacagggagaccccctctctacaraaacatttttaaaaaattagctgggcgtggtgatgcatgcctgtggtcccagttacttgggaggctgacgtgggtggctcacttgagcacaggagtttga

SEQ ID NO: 186042 - DNA, 201 bp, Homo sapiens
gcgggcacacgggggcgggttcgtctgggggcggagcgcgcgggacgggcggcgggatgaggagcttgaggaagcaggcagggaaatgtctgccgccgccrgctctcgggagcgcaacactgcaggttcggcgggcggcgggaagctgggctggggagctgggccgggggcggcggtgcgcccggccctcgggtgggcagg

SEQ ID NO: 186043 - DNA, 201 bp, Homo sapiens
tgggagactgaggtgggagcatcacttgagaccaggagtttgggaccaggctgggcaacacagggagaccccctctctacaaaaacatttttaaaaaattrgctgggcgtggtgatgcatgcctgtggtcccagttacttgggaggctgacgtgggtggctcacttgagcacaggagtttgaggctgcagtgacctatgac

SEQ ID NO: 186044 - DNA, 201 bp, Homo sapiens
gcatcacttgagaccaggagtttgggaccaggctgggcaacacagggagaccccctctctacaaaaacatttttaaaaaattagctgggcgtggtgatgcrtgcctgtggtcccagttacttgggaggctgacgtgggtggctcacttgagcacaggagtttgaggctgcagtgacctatgaccacatcactgtacgccag

SEQ ID NO: 186045 - DNA, 201 bp, Homo sapiens
gacagagatggcatgaggagtgtgcctagccagggcaccaccagcacagtgttagggaccaacgagcgagtgtgagcaccccgagacctccaagatagggytgagggacagccagcgggcccccatcctcacctctgcttcctgcccttagtctcttcctctatacgcaccggaggatggccattaccggggacgatgtct

SEQ ID NO: 186046 - DNA, 201 bp, Homo sapiens
ttttgtattttttagtggagacggggtttcactgtgttagccaggatggtctcaatctcctgacctcatgatccgcccacctcggcctcccagagtgctgrgattacaggcgtgagccaccgtgcccggccttcttattttatttttaaatttttatttgcatgtcatccttgctcagggactatgctaatcttctctgta

SEQ ID NO: 186047 - DNA, 201 bp, Homo sapiens
ccaaagcacttttcattttttcatttcagtagtatatacaaggcaaataattatgcagataatgcctgggtaatggctgtttaaaggaagtgggaatgttyggagtaggcctatactatttgaagttgttatcacaaaagtaacagataccatgacagaccgcaagtcactccttggtgctgcagtcctggtctaggttag

SEQ ID NO: 186048 - DNA, 201 bp, Homo sapiens
ttcagagcagaatgatcatttggcactctggaatttgagcacttcctcctatacctggatttggagacatactcttctatagaatctctcccctcattttmaaaatgagtgattccatgcattctttattaacaggcatttattctgtgccctttctaggtgggcacggtgataggtgtggtatagtgggagtgacacgac

SEQ ID NO: 186049 - DNA, 201 bp, Homo sapiens
tgtctgggccatggggttgttcatcactgcaccctccagctgaacttcaactgtccctccagggcagggtctgagtctcctagaataattatcacaatgayagttaatattttttgaacactatattttaaaccctgcacacgtactaactcataatcctcaagatctaaggaggaagtttcttgagaagagacagtttaa

SEQ ID NO: 186050 - DNA, 201 bp, Homo sapiens
cagctttcttgagtagctgggattacaggaatgtgccaccacacctggctaattttgtatttttaatagagatggggtttctccatgttggtcaggctggkctcgaacttgtgacctcatctgatcctcccatcttggcttcccaaagtgctgggattacaggcatgagccaccgtgcctggctggaaatgttcttaataa

SEQ ID NO: 186051 - DNA, 201 bp, Homo sapiens
gaccattttgggtataatgtaagttgtcccagggtagctggcctaggaagtgtccttttttttttttttttgagacagagtttcgctcttactgcccaggstggagttcagtggcatgatctcggctcaccgcaacctccacctcctgggttcaagtgattctcctgcctcagctttcttgagtagctgggattacaggaa

SEQ ID NO: 186052 - DNA, 201 bp, Homo sapiens
catctctctgtgaccgcttcatgttgttccctgttgacaagagatctggcttttaaagagcagagaagctattggcagattaattttcctttccaggtttrtcttggtttaacgactttcccaaaatatttctgggttgggcccttgggctctttggttttcaaggcaatttgtcaacaatgacaagcgcttctcattttc

SEQ ID NO: 186053 - DNA, 201 bp, Homo sapiens
cggaggctgaggcaggagtcttgcttgaggagttccagaccagcctgggcaacatagtgatatctctaaatttaaatagataaatatataaaataaattaygctctaacagttttgttattggtgatccatacatgaactgaagctagcaaatatgaatgagaagagactttctttcttggaatgccaatgatgagaattt

SEQ ID NO: 186054 - DNA, 201 bp, Homo sapiens
accctgtcattttgaattcatcaacaagcctgatgaagagtcttactgtaagcagtggctgaatgccaaccccagcagaggcttcctcctgccaggtaagrcctctgttcctagcttcctggtatctggtttggggaatgccttactctatatttgctcattttcctaaaatgagctttttgcttgagtgttttattctct

SEQ ID NO: 186055 - DNA, 201 bp, Homo sapiens
ctgtggccagagggggaactatggggctgtgtaatggcaaatctggtcaagagctgctctgacagccagcttccgtgccaggttctagagaggagattccragaagaccgccctgtggctggaaatcccccacatcatgccttaaagtttccataggtagtgtaatgagtgaagatgttctggtccttgctggactgtcct

SEQ ID NO: 186056 - DNA, 201 bp, Homo sapiens
aaatacaaaaaattagccgggcgtggtggtcggcacctgtagtcccaactactcgggaggctgagacaggagaatgacgtgaacctgggaggtggagcttkcagtgagccgagatcgcgccactgcactctagcctgggcgaccaagtgagactccgtctcaaaaaaaaaagattagtgttgggctcttctattcctagag

SEQ ID NO: 186057 - DNA, 201 bp, Homo sapiens
aatgactactgagaacttatgtggctggggagggcttcatgaaggaggaggtgggagttgaggctgggcttcgaaggagaggtggccaaaaagtaggagtracttcatatgaaggcaggagtgcggatggcatgtgtgaagaatctatccttttagatcaggctgtctttgggtgatggattgatgaaggagagtagagcc

SEQ ID NO: 186058 - DNA, 201 bp, Homo sapiens
ttcccttgactctgagccgcaggcggtgcaaggtgtgctgtgtgagggggacagccggcagagccgcctcctgggactcgtgcgctaccgcctggagcacrgcggccaggaacacgcgtgagtgaggggcttggtccccacctgtctgggccatggggttgttcatcactgcaccctccagctgaacttcaactgtccctc

SEQ ID NO: 186059 - DNA, 201 bp, Homo sapiens
tgctctgtcctcacagtgtgatcttgtggctgggggacctcaactacaggatagaagagctggatgtggaaaaagtgaaaaagctcatcgaagagaaggaytttcaaatgctgtatgcatatgatcaggtacagatggccacctgtgccctcttccagcagctgtcctccaccatgagggcacagaaaagcctggcttcca

SEQ ID NO: 186060 - DNA, 201 bp, Homo sapiens
atgcatgcctgtggtcccagttacttgggaggctgacgtgggtggctcacttgagcacaggagtttgaggctgcagtgacctatgaccacatcactgtacrccagcccgggtgagagagggagaccccgtctctaaaaataaaatgtaaaatcactgaaaaaatgagtgttcggtgaaacaagtgggattttctgggccag

SEQ ID NO: 186061 - DNA, 201 bp, Homo sapiens
gtttagacgcctggctgtcaatacccacaacagttatggaggcaagggaaacacgcccttggaaagaaggtaatgtggagtgtgtagcttccgtattgatwaagaagaggatggacttaccctccactgtaagagttatccagagcatctgtgatggtcctgtaggcttccgaggcgatcgggcagtgtcagtcttcagcc

SEQ ID NO: 186062 - DNA, 201 bp, Homo sapiens
ttctgtgtagccctgtgctgggggctatcccagacaggttccttttcccagcctcctctcaagggggctctgttcgcactcctcgttggctaccctcaaasctcctggtcttgtttgtttcggacagttggtctccgcgttgccgccgagggtgccggggcagcccactggggccctcggtgctcttctctctctgctcag

SEQ ID NO: 186063 - DNA, 201 bp, Homo sapiens
agttaccgtgaggttcaaggaatggcggtggtctctgccttggaatagtacttttgtgttcacaattattcttgcatttgaacctcagtgcgcacagaacscttctgtgcgcgggagaaacagggccggagtctcttgggataatacaatcatgcagagccggctcttcaagctcgtggctcagtctgcccccatttgttc

SEQ ID NO: 186064 - DNA, 201 bp, Homo sapiens
acaagagatcacagttagctaacattaattgagcacctactgtgtgccagacatttttctagataccgagacaatgcacaacaactgtatttctccgtttrgtcttctgaacaatactaagaagtagatatcctgttttacagacgagtaaattgacacagaggaggcaagcaacttacccaagatcaatcatcaattgaa

SEQ ID NO: 186065 - DNA, 201 bp, Homo sapiens
tagttaccgtgaggttcaaggaatggcggtggtctctgccttggaatagtacttttgtgttcacaattattcttgcatttgaacctcagtgcgcacagaayccttctgtgcgcgggagaaacagggccggagtctcttgggataatacaatcatgcagagccggctcttcaagctcgtggctcagtctgcccccatttgtt

SEQ ID NO: 186066 - DNA, 201 bp, Homo sapiens
tccgggaggcagaggttgcagtgagcggagatcgctccactgcactccagcttaggcgacagagcgagactccgtctcaaaaaaaaaaaaaaaaaaaaaaagaaaagaaaagaaaattgggataatagtttcctccctcataaaaggtgtgttacgaggagtaggaagataatatttatacgaggcacagaccttggcaca

SEQ ID NO: 186067 - DNA, 201 bp, Homo sapiens
attagctgggtgttgtggtgcatgcctgtagtctcagctactcaggaggctgaggcgggaggatcacatgagccgaggagtttgagattacagtgaactaygattgcagcctgggcaacacagcaagaccctgtctctataaaaaaaaaaacaagaaaaaaaaaacgaacaccatggggtgtgtagaaagtgctcaataag

SEQ ID NO: 186068 - DNA, 201 bp, Homo sapiens
gtgatcactcatctggtcattggcggagtcgaaaatagaactcaggtcgcacttgagacctgactcttacactcttgttcttcttcttcttttttttttttgagacagagtctcactctgtcgcccaggctggagtgcagtggtttgatctcggctcactgcaacctccgcctcctgggtccaagtgattctcctgtctca

SEQ ID NO: 186069 - DNA, 201 bp, Homo sapiens
gagcacggcggccaggaacacgcgtgagtgaggggcttggtccccacctgtctgggccatggggttgttcatcactgcaccctccagctgaacttcaactrtccctccagggcagggtctgagtctcctagaataattatcacaatgatagttaatattttttgaacactatattttaaaccctgcacacgtactaactca

SEQ ID NO: 186070 - DNA, 201 bp, Homo sapiens
tgtgatcactcatctggtcattggcggagtcgaaaatagaactcaggtcgcacttgagacctgactcttacactcttgttcttcttcttcttttttttttttgagacagagtctcactctgtcgcccaggctggagtgcagtggtttgatctcggctcactgcaacctccgcctcctgggtccaagtgattctcctgtctc

SEQ ID NO: 186071 - DNA, 201 bp, Homo sapiens
cttcccttgactctgagccgcaggcggtgcaaggtgtgctgtgtgagggggacagccggcagagccgcctcctgggactcgtgcgctaccgcctggagcayggcggccaggaacacgcgtgagtgaggggcttggtccccacctgtctgggccatggggttgttcatcactgcaccctccagctgaacttcaactgtccct

SEQ ID NO: 186072 - DNA, 201 bp, Homo sapiens
tgtccccaaaagagaggaagagccatgtcctaggagcaaagggactaggtccccttctccaatccacgtaccccacttccaacaaggatagaccacactcragagcaactggatgccctcccagacaaaggcagtatagcaaactgtagatcccagcggggcaaagggactggacccctatccctaaaaactgaaaggcct

SEQ ID NO: 186073 - DNA, 201 bp, Homo sapiens
acttccaacaaggatagaccacactcaagagcaactggatgccctcccagacaaaggcagtatagcaaactgtagatcccagcggggcaaagggactggamccctatccctaaaaactgaaaggcctattctagggaggacaaagaggaggaggaggaggatcaggcctccccggtaccatctccctctgcaaaggcccct

SEQ ID NO: 186074 - DNA, 201 bp, Homo sapiens
aagcattcagacctgattgaggccaggctgccttgaggaccatcagccccaagaacttttttcataaggaaactgtggagaactgttcttcacccagggasgggaggaaggatagatagtatgccatgtttcacactcctgggagaccctgctatttttttttttttttttttttgagacagagttttattctgttgccca

SEQ ID NO: 186075 - DNA, 201 bp, Homo sapiens
ctgaggtgggagcatcacttgagaccaggagtttgggaccaggctgggcaacacagggagaccccctctctacaaaaacatttttaaaaaattagctgggygtggtgatgcatgcctgtggtcccagttacttgggaggctgacgtgggtggctcacttgagcacaggagtttgaggctgcagtgacctatgaccacatca

SEQ ID NO: 186076 - DNA, 201 bp, Homo sapiens
tattagaaacctgcattcaagagcacttttcaaattcctatagctgattaaaaccacctttgaaagaggattaaaacaagacaacagttgtctgtggatgrcaaaatgttttaaggcagccacagtcaaaaacacaactgacaaagaaatttggttaccacagtggcatgtaacaattttacataacaattgtaattatta

SEQ ID NO: 186077 - DNA, 201 bp, Homo sapiens
aagcttattgtgcgtttctacacaaagagtacaacagcaatgtattccacaacggtaaagcaaaataagtgaaattattccaaataaactaaattagaagkcttttcatgaactgggcaactgttggaaccaagctgatatgggattgctagctgattccaatatatgcccagaattagaatattgatccaggtttttaca

SEQ ID NO: 186078 - DNA, 201 bp, Homo sapiens
gggtagcaagagaggcatgagaagagtgaaaagactgcttacccaatttgaaattggtgagatgttccttgggctggttggtctgaggacctgaggtcacrgagtgagggcgaagacaggggactggtctcctgaaggagtcctcctgtcctgggttttggcaccaaatgtcacacgcatccttgtgaagagaccaccaac

SEQ ID NO: 186079 - DNA, 201 bp, Homo sapiens
aattggaaggacagggagattgaagggtagcaagagaggaagattgaagggtagcaagagaggcatgagaagagtgaaaagactgcttacccaatttgaarttggtgagatgttccttgggctggttggtctgaggacctgaggtcacggagtgagggcgaagacaggggactggtctcctgaaggagtcctcctgtcctg

SEQ ID NO: 186080 - DNA, 201 bp, Homo sapiens
attttatgacaagaattatctagatcttgtaggatggagaaatcgaaagtgtcattttctggctatttggaatcattgtcaagtttgtattggggccaagyggtgttgtagaagaaaataagacgcttaggttttaggtcaggtgtgagttgaagaggttttaagtttttgagaacacaggctaaaggagaagaagggaga

SEQ ID NO: 186081 - DNA, 201 bp, Homo sapiens
aaaatgaccaggcacagtggctcacgcctgtaatctcggcactttgggagactgaggtgggagcatcacttgagaccaggagtttgggaccaggctgggcracacagggagaccccctctctacaaaaacatttttaaaaaattagctgggcgtggtgatgcatgcctgtggtcccagttacttgggaggctgacgtgggt

SEQ ID NO: 186082 - DNA, 201 bp, Homo sapiens
aagagttgggagctggctcggcctggcaaggagcagcctggggaggagggtagaggtcagatgggtctgtagaaaaggaggattcccaggattcagagctkggggtggagactgaaggaacagacaggagagaaagaagaaagctttgggatgaatctcattgggaacagagattaggaagggaccgatgtgtaaaagaat

SEQ ID NO: 186083 - DNA, 201 bp, Homo sapiens
acggaatgaaactgtaagccagaccgggtgtgaggaggggaggtaatagaagggttatagggtgggggagcagaggttgaagaagagttgggagctggctyggcctggcaaggagcagcctggggaggagggtagaggtcagatgggtctgtagaaaaggaggattcccaggattcagagcttggggtggagactgaagga

SEQ ID NO: 186084 - DNA, 201 bp, Homo sapiens; identical to SEQ ID NO: 32413

SEQ ID NO: 186085 - DNA, 201 bp, Homo sapiens
attaaatctatagcctttgttttctgtgttgctatcaactgctatttcccagtgctgtgaatgccgtctatactgagaaagaggaaatgggcagaagccarggtactcagtctctgatgtttccctttcaggtgagggtcgtaaatgacgagctttaccggaagacactggaggaaattgttcgctccctggataagatgg

SEQ ID NO: 186086 - DNA, 201 bp, Homo sapiens
cctcacttctcagacggggcggctgccgggcggaggggctcctcacttctcagacggggcggttgccaggcagagggtctcctcacttctcagacggggcrgctgccgggcggaggggctcctcacttctcagacggggcggttgccaggcagagggtctcctcacttctcagacggggcggccgggcagagacgctcctc

SEQ ID NO: 186087 - DNA, 201 bp, Homo sapiens
agtggcgattaggcctggtggaactgccatcaataaaccaagtgttatcagggtgaggaacaggaaagaaggaaatatggggaaatggagtgaatgtcagrtggatcagagagatacagtcatggggatcaggtgtggtatccggaataatgtgggaggccggattgaagtctgggccaggaacaatagtaactgtgggag

SEQ ID NO: 186088 - DNA, 201 bp, Homo sapiens
aggcagagggtctcctcacttctcagacggggcggccgggcagagacgctcctcacatcccggacggggcggcagggcagaggtgctccccacatctcagrcgatgggcggccgggcagagacgctcctcacttcccagatgtgatggcggccgggaagaggcgctcctcacttcctagatgggatggcggccgggcagag

SEQ ID NO: 186089 - DNA, 201 bp, Homo sapiens
gttggtagctatgagaatgaaagacaggagtcaaggatgacttctttcttttaggattgggtgtgtgtcttgcagtccccttacctgtcatccttctgggktccacaccacacctggggtaaccagcagagaaactctgtaccaaccaacttctctgagtgcttgtcatgatggggatttcctcagggagggacctgggtt

SEQ ID NO: 186090 - DNA, 201 bp, Homo sapiens
ggtaacatgcttgtgatcactcatctggtcattggcggagtcgaaaatagaactcaggtcgcacttgagacctgactcttacactcttgttcttcttcttcttttttttttttgagacagagtctcactctgtcgcccaggctggagtgcagtggtttgatctcggctcactgcaacctccgcctcctgggtccaagtgat

SEQ ID NO: 186091 - DNA, 201 bp, Homo sapiens
agcaatcacttgaacctgggaggcggaggttgcagtgggctgagatcacgccactgcatgccagcctgacgacagtgagactccgtctcaaaaaaaaaaaagaaatgaaccagctttgtagtaactcaaatttacaaggggatgtgtttaagtattttttcttctggacccaggaaacaaagtattaaagtctgtcatgcc

SEQ ID NO: 186092 - DNA, 201 bp, Homo sapiens
gcactcggcaagctgaggcaggagaatcaggcagggaggttgcagtgagccgagatggcagcagtaccgtccagcttcggctcggcatcagagggagaccrtggaaagagagggagagggagactgtggggagagagagagggagggggagggggagagggagagggattttattattttttaagagataggggtctctat

SEQ ID NO: 186093 - DNA, 201 bp, Homo sapiens
ttggctcactgcaacctctgcctcccaggttcaagcaattcttctgcttcagcctcccaagtagctgagattacaggcatgcactaccatgcccagctaattttttttttttgagacggagtctctctctgttgcccaggctgtagtgcagtggcacgatctcagctcactgcaagctccacctcctgggttcatgccatt

SEQ ID NO: 186094 - DNA, 201 bp, Homo sapiens
gttcagtctgcacagagctcccaaacctcctcctgctttctcttccagaagaaaatctgtgctactttctcctgccaaggtggtgactgtttcaaagggcmgaaagctgtggccatgtgccctgagggcttggacttctgtgaggtgagccctgcgatgctccaagaattagggagctctcctccctcagagctgcatggc

SEQ ID NO: 186095 - DNA, 201 bp, Homo sapiens
tattgtccaagctgatctcaaactcctgggctcaagcagtcctcctgcctcagcctcccgaatagctgggactataggcacaagccatggtgcacccagcrtactttcagatcagtaaatatctaggagtgtcatgggtagaacatatggtaagactgtttaactttttaagaaactgccaagctgtcttccaaagtgtct

SEQ ID NO: 186096 - DNA, 201 bp, Homo sapiens
ccacacagtgaatctgggggggcaggggaacagagggaaggtgggacagcctgggtggggagaggcctcgcctctgggttgtcttcccttgactctgagcygcaggcggtgcaaggtgtgctgtgtgagggggacagccggcagagccgcctcctgggactcgtgcgctaccgcctggagcacggcggccaggaacacgcg

SEQ ID NO: 186097 - DNA, 201 bp, Homo sapiens
ctgcctgcctcggcctccccaagtgctaggattacaggtgtgagccaccacgcccggccttttttttttttttttcttttttgagatggagtttcactctygttgcccaggctggagtgcgttggcgtggtcttggctcactgcaacctctgcctccttggttcaagcaattctcctgcctcagcctctcgagtagctggg

SEQ ID NO: 186098 - DNA, 201 bp, Homo sapiens
cagcctcctgggcccaagtaaccctcccacctcagctgctggagtagctggtaatacacatgtgctgatttttaaatttttgtagagacagggtcgcactrtgttgcccacatgggtctcaagctcctgggcttgggcaatcctcccgccttggcctcccaaattgttgagattataagtgtgaaccaccacacctggcct

SEQ ID NO: 186099 - DNA, 201 bp, Homo sapiens
ttagtagagacggggtttcaccgtgttgcccaggctgttctaaaactcctgaactcaggtaatctgcctgcctcggcctccccaagtgctaggattacagrtgtgagccaccacgcccggccttttttttttttttttcttttttgagatggagtttcactctcgttgcccaggctggagtgcgttggcgtggtcttggct

SEQ ID NO: 186100 - DNA, 201 bp, Homo sapiens
cctctaaaagtattaaagcagcggcagccaccacacgcagacgtaagggctaggctaaaagagtaaggtcaagttgtttggacagaaaggctccagggcgyggtcccggctcttgtgtaagaattccgaccacacagccctgcacttcagctgtgtgtaatgaaaaaggttgggatgagttagggagaggtagtgtgggag

SEQ ID NO: 186101 - DNA, 201 bp, Homo sapiens
cactgtacgccagcccgggtgagagagggagaccccgtctctaaaaataaaatgtaaaatcactgaaaaaatgagtgttcggtgaaacaagtgggattttytgggccagcaagtcttccaaactgtatatgatgcatcctgtctccatgtgtaatatattttaatgataaatgtatttttaacagtggcggttgtgtatgt

SEQ ID NO: 186102 - DNA, 201 bp, Homo sapiens; identical to SEQ ID NO: 32405

SEQ ID NO: 186103 - DNA, 201 bp, Homo sapiens; identical to SEQ ID NO: 32407

SEQ ID NO: 186104 - DNA, 201 bp, Homo sapiens
ccgcctccccggctctagcaattctcctgcctcagcctcctgagtagctgagattacaggcatgtaccaccaagcccagctaatttttgtatttttattamagacggggtttcaccgtgttggccaggatggtctcaatctcctgacctcgtgatccacccgcctctgcctcccaaagttctgggattacaggcataagcc

SEQ ID NO: 186105 - DNA, 201 bp, Homo sapiens
tttgtgcttttgctgaagttaaattttctctgccagaaatgctttctgagcctctcgttttctcatcagtgatatagtttattggttgagagcacagactsttggctcagattccctgggtttgaaccctggctgtgtgccatttactactgtgtgctcttgggcaagttatttaacctctctgtgtatatctcctggtct

SEQ ID NO: 186106 - DNA, 201 bp, Homo sapiens
accatacccggctaatttttgtattttctatagagacggggttttgccatgttggccaggctggtctcaaactcctgacctcaggtgatctgcccgccccrgcttcccaaagtgttgggattacaagcatgagccactgcgcccggccttttttttttttttttttttgagacagtcttactctgtcacccaggctggagt

SEQ ID NO: 186107 - DNA, 201 bp, Homo sapiens; identical to SEQ ID NO: 32409

SEQ ID NO: 186108 - DNA, 201 bp, Homo sapiens
aaaaattccataagaggatctctattatttttatttattgatttatttttgagatggagtcttactctgtcacccagtctggagtgcagtgacgcgatctyggctcactgcaaactccacctcccgtgttcacgccattctcctgcctcagcctcctgagtagctgggactacaggcgcccgccaccacgcccgcctgatt

SEQ ID NO: 186109 - DNA, 201 bp, Homo sapiens
tagctgggactacagacatgtgccaccatgtctggctaacttttatttatttttattatttttattttcatttttttgagacagattctagctctgtcacytaggctaaagtgcagtggcatgatctcaactcactgcaaccttcacctcccatgttcaagtggttctcctgcctcagcctcctacgtagccaggactaca

SEQ ID NO: 186110 - DNA, 201 bp, Homo sapiens; identical to SEQ ID NO: 32411

SEQ ID NO: 186111 - DNA, 201 bp, Homo sapiens
ttggatcgtgtatacagttcttggactatagtaggcacttgagaaatgattcagtgaacaaaagacaaatcccggttcttcctctttcaggtcatttctastctccccatattccacaaaaatgtcttccactacttgatggcgtttttgcgagaactgctgaaaaattcagcaaaaaatcatttggatgagaatattcta

SEQ ID NO: 186112 - DNA, 201 bp, Homo sapiens
aagcttgaacttgctgcttttagcattttgcattctctctccttcccaaatgacagccgaatgccttgtacatcagtaggtgctcaaaaaatgtctgtctmtggttgaattgtagagacccatacaatttctagcccaaggtgctttgtggcctcaacaactcctgcccccttcctctttgagcatgctctgcatctctgt

SEQ ID NO: 186113 - DNA, 201 bp, Homo sapiens
aaggctcactttctaacccagagcagaagagaaagataaagcgcaaagccagactgaaaactaaaagggatgtgctgattattttaaaattctctattctrcctgccaaacccacatttgtagagcctgtgtttgcagatgaaggaagaatcactattccagaacatgaaagcttcaaatgtggtatttttctcaagagaa

SEQ ID NO: 186114 - DNA, 201 bp, Homo sapiens
gcccatctcagcttccaaaagtgctgggattacaggcgtgagctaccttgcccagcctctcatttacttttatttatttatttatttattttttgtgagayggagtcttgctttgttgcccaggctggagtgcagtggcgccatcttggctcactgcaacctccgcctcttggattcaagtgactgttctacttcagcctc

SEQ ID NO: 186115 - DNA, 201 bp, Homo sapiens
tcggttttatttttattttaaaataatttgaaagctgaacatggtggcgcgtacctgtagtcccagccacttgagaggctgaggtggaaggcttgagcccwggagtttgagggtgatgtgcactatgattgatcctgtgaattagttgctgcactccagcctaggcaacatagtgagactgtctctaaaataaataaataa

SEQ ID NO: 186116 - DNA, 201 bp, Homo sapiens
tgcatcttccttgggcttatctcagagttcactatcactagagtttccatgacattctgggctatggtgctgggacgggtgagagtttaagagcacctcayctccttgccccttcacaagagactgccagaatccagacaattggcggaggacaaggccaatggcagcagaaagaggtgggtgctgtgttctcagccagta

SEQ ID NO: 186117 - DNA, 201 bp, Homo sapiens
tctgtctgtggaatgcgtggttaggggcagtggaatgttttcctttttctgtgggtttgctgtccccatgccatgcattttcctggagccagcctggcagwagttctgtcatgatcttgattgctttccagactctgatgccagtatggactggagatgatgggagccagttggatagccccatggaaatccccaaagagc

SEQ ID NO: 186118 - DNA, 201 bp, Homo sapiens
gcggtcagcgcaaacctggctgaggacatttcggattcttccttggggattcgttcccttctccttgactccggtgccgcgagggcgacaccctccgggcyccgcgtggccaccccgggcgcttccccacgcggatgaacccacctcctgggcgccttcccctcggtgccccgctcgccaattggaggctgcagctcagcc

SEQ ID NO: 186119 - DNA, 201 bp, Homo sapiens
gaataactttcttttggggctttttcctttgggttagagtttgaattccagattgatatgcttttctccactaattcaaagtttgacctttttattctgakatttttttttctcccatccttttgtatagctgaaaattcaggtggccgcaaagactgtctttgaaggcttcacagagggtgagctcacattccagcctac

SEQ ID NO: 186120 - DNA, 201 bp, Homo sapiens
ttctgtctgtggaatgcgtggttaggggcagtggaatgttttcctttttctgtgggtttgctgtccccatgccatgcattttcctggagccagcctggcakaagttctgtcatgatcttgattgctttccagactctgatgccagtatggactggagatgatgggagccagttggatagccccatggaaatccccaaagag

SEQ ID NO: 186121 - DNA, 201 bp, Homo sapiens
tgcctcagcctcccgaatagctgggactataggcacaagccatggtgcacccagcatactttcagatcagtaaatatctaggagtgtcatgggtagaacayatggtaagactgtttaactttttaagaaactgccaagctgtcttccaaagtgtctgtatgattttccatgcctactatcaatggatgagagtcatggctc

SEQ ID NO: 186122 - DNA, 201 bp, Homo sapiens
caaggctgtttataatgaacttggaccaagataattgagcaagcatcacattagattattaaatgggatggcgagagaaaaaaattttccgaacagttgakccattttcccacccacctcccaagaggctgagcctcaggggcctttgtcagaagcaccctgggtagatcaggttaaagttcctcctaaaccctgttacct

SEQ ID NO: 186123 - DNA, 201 bp, Homo sapiens
tccatgacctttatcttaagccagtcttaattatcccgcaattttcatttccagatcttccagaaggggtgcctccgggtgggaaagatgcagggtctcgscactcgtaggttagcacatagcatgcttggtgaattgaacagatgattacctgtgttctagtgtggagaaggagacacgtgaatactctcagccagcttc

SEQ ID NO: 186124 - DNA, 201 bp, Homo sapiens
atgcagggaaattccaagatcatttttcaccttttccatgacctttatcttaagccagtcttaattatcccgcaattttcatttccagatcttccagaagrggtgcctccgggtgggaaagatgcagggtctcggcactcgtaggttagcacatagcatgcttggtgaattgaacagatgattacctgtgttctagtgtgg

SEQ ID NO: 186125 - DNA, 201 bp, Homo sapiens
gataatggctcaataactctgaggctggttgctcagcctctgagggcaatacaggcatttaaaaaattaaaatgaccaggcacagtggctcacgcctgtartctcggcactttgggagactgaggtgggagcatcacttgagaccaggagtttgggaccaggctgggcaacacagggagaccccctctctacaaaaacatt

SEQ ID NO: 186126 - DNA, 201 bp, Homo sapiens
aactttattgcttggacattcaatacatttttggttacaaagcaaaactatcttctgccagagaagaaaggttagctgaagaaagtcccatcagttagtcttttttttttttaatcttctcatctctatactgggcattactagtggggaggggcagcaaagcttgtatggtatattgaaaagaactagaattcataattt

SEQ ID NO: 186127 - DNA, 201 bp, Homo sapiens
atacaggcatttaaaaaattaaaatgaccaggcacagtggctcacgcctgtaatctcggcactttgggagactgaggtgggagcatcacttgagaccaggrgtttgggaccaggctgggcaacacagggagaccccctctctacaaaaacatttttaaaaaattagctgggcgtggtgatgcatgcctgtggtcccagtta

SEQ ID NO: 186128 - DNA, 201 bp, Homo sapiens
gggctgaaagataagtacatcaggttgacaagtggtggtaaagtctgagggtatgaccagttgggaaaaggggcatatgtgtgtgtttgtgtgtgtatgtgagagagagagagagagagagggaaatatggaacatagctgagttgaagaaatagaaatttttatttctagtccctttctgaaagaattgaatgtttatat

SEQ ID NO: 186129 - DNA, 201 bp, Homo sapiens
ggctgaaagataagtacatcaggttgacaagtggtggtaaagtctgagggtatgaccagttgggaaaaggggcatatgtgtgtgtttgtgtgtgtatgtgagagagagagagagagagagggaaatatggaacatagctgagttgaagaaatagaaatttttatttctagtccctttctgaaagaattgaatgtttatata

SEQ ID NO: 186130 - DNA, 201 bp, Homo sapiens
gtgtcactggtgatttttacatttgttaccttcttgcaaaatatacttactgtgctagatgttgacatgacttagtaatattatagaagcccacataggtrtttattaggattttttaactctttaacaaaaagtttaaaacagtgtgtaagtatacaatccagcataagaacatcattggaaagaaagccaagataagtt

SEQ ID NO: 186131 - DNA, 201 bp, Homo sapiens; identical to SEQ ID NO: 32434

SEQ ID NO: 186132 - DNA, 201 bp, Homo sapiens
catatgaaggatagagtagggcatatatataaataggaaattggacaagacaattttttttccaattttagcttttagttatttttaaataaatggtattrtttaagttaatataggtaaagctggcatataaatgttggttctctcctcctgtgggctaaaattctaaaacttaacccaaatgaaatagaattactactt

SEQ ID NO: 186133 - DNA, 201 bp, Homo sapiens; identical to SEQ ID NO: 32436

SEQ ID NO: 186134 - DNA, 201 bp, Homo sapiens
atttgttgttgacaaccgaaagtatagaaaagcataggaaagagaacaaaaactatccataatccctcagtatggatttataggcaaatgttaattgtggrcatttctccccatccaatcttttttcatatatatattcttttctaatatatatctatattatatatattatatgtaatataattatatgtaatatatata

SEQ ID NO: 186135 - DNA, 201 bp, Homo sapiens
tgacaagtgaagtaattggtactcgggctgaaagataagtacatcaggttgacaagtggtggtaaagtctgagggtatgaccagttgggaaaaggggcatrtgtgtgtgtttgtgtgtgtatgtgagagagagagagagagagagggaaatatggaacatagctgagttgaagaaatagaaatttttatttctagtccctt

SEQ ID NO: 186136 - DNA, 201 bp, Homo sapiens
ccatgtgttctcattgttcaattcccacctatgagtgagaatatgcagtgtttggttttttgttcttgcgatagtttactgagaatggatttccaatttcrtccatgtccctacaaaggacatgaactcatcattttttatggctgcatagtattccatggtgtatatgtgccacattttcttaatccagtctatcattgt

SEQ ID NO: 186137 - DNA, 201 bp, Homo sapiens
gtatatatgtgccatgctggtgcgctgcacccactaacccatcatctagcattaggtatatctcccaatgccatccctcccccttccccccaccccacaamagtccccagagtgtgatgttccccttcctgtgtccatgtgttctcattgttcaattcccacctatgagtgagaatatgcagtgtttggttttttgttctt

SEQ ID NO: 186138 - DNA, 201 bp, Homo sapiens
tcctgtgggctaaaattctaaaacttaacccaaatgaaatagaattactacttatgagttgtgtttttacattttaggaaccctgattgctgtccttcaaygtgttcattatgaagttattagtaatacttttgttttctggacttataactggttttagaagtgactcttcctctagtttgccacctaagttactactag

SEQ ID NO: 186139 - DNA, 201 bp, Homo sapiens; identical to SEQ ID NO: 32439

SEQ ID NO: 186140 - DNA, 201 bp, Homo sapiens
aaaataatcatcatctctggagcctctgaaagcttggcattaacgttatgttttacaaaagaatcattttagtgtctgcatctatttttattaagcctttmgaagaatttctaatgtggcaaatgagctgacagcctagaaggagtattgatgtggagtataaaaatggcccatatgaaggatagagtagggcatatatat

SEQ ID NO: 186141 - DNA, 201 bp, Homo sapiens
atagttgttgatagctaaaaggaagtttaagagggatgtggtaataaaactcatttcaatagctattggatttcttcataagttactggagcatccatgtycatgtaggctttgcatgtttgttaatcaacttcatgtgactattggggcacatacagactgatgggggcttttttctcaatagcatttatttcttattcc

SEQ ID NO: 186142 - DNA, 201 bp, Homo sapiens
tagttacacagggaaagagccagagcagtaaatagtgtttttcaaaaattaagtttatgagtatgttttccctgtgagaagatactgtgccgccgtatttrctgatttaaaagtctactctgtgattggaaagaaatatttggatatggggaactatacccagagagaaaccagggaatctactcaatccaagctttcatg

SEQ ID NO: 186143 - DNA, 201 bp, Homo sapiens
acctccagccctcaaatctgtcagctcccctacctttgctccttctctcctgttacaatggaagaggcatcctgtccatctaaagtgaatcattttacctmactcacatgtcctattttcttagagaccaaagaagatagagagcaaaggcagggagatttattagggaaaagctgtttttgtcatcagtgaattgattta

SEQ ID NO: 186144 - DNA, 201 bp, Homo sapiens
acctccggcaactctcttcacctccagccctcaaatctgtcagctcccctacctttgctccttctctcctgttacaatggaagaggcatcctgtccatctraagtgaatcattttacctaactcacatgtcctattttcttagagaccaaagaagatagagagcaaaggcagggagatttattagggaaaagctgtttttg

SEQ ID NO: 186145 - DNA, 201 bp, Homo sapiens
tcattaggtttgttactctgtcttttggagaggtggttttgttactctgcattagttttggttattagggagcaccaggaacaaatgttccatgcaccacwttcagaaggcaacctgtctccgattaaaatagtagagattttgtagaccccaagatcctcataaatcagattctgtgcctttggtcttcctaattttaag

SEQ ID NO: 186146 - DNA, 201 bp, Homo sapiens
tagattcttgatagctgaaattgctgtgctatgactagggctgtgtctgtggaaatacccatatgcctcctctaccactcattaggtttgttactctgtcytttggagaggtggttttgttactctgcattagttttggttattagggagcaccaggaacaaatgttccatgcaccacattcagaaggcaacctgtctccg

SEQ ID NO: 186147 - DNA, 201 bp, Homo sapiens
tgcaagttggacctggatattggaggggcttcaatgtgagactgaggcatttgggctttttgtataggcaggggggccttttgaatatattttaaattaarggaacatgaacagagctgtgcccagagagactgagtaggcagcaggtgtgaggtaagaaagtggaaggtggttgaggtagaaaggtgaattaagagacaa

SEQ ID NO: 186148 - DNA, 201 bp, Homo sapiens
ataagttctttgtcccctaatacatggcacatacatatacttttgtgttatggaattagtgatagtagatatttgttgaatgattttttacaaaatgaccyaggtgtctgctgagttaaccttcatatgtaggaactaattttaggatattctggaagtgcaaactaacactgaagagctattataggccaccaagatgaa

SEQ ID NO: 186149 - DNA, 201 bp, Homo sapiens; identical to SEQ ID NO: 32447

SEQ ID NO: 186150 - DNA, 201 bp, Homo sapiens; identical to SEQ ID NO: 32448

SEQ ID NO: 186151 - DNA, 201 bp, Homo sapiens; identical to SEQ ID NO: 32450

SEQ ID NO: 186152 - DNA, 201 bp, Homo sapiens
tgttcagggtcttcttagtctgaaataatgcattcacttgttgcattctaactgcaatcccagatctttgtaactttcactaaaagttactcttaactaawcttcattagttctttgacttcaccagaacctctagttgaaaaacttctctacttcttacttacatctgtcagtttcagcttagatgctgcagccccaatt

SEQ ID NO: 186153 - DNA, 201 bp, Homo sapiens
atttatagtcctttgggtatatacccagtaatgggatggctgggtcaaatggtatttctagttctagatccctgaggaatcgccacactgacttccacaabggttgaactagtttacagtcccaccaacagtgtaaaagtgttcctatttctccacatcctctccagcacctgttgtgtcctgactttttaatgattgcca

SEQ ID NO: 186154 - DNA, 201 bp, Homo sapiens
ttggctgcataaatgtcttcttttgagaagtgtctgttcatgtccttcgcccactttttgatggggttgtttttttcttgtaaatttgtttgaattcattktagattctggatattagccctttttcagatgagtagattgtgaaaattttctcccattttgtaggttgcctgttcactctgatggtagtttcttttgctg

SEQ ID NO: 186155 - DNA, 201 bp, Homo sapiens
gagcaagagcccaggtggcatgagactccctaatttaacccagccacacaggcagtagcagtggataaagagagtcctctcctgatgcccatccagctgcyatcttcaccacacatctgacctagatggcattcagttttgtccaccctttaagcatacatatgcacctactgaatgaacaaacaggatatgcacaatacc

SEQ ID NO: 186156 - DNA, 201 bp, Homo sapiens
cgttgcttttggtgttttagacatgaagtccttgcccatgcctatgtcctgaatggtaatgcctaggttttcttctagggtttttatggttttaggtctarcgtttaagtctttaatccatcttgaattgattgttgtataaggtgtaaggaagggatccagtttcagctttctacatatggctagccagttttcccagca

SEQ ID NO: 186157 - DNA, 201 bp, Homo sapiens
agggatccagtttcagctttctacatatggctagccagttttcccagcaccatttatgaaatagggaatactttccccattgcttgtttttctcaggtttrtcaaagattagatagttgtagatatgcggcgttatttctgagggctctgttctgttccattgatctatatctctgttttggtaccagtaccatgctgttt

SEQ ID NO: 186158 - DNA, 201 bp, Homo sapiens
tgagacaatggggttttctagatatacaatcatgtcgtctgcaaacagggacaatttgacttaatttggaagaaattttgatgaaaggacaaggagtaatrgaggtattttactatgtagaaagtaagataagtgtaagtgttttgaagctgctagaaaactttgtgtatgctagaaatttctgtgtattttacaaaattg

SEQ ID NO: 186159 - DNA, 201 bp, Homo sapiens; identical to SEQ ID NO: 32435

SEQ ID NO: 186160 - DNA, 201 bp, Homo sapiens
taattgtgggcatttctccccatccaatcttttttcatatatatattcttttctaatatatatctatattatatatattatatgtaatataattatatgtaatatatataatatatataatgtatattatatattatatataatatataattacatataattataatatatattttctacatatatatgtagaatatatta

SEQ ID NO: 186161 - DNA, 201 bp, Homo sapiens
aaccttaaatactctccttgacattcaattatttagtttcagttgtgttgttgtttaattagaactgagcagtggacaggaattgtttttctttgggaagsgtgtggcttttgctctgaaaccttcttcctgtaacttctaacttctgaccttctcctggccagcaatgagttatacatcacaattaggagtataaaagag

SEQ ID NO: 186162 - DNA, 201 bp, Homo sapiens
attgtgggcatttctccccatccaatcttttttcatatatatattcttttctaatatatatctatattatatatattatatgtaatataattatatgtaatatatataatatatataatgtatattatatattatatataatatataattacatataattataatatatattttctacatatatatgtagaatatattata

SEQ ID NO: 186163 - DNA, 201 bp, Homo sapiens
gcatttctccccatccaatcttttttcatatatatattcttttctaatatatatctatattatatatattatatgtaatataattatatgtaatatatataatatatataatgtatattatatattatatataatatataattacatataattataatatatattttctacatatatatgtagaatatattatatattata

SEQ ID NO: 186164 - DNA, 201 bp, Homo sapiens
ttctccccatccaatcttttttcatatatatattcttttctaatatatatctatattatatatattatatgtaatataattatatgtaatatatataatatatataatgtatattatatattatatataatatataattacatataattataatatatattttctacatatatatgtagaatatattatatattatatata

SEQ ID NO: 186165 - DNA, 201 bp, Homo sapiens; identical to SEQ ID NO: 32438

SEQ ID NO: 186166 - DNA, 201 bp, Homo sapiens; identical to SEQ ID NO: 32440

SEQ ID NO: 186167 - DNA, 201 bp, Homo sapiens; identical to SEQ ID NO: 32441

SEQ ID NO: 186168 - DNA, 201 bp, Homo sapiens
gtctgttttgcacatgggaagtggtataaaactttcacattaaaacactcaagtgtgtattttggagtataaaattcacttttttgaggtaaaatgagatmaaaaatgtttcctgttttgtggcaggacatttcagattacaatttcacttccctctgctcttttttaaaaaataatattttattgagatataaatcacac

SEQ ID NO: 186169 - DNA, 201 bp, Homo sapiens
agactctgctgcccggtcccagccagccctgagctggcgccttagacgctcgcctggcagctgcgcacactcggagcgccccgagcggcgcagatagggasgttggggctgtgccccgcggcgcggcgcctgccactgcgcaggcgcctcaggaagagctcggcatcgcccctcttcctccaggtcccccttccccgcaac

SEQ ID NO: 186170 - DNA, 201 bp, Homo sapiens
ccttcacatcccttgtaagttggattcctaggtattttattctctttgaagcaattgtgaatgggagttcactcatgatttggctgtttgtctgttgttgrtgtataagaatgcttgtgatttttgcacattgattttgtatcctgagactttgctgaagttgcttatcagcttaaggagattctgggctgagacaatggg

SEQ ID NO: 186171 - DNA, 201 bp, Homo sapiens
cccggtcccagccagccctgagctggcgccttagacgctcgcctggcagctgcgcacactcggagcgccccgagcggcgcagatagggacgttggggctgwgccccgcggcgcggcgcctgccactgcgcaggcgcctcaggaagagctcggcatcgcccctcttcctccaggtcccccttccccgcaacttcccacgagt

SEQ ID NO: 186172 - DNA, 201 bp, Homo sapiens
cttctgttcttcccagttacacagaaccctcagcctgaccactgtctttataactggtactgcttgcagtgagcttttgcaaacagtgctgagattgacargtgaagtaattggtactcgggctgaaagataagtacatcaggttgacaagtggtggtaaagtctgagggtatgaccagttgggaaaaggggcatatgtgt

SEQ ID NO: 186173 - DNA, 201 bp, Homo sapiens; identical to SEQ ID NO: 32442

SEQ ID NO: 186174 - DNA, 201 bp, Homo sapiens
cctgtgggctaaaattctaaaacttaacccaaatgaaatagaattactacttatgagttgtgtttttacattttaggaaccctgattgctgtccttcaacrtgttcattatgaagttattagtaatacttttgttttctggacttataactggttttagaagtgactcttcctctagtttgccacctaagttactactagt

SEQ ID NO: 186175 - DNA, 201 bp, Homo sapiens
aatgaaatagaattactacttatgagttgtgtttttacattttaggaaccctgattgctgtccttcaacgtgttcattatgaagttattagtaatactttygttttctggacttataactggttttagaagtgactcttcctctagtttgccacctaagttactactagtatcctttgatggcttcagagctgattatctg

SEQ ID NO: 186176 - DNA, 201 bp, Homo sapiens; identical to SEQ ID NO: 32445

SEQ ID NO: 186177 - DNA, 201 bp, Homo sapiens; identical to SEQ ID NO: 32446

SEQ ID NO: 186178 - DNA, 201 bp, Homo sapiens
gtgaaccttaaatactctccttgacattcaattatttagtttcagttgtgttgttgtttaattagaactgagcagtggacaggaattgtttttctttgggmagcgtgtggcttttgctctgaaaccttcttcctgtaacttctaacttctgaccttctcctggccagcaatgagttatacatcacaattaggagtataaaa

SEQ ID NO: 186179 - DNA, 201 bp, Homo sapiens; identical to SEQ ID NO: 32449

SEQ ID NO: 186180 - DNA, 201 bp, Homo sapiens; identical to SEQ ID NO: 32451

SEQ ID NO: 186181 - DNA, 201 bp, Homo sapiens; identical to SEQ ID NO: 32452

SEQ ID NO: 186182 - DNA, 201 bp, Homo sapiens
ttatatattatatataatatataattacatataattataatatatattttctacatatatatgtagaatatattatatattatatatagaaaaatatatatttttttctaatatatgtgtgtgtgttttaatattattgaaatctttatatattctgctttttgtcatattggttatttttatgatgaaatatttcaaaca

SEQ ID NO: 186183 - DNA, 201 bp, Homo sapiens
ttgcttttggtgttttagacatgaagtccttgcccatgcctatgtcctgaatggtaatgcctaggttttcttctagggtttttatggttttaggtctaacrtttaagtctttaatccatcttgaattgattgttgtataaggtgtaaggaagggatccagtttcagctttctacatatggctagccagttttcccagcacc

SEQ ID NO: 186184 - DNA, 201 bp, Homo sapiens
atttaaatataaaataaaatgttttatgtggccagtggctatcttattacttagtgcatatgtagagcatttttatcatcatagaaagttacattggtcarcactgctttagggtttactactatatacatctgtaacttaccacatacagcctacaatattatactacttcatatgtaagaaccttacaaccagaataca

SEQ ID NO: 186185 - DNA, 201 bp, Homo sapiens
gatggagcctcgctgtgtcacctaagctgttctcaaactcctagccttgagcgatccttcctcctcggcctcccaaagtgctgagatgacacgcgtgagcygctgcacgcagcactggtgttattttcaacatcccagctcacattgatgatcctgattctggatgagcaactgcctgatgggtgggaagtcaagtgctag

SEQ ID NO: 186186 - DNA, 201 bp, Homo sapiens
caggcacctgccaccatgcctgactaatttttgtattttttggtagagatggggttttgccatgttgtccagtgtggtctcgaacttgtgagctcaagcartctgcccaccttggcctcccaaagtgttgggattacaggcatgagccaccatgctcagcctggagattttttttttaaataaaatacacattattaaaca

SEQ ID NO: 186187 - DNA, 201 bp, Homo sapiens
gagctcctagccagcctctgccagaggcagttgttcaacctctggacctgtttcctatcatgacaacaaggggatagatgaggaagtcctgagcatccttracccagcaagtggtttgaaggtcaaatgctagccctaggacaggagctgttgtttgtttgtttgttttgagacaaggtctggctccattgcccaggctgg

SEQ ID NO: 186188 - DNA, 201 bp, Homo sapiens
cccatccatgtacgaaggcctgagaaatgtactgttaagctgcgtgtccaggaggagaaaagagctctgatgagctcctagccagcctctgccagaggcarttgttcaacctctggacctgtttcctatcatgacaacaaggggatagatgaggaagtcctgagcatccttgacccagcaagtggtttgaaggtcaaatgc

SEQ ID NO: 186189 - DNA, 201 bp, Homo sapiens
gtacttcaagacagctgctttttacaaataaaatgtgatacaaaagatgacagtatcccgtgctttctggaagtaaaagaagaggatgaaatagtgtgcayacaacactggcaggatgctgtgccttggacagaactcctcagtctacagacagaggtatgtgtcttatttctccttaaatctgtggttggctggcttcat

SEQ ID NO: 186190 - DNA, 201 bp, Homo sapiens
agcaaatttattagcataaatagcaccaagtgctgtaaaaaaaatctcagaagcttaacatggtaatcaaagattacttttttgtccgtatcacagtcaartattggtcaggaagaaagttccacttatgtggtcatttagagaccttgactccttccatactgtggctccaccatcttcaatatatgtctttaaaattat

SEQ ID NO: 186191 - DNA, 201 bp, Homo sapiens
ttttttaaacatctggttttatatttatgtttggaaatctcttattcttccgagactaagaaataggaatatctgtgtttccttgaatgagaggggagccktaaagaggcaagcactgccgcaggtgtgagccctgcctcaggactgcaccagcgggaacacaggtgttcttcatcaggtcattctcccagcttatggttt

SEQ ID NO: 186192 - DNA, 201 bp, Homo sapiens
actaattagggtattatctgagcaaatttattagcataaatagcaccaagtgctgtaaaaaaaatctcagaagcttaacatggtaatcaaagattactttyttgtccgtatcacagtcaagtattggtcaggaagaaagttccacttatgtggtcatttagagaccttgactccttccatactgtggctccaccatcttca

SEQ ID NO: 186193 - DNA, 201 bp, Homo sapiens
cactttttataagtgccaccagatatgtagtgttcatagcatttatgaggttccaaacaatactatgtcactagtgtatgaagaactttattttacagtartaaaaatgttagaaatgccttaattaactgaaataaatggaaacatttatcacataacttcttttttcatttaatttgttaaagttttattttagatgca

SEQ ID NO: 186194 - DNA, 201 bp, Homo sapiens
aaaaaagtaccatttaaaaaaatctcggccgggtatggtggctcacgcctgtaatcccagcattttgggaggccgaggcgggtggatcatgaggtcaggarattgagaccattctggctgacacggtgaaaccccgtctctactaaaataaaaattaaaaaatctctacccatgagcctctttccacactttttataagtg

SEQ ID NO: 186195 - DNA, 201 bp, Homo sapiens
aaacagacagctgaacaaaacagtgtgcttgatgctggctggtgtttctctacaaacattagaccagaacctcatgctggggaatgttactattcctcacrtgaaaatgaacatctctgaacagatgatggggtgagatcttaatttcctagattctagaactaatggattgtaatccacataaatttcccactgtgaagt

SEQ ID NO: 186196 - DNA, 201 bp, Homo sapiens
acggggctcctcaaagcagctggtcaaggaaccgtctatcatcagtctgtagtgaaggaaggggttgtacactggggtataaatcatactgcttccttcaytgaggaactcttgctacaaaacaaaacagacagctgaacaaaacagtgtgcttgatgctggctggtgtttctctacaaacattagaccagaacctcatgc

SEQ ID NO: 186197 - DNA, 201 bp, Homo sapiens
gaaagtaaatattatccagttcggcacaggtgagtgcgctttggccctggtcctgcgtgtgcttcccctacatgtgaatcacattctgtagagctgacaaytgtgggtacccgaccctgcctgtgtggtgaggggcagcctagtatgaaattgaagaacaagagctctggagctggaccccctaggtcccggttccagctg

SEQ ID NO: 186198 - DNA, 201 bp, Homo sapiens
aaattagggaaagaaaatattttcggtgtcaccatatccctacactgtccttagatgtgtcaatgatgacagcaaatggtgactgcatccaacaaggagawcataatctttcacttcatttcctccagtctgccacacctaccatggggaacacagacttctggaaaacactccgatatcttagcttattgtaccctgctc

SEQ ID NO: 186199 - DNA, 201 bp, Homo sapiens
ggaactcttgctacaaaacaaaacagacagctgaacaaaacagtgtgcttgatgctggctggtgtttctctacaaacattagaccagaacctcatgctggkgaatgttactattcctcacatgaaaatgaacatctctgaacagatgatggggtgagatcttaatttcctagattctagaactaatggattgtaatccaca

SEQ ID NO: 186200 - DNA, 201 bp, Homo sapiens
cagtagaaaatggatagtcttgacatgtctaacaattatttatatagttttgtgcatgctccttaatttctgtattgagatttcattgtaataagcatatrtgatctgttgaaaggtgagcaaggcagaggggattctccttctagtaaaggcagcactgaaaaatggagaaacagcagagcaattgcaaaagatgatgac

SEQ ID NO: 186201 - DNA, 201 bp, Homo sapiens
gcttttcaaagttctgacacagaaagtgatgagctatcagaagtacttcaagacagctgctttttacaaataaaatgtgatacaaaagatgacagtatccygtgctttctggaagtaaaagaagaggatgaaatagtgtgcacacaacactggcaggatgctgtgccttggacagaactcctcagtctacagacagaggta

SEQ ID NO: 186202 - DNA, 201 bp, Homo sapiens
tgatcgtattgctctcgggattttaggagattttaattttcttcttgatacttttctatattttctaaattatatctctaaatgaacatattttataattrtaatcaacattttcaaatggcacatgtagtttgatgtttcccgagtgcagcttctgaaagcacatcctgttttccaggtgggaatggagggaggccagga

SEQ ID NO: 186203 - DNA, 201 bp, Homo sapiens
atgagaccacatctctacaaaagaataatttaaaaattagctgggtatggtgtcacatgctcatagtcccagctactggggagtctgaggcgagaggatcrcttgagcccaggagttcaaggctatagtgagttgtgattgtgccattgcactccagccccaggcaacagagcaagaccctgtctcaaaaaatgagtaagt

SEQ ID NO: 186204 - DNA, 201 bp, Homo sapiens
tcttgtatttggaaaaggaaggtttgacactaagtatttacactatgttgcgtttccattccttttgcattagaaagaaaaacaaaatcctttttttttttccccacaaatgaaaatcaacactagtgtctgatgtggcatcacttgcctatagtcccagctacttagggggctaaggcaggtggatctcttgagctcagg

SEQ ID NO: 186205 - DNA, 201 bp, Homo sapiens
acagccttgtactgaaatgatcttgaatgtctctggtggcattattttctttctttcttttttttttttttttttttgagacagaatattgccctctcacrcaggctggagagcagtagtgcaaatctgttctcatagctgcctcagcctctcaggctcaagcactcctcctgcctcagcctcccaggtggctgggactac

SEQ ID NO: 186206 - DNA, 201 bp, Homo sapiens
tgtgctcctcagttccctcatgtgtaaaatgaggggtgtttaaaattccgcaattctaagaactaagaactaagagagaaggtctttcaatatattgattrctgatattctctccaggtctcagcttccatgtctagaaatagacagccttgtactgaaatgatcttgaatgtctctggtggcattattttctttctttct

SEQ ID NO: 186207 - DNA, 201 bp, Homo sapiens
aagaaacccatggtttcactatcaaataatgttaatttctaatttagaaataaatggttccatgttctggagtcacacacttgatctgtaacttaaatctstcatgtttttattaagatgtatatcatgagcctgtacaaagggatttttggtggtgtaatatcaaccataaaagctagaaacgattcttaaaccaacaca

SEQ ID NO: 186208 - DNA, 201 bp, Homo sapiens
catttaaatataaaataaaatgttttatgtggccagtggctatcttattacttagtgcatatgtagagcatttttatcatcatagaaagttacattggtcmgcactgctttagggtttactactatatacatctgtaacttaccacatacagcctacaatattatactacttcatatgtaagaaccttacaaccagaatac

SEQ ID NO: 186209 - DNA, 201 bp, Homo sapiens
tgctgatattctctccaggtctcagcttccatgtctagaaatagacagccttgtactgaaatgatcttgaatgtctctggtggcattattttctttctttcttttttttttttttttttttgagacagaatattgccctctcacacaggctggagagcagtagtgcaaatctgttctcatagctgcctcagcctctcaggc

SEQ ID NO: 186210 - DNA, 201 bp, Homo sapiens
tccgcaattctaagaactaagaactaagagagaaggtctttcaatatattgattgctgatattctctccaggtctcagcttccatgtctagaaatagacagccttgtactgaaatgatcttgaatgtctctggtggcattattttctttctttcttttttttttttttttttttgagacagaatattgccctctcacacag

SEQ ID NO: 186211 - DNA, 201 bp, Homo sapiens
ttccgcaattctaagaactaagaactaagagagaaggtctttcaatatattgattgctgatattctctccaggtctcagcttccatgtctagaaatagacagccttgtactgaaatgatcttgaatgtctctggtggcattattttctttctttcttttttttttttttttttttgagacagaatattgccctctcacaca

SEQ ID NO: 186212 - DNA, 201 bp, Homo sapiens
attccgcaattctaagaactaagaactaagagagaaggtctttcaatatattgattgctgatattctctccaggtctcagcttccatgtctagaaatagacagccttgtactgaaatgatcttgaatgtctctggtggcattattttctttctttcttttttttttttttttttttgagacagaatattgccctctcacac

SEQ ID NO: 186213 - DNA, 201 bp, Homo sapiens
aattccgcaattctaagaactaagaactaagagagaaggtctttcaatatattgattgctgatattctctccaggtctcagcttccatgtctagaaatagacagccttgtactgaaatgatcttgaatgtctctggtggcattattttctttctttcttttttttttttttttttttgagacagaatattgccctctcaca

SEQ ID NO: 186214 - DNA, 201 bp, Homo sapiens
tttcaaaaatatcaaggacttgacatgcatataaaactggattttatacatgcaactttttaaggaacactctttacatttagattgaaacaatagtagtaatatagcatccctcaaaatttgttttacatacatattgttcatgttctagtataattatatgttcatttaattacttgaaagcttttggctggacacagt

SEQ ID NO: 186215 - DNA, 201 bp, Homo sapiens
atttcaaaaatatcaaggacttgacatgcatataaaactggattttatacatgcaactttttaaggaacactctttacatttagattgaaacaatagtagtaatatagcatccctcaaaatttgttttacatacatattgttcatgttctagtataattatatgttcatttaattacttgaaagcttttggctggacacag

SEQ ID NO: 186216 - DNA, 201 bp, Homo sapiens
tcaaaaccagtctggtcaacataatgagaccacatctctacaaaagaataatttaaaaattagctgggtatggtgtcacatgctcatagtcccagctactrgggagtctgaggcgagaggatcacttgagcccaggagttcaaggctatagtgagttgtgattgtgccattgcactccagccccaggcaacagagcaagac

SEQ ID NO: 186217 - DNA, 201 bp, Homo sapiens
tatttcaaaaatatcaaggacttgacatgcatataaaactggattttatacatgcaactttttaaggaacactctttacatttagattgaaacaatagtagtaatatagcatccctcaaaatttgttttacatacatattgttcatgttctagtataattatatgttcatttaattacttgaaagcttttggctggacaca

SEQ ID NO: 186218 - DNA, 201 bp, Homo sapiens
aaaaagaaaaagaaaagaaaaagaatttaaaatttaagtaattctttgaaaaaaactaatttctaagcttcttcatgtcaaggacctaatgctttatttaygttcaataaagctagatatgtaaataatgactgtacttttgctatacaccataattcacagactagaagacagtttgctataaagaaaacctctgaagat

SEQ ID NO: 186219 - DNA, 201 bp, Homo sapiens
attcattcctcactgcacacaggtaagaagacgcagagtttgttattctatgggaagaccaatatattttgctaattttttttctgtcttcttccctcccyttctcaccagcagattttcttcttctgggaacacagctggtggttagccagggctttggggaggcttctagtttttattgaaaggggagagaaaatcacc

SEQ ID NO: 186220 - DNA, 201 bp, Homo sapiens
ctaatttacattcccactgacagtgtataagcatttccttttcaataaagccttgccagcatctgttgttccttgactttttaataataaccattctgacyggtgtaagatggtatctcattgcagttttaatttgcacttttctgataattagttatgctgggctttttttcatgcttgttgaccatttgcacatcttct

SEQ ID NO: 186221 - DNA, 201 bp, Homo sapiens
agatatgtaaataatgactgtacttttgctatacaccataattcacagactagaagacagtttgctataaagaaaacctctgaagatgcaagtgaatactwtgaaaattacattgaagaactgaagaaacaaggatttctactaagagaacatttcacacctgaagcaacccaattagcatctgaacaattgcaagcagtg

SEQ ID NO: 186222 - DNA, 201 bp, Homo sapiens
cgcttgggtttgtcaaagataccataggcagagaattgtccagaaatactaaaaaaaaattagacttattacctcagaaaatggacagaaaaataacaaargacaaaagactactttagcactagaaacagatttcttgatatctagcctagtagggtcagactcaaaatggccacaaaacactgatcatctcagaaaacc

SEQ ID NO: 186223 - DNA, 201 bp, Homo sapiens
gatattctacaatgtgaatttactatttattaaaaaataaataaaattataagcgggcatgttggctcatgcctgtaaactcagctgagatgggagaatcrcttgaggctgagagttcaagaccagcctggtcaacatagcaagaccctatctctacaaaaaaaacaagattttctaaaattacaaatcaaaataaataat

SEQ ID NO: 186224 - DNA, 201 bp, Homo sapiens
cgaggagcaagtgacagcaggtgcctctgcagagaggaactggggacaacagtggggatgaagttaatacgtcgtcattattttattttttagatattctrcaatgtgaatttactatttattaaaaaataaataaaattataagcgggcatgttggctcatgcctgtaaactcagctgagatgggagaatcacttgaggc

SEQ ID NO: 186225 - DNA, 201 bp, Homo sapiens
tcaagcaagtgaacgtgtggaagcagcacctcatgctgatcttattacacaggttacaaggagctattttcgtatcctaagcatatcacaagcaataccayggcagcagagttcatcatggtgagtgcaagaggcttcctgtatctcctgggtcttttcctaccatgctttaaggggacctccagggcttaggccactcaa

SEQ ID NO: 186226 - DNA, 201 bp, Homo sapiens
gatttaggatatgatacaagtagatcttatctctgtggaagaaagacaagttcttcaatactatctatagagataaatgggtaaccacaaggaaaaaatayaaagttggacctttacctcatttctcatactttaactccagacagagcaaatatttaaatatttaaaatcaaaccataaaagtatactaaatgaaaaatg

SEQ ID NO: 186227 - DNA, 201 bp, Homo sapiens
taagatggctatgatttcttttgtttttttattttattttttatttttttgagacggagtctcgctctgtcgcccaggctggagtgcagtgacgcgatctmggctcactgcaagctctgcctcccaggttcacgccattctcctgcctcagccacccccctcagctgggactatagacgcacgccaccacgcctggctaat

SEQ ID NO: 186228 - DNA, 201 bp, Homo sapiens
ttttttgagatagagtctcgctctgtcgcccagggttgagtgcagtggcatgatctcaattcactgcaacctctacctcctgggttcaagcaattctcgtkcctcagtctcctgagttgctgagattacaggtacgcgccaccacactcagctaatttttgtatttttagtagagatggggtttcaccatgttggccaggc

SEQ ID NO: 186229 - DNA, 201 bp, Homo sapiens
attttagtcatttttttatttatcttaggtaaactttttatgttagggaaattagccctttgtgatatgagttgtgaaaatttgtttcccggtattccacrtgttattttgatgttgcttattatcttttggtcatgcagattttttaatgcagtcaaatttttaatctttgtgtttcttctttttgtttagtgttgtttt

SEQ ID NO: 186230 - DNA, 201 bp, Homo sapiens
gatctttgcatatcttacaggtgaaaaatgtattggtgacatttaagtttttgtttctttatgaatgaagaggagcatgttttatattcttacagccctaygtatcacttcctgggtgttatctgttcacatcttttatttttttaattgagattttagtcatttttttatttatcttaggtaaactttttatgttaggga

SEQ ID NO: 186231 - DNA, 201 bp, Homo sapiens
ctcagtaaagaaaactctctcataacacaatttacaagctttgtggcagttgagaaaagggtatgtattattggtaattcgaggttaaattattttatttrtatttccacattaagaaagtcacccttgctttgatggttaatgacgacatccacaccctgggcctgggaagtgtgggttgcagacaggtcagcaggcccc

SEQ ID NO: 186232 - DNA, 201 bp, Homo sapiens
ttcttttttttttttgagatggagtctcactctgtcacccaggctggggtgcagtgactattcacaggctctatcacagagcactacagctttgaactccyggcctccagcgatcctctcacctcagcctcctgagtagctgggatgctccacaatacctgacttaatcaattttttgatctttgcatatcttacaggtga

SEQ ID NO: 186233 - DNA, 201 bp, Homo sapiens
aaaaaatacaaaaatactattcaagaaggagttttataaaataaacaaaaatgacccgtatttctcagtatgattcttttttttttttgagatggagtctyactctgtcacccaggctggggtgcagtgactattcacaggctctatcacagagcactacagctttgaactcctggcctccagcgatcctctcacctcagc

SEQ ID NO: 186234 - DNA, 201 bp, Homo sapiens
atgctattatttaaaattctagctgggcgtggtggctcatgcctataaccccagcactttgggaggctgaggcagatggctcacctgaggtcaggagttcragaccagcctgggcaacatggtgaaaccccatctctactaaatatacaaaaattagctgggtgtggtggtgtacgcctgtagtcccagctacttgggagg

SEQ ID NO: 186235 - DNA, 201 bp, Homo sapiens
gattgaaagtcagtaaacacagtggttaagatcacaggtgctgtggccgaatgctcaggtctgaaccccagcccgcgcttcactctctgggacttgacctycccagtgccccagtcctaatgccctagtggggagagcagtaaaatccacctcaggtggttgtgaagagttctaagaccattccaacacgtctagctcctg

SEQ ID NO: 186236 - DNA, 201 bp, Homo sapiens
gaagttaaaatgtaaactgccatgagattcctttttattttttaactctgtcaggttggcaaagatcacaaaaggtagatgattgaaagtcagtaaacacagtggttaagatcacaggtgctgtggccgaatgctcaggtctgaaccccagcccgcgcttcactctctgggacttgaccttcccagtgccccagtcctaat

SEQ ID NO: 186237 - DNA, 201 bp, Homo sapiens
agaagttaaaatgtaaactgccatgagattcctttttattttttaactctgtcaggttggcaaagatcacaaaaggtagatgattgaaagtcagtaaacacagtggttaagatcacaggtgctgtggccgaatgctcaggtctgaaccccagcccgcgcttcactctctgggacttgaccttcccagtgccccagtcctaa

SEQ ID NO: 186238 - DNA, 201 bp, Homo sapiens
gcacctaggaagcagaggttgcagtgagccaaaatggcacccctacactccagccttagtgacagagtgaggatttgatcataaataagaaaataatataygaaagatgtgcaaccttgtttctaaaagaagttaaaatgtaaactgccatgagattcctttttattttttaactctgtcaggttggcaaagatcacaaaa

SEQ ID NO: 186239 - DNA, 201 bp, Homo sapiens
ttcacttcaacagtagtcacacaactgtatacatcccttaagactcatcaaactgtgtatttaagaggagtgcattttactgtatgcagattatacctccrtttttaaaatgatgttctttgcaagtcttatattagaagccatgtgaatattttttttcctttgctgcttaaacacagatgatccacaagctggcagccc

SEQ ID NO: 186240 - DNA, 201 bp, Homo sapiens
gcccataccaccacacccacaccaccacacccagctaattttttgtagagacagtgtttcgccatgggcccaggctggtctcaaattccaagctcaagcartctgcctgccttgacctcccaaagtgctgggattacaggcataagccactctgcccagccaccacttgttttttaataacagccatcccactgggtgtga

SEQ ID NO: 186241 - DNA, 201 bp, Homo sapiens
tgttctccgagttgccactctgtctccgtcaaatggcagcaactcaatccagatgtgcccgaggccctgcaggccccagcccaggtgccgtccttgtttckcaatgatcgactccttgtctatggattcattcctcactgcacacaggtaagaagacgcagagtttgttattctatgggaagaccaatatattttgctaat

SEQ ID NO: 186242 - DNA, 201 bp, Homo sapiens
gcatgcgctgtccttggtgggtgagaagcagaaagtaaatattatccagttcggcacaggtgagtgcgctttggccctggtcctgcgtgtgcttcccctayatgtgaatcacattctgtagagctgacaactgtgggtacccgaccctgcctgtgtggtgaggggcagcctagtatgaaattgaagaacaagagctctgga

SEQ ID NO: 186243 - DNA, 201 bp, Homo sapiens
cagtggttgtctccagccaagggggagagggaggcctaggctggggacgtcgcacctctgtggtgccaaggagacccagaggtgaggtgtcagggaggcastggcattgtgtcctcaattgagagcccagggaatgggtaccaccatccaacacacacagggcaaaggtactgaaaggtgacagcgtgctggcagcccttg

SEQ ID NO: 186244 - DNA, 201 bp, Homo sapiens
tgccatccccacaagaaggtgacagcaggccctggagaccctcacagtcagttctagtgacagatggtcacctggtggtctccctattctcctcagatgcygctgggttggcagcctctgtgtgctgttttgtttaaggcccttttatcctgaacaagtcattccatctttccaattcctcagctttaaattgggagccac

SEQ ID NO: 186245 - DNA, 201 bp, Homo sapiens
ggggtgcagggagtcaagaatagcacccagtggttgtctccagccaagggggagagggaggcctaggctggggacgtcgcacctctgtggtgccaaggagacccagaggtgaggtgtcagggaggcagtggcattgtgtcctcaattgagagcccagggaatgggtaccaccatccaacacacacagggcaaaggtactga

SEQ ID NO: 186246 - DNA, 201 bp, Homo sapiens
gtcagccaaccttggtcagcataagtgggggtgcaattatcacatagaggctgtcctggaaattattaaagagtcattaaaggcttttagtgtttttttttgtgtgttgtttttaattgtcagagattacgactagcatagattaacctaaatagtgtggtgtaatctcttttatggtacccctcatttcatccctcctat

SEQ ID NO: 186247 - DNA, 201 bp, Homo sapiens
aggcctggtaaaaatacttttattatcgttatctaaaattattgacctttgtgagtgcccagccacacagtgtgatatgaaaagagagtgcagctgccacmggcctgatgtctggggactcctgcgcaaaggcgggcctgctaactagaacaggcaggaaggctactgagtaggaagaaacattagtctacaccaagtaca

SEQ ID NO: 186248 - DNA, 201 bp, Homo sapiens
tttaattttttttttttttttttttgagacagagtcttgctctgtcgcccaggctggagtgcagtggcgccatctcggctcactgcaagctctgcctcccrggttcacgccattcttctgcctcagcctcccaactagctggtactacaggcaccagccaccatgcctggctaattgtttgtatttttagtagagatgggg

SEQ ID NO: 186249 - DNA, 201 bp, Homo sapiens
ttaagcctaaattaatcctaatctaaatatacaaaattttcatgatggggtggtcaactagaatggtgaacatagttggggatgttgagaggatctctgcrtagttatcagaaaaaaatgtatctagcctcttttttctgccctagctagtcatggggttgccaccttatatagctattatcaacatccctttaaaagaaa

SEQ ID NO: 186250 - DNA, 201 bp, Homo sapiens
atattttaatgcaaaatccaagcatagttggagaaaacaggtatgttttttaaacatctggttttatatttatgtttggaaatctcttattcttccgagastaagaaataggaatatctgtgtttccttgaatgagaggggagccgtaaagaggcaagcactgccgcaggtgtgagccctgcctcaggactgcaccagcgg

SEQ ID NO: 186251 - DNA, 201 bp, Homo sapiens
gaatcgcttgaacacaggaggtagaagttgcagtgagccgagattgtgccactgcactccagcctgggcaatggagcgagactccatctcaaagaaaaaawaaataaataaaatgaaataataataaaattgagcaagctgagactgaccagctgcctcagccaggctggcaaatccagggctgattggatgggacatttc

SEQ ID NO: 186252 - DNA, 201 bp, Homo sapiens
ctgtagagctgacaactgtgggtacccgaccctgcctgtgtggtgaggggcagcctagtatgaaattgaagaacaagagctctggagctggaccccctagrtcccggttccagctgtaccactcacaggttctgtgtgtcaccttgggcgcactacttgaacttctggtgcctccgtttcctcatctgcgatctgaggata

SEQ ID NO: 186253 - DNA, 201 bp, Homo sapiens
gtagcaggaaggagagaaaataccaaagagttataaaattcccaaaggatagaatgtatactttattttaaatgtgaagtaactattttctggatggagcrttgaaagagaaataattcctcttttataaatagatagaagaccaaatgaccaggctatgttctccgagttgccactctgtctccgtcaaatggcagcaac

SEQ ID NO: 186254 - DNA, 201 bp, Homo sapiens
ctaaagcagtggagctttacctgggcacagggctagaaaggaaggcttctgatccctggtttacttctgccccttccccgcagctctggaagtgagagttwgctgcccttcccccagcagctggaggcttttgcttcatgtggggaaaggatccagggaagtggccccagcacctcccacacacctgctccactgagaggt

SEQ ID NO: 186255 - DNA, 201 bp, Homo sapiens
cctgacattacagctcgtgaagaggagccgcccgcacaccaggttattcgcctgcggtatcgggtgagtctcagagagctggtcacatagtccagacccayggggaggtcgtcttgttgccctgcaggggactttggcaagcttggaagttgacactagaatacagaagccttacagcatagagggatggggctccgggct

SEQ ID NO: 186256 - DNA, 201 bp, Homo sapiens
agccaccatgcctggctaattgtttgtatttttagtagagatggggtttcactgtgttagccaggatggtcttgatctcctgacctcatgatctgcccacsttggcctcccaaagtgctgggattacaggcgtgagccaccgcgcctggccattttaaccatttttaggtgtacaatttagtggtattagctacattcaca

SEQ ID NO: 186257 - DNA, 201 bp, Homo sapiens
tgtgtggtgttacttctgagatctctattctgttccattggtctatgtgtctatttttgtaccagtaccatgctgttttgattactgtagccttgtagtayagtgtgaagtctggtagtgtgatgcctccagctttgttctttttgcttaggattgtcttggctctacaggctcttttttggttccatatgaattttaacc

SEQ ID NO: 186258 - DNA, 201 bp, Homo sapiens
tgtcgcccaggctggagtgcagtggcgccatctcggctcactgcaagctctgcctcccgggttcacgccattcttctgcctcagcctcccaactagctggkactacaggcaccagccaccatgcctggctaattgtttgtatttttagtagagatggggtttcactgtgttagccaggatggtcttgatctcctgacctca

SEQ ID NO: 186259 - DNA, 201 bp, Homo sapiens
tttctaaatgagttgagtatgttatcatttttaatgttattattaacaattggctaatgtgtacttttcggttatactataattttgttacagttttggcrtttattgtcttttattaatccaagaccctcaaaaaatagaaaaggccgaaaaggcctgggttccctgagagcccttccccttcataagtttaagggggaa

SEQ ID NO: 186260 - DNA, 201 bp, Homo sapiens
aatttctcagggttagaaaagaggttttgcagaatcatcacaggtaagcataaaggaaatatctcaggatctgttataatataatgctctttgagactccrttaaagagctaattacagtaattacctagataatcttcagcaacaagccacagtagcggtggtgtgatgacacattactttcttctctgttcagaacggt

SEQ ID NO: 186261 - DNA, 201 bp, Homo sapiens
aggaggattgagctaatgtatgtaaaggatttttaaactgtgcctgttcacagtaagtgagatataaatgctactgttgtcattagcaactgaaccaaatrcaaaacccctggtctgttgagtaggaggtcccaagtctaaggacaaaacatttgccctcagcgcagtcatagaaaatctataaggaatggtctcaggaag

SEQ ID NO: 186262 - DNA, 201 bp, Homo sapiens
ctttctgtttttatagcattagtttacctcactagaaagttttggagttttctaagtagaccttttgcagttgaagtgacaagaagctccagtccagcacyttctttctcctttcaggcttgcatgcttgtctttcaacccgatctcgatgtcgacctccctgacctagccagtgagagcgaagtgattatttgtcttgac

SEQ ID NO: 186263 - DNA, 201 bp, Homo sapiens
tctactaaaaatacaaaaagtagccaggcatggtggcaggcacctataatcccagctactcgggaggctgatgcaggagaatcgtttgaacccgggaggcrgagggtgccgtgagccgaggtctcaccactgcacttccgcctaagtgacaaaagcgagactgtctcaaaaaacaaagtgttataatagacctagaaaaaa

SEQ ID NO: 186264 - DNA, 201 bp, Homo sapiens
ataatatttaatgacaaaatgctaaagatgctgactgataacagcgggataggtagtgtgatgtcaattttgataaaaaatacagtctgtggctgggcgcrgtgactcatgcctgtaatcccagcacttagggaggccaaggtgtgcagatcacttaaggttgggagttcgagaccagcctggccaacatggtgaaacccc

SEQ ID NO: 186265 - DNA, 201 bp, Homo sapiens
ccaataatatttaatgacaaaatgctaaagatgctgactgataacagcgggataggtagtgtgatgtcaattttgataaaaaatacagtctgtggctgggygcggtgactcatgcctgtaatcccagcacttagggaggccaaggtgtgcagatcacttaaggttgggagttcgagaccagcctggccaacatggtgaaac

SEQ ID NO: 186266 - DNA, 201 bp, Homo sapiens
agtaagatagcatagctgagagtctctacaaggcgtcatttttaatgttcagtatggaatgaaaatttaataacatacgaagaagcaggacaatatgatcrtgatcaaggggaaaatgggctataaatgctgacccacagatgacccagatgttagaattagcagacacagactttaaaactgctattaaaaatatagtga

SEQ ID NO: 186267 - DNA, 201 bp, Homo sapiens
ggattaaaatcctataaaggagggaaccacagagcagggaactctgaaatctgcatccagataccccgcagatccttggctgtctcctaacctctacatayacaggtgcaacctcaaggaatccagaaaaaagcaacagctgggaagctacagagctaagcagagatttcagctgctgcctagtactggccagagtttaga

SEQ ID NO: 186268 - DNA, 201 bp, Homo sapiens
cacatcggtttgtctgctgcctatctcccaagaatgtgggttgaaaaacatccagaaaaagaaagcgaggtatactcctttttacttagacataggagacrctattgaaaaaatgtttcagaataagctggttaaacttgcaaattattgattgtcctgaaaaactagcattacaaaatgaactctcacatctcaagattc

SEQ ID NO: 186269 - DNA, 201 bp, Homo sapiens
tgtaagtaagaacatcctgtgttcagttttctgttcctgtgttagtttgtgaggataatggcttccagcttcattcatgtccctgcaaaggacatggtctkcatggtattccatggtacatatgtaccacattttctttatccagtctatcattgatgggcatttggattgattccatgtctttgctattgtgaatagtgc

SEQ ID NO: 186270 - DNA, 201 bp, Homo sapiens
cacttctgttcattgtcctatcttagtggcagccaaattctgccttgtgtctgttaagagttgtttgggagatggtttcctgcctttcctccagttgtagyaacccctgctttgtactagtgcaggatcctgggcctaggagggtgtcatcccctgccccatggggaggtggctgtttctctctaaagcagtggagcttta

SEQ ID NO: 186271 - DNA, 201 bp, Homo sapiens
ttccaagacttcaatttatgtgaccatttgatggttttctccttttcaaaacatctagactgactgacttgtcactataaccctatactacttagatagcrtactgttgaattttgctgctttatccaatctgggagtttctgcactttgtattgtttaggtcatttttatttaatacaattactgatctggtcagattta

SEQ ID NO: 186272 - DNA, 201 bp, Homo sapiens
attgcaagcagtgagattgatttataatttttttgttgttgattgaatatttttaatagaaatgttttctctattacaaataaaagactgggccaggcttsgtggctcatgcctgtatcccagcagtttgggaggccaaggcaggaggatcacttgaggccaggagttcaagaccagccttggcaacatagagagacccat

SEQ ID NO: 186273 - DNA, 201 bp, Homo sapiens
atatttaagtgtggaagtaacagaaaaggatagttagtggtacaataaagagaaaattgtggtgccgaaaccaaggatgaagacagtgcccagcctaggaygacttatgtcctcctcattgccagattaaatggcagtgtttccaagacttcaatttatgtgaccatttgatggttttctccttttcaaaacatctagact

SEQ ID NO: 186274 - DNA, 201 bp, Homo sapiens
tgctgaaattgtttccttattatgataaaatttagcattttaattttttttttttttttttttgagacagagtcttgctctgtcgcccaggctggagtgcmgtggcgccatctcggctcactgcaagctctgcctcccgggttcacgccattcttctgcctcagcctcccaactagctggtactacaggcaccagccacca

SEQ ID NO: 186275 - DNA, 201 bp, Homo sapiens; identical to SEQ ID NO: 32488

SEQ ID NO: 186276 - DNA, 201 bp, Homo sapiens
atattatcaggttatcctcctacgtgtgttggtaaatgtttcctccttaatacctacatatttccctaggaatatggtccacaagaaaacagccttcacaraaggtattacctatgggtaaagtctgatcagaactattgctaacccaagccttcaggtctcccagaatgtattgacatcttgtgactataatgttctcat

SEQ ID NO: 186277 - DNA, 201 bp, Homo sapiens
tcatttgtgacgtagccctcggaaagtgtatggacttacatgagaaggacttttccttaactgaagcaccaccaggctacgacagtgtgcatggagtttcrcaaacagcctctgtcaccacagactttgaggtatttttatttcaaggaagaagcaaagagggtcttgaatgctcaaagaaaggccttagttttttgctcc

SEQ ID NO: 186278 - DNA, 201 bp, Homo sapiens
gggttcatttgagaggctgccacttaatattatcaggttatcctcctacgtgtgttggtaaatgtttcctccttaatacctacatatttccctaggaatakggtccacaagaaaacagccttcacaaaaggtattacctatgggtaaagtctgatcagaactattgctaacccaagccttcaggtctcccagaatgtattg

SEQ ID NO: 186279 - DNA, 201 bp, Homo sapiens
aactgtatgtatagaagcctggggttcatttgagaggctgccacttaatattatcaggttatcctcctacgtgtgttggtaaatgtttcctccttaatacytacatatttccctaggaatatggtccacaagaaaacagccttcacaaaaggtattacctatgggtaaagtctgatcagaactattgctaacccaagcctt

SEQ ID NO: 186280 - DNA, 201 bp, Homo sapiens
agccttgccagaatctgttgtttcttgattttttaactatcgccattctgactggcatgagatggtgtctcatcgtggttttgatttgcatttctctaatratcggtgatgtttagctttttttcatatttttttgccacataaatgtcttcttttgagaagtgtctgttcatgtcctttgcccactttttaatggggttt

SEQ ID NO: 186281 - DNA, 201 bp, Homo sapiens
agaatgtgggttgaaaaacatccagaaaaagaaagcgaggtatactcctttttacttagacataggagacactattgaaaaaatgtttcagaataagctgrttaaacttgcaaattattgattgtcctgaaaaactagcattacaaaatgaactctcacatctcaagattctgcaactaaaaatatttatgatatcaagca

SEQ ID NO: 186282 - DNA, 201 bp, Homo sapiens
gttttgaaaatttaatgtttgctggggctaggggcacattcaagattaatatagatcaaaggggtaaattattgctcttgacatctaagatatccacctgyaggatgggaataagtaatgaagaggtgattattgaacagttaagaatgctggctctatgtatggccaaactgtatgtatagaagcctggggttcatttga

SEQ ID NO: 186283 - DNA, 201 bp, Homo sapiens
tccacaatggttgaactaatttacactcccaccaacagagtaaaagcattcctatttctccacagccttgccagaatctgttgtttcttgattttttaacyatcgccattctgactggcatgagatggtgtctcatcgtggttttgatttgcatttctctaatgatcggtgatgtttagctttttttcatatttttttgcc

SEQ ID NO: 186284 - DNA, 201 bp, Homo sapiens
ccatatgtttgagtatcgcctctgagggtgacacatggccatggtgttttgaaaatttaatgtttgctggggctaggggcacattcaagattaatatagatcaaaggggtaaattattgctcttgacatctaagatatccacctgtaggatgggaataagtaatgaagaggtgattattgaacagttaagaatgctggctc

SEQ ID NO: 186285 - DNA, 201 bp, Homo sapiens
tgctagattgtgtgtagtcagcgtctaactctagtgcaggtattttagttattcttgcagatggggccatatgtttgagtatcgcctctgagggtgacacrtggccatggtgttttgaaaatttaatgtttgctggggctaggggcacattcaagattaatatagatcaaaggggtaaattattgctcttgacatctaaga

SEQ ID NO: 186286 - DNA, 201 bp, Homo sapiens
aaaattctgagcaaggaagagatgcagtcagtgttgggcttacaccttatcctgcccttctcttttcagagggttgcttttacccaaagtagtggaagatygtggtgtgcaaagaacagacgtcggaaaccttggaagtgggatttatttcagtgattcgctcaggtatgttcgatccttaatcacagaatcgttactgaa

SEQ ID NO: 186287 - DNA, 201 bp, Homo sapiens
tagtaggccatcttgttgttaattacatcttattctttctgtttttatagcattagtttacctcactagaaagttttggagttttctaagtagaccttttscagttgaagtgacaagaagctccagtccagcaccttctttctcctttcaggcttgcatgcttgtctttcaacccgatctcgatgtcgacctccctgacct

SEQ ID NO: 186288 - DNA, 201 bp, Homo sapiens
gttggggtgatcagacccaacaccaggtcatgggggtgacaaagtccagtggagtcaaaggattgagaaaaagacagtttgagagagaaaggtgggacacyagtatgccatcactatggtggaggctgcgaaggccccgagctctgggagcccacggtatttattgataatccaacaaagaaacagatggtgagaatgtgg

SEQ ID NO: 186289 - DNA, 201 bp, Homo sapiens
cacaggttacaaggagctattttcgtatcctaagcatatcacaagcaataccacggcagcagagttcatcatggtgagtgcaagaggcttcctgtatctcytgggtcttttcctaccatgctttaaggggacctccagggcttaggccactcaagccaccatcagagcacccctactcctgtggtttttgtatattggtgg

SEQ ID NO: 186290 - DNA, 201 bp, Homo sapiens
caagcaaatcgccttgcatgcgctgtccttggtgggtgagaagcagaaagtaaatattatccagttcggcacaggtgagtgcgctttggccctggtcctgygtgtgcttcccctacatgtgaatcacattctgtagagctgacaactgtgggtacccgaccctgcctgtgtggtgaggggcagcctagtatgaaattgaag

SEQ ID NO: 186291 - DNA, 201 bp, Homo sapiens
ccggccaatagtgaacacttttaagtaaccaagtatctgatgacttggggaaggatgaaataaacgcaaagcttatgtaaccactaaaaacaccttcaaakaatatttagtgacatggggaggatatcactaaaagctaaataagctgtgaaagtgaaagtcctatttaaaaagtaaagagcaactggctataacattaaa

SEQ ID NO: 186292 - DNA, 201 bp, Homo sapiens
tacaggagagggaaagagagttagaacaagatatgaaatacgaatttcatgctagaggctaagataatttgcactgttgtaggccccagagttccacttgstctgagtaaggggaagccacgccagtcagacccatttgacttaacaaaggaggaaacagcatcagtagttccagacaaacaagaagagctaggcctgtca

SEQ ID NO: 186293 - DNA, 201 bp, Homo sapiens
aaaactctctcataacacaatttacaagctttgtggcagttgagaaaagggtatgtattattggtaattcgaggttaaattattttatttgtatttccacrttaagaaagtcacccttgctttgatggttaatgacgacatccacaccctgggcctgggaagtgtgggttgcagacaggtcagcaggccccacgagtccca

SEQ ID NO: 186294 - DNA, 201 bp, Homo sapiens
atttccacattaagaaagtcacccttgctttgatggttaatgacgacatccacaccctgggcctgggaagtgtgggttgcagacaggtcagcaggccccaygagtcccagcctcccattcatggggggcttcggtgttgggacttagggtgatctttctaaatgagttgagtatgttatcatttttaatgttattattaac

SEQ ID NO: 186295 - DNA, 201 bp, Homo sapiens
gaggtatataactttcatcttctgataagagtgtgatatactggctgggcgcaatgacttatgcctgtaatcccagcactttgggaggctgaggtgggcakatcacctgaggtcaggaatttgagaccagcctggccaacatggtgaaaccccctcttactaaaagtacaaaaattagctgggcatggtggcaggtacctg

SEQ ID NO: 186296 - DNA, 201 bp, Homo sapiens
aactgagtttcccagaaggaatgacagacaaaaagataacatttgaggtatataactttcatcttctgataagagtgtgatatactggctgggcgcaatgrcttatgcctgtaatcccagcactttgggaggctgaggtgggcatatcacctgaggtcaggaatttgagaccagcctggccaacatggtgaaaccccctct

SEQ ID NO: 186297 - DNA, 201 bp, Homo sapiens
tattccatggtacatatgtaccacattttctttatccagtctatcattgatgggcatttggattgattccatgtctttgctattgtgaatagtgctgcaaygaacatacacatgcatgtatctttataatggaatgatttatattcctttgggtatatacccagtaatgggattggtgggtcaaatggtatttctggttct

SEQ ID NO: 186298 - DNA, 201 bp, Homo sapiens
agataatttgcactgttgtaggccccagagttccacttggtctgagtaaggggaagccacgccagtcagacccatttgacttaacaaaggaggaaacagcrtcagtagttccagacaaacaagaagagctaggcctgtcattgggaactgagtttcccagaaggaatgacagacaaaaagataacatttgaggtatataac

SEQ ID NO: 186299 - DNA, 201 bp, Homo sapiens
tatttatcctgatgctctccctctccctgcctccgctacaggccccagtgtatgttgtttccctccctgtgtccatgtgttctcattgttcagctcccacstgtaagtaagaacatcctgtgttcagttttctgttcctgtgttagtttgtgaggataatggcttccagcttcattcatgtccctgcaaaggacatggtct

SEQ ID NO: 186300 - DNA, 201 bp, Homo sapiens
aagataatttgcactgttgtaggccccagagttccacttggtctgagtaaggggaagccacgccagtcagacccatttgacttaacaaaggaggaaacagyatcagtagttccagacaaacaagaagagctaggcctgtcattgggaactgagtttcccagaaggaatgacagacaaaaagataacatttgaggtatataa

SEQ ID NO: 186301 - DNA, 201 bp, Homo sapiens
gagcccaggagttcaagaccccttgggcaacatggtgaaaccccagatctacaaaaaatacaaaaattagctgggtgtggtgatgcatgcctgtagtcccrgctacttgaggggctgagttgggaggatcacttgagcctgagaggtggaggctgcaatgagccataatggcgccactgcacagcctgggcaacaaagcga

SEQ ID NO: 186302 - DNA, 201 bp, Homo sapiens
ctaacactttgggaggctgagatagatggatcacctgagcccaggagttcaagaccccttgggcaacatggtgaaaccccagatctacaaaaaatacaaawattagctgggtgtggtgatgcatgcctgtagtcccagctacttgaggggctgagttgggaggatcacttgagcctgagaggtggaggctgcaatgagcca

SEQ ID NO: 186303 - DNA, 201 bp, Homo sapiens
gccacagtagcggtggtgtgatgacacattactttcttctctgttcagaacggtgcctggggcagttttctgtgcttgaaaacaccctctatattccactscgatttcaaggttacctaatcttgttgagggttaaatttaaaaattttaaaacgtgtttgagtttgtattttgtaggttattacagagaaaaagccactt

SEQ ID NO: 186304 - DNA, 201 bp, Homo sapiens
tgacttgtaccatttgatatttcaaacccgaagaggcctgttccctggggaagtttgccccaaaataactcgatttagcagtgaatttctcactcattttwtgatgaaacagccagactgtagatttagcttgagtatccaagcagaggctggggtgtagattcttatatgtgcatggctcatacattttgacccttcttg

SEQ ID NO: 186305 - DNA, 201 bp, Homo sapiens
agatcgtagactaagacaactttctcttcatttttgctagcttctctttgactatgtctattgagatgccgtatgtgattgaattcattttcagtgatacwcatgaactgaaacaaaaggttagtgcatctttgatttcttaagagctgttattttaacactacttttatcttatcaaagcaatgtatgcacgtggttgaa

SEQ ID NO: 186306 - DNA, 201 bp, Homo sapiens
gaagtgacaagaagctccagtccagcaccttctttctcctttcaggcttgcatgcttgtctttcaacccgatctcgatgtcgacctccctgacctagccartgagagcgaagtgattatttgtcttgactgctccagttccatggagggtgtgacattcttgcaagccaagcaaatcgccttgcatgcgctgtccttggtg

SEQ ID NO: 186307 - DNA, 201 bp, Homo sapiens
ccattgcccagagttaatggttaatacttcggtatatccctccaaacttcctactttgtatgtacagcacatgtataaaatgtgtgtgtgtgtgtgtgtgygtgtgtgtgtatacacacagacatatgtagagtttaaaatctctgtcaaaatggtgagttgtattttagaagttcctgtcattccatgagcaaactttct

SEQ ID NO: 186308 - DNA, 201 bp, Homo sapiens
tcagctttaaattgggagccacagactgtgaaagaatgagaaagcccactgcccgggagagctctctgaactagagggagctgaataatgaagagcgacaytttctatgactaagtcagttcatctcattttaaagggaatattgagccaccgatttagatgggacctgcaattcaatatttagtctgaaatacgaatctt

SEQ ID NO: 186309 - DNA, 201 bp, Homo sapiens
ggagagggaaagagagttagaacaagatatgaaatacgaatttcatgctagaggctaagataatttgcactgttgtaggccccagagttccacttggtctragtaaggggaagccacgccagtcagacccatttgacttaacaaaggaggaaacagcatcagtagttccagacaaacaagaagagctaggcctgtcattgg

SEQ ID NO: 186310 - DNA, 201 bp, Homo sapiens
agatgagggctgtgtagagagggggaaagccacagagaggtccccaggaggaaaggccaagtcctgagagctgataggatagaaggactattctggaatcrtttccagccaacatggcacgaaggaggcatcaaagcccacaaaacgaaaggggcaattttccagctgtcttaacaagagctatattgcgtctgctaagtc

SEQ ID NO: 186311 - DNA, 201 bp, Homo sapiens
ttgaaaaattttgcctggcaccctacacaccctaggggcagccaagcttgcagcaaatccaggtgtggacaatgttttcaaataagttagattttttttttaaatttttcattttggtgtcttccctggattattgattacagatcattaaatatttttgccttattattgtcacatgtttaaaatcttactgtttattgt

SEQ ID NO: 186312 - DNA, 201 bp, Homo sapiens
ccactggccagcaaggtgttcatttgcaggatggcaagagattctgtctctaggacggtgctgacctgctgatttggggagactcaaattgctcatattaacaaggactccttgaaaaattttgcctggcaccctacacaccctaggggcagccaagcttgcagcaaatccaggtgtggacaatgttttcaaataagttag

SEQ ID NO: 186313 - DNA, 201 bp, Homo sapiens
cccactggccagcaaggtgttcatttgcaggatggcaagagattctgtctctaggacggtgctgacctgctgatttggggagactcaaattgctcatattaacaaggactccttgaaaaattttgcctggcaccctacacaccctaggggcagccaagcttgcagcaaatccaggtgtggacaatgttttcaaataagtta

SEQ ID NO: 186314 - DNA, 201 bp, Homo sapiens
acccactggccagcaaggtgttcatttgcaggatggcaagagattctgtctctaggacggtgctgacctgctgatttggggagactcaaattgctcatattaacaaggactccttgaaaaattttgcctggcaccctacacaccctaggggcagccaagcttgcagcaaatccaggtgtggacaatgttttcaaataagtt

SEQ ID NO: 186315 - DNA, 201 bp, Homo sapiens
gctactaaaatatacacattttgctatcataaataccagggtggtggccggtgcggtggttcatgcctgtaatcccaggacgttgggagggaggctgaggyaggaggattgcttcagctcaggagttccagaccagcctggggaacatggagaaaccccatctctacaaaaattggctgagcgcagtggcgtacacctgta

SEQ ID NO: 186316 - DNA, 201 bp, Homo sapiens
tacccactggccagcaaggtgttcatttgcaggatggcaagagattctgtctctaggacggtgctgacctgctgatttggggagactcaaattgctcatattaacaaggactccttgaaaaattttgcctggcaccctacacaccctaggggcagccaagcttgcagcaaatccaggtgtggacaatgttttcaaataagt

SEQ ID NO: 186317 - DNA, 201 bp, Homo sapiens
attatattagtttctgttctaaggcctggtaaaaatacttttattatcgttatctaaaattattgacctttgtgagtgcccagccacacagtgtgatatgmaaagagagtgcagctgccaccggcctgatgtctggggactcctgcgcaaaggcgggcctgctaactagaacaggcaggaaggctactgagtaggaagaaa

SEQ ID NO: 186318 - DNA, 201 bp, Homo sapiens
agttacatcatggttttatctaatggaagaaaattaagatgtcaaaatttgttacattatattagtttctgttctaaggcctggtaaaaatacttttattrtcgttatctaaaattattgacctttgtgagtgcccagccacacagtgtgatatgaaaagagagtgcagctgccaccggcctgatgtctggggactcctgc

SEQ ID NO: 186319 - DNA, 201 bp, Homo sapiens
acattttgacccttcttggaataaattgatgatgttaagcttagttacatcatggttttatctaatggaagaaaattaagatgtcaaaatttgttacattrtattagtttctgttctaaggcctggtaaaaatacttttattatcgttatctaaaattattgacctttgtgagtgcccagccacacagtgtgatatgaaaa

SEQ ID NO: 186320 - DNA, 201 bp, Homo sapiens
ttcctcatgtgtaaaatggaaataataatatctgcccatcagtgtagtggctattcaatctaataaatataaaggacttagggcattgtttttgtgtgcamaacaaattatgacgaggttacagggagaggcgtgtgtcctccatgccttacttgggattagatgacttgtaccatttgatatttcaaacccgaagaggcc

SEQ ID NO: 186321 - DNA, 201 bp, Homo sapiens
tcagatgtttccttctattatcactttctctgtttaacctcagcgacacacgagtacattcttccccacgtcatgtctctcctattgagttgtgagctttytcaacactgttaacatgtacttcaaaaatatttctaatgtcttcaaaattaaaacatgtgaaatgtgatcagttctacagcaaatcgtcacgtcttaagg

SEQ ID NO: 186322 - DNA, 201 bp, Homo sapiens
aaagggtatgtattattggtaattcgaggttaaattattttatttgtatttccacattaagaaagtcacccttgctttgatggttaatgacgacatccacrccctgggcctgggaagtgtgggttgcagacaggtcagcaggccccacgagtcccagcctcccattcatggggggcttcggtgttgggacttagggtgatc

SEQ ID NO: 186323 - DNA, 201 bp, Homo sapiens
atctcattttaaagggaatattgagccaccgatttagatgggacctgcaattcaatatttagtctgaaatacgaatcttaaaatgatttactgacatagckaaatagaaataaaacaggacatgatttatgttttattctatcctagatgaaaaaacaaaccttgaaatctctgattattaaactcagtaaagaaaactct

SEQ ID NO: 186324 - DNA, 201 bp, Homo sapiens
tgccacggacatcaccctgttcccaccactggtgaatggctccaggattctccgttagccccaccaatgtgtcttttaggttttattactgttttctgagraagaatttggcaggttgtcattcaagttgcttaagaagtacgtggagttagctggcatataatgggtatgctttcaagttggaagctaagtcatatgttt

SEQ ID NO: 186325 - DNA, 201 bp, Homo sapiens
ccactggtgaatggctccaggattctccgttagccccaccaatgtgtcttttaggttttattactgttttctgaggaagaatttggcaggttgtcattcargttgcttaagaagtacgtggagttagctggcatataatgggtatgctttcaagttggaagctaagtcatatgtttctgtttcaggacgtttttactgtaa

SEQ ID NO: 186326 - DNA, 201 bp, Homo sapiens
ggctgcacccttgccctgcgcggcgttggcgctgtgggcctgacggcgctgctaggctcgggagtggactagctagtgcagccagcgccctcggggagggrtattgcggtcgttccgctctgccccgcggcgcagccctggtgacgagaaaccgggtgcggtggggggcgcccaccggagccgacagtcacaccaagtctc

SEQ ID NO: 186327 - DNA, 201 bp, Homo sapiens
aggctggcaaatccagggctgattggatgggacatttcttcctgtagatgtcatagtcctctggaaactgtaaaaaatcaaataagcgtgaggtgataatrttatagttactgtgtgacatgaaataaactaaaaggacataagtttagttgtttcacaaattagggaaagaaaatattttcggtgtcaccatatccctac

SEQ ID NO: 186328 - DNA, 201 bp, Homo sapiens
gtttgcctcctcttgggtggctggccagaccgggattccaggaatcctacccactggccagcaaggtgttcatttgcaggatggcaagagattctgtctcyaggacggtgctgacctgctgatttggggagactcaaattgctcatattaacaaggactccttgaaaaattttgcctggcaccctacacaccctaggggca

SEQ ID NO: 186329 - DNA, 201 bp, Homo sapiens
aaagcccaaatttgaactcagatcattctgattccagcgtccagattcttaaccagtacaccatagtgcagcatggtagatcatacaaagcaaaggatccrgagtttgtaaggcttagctttgaattcttgtttattctttctagtgctgtgagtttgggaaagttacttaactcttttgcctcgttttcctcatgtgtaa

SEQ ID NO: 186330 - DNA, 201 bp, Homo sapiens
acttaatatatgcttagttatacaaatgtatttttcttttaacaggatacagtagagaagatttgtataaaagaaataggaacaaagcaaaggttagtacstaaaatataaaacctgtcaattcaatggatattggttttctggtttaaatttccatttagaattgtttgaaataatttcagatagaaatttaagatcgta

SEQ ID NO: 186331 - DNA, 201 bp, Homo sapiens
gcaccacttaggatctgtaaacataatggttaccatttcctaagagtcaggccctcagccgagttttccacatgcagtacttaattctctcagactccatgccaagtgctataattatgcccattgtttggaagaagaagctgaggcccagagacaaacaatatgataaagcccaaatttgaactcagatcattctgattc

SEQ ID NO: 186332 - DNA, 201 bp, Homo sapiens
catttcagtgatcaccttaatctggggagacggggcgttgggtgagaagagcagtttggatatagctgacctccacccctgggcccactctgacccatacrcacatcctcaaggcagctcagagcaacgtcatagactttgaaaagacccagctgtgggctcatgggacatgttccatttccaccaatccctttggcacca

SEQ ID NO: 186333 - DNA, 201 bp, Homo sapiens
tctaaaattgaattggtttgctaagatttggcctcatgatcagcttctgactctgaagattgcattgaacaaccataaaggcctttgaggagattaagaaygttcaagtacagtgccatgatgttctgatccctgtagaggaaaattagttccatttcagtgatcaccttaatctggggagacggggcgttgggtgagaag

SEQ ID NO: 186334 - DNA, 201 bp, Homo sapiens
taagtttttggttttctaaaattgaattggtttgctaagatttggcctcatgatcagcttctgactctgaagattgcattgaacaaccataaaggcctttkaggagattaagaacgttcaagtacagtgccatgatgttctgatccctgtagaggaaaattagttccatttcagtgatcaccttaatctggggagacgggg

SEQ ID NO: 186335 - DNA, 201 bp, Homo sapiens
ttaaattatctgcactgaagctcagaaagagcattaaataccaagtgagtaagaactggtcaaagcaaaagacaagcatcacaggagggttatctaatgcrggtgctggggccgcagccaggagctcgcagcaggttcatcatccacagtcacaggatggaaggcagcgtttcaggggtgccaagtggccagatgcagtgg

SEQ ID NO: 186336 - DNA, 201 bp, Homo sapiens
aagactttcctggtaaactgttctgaattttacgtttatcgaaatatctccaaagactcaatttagaactttattatgcccttatttatttaacatttctwtgtaacaaacatgtatattgcccttatgttgtgccaggcagtgctcaaagcactttcttcccagagagagatgaattctactgttctcccaaacctttgt

SEQ ID NO: 186337 - DNA, 201 bp, Homo sapiens
tattgcataaataggaaacattgttgaaaagactttcctggtaaactgttctgaattttacgtttatcgaaatatctccaaagactcaatttagaactttmttatgcccttatttatttaacatttctttgtaacaaacatgtatattgcccttatgttgtgccaggcagtgctcaaagcactttcttcccagagagagat

SEQ ID NO: 186338 - DNA, 201 bp, Homo sapiens
tggcgacctgggagaggggaattgctggaactgcttccttctctatacccttctctatgttttattgcataaataggaaacattgttgaaaagactttcckggtaaactgttctgaattttacgtttatcgaaatatctccaaagactcaatttagaactttattatgcccttatttatttaacatttctttgtaacaaac

SEQ ID NO: 186339 - DNA, 201 bp, Homo sapiens
aagacagcggcccaggaagacagcagagtgtttgccctgaataactagaaggatcatgtttgcacttactagaatggtcaaagtcacaggagggcaggttrggggccatcaggagtttatctttggccacgtaggtcttgtgactacataggaccagggaggagacccaagttggacttataagtggggagtcagcagcat

SEQ ID NO: 186340 - DNA, 201 bp, Homo sapiens
agaaaccccgccagaggccggggacccgctccccacctggcggacccgattccgggcgcgttccggctatcgtccctgcttgggacgctgcgcccgcctgrtgcggggcggggttccggcgcagtggcgcccgcccagccccgggggcagggagagcctagattacggaagtaccgcgagcaaggagcgcggaatcgggga

SEQ ID NO: 186341 - DNA, 201 bp, Homo sapiens
tttcaaagtcagcttccatttcccagaacctttgtttttggagtccccatggctacaaggttgagtagcagccttatcataaaacgagaatattctttgargaatcagttcttgcgcagtgagcctccctcaagcatccctccgtgatgaagggtttctacccccatctgtccagtcttcatcttcagtgtcttgcacatt

SEQ ID NO: 186342 - DNA, 201 bp, Homo sapiens
ttattggtaattcgaggttaaattattttatttgtatttccacattaagaaagtcacccttgctttgatggttaatgacgacatccacaccctgggcctgkgaagtgtgggttgcagacaggtcagcaggccccacgagtcccagcctcccattcatggggggcttcggtgttgggacttagggtgatctttctaaatgag

SEQ ID NO: 186343 - DNA, 201 bp, Homo sapiens
tgtcgacctccctgacctagccagtgagagcgaagtgattatttgtcttgactgctccagttccatggagggtgtgacattcttgcaagccaagcaaatcrccttgcatgcgctgtccttggtgggtgagaagcagaaagtaaatattatccagttcggcacaggtgagtgcgctttggccctggtcctgcgtgtgcttcc

SEQ ID NO: 186344 - DNA, 201 bp, Homo sapiens
ttattaatccaagaccctcaaaaaatagaaaaggccgaaaaggcctgggttccctgagagcccttccccttcataagtttaagggggaaattcacgtaacrtgcccagcacagtggccagcacctgccagtgctccgtaaagaggaaagccactccacctccccacttcccctcacgcttgtggcccacagcacaagctcc

SEQ ID NO: 186345 - DNA, 201 bp, Homo sapiens
gcttgaaagtgaaaccagctgtcttgctgacagttgtggccttgccaagattacattcactttagtctcattgtgaaacttaatatatgcttagttatacraatgtatttttcttttaacaggatacagtagagaagatttgtataaaagaaataggaacaaagcaaaggttagtacctaaaatataaaacctgtcaattc

SEQ ID NO: 186346 - DNA, 201 bp, Homo sapiens
taattcctcttttataaatagatagaagaccaaatgaccaggctatgttctccgagttgccactctgtctccgtcaaatggcagcaactcaatccagatgygcccgaggccctgcaggccccagcccaggtgccgtccttgtttctcaatgatcgactccttgtctatggattcattcctcactgcacacaggtaagaaga

SEQ ID NO: 186347 - DNA, 201 bp, Homo sapiens; identical to SEQ ID NO: 32489

SEQ ID NO: 186348 - DNA, 201 bp, Homo sapiens
ccaaatacaccatttctggtttccagatatgtgtttttcccaaccaattctctgacaccagttgcatgtcctacaatttaattcaattctgacactggccrcctggggttggcacagacctcacagagttgagggctcagtcccacaagactgattccaactccagacaccggtagcaagtagcaggtccccaggttaccc

SEQ ID NO: 186349 - DNA, 201 bp, Homo sapiens
ttattttatttgtatttccacattaagaaagtcacccttgctttgatggttaatgacgacatccacaccctgggcctgggaagtgtgggttgcagacaggycagcaggccccacgagtcccagcctcccattcatggggggcttcggtgttgggacttagggtgatctttctaaatgagttgagtatgttatcatttttaa

SEQ ID NO: 186350 - DNA, 201 bp, Homo sapiens
cgagtcccagcctcccattcatggggggcttcggtgttgggacttagggtgatctttctaaatgagttgagtatgttatcatttttaatgttattattaayaattggctaatgtgtacttttcggttatactataattttgttacagttttggcgtttattgtcttttattaatccaagaccctcaaaaaatagaaaaggc

SEQ ID NO: 186351 - DNA, 201 bp, Homo sapiens
aaccttggctaaggcagtttgtctttggctgaggatggttcctggggaggcgccccacaggtgacactcctagcagtctcagccctgaaggggacacagcrggcccaacgtcacatcacatagaggagacgattgacaattcagttaagggacctggtgatgtggagaagaaggtttgcagtgggggtgtaggaagtgatg

SEQ ID NO: 186352 - DNA, 201 bp, Homo sapiens
ttcatggggggcttcggtgttgggacttagggtgatctttctaaatgagttgagtatgttatcatttttaatgttattattaacaattggctaatgtgtayttttcggttatactataattttgttacagttttggcgtttattgtcttttattaatccaagaccctcaaaaaatagaaaaggccgaaaaggcctgggttc

SEQ ID NO: 186353 - DNA, 201 bp, Homo sapiens
gggccgggctttgtagccccactggggccagtcctgggatgtgggctgctccggggaggggtcagaaccttggctaaggcagtttgtctttggctgaggayggttcctggggaggcgccccacaggtgacactcctagcagtctcagccctgaaggggacacagcaggcccaacgtcacatcacatagaggagacgattga

SEQ ID NO: 186354 - DNA, 201 bp, Homo sapiens
gctctgggccagagtggtccttgagagaaggtctgaatcaaggcaagggggccgggctttgtagccccactggggccagtcctgggatgtgggctgctccrgggaggggtcagaaccttggctaaggcagtttgtctttggctgaggatggttcctggggaggcgccccacaggtgacactcctagcagtctcagccctga

SEQ ID NO: 186355 - DNA, 201 bp, Homo sapiens
taaaccatacatgagaatttgattgcagttgcatgaactgaagggaatagatagatttctaaaatgtattttattcaagagatattcactgagcactccaygccagggactagctaggctctgagcatccagcagtgcacaatacaaaagctctgcccttgtggagcacacactgtgtgggggagtaggcaataatcatga

SEQ ID NO: 186356 - DNA, 201 bp, Homo sapiens
ggaaagtcttttcaatagtatgttattgacaagtcactctaagctgtaaatatgtgtttatttcctttcgcatgtagtacaagtatcaagtactcacaccygggagagacagatggcaccagactcctgctcatttgtgacgtagccctcggaaagtgtatggacttacatgagaaggacttttccttaactgaagcacca

SEQ ID NO: 186357 - DNA, 201 bp, Homo sapiens
cctgcttttgaactgtaatatcataaagtaaagattttcaaaattgatcaagtatattccagcatattgctcttactccattactgctactgtgctagcawaatggtttgttggcacttgagtacataagacaaacaattttaggccagacacggtgactcacagctgtaattccagcactttgggaggttgaggcggaca

SEQ ID NO: 186358 - DNA, 201 bp, Homo sapiens
gtgcacatctatagtcccagctactcaggaggctgaggcaggaggatcagttgagcccaggagttggagactgcaataagctatgatcatgccactgcacyctagcctgagtaacagagcaaaattctgtctaaaaaaaaagaagaaatattaaataaataagtgcataataaagttctaaattgagtctttggagatatt

SEQ ID NO: 186359 - DNA, 201 bp, Homo sapiens
ttaaatctactttttcctaattaataaggtggtgatttttccttctctttaccaccctggtatttatgatagtaaaatgtgtatattttagtagctaacaragatttaggagaacagtagaattcatttctctctggaaacaaagtgctttgagcactgcctagcacaacataagggcagtatacatatttgtcacataga

SEQ ID NO: 186360 - DNA, 201 bp, Homo sapiens
gacctctgccaggtaaacctctgaaatatagaattctatttattataaaatatgttgagggtgggggtctttagaaatctgatgaatgaggtaacactgartcatgaaattgtctccagagttgtactagaaaataaattgttgaaccattttagaaagccctggatccttatgaaagttaaaccatattttcaaatgtga

SEQ ID NO: 186361 - DNA, 201 bp, Homo sapiens
ttaagtagggatgagctttctaagtaggaccaaaacccaaaagctattttacaaaattcattcaatctcctaatgtgaaattcaaacaatagatgtttatmtaataaaaggcagaaatttcccttgtgtttccggaaacaaccatggcttcaccctgattgcagagttctctgaatgccagaagttcagtaggaacctgcc

SEQ ID NO: 186362 - DNA, 201 bp, Homo sapiens
cgatatcttagcttattgtaccctgctcgagggtcacggaacatcctcctggtgtctgatgggcacctccaggatgagagcctgacattacagctcgtgargaggagccgcccgcacaccaggttattcgcctgcggtatcgggtgagtctcagagagctggtcacatagtccagacccacggggaggtcgtcttgttgcc

SEQ ID NO: 186363 - DNA, 201 bp, Homo sapiens
tgtgtccaagaaggagaaagggttttgttacccttgtaccctgaaatgcatactggattttgtggaggatatagttgtttgggtaagaagtaagtaaaaaygaaggtgaaaaacatgatagaatgtgttattgttttcttcattgagaaagaaaaccatagcatcgtttaggccaggacatccctcagggtgccttcctcc

SEQ ID NO: 186364 - DNA, 201 bp, Homo sapiens
aaagctaatccatggtcaaatgtgtccaagaaggagaaagggttttgttacccttgtaccctgaaatgcatactggattttgtggaggatatagttgtttrggtaagaagtaagtaaaaacgaaggtgaaaaacatgatagaatgtgttattgttttcttcattgagaaagaaaaccatagcatcgtttaggccaggacat

SEQ ID NO: 186365 - DNA, 201 bp, Homo sapiens
taagcccctggacatcacaccacctcctgatcagaaggcgagcagttctggtaggtatttcatagcaagcatttaacgtatcataggtgccatagtacacrcttgggtttgtcaaagataccataggcagagaattgtccagaaatactaaaaaaaaattagacttattacctcagaaaatggacagaaaaataacaaagg

SEQ ID NO: 186366 - DNA, 201 bp, Homo sapiens
gcccagcaagagtacctagaagccgtgacccagggccatggcgcttacctgatgagtcaggatgctccggtatggcttggtgtgcatgccgcatgcatacwggagagggaaagagagttagaacaagatatgaaatacgaatttcatgctagaggctaagataatttgcactgttgtaggccccagagttccacttggtct

SEQ ID NO: 186367 - DNA, 201 bp, Homo sapiens
tacaaatgtatttttcttttaacaggatacagtagagaagatttgtataaaagaaataggaacaaagcaaaggttagtacctaaaatataaaacctgtcarttcaatggatattggttttctggtttaaatttccatttagaattgtttgaaataatttcagatagaaatttaagatcgtagactaagacaactttctctt

SEQ ID NO: 186368 - DNA, 201 bp, Homo sapiens
aaatataaaacctgtcaattcaatggatattggttttctggtttaaatttccatttagaattgtttgaaataatttcagatagaaatttaagatcgtagastaagacaactttctcttcatttttgctagcttctctttgactatgtctattgagatgccgtatgtgattgaattcattttcagtgatacacatgaactga

SEQ ID NO: 186369 - DNA, 201 bp, Homo sapiens
caagccctgcctcagtttccctcccaacactcagttttttcccaacaatagtactccacaggaagtggctaaacatatcaaagaacagcacctggtaccasttctctatgggttggtacatattatcactgcggtcatttttcaaggtattgccatagattcttcaacctgtgcacctgcctaggaccacaccctgctttc

SEQ ID NO: 186370 - DNA, 201 bp, Homo sapiens
cccatctcaaaaataaataaagtaaaacaagctttgggggaaaatggacttttcctatctttttgagaaagtgttaatgtgatataaatattaattttgayatgtggtgattctgacatctgtgtattatttccacctacagctaataagagacatggttaatgtctgtgaaactaatttgtccaaacccaacccaccatc

SEQ ID NO: 186371 - DNA, 201 bp, Homo sapiens
acccaggaggcagagattgcagtgagtcaagatcatgccactgcactccagcctggtcaacaagagcaaaactccatctaaaaaaaaaaaaaaaatgtcartcatgagtgttgctaagagggaacgtatagtgcccattcaaatacaattctggaggctaaggtaggaggatctattgaactcaggaggttgaggctgcaa

SEQ ID NO: 186372 - DNA, 201 bp, Homo sapiens
cctccaggatgagagcctgacattacagctcgtgaagaggagccgcccgcacaccaggttattcgcctgcggtatcgggtgagtctcagagagctggtcayatagtccagacccacggggaggtcgtcttgttgccctgcaggggactttggcaagcttggaagttgacactagaatacagaagccttacagcatagaggg

SEQ ID NO: 186373 - DNA, 201 bp, Homo sapiens
gtcagtactaggtgggccccagtcctggtgcctcctcaccaggcacactctaagcagtcattgcaggcagcatagcccagatcgctgagaaactccaggaygcacgtttgcctcctcttgggtggctggccagaccgggattccaggaatcctacccactggccagcaaggtgttcatttgcaggatggcaagagattctg

SEQ ID NO: 186374 - DNA, 201 bp, Homo sapiens
tccgtgcacggtcaaggggacagtgtctgacgtccccccagtcagtactaggtgggccccagtcctggtgcctcctcaccaggcacactctaagcagtcaytgcaggcagcatagcccagatcgctgagaaactccaggacgcacgtttgcctcctcttgggtggctggccagaccgggattccaggaatcctacccactg

SEQ ID NO: 186375 - DNA, 201 bp, Homo sapiens
tagtgatcctgatcatcaaactcagggcaagcatacatgcctttgagggtttcgtaaaactgaggaaatccaagacaggatgagaaggagttccgtgcacrgtcaaggggacagtgtctgacgtccccccagtcagtactaggtgggccccagtcctggtgcctcctcaccaggcacactctaagcagtcattgcaggcag

SEQ ID NO: 186376 - DNA, 201 bp, Homo sapiens
agatctatttatgggatggtaaaaatacaggagggaaacataccaaaatattaatagtgatcgtattgctctcgggattttaggagattttaattttcttyttgatacttttctatattttctaaattatatctctaaatgaacatattttataattataatcaacattttcaaatggcacatgtagtttgatgtttcccg

SEQ ID NO: 186377 - DNA, 201 bp, Homo sapiens
accatcttccagtgcagacgctacagtgctgggtatctgagctggagattatgcagaggaggcatccagctcatttccaatgatcttttaacaatttctgraagagctaaggaggccttagggacttaccatgtggacttaccatgtgttttgtaaggaatctatcatgtattttgtaaagatgtacaagaaaaaatttat

SEQ ID NO: 186378 - DNA, 201 bp, Homo sapiens
ggtctggagaggagtgacatagcttctaagagtcagatccaaagcaaacacaagtagcccatccccagagtgtgcggcccacttctttctgcctctgccgygtggagaccatcttccagtgcagacgctacagtgctgggtatctgagctggagattatgcagaggaggcatccagctcatttccaatgatcttttaacaa

SEQ ID NO: 186379 - DNA, 201 bp, Homo sapiens
caaactattagattaaatgtgttctaatctcctcccttggcaaatacaacttcataaccacctggaaggccaggttcaaattcggcccttggttgaccccyagcaccctaagagggtttgcctgcaaacgtgaataccccaccccacccatcaaaatgccatccagaccccatgccagtgccccctcacaccagccacctt

SEQ ID NO: 186380 - DNA, 201 bp, Homo sapiens
gaagaaagtgccaattgaaaattgtatggctatcaatgagtttcaaataataacagatgagaatcctcctgatatgcttattaaaatagaattagagtatrttctccctattttataaggttataccttcctcttttcccactgggttatcctttgatcaccaaaattataactaatttaaggatatatttatgaatctta

SEQ ID NO: 186381 - DNA, 201 bp, Homo sapiens
ccaacaaactcagcagaactccaagcactataaatacaaaaatgaccacatttagataggccagagtcaaactgttgaaaaccaaagataagccaggcacrgtggctcacaccagtaatgcctgcactttgggaggccaaagggggcagatcatttgagctcaggatttcgagaccagcctggccaacatggtgaaacccc

SEQ ID NO: 186382 - DNA, 201 bp, Homo sapiens
tttcatagcaagcatttaacgtatcataggtgccatagtacacgcttgggtttgtcaaagataccataggcagagaattgtccagaaatactaaaaaaaaattagacttattacctcagaaaatggacagaaaaataacaaaggacaaaagactactttagcactagaaacagatttcttgatatctagcctagtagggtc

SEQ ID NO: 186383 - DNA, 201 bp, Homo sapiens
acaggagcctaggaaggctagaagcaaggagccagcaagtctagacacattccagaggacgttacgcaagccctgcctcagtttccctcccaacactcagytttttcccaacaatagtactccacaggaagtggctaaacatatcaaagaacagcacctggtaccagttctctatgggttggtacatattatcactgcggt

SEQ ID NO: 186384 - DNA, 201 bp, Homo sapiens
cagggaggcggaggttgcagtgagctgagatcgcaccactgcactccagcttgggtgacagagtgagattccgtctccaaaaaaaaaaaaaaaaaaaaaaagaacctaaatgcagaatatatatgtgtatacacacacatacatattccatttaaacatagttgtatatttttattatcagctgttcagtttttccccaga

SEQ ID NO: 186385 - DNA, 201 bp, Homo sapiens
aaatagaatttcagaccagccatatctattcttgaaggagaaaagtcatagtgcacaggatttgcaaaaagcgcactgtcgtcactcaccagtatgtcaaygctggggtgatatactggtaagccaggttcctgggtgtagaaagaaatacatgcagtgcagactcatcttcgcagtgtagcttgtgctgtttgttttgtt

SEQ ID NO: 186386 - DNA, 201 bp, Homo sapiens
tttttatatgtaatcaaattcttttggtttgacttttgaccctcccctaggtgtccgctgagatctgtactaagagtccggtgacatggaaggtagaatcrggagggcaataagctttctccaggaagacaggaagagccacgtcaagccccgggagtggcagctgcagttcagccctccagggctacctgagcaagccct

SEQ ID NO: 186387 - DNA, 201 bp, Homo sapiens
ttgggcccagccctgttcccaacaatggcagggcctgggacaagaatacaatacaagtatttaaagtttataactttgtagtttataacaagtgtttaaargttataaatcaaactagcaaactattagattaaatgtgttctaatctcctcccttggcaaatacaacttcataaccacctggaaggccaggttcaaattc

SEQ ID NO: 186388 - DNA, 201 bp, Homo sapiens
ctgaggcaggggaatcgcttgaaccagggaggcggaggttgcagtgagctgagatcgcaccactgcactccagcttgggtgacagagtgagattccgtctscaaaaaaaaaaaaaaaaaaaaaaagaacctaaatgcagaatatatatgtgtatacacacacatacatattccatttaaacatagttgtatatttttatta

SEQ ID NO: 186389 - DNA, 201 bp, Homo sapiens
tatctttcttaagataatgcccaattttcccacagtttgcttgtataataattctaaattcactgtcatattgacttaagagagggtccttaaaaactttktttcctacaggatggtgatgggaatctttgcaaattgtatcttctgtttgaaagtgaagtacttacctcagcagcagaagaaaaagctacaaactgacat

SEQ ID NO: 186390 - DNA, 201 bp, Homo sapiens
ggaagcagagattagcagcaggagagagtgagtgagctactcgaagttcatcaggagagactgacatggcccattgggaggctgggctcctagaggcagargtggcccagccctgtcccctccctgttccctgaactgcaggacaatcctacatgtcctgtgaagcaggatattactagagcacagccaaatatgaaaata

SEQ ID NO: 186391 - DNA, 201 bp, Homo sapiens
gtttcagtgcagctcccgctggaggctggcgcttctgggctctggatgtggtactcttcactgcagtctgctgatcctgggtgcctccagaagacccacartgtgactgttgggcccagccctgttcccaacaatggcagggcctgggacaagaatacaatacaagtatttaaagtttataactttgtagtttataacaag

SEQ ID NO: 186392 - DNA, 201 bp, Homo sapiens
tggattgcttgagctcaggagtttgaaaccagcctgggaaacatagtgagacctcgtctctgtaaaaaattaagaaaaaaaattagccaggtgtggtcatrcacacctgtggtttcagcttctcaggaggctaagacagggcgatcacttgagtccaggaggttgaggttgaactgagctgtgatcgtgccactgcatacc

SEQ ID NO: 186393 - DNA, 201 bp, Homo sapiens
ccatcctaataaagcctaaaacaaagcctacacaggacctaccagaacaaaactgaacattctttagagtaagatagcatagctgagagtctctacaaggygtcatttttaatgttcagtatggaatgaaaatttaataacatacgaagaagcaggacaatatgatcatgatcaaggggaaaatgggctataaatgctgac

SEQ ID NO: 186394 - DNA, 201 bp, Homo sapiens
gagtttaaggttgccaaagtggctggaagttaaggattaaaatcctataaaggagggaaccacagagcagggaactctgaaatctgcatccagatacccckcagatccttggctgtctcctaacctctacatatacaggtgcaacctcaaggaatccagaaaaaagcaacagctgggaagctacagagctaagcagagatt

SEQ ID NO: 186395 - DNA, 201 bp, Homo sapiens
tgaacagatgatggggtgagatcttaatttcctagattctagaactaatggattgtaatccacataaatttcccactgtgaagtagagcacaagcacttgyacctgtactctaaatattttcacataggtcatgggaatacagatattattcaacatgtatattgtgttagagcttatcactccatttgttaagctgataa

SEQ ID NO: 186396 - DNA, 201 bp, Homo sapiens
aacccaaaagctattttacaaaattcattcaatctcctaatgtgaaattcaaacaatagatgtttatataataaaaggcagaaatttcccttgtgtttccrgaaacaaccatggcttcaccctgattgcagagttctctgaatgccagaagttcagtaggaacctgccaaaattctgagcaaggaagagatgcagtcagtg

SEQ ID NO: 186397 - DNA, 201 bp, Homo sapiens
ataaaataaaattctgtttaaactattttcgggaaagtaccctgtagcaggaaggagagaaaataccaaagagttataaaattcccaaaggatagaatgtrtactttattttaaatgtgaagtaactattttctggatggagcattgaaagagaaataattcctcttttataaatagatagaagaccaaatgaccaggcta

SEQ ID NO: 186398 - DNA, 201 bp, Homo sapiens
tgagctttctcaacactgttaacatgtacttcaaaaatatttctaatgtcttcaaaattaaaacatgtgaaatgtgatcagttctacagcaaatcgtcacrtcttaaggattttgtcccagtgtggtgccggagtatttgaatattttaatgcaaaatccaagcatagttggagaaaacaggtatgttttttaaacatctg

SEQ ID NO: 186399 - DNA, 201 bp, Homo sapiens
gcgtttattgtcttttattaatccaagaccctcaaaaaatagaaaaggccgaaaaggcctgggttccctgagagcccttccccttcataagtttaaggggraaattcacgtaacgtgcccagcacagtggccagcacctgccagtgctccgtaaagaggaaagccactccacctccccacttcccctcacgcttgtggccc

SEQ ID NO: 186400 - DNA, 201 bp, Homo sapiens
catctaaaaaaaaaaaaaaaatgtcaatcatgagtgttgctaagagggaacgtatagtgcccattcaaatacaattctggaggctaaggtaggaggatctmttgaactcaggaggttgaggctgcaatgagctatggtcatgccactacactccagcgtgggtgagagcaagacccatctcaaaaataaataaagtaaaac

SEQ ID NO: 186401 - DNA, 201 bp, Homo sapiens; identical to SEQ ID NO: 32498

SEQ ID NO: 186402 - DNA, 201 bp, Homo sapiens; identical to SEQ ID NO: 32499

SEQ ID NO: 186403 - DNA, 201 bp, Homo sapiens; identical to SEQ ID NO: 32501

SEQ ID NO: 186404 - DNA, 201 bp, Homo sapiens; identical to SEQ ID NO: 32477

SEQ ID NO: 186405 - DNA, 201 bp, Homo sapiens
ctcaagcaagtgaacgtgtggaagcagcacctcatgctgatcttattacacaggttacaaggagctattttcgtatcctaagcatatcacaagcaataccrcggcagcagagttcatcatggtgagtgcaagaggcttcctgtatctcctgggtcttttcctaccatgctttaaggggacctccagggcttaggccactca

SEQ ID NO: 186406 - DNA, 201 bp, Homo sapiens
cattggccacagcaagtcctttggccaactccagtttcaagggtggaaatatagctgctgcctcgtggcaggaggaacttcaaaagtcacattgcaaaggrgcacgcagacaggagtggagagactttgtggtcatgtgacactctagcacatgcctttgcctttgttgttgtaaagcttatttacattttcaacagcttt

SEQ ID NO: 186407 - DNA, 201 bp, Homo sapiens
ccatttcccagaacctttgtttttggagtccccatggctacaaggttgagtagcagccttatcataaaacgagaatattctttgaagaatcagttcttgcrcagtgagcctccctcaagcatccctccgtgatgaagggtttctacccccatctgtccagtcttcatcttcagtgtcttgcacattctttgccttggcacc

SEQ ID NO: 186408 - DNA, 201 bp, Homo sapiens
aataaataaatgtcaggagggaagaggaggagttcagaaaaggaaatctgaactcatagaaaggcatggaagttgagtggggaatgtgttttagaacaagmcaggagatgtattgcttatttcagcagcagaccctcccagcttttgggagatgtctttacaacctaggccatgagtcaagggtccttaatcctgacttcg

SEQ ID NO: 186409 - DNA, 201 bp, Homo sapiens
aggggtaaattattgctcttgacatctaagatatccacctgtaggatgggaataagtaatgaagaggtgattattgaacagttaagaatgctggctctatrtatggccaaactgtatgtatagaagcctggggttcatttgagaggctgccacttaatattatcaggttatcctcctacgtgtgttggtaaatgtttcctc

SEQ ID NO: 186410 - DNA, 201 bp, Homo sapiens
taatcccagcactttgggagcagaaggtggaagagtcacttgaggcctggagtttgagaccagcctgggcaaccccatctgtacaaaaatatttaaaaatmagccaggcatggtggtgcgtgcctgtagtcccatctacttaagaggatggcttagacctggggtttcaaggctacattaagctgtgactgcaccactgcc

SEQ ID NO: 186411 - DNA, 201 bp, Homo sapiens
ctagaatggtcaaagtcacaggagggcaggttgggggccatcaggagtttatctttggccacgtaggtcttgtgactacataggaccagggaggagacccmagttggacttataagtggggagtcagcagcattcacatagtgtttaaagtcatgagcccagattaaacacccagagaatcagtagagcacagaggccaac

SEQ ID NO: 186412 - DNA, 201 bp, Homo sapiens
ggcttctggtgctggccaattaggaggcctgatcctctgtgccaagaggcttgcaggaagctggagggttatgggtggtcttggtccccagtcagatgccytaaccgcagtccatttcctagtgactccacagtctcgcaccttctgtcttaggaaaggcaggcatgcctccagaccaccagaaaatgttcttcccttctt

SEQ ID NO: 186413 - DNA, 201 bp, Homo sapiens
taggtcctgatacaaacaaaacccactgcatttaaaaaaatgagataggaaaaattaaacactacctggatattttatgatattaaagaaatattgataaytattttttaagtgtcatgattaagaaaaagttctcaaacacaaaacaggtgttcaggaagttctgggctaggcaaattggctcatgcctataatccaagc

SEQ ID NO: 186414 - DNA, 201 bp, Homo sapiens
taaaatcaaagaagttaaacaaaaccccttgatttctaaacttgaattagatcagagaatagaggaacatgttacttgacaccatggaaatgcagtcagcraagtctggaatgtggggaaataaatggcaagagaaaaataaatggcaatagaaaaaaaaggttgaggagcagaacctgtaaataaacctttagagacata

SEQ ID NO: 186415 - DNA, 201 bp, Homo sapiens
ttttgcatatctaactcaagtgattttttatttgagtctttttcttcaactagtatagtgatcattattttaaattctcagtattaaatgagattgggtgyaattattgaattgatttttaaaaagaaaaccagtgggttttttttttaattcttttaaaaaaaaacctattttcatcctattattttcctgagcagcctt

SEQ ID NO: 186416 - DNA, 201 bp, Homo sapiens
tttgaaataatttcagatagaaatttaagatcgtagactaagacaactttctcttcatttttgctagcttctctttgactatgtctattgagatgccgtaygtgattgaattcattttcagtgatacacatgaactgaaacaaaaggttagtgcatctttgatttcttaagagctgttattttaacactacttttatctta

SEQ ID NO: 186417 - DNA, 201 bp, Homo sapiens
aaataatcttttaggcataaagttaattttactgacatgcatttagatacattatgtgtataaaatgaaaagaataaaagttacagatatgatcaataagsatatttttattctgcttaatcactcaaaaaatgttatatctgtagtgcaagttcatcatgaagaactagataagcatagagaatacaaataagccaaaat

SEQ ID NO: 186418 - DNA, 201 bp, Homo sapiens
agtggagggggagtggtggagggctgtggaggaatttatgcctggggagaaaaacatgtaaaataatcttttaggcataaagttaattttactgacatgcrtttagatacattatgtgtataaaatgaaaagaataaaagttacagatatgatcaataagcatatttttattctgcttaatcactcaaaaaatgttatatc

SEQ ID NO: 186419 - DNA, 201 bp, Homo sapiens
atccagatgtgcccgaggccctgcaggccccagcccaggtgccgtccttgtttctcaatgatcgactccttgtctatggattcattcctcactgcacacargtaagaagacgcagagtttgttattctatgggaagaccaatatattttgctaattttttttctgtcttcttccctccccttctcaccagcagattttctt

SEQ ID NO: 186420 - DNA, 201 bp, Homo sapiens
gatgtgtacatgaggatagtcatcacagcgttgtttacaataatgaaaatttagaaataacctctagggttaatcaattatggtgcattcgtagccatatyctttaaaaacagttgatttttaaaatgtttatgtaactagaaactgtgatatttatagaggtttttcgaaatttgagaaagattatcacaaactacctta

SEQ ID NO: 186421 - DNA, 201 bp, Homo sapiens
atccagcagtgcacaatacaaaagctctgcccttgtggagcacacactgtgtgggggagtaggcaataatcatgatgaaagagtgaaacacataacatgtyaggtggtgacaggtgctaaagagaaaaaggaaagcaggaggagctgctttcacagataggagctgtgaaagacaggggctttgaacctgtaaacagaatg

SEQ ID NO: 186422 - DNA, 201 bp, Homo sapiens
cttggtccccagtcagatgccctaaccgcagtccatttcctagtgactccacagtctcgcaccttctgtcttaggaaaggcaggcatgcctccagaccacyagaaaatgttcttcccttcttgattaagcataattgcaatgaaaagagcagacaaaagaagataccccaatggtacaacttgtgcaactgcattgttgta

SEQ ID NO: 186423 - DNA, 201 bp, Homo sapiens
attttaaaacgtgtttgagtttgtattttgtaggttattacagagaaaaagccacttaaactgatttaaatgtgcaggaatatgggtatggcgtctctaaygtggcctctctgtggcatgaaaaactgcccctgaaaacctggaaaacacgttcctaaataccagttacacttgggccctcattcactgtgcatacccagg

SEQ ID NO: 186424 - DNA, 201 bp, Homo sapiens
ccaattcttctaaaccagtaagcttacccactctcagccgggaggagttcacacagatcctgtgtcccatctgtcccctctttggaattcagttcgcttgrttgatgagttcaaaacaagttatgattttgtagattgcctggtgtgttataacagaagtgacattttctgcatccacctatatcctacccagaaacagaa

SEQ ID NO: 186425 - DNA, 201 bp, Homo sapiens
ccagaagacccacaatgtgactgttgggcccagccctgttcccaacaatggcagggcctgggacaagaatacaatacaagtatttaaagtttataactttrtagtttataacaagtgtttaaaggttataaatcaaactagcaaactattagattaaatgtgttctaatctcctcccttggcaaatacaacttcataacca

SEQ ID NO: 186426 - DNA, 201 bp, Homo sapiens
tcatggtcatctctgaatctgcctgttaattgctttatcttgacattgggtcattttttccttgctttttaaaaatgtgtatattttggaatttgtgattraatgttggacattgtgtgtaaaagaagaagagagactgaaataaatgacatttatgcccagaagtggcaactcctgttctttcaggttagtgtaggggtt

SEQ ID NO: 186427 - DNA, 201 bp, Homo sapiens
agacggggcgttgggtgagaagagcagtttggatatagctgacctccacccctgggcccactctgacccatacacacatcctcaaggcagctcagagcaamgtcatagactttgaaaagacccagctgtgggctcatgggacatgttccatttccaccaatccctttggcaccacttaggatctgtaaacataatggttac

SEQ ID NO: 186428 - DNA, 201 bp, Homo sapiens; identical to SEQ ID NO: 32500

SEQ ID NO: 186429 - DNA, 201 bp, Homo sapiens
agtaggaagaggcccagtgggagaaatgttaggtcaagttccctagaaagcagactctggatggaatttgttttcaggaagcctgtgggactgtgcctgcrggagccgcacctgtgagggagtgagggaggcaggacgtggccgaggagacaacagagtcctcagatgatcttgggggaagctctgggccagagtggtcct

SEQ ID NO: 186430 - DNA, 201 bp, Homo sapiens
tacaaataaaagactgggccaggcttggtggctcatgcctgtatcccagcagtttgggaggccaaggcaggaggatcacttgaggccaggagttcaagacyagccttggcaacatagagagacccatttctacgtaaactgaaaaacattacccaggaatggtggtgtacctgtagtcttagctactcatgaggctgaggc

SEQ ID NO: 186431 - DNA, 201 bp, Homo sapiens
cagtggagggggagtggtggagggctgtggaggaatttatgcctggggagaaaaacatgtaaaataatcttttaggcataaagttaattttactgacatgyatttagatacattatgtgtataaaatgaaaagaataaaagttacagatatgatcaataagcatatttttattctgcttaatcactcaaaaaatgttatat

SEQ ID NO: 186432 - DNA, 201 bp, Homo sapiens
acacctgctccactgagaggtgctcctcttggtctcctgccctgctcagcctttccagtgggcccagtggaaggctgtggggatatggggaaacgcctgcragagaatgcaaactccccttgggtcaggagctcccaattcttctaaaccagtaagcttacccactctcagccgggaggagttcacacagatcctgtgtcc

SEQ ID NO: 186433 - DNA, 201 bp, Homo sapiens
ccttcccccagcagctggaggcttttgcttcatgtggggaaaggatccagggaagtggccccagcacctcccacacacctgctccactgagaggtgctccycttggtctcctgccctgctcagcctttccagtgggcccagtggaaggctgtggggatatggggaaacgcctgcgagagaatgcaaactccccttgggtca

SEQ ID NO: 186434 - DNA, 201 bp, Homo sapiens
ttgtattttagaagttcctgtcattccatgagcaaactttctgtgtttcactgcttgaaagtgaaaccagctgtcttgctgacagttgtggccttgccaarattacattcactttagtctcattgtgaaacttaatatatgcttagttatacaaatgtatttttcttttaacaggatacagtagagaagatttgtataaaa

SEQ ID NO: 186435 - DNA, 201 bp, Homo sapiens
aggggctcaaccaacacctacaaggacaccatggctttgagctggggcaggttcttccagattttcctggggttaatgttaggatcactgcctactacagrggcaggagttgcccagaagagcagaaagtgccgcctccacaggcagtttgggatgagggaggagctggagcctttaacatgtgcatgacctaataacttt

SEQ ID NO: 186436 - DNA, 201 bp, Homo sapiens
gtaattccagcactttgggaggttgaggcggacagatcacaaggttaagagattgagaccatcctggccaagatggtgaaaccccgtctctactaaaaatrcaaaaactagctgggtgtggtggcacgtgtctgtaatcccagctacacaggaggctgaggcaggagaatcacttgaaccaaggagtcagaggttgcagtg

SEQ ID NO: 186437 - DNA, 201 bp, Homo sapiens
ggattttttttcttcttcaggtcattgtttttcagacatacacaaataaaagtcacgtgcccattgaggcaaaatatatctttcctttggatgacaaggcygctgtgtgtggcttcgaagccttcatcaatgggaagcacatagttggagaggtaaggcaagaagatgcatcgtgcccgctctcggctttcaaagtcagct

SEQ ID NO: 186438 - DNA, 201 bp, Homo sapiens
aagtctttcaccttcatttttgaaagatattttttgctgagtatgggattctaggtgacagtttatttgttttcctttcagcattttaaatatgttaactkcattgtcttctggcttatatggtttctgagcagaagtcagctctaattcttgtgttgttcatctatatgtgaaggtgtctttttttgtcaagctatcttc

SEQ ID NO: 186439 - DNA, 201 bp, Homo sapiens
tttctggtgctcttcatttctttctatagatacaaagaaatcttccttctgcttgaagagttttctttattttctttttctagcgcaagtgtgctagcaargagtgcattcctcttttatctaacaaagtctttcaccttcatttttgaaagatattttttgctgagtatgggattctaggtgacagtttatttgttttcc

SEQ ID NO: 186440 - DNA, 201 bp, Homo sapiens
attcacatttttaccgtttctggtgctcttcatttctttctatagatacaaagaaatcttccttctgcttgaagagttttctttattttctttttctagcrcaagtgtgctagcaaagagtgcattcctcttttatctaacaaagtctttcaccttcatttttgaaagatattttttgctgagtatgggattctaggtgac

SEQ ID NO: 186441 - DNA, 201 bp, Homo sapiens
tgaaatctctgattattaaactcagtaaagaaaactctctcataacacaatttacaagctttgtggcagttgagaaaagggtatgtattattggtaattcraggttaaattattttatttgtatttccacattaagaaagtcacccttgctttgatggttaatgacgacatccacaccctgggcctgggaagtgtgggttg

SEQ ID NO: 186442 - DNA, 201 bp, Homo sapiens
gcctaatagaagtccacataaagagtctttttgaatgcatagaattatatattaaagaaacccatggtttcactatcaaataatgttaatttctaatttaraaataaatggttccatgttctggagtcacacacttgatctgtaacttaaatctgtcatgtttttattaagatgtatatcatgagcctgtacaaagggatt

SEQ ID NO: 186443 - DNA, 201 bp, Homo sapiens
atcccaactgaaagagacttctctttagttggccttttctggttcaagttcttatcagataagtatatttcgatgatcacttcatttaagtttccattcaycttagactcagtttttagtttttgcctgggttttagtaaacattgatgttgttttcttcattaaagcctgaagtcactcttcatgtaaggaatgatttaa

SEQ ID NO: 186444 - DNA, 201 bp, Homo sapiens
gagagtttgctgcccttcccccagcagctggaggcttttgcttcatgtggggaaaggatccagggaagtggccccagcacctcccacacacctgctccackgagaggtgctcctcttggtctcctgccctgctcagcctttccagtgggcccagtggaaggctgtggggatatggggaaacgcctgcgagagaatgcaaac

SEQ ID NO: 186445 - DNA, 201 bp, Homo sapiens
caggggcattcttctggttcagcctcagtcttaggcagggcctgcagtcctggaccttaggatgggaactaattagcacttctgttcattgtcctatcttrgtggcagccaaattctgccttgtgtctgttaagagttgtttgggagatggtttcctgcctttcctccagttgtagcaacccctgctttgtactagtgcag

SEQ ID NO: 186446 - DNA, 201 bp, Homo sapiens
tttagtagagacggggtttcaccgttttagccgggatggcctcgatctcctgacctcgtgatccgcccgcctcggcctcccaaaatgctgggattacaggygtgagccaccgcgcccggccaatagtgaacacttttaagtaaccaagtatctgatgacttggggaaggatgaaataaacgcaaagcttatgtaaccacta

SEQ ID NO: 186447 - DNA, 201 bp, Homo sapiens
caggatggtgatgggaatctttgcaaattgtatcttctgtttgaaagtgaagtacttacctcagcagcagaagaaaaagctacaaactgacattaaggaamatggcggaaagttttccttttcgttaaatcctcaggtatttccaagtgtcataaactacagtgtgataaaacattgcgcattcagggaacagggtcatgg

SEQ ID NO: 186448 - DNA, 201 bp, Homo sapiens
ctgtgccaagaggcttgcaggaagctggagggttatgggtggtcttggtccccagtcagatgccctaaccgcagtccatttcctagtgactccacagtctygcaccttctgtcttaggaaaggcaggcatgcctccagaccaccagaaaatgttcttcccttcttgattaagcataattgcaatgaaaagagcagacaaaa

SEQ ID NO: 186449 - DNA, 201 bp, Homo sapiens
ctttcttaaacaaaaaggcattcaatctctaggtaaggcactatgtttccatttattaagtcattattttcattcattaataagcatgctcctaattgttrtaaactgttttgtaagctagtgtattaatgtaataattatgaaagttatattcgaatggaattatatttaaccattaaaggaaatgggagatgggtttct

SEQ ID NO: 186450 - DNA, 201 bp, Homo sapiens
tcttttaggttttattactgttttctgaggaagaatttggcaggttgtcattcaagttgcttaagaagtacgtggagttagctggcatataatgggtatgytttcaagttggaagctaagtcatatgtttctgtttcaggacgtttttactgtaagtgttggaaacttaccccctaaggctaaggttcttataaaaattac

SEQ ID NO: 186451 - DNA, 201 bp, Homo sapiens
gagctaatgtatgtaaaggatttttaaactgtgcctgttcacagtaagtgagatataaatgctactgttgtcattagcaactgaaccaaatacaaaacccytggtctgttgagtaggaggtcccaagtctaaggacaaaacatttgccctcagcgcagtcatagaaaatctataaggaatggtctcaggaagtatcgggcc

SEQ ID NO: 186452 - DNA, 201 bp, Homo sapiens
attcttcctatccatgagcatggaatgtttttccatttgttcgtgtcctctctgatttccttgagcagtggtttatagttctccttgaagaggtccttcamttcccttgctagctgtattcctatgtattttattctctttgtagcaattgtgaatgggagttcattcatgatttggctctctgcttgtctgttgttggtg

SEQ ID NO: 186453 - DNA, 201 bp, Homo sapiens
aaaaaaaaaatgtcaatcatgagtgttgctaagagggaacgtatagtgcccattcaaatacaattctggaggctaaggtaggaggatctattgaactcagraggttgaggctgcaatgagctatggtcatgccactacactccagcgtgggtgagagcaagacccatctcaaaaataaataaagtaaaacaagctttgggg

SEQ ID NO: 186454 - DNA, 201 bp, Homo sapiens
tttcttttgctgtgcagaagctctttagtttaattagatcccatttgtcaatttttgcttttgctgcaatttttgatgttttcctcataaaatctttgacygtgcctatgtcctgaatggtattgcctagattttcttctagagtttttatagtttttggttttatatttaagtctttagtccgtatcgagttattttttg

SEQ ID NO: 186455 - DNA, 201 bp, Homo sapiens
acagggagagaattttcaaaatattaagtttccccatagaattttctgaagaactttggtatatgttgccccttgttcactaacaagttctagcagatgasagaacaaatgaggaagtagctaattaatattaatgaacaacctcagaatttttctgagtgttgaatagacttgaatattcaacagtctcaaatatttgac

SEQ ID NO: 186456 - DNA, 201 bp, Homo sapiens; identical to SEQ ID NO: 32476

SEQ ID NO: 186457 - DNA, 201 bp, Homo sapiens
atgttcatcatgatttagtatcatgacattcagcgaacatttattgagtgcctactgtgcactagggactagtaagcatgttaagtttgtaagctttgttratttccaccacaaacccataggacctcaggttattctcataattgaggaaactgagattcccagtgttgaatgaaagccacacagtatcacatggccaat

SEQ ID NO: 186458 - DNA, 201 bp, Homo sapiens
tcaagaccagccttgaccacatagcaagaccctgtctccacaaaaaaatttaaaattacccgagtgtggtagtgtgtgactactcaggaagctgaggtcgkggggattgcttgagcccaggaggttgaggctgcagtgagttgtgatcgtgccactgcactccagcctgggcaacaaagcgagaccctgtctgaaaaaaaa

SEQ ID NO: 186459 - DNA, 201 bp, Homo sapiens
gttcaagaccagccttgaccacatagcaagaccctgtctccacaaaaaaatttaaaattacccgagtgtggtagtgtgtgactactcaggaagctgaggtyggggggattgcttgagcccaggaggttgaggctgcagtgagttgtgatcgtgccactgcactccagcctgggcaacaaagcgagaccctgtctgaaaaaa

SEQ ID NO: 186460 - DNA, 201 bp, Homo sapiens
caggcacagtggctcacaccagtaatgcctgcactttgggaggccaaagggggcagatcatttgagctcaggatttcgagaccagcctggccaacatggtraaaccccatctctacaaaaattagccaggcatggtggcgtgtacctgtggtcccagctacttaggaggctgaggtgggaggatcacctgagccctgggat

SEQ ID NO: 186461 - DNA, 201 bp, Homo sapiens
tcttagataatgctgatgttctgagtcagtaccaactgaattctatccaaaagaaccacgttcatattgcaaacccagattttatatggaaatctatcagrgaaaagagactcttggatgtaaagaattatgatccttataagcccctggacatcacaccacctcctgatcagaaggcgagcagttctggtaggtatttca

SEQ ID NO: 186462 - DNA, 201 bp, Homo sapiens
gtctcgaacttgtgagctcaagcaatctgcccaccttggcctcccaaagtgttgggattacaggcatgagccaccatgctcagcctggagatttttttttwaaataaaatacacattattaaacaactagccaatattcatggatagatagagcagcagcgtctcactgccccaccatcacctctaaaatgccagagtttt

SEQ ID NO: 186463 - DNA, 201 bp, Homo sapiens
agatgtatatcatgagcctgtacaaagggatttttggtggtgtaatatcaaccataaaagctagaaacgattcttaaaccaacacacatattgcaagctasgatattattcaatttttgcaatgttctattgataacatgattgcaatatctttcttaagataatgcccaattttcccacagtttgcttgtataataattc

SEQ ID NO: 186464 - DNA, 201 bp, Homo sapiens
tgaccaggctatgttctccgagttgccactctgtctccgtcaaatggcagcaactcaatccagatgtgcccgaggccctgcaggccccagcccaggtgccrtccttgtttctcaatgatcgactccttgtctatggattcattcctcactgcacacaggtaagaagacgcagagtttgttattctatgggaagaccaatat

SEQ ID NO: 186465 - DNA, 201 bp, Homo sapiens; identical to SEQ ID NO: 32487

SEQ ID NO: 186466 - DNA, 201 bp, Homo sapiens
cagccctggtgacgagaaaccgggtgcggtggggggcgcccaccggagccgacagtcacaccaagtctccgcaccccgtgcggtgcggttcgcagtagcaygcgttgtttcttgtttccagtatgccaaacggccttctttcctaaagttaggtttcgaattgtgcaaaaagtaaggtggtttggtgagtaatcaggaagt

SEQ ID NO: 186467 - DNA, 201 bp, Homo sapiens
ttgattcttaatagagttatgtaagctatgcaagggtttgctccatgacaggtaagtgcagactgctaatatggtgttactccattactcaccttgttgtygcggtgtttgttttgcagcgcacagactgcaaagctgtcattagcaccatggaaggcagctccttagacagcagtggattttctctccacatcggtttgt

SEQ ID NO: 186468 - DNA, 201 bp, Homo sapiens
cgcagccctggtgacgagaaaccgggtgcggtggggggcgcccaccggagccgacagtcacaccaagtctccgcaccccgtgcggtgcggttcgcagtagmacgcgttgtttcttgtttccagtatgccaaacggccttctttcctaaagttaggtttcgaattgtgcaaaaagtaaggtggtttggtgagtaatcaggaa

SEQ ID NO: 186469 - DNA, 201 bp, Homo sapiens
attcttaatagagttatgtaagctatgcaagggtttgctccatgacaggtaagtgcagactgctaatatggtgttactccattactcaccttgttgtcgcrgtgtttgttttgcagcgcacagactgcaaagctgtcattagcaccatggaaggcagctccttagacagcagtggattttctctccacatcggtttgtctg

SEQ ID NO: 186470 - DNA, 201 bp, Homo sapiens
tgattctgaaatattttgatcccaactgaaagagacttctctttagttggccttttctggttcaagttcttatcagataagtatatttcgatgatcacttyatttaagtttccattcaccttagactcagtttttagtttttgcctgggttttagtaaacattgatgttgttttcttcattaaagcctgaagtcactcttc

SEQ ID NO: 186471 - DNA, 201 bp, Homo sapiens
gtcctttcctgatatcctcacacttcctcctggatgatggcatggaggtaatgctgtttatattgattcctatgtgtttactgacctctgttcataactcrtttcaatgaatcagccgacctcccaacctttttcttcttacctgttgtcttagctcaggctgctattaataaatgcaacaggctagggagcttaaacaac

SEQ ID NO: 186472 - DNA, 201 bp, Homo sapiens
ccacaaacccataggacctcaggttattctcataattgaggaaactgagattcccagtgttgaatgaaagccacacagtatcacatggccaatatcatgtkattgcagagtcaggactcaaacccagctcttaaccaccacgctatactgacggccctttcccagttcacagggaaaattcaggaacagggagagaatttt

SEQ ID NO: 186473 - DNA, 201 bp, Homo sapiens
gcaggtgacagcttgcccatagtctcctgtggcgggcagggctgatgtatttgtgccttgggctgcacaggaaatgggctcaaagagtttcagtgcagctyccgctggaggctggcgcttctgggctctggatgtggtactcttcactgcagtctgctgatcctgggtgcctccagaagacccacaatgtgactgttgggc

SEQ ID NO: 186474 - DNA, 201 bp, Homo sapiens
ttatttaataaaccttagaaacagctatagggaattatcttacatgtgtacactataagtatgtagcaagagaatttgtttgcaggtgacagcttgcccayagtctcctgtggcgggcagggctgatgtatttgtgccttgggctgcacaggaaatgggctcaaagagtttcagtgcagctcccgctggaggctggcgctt

SEQ ID NO: 186475 - DNA, 201 bp, Homo sapiens
gttttctccttttcaaaacatctagactgactgacttgtcactataaccctatactacttagatagcatactgttgaattttgctgctttatccaatctgkgagtttctgcactttgtattgtttaggtcatttttatttaatacaattactgatctggtcagatttatatctaccatcttgctagttgttttctatttgt

SEQ ID NO: 186476 - DNA, 201 bp, Homo sapiens
gcatgtatctttataatggaatgatttatattcctttgggtatatacccagtaatgggattggtgggtcaaatggtatttctggttctaggtctttgaggragacccacactgtcttccacaatggttgaactaatttacactcccaccaacagagtaaaagcattcctatttctccacagccttgccagaatctgttgtt

SEQ ID NO: 186477 - DNA, 201 bp, Homo sapiens
tatgtggccagtggctatcttattacttagtgcatatgtagagcatttttatcatcatagaaagttacattggtcagcactgctttagggtttactactayatacatctgtaacttaccacatacagcctacaatattatactacttcatatgtaagaaccttacaaccagaatacattacattacaaccagtatacgttc

SEQ ID NO: 186478 - DNA, 201 bp, Homo sapiens
aaaagtaccatttaaaaaaatctcggccgggtatggtggctcacgcctgtaatcccagcattttgggaggccgaggcgggtggatcatgaggtcaggaaaktgagaccattctggctgacacggtgaaaccccgtctctactaaaataaaaattaaaaaatctctacccatgagcctctttccacactttttataagtgcc

SEQ ID NO: 186479 - DNA, 201 bp, Homo sapiens
tgtatgctgtaattaaacagcatcttccctttgaaaattccttttgtttttctttaagaaaagattttcttacaaagctttttggacattgctgattttamgttaaattattttctcttctgttatttttctttaggcttatcaggagggcagacttcaaaagctactaaaaatgaacggccctgaagatcttcccaagtc

SEQ ID NO: 186480 - DNA, 201 bp, Homo sapiens
attaaacctgatttagacctaagttggtttacttatgtagaggtactatacgaacacttcaaagtagttagcagtgaccgtctttggggttaataaactargataaagcaagcagttcacaactttaaggaaggttgaatatttccatctgtatgctgtaattaaacagcatcttccctttgaaaattccttttgtttttc

SEQ ID NO: 186481 - DNA, 201 bp, Homo sapiens
aatgtccagtacggtggagttgagtggggaaaggagtcaaggttggagacagaacagggagagaggggcaggtggttgggatcttgttgcactggcaccaytgggagccactggagggctctgagcagaggaggggtgtgcttctaacttacaggttctcaggagcactctggggctgggctgagggcagcctgagggtga

SEQ ID NO: 186482 - DNA, 201 bp, Homo sapiens
gcaatggtgtaattatagctcacagcagcttcaaactcctgggctcaggtaatcctcctgcttgagcctcctgagtagctatgaccacaggtgagtggtaycatgcctggctaacttttttatttttatttttatagaaatgaagtcttcttatgatggccaggctggtctcaaactcctggcatcaagccatcctccctc

SEQ ID NO: 186483 - DNA, 201 bp, Homo sapiens
gctggagtgcaatggcgagatctcagctcactgcatcctctgcctcccgggttcaaccgattcttctgcctcagcctcctgagtagctgggattataggcrcacgctaccacgcctggctaatttttgtatttttagtagagatggggttgcaccatgttggtcaggctggtcttgaactcctgacctcgtgatccacctg

SEQ ID NO: 186484 - DNA, 201 bp, Homo sapiens
ggcgtagaaaatgcagtgtcatgatgtgtaatcataaaagtagatgggtacacaccacttcaggagaatggcagagggagttaacatcttggcacttagcrtttagtatttcttctgtaacacacattccattctattttaatgagcttgcaaacatttttcctgctggatttttgaggatcaggaatgtgttttgttcac

SEQ ID NO: 186485 - DNA, 201 bp, Homo sapiens
gatttttttttttggatatgaattatccatattttctaatgcatttgtattttaaaactttttaagatactggccattagtatttggtctggatttttttsagaagtaaaggctttgtcaccctctgaggctaaaacagactaaagacttttctcagtattgttcctcccttacacaaaactgttttcccccttattcaca

SEQ ID NO: 186486 - DNA, 201 bp, Homo sapiens
gcgagactctatctaaaataaaaataaaaaataaaaaaaattaaatttttttctgttcctaaagcaacattcagaagtgaaactactggtttgtatacagtttttttttttacatttgctatctttgggattgtttgatttattaagtacctactcagtagttgaaaacactgtcagatatattacataattttcattcac

SEQ ID NO: 186487 - DNA, 201 bp, Homo sapiens
aaaattagctgggcatggtggcgcatgcctgtaatcccagctactcaggaggctgaggcaggagaattgcttgaacggggaactgggaggcagaggttgcmgtgagccaagattgtgccactctactcctgccatggctacagagcgagactccatctaaaaaaaaaaattaaaaaaaaaaaaaagaaaattgacatcttg

SEQ ID NO: 186488 - DNA, 201 bp, Homo sapiens
gttgtccctcggtatcttcaggggattggttccaggacccttgtgtatacccaaattcatacatactcaagtcccaaagtccaccctgtggaaccagcatwtatggaaagtcagctctctgtattcaccggatgtgaaacatcacatctcacaaatacagtatttatttctttatttctcacaagctttttcctctttaag

SEQ ID NO: 186489 - DNA, 201 bp, Homo sapiens
agaaatccctgtaaatggtattagtaatactttataagcaggttgggagaatatagttttctaaggcattttgaaattcttagatgaaagggtctttatgyagcaaattggtgtcagcctattttccttcctctgagccagaagaaaataggcaccatagggtgggaagggttggcttatctgttagagttcttttgtaag

SEQ ID NO: 186490 - DNA, 201 bp, Homo sapiens
ttttttggatttgggtcttggaattcttaactgtattttcacctaagatttaaaacaagttcaaatactagtttgtaattggccagacttgggacagataygatccttgaatgatcctgggtctcaacttacctttctttcatttttcctttattttagaagagggataagaactttttctgaagagcagtcaacttttcc

SEQ ID NO: 186491 - DNA, 201 bp, Homo sapiens
ggcatgatcttggctcactgtgagctccgcctcccgggttcacgccattctcctgcctcagcctctcgagtagctgggactacaggcgcctgccaccacgyccagctaattttttatatttgtagtagagacggggtttcaccgtgttagccaggatggtctcgatctccagacctcatgatccacccgccttggcctctc

SEQ ID NO: 186492 - DNA, 201 bp, Homo sapiens
agcttgaaccaggagaagccaggttacatacagaatttcagtaaggaacggattgtaaacattggtgaagggaatatgtgacttttcagcatgaggatacrttttctggtatttgttctagtaggtatgttggaggagggggattcctagaaccatggttttcatttagacagccagttattgtgttctgtcaccatcttt

SEQ ID NO: 186493 - DNA, 201 bp, Homo sapiens
ttgcattaagggctgtagactatcagtaaacctgctttttcagctacttggcaacttgcttggaaatggccactttcttttttcaggttattgctgaatctgttattgtttgagtggaattatgtgagagaagtctaaggtttccagctgattctaacaattttactactctattctgcataattttaaaatctactctca

SEQ ID NO: 186494 - DNA, 201 bp, Homo sapiens
tgcattaagggctgtagactatcagtaaacctgctttttcagctacttggcaacttgcttggaaatggccactttcttttttcaggttattgctgaatctgttattgtttgagtggaattatgtgagagaagtctaaggtttccagctgattctaacaattttactactctattctgcataattttaaaatctactctcag

SEQ ID NO: 186495 - DNA, 201 bp, Homo sapiens
tttttagggagcaagggaagtcatgcatcctttaaaaaaccaagtgaatgctgtaggccacctccttaaaaaaatgcacatatacaccaaaatttttttctttttttttttttttttttttgagatggagtctcgctctgtcgcccgggctggagtgcagcggcgctatctcggctcactgcaacctccacctcctgggta

SEQ ID NO: 186496 - DNA, 201 bp, Homo sapiens
tacatttttgatggatataatcactggagttatcctttgtcaagtatttacatagttgttatggtaacaacagatactgcatttggactatggtatttctktaatataaaattagagttcttttgaatatattgtcatgtagtatttgtgagaaatcatacaatgtttataatttgtaaggaagtactaattgcatttgct

SEQ ID NO: 186497 - DNA, 201 bp, Homo sapiens; identical to SEQ ID NO: 32510

SEQ ID NO: 186498 - DNA, 201 bp, Homo sapiens; identical to SEQ ID NO: 32522

SEQ ID NO: 186499 - DNA, 201 bp, Homo sapiens
attctctctcctgccaccatgtgaagaggtgccttctgccatgactaaaagtttcctgaggcctccccagccatgcagaactatgaatcaattaaacctctttttttttttttttttataaattacctagtctcagatatgtccttatagcagcgtgagaatggactaatacacctggattcctccatcccttcataagac

SEQ ID NO: 186500 - DNA, 201 bp, Homo sapiens
cccaatatggcaagaaggtgatggtcctggactttgtcactcccacccctcttggaactagatggggtaagcttttaagatactctagaagtgatgttgcygaagtagttttcccctggcaataatctaactggttcctaaagcctaatttaaaaaatcaaaaactaagttaaagaaaaaacagccccaaaacatatatat

SEQ ID NO: 186501 - DNA, 201 bp, Homo sapiens
aggtgtaggggcattagaagtttgaggaaagagggatacgtgtgaaatggtcattttggatcctgagaaaacaaatattccagggatgcaaaggattgctkggcaaccttgaggatacatttgaagtttgtggtcttaactttaaagtgaaatcacttttaatttctgtgtttccttcagcaatgtttcctgctttaagtg

SEQ ID NO: 186502 - DNA, 201 bp, Homo sapiens
cttggaactagatggggtaagcttttaagatactctagaagtgatgttgccgaagtagttttcccctggcaataatctaactggttcctaaagcctaattwaaaaaatcaaaaactaagttaaagaaaaaacagccccaaaacatatatatcttttatttgagccaagttaaaatggatcaggttaaatgctaaaaattta

SEQ ID NO: 186503 - DNA, 201 bp, Homo sapiens
atctcagctcactgcatcctctgcctcccgggttcaaccgattcttctgcctcagcctcctgagtagctgggattataggcgcacgctaccacgcctggcyaatttttgtatttttagtagagatggggttgcaccatgttggtcaggctggtcttgaactcctgacctcgtgatccacctgcctcggcctctcaaagtgc

SEQ ID NO: 186504 - DNA, 201 bp, Homo sapiens
tttacaattctgaggaatgattacttaataaggttttcatattggttcctttgtaggcaacaaataataaaggcaaagaaaaaatttattcagcagagagwtttctcattgccactggtgaaagaccacgttacttgggcatccctggtgacaaagaatactgcatcagcaggtaaaggaaaaaagcagggtggaaaagaa

SEQ ID NO: 186505 - DNA, 201 bp, Homo sapiens
ctcactgcaacctctgcctcccaggatcaagtgattctcctgcctcagcctcccgagtagctgggattacaggtgccagccactacgcctggctaattttygtatttttagtagagatggggtttcaccattttggccaggctggtcttgaactcctgacctcaggtgatctgcctgcctcggcctcccaaagtgctggga

SEQ ID NO: 186506 - DNA, 201 bp, Homo sapiens
cacctcagcctcccaaaagttctgggattacaggtgtgagccaccgtgcctggccaaaaagcaactaattttttaaagaataaacattttaaagtcagggaaaaaaaaaaaaaaaaaaagaagccttccaaaatttaactcaggtatttgacctctcatggaggaatgttatgctgcttctgagccaaactctaactgcag

SEQ ID NO: 186507 - DNA, 201 bp, Homo sapiens; identical to SEQ ID NO: 32505

SEQ ID NO: 186508 - DNA, 201 bp, Homo sapiens
acctcagcctcccaaaagttctgggattacaggtgtgagccaccgtgcctggccaaaaagcaactaattttttaaagaataaacattttaaagtcagggaaaaaaaaaaaaaaaaaaagaagccttccaaaatttaactcaggtatttgacctctcatggaggaatgttatgctgcttctgagccaaactctaactgcagc

SEQ ID NO: 186509 - DNA, 201 bp, Homo sapiens
ggccaaggcgggtggatcatgaggtcaggagttcgagaccagcctggccaagatggtgaaaccccgtctgtactaaaaacacaacaattagccaggcatgrtggcgcacgcctgtagtcccagctacttgggaggctgaggcaggagaatcgcttgaacctgggaggtggaggttgcagtgagctgaggttgtgccattgc

SEQ ID NO: 186510 - DNA, 201 bp, Homo sapiens
ctactcaggaggctgaggcaggagaatcacttgaacctgggaggcagaggttgcggtgagccgagatcacaccattgcactccagcctgggcaacaagagygaaactccatctcaaaaaaaaaaaaaaaaaaaaaaaaaaaaaagaatactgagttaaaaggtatggccatctcaggaggttgcagtgagccgagatccga

SEQ ID NO: 186511 - DNA, 201 bp, Homo sapiens
aaatgtcactgaagtttagctctaggcctacacaatggagtcttaggtaaatataactggccatctgtccaggttcactgagaggttaatttattatttttatatatatatatatatatatatatatattttttttttttttttttttttttttttttgagacggagtctcgctctgttgccaaggctggagtgcagtggc

SEQ ID NO: 186512 - DNA, 201 bp, Homo sapiens
atgtcactgaagtttagctctaggcctacacaatggagtcttaggtaaatataactggccatctgtccaggttcactgagaggttaatttattatttttatatatatatatatatatatatatatattttttttttttttttttttttttttttttgagacggagtctcgctctgttgccaaggctggagtgcagtggcgc

SEQ ID NO: 186513 - DNA, 201 bp, Homo sapiens
ccaccgcgcccggctaattttttgtagttttagtagagacggggtttcaccgggttagccaagatggtctcgatctcctgacctcgtgatccgcccgcctyggcctcccaaagtgctgggattgcaggcgtgagccaccgcgcccggccattcccattgttatgtatactttgctatttgctgctggtgagacagataagg

SEQ ID NO: 186514 - DNA, 201 bp, Homo sapiens
tgtcactgaagtttagctctaggcctacacaatggagtcttaggtaaatataactggccatctgtccaggttcactgagaggttaatttattatttttatatatatatatatatatatatatatattttttttttttttttttttttttttttttgagacggagtctcgctctgttgccaaggctggagtgcagtggcgcg

SEQ ID NO: 186515 - DNA, 201 bp, Homo sapiens
gggcttggtttttaagaggacatgtgaaagtaattaacccgatttacatttgtataatgagtccaaacaccaccttgcaaaagaactgagagtttagcctkcttaatggagtttctgcttttcacggtccttggccttaccgacggtttacagtccagccagatttagttcacaaaaaaccaaaaccaggtcgacctcact

SEQ ID NO: 186516 - DNA, 201 bp, Homo sapiens
ctacacaatggagtcttaggtaaatataactggccatctgtccaggttcactgagaggttaatttattatttttatatatatatatatatatatatatatattttttttttttttttttttttttttttttgagacggagtctcgctctgttgccaaggctggagtgcagtggcgcgatctcggctcactgcaagctccgt

SEQ ID NO: 186517 - DNA, 201 bp, Homo sapiens
agaatatattttatgtttcttttattgtaagagatggttttgcaagaataaggcttgatgaagacaggctgccaatattagagccgatgaatgttaaccaratgggtgagggaaatgattccagttgccatggcaggaaacagggagttatatctttgactttacaggagtggaaaaacattgtggcagcttttgaaattt

SEQ ID NO: 186518 - DNA, 201 bp, Homo sapiens
cactcttgcccaggctggggtgcagtggtgcaatctcggcccactgcaacctctgcctgcggggttcaggcgattcttgtgcctcagcctcccaagtagcygggattacaggtgtgtgccatcacacccagcaaatacttgtatttttagtaggaacagagtttcgccatggtagccaggctggtctcgaacacctggccc

SEQ ID NO: 186519 - DNA, 201 bp, Homo sapiens
ttggtgctgagtgatccagtaaaccaagactaacccccaccctctcctacctcaaacacacagtgtctagttacagtggtagcctacatggatttctggcrtaatttctcttatcatgaaccattccataaaccagtcctctgcagaaaagagagttcctttcaaatgtgtattctcaggctcacgcagccactgaatcct

SEQ ID NO: 186520 - DNA, 201 bp, Homo sapiens
aaaaaattttttaaaataaaaatacgttaacatttaataaatatattatttttaatttgttaatgaatattttaagtttcttcttagttttaatttctaayatagtaaatagataaaacccacattaacaagctctttggagtctcaattttaaagctctgtttaagattgtaaaggagtcctgagatgaaagagtttgag

SEQ ID NO: 186521 - DNA, 201 bp, Homo sapiens
accatgttagccaggatggtctcgatctcctgacctcatgatccacctgcctcagcctcccaaagtgctgggattacaggtgtgagccaccgtgcctggcrgaattgttaattttagaaagtagattgcattatttagtagaagaataaaatgagatctggcatagcttcctggctaatttatgacatatgtcactctgtt

SEQ ID NO: 186522 - DNA, 201 bp, Homo sapiens
gcggtgtttgtgtccctgattacttgagattagggagtggtgatgactcttaacgagcatgctgccttcaagcatctgtttaacaaagcacatcttgcacygcccttaatccatttaaccctgagtggacacagcacatgtttcagagagcacagggttgggggtaaggtcacagatcaacaggatcccaaggcagaggaa

SEQ ID NO: 186523 - DNA, 201 bp, Homo sapiens; identical to SEQ ID NO: 32506

SEQ ID NO: 186524 - DNA, 201 bp, Homo sapiens
gaatcctgctggaagaagttggtgagcctaggtgactcccttgataaaggatgaaagctttgcagaagagtgttccaaaaaagtgtagtctccagaccacstgctcagaatcccctggagtactcgttaattatgcatgcccaggctttacccgagttcttttgaagtagactcgggaaagagctaggaatctacccccgc

SEQ ID NO: 186525 - DNA, 201 bp, Homo sapiens
ctttaatattattgtacatagggtagtttgatcaagatcatttgatgagataattagaattgcggaaaacaaaggactagtctttaatacccaaaacatayttgttagaaaacagcaaataggaacccaatgggggaggaacactttttgttgaacactttaacaatgaatagaaaaatagggaaccaagctgtttgcagc

SEQ ID NO: 186526 - DNA, 201 bp, Homo sapiens
cagggcaatattaggagagatgacaggcacaaagcaatgcgggattaatatccaggtgaattttgcagacagttgcggtggccccatgttccagtcttggrgggtagatgctgagacaaaggcaggtctccttttatgttttgagacaaggtctggctctattgcccagtgcagtggcttgatattggctcattgcaacct

SEQ ID NO: 186527 - DNA, 201 bp, Homo sapiens
agtaaacttattctactttgtgtctttttttttttttttttttttgagacaaagtctcgctctgttgctcaggctggagtgcagtggcatgatcttggctyaccgcaacctctacctcccaggttcaagcgattttcctgcctcagcctcccgagtagctgggattacaggcacacgccaccacaccctgctaatttttgt

SEQ ID NO: 186528 - DNA, 201 bp, Homo sapiens
ccctctaccgcatgcgaatctttgcgcctaatcatgtcgtcgccaagtcccgcttctggtactttgtatctcagttaaagaagatgaagaagtcttcaggrgagattgtctactgtgggcaggtgtttgagaagtcccccctgcgggtgaagaacttcgggatctggctgcgctatgactcccggagcggcacccacaaca

SEQ ID NO: 186529 - DNA, 201 bp, Homo sapiens
cctgagtagttatccagaagcgacagaaaaaaacgtagaaaggattttgggattgttgcaaacctactttcgaaagtatcctgatactcctgtgtcctatwttgagtttgtgattgatccaaactctttttctcgtactgtggagaatatattttatgtttcttttattgtaagagatggttttgcaagaataaggcttga

SEQ ID NO: 186530 - DNA, 201 bp, Homo sapiens
taccatgttagccaggatggtctcgatctcctgacctcatgatccacctgcctcagcctcccaaagtgctgggattacaggtgtgagccaccgtgcctggyggaattgttaattttagaaagtagattgcattatttagtagaagaataaaatgagatctggcatagcttcctggctaatttatgacatatgtcactctgt

SEQ ID NO: 186531 - DNA, 201 bp, Homo sapiens
tgtttccagccatactgagagatttatcataaaccccattatacagatgaagaaactgagaagcaaagaggttataaaacttacccaaagcacacaactastaagtggaagagctgggataccagttgaggccatctgactcaaaagccctggtcatagtcatatggccgcctccaccttttttataggcttgagaaagtg

SEQ ID NO: 186532 - DNA, 201 bp, Homo sapiens
aatgggcttatgggctttttggactctctctctctgtttctctctctcgttctgcatgtgtgtgtgtctgtgcacacgtgcacttttttcccaagtaaagraaaaggaaggtgggcggcaaaaacactgaggtacggagaccctttcatccttgtgtctctcctgaacacattctgcatcgatgccaccttaggcttcatc

SEQ ID NO: 186533 - DNA, 201 bp, Homo sapiens
tacctgtggtgccacagtttccccatctgtaaaatgtggatgataatagtatctatatcgtaagtttgttatgaggattaaattaattaatatttataaargccatagaacatacctgagacatagtaaacactatatcagtgtttgttaaataaaagaactacttgcatttttccttttcctatcaggacttaaaacctt

SEQ ID NO: 186534 - DNA, 201 bp, Homo sapiens
gagtttctccatgttggtcaggctggtcttgaactcctgacctcaggtgatccatccacctcggcctcccaaagttctgggattacaggcgtgagccaccrtgcccgtcccccttgttctttcttaaatgtcctctttactttctctatcatttttcagactattcttatcttttttaaatgtgtgttgccagtggggagg

SEQ ID NO: 186535 - DNA, 201 bp, Homo sapiens
gcaattgatgatgccagagagggaggctaacttcaagagtgatgttcattaatattaagaaggaaataaaagatgagaatccatacacaagtgaagttggmcttcactattctccacataacagcaattctttgaatgtacaacaatcatttccttctcttctcttcacactgtcttttttgtttttgtttttgttttttt

SEQ ID NO: 186536 - DNA, 201 bp, Homo sapiens
ccatgttggtcaggctggtcttgaactcctgacctcaggtgatccatccacctcggcctcccaaagttctgggattacaggcgtgagccaccatgcccgtyccccttgttctttcttaaatgtcctctttactttctctatcatttttcagactattcttatcttttttaaatgtgtgttgccagtggggaggtgcggtga

SEQ ID NO: 186537 - DNA, 201 bp, Homo sapiens
aaaaaaaaagaccaagtttgacaccccgttctaaggcaagtaggaagcatgaatattaacacagttttgattttgtgagatttatttgtcccaagcatagraggaacaccgttctacatgtgcagttggccttagccacacaggagaggtgtgatctggttcatgtcttcgaggagcttgtaatcatggagctggaactgc

SEQ ID NO: 186538 - DNA, 201 bp, Homo sapiens
aaaaaagaccaagtttgacaccccgttctaaggcaagtaggaagcatgaatattaacacagttttgattttgtgagatttatttgtcccaagcataggagraacaccgttctacatgtgcagttggccttagccacacaggagaggtgtgatctggttcatgtcttcgaggagcttgtaatcatggagctggaactgctga

SEQ ID NO: 186539 - DNA, 201 bp, Homo sapiens
acctctgcctcctgggttcaagtgattcttctgcctcagcctcccaagtagctgagactacaagcacgcaccaccatgcctggcaaatttttgtattattrgtggagaaggggtttcaccatattggccaggctggtcttgaactcctgacctcatgatccacccacctcagcctcccaaaagttctgggattacaggtgt

SEQ ID NO: 186540 - DNA, 201 bp, Homo sapiens
tgcagtcagtccttgctactgtgtccgatccccattggttggggttggaccgcacaatctaagctgatcctgatttgctacttgaaatggagcaggggtgkgggctacaaaagtaagggtgccaaataaggaacagatgtgggttgttacagattgggaacggatgtgcgttacagattgggaatggctggaaggttgttt

SEQ ID NO: 186541 - DNA, 201 bp, Homo sapiens
cctgatttgctacttgaaatggagcaggggtgggggctacaaaagtaagggtgccaaataaggaacagatgtgggttgttacagattgggaacggatgtgsgttacagattgggaatggctggaaggttgtttaccgtacctaggggcaaggaggcaaggaagttaggctttgaaaatagaggacaagcagaacctttaaa

SEQ ID NO: 186542 - DNA, 201 bp, Homo sapiens
gcaggacatggacatcgtaagggaccactttataaatcatttttccagattaaaatatacattccttatattaaagtatagggcccagtattttggaacaygtttccgttcactttaagtttaattgatttttcagagataataagggtgttgtgcctggtgtggtgactcacgcctgtaatcccagcactttgggagtcc

SEQ ID NO: 186543 - DNA, 201 bp, Homo sapiens
actgtctctgtctagtttgagtatcaggatgctactgacctcataaaataagtttgaaaatggcccctccccttgtattttctggacaagattgtatagatggtagggtatcttttattaagttttattttcctccagatatcctgtttgtaggtgtgtgtgagaaacagaaaatgttactgaatcagagagagtctaagt

SEQ ID NO: 186544 - DNA, 201 bp, Homo sapiens
cagtggctcctgcctgtaattccagtgttttgggaggctgaggcaggcagatcatgaggtcaagagatcaatactagcctggccaacatggtgaaaccccrtctctactaaaaatacaaaaattagctgggcgtggtggcatgcgcctgtagtcccaactacttgggaggctgaggcaggagaatcgcttgaacccgggag

SEQ ID NO: 186545 - DNA, 201 bp, Homo sapiens
gtgtaaccacatgtcttatttctcagctttttgtgagagatctcaactgggaagattgattgaggtagtttcttttaagccctgttgttggtcacattgamtgaacattttagtgaactaggattactccacttactggatattcttaatactaaggtaacaatatgaaaaaagaacgtattttctgtatatatgtataaa

SEQ ID NO: 186546 - DNA, 201 bp, Homo sapiens
aggacatggacatcgtaagggaccactttataaatcatttttccagattaaaatatacattccttatattaaagtatagggcccagtattttggaacacgwttccgttcactttaagtttaattgatttttcagagataataagggtgttgtgcctggtgtggtgactcacgcctgtaatcccagcactttgggagtccga

SEQ ID NO: 186547 - DNA, 201 bp, Homo sapiens
acttatacagtttaaaatgtttaaaatgtgccacatagaagcacaccacccagcttatacatggcagatgtaggaccctgagtttgatgatgattcctcaraagagggctttgtctctaaaaattagtttttgtctttcaatactgattgctcatggtatgaactggaggcttccgtcatgtcgttaagtggtaaaaatta

SEQ ID NO: 186548 - DNA, 201 bp, Homo sapiens
gataataagggtgttgtgcctggtgtggtgactcacgcctgtaatcccagcactttgggagtccgaggtgggcggatcacctgaggtcaggagttcaagascagcctggccaatgtggtgaaactccatctctactaaaaatacaaaaattagccaggcgtggtggtgggcacctgtaatcccagttacttgggaggctga

SEQ ID NO: 186549 - DNA, 201 bp, Homo sapiens
tggtcctggactttgtcactcccacccctcttggaactagatggggtaagcttttaagatactctagaagtgatgttgccgaagtagttttcccctggcartaatctaactggttcctaaagcctaatttaaaaaatcaaaaactaagttaaagaaaaaacagccccaaaacatatatatcttttatttgagccaagttaa

SEQ ID NO: 186550 - DNA, 201 bp, Homo sapiens
ttaaaatatatagaagacttaaaaaatagtacaaagcattttcatatacccgttatccagattcatatattactaacattgtgccaatttattttatacayttttagtagtctctcattctgtgtgtgtgtgtgtgtgtttctgtgaatcatttgagagtaagttgaattctcctttacccctaaatactttattgtgtat

SEQ ID NO: 186551 - DNA, 201 bp, Homo sapiens
taaagtattataataaaagtaatagccactgtgacccagactatccagtttggtgattttgctatcatatcatcctatggggccttgtgtggaggtatggyaaagtgtaagtatgctggaccagaccgcctggttttgaggcttggctccagcacttactaacattgtgactttgagtaagtctgttaactactcagtctt

SEQ ID NO: 186552 - DNA, 201 bp, Homo sapiens
agtgctttttagtagtcctcccacagatatactttattcataccataaacccccaactgtccaggtgaataagagtacaatatgcaatatattacagtcctttttttttttttttttgagacggagtcttgctctgttgcccaggctggagtgcagtggcgtgatcttggttcactgcaaccttcgcctcccaggttcaag

SEQ ID NO: 186553 - DNA, 201 bp, Homo sapiens
cctcgttctttaagatcattttacttgtttgcctctgcctcacttccaatttcagtgtaatctggtatctctaaaggctgtaggatcacgggtggacaaargtagtgggtaagacatttaaagctgtaaacaaaagcaacttagaaaacatcatggcatgttcatttagagcaaaactggcaaggcctggggcagagaacg

SEQ ID NO: 186554 - DNA, 201 bp, Homo sapiens
gcctaataacttcctttagggaactgccaaactgactaatccatgaccttaaggcagtgggtcccaaactttgctgccaactcaatcacctttggagtttyttttttttttttaaacgcagaggcccaggtcacactccacaccaatgacatcagaatgtctaggggtgggagccaggcaccaggattctaaagaccctca

SEQ ID NO: 186555 - DNA, 201 bp, Homo sapiens
cagggctgcacgaggagtggatttctgctttgtcattctgactctggcagttagcccgcccgctcggcgcagggcgtggcttctcgtagccattaggaaasagcaaccctttcacctcagttttcttcactccggcatttgcagcagagcgaaaggtggtcgagtcctgaaggagggcctgatgtcttcatcattctcaaa

SEQ ID NO: 186556 - DNA, 201 bp, Homo sapiens
tactatgccaagtcacacctgggatttgttaccattatcacaaatgttttcatatatgagtgacaaaattgaacacttagtgtgtgtctcagactaatagrtaattttctctagtgcagggaaaatggtgggactattttgttaaagttaaggaattatagttgtcttttttttttttttcatctctcagtgggttgactt

SEQ ID NO: 186557 - DNA, 201 bp, Homo sapiens
cccaggctggagtgcagtggcatggtctcggctcactgcaacctctgcctcacaggttcaagtgattctcctgcctcagcctcccaagtagctgggactaygggctcacgccaacatgcctggctaatttttgtatttttcagtagagatggggtttcaccatgttggccaggctggtgtcaaacttctgacctggtgatc

SEQ ID NO: 186558 - DNA, 201 bp, Homo sapiens
aatcgcttgaacccgggaggtggaggttgcagtgagctgagatcacaccactgcactccagcctggtgacagagtgagactccgtcttaaaaaaaaaaaamaaaaaacttccttttgcgggtggcggcgaacgcggagagcacgccatgaaggcctcgggcacgctacgagagtacaaggtagtgggtcgctgcctgccca

SEQ ID NO: 186559 - DNA, 201 bp, Homo sapiens
actccagcctggtgacagagtgagactccgtcttaaaaaaaaaaaaaaaaaaacttccttttgcgggtggcggcgaacgcggagagcacgccatgaaggcytcgggcacgctacgagagtacaaggtagtgggtcgctgcctgcccacccccaaatgccacacgccgcccctctaccgcatgcgaatctttgcgcctaatc

SEQ ID NO: 186560 - DNA, 201 bp, Homo sapiens
cgtcttaaaaaaaaaaaaaaaaaaacttccttttgcgggtggcggcgaacgcggagagcacgccatgaaggcctcgggcacgctacgagagtacaaggtartgggtcgctgcctgcccacccccaaatgccacacgccgcccctctaccgcatgcgaatctttgcgcctaatcatgtcgtcgccaagtcccgcttctggta

SEQ ID NO: 186561 - DNA, 201 bp, Homo sapiens
gtactttgtatctcagttaaagaagatgaagaagtcttcaggggagattgtctactgtgggcaggtgtttgagaagtcccccctgcgggtgaagaacttcrggatctggctgcgctatgactcccggagcggcacccacaacatgtaccgggaataccgggacctgaccaccgcaggcgctgtcacccagtgctaccgaga

SEQ ID NO: 186562 - DNA, 201 bp, Homo sapiens
acctgaccaccgcaggcgctgtcacccagtgctaccgagacatgggtgcccggcaccgcgcccgagcccactccattcagatcatgaaggtggaggagatygcgaccagcaagtgccgccggccggctgtcaagcagttccacgactccaagatcgagttcccgctgccccaccgggtcctgcgccgtcagcacaagccac

SEQ ID NO: 186563 - DNA, 201 bp, Homo sapiens
gaccaccgcaggcgctgtcacccagtgctaccgagacatgggtgcccggcaccgcgcccgagcccactccattcagatcatgaaggtggaggagatcgcgrccagcaagtgccgccggccggctgtcaagcagttccacgactccaagatcgagttcccgctgccccaccgggtcctgcgccgtcagcacaagccacgctt

SEQ ID NO: 186564 - DNA, 201 bp, Homo sapiens
ccgcgcccgagcccactccattcagatcatgaaggtggaggagatcgcgaccagcaagtgccgccggccggctgtcaagcagttccacgactccaagatcragttcccgctgccccaccgggtcctgcgccgtcagcacaagccacgcttcaccaccaagaggcccaacaccttcttctaggtgcagggccctcgtccggg

SEQ ID NO: 186565 - DNA, 201 bp, Homo sapiens
ccgggtgtgccccaaataaactcaggaacgccccggtggaaaaaaaaaaaaaaaaaagtgatctggctggacaaactgagccagtcccacacaaaatcttaaaaaaaaaaaaagaaaagaaataataataggtttttaaaaatcattatttgcctattggagaggtaaaaacagatttctttatcttaatttgtatcactt

SEQ ID NO: 186566 - DNA, 201 bp, Homo sapiens
cgggtgtgccccaaataaactcaggaacgccccggtggaaaaaaaaaaaaaaaaaagtgatctggctggacaaactgagccagtcccacacaaaatcttaaaaaaaaaaaaagaaaagaaataataataggtttttaaaaatcattatttgcctattggagaggtaaaaacagatttctttatcttaatttgtatcacttt

SEQ ID NO: 186567 - DNA, 201 bp, Homo sapiens
gaattttcacaccatttaatcctcagaaatcctgagacgttggcaaaacacatggggtctccatgtttttacaagtagggaaagcaaggctcagaaagatyaagtggcgtgcccagctggacacagactattaaatggggcggcgacgacgaccccagggcttcctcactctctcaggcagtacaggacagtgattaaacg

SEQ ID NO: 186568 - DNA, 201 bp, Homo sapiens
gacgcagcgctgggaaatgacgaaaaacgctcgtgggctagcgcatgtgttaatcgaagttgatgagacgttggacaaatttcacatctcgggaaacttgraatttctaacgctttttatcttttaaaatagctttttaaaaatgtcctttttctcctatttccccttcctctttccctcccagttgtaaataacattttt

SEQ ID NO: 186569 - DNA, 201 bp, Homo sapiens
gtatagcccttgctgcttctgagtcttgatgaattatatgttcataatatttactgaacatttattatgaaccaaggcaatgacgatatagcagtgaactyggcatattcaaagttcatgcccttgtgaagcttatattctaagtggggagacaaaagatacctaagaactttaggagttgtggtaagcggtattgaaaaa

SEQ ID NO: 186570 - DNA, 201 bp, Homo sapiens
gaaaccccgtctgtactaaaaacacaacaattagccaggcatggtggcgcacgcctgtagtcccagctacttgggaggctgaggcaggagaatcgcttgamcctgggaggtggaggttgcagtgagctgaggttgtgccattgcaatccagcatgggcgacaagagtgaaactccgtctaaaaaaaaaaaagctctgtagt

SEQ ID NO: 186571 - DNA, 201 bp, Homo sapiens
cattatgcctggctaatttttgtatttttcattgtgacagggtttcaccatgttggccagggtggtctcgaactcgtgacctcaggcaatctgcccgcctyagcctcccaaagtgctgggattacaggtgtgagccaccacgcctggcccattacagttttatctgcatttttctgactgcctggttctgtgctgttcctg

SEQ ID NO: 186572 - DNA, 201 bp, Homo sapiens
aagtacgatgaaagtgaaagcttgccaggcgcggtggttcacgcctgtaatcttagcactttgggaggccaaggtgggcagatcacgaggtcaggagatcragaccatcctggctaacatggtgaaaccccgtccctactaaaaatacaaaaaattagccgggcgtggtggcaggcgcctgtagtcccagctactcgcgag

SEQ ID NO: 186573 - DNA, 201 bp, Homo sapiens; identical to SEQ ID NO: 32515

SEQ ID NO: 186574 - DNA, 201 bp, Homo sapiens
tagaggtatatatgctatatttgcattagagctatgattcataaacaacagctgtatgtatatgctgtactgatagaaagtaacatcttcctatatacaattttttttttttaatttatttttttattgataattcttgggtgtttctcacagagggggatttggcagggtcatgggacaatagtggagggaaggtcagca

SEQ ID NO: 186575 - DNA, 201 bp, Homo sapiens
gatttctttatcttaatttgtatcactttgattattaatgaggcacaatattttttcctgtatgttgtatttcctatgtgtaccttgctgggctcaggtgrtcctcccaccttagccttccaagtagctgggactatctaaattgtagtcactgtgttgtatttcattatctgaattgcctgttcattttcctcatgggat

SEQ ID NO: 186576 - DNA, 201 bp, Homo sapiens
tcctggccaacatggtaaaaccctgtctctactaagaatacaaaaattagctgggcatggtgacgcatgcttgtagtcctacctactagggaggctgaggyaggagaatcgcttgaacccgggaggtggaggttgcagtgagttgagatcacgccactgcactccagtctggtgacagagcgagaattcatctcaaaaaaa

SEQ ID NO: 186577 - DNA, 201 bp, Homo sapiens
tcagtgtctaaatgtccttgattctaaattgtacttacaatgtttattatctgctggcttttgttctctgctattttatttttttttacataaaatatttrtaataaagatgaagaaggtactcaccatccaaagtcaaggaatgttaacatttttgctgtatttgtttcagggcttttttcttataagagataaaccatc

SEQ ID NO: 186578 - DNA, 201 bp, Homo sapiens
ctgtagtcccagcaactcgggaggttgaggcaggagaatggtgtgaacccgggaggcggagcttgcaataagccaagatcgagccactgcactccagcccrggcgacagagcgagactccgtctcaaaaataaataaataaaataaaataaaataaaaataaaaaataaaaatacaacaaattagccaggcctggtggcgg

SEQ ID NO: 186579 - DNA, 201 bp, Homo sapiens
gcatcctcattatgtagagctctgcaactttttaataatctcttgttttttgagaccctttccacattattacatggaaatctattttaagtgctttttartagttcctcctatggatacgctttattcataccataaacccggaatcgtcagggcgaatatgtgtaagagtaccatatgcaatatattacagtccttttg

SEQ ID NO: 186580 - DNA, 201 bp, Homo sapiens
acagtagagcttctttcaaaactggaaccaatcctctcaaaccctgccactgcttatcaattaaatttatgtcatattataaatccgttgttgtcatttcttttttttttttttttttgagatagagtctcactctttttgcccaggcactatctcaactcactgcaacctctgcctctcgggttcaagtgattctcctgc

SEQ ID NO: 186581 - DNA, 201 bp, Homo sapiens; identical to SEQ ID NO: 32513

SEQ ID NO: 186582 - DNA, 201 bp, Homo sapiens
catccattcaaattttacatgagattacattaattcagtcatgtcatcagactctactttttgtgggttctttttttcttctttttctgtgtttctttctytttttttttttttttgagacagggtttcactctgccacccaggctgtgctgcagtgatgtagtcatggctcactgtggcctcaacctcccgggctcaagt

SEQ ID NO: 186583 - DNA, 201 bp, Homo sapiens
ggtacctgatctgttttaatcatcctcatgctaacaaaattcttcagtagatataacctaaattttttttctctttcatcttggttttaaaatgtcttccyccttttattctctggagaaatagaagatatccttgatcatactacttctctgttttattcattttggtagtcgcctaagatggttttaatgcatatggca

SEQ ID NO: 186584 - DNA, 201 bp, Homo sapiens
ttgagacagggtttcactctgccacccaggctgtgctgcagtgatgtagtcatggctcactgtggcctcaacctcccgggctcaagtgatcctcctgcctmagcctctcaagtacttgggactacaggcacatgctaccacacctagctaatttttgttgttgttgttgttgagatggagtcttgctctgtccccaggctg

SEQ ID NO: 186585 - DNA, 201 bp, Homo sapiens
acttgggactacaggcacatgctaccacacctagctaatttttgttgttgttgttgttgagatggagtcttgctctgtccccaggctggagtgcagtggcrcgatctcggctcacagtaacctctgcctcccgggttcaagcaattctcctgcctcaacctcccaagtagctgggactacaggcacgcgacaccatgccca

SEQ ID NO: 186586 - DNA, 201 bp, Homo sapiens
gttttcagcttactttgcccagatctgtcagaggaatcactgtctatggcagctatagccttataaaatatatttcttaaataataagacttgaaagtcaraattaatcctttatccctgggctgcagaatggattttgttagtagtcatgaaaacaacattcatctccttgtacatctccatcagatctcttgagtgacc

SEQ ID NO: 186587 - DNA, 201 bp, Homo sapiens
cctccttaaaaaaatgcacatatacaccaaaatttttttctttttttttttttttttttttgagatggagtctcgctctgtcgcccgggctggagtgcagyggcgctatctcggctcactgcaacctccacctcctgggtacaagcagttctcctgcctcagcctccttagtagctgggattacagacacgtaccaccatg

SEQ ID NO: 186588 - DNA, 201 bp, Homo sapiens
tataactttgcctattataactccttacctccatttttaaacagtgtgactatgaaaatgttccaaccactgtatttactcctttggaatatggtgcttgyggcctttctgaggagaaagctgtggagaagtttggggaagaaaatattgaggtaagttcttttcctcttttctcctatgttatatcactacttttttttc

SEQ ID NO: 186589 - DNA, 201 bp, Homo sapiens
ggcaagtgggaattcttggctaggaccccaacataactaaggtttaatcttaaccttaaataagactcctttgaaggaggtacaagcacaagagctataamcaggatattgtagtcctttttatagcacttaagttcttcttatgacatttatttgtaaaaactaaaaatccttttaaggctaaaaaacctacctagggtt

SEQ ID NO: 186590 - DNA, 201 bp, Homo sapiens
ccatgcccagctaattttctgtgcttttagtagagacagggtttcaccgttttggccaggctggtctcgaactcctgacctcaaatgatccacccgcctcrgcctcccaaagtgctgggattacaggcgtgagccaccacgcccagccaatatacaccaaattttatatgcagtttaagacccactgcactctaatcatcc

SEQ ID NO: 186591 - DNA, 201 bp, Homo sapiens
tgacaaacctgtaaaccagaaagtgaagacagcaggcagagtggcgtgctataaaatttttatcatcacacttgaagtgatcgtgttgctcattaatggcraaaactcaagttctaacacatggcagttttagtctgtgtttagccttgccatgtgctttcatctgccaggctcctctttgctttcccctttgtttccctg

SEQ ID NO: 186592 - DNA, 201 bp, Homo sapiens
tatttcttagagttgtaataattgttgactttgttctttgaatgtttgtaaggcttggaaagcaggttataaactgatttctcaatgttgttgtaggtctyggaggaacatgtgtgaatgtgggttgcatacctaaaaaactgatgcatcaagcagctttgttaggacaagccctgcaagactctcgaaattatggatgga

SEQ ID NO: 186593 - DNA, 201 bp, Homo sapiens
aatcccagggagagaaagattggtggagtaaaatggaaagcttctttctaggaccatggtgctccttttttgtgggtcagaaaatcccaagggctcacagrcaaacattattaagaatctaatctaggcctgttggtgactcacgcctctaatcccaacacactgggaggccagggtagtaggatcgcttgaggccaggag

SEQ ID NO: 186594 - DNA, 201 bp, Homo sapiens
caagaggcaaatgaggaaagtgaggcccagagaggtaacaagcatacaactattaagtagtggagcgaggattctcatgctggaagctagtgtacttaacyactgtgctctactgccttgcttaatagagtgattgggcacgtctaatgaaaccttggtgatatggtttagctctgtgtccccacccaaatctcaccttga

SEQ ID NO: 186595 - DNA, 201 bp, Homo sapiens
taagacctgaacaggaagcactgtttcccattaaaataagcagttgaaataaaatcaaactttttagtggattaccagtatctggaaacaatagaaaaagragcttatgctgggcacagtgtctcacgcctgtaatcccagcacttcgggaggccaaggtgggcggatcacctgaggtcaggagttcaagaccagcctgac

SEQ ID NO: 186596 - DNA, 201 bp, Homo sapiens
gctaattttcgtattttaagtagagatggggtttcaccatgttggtcgggctggtctcaaactcctaacctcaggtgatccaactgcatcgcctcccaaartgcaggaattacgggcgggtgtgagccacgcgcctggccacacacacaaatatgcatgcttaggcccatgccttgcaagtctgattcagtaggttaggga

SEQ ID NO: 186597 - DNA, 201 bp, Homo sapiens
ccccatttttctctgaattttattgtttgagaactctttcaaagaaagcccctctagcagacaacattgagcagcgaaaaagaaggaaataatcatttatmatcctaataatgttaagtgagggagatgggacataaaagacttttcaagcacgattttatattttaactttgggttaaccagatggaaggggaaggtaga

SEQ ID NO: 186598 - DNA, 201 bp, Homo sapiens
tgaacggggaactgggaggcagaggttgcagtgagccaagattgtgccactctactcctgccatggctacagagcgagactccatctaaaaaaaaaaattraaaaaaaaaaaaagaaaattgacatcttggattcacattatgaataaaaagagcttgattaatcaagttttcagcactgttgttgaatagtgtactttat

SEQ ID NO: 186599 - DNA, 201 bp, Homo sapiens
aaaaaatagtacaaagcattttcatatacccgttatccagattcatatattactaacattgtgccaatttattttatacatttttagtagtctctcattckgtgtgtgtgtgtgtgtgtttctgtgaatcatttgagagtaagttgaattctcctttacccctaaatactttattgtgtatttctatgaacgagggcattt

SEQ ID NO: 186600 - DNA, 201 bp, Homo sapiens
ggaggccgaggggggtggatcacctgaggtcaggagtttgagaccagcctggccaacatggtgaaaccctgtctctgctaaaaatacaaaaaaattagccrggtgtggtggtgcaagcctgtaatctcagctactcagtttcacgtgcatccgtgtgaaaagaccaccaaacaggctttgtgtgagcaacaagcctgttta

SEQ ID NO: 186601 - DNA, 201 bp, Homo sapiens
tttgtgtgagcaacaagcctgtttatttcacctgggtgcaggcaggctgagtcagaaaagagagtcagcaaagggtggtgggattatcattagttctttctttttttttttttttttgtgagacagagtctcgctctgtcgcccaggctagagtgcagtggtgcgatctgggctcactgcaagctccgcctcccaggttca

SEQ ID NO: 186602 - DNA, 201 bp, Homo sapiens
ttaaacatagtattaaacccattttataatgaggtagactgagtcactaaacatataaaatgtatcttatgaagcgatacagatgaatcattgacaattgratagaatcaacagacttcagatactcttgtaaatatcatttctgtcaacagggagaatcttatgggttacataaaagtgaattggaaagttttcaaaggt

SEQ ID NO: 186603 - DNA, 201 bp, Homo sapiens
aggttagatcgcaaaggctaaacattccaattcactaatttaaagagagggacagggtgagtggtttggtgggaaaaatcattatgacagagcaggtaatyggaatgagtcagggtggggtaggtaatcggaatgacttaagggtggagcagataatcggaatgagtcagagtggagtaggtactcgaaaaggttgcttta

SEQ ID NO: 186604 - DNA, 201 bp, Homo sapiens
actttgtatctcagttaaagaagatgaagaagtcttcaggggagattgtctactgtgggcaggtgtttgagaagtcccccctgcgggtgaagaacttcggsatctggctgcgctatgactcccggagcggcacccacaacatgtaccgggaataccgggacctgaccaccgcaggcgctgtcacccagtgctaccgagaca

SEQ ID NO: 186605 - DNA, 201 bp, Homo sapiens
gcaaaagtcccggcgctgtggctcacgcctgcaatcccagtactttgggaggccaaggcgagcagatcacgaggtcaggagatcaagaccatcctggctayggtgaaacccagtctctactaaaaatacaaaaaaattagctgggcgtggtggcgggcgcctgtagtcccagctactcgggaggctgaggcaggagaatgg

SEQ ID NO: 186606 - DNA, 201 bp, Homo sapiens
ttgggaggccaaggcgagcagatcacgaggtcaggagatcaagaccatcctggctatggtgaaacccagtctctactaaaaatacaaaaaaattagctggkcgtggtggcgggcgcctgtagtcccagctactcgggaggctgaggcaggagaatggcatgaacctgggaggcggagcttgcagtgagcccagatcgcacc

SEQ ID NO: 186607 - DNA, 201 bp, Homo sapiens
gggtggatcacaaggtcaggagttcgagaccagcctggccaacgtagtgaaaccccgtctgtaataaaaatacaaaaattagccaggcatggtggtgcgcrcctatagtcccagctactcaggaggctgaggcaggagaatcgcttgaacccaggaggcagaggttgtggtgagccgagattgcgtcactgcactccagtc

SEQ ID NO: 186608 - DNA, 201 bp, Homo sapiens
agctattcctgagaaaaatgcacataaataattttgcatataaactcagactatttgtggatctgcttcagaatatctggtacagagaattacccttcaamgtgttactgtacacactttgaatagttgaagccttcgtaggtttttaaaattttgttatatggcaaatttcttttcactggtatttgttatagtggaata

SEQ ID NO: 186609 - DNA, 201 bp, Homo sapiens
tgagttctccgggaggtggagttgcagtgagccgagatagtgacactgcactccagcctgggcgacagagcgagactccatctcaaaaacaaaacaaaacraaacaaacaaaaaacaaaaaatctatagataaaggaattcagatatatactggtggagaactataaggttctcatctgtctttggggtggagaaattggt

SEQ ID NO: 186610 - DNA, 201 bp, Homo sapiens
gggaggcagaggttgcagtgagccaagatcatgccactgcactccagcctgggtaacagagtgagactccatctcaaaaaaaaaaaattaataataaaaawaataataataataagctatatggcacttctttcatcttaggttctaatagctgtttaccactactaattagtatgtaactccttggctggtggtgagggt

SEQ ID NO: 186611 - DNA, 201 bp, Homo sapiens
tccagcctgggtaacagagtgagactccatctcaaaaaaaaaaaattaataataaaaaaaataataataataagctatatggcacttctttcatcttaggwtctaatagctgtttaccactactaattagtatgtaactccttggctggtggtgagggtggttgatctgcacttttatgagatgaaacatctgagagttga

SEQ ID NO: 186612 - DNA, 201 bp, Homo sapiens
acaggaagcactgtttcccattaaaataagcagttgaaataaaatcaaactttttagtggattaccagtatctggaaacaatagaaaaagaagcttatgcygggcacagtgtctcacgcctgtaatcccagcacttcgggaggccaaggtgggcggatcacctgaggtcaggagttcaagaccagcctgaccaacatggag

SEQ ID NO: 186613 - DNA, 201 bp, Homo sapiens
gacccttgcctatgaagcactgtagaatacctttatcacttcatttccataagttcagttatgtccctggaatataatcttgaagcagaagagcctgatawaataacagtgtagcctctaaggttgatccccaatataagatgatctttacagagatctcctgttatatttcaggctacttatttagattatggctccaca

SEQ ID NO: 186614 - DNA, 201 bp, Homo sapiens
acttcatttccataagttcagttatgtccctggaatataatcttgaagcagaagagcctgatataataacagtgtagcctctaaggttgatccccaatatragatgatctttacagagatctcctgttatatttcaggctacttatttagattatggctccacaagtcatttgaggcaaagtggaaagagaattagagtga

SEQ ID NO: 186615 - DNA, 201 bp, Homo sapiens
aggcccgtaaatgcgtagaaaatgtaataattccaaataaaaatacctagcatttttggattccacaatagcaaggtaatttcccatgtattatctaagaygtgtctttttttccggtcttggctcctggaatgcatgcctgaatgactactaaggttttaactcattcactttattttatatggtaagtcagtagctcaa

SEQ ID NO: 186616 - DNA, 201 bp, Homo sapiens
ggctgaggcaggaggtttgcttgagccaaggagttcaaggttacagtgagctatgattgcaccattgcactctagcctggattactgagtgagaccttgtwtcgaaaaacaaaaaggatctgctagtggccagcaccatcatttctattaggaaaagtgggctcttccagattaggaagaggaggtaaacttcatgcctag

SEQ ID NO: 186617 - DNA, 201 bp, Homo sapiens
tttagaagtgggcacaaggctcttggtcatcaaattcgttttaggtttagagaagtaatcttacctcttggagcaagagctagatttcactcttttatgtrtagagtgagatcaaggaagaaggggaatagaaggaatagaacttagcaaacagctccccactcccaagtcaagtttgttagaaatgtaacactggactac

SEQ ID NO: 186618 - DNA, 201 bp, Homo sapiens
cattttatagatgagtaaacaaaggcacagagaggtaacagaagttgcctaagggcacacagtttgccagcagaaaagccaggttacgtgatttcattgcrggctcttataactattgagctatactgcttgttagtagaacgccagatgatgctatgggattagcccagagatttacaaaagaggagacctgggcacatt

SEQ ID NO: 186619 - DNA, 201 bp, Homo sapiens
tgtgggctctgctcaagcatcacattctgagatctttcctgacttccctaccctactttattcttcttcaaggtacaaagaactctttcagaaaagctttktgtgtgtgtgtgaaggagagcaatgaaatggggtggtggtaactgcaagggttggggcacatgggatcatgagagccttttctttctttttgggaacagt

SEQ ID NO: 186620 - DNA, 201 bp, Homo sapiens
gtctgtcttatttatatttcaggtgaagtaccacttaaatggaactgaatgatagcactttcaattttaagtttggttaaaattttaaaaacaatgtttctttttttttttttttttgagacggagtcttgctctgtcacccaggctggagtgcagtgccatgatcttggctcactgcaatctctgcctcctgggttcaag

SEQ ID NO: 186621 - DNA, 201 bp, Homo sapiens
ctttctaggaccatggtgctccttttttgtgggtcagaaaatcccaagggctcacaggcaaacattattaagaatctaatctaggcctgttggtgactcaygcctctaatcccaacacactgggaggccagggtagtaggatcgcttgaggccaggagtttgagtccagcctgggcaagagtgagagcttgtctctacaaa

SEQ ID NO: 186622 - DNA, 201 bp, Homo sapiens
tcccaagataaacttggagctcctggcctattagaaagtgacattcttaggctggcacggtggctcatgcctataatcccaacactttgggaggccgaggkgggcagatcatgaggtgaagagatcaagactatcctggccaacatggtgaaacccctcatctctactaaaaatacaaaaattagctgggtgtggtggtac

SEQ ID NO: 186623 - DNA, 201 bp, Homo sapiens
cagtgctgtgcttcctccttcacattgctccaccgcacccccttccacatcccaagaaccttcttcttccgctgaccccaagctctgcctttcaccccctrcatctgatagtaggcaagagagaaatgtgcagtttgggctggtaagtttgggggcttttttttgttattaaagttaaggctttttgtttgtttgtttttt

SEQ ID NO: 186624 - DNA, 201 bp, Homo sapiens
tttgggggcttttttttgttattaaagttaaggctttttgtttgtttgttttttaaaatgagatggagtctcacagagtgagactggagtgcagtggcgcratcttggctcactgcaacgtctgcctcccgggttcaagcgcttctcctgcctcagcctccggagtagctgagattacaggcacccgccactacacctggc

SEQ ID NO: 186625 - DNA, 201 bp, Homo sapiens
ctgcctttcttaggatgatctaagttacatgttaataaagttcttggagatctagcatagaatgcattcagcactgtaaatcacaacttaatgtttgcctygatatgctctgttgctctgagcaagttgtgtgggctgttatctcctgagaaatccctgtaaatggtattagtaatactttataagcaggttgggagaata

SEQ ID NO: 186626 - DNA, 201 bp, Homo sapiens
ggccgggtgcggtggctcacacttgtaatcccagcaccttgggaggccgaggcaggcggattgctttgagctcaggagttccagatcagcctgggcaacayggtgaaaccccgtctctactagaaataaaaaaattagccagggcttggtggcacatgcctctggtcccagctactctgggactgaggctgaggctgggga

SEQ ID NO: 186627 - DNA, 201 bp, Homo sapiens
gaaggggtttctccgtgttggtcaggctggtctcgaactcctgacctcaggtaatccaccggccttagcctcccaaaatgctgggattacaggcatgagcyactgcacccagccttgagttaagttttgatcggtgtccactgtaatgctttgttgacagttactgtgaatgaccaacctgtaaaaggggaaaatccaaac

SEQ ID NO: 186628 - DNA, 201 bp, Homo sapiens
actgtatttatcaccattttatagatgagtaaacaaaggcacagagaggtaacagaagttgcctaagggcacacagtttgccagcagaaaagccaggttaygtgatttcattgcgggctcttataactattgagctatactgcttgttagtagaacgccagatgatgctatgggattagcccagagatttacaaaagagga

SEQ ID NO: 186629 - DNA, 201 bp, Homo sapiens
ccgggcacagtggctcatgcctataatcccagcactttgggaggctgaggtgagaggactgcttgagcccaggagtttgataccagcctgggcaacaaagygagaccctgtctctacaaaacatttttttaaatgaagcataggccgggtgcggtggctcatgactgtaatcccagcacttggggaggccgaggcgggtgg

SEQ ID NO: 186630 - DNA, 201 bp, Homo sapiens
gatggtcttgatctcctgaccttctgatccacccgcctcagcctcccaaagtgctgggattacaggtgtgagccaccatgcctggcctctgatcaaattcytttttttttttttttttttttttttttgagacggagtcttgctctgtcgcccaggctggagtgcagtggcgtgatctcggctcactgcaagctccacctc

SEQ ID NO: 186631 - DNA, 201 bp, Homo sapiens
ttttagccaggacggtctcgatctcctgacctcgtgatccgcccgccttggcctcccaaagtgctgggattacaggcttgagccattgcgcccagcctaattttttttttttttttttgagatggagtctcactctgtcacccaggctggagtgcagtggtgccgtcttggctcactgcaacctccacctcccgggttcaa

SEQ ID NO: 186632 - DNA, 201 bp, Homo sapiens
ggtttcaccatgttggccaggatggtctcgaactcccaacctcaggtgatccacccaccgcagcctcccaaagtgttgagattacaggcatgagccactgygcccagccatgtttaactttttgaggaatttctaaactgtttcccaaagtgtctatactattttacatttctgccagcaatgtattagagttccaaattt

SEQ ID NO: 186633 - DNA, 201 bp, Homo sapiens
tttagccaggacggtctcgatctcctgacctcgtgatccgcccgccttggcctcccaaagtgctgggattacaggcttgagccattgcgcccagcctaattttttttttttttttttgagatggagtctcactctgtcacccaggctggagtgcagtggtgccgtcttggctcactgcaacctccacctcccgggttcaag

SEQ ID NO: 186634 - DNA, 201 bp, Homo sapiens
ttggaccaggacagtaacttcctagcaggtctgtatatctccatatctccacttttttttttttttttttttttttgagatggagtctcactgtgtcgccygggctggagtgcagtggtgggatctcggctcactgcaaactccgcctcccgggttcacgccattctcctgcctcagcctccccagtagctgggactacag

SEQ ID NO: 186635 - DNA, 201 bp, Homo sapiens
caggtctgtatatctccatatctccacttttttttttttttttttttttttgagatggagtctcactgtgtcgcccgggctggagtgcagtggtgggatcycggctcactgcaaactccgcctcccgggttcacgccattctcctgcctcagcctccccagtagctgggactacaggcgcctgctaccacgcccggttaat

SEQ ID NO: 186636 - DNA, 201 bp, Homo sapiens
aaatacaaaattagccaggcgtggtggcacatgcctataatcccatctactcaggaggctgaggcaggagaatcactggaacctgagaggcggaggctgcrgtgagccgagatagtgccattgccctccagccagggcaacaagaacaaaactctctctctcaaaataaataaataaataaaaataaaatgaaatccaaaa

SEQ ID NO: 186637 - DNA, 201 bp, Homo sapiens
ccagaattgccttaaattgtttttgctctgttcttaggttgggggcggctatgagcaggcagaggatgtggtgtcacccaattaggagctctcagcttackaggcaattagcataggttgccagggctgcacgaggagtggatttctgctttgtcattctgactctggcagttagcccgcccgctcggcgcagggcgtggc

SEQ ID NO: 186638 - DNA, 201 bp, Homo sapiens
ccaggctcctctttgctttcccctttgtttccctgctttgaagttcattcattgtcctggtttactgtgaaatgccacttggggataactcaaaataggasagtggctttattacctgtgcttttcatatttcatgctacctttctgttttccagtttcccccagttaagttgcattccttatgtaccgtgatgttcctct

SEQ ID NO: 186639 - DNA, 201 bp, Homo sapiens
tgagccaccatacccggctttagtttttaatatatagcttagttggtcacatggtgcagatggcattccttcagtatttcgcgtgccagttgtctcagctratagatatcagcagctggcaaggaccttggctgcactgcctgctgccccctcatcttcactggcacagggccctacacttagtcaacaggcagccaaaac

SEQ ID NO: 186640 - DNA, 201 bp, Homo sapiens
gagttagagaccagtctgaccaacatggagaaaccccatctctactaaaaatataaaattagctgggtgtggtgttgcatgcctgtaatcccagctactcrggaggctgaggcaggagaatcacctgaacccagaaggcggaggttgcagtgagccgagattgtgccactgcacttcagcctggcaacaagagcaaaactc

SEQ ID NO: 186641 - DNA, 201 bp, Homo sapiens
cccagcaccttgatattcaccaacctggaagttctccaaaccccttatttaggggtgtttatagaggtcccattatgtaggcatgattgattaatcattgrccattggtaattacccaatctcctgctccctccccagatgtaggggaccagaactggggctaaaaattctacctctgatgacatggttggttcctctggc

SEQ ID NO: 186642 - DNA, 201 bp, Homo sapiens
agactggaatgcattaaagagggattgtagccacccggggctgaagcctccatttttccgtcagcctgtcaatagttttgatttgatctttaagtacctgrtgtagtaaataattttcatctaaaattttacttgccaagatatagaatttccctctggggggtgtctatgaagttccttgattttattttcccaaacaaa

SEQ ID NO: 186643 - DNA, 201 bp, Homo sapiens; identical to SEQ ID NO: 32509

SEQ ID NO: 186644 - DNA, 201 bp, Homo sapiens
aggaagggggttgtttacaaactaggagaataataacatttccaaataaggaagagatgtatgctgtaagctgggaatgcctgggcattttcagacatgtytgagcaggttataagccagaacaaataacttggttaaagtacaaggacatagaatgtacttattcccttactatatttaacagctacatagggcttaaca

SEQ ID NO: 186645 - DNA, 201 bp, Homo sapiens
ttttttttttttttttgagacggagttttgctttgtcacccaggctggagtgcagtagcccaatctcagctgactgcaacctctgcctcccaagttcaagygattctggtgcctcagcctcctgagtaactggggccacaggtgcgtgccaccacacccggctaatttttatattttcagtagagagggctttcaccatgt

SEQ ID NO: 186646 - DNA, 201 bp, Homo sapiens; identical to SEQ ID NO: 32511

SEQ ID NO: 186647 - DNA, 201 bp, Homo sapiens
tctcttttcttagtggagtggaatgttctatccccacaagaaggattatatcttatagacttgtcttgttcagattctgtatttacccattttattgaaayatatactaagttccatgtatttttgttacaaatcttctgaaaaaaaacaaaacaatgtgaaacattaaaattaaaaggcattaataatatccacgtgtgc

SEQ ID NO: 186648 - DNA, 201 bp, Homo sapiens
tcttttcttagtggagtggaatgttctatccccacaagaaggattatatcttatagacttgtcttgttcagattctgtatttacccattttattgaaacayatactaagttccatgtatttttgttacaaatcttctgaaaaaaaacaaaacaatgtgaaacattaaaattaaaaggcattaataatatccacgtgtgcct

SEQ ID NO: 186649 - DNA, 201 bp, Homo sapiens
cgctcggcgcagggcgtggcttctcgtagccattaggaaacagcaaccctttcacctcagttttcttcactccggcatttgcagcagagcgaaaggtggtsgagtcctgaaggagggcctgatgtcttcatcattctcaaattcttgtaagctctgcgtcgggtgaaaccagacaaagccgcgagcccagggatgggagca

SEQ ID NO: 186650 - DNA, 201 bp, Homo sapiens
aacccaggcagcttcgtggcgtgtgcggtttcgacccggtcacacaaagcttcagcatgtcatgtggtaggtgaggccggcgcctgtaggctggcggtttccttcctcttggtctttgtagagacagtttgcagaacagcggagaaaatgggtattgtatcgtttcttacagagtccgagtcttgaaatgtagatgacaat

SEQ ID NO: 186651 - DNA, 201 bp, Homo sapiens
tgatcatgccttttagggttatggggacacaattcaacccacaatagtgagtatatttaaaaatgtagatgccatttcaagatactcacaagcttcaatarccatttttgatagggacgaaggaaaagacgattttattgtcttttgtatatgagtgtctaattttttgtctgaattcagctctcagtgggcttgttgaaa

SEQ ID NO: 186652 - DNA, 201 bp, Homo sapiens
gtcactctttttataagctttggaactcacttaattgatttggtctgatgttctgatgttttttctttttttttaattgaaaacttttttttctttagagmtggaggtctcattatgttgtccaggctggtcttgaactcctgggctcaagcgatcatccggcctcggcctcctaaagtgctgggactgcaggtcacgaca

SEQ ID NO: 186653 - DNA, 201 bp, Homo sapiens
tcccctggagtactcgttaattatgcatgcccaggctttacccgagttcttttgaagtagactcgggaaagagctaggaatctacccccgcccccccgccttttttttttttgagatggagttctgctcttgttgcctgggctggagtgcagtggcatgaactcagctcactgcaacctccacctcctgggttcaagtggt

SEQ ID NO: 186654 - DNA, 201 bp, Homo sapiens
gcaacctccgcctcccgggttcaagtgattctcctgcctcagcctcccaactaactgggattacagacttgcgccaccacactggctaatttttgtagacrggggtttcaccatgttggccaggctggtcttgaacacctgacctcgtaatctgcctgtctcggcctcccaaggtgctggaatgtacaggcgtgagccacc

SEQ ID NO: 186655 - DNA, 201 bp, Homo sapiens
cccctggagtactcgttaattatgcatgcccaggctttacccgagttcttttgaagtagactcgggaaagagctaggaatctacccccgcccccccgccttttttttttttgagatggagttctgctcttgttgcctgggctggagtgcagtggcatgaactcagctcactgcaacctccacctcctgggttcaagtggtg

SEQ ID NO: 186656 - DNA, 201 bp, Homo sapiens
ccgaatgtcgggctgcactattatttattggatacaaggcagaaggggcagggtaaagaatgtgagtcacctccaatgataggtaaggtcacgtgggtcaygtgtccactggacagggggcccttccctgcctggcagccgaggcagagagggagaggagacaaagagaaagacagcttacgccattatttctacacatca

SEQ ID NO: 186657 - DNA, 201 bp, Homo sapiens
ggactatcattgcagctaaaatatttctccctacagttttcctcctcacttctattctttatttcaacacctgtcttctcttcctaccacaacccactttyccaactgcctacccgttcagaatacaagaccaaagttttccattcctttcctcctctgttcccacgacaatcccataagtctttatttttggaaaaggag

SEQ ID NO: 186658 - DNA, 201 bp, Homo sapiens
ggtgttcattcattacatgcttgctgaatggaacttcattcttctgtgcctacttgtactttctttaagagaacaatgaggctgggcttctaaaaaaaaakatacattttaatatcttccatatattgaaaaaaatttctttagaggcaaggtcttgctctaacccaggctggagtgcggtggcactatcatggctcgctg

SEQ ID NO: 186659 - DNA, 201 bp, Homo sapiens
attacatgcttgctgaatggaacttcattcttctgtgcctacttgtactttctttaagagaacaatgaggctgggcttctaaaaaaaaagatacattttartatcttccatatattgaaaaaaatttctttagaggcaaggtcttgctctaacccaggctggagtgcggtggcactatcatggctcgctgcagcctcaacc

SEQ ID NO: 186660 - DNA, 201 bp, Homo sapiens; identical to SEQ ID NO: 32508

SEQ ID NO: 186661 - DNA, 201 bp, Homo sapiens
gtactttctttaagagaacaatgaggctgggcttctaaaaaaaaagatacattttaatatcttccatatattgaaaaaaatttctttagaggcaaggtctygctctaacccaggctggagtgcggtggcactatcatggctcgctgcagcctcaacccccctgggctcaagcaatcctcttgcctcagccgcctgagtatc

SEQ ID NO: 186662 - DNA, 201 bp, Homo sapiens
agaacaatgtgtgagtgttagctagtgagagaacactgtacaaaaggcctgggtgggaaagcggatggctcattcaaggaactgaagaagaccctcaataytggcatagcttaaagagcttagagagttaaaaatatatatttattttttatttttttgtatatatatgctggagaaacaggtgggtaagtgatggtcttg

SEQ ID NO: 186663 - DNA, 201 bp, Homo sapiens
caggaatgtgttttgttcactatcttatctcctacagtccttggcatactgccctacaaatcagtaaatgtgtttatatgactcatatggcaaaaggcaatttttttttttttaataagtgaggaatgttccaaaagccaatgctattaacattgaccagcttcttctagtaaggagaggagacagtattttttcaaagtg

SEQ ID NO: 186664 - DNA, 201 bp, Homo sapiens
ctccagctgcaccgtggaagcgggactgagcgagcaagtgaagtggcagatccagttatgtggctggtgaggtgcatgagaggagatgatagtggccggargtgtggcagtggaaatggagtgacacggttatatttgagggcagagttgatagtacttggcagctggctgggaatgggaagagggagagctgaagaccac

SEQ ID NO: 186665 - DNA, 201 bp, Homo sapiens
agtgcaatgatttaaccctgactagaactctgacgtttacagctagccttgaggccatgttttcagccagtgtgcggatttgccggggtcagactccaagsttgattgtgagttctagcctttgtcagaaatgcagcaagtcatgctaacttgcaagggagtcaacagagggcacgcggtgcctgcggggccgggacggaa

SEQ ID NO: 186666 - DNA, 201 bp, Homo sapiens
tcttgatatctatgtccttccatttatttactgtttttctttagctacattctttttgtgtgtggttaaaaaaaaaaaatttaccatcttaacaattttgtttttttttttttttagtttcgctctcgttgcccaggctggggtgcaatggcgccatcttggctcacctcagcctccacctcccaggttgaagcgattctc

SEQ ID NO: 186667 - DNA, 201 bp, Homo sapiens
ctccctggggacacctctcccttcgccattccacaaggaagggaactgggaggaacaggggtctccggactcaaggcgctaaggacaggcatgcgtgtgtrgtccatgccccgtcaccctgctgaattggggctggcctctgggaggggcttcccaagacaaccctgcaagcctgtggagcttggggcttgggggtgcagg

SEQ ID NO: 186668 - DNA, 201 bp, Homo sapiens
gtgctatatatagggttagatgctcagagaacctatgaggacaacaaattgtttttatcctccaagaatgggagggggaagtagctaaataggcctggtcyatgtagctctaatgcagagaaatacttatctaggtaatgcaaaatacaaaacccagttgtgtctaatttacacaggtgatactgacactgtacatctggt

SEQ ID NO: 186669 - DNA, 201 bp, Homo sapiens
tcattgaagaaaaggtccttctcactgccccttaaatccctctgtgatgtatttgctgtgtatgaatttttggtattccacagatgtagttaatgctgacrtctctgtttcctgtattacatcacatcgctgaaacggacgcttactaccaggcacccagcatccttgcatatctgatggtttgggggcatcacaccatta

SEQ ID NO: 186670 - DNA, 201 bp, Homo sapiens
ggctggcgttgcctggacaaccaacagacagatggacatgaagtacgcttcttccaggcctggcccatgagattctcccactgtccctttccccttatgcygcaatcttggaggccttgtgggaaaatggcggcatcccaagttgcaagaggcctgtggccctcagtcactgcttggaggagagctgcctgactagccctg

SEQ ID NO: 186671 - DNA, 201 bp, Homo sapiens
acagaagcagaacattatgctaattattggaaactttttcagcaacagagcttcagattttaaaaagcttttcttttattaagcccagaatataataagcrttgtaatacaataagcattgtaataagttcagatttatttgagtgtgtggccctggcatgacgtgtgtctgcgtctgtccacgtggcaaggtagcatgtt

SEQ ID NO: 186672 - DNA, 201 bp, Homo sapiens
gatcattgctgttacttctgttttctaaactctgcaactcttgtggcccaggagcccattgaatgtgtgtgctgatcatctgggggactcaagttagtagwttctgttttcataaccgcctggaatggaggaagaggaagagggaagcagtgatcagaaggttcacccttagtagaactaaagcattctgtcaaatcataa

SEQ ID NO: 186673 - DNA, 201 bp, Homo sapiens
tctaactgtctgctttaatgaaggggagtgtccctgagaacattcaggcactgatcagtgcccagaccacagggactcccacctctggatgcgtccagccsgatccacagaacagggtcgtggtgaggatgaaacgcggtgatgaacataaagtgccagactctgtacttgaccatcacatgctgtcactcagtgttagcg

SEQ ID NO: 186674 - DNA, 201 bp, Homo sapiens
aacctctacagtttaaccttcctcacatctgggatacaaagctaaaataaccaacatttgaagaaccaaggaaatagaatactgtctcaaatcaagaaaamgagaaatcaaatgaagttcaaccccaaggggaagcagatatggagagtcacacaaggttttccagtggctgttataactatactaaatggctgggtgcca

SEQ ID NO: 186675 - DNA, 201 bp, Homo sapiens
agtggaatttcctgggtgggagaattgtaggcttctatgaatgacaagaataattaccattttcctaatgactttttttctgtcttgagtcaaaggtatcmaggaaccggtaaaaatctcatgtatttgccctggagtctcagttgaccatccttggtctatgtaaacactctgaactagaacaacttttctccagataac

SEQ ID NO: 186676 - DNA, 201 bp, Homo sapiens
aaactgaggctaagagtagtatggaacccagggagacagtgttggagccagaattcagcacaagtagtctgactctggtactcttagccattgtactttaragtcccctgagttaaagaaaaacagtttcccacaagttaaaacccagaccagtgtccacatttgactagatgactagtggaggcatcctattccatgtaa

SEQ ID NO: 186677 - DNA, 201 bp, Homo sapiens
gctagtttgttcaagttgggatccaataaagaaccacccattgtgtttcattatgtcttttaagccccttctaatctagacggggtctccctctccacctytgtgtccccaccccatctccaccgtgacattgactagttgaagattccagcccggctgttctgtaaaatgttttatcccctggatttcttctgaatgctt

SEQ ID NO: 186678 - DNA, 201 bp, Homo sapiens
aataaaaaaaatcctccaagaccacatgctttttgtctcctacccgggcttcctaatagctgccatgtgtgagcgggtatggattctggcctcacctcccrgggaagtcggtggaggctgtctccagaagggcttagaacattctcacacgcggatttttgtctcccagttcaaaaaacacatcccaggaataagcccata

SEQ ID NO: 186679 - DNA, 201 bp, Homo sapiens
agggtttcaccaaagtgttggccaggctggtctcaaactcctgacctcaggtgatccgcccaccttggcctcccaaagtgctgggattacaggtgtgagcyaccaagcctggcgtgttctcatatgttatacacttaaaatcaaatgcatgaatactgaatatgtgtgtttataattgaatgccctacaatcaattgataa

SEQ ID NO: 186680 - DNA, 201 bp, Homo sapiens
tgacctagagcctgctgtagagtggactctgcatgaatattgattgagtaaatatgcgacctgcaaggaacaatttcaggatggggtcagggccagtgtgyccttaggcagccaggagcctccagtggtgtaattgattattgcgaaaccgtcttcttccccatctccttgtcactgtgcctgaatgcccacctgagcagc

SEQ ID NO: 186681 - DNA, 201 bp, Homo sapiens
tatgggaatggaaggtggttgtgctttgtgtcttgcttctttgaatcaggccctcagaatgttctttgataaacgaatattatgaaaaaagatgtttaacyggtggcattattgctcaggttatcattcttcttttgtgcagttacaatcagtgttagacatttaatacaggatgtttttcaggggcatttgaataggaag

SEQ ID NO: 186682 - DNA, 201 bp, Homo sapiens
gtgtttacacagtttggtgccttgacacttgctctttatgacgaatagcgcagaagatttatgtgcttctccgttactgtgatataactggaaagaatagyagcaagacccaaagagaaaaaacactcgcctcagcgacggtcagcccttggcatttgggaaggatgtgctcggagaccttcatcgacacccagacaccat

SEQ ID NO: 186683 - DNA, 201 bp, Homo sapiens
aggaaatgtaatcctaacaaactaggattataaatgtctgcatagttacaaatatctgtatagtatattaatattcagtaatatctagtaatatgacaatrtttatagtaatacctgtatattatgcattctcttgtaataagtatcatctgtatagttaatactgtaaattatgtttatatgtcatgacacacaaaattg

SEQ ID NO: 186684 - DNA, 201 bp, Homo sapiens
ttcagagttgtgtgatctatattagaatcttcatcgagattctctgtgctgtgtaatttcacctgctgagattctggctatgtgcatagtcagggaaatckttgtcttccttttctttccatcctcttcctcctcatcagccatctcttctacctttttgccctttcgttaggttataacttggagcacatacagccagag

SEQ ID NO: 186685 - DNA, 201 bp, Homo sapiens
aaactcacgtccatagctcgtgagcaaattttgatcgcaggaaatattttcaagctgcagttgttccagtagtcattttagttgggaatctttggctcctwtaccacttgcttatgtttgaacttcttcattttatctgatttatccctccctggtttgactgatgccttatcctcttctgtttatttgaggtatttccac

SEQ ID NO: 186686 - DNA, 201 bp, Homo sapiens
aatgtcaggaattgctagttgtcacttgaagaaggtacatacattgggggtggggggagaaagaacttggcaggatattctgatgaaatagaatctaaccmagtctttaataaatggagtaacggctcaggcaggtacacacgccccctcgcatgctctttttttgatgttaaaaggtgctttcttcatctctttcattct

SEQ ID NO: 186687 - DNA, 201 bp, Homo sapiens
tagttctcaggggatagtgtgtcttttaaacggctttattgccaccatattggttttctgaataatcagaaacttctgttatgattgtgttctagtgttcraacagaagtgcaccctaagtaggaacaaatgtcaggaattgctagttgtcacttgaagaaggtacatacattgggggtggggggagaaagaacttggcag

SEQ ID NO: 186688 - DNA, 201 bp, Homo sapiens
agaaaagaaaagaaaaaaatcaaagaggccccctcatctgcactgacaaagtggccaaacctgatctttgctctgttgatgaatcctacctcgaaccgcgmctgcgcagcacctgatcggcaattcctgggcacgtagagaggaactgtcctaccacggggttaaaatagggagagcgcagcttgcaggaaattctcagag

SEQ ID NO: 186689 - DNA, 201 bp, Homo sapiens; identical to SEQ ID NO: 32556

SEQ ID NO: 186690 - DNA, 201 bp, Homo sapiens; identical to SEQ ID NO: 32531

SEQ ID NO: 186691 - DNA, 201 bp, Homo sapiens
tagtacccactagataagttaacattaattccctcttgattaatagtattttcacaaggatttataattcagacactttcattctgtttggactttttcckacttgacgtggacatggccaagatgaagttttttgtgtgctgtatttttaaatgtctaaagtagaaagatgatgtgtagttggggatttcgagttgccta

SEQ ID NO: 186692 - DNA, 201 bp, Homo sapiens
ttaaaacttaaatataagccaattcggttgaaatatttttagcaaattaagaaatacctttaatttatggctgtaagatggaaaagaactaaatgcttccraaaggttttttcacgcctaagtccctgtcgttttaaaatttaaggtcattttaattttttaattgaggtataatttatatactataaaatacccacccca

SEQ ID NO: 186693 - DNA, 201 bp, Homo sapiens
acttgatgtccccgtgttatcaatgacaagcatttctgggatgccaggcctaccctgtggctgcagaacagagcccagccagttgaggaacatagctcacrtcttagttgcctgtgaagccaggcgtttgcctactgctttcacaagattagttcacaagaatcgtacgttgcattatccccattttacagatgagaagcc

SEQ ID NO: 186694 - DNA, 201 bp, Homo sapiens
cctaaatgaaataacatgatatatgctcactatgaatgaaaagataagatagctcagcagagaaatagaatgataaaaagaagaaccaaatggaaattctrgaactgaaaatagttatctcaaataaaaatttactgagtggacttaacagctgaaggcagagagggggaaaatgacagaggaaaaagagaaaatggagca

SEQ ID NO: 186695 - DNA, 201 bp, Homo sapiens
ccgagacccagagagacacagtgtctctccctgatccttcagcaagtgagtggctggtcacagcagccgctgcagcccccgctgccagtcctccacccttyggccacctcacaccatctgcaggcatcgtgttcaatagcaggtgaggtcactgaagcaggcattttgaaaggttagagactaattatgaccagagcattg

SEQ ID NO: 186696 - DNA, 201 bp, Homo sapiens
agtaggtagatattttcctccctctccttgagatttgttgagaatctgttacctcccagtttgatcagactctgagaaggatagagagagaagatttgatrcagagttgattccgcaaaacctcagtagctttcaccttgacctggctatacacacacctcaagcctctcgctttgtagaaggatgcgcttcctcatgttt

SEQ ID NO: 186697 - DNA, 201 bp, Homo sapiens
caagtgtataaatggtcattacctaaggattattcagatattggcttcaggaaacatatttattttgttttcaatgtgtattttgttgccatttcttcccytctccgctgtaagaacttggttagctgcagaatgcatcagagtatcaacaggggctgggctggaccgagcccacccaggcaggagtggctttcattactt

SEQ ID NO: 186698 - DNA, 201 bp, Homo sapiens
gtttcatcctacgtgtctgaagtagaaataaccccatcttgtatacctgtggtgaccaacatggaggccttctcatcagaacatttcaacttagagatctrtcgccaaaatctgcagaccaagcagttggggaaagtaattttgtttgccgaagtgacccccacaacgatgcgtctcctggatgggtaaggtgtgagcagg

SEQ ID NO: 186699 - DNA, 201 bp, Homo sapiens
atacctgtggtgaccaacatggaggccttctcatcagaacatttcaacttagagatctatcgccaaaatctgcagaccaagcagttggggaaagtaatttygtttgccgaagtgacccccacaacgatgcgtctcctggatgggtaaggtgtgagcaggtctgcatctgctcagaggagtcctgttccattgatcatcctc

SEQ ID NO: 186700 - DNA, 201 bp, Homo sapiens
agttcagatttatttgagtgtgtggccctggcatgacgtgtgtctgcgtctgtccacgtggcaaggtagcatgtttcccactgtggcctgtgttccaggayggggagggaatgtgtggctgagccctgtgggatgtgctctttctactctgctcatctccattccactgagatcccagctgggacagaggatcccgtttgt

SEQ ID NO: 186701 - DNA, 201 bp, Homo sapiens
ccaatatattttcttacacaggacagtatccagccaagtacaaaaaaaaaaaaaagatagtcgttctccatactgaattgttaagatcatgtctgtataartcactgaccgtgagtgacaaagatgttcacacatacaagcacaaaaccctgaaaatagtgaaagcttttgttctttcctgtggcctgtgtattctaaact

SEQ ID NO: 186702 - DNA, 201 bp, Homo sapiens
caccgaatgcatacatctttccttatggacccaatcgatcggatttctccccacggtattaaagtcgacccttattcttgcttttatttgaatacattttscaatatattttcttacacaggacagtatccagccaagtacaaaaaaaaaaaaaagatagtcgttctccatactgaattgttaagatcatgtctgtataaa

SEQ ID NO: 186703 - DNA, 201 bp, Homo sapiens
acctacttagaagagggatagtgcagtttgccgttgtatttacggttcatgaaactcatgattttctaataaaggctggtgaaggtgcctagggtagaagyagcaaatgctcccagcagtcccatccgtacagctgggagcactgttgtgtgccgcggcacggaagtttctgaaggtgacacttgcccatgttcattatgg

SEQ ID NO: 186704 - DNA, 201 bp, Homo sapiens
ggttggcataatgccactggcattcaccgctggctggcagtgtgctcaggaaaaagcgtgccacctcacaaggggatccttggggctgcccgaacttggcyggcaacattggctttttgctgctgaagacgtgagagtccagagggaagtgtccgtaatggtaggagaagggcaggctgtaggatggcgtgtacagaaggt

SEQ ID NO: 186705 - DNA, 201 bp, Homo sapiens
cttcctcagcctcccgagtagctgggactgcaggcgcgtgccacaacgcccaggtaattttttgtatttttagtggagacggggtttcaccatgttagtcrggatgatttcctgacctcgtgatccgcctgcctctgcctcccaaaatgctgggattacaggcatgagccactgcgcccagccaattcagggctaattttc

SEQ ID NO: 186706 - DNA, 201 bp, Homo sapiens
aagcttcggaaaaggatttggctgaaggcagccagattcttttatctggtgcctgaaagcttacgttagataacaaggggatataaataaactgatctagrtaagttagtttacttaggccttggaacctcgcccttaagcatccacgcacagaactactctctccgggtctgggtgaccatgtgaattgcccacaaatgt

SEQ ID NO: 186707 - DNA, 201 bp, Homo sapiens
tggttttaaagagatctagatcattgagattccaaaataaagcttttattaacctaggtccagtcaaacagtacttgtgtctcttatgtttggtagaagamgaccagctgttgatacgacggttttggtgaactcagggctaattttctttctttctttctttcttttttttttttttttgagacagtctcactctgtcgc

SEQ ID NO: 186708 - DNA, 201 bp, Homo sapiens
tagcatagcagcttgacctgaaatagtaaatttaatagttgttgggtttaagctgtgatgttgaaggtctacaggtggaaagcttgaccatttatttgtgsttggctactgttattttgagatttaaaatatgatcaggttgatgatttggtggatatctcagtctgcttgggtctacttttgagggatacctcagtctac

SEQ ID NO: 186709 - DNA, 201 bp, Homo sapiens
ggccaatttttgagcagcaagtgggccttagactttgtagcactggcctggaattaactgggagcgtgtccctgctactgcctctgacatgaatgagcctkgcataccatgagaatttcagttttacctacttagaagagggatagtgcagtttgccgttgtatttacggttcatgaaactcatgattttctaataaaggc

SEQ ID NO: 186710 - DNA, 201 bp, Homo sapiens
tttataccaaatcctgtgctaaatacttgatttttaaaaaaggatttatgccctccaagcctttatttcaatgtcaaaaatgccatctctctcttctgaaygccaggtcgtcttgcccatctctcaggtttctgtctgaagctttataataaatgatggtaatttgattacaaaagagaaagataccatcattttatattg

SEQ ID NO: 186711 - DNA, 201 bp, Homo sapiens
acaaaaaaaaaacatgaatatgatggctgcaaggtcttgggcagcctggacactatgaatagtgtagcctgagatgatctggtctcagagtgcgaaacagmttgtgcttgtatggactttacccaactcccccttgatttacatggtggtcctatctttggaatatttagagtttaataccgctgtacagaaagtacttgc

SEQ ID NO: 186712 - DNA, 201 bp, Homo sapiens
gcacctatacaaaaaaaaaacatgaatatgatggctgcaaggtcttgggcagcctggacactatgaatagtgtagcctgagatgatctggtctcagagtgsgaaacagattgtgcttgtatggactttacccaactcccccttgatttacatggtggtcctatctttggaatatttagagtttaataccgctgtacagaaa

SEQ ID NO: 186713 - DNA, 201 bp, Homo sapiens; identical to SEQ ID NO: 32555

SEQ ID NO: 186714 - DNA, 201 bp, Homo sapiens; identical to SEQ ID NO: 32534

SEQ ID NO: 186715 - DNA, 201 bp, Homo sapiens
ataactcaataaaatggcaaaaaattgaggggtgagctttttgtagtagtttccaaattggatcaattacatttaggatttaagtcagaatagaaattttsgacatataaaaacatggagatgggaatgtctgattttcttggacagttttacttttgaacattttcatgactccgctggccttctgttaactacactaac

SEQ ID NO: 186716 - DNA, 201 bp, Homo sapiens
gtgctcatatctgactgttaagaagatgtgatgaaatagacacatgcacctatacaaaaaaaaaacatgaatatgatggctgcaaggtcttgggcagcctrgacactatgaatagtgtagcctgagatgatctggtctcagagtgcgaaacagattgtgcttgtatggactttacccaactcccccttgatttacatggtg

SEQ ID NO: 186717 - DNA, 201 bp, Homo sapiens
aaaaggggaagaagttcatgcattacatacaatgtatggcttagagcgttgggaattaacctgattgagaaagataactcaataaaatggcaaaaaattgrggggtgagctttttgtagtagtttccaaattggatcaattacatttaggatttaagtcagaatagaaattttggacatataaaaacatggagatgggaat

SEQ ID NO: 186718 - DNA, 201 bp, Homo sapiens
acagccaggtgggcgggtcgggcgggcgggcgacccgggccccgcgagccggaagtgcccccgtccctgcgcctcgtccccgccgggagcccgggagttcrggagccccggagtggcgccctcagtgcggcctgtgcggcccgggaggggctgttgccccggggcccagagagaggccggaggtgcgggactcggaccacg

SEQ ID NO: 186719 - DNA, 201 bp, Homo sapiens
gacccaacaattcagtttgtaggaatttaacccaagtagatgaagtgatgcaaagttttatatatgtggatgttcgtcgctttgccatttataatacagamaaatagaagctgttcttggtgtttaataatgggaggttaattgtatatccgtttgattaactgttgcacagcatttaaaaattagaaaagcagatcagaa

SEQ ID NO: 186720 - DNA, 201 bp, Homo sapiens; identical to SEQ ID NO: 32540

SEQ ID NO: 186721 - DNA, 201 bp, Homo sapiens; identical to SEQ ID NO: 32542

SEQ ID NO: 186722 - DNA, 201 bp, Homo sapiens
aaggaacacaggaagaataaaccagaaatgaatgagattttgatttgtggtttacagaaaggaggtggagtgggagacctaggtagaaggaatgggtaggrgagtgtgacacttctcggagtatacttgtctgtgtacagttccgactctgaaccaggttaaacaatgaaaaagaaagaaggattggtggggtttgggtgt

SEQ ID NO: 186723 - DNA, 201 bp, Homo sapiens
ttgggattcagagggtatctggggtcttagcatcagtttgtttttgctttgtgttttaaaactgcaggcgattctgatgggcagcattgtttgagagcctrgctctggaggcagctttgcctctgtgaccttgatggtatggccaggaacccatgcttgttgaggtgggtagctcctagcaaagactgaggcatttgttaa

SEQ ID NO: 186724 - DNA, 201 bp, Homo sapiens
aagcggattggtggactgcacattcatttaaggttgaaatgcttagcattgtaaaggtgactgtgaattttaagcttcattctttattgacctggcagatsggagagtgctgtgtcttggtgtaatgaagcattatgttggtacagtgaaaaggaaactgccttcctggctggaattcggtctccctaaaagctcatggtc

SEQ ID NO: 186725 - DNA, 201 bp, Homo sapiens
agggttcttgagcagcctcttcagtgtcctctggagaagctcagcttctgatggtatatggaggaacccagcggcttctgggatcccagcctatgagtaaytcgagttacttagcacagtggctcgaaattccttctggtgatcaaagaacccacaaaacagaataggaggcagcgccccatgcccttgtcagtgaggcag

SEQ ID NO: 186726 - DNA, 201 bp, Homo sapiens
ttgagtgcagccttgtgagagaccctgagctaaaggcatcctgctgagccaacccagactccaggcacacggaaatcgtgggtttcttaagttgtctcggkctgcttagttttgcgttcatttgttacacagcaatagataagtaatacgctctcttaaacaacttagagtctctgctgacttcccctacctcgtcccatt

SEQ ID NO: 186727 - DNA, 201 bp, Homo sapiens
ctccatccctcccacccccacatacagaaaataactatgaaaactgggtataattcagaaagcagctgcctgaagccattgagagtgagcagaagcaggcmagtttatggtgggagaacctcgttgggacaaggtgggtcttgagctgcactcttgagctgcaccaagtaagctcagggccaagggcaggtggtgcagtga

SEQ ID NO: 186728 - DNA, 201 bp, Homo sapiens
cagcccccgctgccagtcctccaccctttggccacctcacaccatctgcaggcatcgtgttcaatagcaggtgaggtcactgaagcaggcattttgaaagkttagagactaattatgaccagagcattgtttcatgggtgtcttacatgggaaagaggtcttttaaaattatttgacttctgaaccacatttctccaagga

SEQ ID NO: 186729 - DNA, 201 bp, Homo sapiens
ttttatgtcatttaataagttgtgcatacatattctaagggaaattatgagccgcctgattcattacacatttttccaacttgtaattatgttggcatcaratgttggcatcctttgaaagaactggcatattacttgatcattgtaaatctctcagtacttttaacaaaatggcattagaaccattttcttcaaaatttc

SEQ ID NO: 186730 - DNA, 201 bp, Homo sapiens
gaagtcatatatcaccagcaggtgtcttttatccgtgaaattgttctagtctctaacttgctgcttattgtctagaagctgtatccccagagtcatgctgyggcattgccgacgtctggagatggtggagatgcatatgtggcctgcaggtgacatcaggatcagccaccagtgctctgccttacgctagctctgccagag

SEQ ID NO: 186731 - DNA, 201 bp, Homo sapiens
ccaaatgttatttttagaagccttctcacctctttccccatcctttgggatttcttttttctttccttaaactctgttttgccttctcaaatattgcaatmaaaatcagtaccatcccaatattagttcaatatgtaaagcagattttgtatttgctcttaggataggaaaggcctttctaagcttataaatccaagggaa

SEQ ID NO: 186732 - DNA, 201 bp, Homo sapiens
tgccaaatgttatttttagaagccttctcacctctttccccatcctttgggatttcttttttctttccttaaactctgttttgccttctcaaatattgcartaaaaatcagtaccatcccaatattagttcaatatgtaaagcagattttgtatttgctcttaggataggaaaggcctttctaagcttataaatccaaggg

SEQ ID NO: 186733 - DNA, 201 bp, Homo sapiens
gcttaaatggaatttattcacagtgctgttatatcaatatatgcgttattattttaggattagatttccatgtataacaagaatgttgttattgtcttcayaggggattttattattgccattctagaatggaccttttatttcttcgccatctccattttctccttcattaactaagaagcaaattagacttgcattgag

SEQ ID NO: 186734 - DNA, 201 bp, Homo sapiens
cttctgcgtcagcgacagccaggtgggcgggtcgggcgggcgggcgacccgggccccgcgagccggaagtgcccccgtccctgcgcctcgtccccgccggsagcccgggagttcgggagccccggagtggcgccctcagtgcggcctgtgcggcccgggaggggctgttgccccggggcccagagagaggccggaggtgcg

SEQ ID NO: 186735 - DNA, 201 bp, Homo sapiens
ggcagtgctgaggcacaccgacacccacagccccatgctcacgcgtggcctggtgaaaacctaggaagtccatgctcttgcgacgtgttcagtgcttcttsgccctggaaagttccaatgttgaaatgtggctgcactcagtgctgcctgtggatggaattatgaactgtgaaggccagcttcattctccctacatggtcg

SEQ ID NO: 186736 - DNA, 201 bp, Homo sapiens
gaggactgctctcggaggaacatccaaaactgagccggacctgcactcagagtggacgtggcagtgctgaggcacaccgacacccacagccccatgctcaygcgtggcctggtgaaaacctaggaagtccatgctcttgcgacgtgttcagtgcttcttcgccctggaaagttccaatgttgaaatgtggctgcactcagt

SEQ ID NO: 186737 - DNA, 201 bp, Homo sapiens
ggatccttttaataacacactcattttatataataatatccaactgtaatgcagtacataaacctctctcccagaccctacccagagctcctcctcccacrctcattactgctctggtctgtagcaggaactttaatcttcctctttgcattttaatgcttatcataaaaaacgttatgagaagttccaggcagtttcatt

SEQ ID NO: 186738 - DNA, 201 bp, Homo sapiens
ccccttcaggtgcacttagaactacctcccagctccaacatagtgcaaactccagaagattttaacttgctcaagtcaagcaattttagaagatacgaagwccttagagagattctgacaacccttggcctcagctgtgacatgaaacaagttcctgccttaactcctctttacttgctgtcagctgcggaggtgagttgt

SEQ ID NO: 186739 - DNA, 201 bp, Homo sapiens
cctgaatgaatgatgaacagtaataatgctgacatgtggcctagcatgtggcctccctccgtagcttctatcatttcaggaggctcgccttgggagaatcrggctccaggtttattccatgaataaagagtgtctctgtggtccacagcctttgttggtcctggtggtctctgtcctcaggttttcatgctcttgcgtaag

SEQ ID NO: 186740 - DNA, 201 bp, Homo sapiens
gaacctcagtttttgaggtagttgcaaaaactttcagtgagcacctactatgtataggcacaatgctaaataccagggatatgaaggtgaataagagagcmccaatatcaaatgtttgtagattgcatcatattgtaaatgtacgaggaccacagaatttgagagatggaggggaagttagagatgatctggcttgtgtcc

SEQ ID NO: 186741 - DNA, 201 bp, Homo sapiens
tcaaattatcccagatttggtttgaaaagtaggctcccatctccttttgacagggcctcttggatctttgatcacttcctcactctctggcataataaggyattccaggcgtaaccttgtacccagctctggaatgagctgtttttatattttactttctacatttttagaaggaactctggttccttttagtggggaatg

SEQ ID NO: 186742 - DNA, 201 bp, Homo sapiens
atgatctgcccgcctcagcctcccaaagtgctgggattacaggcgtgagccaccgcacctggccaatttttttttcttttaagcagtgtgattggttttcyctgagtacggaagtctcagtcccagaatatgttcagattggcagaggagaaattcggttgtcatgtgactcactggcccctcatggagcttttagccaca

SEQ ID NO: 186743 - DNA, 201 bp, Homo sapiens
aggaggtgaggacagtgaccatcaagagaaaactctattctattctttctgagcctccaaagaccaccacatgaattaagccctactctgggaaacccacrctgacctagcactgggggcacatttttccaccaggtggctttaggggagggacctggcagaatcgaaaatttggaggagaaaatgctctccatgtgagtg

SEQ ID NO: 186744 - DNA, 201 bp, Homo sapiens
ctatctttccccttcaggtgcacttagaactacctcccagctccaacatagtgcaaactccagaagattttaacttgctcaagtcaagcaattttagaagmtacgaagtccttagagagattctgacaacccttggcctcagctgtgacatgaaacaagttcctgccttaactcctctttacttgctgtcagctgcggagg

SEQ ID NO: 186745 - DNA, 201 bp, Homo sapiens
atttgagtgtgtggccctggcatgacgtgtgtctgcgtctgtccacgtggcaaggtagcatgtttcccactgtggcctgtgttccaggacggggagggaawgtgtggctgagccctgtgggatgtgctctttctactctgctcatctccattccactgagatcccagctgggacagaggatcccgtttgtccagcatctga

SEQ ID NO: 186746 - DNA, 201 bp, Homo sapiens
gtttctgcttatcttcccttagctcagtgacttgcctgggccccttgtgtcctgtgacggcttaattaatgtgcagatttccctttaggatatcaacttaygagtgaagtggcccaacgatatttattacagtgacctcatgaagatcggcggagttctggttaactcaacactcatgggagaaacattttatatacttat

SEQ ID NO: 186747 - DNA, 201 bp, Homo sapiens
gtgggccactgctgaggaaggggtgggactggggacctgtatttcaaatgttggcttaaaagaactgaaattcatctaggcttgttaggaactgtttcacragtgtgcagtgtaatacaaaattgaggattttgatagatttcccatctttgttactcttaacgttaaaatcatagttcacagagtgaagttggtgggatt

SEQ ID NO: 186748 - DNA, 201 bp, Homo sapiens
ctgtgacggcttaattaatgtgcagatttccctttaggatatcaacttacgagtgaagtggcccaacgatatttattacagtgacctcatgaagatcggcrgagttctggttaactcaacactcatgggagaaacattttatatacttattggtaagtttcaaaaacctttcccccagcatttttagattaataaaacaat

SEQ ID NO: 186749 - DNA, 201 bp, Homo sapiens
tgatattacatatttcatttatggcattgtggaaagttcattagcagtgcatagcgtgaattgtaacttcatatatacagccattctagaaaatgtggtayagtagaatgttactatttaccctgtgctagttggagatgagggggatatgtggtgggccttgtagcagttctaggacatctgaacagaaagggatttaat

SEQ ID NO: 186750 - DNA, 201 bp, Homo sapiens; identical to SEQ ID NO: 32550

SEQ ID NO: 186751 - DNA, 201 bp, Homo sapiens
ggtgtcagcagggctggctccttctgaggccgtgagagaggctctgttccgggcccctctctctggcttgtagaggctgtcgtctccctgtgtgttcctgkcacctctcctgtgtgtgtgtctgtgttcaaatgtcctcttcttacaaggacacgagtcatactggattaggacccacctgaattacctcatgttaactta

SEQ ID NO: 186752 - DNA, 201 bp, Homo sapiens
agggagagcgcagcttgcaggaaattctcagagtgggagtttttgtgtgatttttttttctttcctttttttgaaaaaaagttaatatcgactcatttggkggggatgtaatgcccttttctacctatcccccaaaggaaagtttgtattcttttcaatgaaaccattttaaaagcaggactgaagccgaaaacgatgcag

SEQ ID NO: 186753 - DNA, 201 bp, Homo sapiens
gcttttcctgagtgccgctttggttccacagtgaatgcactcggctgccactcacagaaagcttttattccacaacctttgccagcaaggaaggaaaatayacagaagcagggaggtaatcattatggaacccccctcctttttgtttttcctttttctttttgtaaggacatcatccgctaaggatggaaatgcatttat

SEQ ID NO: 186754 - DNA, 201 bp, Homo sapiens
gggtctattccttggttgttgggagagagtgtcccgccctttactgtccccactctatggctcccctgccctcttaggtgttggttggcagaatgccagcyttctagtcccctcttcattgtttgaagtcatatatcaccagcaggtgtcttttatccgtgaaattgttctagtctctaacttgctgcttattgtctagaa

SEQ ID NO: 186755 - DNA, 201 bp, Homo sapiens
gtaagctctttgtagtcagccagttggtgcaccatgatggatgcattgattgcagacaaaaaggccttttccagatatgtttctgagaacctgtggctctytaagtgggccaaactaggcatgtaacaaacttctttagtttaacattttctgggtcattgttaaaataacatagcttaaatggaatttattcacagtgct

SEQ ID NO: 186756 - DNA, 201 bp, Homo sapiens
aagcctctggtcttcccgtgttagataacccagaggggctccccggtaatgttcaggtaatccagcttatctcatcagttaggaatttgtctttagatttrctaacagctgatgtaaagaagtcaacaagtcacagattaaacttagagagacacttagaaaaaagtagatgtattctggaaggtgagaccagacaggaat

SEQ ID NO: 186757 - DNA, 201 bp, Homo sapiens
acctgttagtgctttagttaaagacatttagtttaatctgctgtacttaaaactatttgagaaaattgaaatggttaattttaatactacctcatcaatayaataacatacttaaaaaaacttgtattttatcccatgttttaaacatactgttataaaaaccttgatctgcacattttttgctgtcatcagaattttgta

SEQ ID NO: 186758 - DNA, 201 bp, Homo sapiens
acttttaatgagaagtgggacttacctagatgacttatgttctacttaatatttttctatatttttcaaatatgttcactccccaaggtaactgcagctawtattttggtatatttcctaataatttttgttttttttttttgagttggagtctctatgttgcctaggctggagtgcagtggtgtgatctcagctgactgc

SEQ ID NO: 186759 - DNA, 201 bp, Homo sapiens
agcctcccaagtagctggaaccacaggcatgtacctccatgcctggctaaatttttgtattttttgatagacatggggttttgccatgtggcctaagctgstcttgaactcctgggctcaagtgatccacccacctcagcctcccaaagtgctgggattacaagcatgagccactgagcctggcccctgtatttttctata

SEQ ID NO: 186760 - DNA, 201 bp, Homo sapiens
caaaatgttccattttataggtgactggagagactgagagagatggattcccttactccatgttcatatcaacactgggattcgagtccagatctgtcccrttccctgtctgagtctccactctgctgtgatgtttctaaagttccttgggaaccttcctgtagctgccaggaataatatccccagggtccctggctagga

SEQ ID NO: 186761 - DNA, 201 bp, Homo sapiens
ggagtcgtaaaacacacacatttgtccccaccattccattccttccctctgtctccctgacttccctccttatccccaagaggaggaggtaaggggaggcrctgcttgtcttctggcagcaagaagttctaggatcgacatgacagggaccactttgcaaattccatcatatttcatttttactgacactgcacaaaatgt

SEQ ID NO: 186762 - DNA, 201 bp, Homo sapiens
gctgacatggtggccacaagatgcgatgcatttatcaaaacccacagaatgtacagcacaaagcacgaaccctaacagaagcagtgagctgtggttaatartcctataccaagactgcttcagaaatcgtaacaaatgaccacaccacagcaagatgtgaatgataaggaaactgttggggaaggggacatatgggaactc

SEQ ID NO: 186763 - DNA, 201 bp, Homo sapiens
taaagggtcagaaaaaattttaaagaataaaatttatatgacactttgggaaaggcaaaactatagagagagtaaaaataccggtggttgccaaagggttyggggaggggaagggatgagggatgaataagtgaagcacaggggaatttttagggcagggaaactgttctgtgtaatgctgacatggtggccacaagatgc

SEQ ID NO: 186764 - DNA, 201 bp, Homo sapiens
attacaaaggcaatttagtgggaaaacccagcacaaaccacataaccctgtgggtcaaagttaacatccctgatgtcaggagacagcactgcctgcctccygatgtcaggccctgaggtcacaatatcgcttccatgtattcctgctagaaatgcacccctgagtcttataacgggggtatctgattatctaaattgaggg

SEQ ID NO: 186765 - DNA, 201 bp, Homo sapiens
tcaatacaatatttgaatctataccctcaggctaagggcaaaaaaaactgtaaacaaatattgaactctagttagtaagtgtgatttcgcagtaatatggrtcagcactgctgagaccacttccccctgtgtattatggcattgagcaaatgaataaatagtgtagataatgcaagccagatttcccactattggagaaag

SEQ ID NO: 186766 - DNA, 201 bp, Homo sapiens
gcaggagaatggtgtgaacctgggatcgcgccactgcactccagcctgggcaacagagtgagactccgtctgaaaaaaagaaaaaatgaggaaaagctctrtgaacttatttgcagctgctccccagcactagcaacaccgcctcagctccacctcagatcatcaggccttagattctcataaggagtatgcaacctagtg

SEQ ID NO: 186767 - DNA, 201 bp, Homo sapiens
aaaattactttttgcttgatttgacgattgttccaaaaacaagaacatgttaatatacgtattaaagttactgaatagagatcaagattttcttttctttytttttttttttttgagatggagtcttgctctgtcgcccaggctggagtgcagtggcgcaatcttggctcactacaagctccgcctcctgggttcacgcca

SEQ ID NO: 186768 - DNA, 201 bp, Homo sapiens
gatgcttttctacaacaaaaacaaatgttaattccatttggatggaattaatttttaaaaacagcattgccactcagtttttttgaaatgtttacaagttrtatgccaaaaattatattgcactctcatcagtaattatttttattgacttaataactcagttaggtcctccttcagttttgttgaaagcaaagaactgga

SEQ ID NO: 186769 - DNA, 201 bp, Homo sapiens
acagttctcatcaaaagcttaattgtaggatgtgatttttaacatatgacaaatattgacgttcaaagagtctcatgtctttctaaaatttatccaatgartttaaatgccatacctatttgatgcctgccattatccattaaaagttatatgagactcttttttaatagtcaaaatttcacatcgttattttatattttt

SEQ ID NO: 186770 - DNA, 201 bp, Homo sapiens
cagattgtgcttgtatggactttacccaactcccccttgatttacatggtggtcctatctttggaatatttagagtttaataccgctgtacagaaagtacktgctgtgtacccgcaaaaatagaatcagattctcaagtcagatcattgtgaacaagtatttcatctaaatgtgtgtccagtggaatattaaaaatttgtt

SEQ ID NO: 186771 - DNA, 201 bp, Homo sapiens
gagttcaagaaccagcctgggcaacaaagtgagacctcatctctactaaaattaaaaaaaaaaaaatttagctaggcatggtggcatgtgcctgtagtccyagcaggttgggaagctgagctgggaggatcacttgagcctgggaagtcaaggctgctatggactgattgtgccactgtacaccagcctgggtgaccttgc

SEQ ID NO: 186772 - DNA, 201 bp, Homo sapiens
aagtgtctagtttcctgggagggtggaggctgcgtcccagcgttgggctccaggtgagctcagaatgtcttcctctgctgctttgaaatccagttgctgcmttggttacactagtcaaccaaaaatgggatgaaatgacctaaaaaaaatagtttctaaatattatccggcttaaaaattggcctggatttcccttttact

SEQ ID NO: 186773 - DNA, 201 bp, Homo sapiens
ttaatctaattgtagagaacaaatgcttagattgctctaaagacgggaggttggtccctgttaactgtttaagtgatgctcctttgctgctccaaaaattagagtaatatatctgtgtatctggaatgtacgtttcttggtgctgctgtaacaaattcctgcaaactggcagcttaaaacagctgaaaataattctctgtc

SEQ ID NO: 186774 - DNA, 201 bp, Homo sapiens
catttcagagtcaggcctcttcccaggctacctcctagcatgtgactccaaagaagatggtcagcagtttcagattcatttctgaaagtgagccattcacrttggactggatccagtatccactaaaccaacacggagaagtgtgtcattttttcatgaagtggacatgctaatgctgtccattgacctctcgtatttttc

SEQ ID NO: 186775 - DNA, 201 bp, Homo sapiens
tgaagtgagccaagatcacgccattgcactccagcctgggcaacaagagcaaaaaactccatctcaaaaaaattaattaattgaaataaaataaaagcaamattgtaatttagtctcatcatataggaagattactttataatctttataatgacgatatgtcactacttagttttaaaatatgggagacatttattattt

SEQ ID NO: 186776 - DNA, 201 bp, Homo sapiens
ctctactaaaaatacaaaaaaaaagccaggcgtggtggtgggcacctgtagttccagctacttgggaggctgaggcaggagaatggtgtgaacctgggatygcgccactgcactccagcctgggcaacagagtgagactccgtctgaaaaaaagaaaaaatgaggaaaagctctgtgaacttatttgcagctgctccccag

SEQ ID NO: 186777 - DNA, 201 bp, Homo sapiens
ttgaaaaggctacaaaaattgtgagagctgttcctggaatggccttttgaaaatccccttgcatcctggaagaaggatgagcggatggctctaaatctggyattgttggaccaatcgagccaagacggggtttgttgacaggaatgttgctgaagaaccacatggagttgagctgtttgccttcagatttagcagttgttt

SEQ ID NO: 186778 - DNA, 201 bp, Homo sapiens
acctcagatcatcaggccttagattctcataaggagtatgcaacctagatcccttgcatgcgcagttcacagtagggctcctatgagaatctaatgctgcygctgatctgacaggaagtggagctcaggtggtaacgtgagctgtggggagcggctgtaaatacagaggaagcttttctagctttcttactcacctgcctg

SEQ ID NO: 186779 - DNA, 201 bp, Homo sapiens
agcgtgctgctatgactgctggctcttatttattgatcagtgtttataccaaatcctgtgctaaatacttgatttttaaaaaaggatttatgccctccaarcctttatttcaatgtcaaaaatgccatctctctcttctgaacgccaggtcgtcttgcccatctctcaggtttctgtctgaagctttataataaatgatgg

SEQ ID NO: 186780 - DNA, 201 bp, Homo sapiens
aaagatggtcagttctccccaagttaatttatacatttaatgcacttagactaaaaataccatcaaggcttttttttttttttttttgagacagagtttcrcgctcctgttgtctaggctggagtgcaatggcatgatctcagctcactgcaacctccgcctcagctccacctcagatcatcaggccttagattctcataa

SEQ ID NO: 186781 - DNA, 201 bp, Homo sapiens
caggggtctccggactcaaggcgctaaggacaggcatgcgtgtgtggtccatgccccgtcaccctgctgaattggggctggcctctgggaggggcttcccmagacaaccctgcaagcctgtggagcttggggcttgggggtgcaggatagagagcagtctctccgattttctcggactccctgaccaggtcaggggttacc

SEQ ID NO: 186782 - DNA, 201 bp, Homo sapiens
aggaggcccactgtctccacctctgtttggcattgtactaaaggtattagccaatccaaacagacaagagaagtcaattaaaggtatcattgaaaaagaartaaaactatctgtttgcagaggaaatgagaaaccttaaagaatcagtgattctctaactcaaacaataagagaattcagtaatagagcaggatataaaat

SEQ ID NO: 186783 - DNA, 201 bp, Homo sapiens
caggtaatccagcttatctcatcagttaggaatttgtctttagatttactaacagctgatgtaaagaagtcaacaagtcacagattaaacttagagagacrcttagaaaaaagtagatgtattctggaaggtgagaccagacaggaatttctttgggatcttcatgaaagaattccatgtgagaacgaatggcatcctcag

SEQ ID NO: 186784 - DNA, 201 bp, Homo sapiens
ggtcttagcatcagtttgtttttgctttgtgttttaaaactgcaggcgattctgatgggcagcattgtttgagagcctagctctggaggcagctttgcctytgtgaccttgatggtatggccaggaacccatgcttgttgaggtgggtagctcctagcaaagactgaggcatttgttaaaattgagcaaaaagtattaata

SEQ ID NO: 186785 - DNA, 201 bp, Homo sapiens
cattccctagctggacagtcatggattcagcagaaactgggagttctgttcttgtaagggagaaagaaaggctagattttgggagataattagcatctctrtcacagctatcatttcagttaactgactttccaaggaagatttaattaagaccttcttgctgaatggtggttacttaattcttttttttttttttttttt

SEQ ID NO: 186786 - DNA, 201 bp, Homo sapiens
atttgtgcatatcagaacagtgtcctcactttacactgtttgcaatggacatgcgtgactttcagttaatgtgggaccatgcaaagtgagaactgcctgcmttagcaaattactaatttaaggtaatcaaagtaagatgctgcctggagaaattaccttgtatgtatgtctgtgtgtgtgtgtggttttacgtgctagtaa

SEQ ID NO: 186787 - DNA, 201 bp, Homo sapiens
gaataggactagtgaggagagtctagcaaggagacggaggttctctgtatctctcctaccccactcctgccttctgccattccacctacagctttggaatmggatcgaacaaacagaaaggttaaagaaagggaagaagaaaggatcttgagggtttgttcatgttctcctttgggaatatcgctgaagcaactgacctgg

SEQ ID NO: 186788 - DNA, 201 bp, Homo sapiens
aatgatggccagctaaaaactgggcttttatggggaaaacaggatcactctgctttgttgaggggagcttggatgaagccaccagaacttgggccactgaratgccatcctaggagtgggagctctgagcaggagccccagcgagggccctggaggtttggggtgggtgaacaaaggaggatcgatgtgaggacattggca

SEQ ID NO: 186789 - DNA, 201 bp, Homo sapiens
aatttttctgtcaacataaccaccattgggagaggtgaaaaattgagaaaatgaatagaatgtgtttaacttattttcacactcattttattgaagctctytgtaaaaataaacccaggtggacggtaattgattgagtgataatttctaagtagcaaagtgttaaagtagataagtgcctcctactgtggagaaactgcc

SEQ ID NO: 186790 - DNA, 201 bp, Homo sapiens
gtgcatggacttgagggcccctgggaagctgggtatggtcctctctgccaggagagaaagcctctggtcttcccgtgttagataacccagaggggctcccyggtaatgttcaggtaatccagcttatctcatcagttaggaatttgtctttagatttactaacagctgatgtaaagaagtcaacaagtcacagattaaact

SEQ ID NO: 186791 - DNA, 201 bp, Homo sapiens
tgtgcatggacttgagggcccctgggaagctgggtatggtcctctctgccaggagagaaagcctctggtcttcccgtgttagataacccagaggggctccmcggtaatgttcaggtaatccagcttatctcatcagttaggaatttgtctttagatttactaacagctgatgtaaagaagtcaacaagtcacagattaaac

SEQ ID NO: 186792 - DNA, 201 bp, Homo sapiens
tcacgccattctcctgcctcagtctctcgtctcagtcacctgagtagctgggactacaggtgcccgccgccacacccggctaattttttgtatttttagtrgaggtggggtttcaccgtgttagccaggatggtctcgatctcctgaccttgtgatctgcccgccttggcctcccaaagtgctgggattacaggtgtgagc

SEQ ID NO: 186793 - DNA, 201 bp, Homo sapiens
ccctggaacttggatgacacagaggcacggtaaatatttgttgagtgagtggatgcatttcataaacatattcagtgctgtttcaatcgtttccccccaawcttctgttttctgtaagacattgatctttccaacctcagttttatcagtcatggcatctcttggaaacaaagcttggtggtgaggacagagtcccatcct

SEQ ID NO: 186794 - DNA, 201 bp, Homo sapiens
atgtgatctgtctctgcttagtttcctcatttgaaaaaaaggaatagtaatgcctactcagaataaggttgaaatcaaacactatattagacacaccaaabcaggtgctcaattaaaagtaacccctcccactgcaaaatgtactatatatagggttcgtgtgtgcacacatgcagggaacccgagcattctcatccagct

SEQ ID NO: 186795 - DNA, 201 bp, Homo sapiens
gaaagaagtcagacacagaagaagaccacatgttgtgtgatttcatttataggaaatgcctaggataggcaaatccatggggatagtaagtataatagatyagtggttgccaggagattggttgaggggggtggaggagagaggaatggggagtggctgctaatgtgtgagggatttcttttgggggtgatgaatctggaa

SEQ ID NO: 186796 - DNA, 201 bp, Homo sapiens
tgatacaaagagaatcttgaacaagtttaggcattttgcagtaattttcagttttcattactatgctgaaaagatctatctgtatgatatccagagatgtkgttgctgcagtgaggtctttaagtgcaaatctaatcacgttccttcctttctcaaaaactcacaggctttgcatttcagaacctacaaaatcccaaccct

SEQ ID NO: 186797 - DNA, 201 bp, Homo sapiens
aatgatacaaagagaatcttgaacaagtttaggcattttgcagtaattttcagttttcattactatgctgaaaagatctatctgtatgatatccagagatrtggttgctgcagtgaggtctttaagtgcaaatctaatcacgttccttcctttctcaaaaactcacaggctttgcatttcagaacctacaaaatcccaacc

SEQ ID NO: 186798 - DNA, 201 bp, Homo sapiens
tttgataaaagcaaaagattctttcctagtgagtcagaagatgggcctctgagccaggcaaacctggttgactgttctctgatctcaccaggccacttctscggtgtagcttccacttatcagcagtaaaatgagactacttggcaatgatgatgtcttgagagtcactgggacatttaaatgagaacatggctcatacca

SEQ ID NO: 186799 - DNA, 201 bp, Homo sapiens
tgataatttgattcctttgaacacacttacaagagtgatataatagtttcatttaaatgtcaatattgatcccaaaccagaaattgcatcctttgcaactrtcctagcttagacggaaaacttttatgtgaacttaaaaatatgcagggctttcatagttttttttgtaattctactaggggacatttaagccaaaggttt

SEQ ID NO: 186800 - DNA, 201 bp, Homo sapiens
aggtgactctgtttcagttctcagaaaaaaagataaagcaagaaccccattttgatgttattatttggaagtcaatttccagatctttctagaaagccttrtagcctccaggactgttaaacttacacaaatgcattttaagaggctggccggccgggcatggtggctcacgcctgtaatcctagcactttcggaagctga

SEQ ID NO: 186801 - DNA, 201 bp, Homo sapiens
tgagccacgaaacccagcctgttcatgcactttagatgatggtggataacacatttttatgataatttgattcctttgaacacacttacaagagtgatatmatagtttcatttaaatgtcaatattgatcccaaaccagaaattgcatcctttgcaactgtcctagcttagacggaaaacttttatgtgaacttaaaaata

SEQ ID NO: 186802 - DNA, 201 bp, Homo sapiens
gctggagtgcagtggcacaacctcggctcactgcagcctccatctcccaggttcaagtgattctcctgcctcagcctcccaagtagctggaattacaggcrcacgccaccatgcccagctaatttttgtatttttagtagagacaaggtttcaccatgttggccaggctggtctcaaactcctgacctcaagtgatccgcc

SEQ ID NO: 186803 - DNA, 201 bp, Homo sapiens
aaaagatttatgtgtttggttgggggaggggaaattaaacttctcataatagtttttaaattaaattttgtgctcgtccaaatcctttccttctccacccyttcctctgatattcccttactcattaaagcccaggattttgatggtattcacagggaagctgatttactggaataaagaagttctttaagttttaaattt

SEQ ID NO: 186804 - DNA, 201 bp, Homo sapiens
gggtgtgctgggccccgaccacccctgccgaagtgagccatccccgcctggactctgacacctctgttgtccctactccttaagaggcccaaggcctcatrtcactcgttatccttcccatcaatgtcttttctccctggttgattacacattcggtgagaatgcaattttgcttacgatttccttggatcctcccatata

SEQ ID NO: 186805 - DNA, 201 bp, Homo sapiens
gggagtgaggtgtgcccatcagctctgccagtggcacgtgccccttagggacattcaggaagacgcttcaccgagcatttggcatgagtgtggagaggacstgtgcacagaacagcttcaggaagacaaaatgccacctctaggaaacatcttggttttaatcttttgtggggagtggtggccccacagttttgtagaagc

SEQ ID NO: 186806 - DNA, 201 bp, Homo sapiens
ttggctaggatggtcttgatctcctgacctcgtgatgggcccaccttggcctcccaaagtgctgggattataggcatgagccactgcgccaggcccaaaayggtttttaatgataatacccagggtgggcaaggatataatgaaacaggtacttttaagccttgttcaaaccccagtgggagtgtacattagagcaacctc

SEQ ID NO: 186807 - DNA, 201 bp, Homo sapiens
tctcgcaaatgctgaaagcggtctcactgaacagtcaccgctgcccagagccctggatgtgtgggttggtgtgtactcggctccggcaggggtgggggtcygcatgttgttgccccggacatcctatgtggggtttccttatgcgattcttgctacttggtatgtatttgaattgtttttacaacagaggacgcttcttag

SEQ ID NO: 186808 - DNA, 201 bp, Homo sapiens
ttcaggcagatgggcttttccgtgcctgaaaaaggcaactcgatttactgggaaggaactccccaccccgactttgtgtaatagtttccccacgaagagcrctcatgaggatgaagtgaaagcgcgttgcccttctattcccttcctgttcactctgcccaggtgggcagttgctgggtcacaatagtctgcactcttagc

SEQ ID NO: 186809 - DNA, 201 bp, Homo sapiens
tcattctatgcgactgtttttatgtttcttcactgactctgcacccagaaagcaggattactgttttacttgttccatgtcatgcctgggagaataatgtrcactcatatttatgactgaacatacatttctgtctcatgggatttggggaatttgtagcaattaagaaatggtgaagccaggctcagtggcgcgatgtag

SEQ ID NO: 186810 - DNA, 201 bp, Homo sapiens
cattataggtgtgagccactgtgcctggtccgtattgctgttttatcaccagctacctgcagtgcatttgggctaaacatgtcgtttgcataaaaccattytaaaaatcacaaattgacctgcaaagcaaggtgtatcaacagaggggcatggcagcttcatgggacccccctataggagactcaatcctgggtgcctcta

SEQ ID NO: 186811 - DNA, 201 bp, Homo sapiens
caataagagcatgctacgctttgtttagctgctagctgtttccttcctaatggatagttagctgatttctgttgtttttctctgagaaccaatgttgcaaygcccatcgaggaactctgccccccagatatatgtacatgtgtgatgtttctcttttatgggaactgggtcatcaagcatgtgtctttagtctggatagct

SEQ ID NO: 186812 - DNA, 201 bp, Homo sapiens
caaactcctggcctgaagtgatccttctgctttggcctctcaaagtgctggcattataggtgtgagccactgtgcctggtccgtattgctgttttatcacmagctacctgcagtgcatttgggctaaacatgtcgtttgcataaaaccattttaaaaatcacaaattgacctgcaaagcaaggtgtatcaacagaggggca

SEQ ID NO: 186813 - DNA, 201 bp, Homo sapiens
ccacctcaatgaaaaacttagaggaaaaaatagaattggtcattaaaattgttacgttctatagattatcagctttcaattgtatgagtaatacatggatrtattttctgttcatatatttaaaagtgaaatctaaagttttccctaatcccatctgtcttgttttgcctgtgcccttcctttctctcattcccacctcta

SEQ ID NO: 186814 - DNA, 201 bp, Homo sapiens
ttttatggaaagatatattgactggaatcacttagaatccaaatgccacctcaatgaaaaacttagaggaaaaaatagaattggtcattaaaattgttacrttctatagattatcagctttcaattgtatgagtaatacatggatatattttctgttcatatatttaaaagtgaaatctaaagttttccctaatcccatct

SEQ ID NO: 186815 - DNA, 201 bp, Homo sapiens
ggatggacttctcccaggttccggagaccctgagatggggacaactgcccacactcacatggtagcctggtggaagaatgcttgtacggtacaacgctccktggggacaaagtcgtcgtgccagccaattgttttttcccctttccagagtgtgagtgccagacaatgttctcatgacgccttttttttttatgactattt

SEQ ID NO: 186816 - DNA, 201 bp, Homo sapiens
taccaggaaggccccgtccggctcagccccggcaggctccagggccacctggagaatgaggacaaggacaggatgattgtgcatgtgccttttggaactcrcgggggagaagctgttctttgccaggtactcagggcagcatggatttggtgatctttgggtatctgtgggtatttttgcgagggaatatgtcttttaaag

SEQ ID NO: 186817 - DNA, 201 bp, Homo sapiens; identical to SEQ ID NO: 32549

SEQ ID NO: 186818 - DNA, 201 bp, Homo sapiens
acattatagttaatgtgttgcttcacgacagatacacattgtgagaaatgcgtccttaggtgatttcatcatgcaaacatcatagagtgtacttatacaartctagatgctgtagcctactttacacctgggatttatggggtagcctattgctcctaggctataaacctgtacagcatgttactgcattggatactgtag

SEQ ID NO: 186819 - DNA, 201 bp, Homo sapiens; identical to SEQ ID NO: 32551

SEQ ID NO: 186820 - DNA, 201 bp, Homo sapiens
tatggctaggcgccatggctcaaacttgtaatcccagcactttgggagatccaggcaggagtttgactgctcgagaccaggagtttgagaccagcctgggygacacagcgagaccctgtctctatgaaaaataatttctaaaaaattagctgggcatggtggccaggaagatcacttcagctcagagttcgaagctgcaga

SEQ ID NO: 186821 - DNA, 201 bp, Homo sapiens
ctttttttattttcactttttttttttttagagagggtcttgctctgtcactggagtgcagtggtgccatcatagctcactactgaaaccttgaactcccrggctcaaatgatcctcctgcctcagcctcccaagtagctgagacaataggagtgtgccacacggcccgctaatttaaaaaaaaatttttttgtagaggca

SEQ ID NO: 186822 - DNA, 201 bp, Homo sapiens
aaaaatctatcgctatatgcaagggggaaaatatactatgttatctaaccaaaagtctgaagttctgggagtgggtgttctatgcagctatattaaagcasatgaacaaatggccaaggtactttaaaaatctatctttatggctaggcgccatggctcaaacttgtaatcccagcactttgggagatccaggcaggagtt

SEQ ID NO: 186823 - DNA, 201 bp, Homo sapiens
ggacagaaatacatgtcactcttcaagtggttagagacacgaaatctgaaatgaggacaaggaaggaggaagttgacagtcaagactgtaactttttccakgtggcagagaggaatgtgtgatgccatcaacaggctgagctgctcaattgtttgtttttgtccaggctgtggatttaatgtgactaacagtaaccctacc

SEQ ID NO: 186824 - DNA, 201 bp, Homo sapiens
ttctttttggattttctctcttttaaaaatctatcgctatatgcaagggggaaaatatactatgttatctaaccaaaagtctgaagttctgggagtgggtrttctatgcagctatattaaagcagatgaacaaatggccaaggtactttaaaaatctatctttatggctaggcgccatggctcaaacttgtaatcccagca

SEQ ID NO: 186825 - DNA, 201 bp, Homo sapiens
ttttattctctcctggactcagtgcagagctacaatgcttggtagaccacttatttcagaggcaacactgatacgttttgtcccatatttaatagcttctrttgaattaaattgaatcaaatgtggctttcttttttcccacctttttatttgcagtaaggttgagatggttttagcttgaacaagaataataaaagaagg

SEQ ID NO: 186826 - DNA, 201 bp, Homo sapiens
tgtctctctctcctattcatgccttagcggtgcacttgcaggactccactctgaaggaagttaaggatcaggtctcaaacaagcaagcccagatcctagakccgaagcctgaaccttctcttgagattaagcctgagcaggacggtatggagcatgttggcagagatgacccaaaggctcttggtgaagaacccaaacaaa

SEQ ID NO: 186827 - DNA, 201 bp, Homo sapiens
ttagtgtttccaaaggatgcccccgagttgaggggggatgcaggtgggagccgtgccagaggctgtcctggaatgtaagtcccagaatgcagagagggtgrtgagattcttgagatgagctatgtgtcatacaagaagtgttgattaattttctgtctctctctcctattcatgccttagcggtgcacttgcaggactcca

SEQ ID NO: 186828 - DNA, 201 bp, Homo sapiens
acgtagtctttgttgcccaggctggagtgcagtggcacaacctcggctcactgcagcctccatctcccaggttcaagtgattctcctgcctcagcctcccragtagctggaattacaggcacacgccaccatgcccagctaatttttgtatttttagtagagacaaggtttcaccatgttggccaggctggtctcaaactc

SEQ ID NO: 186829 - DNA, 201 bp, Homo sapiens
caaacctgcctcagagccattcctttaaactggcgcgcattctggggcacataagtggggagtggtggagttttcagacccttagcctccacgtggactcytgcctgagattgatccgcccgagcagatgtcagtggtgggggtatcagcctgttttcttctcccacccactgccacgcaccccaccctgccccgccccac

SEQ ID NO: 186830 - DNA, 201 bp, Homo sapiens
gcccaccttggcctcccaaagtgctaggattacaggcgtgagccactgtgccggccagcctcctcatctttaaatgtacttcccggttagctactgtgtgstaagcagtgaggaatggcggggataggccccgtttcagaattcatggcttgaaaacagtggtctagagatattaaagctgtcctgagtcatcgatgggct

SEQ ID NO: 186831 - DNA, 201 bp, Homo sapiens
ttatttaatcaggaatcaaaagcgcatgaggggttcaagtccaactgcaaagcttggggttctggaggaccacagatgcagctgcccccaaggatgctgarcatgtgactacacatgcaaatgaaagggaaacaaaaccaaatggatggggtgatgggcagagttaaggtctagacagcattttgagatctttgctgtcct

SEQ ID NO: 186832 - DNA, 201 bp, Homo sapiens
ccagggatatgagtttctgaattctcaacctggtgcctttgccagagaacaaagtcaggttaatcagacgtcttcccctctccagcccaactcattcgctrgctgacctctcctggtcccatggttctaagaaccatctccacgataatgattcccaaatgaatatcctagcccagacctctccctcccactccagacttc

SEQ ID NO: 186833 - DNA, 201 bp, Homo sapiens
acctctgttctttctctttaagtaggggggttggatttgttctgtgagtctgtgattttaacccagatgttataaacacaagattaaggacatcaatacayttaagatggaggattaacaaaataaggatatggtatctagaagaaaatttattttagggtggataatttaattgtactaagcaagtctggtaaagatgag

SEQ ID NO: 186834 - DNA, 201 bp, Homo sapiens
ggtccagagccgtggctgggtggccgcagctgcacctgggagcatggggctcctgcccagccgacttggtagggggcagggctcccgcccattcctggccygtgttagctccatggagtgcagcagccctggccacacctcccccattgcagctggtgtccccacagtggctgctccagatgggccaccacgtcctcacta

SEQ ID NO: 186835 - DNA, 201 bp, Homo sapiens
attaaaagatgcatttctagggttatgccatgaccaaggtttgaaatctctgagtccagagtttacttcccaagtcctgaataaaactctattttcaagcrtgggatctgttattcaagcaggagaagaaaccagagattttattctctcctggactcagtgcagagctacaatgcttggtagaccacttatttcagaggc

SEQ ID NO: 186836 - DNA, 201 bp, Homo sapiens
agaataaagtattaaaagatgcatttctagggttatgccatgaccaaggtttgaaatctctgagtccagagtttacttcccaagtcctgaataaaactctrttttcaagcgtgggatctgttattcaagcaggagaagaaaccagagattttattctctcctggactcagtgcagagctacaatgcttggtagaccactta

SEQ ID NO: 186837 - DNA, 201 bp, Homo sapiens; identical to SEQ ID NO: 32545

SEQ ID NO: 186838 - DNA, 201 bp, Homo sapiens
gaaaacatggtagttttcttactgcttagtttttgcagtatttcatttcttactgaagacctctcgcaggccgattcagggccctgctgaacactgaagtycagcttttctgaagacaccgccctctgcctggagaggatagtggtgttaagtaactgcacagataagcctattcagacaccatccctggtaactctcatg

SEQ ID NO: 186839 - DNA, 201 bp, Homo sapiens
gacaattgctttttattttaatagccagtatattgttttaaaatctgagaccagtcaatccttcccttcacactggaaacggcaggacacttgccgggaakgctgttgttacaaatggcattgttctgcctgtggcgaatgttttggggattttttttcttaaagtcactgaaaacatggtagttttcttactgcttagtt

SEQ ID NO: 186840 - DNA, 201 bp, Homo sapiens
cctgtatgtattgaatgaatgaatacgtgagcaactgcaagtcctgcccctgttgctgtagttacttgtcttttttccagaggtaattgacaattgctttktattttaatagccagtatattgttttaaaatctgagaccagtcaatccttcccttcacactggaaacggcaggacacttgccgggaatgctgttgttaca

SEQ ID NO: 186841 - DNA, 201 bp, Homo sapiens
gccttacgaacgttcagtaggtgcttcagatcctgtatgtattgaatgaatgaatacgtgagcaactgcaagtcctgcccctgttgctgtagttacttgtyttttttccagaggtaattgacaattgctttttattttaatagccagtatattgttttaaaatctgagaccagtcaatccttcccttcacactggaaacgg

SEQ ID NO: 186842 - DNA, 201 bp, Homo sapiens; identical to SEQ ID NO: 32552

SEQ ID NO: 186843 - DNA, 201 bp, Homo sapiens
gcagcgagcctcagccctctccccagcacgcccagctctctcatcatggattattcttcagctcattgtcttaagtcgtcctgtgacacctcccagtgacygcacgctgttcttccttttcagtggtcagcaagtccatctgggcagcgcagagggaccaaaggtgtccatcgttggcctggacgattctggcttcctcca

SEQ ID NO: 186844 - DNA, 201 bp, Homo sapiens
tccttgcctcagcctcccaagtagctgggagaacaggtgcccgccaccacacccagctaatttttttgtatttttagtagacacagggtttcactatgttrgccaggctggtatcaaactcctgaactcatgatccgcccgcctcggcctcccagagtgctggcattacagacgtgagccacttgcccagtctcccccatt

SEQ ID NO: 186845 - DNA, 201 bp, Homo sapiens
tcagcccaggctgccttttccctgcagcgagcctcagccctctccccagcacgcccagctctctcatcatggattattcttcagctcattgtcttaagtcrtcctgtgacacctcccagtgaccgcacgctgttcttccttttcagtggtcagcaagtccatctgggcagcgcagagggaccaaaggtgtccatcgttggc

SEQ ID NO: 186846 - DNA, 201 bp, Homo sapiens
gacggtttatgcatgcctacattggcaggagcagattatcatatgaggttactttgagtcttgtagttttggagcagggtatagatgcagagagattggtygaaagcacttcacagggtttagcattttctgtgtgtgaccacgggaaccaccaaagtggtatcacatcaaacaggtatgttcctacatccttccacactc

SEQ ID NO: 186847 - DNA, 201 bp, Homo sapiens
gctgcctgaaaaagaggagaggacgaggcccatgttaccttggtttctgcttatcttcccttagctcagtgacttgcctgggccccttgtgtcctgtgacrgcttaattaatgtgcagatttccctttaggatatcaacttacgagtgaagtggcccaacgatatttattacagtgacctcatgaagatcggcggagttct

SEQ ID NO: 186848 - DNA, 201 bp, Homo sapiens
atcttatctcaggtttgaacattgcctggaggctgtgcttagatatgggttgaaattgtgccactagcaaataaaaaatactctttcttgttagtaccatrtatgtattatgtcacactgaatatgaatgactgttttctcaggtcccccaaggtactagttatgcaaataactagtaccacctccacataactgacacta

SEQ ID NO: 186849 - DNA, 201 bp, Homo sapiens
gcaccagctgccacgcacgtggcggaggagcttgacagctctgggaactctgcaggtgtcctcccgccggcgaggcaggggctcattcccctggccatgtrgtgggcacagggggatgtgggaaggcgagagaggggaaggaaagggaactgggggcagtgatgaagagcagagcctcctagacacaggtttcctagagga

SEQ ID NO: 186850 - DNA, 201 bp, Homo sapiens
gcttgtacggtacaacgctccgtggggacaaagtcgtcgtgccagccaattgttttttcccctttccagagtgtgagtgccagacaatgttctcatgacgycttttttttttatgactatttttattttggtcatcattttctttatattttatggaaagatatattgactggaatcacttagaatccaaatgccacctca

SEQ ID NO: 186851 - DNA, 201 bp, Homo sapiens
cggggagatgcagtggtccagacgcagcttctcagaggggtagctgggtgtgtgtccaggtcactggtggccagaggctgcactcctaatagcagtactgsggcgagacacaaaagcaaccaggtttcgctgctgacagtccttcagagtcaatttctgaagtctcttaaatgaaaaacatgcatgctttggtgtggaatt

SEQ ID NO: 186852 - DNA, 201 bp, Homo sapiens
atgattttcacatctgtgtgtttaagtgtttggggttttttattttcttgtccactatctggttgaagaattgagattatactagaatcatgaagcgagtyaggcaactttccctcattttctaattcgtgggacataatgggctgtgtttagagttacagattgcaactattttgagtcccaggtgtgcttggtttacta

SEQ ID NO: 186853 - DNA, 201 bp, Homo sapiens
ttgcattattgaaaatactctcattaatgtatattctgatgtaattttactctataattgctcaaaagagcctctctaaggctccagttgaaggtggagtsgggggccagggctggggtgtaggtgctaaattttcctccttcttagatgccattttccaaacccttctgcccaggtcttttaaaacagttggaccagacc

SEQ ID NO: 186854 - DNA, 201 bp, Homo sapiens
atacaaaaattagccgggtgtggttgtgtgcacctatagtcccagctacttgggaggctgaggctggagaattgcttgaacctgggaggtggaggttgcartgagccgagatcactccactgtactctagcctgggcaatagagtgagactccattgcaggaaaaaaaaaaaaagatcatgataaaaagtcactttaataa

SEQ ID NO: 186855 - DNA, 201 bp, Homo sapiens
attttaaaaatctaaatttgtatgcacataaagttttcatttctcacacctcatatcatgcagcctgctgtcatggcctttccaagtgtgtgcggaatacraggctccctgctgggcacacggccggtctcagggttgctgtaaaatgttctacctcgtgttaaaaagaaaagatataattagcagcgtttgcattattga

SEQ ID NO: 186856 - DNA, 201 bp, Homo sapiens
ttttccttccttgtctcctttcttttatttaaatgtgtgcaattttctctccttccttgaacaaaatagctcaaattatataaaaagtataaagttaaaastgaagtgttacttttggtaacttgctgaattatttacttctttaggtattggggtactctaagtaccaaaatttaaaacaaaaatcacagtctgtattct

SEQ ID NO: 186857 - DNA, 201 bp, Homo sapiens
cccccaaatacctgcacacacacatacacacactgtgcacacacttcatccagtggtctgggcctcctcgttgggcctcaggtcaagcacacgctactacytccatcctttgtgtttactcttctccctgcccggatcgttccttgccaaggtagcttcccgagtctctcacttccttcaagtctctgctcacgtgttagc

SEQ ID NO: 186858 - DNA, 201 bp, Homo sapiens
agtcctcacctccctggaagccctgtgtgattgcctcccttcctcccccaaatacctgcacacacacatacacacactgtgcacacacttcatccagtggyctgggcctcctcgttgggcctcaggtcaagcacacgctactacctccatcctttgtgtttactcttctccctgcccggatcgttccttgccaaggtagct

SEQ ID NO: 186859 - DNA, 201 bp, Homo sapiens
attaacttgccctagtattcaagactatgcgtgttggtgtaaggatagagatatacagatgaatggaacagggtaagtgtccagaagtagactcacctgtrtgtggccagttgatgtttgataaaagtgccaaggtcattcagtggagaaaagatagccatttcaataaatggtacttgaaccattgaatatctgcctgca

SEQ ID NO: 186860 - DNA, 201 bp, Homo sapiens
tttttacatatccaggagacatcttaaaattaacttgccctagtattcaagactatgcgtgttggtgtaaggatagagatatacagatgaatggaacaggrtaagtgtccagaagtagactcacctgtgtgtggccagttgatgtttgataaaagtgccaaggtcattcagtggagaaaagatagccatttcaataaatgg

SEQ ID NO: 186861 - DNA, 201 bp, Homo sapiens
atagtgctgctccataggatgaataatttcccataaactgccaagagcggtaccggcagggagccaccctcagctttccttgtgactgttatcattcctgygactgcatctgttccatacctgatggagagcttggtcacagagtctctgttttctcagctgattgttcaaatgactgctgtttctttgtgtctctttgtt

SEQ ID NO: 186862 - DNA, 201 bp, Homo sapiens
tatttgttctttctttcaaattatttttattcctgttaaaattgaactatgagacagatgcctgtgtttttttccttttcttgattgtcataacctctccsattgttataatagaatgtggcacagatgatttgggctggagagctaattatgcatgataacctgatttctaaaatatcacaggatagaggcaactactaa

SEQ ID NO: 186863 - DNA, 201 bp, Homo sapiens
gctggggctgcagggacagccccataggctcacttagattgctggttgctgacacagagctcctttctaatcaaatctgtattctttcccactttcttgaractagttagctttagttggagatcatttctcttgattgaaccttgctgagagtgtcaaggactggcaagcactgacattttgaattttcagagctgtttc

SEQ ID NO: 186864 - DNA, 201 bp, Homo sapiens
cctccatagaaaactctcacctcttcctcaaggaagatggccctggtatgacattcatttccttccacttgatcagattcaggatctctggatgatgtgcygttttctcttttagggccggatgtacctgttgaggtcttgcaatctgttagctgaaacagacgagctctctgcccccagcacaccatgtgccacactgct

SEQ ID NO: 186865 - DNA, 201 bp, Homo sapiens
tttctccgtctaccattccccatcatggaacctgcaccagctgaaaattgggagttgtattcctaaggaagacggggaaggacacagtggggaacagccarcagtttctgctgaggtcccagatatccacatgcatttgtcttcccctccatagaaaactctcacctcttcctcaaggaagatggccctggtatgacattc

SEQ ID NO: 186866 - DNA, 201 bp, Homo sapiens
aaatgaaaaatgagcacacagtcctcctcttcatgtggaaatgctggtcctgtttacctgcgtgagaacccagagtttcatgagctgcttcatgagccgakgagatctgaagccatgaaggcgagctggagcccaagtgcagggcccgcccaggcaccagctgccacgcacgtggcggaggagcttgacagctctgggaac

SEQ ID NO: 186867 - DNA, 201 bp, Homo sapiens
cccccacgtgtggctttgaagaggagtgatgtgtgcacctgttccgtctcccatgatgttagcagctcttcaaaagcaggatttgtttcattttggtcttkttttatgtgggaggatcacagcagctgttggaataaatgattgagaaaatgaaaaatgagcacacagtcctcctcttcatgtggaaatgctggtcctgtt

SEQ ID NO: 186868 - DNA, 201 bp, Homo sapiens
gcccagctccagtgccattctcagaccctccagctacttccagctctttcctccagcactgtccagcacttgccatgttgaagcctcttttagggtatccmccacgtgtggctttgaagaggagtgatgtgtgcacctgttccgtctcccatgatgttagcagctcttcaaaagcaggatttgtttcattttggtcttgtt

SEQ ID NO: 186869 - DNA, 201 bp, Homo sapiens
gacccaaggcggcctcgctgggatgcaggcattccttccggaactcgccttgggccgcccattctcactcctgctctttcttctgtccatgaagtcccccygggccccgcaccctccctccacccacacacccctacccctgctctcttctctgcttcttaaaattctgttcatccttaaggcccagctccagtgccattc

SEQ ID NO: 186870 - DNA, 201 bp, Homo sapiens
tttcctacttctgtttaccagactctgtgctctagcagagctatcctttatccactgttgaccacatacaatgtgcagatccacttggggccatcttcccscagctattaggacccgtgtgcctgcttccttattactgttggatgttttgttgtcagttattaaaaagacaagcaacagggaacaattagctcagtgacc

SEQ ID NO: 186871 - DNA, 201 bp, Homo sapiens
gtaaccctaccatctgcatcaacgacctcatcacagaatacaataaacaacacaaggcagaactgaagcccttaagagccgattatctcatcgccagagtygtgactgtgctggagaaactgatcaaagagtttcaggacaaagggcccaacagcgtccttcccctttattaccgatactgggtccacaggtcagtgctgg

SEQ ID NO: 186872 - DNA, 201 bp, Homo sapiens
cctcagtctctcgtctcagtcacctgagtagctgggactacaggtgcccgccgccacacccggctaattttttgtatttttagtggaggtggggtttcacygtgttagccaggatggtctcgatctcctgaccttgtgatctgcccgccttggcctcccaaagtgctgggattacaggtgtgagccaccgcgcccggccgt

SEQ ID NO: 186873 - DNA, 201 bp, Homo sapiens
ctcccgggttcacgccattctcctgcctcagtctctcgtctcagtcacctgagtagctgggactacaggtgcccgccgccacacccggctaattttttgtrtttttagtggaggtggggtttcaccgtgttagccaggatggtctcgatctcctgaccttgtgatctgcccgccttggcctcccaaagtgctgggattaca

SEQ ID NO: 186874 - DNA, 201 bp, Homo sapiens
tttattagtatcttagtagttctgtatcttttttttttttttttttttttttttttgagacggagtctcactctgtcgcccaggctggagtgcagtggcaygatcttggctcactgcaagctccgcctcccgggttcacgccattctcctgcctcagtctctcgtctcagtcacctgagtagctgggactacaggtgcccg

SEQ ID NO: 186875 - DNA, 201 bp, Homo sapiens
ttccccctcttcggcaggctgatgtttcagacaccgcaggaaatgggcttaatagtgatcgcggcccggcagaccgagggcaaaggtcagtcatcttttgwgatcattgctgttacttctgttttctaaactctgcaactcttgtggcccaggagcccattgaatgtgtgtgctgatcatctgggggactcaagttagtag

SEQ ID NO: 186876 - DNA, 201 bp, Homo sapiens
ttgcatggatgtgtcatggtagcctgataaagggccgtctgtggtggtgcctgtgtccctttgttttccttccttgtctcctttcttttatttaaatgtgygcaattttctctccttccttgaacaaaatagctcaaattatataaaaagtataaagttaaaagtgaagtgttacttttggtaacttgctgaattatttac

SEQ ID NO: 186877 - DNA, 201 bp, Homo sapiens
tcagtcttttactttcaactggtctggtgggtgtgcagttgtatctcactgtgctttcaatctgcattttcctgaaaacagatattgttgaggatgattayacttattgtacctattacactgctggcattcttaatttgtgaaatgttgttcaaatcttttgcccattttgaagttggggtacttgtcattttattattg

SEQ ID NO: 186878 - DNA, 201 bp, Homo sapiens
tatttttagtagagacggggtttcaccatgttagccaggatggtctctatctcctgaccttgtgatccgcccgcctcagcctcccaaagtgctaggattayaggtgtgagccaccgcgcccagcccagctgaagtattaaagggtatatctgcaatttacattgaaaggcataaagcaagaagatgaattaatggctggat

SEQ ID NO: 186879 - DNA, 201 bp, Homo sapiens
ttttcactgttcttagcattatctctctttccctttctctctctttttttttgagatggagtctcgctctgtcgcccaggctggagtgcgcatgatctcarcttactgcaacctccgcctcctgggttgaagcaattctgctgcctcagcctcctaagtagctgggattacaggttcatgccaccatgcctggctaatttt

SEQ ID NO: 186880 - DNA, 201 bp, Homo sapiens
tagagatggggtttcaccatgttggccaggctggtctcaaactcctgacctcaggtgatccacccacctcagcctcccaaagtgccgggattacaggcatkagccactgcgcccggcccaggagtgccatcttttgattataaagatttgctgtgccatctggctttgtcctgtgagtgaagacaccaagcgaacatgaaa

SEQ ID NO: 186881 - DNA, 201 bp, Homo sapiens
gctcatcaagaggtactgatgaggaaatgaatagataagtcacacactgggagttaatatttgcaaaacatatgtctgacaaaggactcgtatctgacatrtacaaagaacttctacaactcagtaataaaatgacaaatactccaatttaaaaatgggcaaaagatttgaacaacacttcacaaattaagaatgccagca

SEQ ID NO: 186882 - DNA, 201 bp, Homo sapiens
catacaggaaaattgatttgagatgaatcatagaccttaatacagaagtgaaaaatcgtaaagttttaaaggaaaacaatatcttcatgacttgcgactargaagaaatttcttaaactgattacagaaagcaataactataaaagaaaaatgatgttagacttcatttaaaaattctagccaggtgcagtggttcattcc

SEQ ID NO: 186883 - DNA, 201 bp, Homo sapiens
tctctccctttctctctttaatgtgataaaatatatataaaataagtttactgttagaaccacctttaagtctccgattcagtggtgtaaattacacccayactattttacaaccattttcactctatatttccaaaactttttttttaagcgtcctaaatagaaactctgtaacagtgaataaataattccccttcccct

SEQ ID NO: 186884 - DNA, 201 bp, Homo sapiens
tgtgctgactggtccttgggtgtccctggctggtcctggaaaaagcaccatccgaatggccaaacagttgtcaatgaaattctcactccaggccgtggacytcacctggaactggcagcctggagcccaggcttcaggcttgaaggtgtggtttcaccaggaactggcttcttcctgcttaggagcctgtctgcctcccgc

SEQ ID NO: 186885 - DNA, 201 bp, Homo sapiens
tcctgcaggcagatcgtcccgatgagtgtccagctcttagtggacaggagacctgtagtgtgtagctcctttccgcagacatgttatcccaacatctgtcyggctctcagcgaagaggagacccatggtgggtagctcctttctgcagacaggttgtcccgacatgtgtccagctctcagcggggtcttccagaggagagt

SEQ ID NO: 186886 - DNA, 201 bp, Homo sapiens
cgtattaaagttactgaatagagatcaagattttcttttctttctttttttttttttgagatggagtcttgctctgtcgcccaggctggagtgcagtggcrcaatcttggctcactacaagctccgcctcctgggttcacgccattctcctgcctcagcctcctcagtagctgggattacaggcgcccgccaccacgcctg

SEQ ID NO: 186887 - DNA, 201 bp, Homo sapiens; identical to SEQ ID NO: 32541

SEQ ID NO: 186888 - DNA, 201 bp, Homo sapiens
tcgaaggggtaactcgcgatagttacattttctgaataaaaaaatgagacaagttattgaacaaaagatttggggaggtgaagttcagatagaaaaatacrggtacttccaggccatttttgttgtttctgtggagaatactgaagaatatttcgtgtcattgccacctgggaaccttggaagtgtggtcctggagctcgt

SEQ ID NO: 186889 - DNA, 201 bp, Homo sapiens
aagcacttatacaaattatgtatagtcgtgataagtgctataaagtaactaagggtttacgaaagtttgtgaacggctgtgggtcagagacatcctccctrtagaagtgacgttttagctatcctctgatagttgagttcaaagaaataggtgcatttgcgtattgcagagtgggtagtgctacttatatgtcagcccact

SEQ ID NO: 186890 - DNA, 201 bp, Homo sapiens
tctttctacccacttctctgccagtattatttggaaggaattcccagatactgtttcagttttctcatctgcaaatattttagtatgtgtctctgaaagawgcgagctctgtttaaaaacataatcacaattccaccgtcatacctaaaatgaaacaatctcttcatataatctcatgtccagtcagccttccagtttcca

SEQ ID NO: 186891 - DNA, 201 bp, Homo sapiens
cctggctttctctttggtctctgcacttgcagaatagattccgcttctacagtgagcctgtttggcttggtggaggtgtgatgcctataaaaccagccttrttagaaatgacttattcactccctgcttttactgttctactcaagccttttgtggtcttcgctagttggcaggtaacaaaaaaatgcagtaaatcctggg

SEQ ID NO: 186892 - DNA, 201 bp, Homo sapiens
ttgtggaggcagtggctgagctgccccatagagccgccctcgccgttagagccaaccctggctttctctttggtctctgcacttgcagaatagattccgcytctacagtgagcctgtttggcttggtggaggtgtgatgcctataaaaccagccttattagaaatgacttattcactccctgcttttactgttctactcaa

SEQ ID NO: 186893 - DNA, 201 bp, Homo sapiens
tctcgttttctcgttagaaaaatgaagaagctgcggtcagcccagggagtgcctcttgcggcctcacagctgatggtggcagagctgagggcaggatcccrtgccagagtcccctgcccccacaagaagcccaggtggggctggcaggtaacaggcaaatagctgaggatggtggggcggggggacatgtcagcatcagaa

SEQ ID NO: 186894 - DNA, 201 bp, Homo sapiens
ccacaagtggcttctgctgcaggcaccagcacctagacaaggggaatgtggtggcatccagaaacttggagacaccaggaactgcagagccccaaagaggktgtcacagccctggcttggggagcccctaggtctggctccccgaagagctgcctctcttctctcctcatcacctgcaacatggcgagcagggggacgttg

SEQ ID NO: 186895 - DNA, 201 bp, Homo sapiens
gttattaaaaacacttttcagtagaaactctgcttttctcctatgaacgaatgcaccttctgagccggagcttcttagaccgtggccttgagtgtgtgggsttagacccgccctctccttgcacacgtagggcagtgttggacgccgctcccctctctcctgccaggcctggccaggtgttattccctgggattctctgaa

SEQ ID NO: 186896 - DNA, 201 bp, Homo sapiens
acgaactgttttgaaactgcataagacctacgtagagaaaccatgatcatggtttggaagagttagtactggtaaaatgccagtttgctgtaagttgatgyacgaatttggtacaagctcaatcaaaatcacggcaggtatttttgtggaaatgtatacgaaaatgtcacaggatccttagagtattgcttttccagccag

SEQ ID NO: 186897 - DNA, 201 bp, Homo sapiens
ttatagtagacatttagtaagcacattttatttggacacttgcaaagtgttttggtttttccccctaatggattgggagctgcttccttggctcctgtgcrccgagagcccccagagaccccagggacaggccggcagtgcacagccctctctgcccgagcggctgcccgcacagtccagctctgtattctgggaaagcag

SEQ ID NO: 186898 - DNA, 201 bp, Homo sapiens
aaatcgtaatgtactatgttccccatacttccaatatctacttgtatactaatcttattacaaaagaaaatcaggctagctaatatgtctaactcttgacwattctcttaattttttattttttcaatgagatgagtggtaaagctataacgggagtcctaagttaaagtctcagctcttgagctaattagtgggacaagt

SEQ ID NO: 186899 - DNA, 201 bp, Homo sapiens
ctgatggcgtctccttcttaccctctctgcctttgaagccaactgtcagcctctgatcattcctctatttatatccagtgaaatggtgtgaatctgtggcwctagaaatcaggcctcacctacaatcctgaatatttaattttgttctctgaatgaatggttgcagcattttctagaagtttctgccatatggagcaattc

SEQ ID NO: 186900 - DNA, 201 bp, Homo sapiens
gatactgtttcagttttctcatctgcaaatattttagtatgtgtctctgaaagatgcgagctctgtttaaaaacataatcacaattccaccgtcatacctwaaatgaaacaatctcttcatataatctcatgtccagtcagccttccagtttccaattagacatatttaaagatggactgtagtatctgtgcattgtgtat

SEQ ID NO: 186901 - DNA, 201 bp, Homo sapiens
gtggggggatagccagactctgcctaggattgtctagattacttttcataggcaaccttgatgcatttcaggatttaagtttttctgtagctttttagttmataaaatgctttaaaggtcaaaggtctataattttgaaggttttgctctgtgtattttttccttctgtgatgttggggttaggtgtagtgtctcagattg

SEQ ID NO: 186902 - DNA, 201 bp, Homo sapiens
tgcattcttgtcattgctggtgatttcctattataaataatcatatttctttttgagccagcagttctgtataattctgtagtgaccccattacaatcttycttttctggaagatacttggtgaattataaaacaaagcagacattgacagaagttgaataggatggggttaataactgttgtttacaatacttcatgata

SEQ ID NO: 186903 - DNA, 201 bp, Homo sapiens
ggtgacatgatgggttttgatgttgaattgcaaaagaaatcatacttggggggttttcctgtgctccctttagaatgttttatttttgtgggaagaaggcytttcagctactgtgtgtcctgtctttttacttgaatcttgtttccacaagtgtgcctcaaagcagcgcctgcagagtaaatacccggggcagagatgtgt

SEQ ID NO: 186904 - DNA, 201 bp, Homo sapiens
cagctgtggtggaaaatgcccctcggctcccacgccctaaggagtgctctgggaggggtaaggggagtttgggcagatgtggagtggtcttggatgaggtygtggctgacattttggatttcgatgttttgttaaagcttatttgacttactaacatagtatagaacctgccgtggaatcggagtgtggggtctgatatgc

SEQ ID NO: 186905 - DNA, 201 bp, Homo sapiens
tttgaaggtggatatgcactgcctgaggtggtctttccggaggcagctgaattcctcctgcatctagtcactgtgctatgggtcagtatttatagatctgsaccacagagactgggaatggaattgggtttgtgctttgtatttggttttctttctggcatccctacttaacagatctcagtcatcctcacggaattaagt

SEQ ID NO: 186906 - DNA, 201 bp, Homo sapiens
gagttcgtgtgctgcgggctgtttttgactattggctgggagcttttgctgatagtgagcagaaagtttagtttagttcagggctttcttgaataccctgrttaaccaaaagacttgtgagggaggaacaaggcagctgtcagggttaaatgagcttgctggttaactgaggcttagtcagaaaattctcgttttgttctt

SEQ ID NO: 186907 - DNA, 201 bp, Homo sapiens
gagagttctgggattggttaacacttaggatcaggtgcctatggaatggaagcagcacaacctgaatcctgggccatgcaatgttcatacatggagtcctrtctctctgctgcatcagccttccctgccaatggtgtcagcacaaggactagagctgaagttacacaagggcccagaaggtggaaggtgctttgttggaga

SEQ ID NO: 186908 - DNA, 201 bp, Homo sapiens
tttatcacatcaattcaaaacatgcagcaagaaataaggggagagttctgggattggttaacacttaggatcaggtgcctatggaatggaagcagcacaayctgaatcctgggccatgcaatgttcatacatggagtcctgtctctctgctgcatcagccttccctgccaatggtgtcagcacaaggactagagctgaagt

SEQ ID NO: 186909 - DNA, 201 bp, Homo sapiens
cagaagtttctggaaaacgagggataattcctcgtctttgtggcatgcgttctagttaaccaagcttttttacctgtgtcgccatctcatttgggtctcayagtgaccctgataagtagggcagggcggggaaggagtccttgcccccgggagaggaagctggcgtacaggacagtgaagaggcttatgtatttttcgttt

SEQ ID NO: 186910 - DNA, 201 bp, Homo sapiens
gtgtgtaggtgacctgagaaacacaagccggctggactcttagcaggggtcctgtgtccagctgggatcaagatgtagctgtcacaagaagtgacaactgrgtttgttactgaaatgatcgggcaaaatcaccatgaggtgtgtttgtgtgattttggtagtggggagttatggaatgggtaatacgtacttaaaaacaga

SEQ ID NO: 186911 - DNA, 201 bp, Homo sapiens
gcctgggacatctgcttaggatctggggagcacaagaatttttccaaaatgaaaaagcttgggaaccttgtgggtgttcatcgtggccaacggtggctaayagtgtgtaggtgacctgagaaacacaagccggctggactcttagcaggggtcctgtgtccagctgggatcaagatgtagctgtcacaagaagtgacaact

SEQ ID NO: 186912 - DNA, 201 bp, Homo sapiens
tgggtgagagactgatacaccacatggctcactgtggggtgtcctgggtgcgatcacctggtggccaccacatcttcccgccaccagtgggtgacaggcartcagcagcaatacatctttactgtgctgggacatgaatgtttttgagaaacactgattttatagaagaaacataatcctttcccttacagaacaccagaa

SEQ ID NO: 186913 - DNA, 201 bp, Homo sapiens
gtggatcacttgaggtcaggagtttgagaccatcctggccaacatggtgaaaccccatctctactaaaaatacaaaaattagtcgggcatggtggtgcacrcctgtagtcccagctagttgaggggctgaggcaggagattgcttgaatctgggaggtggaggttgcagtgagccgagatcacgccactgcactccagcct

SEQ ID NO: 186914 - DNA, 201 bp, Homo sapiens
ttggggaatgggtgagatgaggctgaagaccctcacctgggaatctcgagaatcttctgttctcgagaaggcttctaacaggtgtcagagtgcttagcctractcctgaccccccacacttcctgctgctcattgctttctccaaagaagttattctcatctttcagcctaaaaatgtatttttgacctcagaataggatg

SEQ ID NO: 186915 - DNA, 201 bp, Homo sapiens
ggcttcctctctgcagatgttggtgggtgagagactgatacaccacatggctcactgtggggtgtcctgggtgcgatcacctggtggccaccacatcttcycgccaccagtgggtgacaggcaatcagcagcaatacatctttactgtgctgggacatgaatgtttttgagaaacactgattttatagaagaaacataatc

SEQ ID NO: 186916 - DNA, 201 bp, Homo sapiens
ttttctttctggcatccctacttaacagatctcagtcatcctcacggaattaagttccatggagaggatcttggcacccagtcatctgctaaatcctgccygtccatttggctcatcgcctgccttagggattggatgcctgggctggctttctgcttcctgtgccctgcaagacactctgttgctgggagtcaaagatct

SEQ ID NO: 186917 - DNA, 201 bp, Homo sapiens
gtattgtgttattggtgtactcttaatgtgcacataggtaatgagcaaagaataaatacattggtaagtgtcccaaattaatgggatattagcgtaattgygaaataaagggttttaaagaagttgattgcttgggataattagcacgaatttttttatgtgtcagtttggtactttaaaagtgaaaattattggagaatt

SEQ ID NO: 186918 - DNA, 201 bp, Homo sapiens
aggtgtggccctttccacgttagggggaagagggtccctgtgtcaagagtatattcagactgtaactttattcatttgggattgaaaacatttgttttgayttgagccactttcagcaaatctttggaacaatcacatttgtgctaatgtctgccatcttgtggcaacagcgctctgggtttcacgtctgtgagtcgtgtc

SEQ ID NO: 186919 - DNA, 201 bp, Homo sapiens
tgagccttactgtcttcagctgtgagatcaggggcgttggaacactagatgctctccaggcatcttcagctcacctcctttgacctggtgatgcgcccacrccagagcctccaccaaccagccttttatctctcagtgacttctggcgcttttaggttgctgagctagttttgtgaatcagcctcatgtgagttgaggaaa

SEQ ID NO: 186920 - DNA, 201 bp, Homo sapiens
tagggaaaatgctggaaccaagactttgtcattcactagctctgtgaccttgacagtctctcctccctgagccttactgtcttcagctgtgagatcagggkcgttggaacactagatgctctccaggcatcttcagctcacctcctttgacctggtgatgcgcccacaccagagcctccaccaaccagccttttatctctc

SEQ ID NO: 186921 - DNA, 201 bp, Homo sapiens
tgatggggtctagggaagtgggtgtggaccagccactgcaaatccattgtcactgcaggaaaagcccctcccagagttcagtctgccttgacgtagtgggygtgtggcacattccatttaatctcctgataaatgatagtcaaccctctggagacagcatgaggctagactgtgaaacataggagcttggggtaactgagt

SEQ ID NO: 186922 - DNA, 201 bp, Homo sapiens
acctccacataactgacactacccagacaaaaggggaagaagttcatgcattacatacaatgtatggcttagagcgttgggaattaacctgattgagaaarataactcaataaaatggcaaaaaattgaggggtgagctttttgtagtagtttccaaattggatcaattacatttaggatttaagtcagaatagaaatttt

SEQ ID NO: 186923 - DNA, 201 bp, Homo sapiens
ggttggagtgcaatggagctatctcagctcaccgcaacttccgcctcctgggttcaagcgattctcctgcctcaacttcccgagtagctgggattacaggytcatgcaaccacgcctggctaattttgtatttttagtagagacagggtttctccatgttggtcaggctggtcttgaactcccgacctcaggtgatctgcc

SEQ ID NO: 186924 - DNA, 201 bp, Homo sapiens
gtttccacattgctataaagtactgcccaagactgggtaatttacaaaggaaagaggtttaactgactcacagttcagcacggctggggaggcctcaggaracttacaatcgtggcggaaggtgaagggaagcaaggcaccttcttcacaaggcggcaggcaggagaatgaacacaggaggaactaccaaacacttacaaa

SEQ ID NO: 186925 - DNA, 201 bp, Homo sapiens
ctgcttttgtttcagtgcttactcaaggtaattagaggaattttttttaggtgtttacacatctaggaggatttggagatttctgacagatttttgagggygtggtattttttgagggctggtatttcagtaccagctgagctaccatggtactggtgtagagagctttcttttgatctctctgggcatgtgagtggcttg

SEQ ID NO: 186926 - DNA, 201 bp, Homo sapiens
ctagtctgtttgcttctgattggttccatgtgagtaaccatcaagatcttgtctagacagtttttcagcctaaaaactctggtcttttaaaggcctcagcrctctgccattcctttccctcccaatttaatagcaactcccttgggccaaatgaaaccgtgggcttgggtggaaggccaggcccttaatcatatctttggc

SEQ ID NO: 186927 - DNA, 201 bp, Homo sapiens
tgtttgacagacattgaagctgagcttgccaacactagaggtggaacctcccatagggttaagagtttttacttttacaaaggggaaaaatattttggccyttctgagggtgtttaggaatctttgtttctcttcttgtttggtttgattattaattatgaatcccttgcttggtgcagagctgatactggatgaatggtt

SEQ ID NO: 186928 - DNA, 201 bp, Homo sapiens
atttatggtgaagtgtcagggtaagaaacagtggcttgtattcactttgattggataatacagaccaacattagtaaatgcttgacttaccaaaaaggagmctcattctgaaagctgaatccactgggctccttgggagccatgaaatgatttatttagcagcaatgtggacgctcttatgctggacgtggggaagattag

SEQ ID NO: 186929 - DNA, 201 bp, Homo sapiens
tgacccaaagaacttaatacaattctttttttccacaggaaatttgcttatgttccttgtacttgatcaaggcattcattgaaggtttattgagtgcctgktatatgccagattgtgtgctaggtagggttggaggcatgtgttacatggagatgaaagattcattcagagatgacattccctgtttgtaaggagttcaca

SEQ ID NO: 186930 - DNA, 201 bp, Homo sapiens
gatcttatattttttcacatctttaagactatacaactcttaaagatatttaaaatatctttttgaattttggatatttcaaatggctttgatctgtggtmattctacagattaccaacaacagataaatggatcttaaaattcagttttaaaaaatgtagcattcacatactcatattttcgcttattcattcattaaca

SEQ ID NO: 186931 - DNA, 201 bp, Homo sapiens
gttctacctgacttcacagccatttgaatttaacagggtcctaaggtattaaatagaaaaatatattatggaagaaggacatttgaattgatgggatcttwtattttttcacatctttaagactatacaactcttaaagatatttaaaatatctttttgaattttggatatttcaaatggctttgatctgtggtaattcta

SEQ ID NO: 186932 - DNA, 201 bp, Homo sapiens
atccatttgaaatatatcttggtattctgtagtccgaaaaccgaaaattagtactgtgataggacccaaatgtagcttttggtagctcatttgagcttgamctcttccaacaacttttctggtttctttgcaagcaggatcaccccttattttgcatgccttctctgggagctctctctggtgctgacctaagctttttgg

SEQ ID NO: 186933 - DNA, 201 bp, Homo sapiens
accgcgctcggccgtggttacttaattcttaattttctggggtaggagaatgccttcccaacaaggaggattgccacagtccagttaactaatttcacttrtgatcagagacatcagtgggtcttgcaaccaggagctagagacgtccagagccattcatgttgaccactctggctgttaccccgagctccattttataaa

SEQ ID NO: 186934 - DNA, 201 bp, Homo sapiens
agctcaagctgccctgtggcgagatccacatgaagtagaaggacatgtggctcttcgtggacagccctggctgagctcccagctgacaggcagctccagckcagtgacagaggcatcttgaaagtaggtcatccagccctggtttagtcactctacctgatgccacatggagcagagttaagctgttcctgcccagtcctg

SEQ ID NO: 186935 - DNA, 201 bp, Homo sapiens
cccctcatcaacatcataacaaaatgactttgagtgaaacaacattattcaaggacctgctgttttgaattcctgcaaactctctctctcttttttttttytttttaaatggtcgcactttgttgcccaggctggagtgcagtggcacgatcatggctgactgcagcctcaacctcctgggttcaagggatcctcccagct

SEQ ID NO: 186936 - DNA, 201 bp, Homo sapiens
cttggagcctccatctgggcttttggaacatgccatctgggagtccagctcccatactgtgaggaagctcaagctgccctgtggcgagatccacatgaagkagaaggacatgtggctcttcgtggacagccctggctgagctcccagctgacaggcagctccagctcagtgacagaggcatcttgaaagtaggtcatccag

SEQ ID NO: 186937 - DNA, 201 bp, Homo sapiens
taataaaaacaaagataattatttacctgattatttcagttcagcatggtgggtggccgcgtggctggaactcatccaggaagctcagggtactactggtkggggagtcagccctggccaggatgccctcccatcacagggcacactcacacccgtactcacacttgctcagatcaggaccatgtagacgcatcggttcac

SEQ ID NO: 186938 - DNA, 201 bp, Homo sapiens
ggacatgtcattctcatgcagaaggggaagactaattgctggcacaaacttgttgcagcgcattgaagatggctgcaaattctttcctcctattgagaggyggagtcacttccccctcccttgaatctgaactgaccttagtgatttgtgtgtccattgggatatggtagaagtgacattctgaaaattctcaggccagat

SEQ ID NO: 186939 - DNA, 201 bp, Homo sapiens
aatatgaattatatgtacatttaagaaagattaataaaaacaaagataattatttacctgattatttcagttcagcatggtgggtggccgcgtggctggarctcatccaggaagctcagggtactactggtgggggagtcagccctggccaggatgccctcccatcacagggcacactcacacccgtactcacacttgctc

SEQ ID NO: 186940 - DNA, 201 bp, Homo sapiens
cacctttgtaataaatctagtaatgatgtaacccaataagaggaggtaaagtatttcaagggcagaacacagctgcaccctaggcactggtgtcccagccragtaagctgcagatttgatgcctttgccattcataataataaagaaagagaggaaatgtttgtatgctcgctgtactgatcaagtttgcagggaaaactt

SEQ ID NO: 186941 - DNA, 201 bp, Homo sapiens
tcctgcctgctccagtgaagcataacgatccattcatttgtccattcattccacaaacttctgagtgccatcagtgtagcgagtactgaactctggagatscacgtatctcactgggagatcagtatgagggctggaggtgctgactccagaccaactccaggaacaactcctagaaaacagccaccgaagtgggccactg

SEQ ID NO: 186942 - DNA, 201 bp, Homo sapiens
gcttaaaattaaggaatttggacattaggacagatgaacacgtacagcccaagcaggtttcctgcagtgctgcaggccacatgaattagcttttggaggcrtaataaatgttcctcttatctttttctctgcaaatattgtaactatagtaactgcatattctcagaaaatccacttaaaaacccgacttcctagagccat

SEQ ID NO: 186943 - DNA, 201 bp, Homo sapiens
cttcaggttcccaattcctttcttatgttttgtcactcttccaagtgctgaaaagaaaaacttcaaataagagaatattgaagctacttagatttgtggcrtactaatacataggtagggggaaaatggaaagaggatgaaaggaaaatgctagtttctttttcttgcgtaggagatcctttggctcatcttctttttcct

SEQ ID NO: 186944 - DNA, 201 bp, Homo sapiens
tcaagggttgctcctgcctcagcctcccaagtagctgggactataggcacacgccactatgcccagctaagttttgtatttttagtagagacagggtttcrccatgttgcccaggctggcctcgaactcctgggttcaagtgatccttctgagtcagcctcccagagtgctgggattttaggcgtgagccacccattccca

SEQ ID NO: 186945 - DNA, 201 bp, Homo sapiens
ctcagacccctgactgcagcgccgggctcttcacctcacaggctgtcttctccatgggaaccctcagagagagcatgggtgttccaggccccagtgtcacrgtcttctgtagtaagaactggaaggctaagccgggtgttttgcctgctctctttctccctgtcccccttgtggtaggaacgtgaacctccttacagggag

SEQ ID NO: 186946 - DNA, 201 bp, Homo sapiens
acccatcatctagatttaataattatcaacatagttgaataattatcaacattttgccttactttatgtattttgggggtaaattttacagatttcatgaygtatatacatttttaaaaattaaggacttttcctatgtcaccacagtacttcctttttttcttgagacagggtttggttctgtcactcaggctggagtgc

SEQ ID NO: 186947 - DNA, 201 bp, Homo sapiens
tcgagctcctgacctcaggcagtccacctgccttggcctcccaaagggctgtggttacaggcgtgagacaccgcgcccagccaatttttgtatttttagtrgagatggggtttcaccatgttggtcaggctggtctcaaactcctggtggtctacctgcctcggcctcccaaagtgttgggattacaggcatgagccacca

SEQ ID NO: 186948 - DNA, 201 bp, Homo sapiens
cagccctggagcctgtgaatatgaccttatttggaagctgggtctttgcagatgtaatcaagtgaagatgaggtcattagggtggatccctaatccagtaygactgctgtcctcagaagactagaggacacacagaatcgggacacttaaagaggagaacgccatgtgatgatggccacagagatgggggtgatgtgtgta

SEQ ID NO: 186949 - DNA, 201 bp, Homo sapiens
attgaacaagttcagatcttccagttgtttctcagtgaacgtagtttgtttcttttgtgaaggcctctggggcttgcctttgggaagatcctctgagcctmatctagatgtgttcgtatgttcaggtccagttatcttaggtatatactggggagtagaattactagatcatatggtaactctatgtttaactctttgagg

SEQ ID NO: 186950 - DNA, 201 bp, Homo sapiens
tttctcttttcactactcccatctgactttggcctccatcacgcctctcaaactgctctcatcagagtctgggctctgtggcaccaaggccagcggtgacktctcagccctctccccacggcactgtcatcgtcttccaaccttccaaactggagtcaggagactcccgcaaccaccgccccccactgctgtccacagaca

SEQ ID NO: 186951 - DNA, 201 bp, Homo sapiens
ccttttgtgtctgatgtctctattttgtagagatgaggaaccaaaagaattaaaatggaagcttggagaatgaacttgggattctgaagtgtctagaagcmgtatatgttcagatcttggcagcagccaaaatgaactattttggggccactggggtggtctatagggtccctaccactggggcctaagtttagttggaat

SEQ ID NO: 186952 - DNA, 201 bp, Homo sapiens
cgtatggctgtgcaaccggcaagggccaagggagttctgcagccagtggggtcataagaccaggtgtccgcagaggggaacctgagccacccccatccctrtgggtgagctgtctctgctcccaaggctgacctttctgcttctgtgctaggtcccaccccacttggccctttggattcttttctctaggggacctttcac

SEQ ID NO: 186953 - DNA, 201 bp, Homo sapiens
ctctctgctaagcccacatggctggatagctgactgtggcaggataaaaacacaaaatcatgcggacttctcactctcagttcagagtcgctgaccttccstggtgctcaaatgcttccagctgccctggggaaggcgctgctcagaagattctccccactgcattcgtcttctcattctccctgttgtcatgttcgttcc

SEQ ID NO: 186954 - DNA, 201 bp, Homo sapiens
ataacctcttagctctctgcttgagttaaataatagttttatctttctgtttttgtgatttaacctaattcacctatatgtatctctagcctgtgtggtgrcctggtgacatccagctgccctggggaaagtgatggaaattcagatctgtgcattttatgctttaagggcattgaccaaagttttaggggcagagttggt

SEQ ID NO: 186955 - DNA, 201 bp, Homo sapiens
ggggattatgtttccaacacatgaaatttggaggacagattcaaactatagcaatatctgtccttcctcttctctttctaccatggtactgtgtttgagayaccgtgggtactccatacatgtttcttaaatgaatgatgtataccatagtcaatctggatgattcactttagaggataattcctgcattattcctgttct

SEQ ID NO: 186956 - DNA, 201 bp, Homo sapiens
tcatcttcattcttttcaactcctttattagtatcttagtagttctgtatcttttttttttttttttttttttttttttgagacggagtctcactctgtcrcccaggctggagtgcagtggcacgatcttggctcactgcaagctccgcctcccgggttcacgccattctcctgcctcagtctctcgtctcagtcacctga

SEQ ID NO: 186957 - DNA, 201 bp, Homo sapiens
ttatgtttcataagagggccctggtttcatttgataccttttagattctctttgttctgagtaattcacttggttctgagtaagccctgaaagattatgtwaaataagtataagaaaaaaacctgcatgccttgcttttatcagttttattttgcagatttgtacgtgtctaagtattgctttcaaaaacaaataatttag

SEQ ID NO: 186958 - DNA, 201 bp, Homo sapiens
cctcttgattacctatctatctgttatttggagagttttccttggtaaggttttaatgtgcatttatacagtaaatgcttattaagcatgcacttttgtcytaggttccatggataccgttgggagcaaaacaggaacatatgtatattatctttatggaacttatattctaataagacagtgtggcattgaataagcact

SEQ ID NO: 186959 - DNA, 201 bp, Homo sapiens
atgttagaaaaataacattaattagaattttataaacccccttgaagtggaatctgatagtggttgtttgttgtcaatagaactagctgtaatgatttcawagactgtgcattatttttgatgcttacgtagccatctcaagaccatactctctcattgtcttttttgagttttacctcttgattacctatctatctgtta

SEQ ID NO: 186960 - DNA, 201 bp, Homo sapiens
ttaagcagaggaatagtgcaacatttttatttttttgagatagagtctcgctctgttgcccaggctggagtgcagtggtgtgatcttggctcactgcaagytccgcttcctgggttcacgccattctcctgcctcagcctcctgagtagttgggactacaggcgcctgtcaccatgcctggctaattttttgtatttttag

SEQ ID NO: 186961 - DNA, 201 bp, Homo sapiens
aataatgttttgctatctgctttatttttatttatttcaggctaattctctaattttactgttaatttaagaattatcaatacactatatagcagcctcaratttacaaagaaattgtgttttcaaaatttgtgtgctaacttgtcttttaacaatttggtccccattatttatgacagttgggttttcctagcatctcac

SEQ ID NO: 186962 - DNA, 201 bp, Homo sapiens
ttcacttaatgtaatgtattcgagattcgtccacgttgtaacatgcatcagtagttcattctcattcctttttatggttgaataatagtcctctgtatagmtatatacattttatttatctgttcatctgttgatggacatttgggttgtttctaccttttggctattgtgaataatgctgctgtgaacatctgcatacaa

SEQ ID NO: 186963 - DNA, 201 bp, Homo sapiens
tattgagggacacctgggttatttccagccttggctgttgtgaataatgctgccatgatcattggcacacacatatctgggtccctgctgtcagttctttygggtttatacctgggagtggaattgctggatcatgtattaattctctgtttaattttttttttttttttttgagacggagttttgctcttgttgcccagg

SEQ ID NO: 186964 - DNA, 201 bp, Homo sapiens
tggccataaaggcctgcgtttattcttttcccctcaaacgcaatgtttctcaagtttttttttttcatgattgtttttccgaggagaataattaaattcamgttcactctgagaagagaaatgagctactaaggaataagattttgttgtggggggccggacatggtggctcacacctgtaatcccagcactttgggaggt

SEQ ID NO: 186965 - DNA, 201 bp, Homo sapiens
tagagctaaatgaaaattctggagtttctctttgtccaaatattctacacaggttagtgagttggccataaaggcctgcgtttattcttttcccctcaaasgcaatgtttctcaagtttttttttttcatgattgtttttccgaggagaataattaaattcacgttcactctgagaagagaaatgagctactaaggaataa

SEQ ID NO: 186966 - DNA, 201 bp, Homo sapiens
cttataaagccaccaatcccaccataggtgccctaccctgatgaccccattcaatctcaatttcttcccaaaggccccacctccaagtaccatcaacatakaattgggggattatgtttccaacacatgaaatttggaggacagattcaaactatagcaatatctgtccttcctcttctctttctaccatggtactgtgtt

SEQ ID NO: 186967 - DNA, 201 bp, Homo sapiens
tttctgagtggggctgcagttctggaggagcagcagcgcttgcagggggactggctctccagtttccgagctggccgcattccagtttgtccatttggaaygagctgtattgctgcatggcaaagaagatggatgaagggccagcgaggggccggcaggaagctgccttccggccctgcaagaaccgtcccgacggggccc

SEQ ID NO: 186968 - DNA, 201 bp, Homo sapiens
ttcatcattggctccttttacactgccagtgcctgctaccgcagggggctaaatcaatgtttttacagctaaattccgggttgagtctccattggctgagsggttctcctcctcctttgattgctctgaggacaatggtgcctttagcttcccgcgggaggttgccctgttcgtttccctgtttcccacgcaccttcatcc

SEQ ID NO: 186969 - DNA, 201 bp, Homo sapiens
  misc_feature (1)...(201): n = A,T,C or G
gcagtgttcgccggtggctctggaggatttttagctggagacgagctgctaggcactagggggttggcataatgccactggcattcaccgctggctggcantgtgctcaggaaaaagcgtgccacctcacaaggggatccttggggctgcccgaacttggccggcaacattggctttttgctgctgaagacgtgagagtcc

SEQ ID NO: 186970 - DNA, 201 bp, Homo sapiens; identical to SEQ ID NO: 32579

SEQ ID NO: 186971 - DNA, 201 bp, Homo sapiens; identical to SEQ ID NO: 32582

SEQ ID NO: 186972 - DNA, 201 bp, Homo sapiens
aaaaatcttacagccggatgctatgaggacagatagttgatcttttatactcaacaaagggattctacccctctgatctaggaaaattccactgatgatcrtgtcacgggtataggatttgaattttttcttgcaatttcctaacccaagtatcgtgacttggaaccttagatctagtcacttccataagattttttttag

SEQ ID NO: 186973 - DNA, 201 bp, Homo sapiens
acagcttaaaaataatttttagagatccaaattagagaggaagtcagaattccaggtgcaccttgaatagcttttgacatgtggctgctgtggtcttgtgyggctgttttacaatacggcaccggctaaaggcagctagcagattaaagcaaacatttaaaagcttttatagctatgaatgcttttaagggtctttcatat

SEQ ID NO: 186974 - DNA, 201 bp, Homo sapiens
ttggggtaaggctactctgaggccatctcagtgaaagagctaggaaagataattattttcctcttaaagatatgagttcaaatgcatatttccaatagttmaagatgttctaatttaaattcttttgatgctctaaatattgtctacttttctctttattttgattaacaaaataaaattactttttgcttgatttgacga

SEQ ID NO: 186975 - DNA, 201 bp, Homo sapiens
gctctgtgagccatgggtgcacagtggacacagtgttgtttctctctgcttttaagtatttttcttctcttaccgagttccagccatttgtaaagttccayccagtttctgtagctgggaggggaggatgataagcttctcagcgtggtctttctctagcgctcctttgtcctcagcaggaccactgtggaagcctggaga

SEQ ID NO: 186976 - DNA, 201 bp, Homo sapiens
gtgcattgatgtgatcgcagctcactgcagccttgaactcctgggctcaagcaatcctcccttttcagcctctgagtatctgggaccaccacacccagccttttttttttttttttttttttttttttgagatggggacttgctctgtcgcccaggctggagtacaagtggcgtgattgcggctcactgcagcctcgacct

SEQ ID NO: 186977 - DNA, 201 bp, Homo sapiens
tggggacttgctctgtcgcccaggctggagtacaagtggcgtgattgcggctcactgcagcctcgacctccccaggagtagctggaactacaggcacacascaccatgcctggctaattttctttacttttgtagagatgtggtttcaccatgttgcccaggctggtcttgaacttgagttcaagtgatttgcccgctttt

SEQ ID NO: 186978 - DNA, 201 bp, Homo sapiens
ccccccttctcccaccatagtctttccagggaatttatttccagctccattaaatttatagcatcaagggtttataataggtagtttttttctttctttcttttttttttttttttgagactgagtcttgctctgtcacccaggcctggagggcagtggcgcgatcttggctcactgcaagctccgcctcctgggttcatg

SEQ ID NO: 186979 - DNA, 201 bp, Homo sapiens
tctccaagaccatatatatggggacctctccatggcttcctctctgcagatgttggtgggtgagagactgatacaccacatggctcactgtggggtgtcckgggtgcgatcacctggtggccaccacatcttcccgccaccagtgggtgacaggcaatcagcagcaatacatctttactgtgctgggacatgaatgttttt

SEQ ID NO: 186980 - DNA, 201 bp, Homo sapiens
cccccttctcccaccatagtctttccagggaatttatttccagctccattaaatttatagcatcaagggtttataataggtagtttttttctttctttcttttttttttttttttgagactgagtcttgctctgtcacccaggcctggagggcagtggcgcgatcttggctcactgcaagctccgcctcctgggttcatgc

SEQ ID NO: 186981 - DNA, 201 bp, Homo sapiens
tggttaatattaatatttgacatattatttagaaagggttcgctctgatagtaaaacacgtgactcttgttcatggcctgtggcagctgtgacttccaggkttaactgtgagctctgagttggtgtgtgggggcctccgagctgaagctgtccctttgcttctgtgggtggaaggtacccctgggtgccctacccctgctt

SEQ ID NO: 186982 - DNA, 201 bp, Homo sapiens
ccccttctcccaccatagtctttccagggaatttatttccagctccattaaatttatagcatcaagggtttataataggtagtttttttctttctttcttttttttttttttttgagactgagtcttgctctgtcacccaggcctggagggcagtggcgcgatcttggctcactgcaagctccgcctcctgggttcatgct

SEQ ID NO: 186983 - DNA, 201 bp, Homo sapiens
gagctatgattgtgccactgcactccagcctgggcaacagagtgagaccctgtctcaaaaaaaaaaaaaaaaaaaggaaacaagactggaaggaaatctgktatatatgggacttatttgtggtggagtgcttaagggtgattttaataatcttttaaaactttctctgtattttccaaattttctataatgattatatat

SEQ ID NO: 186984 - DNA, 201 bp, Homo sapiens
cccagtagctgggactacaggcgcccgccatcatgcccggctaatttttttttgaatttttagtagagacggggtttcactgtgttagccaggatggtctyaatctcctgacctcatgatctgcccgcctcagcctcccaaagtgctgggattacaggcgtgagccaccgcacctggccaatttttttttcttttaagcag

SEQ ID NO: 186985 - DNA, 201 bp, Homo sapiens
ccagtagctgggactacaggcgcccgccatcatgcccggctaatttttttttgaatttttagtagagacggggtttcactgtgttagccaggatggtctcratctcctgacctcatgatctgcccgcctcagcctcccaaagtgctgggattacaggcgtgagccaccgcacctggccaatttttttttcttttaagcagt

SEQ ID NO: 186986 - DNA, 201 bp, Homo sapiens
gcaactttccctcattttctaattcgtgggacataatgggctgtgtttagagttacagattgcaactattttgagtcccaggtgtgcttggtttactaaakccaccaaaatatttttttaaaaccttgtccttaattaaccttttaaattaaaaagatgcttttctagtttcactgtttttcttttttccactgaatgacc

SEQ ID NO: 186987 - DNA, 201 bp, Homo sapiens
tctatttttccaaatttgagaactgaggcttagaaaactggagcaactttctgagcctctgggctgaattcgggactctgatttgtagggtcaagttttckgctccttggaaatctggcagatccaaattggatggaactgtgttggacgttgttggcactgcttacagatgagagaggctggggagacccagcacttcgt

SEQ ID NO: 186988 - DNA, 201 bp, Homo sapiens
ttagaaagagggacggctggattttcctcacggggcttgcgtgtctaaatgtttacattttattcttattagttgtccacaaacaaccctatgattttggmtagttactgaatttctatttttccaaatttgagaactgaggcttagaaaactggagcaactttctgagcctctgggctgaattcgggactctgatttgta

SEQ ID NO: 186989 - DNA, 201 bp, Homo sapiens
tttttttttttttttttgagacggagtctcactctgtcaccaggctggagtgcagtggcacgatctcagctcactgcaacctccgacttcctggttcaagsaattctcctgcctcagcctcccgggtagttggagttgcaggcctgcaccaccacaaccagctaattttttatttttagtagagacggagtttcaccatgt

SEQ ID NO: 186990 - DNA, 201 bp, Homo sapiens
aatacaaaaatcagccgggcatggtggtactcacctgtagtcccaactacttgggagcctgaggtgggagcatcacttgagcccagtgagctgtaatcacrccactgcattccagcctaggcaacagagcaagaccctgtctcaaaaataaaaaggaagaaagaaaggaagtaaagaaaaataacaactcagttaatatca

SEQ ID NO: 186991 - DNA, 201 bp, Homo sapiens
gggtttcactgtgttagccaggatggtctcaatctcctgacctcatgatctgcccgcctcagcctcccaaagtgctgggattacaggcgtgagccaccgcrcctggccaatttttttttcttttaagcagtgtgattggttttccctgagtacggaagtctcagtcccagaatatgttcagattggcagaggagaaattcg

SEQ ID NO: 186992 - DNA, 201 bp, Homo sapiens
gtgttagccaggatggtctcaatctcctgacctcatgatctgcccgcctcagcctcccaaagtgctgggattacaggcgtgagccaccgcacctggccaatttttttttcttttaagcagtgtgattggttttccctgagtacggaagtctcagtcccagaatatgttcagattggcagaggagaaattcggttgtcatgt

SEQ ID NO: 186993 - DNA, 201 bp, Homo sapiens
gtgtgctctacaggatcccacccagcagtcctcaggctgcagtttaatcaggacgcttccagcctccttcccacactgtggggtcctattcttaattttctttttttttttttgtttgaggtgggagtcttgctctgtcgcccaggctggagtgcagtggcacaatcttggctcactgcaacctctgtttcctggattcaa

SEQ ID NO: 186994 - DNA, 201 bp, Homo sapiens
agccttgaccttctgggctcaagtgatcctcctacctcagcctcccgagaagctgtcaccacaggcatgcaccaccatgcttggctaatttaaaaaaatgttttgttttttttttcatagagatggggtttccctgtgttgcccacgctggtcatgaacttctggactcaaatgatcctcccactttggcctcccaaactg

SEQ ID NO: 186995 - DNA, 201 bp, Homo sapiens
attcctgaaggccagtggaaccaaagttggcccttccatggccacacacccccagatgcatgcaaaccctgtccctcctgtgtgagccattggtgccgcgkgcgtgtccatgtctggcctaaccggtctttccccctcttcggcaggctgatgtttcagacaccgcaggaaatgggcttaatagtgatcgcggcccggcag

SEQ ID NO: 186996 - DNA, 201 bp, Homo sapiens
tgaccttctgggctcaagtgatcctcctacctcagcctcccgagaagctgtcaccacaggcatgcaccaccatgcttggctaatttaaaaaaatgttttgttttttttttcatagagatggggtttccctgtgttgcccacgctggtcatgaacttctggactcaaatgatcctcccactttggcctcccaaactgttggg

SEQ ID NO: 186997 - DNA, 201 bp, Homo sapiens
gtaaccttccaaggtaggtgctcttatctctaccttacagacaggacattgaagcatggggaatttgagtagcttgctcaggtcacacgctcttaaccagrggagccaggattgaagtttgggaagttgggctgactaggctgtgctggaagagtgtagagacaaacaaactgcctggactcttttctttttgttttaaaa

SEQ ID NO: 186998 - DNA, 201 bp, Homo sapiens
ctttctgcagtgttcttataaatgacaaagtcttgcttctaaatccctagtctgaccgggcgcggtggctcacgcctgtaatcccagcacgttgggaggcygaggtgggacgatcacctgaggttaggagtttgagaccagcctggccaacatggtgaaaccccatctctactaaaaatacacaaattagccaggtgtggt

SEQ ID NO: 186999 - DNA, 201 bp, Homo sapiens
ctaaaaatacaaaagttagccaggcatggtgacgggcacctgtaatcccagctactcgggaggctgaggcaggagaatcgcttgaacccaggaggcagagyttgcagtgagccgagattgcaccactgcactccagcctgggtgacagagagagactgtctcaaaaacaaacaaacaaaaactatccttagattaagacat

SEQ ID NO: 187000 - DNA, 201 bp, Homo sapiens
gtgggcgcgctggggtcgccggccggctgagctcgtgcgcgccacggtgcggcggctgcgtgcctcgcgctgttccttcaccttctgcggcgcggccgcgsagcccccgggcgcccgcgtgtgcctgagccgtggcggccgcgtcttctgcgtcagcgacagccaggtgggcgggtcgggcgggcgggcgacccgggcccc

SEQ ID NO: 187001 - DNA, 201 bp, Homo sapiens
agagcatttgggtacaaagtgagaatttacagagatcatcctcttcagaaacagtgagtaccatgtttacttgtgtcccataaggaactgatgtgtcttaktcaaaaccaaatttgctttttttttttttttcctgagacagagtcttgctctgtcacccaggctggagtgcagtggtgtgatctcggctcactgggacct

SEQ ID NO: 187002 - DNA, 201 bp, Homo sapiens
aattcagccatgtactctggaggtttagctatgttgtagccaattgatctatctcattcctttttactactgtacattataccacaataagagcatgctaygctttgtttagctgctagctgtttccttcctaatggatagttagctgatttctgttgtttttctctgagaaccaatgttgcaacgcccatcgaggaactc

SEQ ID NO: 187003 - DNA, 201 bp, Homo sapiens
ggctggagtgcagtggcatgatcatggctcactgcagcctttacttcctgggctcaatccatcctcccacctaatcttcccaagtagctgggaatacaggygtgtgccaccacacccagctagtcttttgtttttagtagagatggggtttcaccttgttgcccaggctggtcttgaactcctgggcttaagcgatccttc

SEQ ID NO: 187004 - DNA, 201 bp, Homo sapiens
ggtggccaaattaaggatgatataactgtcaagtggcatagtttgtgtcttactaatatttaagatttgataagattggccctggtcagcctgggcagcayagcaagatgctgtctctacaagaaattaaaaaaaaaaaatttagccaggcatggtagcgtatgcctttggtcccatctacttgggaggctgaggtgggag

SEQ ID NO: 187005 - DNA, 201 bp, Homo sapiens
gataagaaaacttaggttataagattaaatgacattcctaaagtgataggaatatcattgctaagtgacagacaaagttttctttcttttttttttggagwtggagtcttgctgtgttgcccaggctggagtgcagtggtgcgatctcagctcactgcaacctccacctcccgggttcaagcaattctcctgcctcaccct

SEQ ID NO: 187006 - DNA, 201 bp, Homo sapiens
acagtacttgtgtctcttatgtttggtagaagacgaccagctgttgatacgacggttttggtgaactcagggctaattttctttctttctttctttctttyttttttttttttgagacagtctcactctgtcgcccaggctggagtgcagtggcgcgatctcggctcactgcaagctccgcctcccaggttgacgccatcc

SEQ ID NO: 187007 - DNA, 201 bp, Homo sapiens
cgtatacattatagttaatgtgttgcttcacgacagatacacattgtgagaaatgcgtccttaggtgatttcatcatgcaaacatcatagagtgtacttayacaaatctagatgctgtagcctactttacacctgggatttatggggtagcctattgctcctaggctataaacctgtacagcatgttactgcattggatac

SEQ ID NO: 187008 - DNA, 201 bp, Homo sapiens
atcttagcttactatcatatttttactttataaacttgattttttaaaatttttgattctttcgtaataacagcttaaaacaaacacattgtacagctgtaaaaaatattttctttctatccttattctaaaagcttttttctaagattttatatatttaaaaaaaaattttgtttttaaaattttattcttattttcatt

SEQ ID NO: 187009 - DNA, 201 bp, Homo sapiens
aatgatcagatttgcactttaggaaggtcacaattcaggcagattgcagaagggattggaggggagcaaacctggaacagattgtggccacatgggaaaakataatgggcttgatgagtgttgggagtaggaacgctgagatagagacatgtccatactggttaggaggtgatggcctgtgggtggatggtgggtcacttg

SEQ ID NO: 187010 - DNA, 201 bp, Homo sapiens
tagctctcctttatcctctctatttccaaacacaaaagacagcaaggatagccaaaagttaaaaataactttttccctttagtcttgtattttcaaattcttttttttttttttttttctagacggagtgtcgttctgtcgtccaggctggagtgcagtggtgtggtctcggctcaccacaacctctgcctactgggttcc

SEQ ID NO: 187011 - DNA, 201 bp, Homo sapiens
gagagccaaaatgaatgaagggagcttgacgaggtcattcaagtatgatgatggagggaggtgacccaaaaacaggatttagaaacataagccaactgtcsacttagtgatgctgactaaatctcattagctgaacaaatggaacaacaacaacaattaaaaaaccaaaaccaaaatcaaaacaaagaagcaggaaaaaaa

SEQ ID NO: 187012 - DNA, 201 bp, Homo sapiens
aacataagccaactgtccacttagtgatgctgactaaatctcattagctgaacaaatggaacaacaacaacaattaaaaaaccaaaaccaaaatcaaaacraagaagcaggaaaaaaaataaagaaattgtccttactagttttgttgtatattaatttttaattgaggtataatttatataaaataaaatgcacagattt

SEQ ID NO: 187013 - DNA, 201 bp, Homo sapiens
gttttgaagtttttcttgctccttggaaagcacttccaaaattgtgctaacaaattacaagtaggccatttataagctacataacacttttgttattacgwcatcttggcctccagcgaaataaatgttaacgttagaatttgtcatttaagttcacaggcagcatcatgtggctctctggagttttacttgtgttaatgt

SEQ ID NO: 187014 - DNA, 201 bp, Homo sapiens
aggctgaggtgggaggattgtttgagcccaggagttcaagaccagcctgggcaacataatgagatcctgtctctaaatttaaaaaaaaaaagaaaaagaaraaagaaactgtttttctcattgcctgtgagtaccctcagtttacatagtgctatctttccccttcaggtgcacttagaactacctcccagctccaacata

SEQ ID NO: 187015 - DNA, 201 bp, Homo sapiens
ttaagcagcactatgaaacaggttactaatggaggaaaaatagttggaatataatcataaaagtttaatattttcagtatacaaaaagctttacagttgakgctgggcgcggtggctcaagcctgtaatcccagcactttggaggctgaggcaggcagatcgtttgaggtcaagagttcaagatcagcctggccaacatgg

SEQ ID NO: 187016 - DNA, 201 bp, Homo sapiens
cattcaagaatctgagcactcaggtgcatcttggggtaaggctactctgaggccatctcagtgaaagagctaggaaagataattattttcctcttaaagayatgagttcaaatgcatatttccaatagttaaagatgttctaatttaaattcttttgatgctctaaatattgtctacttttctctttattttgattaacaa

SEQ ID NO: 187017 - DNA, 201 bp, Homo sapiens
acagaggggcatggcagcttcatgggacccccctataggagactcaatcctgggtgcctctatagaaacataaattcagtgaaaacaaaggagctagttcycatggctggagaatgtaaacggatgaaggtaatgccccccttctcccaccatagtctttccagggaatttatttccagctccattaaatttatagcatca

SEQ ID NO: 187018 - DNA, 201 bp, Homo sapiens
gtattgctgttttatcaccagctacctgcagtgcatttgggctaaacatgtcgtttgcataaaaccattttaaaaatcacaaattgacctgcaaagcaagrtgtatcaacagaggggcatggcagcttcatgggacccccctataggagactcaatcctgggtgcctctatagaaacataaattcagtgaaaacaaaggag

SEQ ID NO: 187019 - DNA, 201 bp, Homo sapiens
tacaggtgcccatcaccatgcctggctaatttttgtatttttagtagagacagggtttcaccatgttagtcaggctggtctcaaactcctgacctcaggtsatccacctgcctcagccccgcaaagtgctgggattacaggcgtgagccactgcacctggcttaatgtatttttctaatgagttaattagaattctccact

SEQ ID NO: 187020 - DNA, 201 bp, Homo sapiens
agtagagacagggtttcaccatgttagtcaggctggtctcaaactcctgacctcaggtgatccacctgcctcagccccgcaaagtgctgggattacaggcrtgagccactgcacctggcttaatgtatttttctaatgagttaattagaattctccactaaaaaaaatctttgcctgccattttttaacatagtacttgat

SEQ ID NO: 187021 - DNA, 201 bp, Homo sapiens
atgatcattggcacacacatatctgggtccctgctgtcagttctttcgggtttatacctgggagtggaattgctggatcatgtattaattctctgtttaattttttttttttttttttgagacggagttttgctcttgttgcccaggctggagtgcaatggcatgatcttggctcactatagcctccgcctcctgggttca

SEQ ID NO: 187022 - DNA, 201 bp, Homo sapiens
cctaactggaaggacgcatcatcagggccccagagaaggatggctggatgggttccaggcttgctgctggggctgagacgagtggtctctaacccagaggccaggggagggggcaggagaggcagcgcagagtgcagctggctgctggggacacacagggccagctggagcgcgttctccacgggatgagggtggctactt

SEQ ID NO: 187023 - DNA, 201 bp, Homo sapiens; identical to SEQ ID NO: 32557

SEQ ID NO: 187024 - DNA, 201 bp, Homo sapiens
tggcacgctgaataaacgcccaccccaagggttgtcagatgatcaatccctgccttagatgaagtcaggaaaaaaaaatagtcctatttcaggagcgccatttttttttttttccatacagagtcttgccctgtcccccatgctggagtgcagtggcgcgatctctgctcactgcaccctccacctccggagttcaagcga

SEQ ID NO: 187025 - DNA, 201 bp, Homo sapiens
atgtccctaaatatttcagatctattgatgccattaaaatgatattttaaagaagttcaggctccaaatatttattgttagtatatggaaatgcacccaatttttgttttgtttttttttttttttgagatggagtctcactctgttgcccagcctggagtgcaatggtacaatcttaggtcactgcaacctctgcctccc

SEQ ID NO: 187026 - DNA, 201 bp, Homo sapiens
cctaaatatttcagatctattgatgccattaaaatgatattttaaagaagttcaggctccaaatatttattgttagtatatggaaatgcacccaatttttkttttgtttttttttttttttgagatggagtctcactctgttgcccagcctggagtgcaatggtacaatcttaggtcactgcaacctctgcctcccaggtt

SEQ ID NO: 187027 - DNA, 201 bp, Homo sapiens
gctcagtacatttggagtctgcattcacctgagttggggaatggccctagataaggccagaggggaaagcaggggctggaatgttgtgtgggaaattaccytgatatggtggtagcttccaagaacatggccaagcagcctattccagcagtcacagaatagagaggctcataggctgagttaagacgctcgaatcacatt

SEQ ID NO: 187028 - DNA, 201 bp, Homo sapiens
atatttcagatctattgatgccattaaaatgatattttaaagaagttcaggctccaaatatttattgttagtatatggaaatgcacccaatttttgttttktttttttttttttttgagatggagtctcactctgttgcccagcctggagtgcaatggtacaatcttaggtcactgcaacctctgcctcccaggttcaagt

SEQ ID NO: 187029 - DNA, 201 bp, Homo sapiens
gatgcacagaaagcatttgcacctggcccctgcacacagctcagtacatttggagtctgcattcacctgagttggggaatggccctagataaggccagagrggaaagcaggggctggaatgttgtgtgggaaattaccctgatatggtggtagcttccaagaacatggccaagcagcctattccagcagtcacagaataga

SEQ ID NO: 187030 - DNA, 201 bp, Homo sapiens
tccattgtaatcttatgagggacagccatcatatatatggtccatcgttgggcgagacattatgtggtacatgactgtattaaatttacaaatatggtaarcttgaagttttcttatatattctaatattatatataaatttagtaagatttcaacttaaagccaagatcagactttccaaaatattgcaattatataaaa

SEQ ID NO: 187031 - DNA, 201 bp, Homo sapiens
acaatgtcattagaccatgggaattttttacctccattgtaatcttatgagggacagccatcatatatatggtccatcgttgggcgagacattatgtggtrcatgactgtattaaatttacaaatatggtaagcttgaagttttcttatatattctaatattatatataaatttagtaagatttcaacttaaagccaagat

SEQ ID NO: 187032 - DNA, 201 bp, Homo sapiens
gtctcactctgtcgcccaggctggagtgcagtggtgtgatctcggcagtctctgcctcccaagttcaagtgattcttgtgcctcagcctcgtgagtatctrggactacaggtgcctgccactatgctcagctaatttttagtagtattttagtagtatttttagtagagatggggtttcactatgttggccacgttggtct

SEQ ID NO: 187033 - DNA, 201 bp, Homo sapiens
ggggctggcctctgggaggggcttcccaagacaaccctgcaagcctgtggagcttggggcttgggggtgcaggatagagagcagtctctccgattttctcrgactccctgaccaggtcaggggttacctagtacccagtgttcaccttccctacagcctgctgaattctaaagaggaaaccccacacagggccagacaggt

SEQ ID NO: 187034 - DNA, 201 bp, Homo sapiens
tcatttgactcgttctcttctcctctgtattatctgcaaactagatgtgagttttaaaggttgatcaattgaaattagttgaattaagtttcatctctgawgccactactctgtagccacagggagctttgggacgtaaagggcctggtgtttgcaggaggatggcctaagagcctggatctgtgtttactgagatcttag

SEQ ID NO: 187035 - DNA, 201 bp, Homo sapiens
acgctgtccagcctgtgtttttgggtgaaaaaagaacctgtataaatatattgccttaatattcttggatatcaggaagttcacttttgatattaaacttaaaaaaaaaaaaacctctgccttaggaaacttgggtctgtaaaagtgtttgacagacattgaagctgagcttgccaacactagaggtggaacctcccatag

SEQ ID NO: 187036 - DNA, 201 bp, Homo sapiens
gcctcagcctcccaagtagctggaattacaggcacctgccaccatacccggctaattttttgtatttttagtagagacggggttttaccatgttggccagkgtgggtcttgaactcctgacctcaggtgatctgcccgcctcagcctcccgaagtgctgtgatacagccatgagccaccattctggctccttggactttta

SEQ ID NO: 187037 - DNA, 201 bp, Homo sapiens
tctgtgaccttgacagtctctcctccctgagccttactgtcttcagctgtgagatcaggggcgttggaacactagatgctctccaggcatcttcagctcayctcctttgacctggtgatgcgcccacaccagagcctccaccaaccagccttttatctctcagtgacttctggcgcttttaggttgctgagctagttttgt

SEQ ID NO: 187038 - DNA, 201 bp, Homo sapiens
gttttgtgaatcagcctcatgtgagttgaggaaatgttgtgtgggagacagttgactttctacaaatgaaggagaagaaaaggaaacacaatcccataaaataaataaataaatatatatatatatatatatatatatatatatatatatatatatattttttttttttttaaatgggaagggggcaggatcgcattgggg

SEQ ID NO: 187039 - DNA, 201 bp, Homo sapiens
tgagggatctgttcccattacccaaacacttcccccacaggccccacctcaaccactggggattacatttcaacgtgagatttggaggggacaaacttccrgattctatcagtaaccaattccttgggctttttttttttttttttttgagacggagtctggctctgttgtccaggctggactgcagtggtgcaatcttgg

SEQ ID NO: 187040 - DNA, 201 bp, Homo sapiens
ttttgtgaatcagcctcatgtgagttgaggaaatgttgtgtgggagacagttgactttctacaaatgaaggagaagaaaaggaaacacaatcccataaaataaataaataaatatatatatatatatatatatatatatatatatatatatatatattttttttttttttaaatgggaagggggcaggatcgcattgggga

SEQ ID NO: 187041 - DNA, 201 bp, Homo sapiens
tggttcaagcagttcccctgcctcagcttcccgagtagctgggattacaggcacacatcatcaggcccagctaattttttttttttttatttttagtagasacagggtttcaccatgttgacaagactggtctcgaactcctgacctcaggcaatccacccgctttggcctcccaaagtgctgggattacaggcgtgagcc

SEQ ID NO: 187042 - DNA, 201 bp, Homo sapiens
tttgtgaatcagcctcatgtgagttgaggaaatgttgtgtgggagacagttgactttctacaaatgaaggagaagaaaaggaaacacaatcccataaaataaataaataaatatatatatatatatatatatatatatatatatatatatatatattttttttttttttaaatgggaagggggcaggatcgcattggggag

SEQ ID NO: 187043 - DNA, 201 bp, Homo sapiens
cctgtctcctgcagatgcccagaggtcctcatggcagggcgggctccctcccagcctgacaacagcagccaccacctcactgcaggcaccctccatccackattcttcaaggcctcctcagcccttgatgtactgcgttatttaacatctgtctctgtctctatcacttaaaccttacaaagtcaggaactttgctcactg

SEQ ID NO: 187044 - DNA, 201 bp, Homo sapiens
cggcctccctcccatcctcgtggtccagagtggctcctaaagtctagaggggggctgaggtggcagggggctggtgtgtcagcgccatcctgagcagcacycacctggccgggttgcgacaccgcccaggctcagcttcaattttgctccagaatcagagcgggcacagggagcaggaagaggccaggcagcgggatcagg

SEQ ID NO: 187045 - DNA, 201 bp, Homo sapiens
ttgtgaatcagcctcatgtgagttgaggaaatgttgtgtgggagacagttgactttctacaaatgaaggagaagaaaaggaaacacaatcccataaaataaataaataaatatatatatatatatatatatatatatatatatatatatatatattttttttttttttaaatgggaagggggcaggatcgcattggggaga

SEQ ID NO: 187046 - DNA, 201 bp, Homo sapiens
gctgtttgtgctgaggggtgcctacaggcctgcaaccagccgtcctcagcccctcctcggcctccctcccatcctcgtggtccagagtggctcctaaagtmtagaggggggctgaggtggcagggggctggtgtgtcagcgccatcctgagcagcacccacctggccgggttgcgacaccgcccaggctcagcttcaattt

SEQ ID NO: 187047 - DNA, 201 bp, Homo sapiens
tcagcctcatgtgagttgaggaaatgttgtgtgggagacagttgactttctacaaatgaaggagaagaaaaggaaacacaatcccataaaataaataaataaatatatatatatatatatatatatatatatatatatatatatatattttttttttttttaaatgggaagggggcaggatcgcattggggagaatagctg

SEQ ID NO: 187048 - DNA, 201 bp, Homo sapiens
tgggctggtcttggcttgaaggcagggcgtcaccagggacccgcccctttctacctatgagcctgtctgccttctgctgtcagtcatgttgtccaaggtgyccaggctgtttgtgctgaggggtgcctacaggcctgcaaccagccgtcctcagcccctcctcggcctccctcccatcctcgtggtccagagtggctccta

SEQ ID NO: 187049 - DNA, 201 bp, Homo sapiens
gcctcatgtgagttgaggaaatgttgtgtgggagacagttgactttctacaaatgaaggagaagaaaaggaaacacaatcccataaaataaataaataaatatatatatatatatatatatatatatatatatatatatatatattttttttttttttaaatgggaagggggcaggatcgcattggggagaatagctgcag

SEQ ID NO: 187050 - DNA, 201 bp, Homo sapiens
aagttctcactctgggccacaggcttcacctggaactgacagccaggtccccaggttttgggctggtcttggcttgaaggcagggcgtcaccagggacccrcccctttctacctatgagcctgtctgccttctgctgtcagtcatgttgtccaaggtgcccaggctgtttgtgctgaggggtgcctacaggcctgcaacca

SEQ ID NO: 187051 - DNA, 201 bp, Homo sapiens
ctcatgtgagttgaggaaatgttgtgtgggagacagttgactttctacaaatgaaggagaagaaaaggaaacacaatcccataaaataaataaataaatatatatatatatatatatatatatatatatatatatatatatattttttttttttttaaatgggaagggggcaggatcgcattggggagaatagctgcagtc

SEQ ID NO: 187052 - DNA, 201 bp, Homo sapiens
tacgttctctcctgaaggtttgtaatgtttcgtttagccctgtagacacttatgataataataagccatttattgagcccttgctaggtattttataaacrttacccctaatgtcacaggatccttggggtgtcgtttcaccagacagaaacctctgtggctagcggtgccttctgcctaagtattgcttgtgcccactgg

SEQ ID NO: 187053 - DNA, 201 bp, Homo sapiens
attggtggggtttgggtgtgggggtaaaatgtaatatagaagtacagttaaacctaacctgatttcagacaaataaaataaccacactaaagtaaaggggaaaaaaaaagaacaaatccaaggaaatgttcaatacaatatttgaatctataccctcaggctaagggcaaaaaaaactgtaaacaaatattgaactctagt

SEQ ID NO: 187054 - DNA, 201 bp, Homo sapiens
gcccgccttggcctcccaaagtgttgggattacaggcgtgaaccaacacgcccggcctcttccaccttcttgagataaccactgttaatatgtgtccttctttttttttttttttttttttgagacagtgtcttgctctgttgcccaggctggagtgcagtggcatgatctttgctcactgcagccttgaactccctgcct

SEQ ID NO: 187055 - DNA, 201 bp, Homo sapiens; identical to SEQ ID NO: 32558

SEQ ID NO: 187056 - DNA, 201 bp, Homo sapiens
catgtgagttgaggaaatgttgtgtgggagacagttgactttctacaaatgaaggagaagaaaaggaaacacaatcccataaaataaataaataaatatatatatatatatatatatatatatatatatatatatatatattttttttttttttaaatgggaagggggcaggatcgcattggggagaatagctgcagtcat

SEQ ID NO: 187057 - DNA, 201 bp, Homo sapiens
agatagtataggatagcgagagactttctgatgggggccctggagcgggcagagcatcaggcagatgggcctggagcagtgcagtgtgttaagacagtackttctctcctgaaggtttgtaatgtttcgtttagccctgtagacacttatgataataataagccatttattgagcccttgctaggtattttataaacgtta

SEQ ID NO: 187058 - DNA, 201 bp, Homo sapiens; identical to SEQ ID NO: 32559

SEQ ID NO: 187059 - DNA, 201 bp, Homo sapiens
tgtgagttgaggaaatgttgtgtgggagacagttgactttctacaaatgaaggagaagaaaaggaaacacaatcccataaaataaataaataaatatatatatatatatatatatatatatatatatatatatatatattttttttttttttaaatgggaagggggcaggatcgcattggggagaatagctgcagtcattt

SEQ ID NO: 187060 - DNA, 201 bp, Homo sapiens
gaagtagaaataaccccatcttgtatacctgtggtgaccaacatggaggccttctcatcagaacatttcaacttagagatctatcgccaaaatctgcagaycaagcagttggggaaagtaattttgtttgccgaagtgacccccacaacgatgcgtctcctggatgggtaaggtgtgagcaggtctgcatctgctcagagg

SEQ ID NO: 187061 - DNA, 201 bp, Homo sapiens
tgagttgaggaaatgttgtgtgggagacagttgactttctacaaatgaaggagaagaaaaggaaacacaatcccataaaataaataaataaatatatatatatatatatatatatatatatatatatatatatatattttttttttttttaaatgggaagggggcaggatcgcattggggagaatagctgcagtcatttaa

SEQ ID NO: 187062 - DNA, 201 bp, Homo sapiens
ccacccccatgcccaactcatttttttggtatgttttttgtagagataaggtttcaccatgttggccagggtggtcttgaactcctgggctcaagcgatcygcccaccttggcctcccaaagtgctaggattacaggcgtgagccactgtgccggccagcctcctcatctttaaatgtacttcccggttagctactgtgtg

SEQ ID NO: 187063 - DNA, 201 bp, Homo sapiens
agttgaggaaatgttgtgtgggagacagttgactttctacaaatgaaggagaagaaaaggaaacacaatcccataaaataaataaataaatatatatatatatatatatatatatatatatatatatatatatattttttttttttttaaatgggaagggggcaggatcgcattggggagaatagctgcagtcatttaaga

SEQ ID NO: 187064 - DNA, 201 bp, Homo sapiens
ctcccaaagtgctgggattacaggcgtgagccaccgcgcccggcctaagtggacatactttttaaccactatattgataattatgtttactgagggagggrcaaattctcccctaaattttcattcattatttagttcaataggtttttatcaagcagatttgaactgatatgcagcacagtggagcctgcctagttacct

SEQ ID NO: 187065 - DNA, 201 bp, Homo sapiens
ttgaggaaatgttgtgtgggagacagttgactttctacaaatgaaggagaagaaaaggaaacacaatcccataaaataaataaataaatatatatatatatatatatatatatatatatatatatatatatattttttttttttttaaatgggaagggggcaggatcgcattggggagaatagctgcagtcatttaagaaa

SEQ ID NO: 187066 - DNA, 201 bp, Homo sapiens
tttgagatggagttttgctcttgttgcccaggctagagtgcaatggcacgatctcggctccccgcaacttctgcctcccgggttcaaatgattctcctgcyttagcctcccgagtagctgggattacaggcatgcaccaccatgcccggctaattttgtatttttagtagagacagggtttcttcatgttggtcaggctgg

SEQ ID NO: 187067 - DNA, 201 bp, Homo sapiens
gaggaaatgttgtgtgggagacagttgactttctacaaatgaaggagaagaaaaggaaacacaatcccataaaataaataaataaatatatatatatatatatatatatatatatatatatatatatatattttttttttttttaaatgggaagggggcaggatcgcattggggagaatagctgcagtcatttaagaaaga

SEQ ID NO: 187068 - DNA, 201 bp, Homo sapiens
ggaaatgttgtgtgggagacagttgactttctacaaatgaaggagaagaaaaggaaacacaatcccataaaataaataaataaatatatatatatatatatatatatatatatatatatatatatatattttttttttttttaaatgggaagggggcaggatcgcattggggagaatagctgcagtcatttaagaaagata

SEQ ID NO: 187069 - DNA, 201 bp, Homo sapiens
gggagaggaaccagtgtggctaaataaatgccacagaactctccttgggcatcccacgcagcatggcacatttattccctaggggccctgggcagtgaagsgttagggtccagttttatctacaaggagattgaggctaagcctaggcaggtgacccctgcgggtcttaaccagccaagtgcctccatggggtcttctgtg

SEQ ID NO: 187070 - DNA, 201 bp, Homo sapiens
aaatgttgtgtgggagacagttgactttctacaaatgaaggagaagaaaaggaaacacaatcccataaaataaataaataaatatatatatatatatatatatatatatatatatatatatatatattttttttttttttaaatgggaagggggcaggatcgcattggggagaatagctgcagtcatttaagaaagatagt

SEQ ID NO: 187071 - DNA, 201 bp, Homo sapiens
actttctacaaatgaaggagaagaaaaggaaacacaatcccataaaataaataaataaatatatatatatatatatatatatatatatatatatatatatatattttttttttttttaaatgggaagggggcaggatcgcattggggagaatagctgcagtcatttaagaaagatagtatttcgatttcagagtttgggac

SEQ ID NO: 187072 - DNA, 201 bp, Homo sapiens
gtcactctgcacagtaagctttgcctacagatttggttagatattgctgcgtcatttcctagttttccagactagatgggatggccatgctctgcatcccygtagcctttaaatcacagttcctattctagttcgtatctttttcttattaggaaatgagactgtttagcatagcagcttgacctgaaatagtaaatttaa

SEQ ID NO: 187073 - DNA, 201 bp, Homo sapiens
tttctacaaatgaaggagaagaaaaggaaacacaatcccataaaataaataaataaatatatatatatatatatatatatatatatatatatatatatatattttttttttttttaaatgggaagggggcaggatcgcattggggagaatagctgcagtcatttaagaaagatagtatttcgatttcagagtttgggacca

SEQ ID NO: 187074 - DNA, 201 bp, Homo sapiens
gggttgaaattgtgccactagcaaataaaaaatactctttcttgttagtaccatatatgtattatgtcacactgaatatgaatgactgttttctcaggtcycccaaggtactagttatgcaaataactagtaccacctccacataactgacactacccagacaaaaggggaagaagttcatgcattacatacaatgtatgg

SEQ ID NO: 187075 - DNA, 201 bp, Homo sapiens; identical to SEQ ID NO: 32532

SEQ ID NO: 187076 - DNA, 201 bp, Homo sapiens
tcccacctgtgtcatcagctttttgtcagatgtccccaaatttacaaaaactgcccttttccctctccatcttctgtcagttggttgcatcattcaccaasttgggcacccgactgatggtctttgcgtcttttaaatttcagttgacagtcagcctttgttttttttgacccagtgcttaggatggtggttacgtgttca

SEQ ID NO: 187077 - DNA, 201 bp, Homo sapiens
ccctgacagctgatcaggcatcttcacaggtcttttcctcttttcttaactttccttagggtcatgtgaggtaggaaggagagagctgagttctctttctrtagaatatcctcatggtcgagcggctctgaccaggaagcagcgcctggttgtgaaatggctgcatctggaatataggtgccgcctcctctcctagaaaga

SEQ ID NO: 187078 - DNA, 201 bp, Homo sapiens
accaagctgcagcgtctccccagaaagccctggcagccctgctggtgggtagggggtgggtctggtcatcggcacaggtgacctggctattttatcagccrgggaacagtaaataacagcagccagtgtctacgtaaccctgacagctgatcaggcatcttcacaggtcttttcctcttttcttaactttccttagggtca

SEQ ID NO: 187079 - DNA, 201 bp, Homo sapiens
tccccgtgttatcaatgacaagcatttctgggatgccaggcctaccctgtggctgcagaacagagcccagccagttgaggaacatagctcacgtcttagtwgcctgtgaagccaggcgtttgcctactgctttcacaagattagttcacaagaatcgtacgttgcattatccccattttacagatgagaagcctgcctgaa

SEQ ID NO: 187080 - DNA, 201 bp, Homo sapiens
tctacaaatgaaggagaagaaaaggaaacacaatcccataaaataaataaataaatatatatatatatatatatatatatatatatatatatatatatatwttttttttttttaaatgggaagggggcaggatcgcattggggagaatagctgcagtcatttaagaaagatagtatttcgatttcagagtttgggaccaac

SEQ ID NO: 187081 - DNA, 201 bp, Homo sapiens
tgtttacttctaaaatttaaaatataactttggcctttgactttggcaacggttgtgactgaagggttattctggcaaattctccatcaaattttttttgytgttccaattcaacacctgaataagttaacctttcacatgccaagctcctgaagttgaattattctgtggcctggtatttttcagagaagcttctacatt

SEQ ID NO: 187082 - DNA, 201 bp, Homo sapiens
tgtcttaagaaaaaaaaaaaaaaatcccaaacaaaaaactcccacctgtgtcatcagctttttgtcagatgtccccaaatttacaaaaactgcccttttcyctctccatcttctgtcagttggttgcatcattcaccaacttgggcacccgactgatggtctttgcgtcttttaaatttcagttgacagtcagcctttgtt

SEQ ID NO: 187083 - DNA, 201 bp, Homo sapiens
gctgaggcaggagattgcttgaatctgggaggtggaggttgcagtgagccgagatcacgccactgcactccagcctgggtgacagtgagactctatctcaaaacaaacaaacaaacaaacaaacaaacaaacaaaaactctctgctggcatcgcttccaacccaaacacccagaacgcaggaggggatgatacagtggcgt

SEQ ID NO: 187084 - DNA, 201 bp, Homo sapiens
gatcccgggaggttcacttgagccccggagtttgaagctacagtgagctatgattgagccattgcactccagtctgggtgacaaagcaagaccctgtcttmagaaaaaaaaaaaaaaatcccaaacaaaaaactcccacctgtgtcatcagctttttgtcagatgtccccaaatttacaaaaactgcccttttccctctcc

SEQ ID NO: 187085 - DNA, 201 bp, Homo sapiens
ctgaggcaggagattgcttgaatctgggaggtggaggttgcagtgagccgagatcacgccactgcactccagcctgggtgacagtgagactctatctcaaaacaaacaaacaaacaaacaaacaaacaaacaaaaactctctgctggcatcgcttccaacccaaacacccagaacgcaggaggggatgatacagtggcgtg

SEQ ID NO: 187086 - DNA, 201 bp, Homo sapiens
ccccaacctcctctcccacacttcgagccggcgtttgggtgaccgtgaaccaggagagacagctgtggcgggccgggagcggtggcttatgcctgtaatcmctgcactctgggaggcctaggaggaaggacagctttgagcccaggagatggagaccagcctgggcaacatagctagacccctctctacaaaaaacaaaac

SEQ ID NO: 187087 - DNA, 201 bp, Homo sapiens
tgaggcaggagattgcttgaatctgggaggtggaggttgcagtgagccgagatcacgccactgcactccagcctgggtgacagtgagactctatctcaaaacaaacaaacaaacaaacaaacaaacaaacaaaaactctctgctggcatcgcttccaacccaaacacccagaacgcaggaggggatgatacagtggcgtga

SEQ ID NO: 187088 - DNA, 201 bp, Homo sapiens
cagaggtcctcatggcagggcgggctccctcccagcctgacaacagcagccaccacctcactgcaggcaccctccatccactattcttcaaggcctcctcmgcccttgatgtactgcgttatttaacatctgtctctgtctctatcacttaaaccttacaaagtcaggaactttgctcactgctgtatccctggaacttgg

SEQ ID NO: 187089 - DNA, 201 bp, Homo sapiens
gaggcaggagattgcttgaatctgggaggtggaggttgcagtgagccgagatcacgccactgcactccagcctgggtgacagtgagactctatctcaaaacaaacaaacaaacaaacaaacaaacaaacaaaaactctctgctggcatcgcttccaacccaaacacccagaacgcaggaggggatgatacagtggcgtgaa

SEQ ID NO: 187090 - DNA, 201 bp, Homo sapiens
cccagcactttgggaggcagaggcgggtggatcacctgaggtcaggagttcgagaccaccctggccaacgtggtgaaaccctgtctctactaaaaatacaraagttagccaggcatggtgacgggcacctgtaatcccagctactcgggaggctgaggcaggagaatcgcttgaacccaggaggcagagcttgcagtgagc

SEQ ID NO: 187091 - DNA, 201 bp, Homo sapiens
ttgatgtttcctacctagtgtgtatcttcagtttatgtcttcaatttcctttttgaaaaaataatgaattcctccaagtctcaagttattggtttaatttycagcatttctgcccttccccttaccattcccttcccccacctctgccccgaaacatacatgtattattactttgtgctactaaccaaactaattttgtcc

SEQ ID NO: 187092 - DNA, 201 bp, Homo sapiens
gcgtgtcaccaagagggcagcgcgtcaccaagagggcagcgcgtcaccaagagggcagcacacgccctgagagtgcggacaggctgaggctcccgcacatycgcagagggctgggcttcaccacacgctgtccagcctgtgtttttgggtgaaaaaagaacctgtataaatatattgccttaatattcttggatatcagga

SEQ ID NO: 187093 - DNA, 201 bp, Homo sapiens
tagctgggcatggtggccaggaagatcacttcagctcagagttcgaagctgcagagagctgtgattatgccacggcactccagcctgggcgacagaacgaraccttgtctcttaaaaaaaatctatcctagctgggcgcggtggttcacgcctgtaatcccagcactttgggaggcagaggcgggtggatcacctgaggtc

SEQ ID NO: 187094 - DNA, 201 bp, Homo sapiens
ccagagggcttgaatgccctctgcagtgttgtggatgtgtctgagcaccagatactgggcaatttcctaccatttgttcagtcaaatatttactgagctcttttttttttttttttctttaagagatgggatcttgctctgtcatccaggctggagtgtagtggtgcaatctcggctcactgcagcctcgaactcctgggc

SEQ ID NO: 187095 - DNA, 201 bp, Homo sapiens
ctctatgaaaaataatttctaaaaaattagctgggcatggtggccaggaagatcacttcagctcagagttcgaagctgcagagagctgtgattatgccackgcactccagcctgggcgacagaacgaaaccttgtctcttaaaaaaaatctatcctagctgggcgcggtggttcacgcctgtaatcccagcactttgggag

SEQ ID NO: 187096 - DNA, 201 bp, Homo sapiens
aggagaatcgcttcaacccgggaggtggaggttgcagtgagtcgagattgtgccactgtactccagcctggcgacagagcgagactctgtctcaaacaaamaaaaaaaaagaagaatgccagcagtataataagtgtaataatccttaacaatatctgttttcaggaaaatgcagattaaaagcacagtgagataccactg

SEQ ID NO: 187097 - DNA, 201 bp, Homo sapiens
atggccaaggtactttaaaaatctatctttatggctaggcgccatggctcaaacttgtaatcccagcactttgggagatccaggcaggagtttgactgctygagaccaggagtttgagaccagcctgggcgacacagcgagaccctgtctctatgaaaaataatttctaaaaaattagctgggcatggtggccaggaagat

SEQ ID NO: 187098 - DNA, 201 bp, Homo sapiens
gaaaagactgacacaccaaatattggtgaagttgtagaggaactgcaatttctgaacatcgttggtgggaatataaaatgatacgaccattttgaaaaaawatagtggagcaatttttaaataaaagcacacatatgcctaccctgtaaccccatccctagatatttacccaagataaacaaaaatacatgtctatgcaga

SEQ ID NO: 187099 - DNA, 201 bp, Homo sapiens
gttgtcctggagtggccaagtctctcctcagcgggaactgcacgtccttctccagtgacacaattttaaggtcttgttaccatgcaggaacccactttccrgctgccactgtcctgtagagaagtgtaggatatggctttagtcctgtttatcactttgtttttcttctatttctggtccacagagatgcttgcttttaag

SEQ ID NO: 187100 - DNA, 201 bp, Homo sapiens
aaagtgacacaccaataagattgcatcctggctgggcgcggtggctcacacctgtaaccccagcactttgggaggccgaggcgggtggatcacaaggtccrgagttcaagaccagcctggccaacatggagaaactctgtctctactaaaaatacaaaaattatttgggcatggtggtgcatgcctgtaatcccagctact

SEQ ID NO: 187101 - DNA, 201 bp, Homo sapiens
ccttgtctccaggaactccgcccgcttgtagcgccatcctgttttccgtcctggcatcgttctcatgtgaaaacgagttcatacaattcactgcgtgtgcrtcttggctactctgtgtattcaccctgaccagtgagtccacatgcattcagtcgagcacccctctcatcccttcggctctagtgggaacagaacttgact

SEQ ID NO: 187102 - DNA, 201 bp, Homo sapiens
gaaagagctaggaaagataattattttcctcttaaagatatgagttcaaatgcatatttccaatagttaaagatgttctaatttaaattcttttgatgctstaaatattgtctacttttctctttattttgattaacaaaataaaattactttttgcttgatttgacgattgttccaaaaacaagaacatgttaatatacg

SEQ ID NO: 187103 - DNA, 201 bp, Homo sapiens
aaggttttgctctgtgtattttttccttctgtgatgttggggttaggtgtagtgtctcagattggccaaatgagtttttcttggtagacggctttaaaaawtttttttaattttaatttaataggtacatagtaggtgtatacatttatgggatgcatgagatgctttgatacaggcgtgctgtgcataataatcacatca

SEQ ID NO: 187104 - DNA, 201 bp, Homo sapiens
aaatttatcaataaccgttggaggatgacataggtagaaatataggtctatttattgataacctagttttaaaattaataattatatgggaagatactttaagaaatggtgggggaaatatgctcatataagtgaaaatcatgcaagtaataactaagaaaaataaggaattaatagctaataatcatgagagtgactgtt

SEQ ID NO: 187105 - DNA, 201 bp, Homo sapiens
aagttcaaacaggtactgagttaatgtcagtatgataggctttccctggggaagttctgccatgtatttaatgggggataggacagtaaacactctactcyctcttgtccccaaactattattcccagggcatgccttcctaagggcaagaaactagagactttttgagtctgtggagacttttcctatagaaagccggtc

SEQ ID NO: 187106 - DNA, 201 bp, Homo sapiens
gcgggagaatggcgtgaacctggaaggcggagcttgcagtgagccgagatcgcaccactgcactccagcctgggtgacagagcgagactctgtctcaaaataaataaataaataaataaataaataaataaataaataaattaaacatcttttgcttaatgcatggactcaggtcattgaaaaaaagttgcagttgtttcc

SEQ ID NO: 187107 - DNA, 201 bp, Homo sapiens
agaatggcgtgaacctggaaggcggagcttgcagtgagccgagatcgcaccactgcactccagcctgggtgacagagcgagactctgtctcaaaataaatwaataaataaataaataaataaataaataaataaattaaacatcttttgcttaatgcatggactcaggtcattgaaaaaaagttgcagttgtttccttagg

SEQ ID NO: 187108 - DNA, 201 bp, Homo sapiens
gagtctttttctgtcacccaggcttgagtgcagtggtgcaatctcggctcactgcaacctctgtctcctgggttcaagtgattctcctggctcagcctccygagtaggtgggactgcaggtgtatgccactgcgcctggctaagttttgtatttttagtagagatggggtttcgccatgttgcccaggctggtcttgaact

SEQ ID NO: 187109 - DNA, 201 bp, Homo sapiens
ggaaggcggagcttgcagtgagccgagatcgcaccactgcactccagcctgggtgacagagcgagactctgtctcaaaataaataaataaataaataaatwaataaataaataaataaattaaacatcttttgcttaatgcatggactcaggtcattgaaaaaaagttgcagttgtttccttagggccttccagctgagac

SEQ ID NO: 187110 - DNA, 201 bp, Homo sapiens
ttcaatttatctatttcttcttttgttgcttctgtttttggtgtcttatctaagaagtcattggttgatcaaaagtcatgacaatttatgcctgtgttttycttctctgaattttgtagttttagctcttatattgaggtctttgatccagtttgagttaatttttgtacgtggtttgcatgatgtgaggaagaggtttat

SEQ ID NO: 187111 - DNA, 201 bp, Homo sapiens
tacaacaaatgaatcaatacaaacataaccaaataacgagactcagcagtaacacattttatcctacattcttttcgaatatttaaattttattgaggatraccatggatttcatggctcttcatttttttttttttttttgagatggagtctttttctgtcacccaggcttgagtgcagtggtgcaatctcggctcactg

SEQ ID NO: 187112 - DNA, 201 bp, Homo sapiens
ggcggagcttgcagtgagccgagatcgcaccactgcactccagcctgggtgacagagcgagactctgtctcaaaataaataaataaataaataaataaataaataaataaataaattaaacatcttttgcttaatgcatggactcaggtcattgaaaaaaagttgcagttgtttccttagggccttccagctgagacttga

SEQ ID NO: 187113 - DNA, 201 bp, Homo sapiens
ggcttatgcctgtaatccctgcactctgggaggcctaggaggaaggacagctttgagcccaggagatggagaccagcctgggcaacatagctagacccctytctacaaaaaacaaaacaaaacaaaaaaaacacttaggtcggcgtggtggcacgcgcctgtagtcccagctactctggagggtgaggcgggagggtcact

SEQ ID NO: 187114 - DNA, 201 bp, Homo sapiens
ttttttcatagagatggggtttccctgtgttgcccacgctggtcatgaacttctggactcaaatgatcctcccactttggcctcccaaactgttgggattrcaggcatgagccactgtgtctgcccccaagtcctttttaaattaaatttcctttttatacatttcagtggcctgattatgtaattcttatcaatctagca

SEQ ID NO: 187115 - DNA, 201 bp, Homo sapiens
gtggttgagttgtttcttcctattttttttttttttaaatatagtcagggtctcactccattgctcaggctggatggagtgcattgatgtgatcgcagctyactgcagccttgaactcctgggctcaagcaatcctcccttttcagcctctgagtatctgggaccaccacacccagccttttttttttttttttttttttt

SEQ ID NO: 187116 - DNA, 201 bp, Homo sapiens
gcggagcttgcagtgagccgagatcgcaccactgcactccagcctgggtgacagagcgagactctgtctcaaaataaataaataaataaataaataaataaataaataaataaattaaacatcttttgcttaatgcatggactcaggtcattgaaaaaaagttgcagttgtttccttagggccttccagctgagacttgaa

SEQ ID NO: 187117 - DNA, 201 bp, Homo sapiens
gaacttgcagaaatccatctcatttttacaccagtcttttacgccacattgtacactaacctcacataaagtgtaatgaccgtcaaaatggctatttcccyaattataagataatattcataatcatgtcacatttgttgatgtttcctacctagtgtgtatcttcagtttatgtcttcaatttcctttttgaaaaaataa

SEQ ID NO: 187118 - DNA, 201 bp, Homo sapiens
tgtagcaagaacaccatagggagccttcctggcacagcctttttagaggcagccttcttggtgcttatctgtcttcaatttctgtttcctgtccttatttwaaaaaacattattgcatcccgtgaatgtatgtgattgaccttaaaatcttttgcatgaaggcttagtataatttaataaaaacggccttatcttattttc

SEQ ID NO: 187119 - DNA, 201 bp, Homo sapiens
cggagcttgcagtgagccgagatcgcaccactgcactccagcctgggtgacagagcgagactctgtctcaaaataaataaataaataaataaataaataaataaataaataaattaaacatcttttgcttaatgcatggactcaggtcattgaaaaaaagttgcagttgtttccttagggccttccagctgagacttgaat

SEQ ID NO: 187120 - DNA, 201 bp, Homo sapiens
gggtctttctctgtcgctgaggctggagaccagtggtgcgatcacagctcactgaagccttgaccttctgggctcaagtgatcctcctacctcagcctccygagaagctgtcaccacaggcatgcaccaccatgcttggctaatttaaaaaaatgttttgttttttttttcatagagatggggtttccctgtgttgcccac

SEQ ID NO: 187121 - DNA, 201 bp, Homo sapiens
gagcttgcagtgagccgagatcgcaccactgcactccagcctgggtgacagagcgagactctgtctcaaaataaataaataaataaataaataaataaataaataaataaattaaacatcttttgcttaatgcatggactcaggtcattgaaaaaaagttgcagttgtttccttagggccttccagctgagacttgaatgc

SEQ ID NO: 187122 - DNA, 201 bp, Homo sapiens
tatattctagatatgaatcctttatcagttatgtgtgttacaaatacctattctcattccagagctgctaaaaaaaaaaaaaaaaaaaaaaaaagacaggrtctttctctgtcgctgaggctggagaccagtggtgcgatcacagctcactgaagccttgaccttctgggctcaagtgatcctcctacctcagcctcccga

SEQ ID NO: 187123 - DNA, 201 bp, Homo sapiens
ttgcagtgagccgagatcgcaccactgcactccagcctgggtgacagagcgagactctgtctcaaaataaataaataaataaataaataaataaataaataaataaattaaacatcttttgcttaatgcatggactcaggtcattgaaaaaaagttgcagttgtttccttagggccttccagctgagacttgaatgcgagg

SEQ ID NO: 187124 - DNA, 201 bp, Homo sapiens
tgcagtgagccgagatcgcaccactgcactccagcctgggtgacagagcgagactctgtctcaaaataaataaataaataaataaataaataaataaataaataaattaaacatcttttgcttaatgcatggactcaggtcattgaaaaaaagttgcagttgtttccttagggccttccagctgagacttgaatgcgagga

SEQ ID NO: 187125 - DNA, 201 bp, Homo sapiens
tgcaggtgcacaccaccacgcccagctaacttgtatttttctgtgtgtgtatgcgtgtgtgtgtgtgtgtgactgacttccttaaaacagtaatgacttaytgatagtcagctattgtacagaaagggtatcacaaacctctttgtcttttggatcatgcctctgttttcagagcaggttgttttcccaggtgattttgat

SEQ ID NO: 187126 - DNA, 201 bp, Homo sapiens
ggctgctgggcaggatgactggctaatgcctttttcatgtggttgtaaaagttttaatttctttccacattcatttatttgacctcttaaagctgcctctrtgcaaaccctttaaaagtgaaacatttgttcaagaaatgagtcacgattgttaggaagacaatgatgaacatattaggagtggggctcccccatttgcag

SEQ ID NO: 187127 - DNA, 201 bp, Homo sapiens
ctatgataagataccacttcacatgcattagtagggctgaacttaaaaaagactgacaataccaaatgttgacaagaatgtggagaaactggaactctcaygtgttactggtgggaatgcagaatgataacagccacttttgaaaacagtctggaatttatcttgggtaaatccctaggaatggcattactggatgataca

SEQ ID NO: 187128 - DNA, 201 bp, Homo sapiens
ataggaaaaaaatctcaactgttacatgacaccatatggaaaaattaagtcaaaacggatcatagacctaaatttagttgcaaaaactgttaagcttctcrgagaatatatttgtgacattggagtagggaaagatttcttaaatgagacacaaaaagcatgaactataaaagaaaaaatgattaaaatggactttgatct

SEQ ID NO: 187129 - DNA, 201 bp, Homo sapiens
tctcaacctggtgcctttgccagagaacaaagtcaggttaatcagacgtcttcccctctccagcccaactcattcgctggctgacctctcctggtcccatkgttctaagaaccatctccacgataatgattcccaaatgaatatcctagcccagacctctccctcccactccagacttctgcttggattccgtgggctgtc

SEQ ID NO: 187130 - DNA, 201 bp, Homo sapiens
ttctcaacctggtgcctttgccagagaacaaagtcaggttaatcagacgtcttcccctctccagcccaactcattcgctggctgacctctcctggtcccayggttctaagaaccatctccacgataatgattcccaaatgaatatcctagcccagacctctccctcccactccagacttctgcttggattccgtgggctgt

SEQ ID NO: 187131 - DNA, 201 bp, Homo sapiens
gcagtgagccgagatcgcaccactgcactccagcctgggtgacagagcgagactctgtctcaaaataaataaataaataaataaataaataaataaataaataaattaaacatcttttgcttaatgcatggactcaggtcattgaaaaaaagttgcagttgtttccttagggccttccagctgagacttgaatgcgaggag

SEQ ID NO: 187132 - DNA, 201 bp, Homo sapiens
cctgcctcagcctcccaagtagctgggattacaggtgcctgccaccatgcccggctaattttttgtatttttagtagagacggggtttcaccatgttggcyagctgatctcaaactcctgacctcaggtgatccacccgccttggcctcccgaagtgccgggattacaggcatgagccacagtgccctcccttgtctggtg

SEQ ID NO: 187133 - DNA, 201 bp, Homo sapiens
agtgagccgagatcgcaccactgcactccagcctgggtgacagagcgagactctgtctcaaaataaataaataaataaataaataaataaataaataaataaattaaacatcttttgcttaatgcatggactcaggtcattgaaaaaaagttgcagttgtttccttagggccttccagctgagacttgaatgcgaggagtc

SEQ ID NO: 187134 - DNA, 201 bp, Homo sapiens
ttggggggacacagttcagcccattaaccctggaacagaagcagaatattgaattttaaaagaacccaagggaggagtttcaggaaggccaggggctggcygtggcctgtttgtcttagacacacccttgcctcctgccgcctctctatctctctcctctggtccacaaggaggttcctggaggctcttctgccgtggggc

SEQ ID NO: 187135 - DNA, 201 bp, Homo sapiens
aaattaaacatcttttgcttaatgcatggactcaggtcattgaaaaaaagttgcagttgtttccttagggccttccagctgagacttgaatgcgaggagtygtatctcagacacaacctgtgcggtgcctcagtttttcattggaagaaactgtcccttggagagagggaggttgtactatacctgatggctggcagggga

SEQ ID NO: 187136 - DNA, 201 bp, Homo sapiens
agtctcctctccttataaggataccagtcataacagattaggtgatgacctcatttcaccttaatgactattttatccttataaggataccagtcataacrgattaggtggtgacctcattttaccttaatgactattttaaagtacctgtctcctgatgcagtcccattctgaggtactgggggttagaacttcaacatt

SEQ ID NO: 187137 - DNA, 201 bp, Homo sapiens
tgccccctttccatcatcccccaaaagggaaaaaatgagcactagcataaaagttctttggagaaatattatcggatagattcagtagagcagaacctttwaaaaaaaaaaaaaaaactactcaaattcttggcttggttttatagccagcatcatctactactaatttatttctacttagttacccaatttagcatcaat

SEQ ID NO: 187138 - DNA, 201 bp, Homo sapiens
atgaatcatagaccttaatacagaagtgaaaaatcgtaaagttttaaaggaaaacaatatcttcatgacttgcgactaagaagaaatttcttaaactgatkacagaaagcaataactataaaagaaaaatgatgttagacttcatttaaaaattctagccaggtgcagtggttcattcctgtaatctcagcattttgagag

SEQ ID NO: 187139 - DNA, 201 bp, Homo sapiens
acatagaggaggccagaagttgggggcagaggctcacttatggccgacagttgagagaggggttagagacagagacggagaacttggatgtgctggttcgyaagggctgctataactaagtattgcagactggggcttcaacaacagaaattcatttccccagttctggaagctagaagtccaagatgaaggtgtgggcgg

SEQ ID NO: 187140 - DNA, 201 bp, Homo sapiens
ctgagcgtcactgccagaggtcaccaaggaagagaacatagaggaggccagaagttgggggcagaggctcacttatggccgacagttgagagaggggttakagacagagacggagaacttggatgtgctggttcgcaagggctgctataactaagtattgcagactggggcttcaacaacagaaattcatttccccagttc

SEQ ID NO: 187141 - DNA, 201 bp, Homo sapiens
catttccagcctggacaatagagcgagatcctgtctacaaacaaacaaacattttgtactgccacctttaaccttttttttttttttttttttttttttaratggagtcttgctctgttgcccaggctggagtgcagtggtgtgatctcggctcactgcaacctccatctccctggttcaagcagttcccctgcctcagct

SEQ ID NO: 187142 - DNA, 201 bp, Homo sapiens
gtcctgtgacggcttaattaatgtgcagatttccctttaggatatcaacttacgagtgaagtggcccaacgatatttattacagtgacctcatgaagatcrgcggagttctggttaactcaacactcatgggagaaacattttatatacttattggtaagtttcaaaaacctttcccccagcatttttagattaataaaac

SEQ ID NO: 187143 - DNA, 201 bp, Homo sapiens
actcccgggctccagcagttctcccgcctcagcctcccaagtagctggggctataggcacgtgccaccatgcctggctaatttttaaattttttgtagagrtggggtctcactatgttgcttaggctcagtggaaggtcttgaatgccaggcaagactgcctgcactttctggggtgggggcaggcactgcaggagtttga

SEQ ID NO: 187144 - DNA, 201 bp, Homo sapiens
cctgtgctgcaccggagagagggagcattattgactgaaatattctcatatgagcatgtgtttactttgagaagaaactatttctcatgcatagtgatccaaataagtagtcattttgacattttatctttcagagacagtgtcttgctctgtcacacaggctagagtgcagtggtatgatcatggctcactgcagcctca

SEQ ID NO: 187145 - DNA, 201 bp, Homo sapiens
ttacttgtgttaatgtagttgggttggaaaatgatcttagggatccatatttgggtttgaaggttcttctgtctgaagacattttggaattttcagaaacatgtgtgtaggatattgccagtgagctggaccatcttcttaagaactttttgactgttgggatgtcttctgtgatgtgcctgttaatttcttttgcctgta

SEQ ID NO: 187146 - DNA, 201 bp, Homo sapiens
ggtttcaccatgttggtcaggctggtctcaaacttctgacctcaggtgatccacccacctcggcccctcccaaagtgttgggagtacaggtgagagccacygcgcccggccctctctgtttaatgtttttttttttttttttttttttgagacggagtctcgctctatcgcccaggctggagtgcagtggcgcgatctcgg

SEQ ID NO: 187147 - DNA, 201 bp, Homo sapiens
atattcattctgcgactaacagttgatcaaaaatcaaaggataaagcgtaccgtaagtgacagaaaggatagggggcattaaagctttagctaacatactstgtgtgttagaaaaattacagataattccatagtaggtagatattttcctccctctccttgagatttgttgagaatctgttacctcccagtttgatcaga

SEQ ID NO: 187148 - DNA, 201 bp, Homo sapiens
caaagactcataaaaatgattttcaaacttatttttaaaactaacattctaagacataatttgctagatttcagtgataatttaggcatattcattctgcractaacagttgatcaaaaatcaaaggataaagcgtaccgtaagtgacagaaaggatagggggcattaaagctttagctaacatactctgtgtgttagaaa

SEQ ID NO: 187149 - DNA, 201 bp, Homo sapiens
gatgttggcatcctttgaaagaactggcatattacttgatcattgtaaatctctcagtacttttaacaaaatggcattagaaccattttcttcaaaatttsctttctcccatgatccctgcttgggaaataggcagtgtggtagaattctttcaggactcatttgaaaaactcaacctttcaagaacaagtcttcttgcta

SEQ ID NO: 187150 - DNA, 201 bp, Homo sapiens
ttaaagcagaatgatcagatttgcactttaggaaggtcacaattcaggcagattgcagaagggattggaggggagcaaacctggaacagattgtggccacrtgggaaaagataatgggcttgatgagtgttgggagtaggaacgctgagatagagacatgtccatactggttaggaggtgatggcctgtgggtggatggtg

SEQ ID NO: 187151 - DNA, 201 bp, Homo sapiens
tacttgtgttaatgtagttgggttggaaaatgatcttagggatccatatttgggtttgaaggttcttctgtctgaagacattttggaattttcagaaacatgtgtgtaggatattgccagtgagctggaccatcttcttaagaactttttgactgttgggatgtcttctgtgatgtgcctgttaatttcttttgcctgtat

SEQ ID NO: 187152 - DNA, 201 bp, Homo sapiens
atcagtgagcaaagcgtacttatgtttatatctagaaagaaaagcaagttcttgcaaaaatagtgagtggttacagtgtgtgtgagacatttcagagtcaggcctcttcccaggctacctcctagcatgtgactccaaagaagatggtcagcagtttcagattcatttctgaaagtgagccattcacgttggactggatcc

SEQ ID NO: 187153 - DNA, 201 bp, Homo sapiens
catgcagttttttatttgtttgttttgttttttgagacggactcttgctctgttgcccaggctggagtgcagtggcacaatcttggctcactgcaacctcygcctcccaggttcaagcgattcttctgcctcagcctccagagtagctgggattacaggcacatgccaccacgcctggctaatttttgtatttttgtagac

SEQ ID NO: 187154 - DNA, 201 bp, Homo sapiens
gaagaataaaggaaaaaaagagttttgttcagcaccttattaacgtttccagggtgttgatcctgccgactccagtgaagtataaccatttattcactcattcattcattcattcattcattcattcattcattcattccacacacttctgaatgccatcagtgaaccaagtactgaactctagagttatgagactaaatt

SEQ ID NO: 187155 - DNA, 201 bp, Homo sapiens
aagaataaaggaaaaaaagagttttgttcagcaccttattaacgtttccagggtgttgatcctgccgactccagtgaagtataaccatttattcactcattcattcattcattcattcattcattcattcattcattccacacacttctgaatgccatcagtgaaccaagtactgaactctagagttatgagactaaattt

SEQ ID NO: 187156 - DNA, 201 bp, Homo sapiens
agaataaaggaaaaaaagagttttgttcagcaccttattaacgtttccagggtgttgatcctgccgactccagtgaagtataaccatttattcactcattcattcattcattcattcattcattcattcattcattccacacacttctgaatgccatcagtgaaccaagtactgaactctagagttatgagactaaatttt

SEQ ID NO: 187157 - DNA, 201 bp, Homo sapiens
accatgcctggctaattttttgtatttttagtagagatggggtttcaccatgttggccaggctggtctcgaactcctgacctcaggtgatccacccgcctygatctcccaaagtgctgggattacaggcgtgaaccaccgcgtttggcccctattcttagttttataaattaatgggatgataaaagcagcagcgtaggac

SEQ ID NO: 187158 - DNA, 201 bp, Homo sapiens
gaataaaggaaaaaaagagttttgttcagcaccttattaacgtttccagggtgttgatcctgccgactccagtgaagtataaccatttattcactcattcattcattcattcattcattcattcattcattcattccacacacttctgaatgccatcagtgaaccaagtactgaactctagagttatgagactaaattttt

SEQ ID NO: 187159 - DNA, 201 bp, Homo sapiens
ccagggcttgagaaggggatttctgccaaaccgatgggtgtataccaattctcatgaaggtcttaatttggacctactttgagactgcatactttttcatrtttatcagacagctgggtacagtctgtttttgaagtgctttttcagctttagctgtcctccttttttggttttctgacttttcctcattgatttggagtt

SEQ ID NO: 187160 - DNA, 201 bp, Homo sapiens
aataaaggaaaaaaagagttttgttcagcaccttattaacgtttccagggtgttgatcctgccgactccagtgaagtataaccatttattcactcattcahtcattcattcattcattcattcattcattcattccacacacttctgaatgccatcagtgaaccaagtactgaactctagagttatgagactaaatttttt

SEQ ID NO: 187161 - DNA, 201 bp, Homo sapiens
ccagcttcgcactcttctctgccccagctagtctctggccttgcaccctggggctcttcttgcccccttctcagggctcagtgtgctctacaggatcccayccagcagtcctcaggctgcagtttaatcaggacgcttccagcctccttcccacactgtggggtcctattcttaattttctttttttttttttgtttgagg

SEQ ID NO: 187162 - DNA, 201 bp, Homo sapiens
cagtggcgcgatcttggttcactgcaacctccacctcccaggttcaagtgattctcctgcctcagcctcccgagtagctgggattacaggcatctgccacyatgcctggctaattttttttttgtatttttagtagagacggggtttcaccatgttggccaggctggtcttgaactcctgacctcaggtgatccgctcgcc

SEQ ID NO: 187163 - DNA, 201 bp, Homo sapiens
catggctggagaatgtaaacggatgaaggtaatgccccccttctcccaccatagtctttccagggaatttatttccagctccattaaatttatagcatcargggtttataataggtagtttttttctttctttcttttttttttttttttgagactgagtcttgctctgtcacccaggcctggagggcagtggcgcgatct

SEQ ID NO: 187164 - DNA, 201 bp, Homo sapiens
tctcctgcctcagcctcccgagtagctgggattacaggcatctgccaccatgcctggctaattttttttttgtatttttagtagagacggggtttcaccaygttggccaggctggtcttgaactcctgacctcaggtgatccgctcgccttggcatcccaaagtgctgggattacaagtgtgagccaccgtgcccggcctc

SEQ ID NO: 187165 - DNA, 201 bp, Homo sapiens
agaggggcatggcagcttcatgggacccccctataggagactcaatcctgggtgcctctatagaaacataaattcagtgaaaacaaaggagctagttcccmtggctggagaatgtaaacggatgaaggtaatgccccccttctcccaccatagtctttccagggaatttatttccagctccattaaatttatagcatcaag

SEQ ID NO: 187166 - DNA, 201 bp, Homo sapiens
ctgaggctaagagtagtatggaacccagggagacagtgttggagccagaattcagcacaagtagtctgactctggtactcttagccattgtactttagagycccctgagttaaagaaaaacagtttcccacaagttaaaacccagaccagtgtccacatttgactagatgactagtggaggcatcctattccatgtaatca

SEQ ID NO: 187167 - DNA, 201 bp, Homo sapiens
tacctttatattgaaggattgcatgttagttgctttttcattttgaaaagagtatggtatgtaatgcatccgttatctgctgcttccatcttccactctartcgagtctacatcttcatcgaacgcttactcttcgctctgaaaagttcctgcagcagcctgctgtactgtagccaggctgggttgcttggcgtggcagag

SEQ ID NO: 187168 - DNA, 201 bp, Homo sapiens
tggctaattttttttttgtatttttagtagagacggggtttcaccatgttggccaggctggtcttgaactcctgacctcaggtgatccgctcgccttggcrtcccaaagtgctgggattacaagtgtgagccaccgtgcccggcctcagctcagcagtatttttgacttaacagctgagtatgctcgctgaagaacatcta

SEQ ID NO: 187169 - DNA, 201 bp, Homo sapiens
gccagctctctgtattaaatcccctctgagtatctagtagtttttgttgattggtagaaatagcatggtcaggaatgccaggtactgcagaaagatggaarggatggaaatggaaaatggtcagatctttgagcaatgggggtagagcccagaattccagggcttgagaaggggatttctgccaaaccgatgggtgtatac

SEQ ID NO: 187170 - DNA, 201 bp, Homo sapiens
ggctcaagtgatcctcccgcctcagccgctcaagtagccaggaccagagacacatcctaccacacctggatcagtttcgtatttattttttatagagacargacctctcactatgttgtccaggctggttccaaattcctggcctcaagcagtcctcttgcctcagtttcccaaagttctagggtgtgatccactgcacct

SEQ ID NO: 187171 - DNA, 201 bp, Homo sapiens
gacggggtttcaccatgttggctagctgatctcaaactcctgacctcaggtgatccacccgccttggcctcccgaagtgccgggattacaggcatgagccmcagtgccctcccttgtctggtgttttgtcatgttgtagccagctctctgtattaaatcccctctgagtatctagtagtttttgttgattggtagaaatag

SEQ ID NO: 187172 - DNA, 201 bp, Homo sapiens
ttgttggtgcccaaagtccagtggggactgaggcagcagggggctggcatgtcagcgccgccctgagcatgtgcacacctggctgggtcatgacagtgccygggcttggccacaactttgctctgaaatcagagtgggtgccgggagcagggacaggccctgcagcaggagcaggcacttctgagcctgtgggggaggggg

SEQ ID NO: 187173 - DNA, 201 bp, Homo sapiens
ccttcaactcggaagggggcgtggctctcacctgttcccagttcctgccagctctgtagaggtgcagcctcaaccatgcctcctccgctgcagctggcacggggcctcactatcactacctgccccctagtccccaactcatgggaaggggctgccaggccactgctccctgggccctgccccttcctttgcctcattccc

SEQ ID NO: 187174 - DNA, 201 bp, Homo sapiens
tgacaaggtattaacaggcaacgttactgaactcctcctgtgtatttcctagacatacgttattaagtttatcccctacagcagcctagtgacagtcacattttttttttttttgagatagggtcttcctttgtcacccaggctggagtgcagtggtgtgatcacagctcactgcagccttgacctcccaggctcaagtga

SEQ ID NO: 187175 - DNA, 201 bp, Homo sapiens
ggaactctggttccttttagtggggaatggtatttagatacaaaggtctgggaacttcttcttctgagaatggcagatcaagatcttaccagacagatctyccacctccatccctcccacccccacatacagaaaataactatgaaaactgggtataattcagaaagcagctgcctgaagccattgagagtgagcagaagc

SEQ ID NO: 187176 - DNA, 201 bp, Homo sapiens
cccacccccacatacagaaaataactatgaaaactgggtataattcagaaagcagctgcctgaagccattgagagtgagcagaagcaggcaagtttatggkgggagaacctcgttgggacaaggtgggtcttgagctgcactcttgagctgcaccaagtaagctcagggccaagggcaggtggtgcagtgagagggactcc

SEQ ID NO: 187177 - DNA, 201 bp, Homo sapiens
tttctcggtctctagaacagtgttacatagtaaatgctcaataaaccagtgttaagtcaacatgtgaatgcacagaattaggaatgcaggcgtcagggcagggtgaggcttcagaccgtgtgtgcccaccaagttgcaaaccattgcatcctacgctaacggctctctccattagccttctcaatttttcttctgctgagc

SEQ ID NO: 187178 - DNA, 201 bp, Homo sapiens
ggaagtttgaatgacacctaagctgtgtaaattgaaaaaggtcagagctttgtattttgaaaagtgtttttggtacattgctatccaatacatttattcawtgattgattgattgagataggatcttgctctgtcacccaggctggagtccagtggtacaatcacagctcactgcagcctcgaccttctgagctcaagggt

SEQ ID NO: 187179 - DNA, 201 bp, Homo sapiens
aagcagcatttaagagttttatctgtgttaagagccctaattgttagtttgtaatactatattacttctgacagatgctttgctgaaatcgtaatgtactrtgttccccatacttccaatatctacttgtatactaatcttattacaaaagaaaatcaggctagctaatatgtctaactcttgacaattctcttaattttt

SEQ ID NO: 187180 - DNA, 201 bp, Homo sapiens
gaatggatctgtgaaaaaagttgagtattattttacaataattttagactttcatgactggaaattaaatacagcagttttaaaggcatattttacttgarcttttacaagctcaggccatgtttttattaaaaaatcggactcagcaccttatatggagtacaataccagatgtgagatataagagaaattgctggggcc

SEQ ID NO: 187181 - DNA, 201 bp, Homo sapiens
taaatgcattctgtagatttttaccattcggtctttactaaaacctggtgagatagttatcatcatggttcccctttaaagagataagggggaagctatakcttagagagtttaaatgcttggacagagtgacataaagagtaagtgatagaagcagcatttaagagttttatctgtgttaagagccctaattgttagttt

SEQ ID NO: 187182 - DNA, 201 bp, Homo sapiens
gattgaagttgttcatctgcattttctgttgaaaagggttatttggggacctaaaaacctttctcatttcctacttctgtttaccagactctgtgctctarcagagctatcctttatccactgttgaccacatacaatgtgcagatccacttggggccatcttcccccagctattaggacccgtgtgcctgcttccttatt

SEQ ID NO: 187183 - DNA, 201 bp, Homo sapiens; identical to SEQ ID NO: 32588

SEQ ID NO: 187184 - DNA, 201 bp, Homo sapiens
attaaatccagactgagcaaagacgtaaatggttacaaccaaagtaattccaagtgcgagtaaaaagaaaaaataccgatgtttataatctacctttataytgaaggattgcatgttagttgctttttcattttgaaaagagtatggtatgtaatgcatccgttatctgctgcttccatcttccactctaatcgagtctac

SEQ ID NO: 187185 - DNA, 201 bp, Homo sapiens
ggctggagaattgcttgaacctgggaggtggaggttgcagtgagccgagatcactccactgtactctagcctgggcaatagagtgagactccattgcaggaaaaaaaaaaaaagatcatgataaaaagtcactttaataaacttgtggatttaggtctgattatttttgtttctgtaggtgctgcattgcttgtctctcct

SEQ ID NO: 187186 - DNA, 201 bp, Homo sapiens
ggatcacaaggtccggagttcaagaccagcctggccaacatggagaaactctgtctctactaaaaatacaaaaattatttgggcatggtggtgcatgcctrtaatcccagctacttgggaggctgaggaaggagaattgcttgaactggggcccaggaggcagaggtagaagtgagccaagattgcgccactgcactccag

SEQ ID NO: 187187 - DNA, 201 bp, Homo sapiens
ctcctcccacactcattactgctctggtctgtagcaggaactttaatcttcctctttgcattttaatgcttatcataaaaaacgttatgagaagttccagscagtttcattttgtgaaagcacacacagcaatcttgatttcgttagaatgttaagctctgtttactgttcttgggtttatgagggtcattccgtgggcca

SEQ ID NO: 187188 - DNA, 201 bp, Homo sapiens
tgctgaggcacaccgacacccacagccccatgctcacgcgtggcctggtgaaaacctaggaagtccatgctcttgcgacgtgttcagtgcttcttcgcccsggaaagttccaatgttgaaatgtggctgcactcagtgctgcctgtggatggaattatgaactgtgaaggccagcttcattctccctacatggtcgcatct

SEQ ID NO: 187189 - DNA, 201 bp, Homo sapiens; identical to SEQ ID NO: 32538

SEQ ID NO: 187190 - DNA, 201 bp, Homo sapiens
tttactggcattttgttggcaaagcagtctttggagcccttccttatttgagcgtgtttcctgacacctttggcggtatggtactgtgttttttagatttaaaaaaaaaaaaagcttaaatagaaaagcatatataaacatatacagaagattgattgtaagatgtcaagcaaaataaaacagcagcatacactctcaaca

SEQ ID NO: 187191 - DNA, 201 bp, Homo sapiens
agtggaaagatggtgccatgttggctggtgtgctcactgttggaagcctgccatattgaggtggcagtcaagtgtgtgtgtgtgtggatttgtgcatgtatgtgtgtgtgtgtatgtgcatgtgtgtgtgtgcatgtgcacacatgcttgtgtgtgtgcgagacaccagcccttgctatgcttcatggtgctaaaaacgac

SEQ ID NO: 187192 - DNA, 201 bp, Homo sapiens
gtggaaagatggtgccatgttggctggtgtgctcactgttggaagcctgccatattgaggtggcagtcaagtgtgtgtgtgtgtggatttgtgcatgtatgtgtgtgtgtgtatgtgcatgtgtgtgtgtgcatgtgcacacatgcttgtgtgtgtgcgagacaccagcccttgctatgcttcatggtgctaaaaacgaca

SEQ ID NO: 187193 - DNA, 201 bp, Homo sapiens
gcaatgtgcagaagtgaatggagcaatagaaagaagaattatttgatgtaaactaaagatctcaacaactcgaatcaggttatttaatcaggaatcaaaarcgcatgaggggttcaagtccaactgcaaagcttggggttctggaggaccacagatgcagctgcccccaaggatgctgagcatgtgactacacatgcaaat

SEQ ID NO: 187194 - DNA, 201 bp, Homo sapiens
gctaacttttcgtagcttttgtagagacaaggtctcacttttttgcccaaggctggttttgaattcctggcctcccaaagttctgggactataggtgtgarccactgtgcttggtctgttgagctcttataacttgaggcatccccttccagtcaccttggagatagttctgtctcccagaatggctccttataaacccac

SEQ ID NO: 187195 - DNA, 201 bp, Homo sapiens
ttgttaaaattgagcaaaaagtattaatacaatacaaaacatctaaatatgttctcatctgtttctggaggttttctttgttttggttttggtttttttcrgagacagagtctcactctgtcgcccaggctggagtgcagtggtgtgatctcggcagtctctgcctcccaagttcaagtgattcttgtgcctcagcctcgt

SEQ ID NO: 187196 - DNA, 201 bp, Homo sapiens
agcatcaatgcagaaattctaaataaatattaactaacagaatctaacattaagacaaatgtgatttttttttctaggaatgcaagattggtttaatattaaaaaaattaatagatctcttaactcattaatatgttaatagatcaaaaaagaaaaatgtatgattatttccatagatactgagaaaacactttataaaat

SEQ ID NO: 187197 - DNA, 201 bp, Homo sapiens
tttgctcataggtaggacaactcaaaatcacaaagatggtcagttctccccaagttaatttatacatttaatgcacttagactaaaaataccatcaaggcttttttttttttttttttgagacagagtttcacgctcctgttgtctaggctggagtgcaatggcatgatctcagctcactgcaacctccgcctcagctcca

SEQ ID NO: 187198 - DNA, 201 bp, Homo sapiens
ttgacttgagccactttcagcaaatctttggaacaatcacatttgtgctaatgtctgccatcttgtggcaacagcgctctgggtttcacgtctgtgagtcrtgtctgacaggaaaatgcccacggagctgggaatgtgttcgggaattctcttggcccatgcctgcacttgctgcctgtgattgatacctggttttgggca

SEQ ID NO: 187199 - DNA, 201 bp, Homo sapiens
agttcaagaccagcctgggcaacataatgagatcctgtctctaaatttaaaaaaaaaaagaaaaagaaaaaagaaactgtttttctcattgcctgtgagtrccctcagtttacatagtgctatctttccccttcaggtgcacttagaactacctcccagctccaacatagtgcaaactccagaagattttaacttgctcaa

SEQ ID NO: 187200 - DNA, 201 bp, Homo sapiens
ttggcaggagcagattatcatatgaggttactttgagtcttgtagttttggagcagggtatagatgcagagagattggttgaaagcacttcacagggtttrgcattttctgtgtgtgaccacgggaaccaccaaagtggtatcacatcaaacaggtatgttcctacatccttccacactcctgctactcattgaatttgaa

SEQ ID NO: 187201 - DNA, 201 bp, Homo sapiens
gggacgtcccactttctgcccaggagcctgtctgccttctgcagccatcaacctgacatccacggtgcccacagcacccaggctgttcatgctgaagggcrcgtacaggcctgtgccaaactgccctcagcgcccccttggcatcccagaagcctgtgcttgttggtgcccaaagtccagtggggactgaggcagcagggg

SEQ ID NO: 187202 - DNA, 201 bp, Homo sapiens
ttttgtgtctttaaacacatgcttaaatatcatatagacataactgagattcctaagcggtaacgatgtgaacatttgggttgcagaagtactgaaacctygttttaaaatcctgtcattgagatcactgccggagcaaagcgcagagcaggaggtttggggaggagggttctgcagagttggccaaggataaatctccca

SEQ ID NO: 187203 - DNA, 201 bp, Homo sapiens
attgaccccaaaatgtaattttcccatgatgtattctgagaccatatctcgaaacacctaagggtaaacctagaaaattcctattggccaggtggagttasagtacctgtgggaaggtgtggtctcaaaacccttagggaatttggaaaaactggagatgttggtcaccttcagatagaggagatgacctctccataccta

SEQ ID NO: 187204 - DNA, 201 bp, Homo sapiens
gattctcccactgtccctttccccttatgccgcaatcttggaggccttgtgggaaaatggcggcatcccaagttgcaagaggcctgtggccctcagtcacygcttggaggagagctgcctgactagccctggacttgggccactgcagttggacttgtttcagctaatgttagcctgcctcgatgaatcacaattttgaaa

SEQ ID NO: 187205 - DNA, 201 bp, Homo sapiens
cccatgagattctcccactgtccctttccccttatgccgcaatcttggaggccttgtgggaaaatggcggcatcccaagttgcaagaggcctgtggccctsagtcactgcttggaggagagctgcctgactagccctggacttgggccactgcagttggacttgtttcagctaatgttagcctgcctcgatgaatcacaat

SEQ ID NO: 187206 - DNA, 201 bp, Homo sapiens
aactaacgtagaaacacacacattagtctaggctgcccagggtcaggatcatcagtatcactgactttcactgcacatgtgtcctcctggaaggtcttcaygggcagtaacgtgcatggagcagtgaactcctgtgataacaatgccttcccccacagtagctcctgaaggacctgcctcaggctgttacagttaactgtt

SEQ ID NO: 187207 - DNA, 201 bp, Homo sapiens
gggatccaataaagaaccacccattgtgtttcattatgtcttttaagccccttctaatctagacggggtctccctctccacctctgtgtccccaccccatytccaccgtgacattgactagttgaagattccagcccggctgttctgtaaaatgttttatcccctggatttcttctgaatgctttcttttcttgtcttttt

SEQ ID NO: 187208 - DNA, 201 bp, Homo sapiens
taggttgtagtgtgtttgggggagagcaggaggaggtgaggacagtgaccatcaagagaaaactctattctattctttctgagcctccaaagaccaccacrtgaattaagccctactctgggaaacccacactgacctagcactgggggcacatttttccaccaggtggctttaggggagggacctggcagaatcgaaaat

SEQ ID NO: 187209 - DNA, 201 bp, Homo sapiens
tgttcttgttcttcccttttctgggaatttttccatgcatggataattggcctgcataaccatattttgaaatactaggagaggtaaaattaatagttagsattaatagtaatgatccagatactacatttctgtctgtctccatacatccctgaacaagctgttgattgatttgaaagggcatatgtatatgtgctggtg

SEQ ID NO: 187210 - DNA, 201 bp, Homo sapiens
gtcgcaagtgagtgaccataagcatgccaatgactgcctgtagatcattactgccagagcactttcatgcaccaaatgtgagcatgaccatttggctgccrtctcttcagtgatgggaaaaggagggaaatgtgacttcctttattgttttgtgtttcttccctggttaggaaagttggcgtgttcttcattttgttaatt

SEQ ID NO: 187211 - DNA, 201 bp, Homo sapiens
gctatatatagggttagatgctcagagaacctatgaggacaacaaattgtttttatcctccaagaatgggagggggaagtagctaaataggcctggtccaygtagctctaatgcagagaaatacttatctaggtaatgcaaaatacaaaacccagttgtgtctaatttacacaggtgatactgacactgtacatctggtgg

SEQ ID NO: 187212 - DNA, 201 bp, Homo sapiens
atagagtctcactctgttgtccaggctggagtgcagtggtgtgatcttgacttactgcagctgtgaccttctaggctcaagtgatcctcccgcctcagcckctcaagtagccaggaccagagacacatcctaccacacctggatcagtttcgtatttattttttatagagacaggacctctcactatgttgtccaggctgg

SEQ ID NO: 187213 - DNA, 201 bp, Homo sapiens
aaatggaagacttaacttctctgagacagaacataatgaaatataaaaatatttatcacagatactggttgctaaggaggtttatggaatctacttccttrtagtcattcaggatcccctaatggtaattcttaccgtgtatttgggagtggaacgtaggacttcttcaggtacctattagctcaggaagcctatttttaa

SEQ ID NO: 187214 - DNA, 201 bp, Homo sapiens
tttagctacatctgtgttgctgcaaaggacatgatgttgttctttttcttagctgcaatgtatttgtgtatatgtaccacattttctttatgtagtccacygttgatgggcatctatgtcgattccctgtctttgctattgtaagtagggccgtgataaacatatgtgtgcatatgtctttatggcagaacaatttatatt

SEQ ID NO: 187215 - DNA, 201 bp, Homo sapiens
gtatgagtacttaatttagatcattattttctttttcattaagcattgccatcaatagttaactaacatcttaaatttttggcatttttgtcatctctccrtccattttacacctaacaattacgtttgtaaaatgtgttttctgattacaccaatcaatagtttctcctcacctacaggaatgtttctcaaacttgagtt

SEQ ID NO: 187216 - DNA, 201 bp, Homo sapiens
cagatcaaggcttttattgtataagataaatagtggtgatgtatccggatggaattttggaaatagtggctatttcccacccagcagaaccttggaggccwctgtttcaggattttcactgattttcctagttatcttgtggtgggtttcctggaacaaaaggctataaaacagaacacacctatatctgtaggcccttgg

SEQ ID NO: 187217 - DNA, 201 bp, Homo sapiens
aaggagactgtgtgtttagtgaaggccatttgtaatgtgcctctctaagctgtgccagctctttaatggataccttggctgcatgaaaaaagcaggaaacyacattgcactccagatgctaccatttaggtggccccctgctactggttctgctgacaagtaggttgtacagatagaacaggggctatttttcaagaagct

SEQ ID NO: 187218 - DNA, 201 bp, Homo sapiens
gggcttttagtgcatccaccaccagaatagtgaacattgtaaccagtaggtagtttttcagccataacccccctcccaccctcccacctttcatagtctcyggtgtctactattccactctgtatatgcatgtgtacatattgttgagctcccacttataagtgagaacatataatatttgattttctgtttctaagttat

SEQ ID NO: 187219 - DNA, 201 bp, Homo sapiens
ctccagtgagtatttcctttgagtatgatgttggcactcaaaaagttttggattttggagaattttgagtttcagattttcagattagggatactcaaaastgtaaagcaactattccaaataaaaaaaaaaatctgaaatctgtaacacctctggtcccaagcatttcaaatctgatatagtcaacctgtaccgatttca

SEQ ID NO: 187220 - DNA, 201 bp, Homo sapiens
ggaaaacaattttcccaacaccagtaaatgaagatacagtcatttcatcattttatgtgattgatacttttgttggagatcaattgaccataaacgtgtgttttttttttctggtctctctattctgttccagtgggtggtctatatatctgtttttataccagggccatactattttgattagtagacctttatggtata

SEQ ID NO: 187221 - DNA, 201 bp, Homo sapiens
tttaaaaaaataacttattgtagtaaatttaaggggtacaagtgcaggtttcttacatgcatatgttgcataatgatagtctgggcttttagtgcatccaycaccagaatagtgaacattgtaaccagtaggtagtttttcagccataacccccctcccaccctcccacctttcatagtctccggtgtctactattccact

SEQ ID NO: 187222 - DNA, 201 bp, Homo sapiens
acctgccctcggaccaggagaaaacagtgggaatgactgacaaattaaagcgatataatctatatgtggaaggaaaaggagactgtgtgtttagtgaaggycatttgtaatgtgcctctctaagctgtgccagctctttaatggataccttggctgcatgaaaaaagcaggaaaccacattgcactccagatgctaccatt

SEQ ID NO: 187223 - DNA, 201 bp, Homo sapiens
aatgcacaggctgtatggggaacagtttggctcgagagaatatgtgtaaggactggggaagataagattttgtagaagtaagacaaattggtaaagatctytggcttgcaaaagggcagtgttttgggcgttagcagagcagagaagtgacaagtgagtttttaaaaaaataacttattgtagtaaatttaaggggtacaa

SEQ ID NO: 187224 - DNA, 201 bp, Homo sapiens
taatcatatctgcctgcttttagggttacttttctaatgtaaaaataacagataccctatatctgccatattgaaatccattaccagctgtagacacctcygcagagataattataatgaaacatattttcatatttttgataaatgttaatgatttgtgaagtgcagtaaagtaagacattgacttatgaaaatgacttc

SEQ ID NO: 187225 - DNA, 201 bp, Homo sapiens
cctttcttctttgctacagaacatttctctttttatttttattttttcagtctacaaatatttattgcacacctgagctatgcctgtctctgaacagcagyggataagacagacttacacaacagtgaacaagataacataaactccgtaagaataggagtttatattctaggggcagagtgacaaacaaacgaacaactc

SEQ ID NO: 187226 - DNA, 201 bp, Homo sapiens
taagttcagaataaggatttatctttttttcttgtcctgttgtcattttgttaattcttttctgactgttttgtagttcatttgtgttttttttcctctcytgctatattcctgtatgatgtgataatttttttgtggtagtgtgctttgattcttttctctttatgtttggtgtatctattacagagatttactttgtgg

SEQ ID NO: 187227 - DNA, 201 bp, Homo sapiens
gaggataatggtctccagttccatccatgttgctgcaaaagacattctttcattcttttttatgactaagtattattcatagatagatagattgatatcayacatgatatagatagcactttttaatccagtcctctattgatggacacttaggttgattccatccatatttttgctattgtgaataatgctgtgataaat

SEQ ID NO: 187228 - DNA, 201 bp, Homo sapiens
actttgtggttactatggagcttacataaaatattttataattgtaacggtcagtttaatgtagataacacttaacttcaaccacatgcaaatattctacttttttttttttttttgaggcggagtctcactttgttgcccaggctggagttcagtgagccactgtgcctggccaatgatttatctttcaataaatgtgta

SEQ ID NO: 187229 - DNA, 201 bp, Homo sapiens
tgtaacataaagaacacacatacacaaacatgagaaaagaagcaatagctatccctctaagaacatgaaattatatgctttatagaaggggaaattgaaayaaacaattgtgtgtgtgtgtatatatatgtatatatataatatatatgaatatatattataaatataatatcatatattatatatttacagtatataaat

SEQ ID NO: 187230 - DNA, 201 bp, Homo sapiens
catctcggcaccttctgacctatagttagaatttctgatttctcctggtctctcttgatttttaatccctagtactttcaaaggtctgagaagggcagaayaaaaaccaattcatcatgtgggcaagcagagatctatatttccctggagcaaagcaatgaacctttgagtttcaaccagcttaggatattgagtccaaac

SEQ ID NO: 187231 - DNA, 201 bp, Homo sapiens
cacagagatagtccaagttggaaataaataatctggagtttgcagaagcaaggtggaaaagattactttgcagtgctaaatattccaatctaaatgggtarttttatcaaaattaacttctggactggacccttactggcttgagttctggttggcaactgcaaacaattttaatgcaaaatggaaacaattggtaaatgt

SEQ ID NO: 187232 - DNA, 201 bp, Homo sapiens
aaatattccaatctaaatgggtagttttatcaaaattaacttctggactggacccttactggcttgagttctggttggcaactgcaaacaattttaatgcraaatggaaacaattggtaaatgtgtctttaaaaattaaaatatctggctgggcacagtggctcacacctgtaatcctagcactttgggaggctgaggcag

SEQ ID NO: 187233 - DNA, 201 bp, Homo sapiens
agcactttgggaggccaaggcgggaggatcacgaggtcaggagatggagaccatcctggctaacacggtaaaactccctctctactaaaaaaaaaaaaaaatacaaaaaattagccagatgtggtggcgggcgcctgtagtcccagctactcaggaggctgaggcaccagaatgcgtgaaccccagaggcggagcttgcag

SEQ ID NO: 187234 - DNA, 201 bp, Homo sapiens
ttttgttcaaaataatatttgtttacattagaattataaaatgtcatgtttattccctcatgttatttctacttaaaaatgtgggttactgttgctgggcrcggtggctcacgcctgtaatcccagcactttgggaggccaaggcgggaggatcacgaggtcaggagatggagaccatcctggctaacacggtaaaactcc

SEQ ID NO: 187235 - DNA, 201 bp, Homo sapiens
tgtaaatatgtatgtagataaaaatattttatcaattgtagtgaaaccaaggattctaaacattaccatttgggtcaaagcatgttggctaggaattcttyttacatttataacttcttattttaaatttctgactccttacaaacagccattttacttgaaatagatttttttaactgagaaatgacccctagctgttaa

SEQ ID NO: 187236 - DNA, 201 bp, Homo sapiens
cttaattcaccatttgtgcaaaattgaatctgcatttctgcagctgtaggagaatacagattatttttaatttgttgaaacttcttttatttacagttaayctgtaatttccaaggttaaagtctggaattttgttgattagtactgaggagaggcaaggaagattcaagatgcacaaaacatacaatataaaaagaaaaa

SEQ ID NO: 187237 - DNA, 201 bp, Homo sapiens
tgtccctgtttgcagatgacatgattgtatatctagaaaaccccatcctctcagcccaaaatctccttaagctgataagcaacttcagcaaagtctcaggrtacaaaatcaatgtgcaaaaatcacaagcattcttatacaccaataacagacaaacaaagtgtgaaatcatgagtgaactcccattcacaattgcttcaa

SEQ ID NO: 187238 - DNA, 201 bp, Homo sapiens
atcacttttgttcaaaataatatttgtttacattagaattataaaatgtcatgtttattccctcatgttatttctacttaaaaatgtgggttactgttgcygggcacggtggctcacgcctgtaatcccagcactttgggaggccaaggcgggaggatcacgaggtcaggagatggagaccatcctggctaacacggtaaa

SEQ ID NO: 187239 - DNA, 201 bp, Homo sapiens
aaagggctaatatccagaatctacaatgaactcaaacaaatttacaagaaaaaaacaaacaaccccatcaaaaagtgggcgaaggacatgaacagacactyctcaaaagaagactctcctttattctaggggttctgaatctgtaaattggctgtaatctgggaattcactgaggggctgttactttctgtttttatgctt

SEQ ID NO: 187240 - DNA, 201 bp, Homo sapiens
ttctcctgatgaattgaccactttttcattatatagtaacattgtttgtctttctatgacaatttttgactcaaattgtctattgtctgatacagctgtakatatcctactttcttttgtttgccacttgcgtggaatatctttttgcatctctccactttcagccttcatgtgccttgaaagctaaactcagtctctgta

SEQ ID NO: 187241 - DNA, 201 bp, Homo sapiens
atactgaattggcaaaaactggaagcactctgcttgaaaattggcacaagacagggatgccctctctcaccactcgtattcaacatagtgttggaagttcyggccagggtaatcaggcaggagaaagaaataaagagtattcaattaggaaaagaggaagtcaaattgtccctgtttgcagatgacatgattgtatatcta

SEQ ID NO: 187242 - DNA, 201 bp, Homo sapiens
cctgaccacagtcggccaggagcgcctcttaggttttaactaaagaaaacctgtctttgactgccaagccgtgttttgtgtttctttcttctttaattctkacatcttgcttgtggttggaactgttggttgatttgtggttgattaggtgtatccaatgcagatattttgtgtatctctattgccagattatgccatgga

SEQ ID NO: 187243 - DNA, 201 bp, Homo sapiens
ctccagtgagctgtttaacacttacgcaatccgtggacagcaatgttaaagagcatgctgtagcacacgccatttggggttccagaggttgcgggcaaccrctgacgctgctggggcctgtacagggttcgttcctgccagtgcccaaaggcactcgccccagcccttgcacatgctcacctgcatgctccccctcccata

SEQ ID NO: 187244 - DNA, 201 bp, Homo sapiens
ccactcttaatgtgatatatcatattattgctttgcagacattgaaccattgttgcatttcagggataagtccttattaaccttttattgttctttttaayttgttttgctagtattctgatgaagatatttgcatctatgttcatcaagaatattgtcctgtaattatttttcttgtagtgtccttgtctggctttggta

SEQ ID NO: 187245 - DNA, 201 bp, Homo sapiens
atatggggacccagaacagatacaggctaaaaataattagaattaattggaaggtgaaatactaaaagtaaaaaatacagtttgggatgactctaattgtytttatcttaggtgaaagagtactaaattgggatagtggcagtgacaatggaaaaggagcaacaataagataagcccagcaataataagtaataaattacc

SEQ ID NO: 187246 - DNA, 201 bp, Homo sapiens
cgacaacaaccacatgattatctcaatagatggagaaaaggcttttgacaaaattcaacagccctttatgctaaaaactctcaataaattaggtattgatrggatgtatctcaaaataataagagctatttatgataaacccaaagccaattacatactgaattggcaaaaactggaagcactctgcttgaaaattggcac

SEQ ID NO: 187247 - DNA, 201 bp, Homo sapiens
atggattaaggacttactgagcccacagtgggacagacctaagctaaaatttcattaatcacatggccttcataaatccctcctttgactggtagaacacmgtgatgtttgggtttcctagaatttgcgtcagttcagagccagggtccagtagttcccaaaaggtcttacttttaccttttccccagtgtacagttattc

SEQ ID NO: 187248 - DNA, 201 bp, Homo sapiens
aatgaagatacagtcatttcatcattttatgtgattgatacttttgttggagatcaattgaccataaacgtgtgttttttttttctggtctctctattctrttccagtgggtggtctatatatctgtttttataccagggccatactattttgattagtagacctttatggtatattagaaatcaggtagtgtgatgcgtc

SEQ ID NO: 187249 - DNA, 201 bp, Homo sapiens
atcccatttgtatgtttctgcttttattgcctgtgcttttggggtcatataaaaaaattactgtctcaaccagtgtcaagaagctttgtctttatgtttcytttagtagttttacagtttccggtcttatttttaagtctttaatcccttttgagttgattctgcatatagggtaagataaagagccaattttatattctt

SEQ ID NO: 187250 - DNA, 201 bp, Homo sapiens
ccatttctgtttccttgaacttgcatgaaggaagttgctgagaagtctccaagcatattaggcaaaccttggccagaaccttccatttgaggttgggtacmggtgagtggtgactcatgaaggtagctggtataaaaaagagagttatctcaaccacatgggttgagaaaagtttaaagactcattctctaccactattgg

SEQ ID NO: 187251 - DNA, 201 bp, Homo sapiens
tggagggtggagggcgggagaaaggagaggattaggaaaaataactaatggatactaggcttgatacctgggtgatgaaataatctgtacaacaaaccccyatgacacgagtttacttgtataacaaatgttatataggtaaacttactccagaaggcttttcctggtctgtttgtttgggaaagatgtctcatatttttg

SEQ ID NO: 187252 - DNA, 201 bp, Homo sapiens
gagaaaaaaacgtatagaataaggatataaaaatatttttggacagttgtacagtgtttgtgttttgagctaaatattatcacaaaggagtcaataaagtkaaaaaagtaaacacacagtaaaatgttgcaataagctaaggtttattattgaagaaagaaatttttaataagtttagcatagcctaagtgtacagtgttt

SEQ ID NO: 187253 - DNA, 201 bp, Homo sapiens
tcttcagactatattatcttcatttaaccatttctcatataaattgtttgaaatttaataatttgcagaactacaattgtgaactgtttgcagtagactgyttttgcttttatttttttctctatgttcctctctcctttgattctgaaaccataagctcagtacaatatttacattaattcctggctggcttgttgaaag

SEQ ID NO: 187254 - DNA, 201 bp, Homo sapiens
cacaaatattcagaaacacaataattttacaggctgtaatagttgtagggtataatgtcagtcttgtactcagtatatatttatatgtatactttatcacycagaggactgaccgagagtggccaccattggtgaggatataaggagggcctacatatccataatagtcacgggtctcgtttcctgcctgagagtgagaga

SEQ ID NO: 187255 - DNA, 201 bp, Homo sapiens
tgacaatgatgattatttaacttatacatttgaataacacttcagattttatactgtttacactctttattctattttattctccttcctacatgtgtagkataggtattaatagccacattactgaagattagggaacttgttgcacagaagaattaaatgatcagcttaatataaaaaagtaaatggtagagttctgtc

SEQ ID NO: 187256 - DNA, 201 bp, Homo sapiens
atcacagttgctgtaatgacagaattgtttaaaaaaccaacttgtcatgtaagcactctactgcttattaaaatatagcacaattgaaaaaataaaatgtrttttaaatctttaaaaagtcattgcaaatggtcattatattgcctgggagccatacaatagcagtgggtatagattacaggggattatgaataggaaata

SEQ ID NO: 187257 - DNA, 201 bp, Homo sapiens
gaggtgtgaccttgaggtggttccgctaaagggtttttgataaatgagagtgggttgggaagtcctccagatcaaatttaccctcattttatagatttttytgcatgagaagtggtcatttaataatctctattatgcaagaaaatctatcacctatcagccaagagaaggctacatggttttttaaaaaggctttgtttt

SEQ ID NO: 187258 - DNA, 201 bp, Homo sapiens
gtttattacaacagtgcgtatcttgcttcccagtctgacactcttcacatggctcagagttttctttctaatgcacacacacagacacacagacacacagmcacacacacacacacacacacacacacactctgaaactactctgcagcttaaaagtttgtagtgacctcttatggccattaggatatagtccagatattt

SEQ ID NO: 187259 - DNA, 201 bp, Homo sapiens
gcctctcactgcttggggccggcagcaccagctggtcactccaagggtggggcctgctgagcctgcgcccacccggaactcatgctggctggtgagcgccrggcgcagcccaggttcccaccattccctctccttccacacctcctggcaagcagagggagccagctccggcctcagccagcccagagaggggctcccaca

SEQ ID NO: 187260 - DNA, 201 bp, Homo sapiens
tcaatgctgttatgtgttcttctcatcagatgaaatttctctgcgaatgcaccataagttatctaggtgatagcaataacaagagccttattcataaaaakattaattaacaggtatattttgagcagaatttaggagcacagagatagtccaagttggaaataaataatctggagtttgcagaagcaaggtggaaaagat

SEQ ID NO: 187261 - DNA, 201 bp, Homo sapiens
agagactccgtctcccaaaaaaaaaaaaaaaaaaaattaaaatatctttgatatctaaaagttaaacaggccaatgtttcctgtatacttttacctaaatrtatcagtgatagattgaaggcagaaatgactttgacaagcccatttcaaagttttaatgaaagtttcaaattatgcaatgaggggtcattgattcacctt

SEQ ID NO: 187262 - DNA, 201 bp, Homo sapiens
taacgttaaagacaaattttatggtgattacaacatgatgttcaatcaagattaaaatgtgttacatcattggcaaaaagccagaaggagctttattccartgtgatgcttaagtataatatcaatattatatatgctgtcattaggaatttgacattaaaggagattctcttgattatatatggttgcacttgaaggtca

SEQ ID NO: 187263 - DNA, 201 bp, Homo sapiens
atggctactattgaattggccagtattggttccaagatttttaaatttattctttctggttctttaattgtaaatcagaaagttataggtgttgatgcaayatcatgaactttgaagtaaatataaatggctccactttagatactgttaattctaagcacaattagattttaactatcttggttctggttattttgtata

SEQ ID NO: 187264 - DNA, 201 bp, Homo sapiens
agcagcatgggggtaactgcccccatgattcagttacctcccatcaggtccttcccatgacatgtggggattatgggaactacaattcaagatgagatttrggtggggacacagtcaaacgatactaccttataacagtagaaaactatttttctattttcttgtttctatctggagtagaacataaaatcagttaaaaaa

SEQ ID NO: 187265 - DNA, 201 bp, Homo sapiens
taatccctagtactttcaaaggtctgagaagggcagaataaaaaccaattcatcatgtgggcaagcagagatctatatttccctggagcaaagcaatgaamctttgagtttcaaccagcttaggatattgagtccaaacattcggatttcagacataaaatagtaaaagaatttgtaacctctggaaaatgcattctcagc

SEQ ID NO: 187266 - DNA, 201 bp, Homo sapiens
aaaaaaaaaaatacaaaaaattagccagatgtggtggcgggcgcctgtagtcccagctactcaggaggctgaggcaccagaatgcgtgaaccccagaggcrgagcttgcagtgagccgagatcgcgccactgcactccagcctgggtggcagagcaagattgtgtctcaaacagacagacaaacaaaaatctgggttactg

SEQ ID NO: 187267 - DNA, 201 bp, Homo sapiens
tcacacagtataaattgctgttttagcctaaagtatttttttgttttgagactattttcttcagttaaataaaataatgttttatgtagggtactttcatrgtgggtatatgctttatcaatatttttggtcattgccagtatttgagcagtaataatttgtaggcttttaagataatttgtgacaattgttgtaagacat

SEQ ID NO: 187268 - DNA, 201 bp, Homo sapiens
aagaactcctacttctaagaatttgttagaagatgagtttgtaaagaagaaatagccatatagacatgaagagtaataagggaatatcatggaagctaatrgaagaagagtttccaggaaagaaataattggtattattgcagtgaaaagtcaagaaaagtgatctaaaatgttcattttgcgggatagagagtccattga

SEQ ID NO: 187269 - DNA, 201 bp, Homo sapiens
gtattgtctttcatggcagttgcttcaggggaggccattatactttccttaggaggtggaaaaaccaataccactatgaatgtagatgccacagccaaagsggggagaccaatttcactagaaaagaaaactaatcagaatttaggggttcaatgtaaccagcttcatcagggtcttcccacacatctcaatcccaattta

SEQ ID NO: 187270 - DNA, 201 bp, Homo sapiens
catgggatgcaaggctggttcaacatatgcaaatcaataattgtaatccagcatataaacagaaccaacgacaacaaccacatgattatctcaatagatgsagaaaaggcttttgacaaaattcaacagccctttatgctaaaaactctcaataaattaggtattgatgggatgtatctcaaaataataagagctatttat

SEQ ID NO: 187271 - DNA, 201 bp, Homo sapiens
gtagtcccagctactcgggaggctgaggcaggagaatggcgtaacccaggaggtggagcttgcagtgagctgagattgtgccactgcactccagtctgggygacagagcaagactccgtctcaaaaaaaaaaaaaaaattgctctatcagattttgtggaattctttcacatccattttttcaacaacaatagagtttttt

SEQ ID NO: 187272 - DNA, 201 bp, Homo sapiens
tcgaccacgatcaagtgggcttcatccatgggatgcaaggctggttcaacatatgcaaatcaataattgtaatccagcatataaacagaaccaacgacaamaaccacatgattatctcaatagatggagaaaaggcttttgacaaaattcaacagccctttatgctaaaaactctcaataaattaggtattgatgggatgt

SEQ ID NO: 187273 - DNA, 201 bp, Homo sapiens
ctaagttaaaaggaagaagtaaaattatctctatttgcccatgatataattctatatgtaaaaaaaccagaattccacaaaaaaactcatagaactaatamatgaatatggcaaagttgaaggatacaatattgacatacaaaaatcagcagcatttatatacacaactgaaaacccagcctaactaaaaaagaccctaag

SEQ ID NO: 187274 - DNA, 201 bp, Homo sapiens
tggggatcagaggccatacatgttaagactgcaagctatcctagataaattgagtaagtgagaagacataattcatatggtgagatgacatgggtggtcarcaattagataaataaaagcctctaaaactcgggttgactaaaatcccaggaaaggaaaaaggcagaacacacaaagtaagtagagccaaggcaagctgtg

SEQ ID NO: 187275 - DNA, 201 bp, Homo sapiens
acaaaccaaatccagcagcacatcaaaaagcttatcgaccacgatcaagtgggcttcatccatgggatgcaaggctggttcaacatatgcaaatcaataawtgtaatccagcatataaacagaaccaacgacaacaaccacatgattatctcaatagatggagaaaaggcttttgacaaaattcaacagccctttatgcta

SEQ ID NO: 187276 - DNA, 201 bp, Homo sapiens
aaaaagagaattttagaccaatatcgctgatgaacagcgatgcaaaaatcctcaataaaatactgacaaaccaaatccagcagcacatcaaaaagcttatygaccacgatcaagtgggcttcatccatgggatgcaaggctggttcaacatatgcaaatcaataattgtaatccagcatataaacagaaccaacgacaaca

SEQ ID NO: 187277 - DNA, 201 bp, Homo sapiens
tgttctgttccattgggtgctggttttttgaaaagatcaacaaaattgatagaccactagcaagactaataaagaagaaaagaaagaaaaatcaaatagaygcaataaaaaatgataaaggggatatcaccaccgatcccacagaaatacaaactaccatcagagaatactataaacacctctacacaaataaactagaaa

SEQ ID NO: 187278 - DNA, 201 bp, Homo sapiens
taatccatcttgaattaatttttgtataaggtgtaaggaagggatccagtttcagctttctacatatggctagccagttttcccagcaccatttattaaayagggaatcctttccccatttcttgtttttgtcaggtttgtcaaagatcagatggttgtagatgtgtggtattatttctgagggctctgttctgttccatt

SEQ ID NO: 187279 - DNA, 201 bp, Homo sapiens
tcactctgatggtagtttcttttgctctgcagaagctctttagtttaattagatcccatttgtcaattttggtttttgttgccattgcttttggtgttttwgacatgaagtccttgcccatgcccatgtcctgaatggtattgcctaggttttcttctagggtttttatggttttaggtctaacatttaagtctttaatcc

SEQ ID NO: 187280 - DNA, 201 bp, Homo sapiens
cccattctgtaggttgcctgttcactctgatggtagtttcttttgctctgcagaagctctttagtttaattagatcccatttgtcaattttggtttttgtygccattgcttttggtgttttagacatgaagtccttgcccatgcccatgtcctgaatggtattgcctaggttttcttctagggtttttatggttttaggtc

SEQ ID NO: 187281 - DNA, 201 bp, Homo sapiens
atacaccaacaacagacaaacagagagccaaatcatgggtgaactcccattcacaattgcttcaaagagaataaaatacctaggaatccaacttacaaggratgtgaaggacctcttcaaggagaactacaaaccactgctcaaggaaataaaagaggagacaaataaatggaagaacattccatgctcatgggtaggaag

SEQ ID NO: 187282 - DNA, 201 bp, Homo sapiens
aatgtagacatatatatatacacaacggaatattattcaaccttagaaaaaggaaatcctcctatttgtgacaatatgaatgaacctaaagaacagtttgytaagtgaaataagccagacacagaaagaaaaatactgtgtgatctcacttatatgtgaaagcctattagattctcaatgtgtgatttggaaatagcattg

SEQ ID NO: 187283 - DNA, 201 bp, Homo sapiens
tttgttatccatataaatttgcatttcagtagtcttatctttagcattaccatctgtgaaaagggaatgagaattattgatgtatttaccttgcaggattrtaacacagataaaacaagataatggatgtaagagaactctcccatctataacatagtctcacacacacataagtagttttgtggtatattacttacttaa

SEQ ID NO: 187284 - DNA, 201 bp, Homo sapiens
gaccagtggaacagaatagagaccccagaaataaacctaaatatatactatcaactaattttagacaaggacatgaagacaacataatggagataggatasttcctttaaaagatggtgctgggaaaactagatttccatatgcaatagatttccatatgcaaaagaatgaagtaggcccttataccatacacaaaaagtc

SEQ ID NO: 187285 - DNA, 201 bp, Homo sapiens
tttcatataagtagaatcatacactatttgtccatttgcatctggcttatttcacttagcatacagttttcagggtttatccatgttgtagtgtgtatatyacttcataccttcttatggctgaaccatattcctctgtgtgtgtgtgtgtgtgtgtgtgtgtgtgtgtgtgtgtgtatgtctttgtgtgttcatactaca

SEQ ID NO: 187286 - DNA, 201 bp, Homo sapiens
acataaaaattataatgagttgatgttttgaaaaggcgctaaatgcatgaagaacctgattcaaaaacagggcctggggactttgatttcatggcatgatyttgagatgtatttggtgcagattttgaaattaaaaaaaaaaaagttccaggaaaggtaaaattaatctggaataaaatttctatggttgggccaaatgcc

SEQ ID NO: 187287 - DNA, 201 bp, Homo sapiens
agatttgctctaagaattaggctgttcagtcacaattcagagcacattgttaggctcctcaatggctgagtgactgttttcttgtttaggttgtgtcatgwcctgcttgggtcagatgtataggcattattatgagtatgtattcatattattatgtcttactaagatagcacattatcccaaacacgaattaaccttatg

SEQ ID NO: 187288 - DNA, 201 bp, Homo sapiens
aataatttaacatgagaattcagacaatatattttgcttttaaaatatctattgtgtagaaactaaataacccaaatgttgatatttccttacaagccagmaactcctctctggtgatataacttgcaaatataagcaaaataattcacccatgtgtcataaataggactcttatttattacctgccaccagggaataacc

SEQ ID NO: 187289 - DNA, 201 bp, Homo sapiens
tgctgtaatgacagaattgtttaaaaaaccaacttgtcatgtaagcactctactgcttattaaaatatagcacaattgaaaaaataaaatgtgttttaaawctttaaaaagtcattgcaaatggtcattatattgcctgggagccatacaatagcagtgggtatagattacaggggattatgaataggaaatatttgaatg

SEQ ID NO: 187290 - DNA, 201 bp, Homo sapiens
ctttgaaatctgacactaattttctaattgcatttttttaggaagcagaatctgaaactttctgaggagagcatttgagcttcagatttctaacaggtaaygagaaaatatggaaaagacccacactacctacattacactttcacaaagtaaaagttaaagttctggtaggaaattttgtaaaaaataaaattcacactg

SEQ ID NO: 187291 - DNA, 201 bp, Homo sapiens
aaaagccccttatagaaccatcagatcttgtgagaactcactcactaacagcagcatgggggtaactgcccccatgattcagttacctcccatcaggtccytcccatgacatgtggggattatgggaactacaattcaagatgagatttaggtggggacacagtcaaacgatactaccttataacagtagaaaactatttt

SEQ ID NO: 187292 - DNA, 201 bp, Homo sapiens
tgtgatgcaaggttcaactgcataagtgaataaatatgattcattacataaacagaactaaaaacaaaaaccatctaattatctccatagacacagaagargcttttgataaagtacaacattcctttatattataaactctcaacaaactagttattgaagaaacttaccttgaaataataagagctatctgtgacaaac

SEQ ID NO: 187293 - DNA, 201 bp, Homo sapiens
cacactgctcctctgggtccctaaagcaacgtcccctccttgccactgcacatctaagaagcccaggcctcggtgggcgggatgactgggaattgggaacrtaacctacgccgcgaccattctgggtggctaggatggaatcctggtggagaagatggacacccccgcccttgacgtctacccgagctacacaaacctact

SEQ ID NO: 187294 - DNA, 201 bp, Homo sapiens
caacaacaaatttcagaattatatttctgttaatatttagtttagaatctaattatttagttcaacgaatgctgtgatttgattattaataaatgaatgcrgattacttttcaataaatatatctggatgtcacaaatgttatttcacttcaagaaaccaaattcatctattttcctctctctttagtaatacatcttttg

SEQ ID NO: 187295 - DNA, 201 bp, Homo sapiens
gtatacaaaacaaaattattgcctttaatttctatatgtttattctacagattatcttacactgaactgatcaagtactttgaaaatgacttcgaaatttmtcttggtgtccttcatacttgctgcactgagtctttcaaccaccttttctctccaaccagaccagcaaaaggttctactagtttcttttgatggattccg

SEQ ID NO: 187296 - DNA, 201 bp, Homo sapiens
ccttttataggttcctaatttggacctgcttaacaaggaagctgtggaagataagaaggagaaagagctttggtcaatctgaggtttattttccttataartgtggaaagtaataacaataccttaaactttttacaaacctctcctggaatccttataccaaacttgtcacctcagtattgtctccattttaaagacaag

SEQ ID NO: 187297 - DNA, 201 bp, Homo sapiens
agcaaaataactctttgtggtaacaggtatcaaaacacgggagccgagatgatatagctctgtttcaagaaatatgtgaatacccacctaccaggtgctcmgtggaatcaaagatgaatccaagttcacaaatagacttctacttccaaggtagtacttttgacctgcctggtcatctcagtcttttccattccaacaacc

SEQ ID NO: 187298 - DNA, 201 bp, Homo sapiens
agctttggtcaatctgaggtttattttccttataagtgtggaaagtaataacaataccttaaactttttacaaacctctcctggaatccttataccaaacytgtcacctcagtattgtctccattttaaagacaagtaaatgacaggtaagtgacctcaaaaggtttaacatcctgaggtcacaaaataagtgacaacatg

SEQ ID NO: 187299 - DNA, 201 bp, Homo sapiens
taagtgtggaaagtaataacaataccttaaactttttacaaacctctcctggaatccttataccaaacttgtcacctcagtattgtctccattttaaagasaagtaaatgacaggtaagtgacctcaaaaggtttaacatcctgaggtcacaaaataagtgacaacatgactcagacatgctctttgacatattttatcac

SEQ ID NO: 187300 - DNA, 201 bp, Homo sapiens
ggggagggatagcattgggagatatacctaatgctagatgacgagttagtgggtgcagcgcaccagcatggcacatgtatatatatgtaactaacctgcayaatgtgcacatgtaccctaaaacttaaagtataataaaaaaaaaaaagaaatgcaaattattgggcccaaaacagacctactgaatttgaaactgtgagg

SEQ ID NO: 187301 - DNA, 201 bp, Homo sapiens; identical to SEQ ID NO: 32608

SEQ ID NO: 187302 - DNA, 201 bp, Homo sapiens
agtgggtgcagcgcaccagcatggcacatgtatatatatgtaactaacctgcataatgtgcacatgtaccctaaaacttaaagtataataaaaaaaaaaaagaaatgcaaattattgggcccaaaacagacctactgaatttgaaactgtgaggccctggtgaaacacacaaaagtttgagaaccattgcccttaggcata

SEQ ID NO: 187303 - DNA, 201 bp, Homo sapiens; identical to SEQ ID NO: 32609

SEQ ID NO: 187304 - DNA, 201 bp, Homo sapiens; identical to SEQ ID NO: 32610

SEQ ID NO: 187305 - DNA, 201 bp, Homo sapiens
tagtgggtgcagcgcaccagcatggcacatgtatatatatgtaactaacctgcataatgtgcacatgtaccctaaaacttaaagtataataaaaaaaaaaaagaaatgcaaattattgggcccaaaacagacctactgaatttgaaactgtgaggccctggtgaaacacacaaaagtttgagaaccattgcccttaggcat

SEQ ID NO: 187306 - DNA, 201 bp, Homo sapiens
ttctcaggtttgtcaaaaaaacacatgaaaaaatgctcatcatcactggccatcagagaagtgcaaatcaaaaccacaatgagataccatctcacaccagktagaattgcaatcattaaaaagtcaggaaacaacaggtgctggagaggatgtggagaaataggaacacttttacactgttggtgggactgtaaactagtt

SEQ ID NO: 187307 - DNA, 201 bp, Homo sapiens
actttgcagggttggtcttaggtatcaaatgagagaacagattttgaaaagctataatatttcacaaatgagaattccatccctcagaggggaattaggagaatcatatgaaacagcgaatgttaaaatatgtgtgtgttttacacacacagttttcagcaaacagcactttttttctggtttaagaaaattagctaggag

SEQ ID NO: 187308 - DNA, 201 bp, Homo sapiens
cactttgcagggttggtcttaggtatcaaatgagagaacagattttgaaaagctataatatttcacaaatgagaattccatccctcagaggggaattaggagaatcatatgaaacagcgaatgttaaaatatgtgtgtgttttacacacacagttttcagcaaacagcactttttttctggtttaagaaaattagctagga

SEQ ID NO: 187309 - DNA, 201 bp, Homo sapiens
tcacagagctttaaaccagggaagtgcttttactacacctatcaatgataagattaaattttgacaaattttaacattaggaaagtcaacaacaaatttcrgaattatatttctgttaatatttagtttagaatctaattatttagttcaacgaatgctgtgatttgattattaataaatgaatgcggattacttttcaat

SEQ ID NO: 187310 - DNA, 201 bp, Homo sapiens
tcactttgcagggttggtcttaggtatcaaatgagagaacagattttgaaaagctataatatttcacaaatgagaattccatccctcagaggggaattaggagaatcatatgaaacagcgaatgttaaaatatgtgtgtgttttacacacacagttttcagcaaacagcactttttttctggtttaagaaaattagctagg

SEQ ID NO: 187311 - DNA, 201 bp, Homo sapiens
aattttaagtctgaatttctagtaagaagtgtgatataagataattatctttgccttcatgagtgagagtctaggtcccaacttctcatagaaatgaacayagcaatcatccagtcaattacaaagtatataatgatatattcccagtgcgactatcaattaatgaaatagcatagtaccctgtcagataattactagtga

SEQ ID NO: 187312 - DNA, 201 bp, Homo sapiens
ctgcataatgtgcacatgtaccctaaaacttaaagtataataaaaaaaaaaaagaaatgcaaattattgggcccaaaacagacctactgaatttgaaactstgaggccctggtgaaacacacaaaagtttgagaaccattgcccttaggcatactttataaataccatctacttgatcaagcatttatgatcggggctacc

SEQ ID NO: 187313 - DNA, 201 bp, Homo sapiens; identical to SEQ ID NO: 32611

SEQ ID NO: 187314 - DNA, 201 bp, Homo sapiens
ttctttagatacgcttttcctggtagatttcaaattactttgaaatgactaggggtcagtttatgacttttcgaaaaactgatttaggattttttcgaggyggatggggcagggagcgttcctattgcatagttccctgaagcaagtataagtattagagatggatttactagtcattctccttgccacctttaagataaa

SEQ ID NO: 187315 - DNA, 201 bp, Homo sapiens; identical to SEQ ID NO: 32613

SEQ ID NO: 187316 - DNA, 201 bp, Homo sapiens
ttcctggtagatttcaaattactttgaaatgactaggggtcagtttatgacttttcgaaaaactgatttaggattttttcgaggtggatggggcagggagygttcctattgcatagttccctgaagcaagtataagtattagagatggatttactagtcattctccttgccacctttaagataaagcctgtcagttttgct

SEQ ID NO: 187317 - DNA, 201 bp, Homo sapiens; identical to SEQ ID NO: 32614

SEQ ID NO: 187318 - DNA, 201 bp, Homo sapiens; identical to SEQ ID NO: 32616

SEQ ID NO: 187319 - DNA, 201 bp, Homo sapiens; identical to SEQ ID NO: 32615

SEQ ID NO: 187320 - DNA, 201 bp, Homo sapiens
gaacttcaaattcaagacacagtaggtcaaaagtaaaagggtgggaaaagttgtactatgcaaacattaatttttcttttcttcccctatacaataccaaygtaaacaaatattaatttttgaaaagcaagaatggctatgttaatatctgacaaaatagactttagagtagaaaggattactataaagaggattttacat

SEQ ID NO: 187321 - DNA, 201 bp, Homo sapiens; identical to SEQ ID NO: 32617

SEQ ID NO: 187322 - DNA, 201 bp, Homo sapiens; identical to SEQ ID NO: 32618

SEQ ID NO: 187323 - DNA, 201 bp, Homo sapiens; identical to SEQ ID NO: 32619

SEQ ID NO: 187324 - DNA, 201 bp, Homo sapiens; identical to SEQ ID NO: 32621

SEQ ID NO: 187325 - DNA, 201 bp, Homo sapiens; identical to SEQ ID NO: 32620

SEQ ID NO: 187326 - DNA, 201 bp, Homo sapiens; identical to SEQ ID NO: 32622

SEQ ID NO: 187327 - DNA, 201 bp, Homo sapiens; identical to SEQ ID NO: 32623

SEQ ID NO: 187328 - DNA, 201 bp, Homo sapiens
tttttttggcagagaaataagtaaatatttttaaaatttcttcagtgttttctacaatgaaaaggaaatcaacaatttctatactctacgtaggggtcagyttcccaaacccatgacccattagtaatcatcaacaccttatccctggtctcccatatcccggtggttataaattcatggttaaggcacatagctcatgtc

SEQ ID NO: 187329 - DNA, 201 bp, Homo sapiens
gcaagaagagagcgtgtgcaggggaactcccctttaaaaccatcagctcttgtgagacttattcactatcatgagaacagcatgggaaagacctcaccccrtgattcaattgcctcccaccaggaccctcccatgacacgtgggaatgatgagatctacaattcaagttgagatttgtgtggggacacagccaaaccattt

SEQ ID NO: 187330 - DNA, 201 bp, Homo sapiens
gaactgccatcaataaatcaagcgtgatcagggtgaggaacaggaaagaaggaaacatggggaaatgaggtggatcagagagatacagtcatgggggtcakgtgtggtatcaggaataatgtgggaggccagattgaagtccgggccaggaacaatggtaattgtcggacttaaagagtgagtacagctgaaggagccggg

SEQ ID NO: 187331 - DNA, 201 bp, Homo sapiens
ttcaaacagttattttcaagtgtagcacacctcctattgggtcacactctcaacctcatctctaggggtccactgggactttagtctagttacaggtctakaagcaaacaggggtgttggggtggctcctgaggagaatcaacattatttggcctggtgagtgcctcagggaggccatcactgttgcctcaggcagcacag

SEQ ID NO: 187332 - DNA, 201 bp, Homo sapiens
ggcccctgccacctcaggatccagttattcccactgtatttacattttgtagttgagtgacttggttcccactgttagatctgacatacagagaagaccarttataggactcttcaaaaacataagtgctgccctcataaatctatttcacaaggcattgatcaagggtatgtcttctggaacctcccagctgggatgagt

SEQ ID NO: 187333 - DNA, 201 bp, Homo sapiens
taatttgctcaagcaatgaaaccacatctggtacagcagctgcaattggagtccccattttgttaagtttatgataatccactgtcattctccaagatccrtctgtcttctgtccaggcgaaatgggagagttgaacagggatgtggtaggactcaccacctctgcatctttcaagtccttgatggtggcactaatctctg

SEQ ID NO: 187334 - DNA, 201 bp, Homo sapiens
gaaggtattaaagttgctatgtgagaagaaacacttgaatctgtgaatgaattctctttcaccctcactctctgtctctgtctagtgcatgtgcacacacrtttatattttaagaaaagtatttttagaaggaatctaacaaagagatggtgttaatttggatcttttaaaccaaaatactacatattcattttgcatttt

SEQ ID NO: 187335 - DNA, 201 bp, Homo sapiens
gtttgctttttacatttaactctttcattcttctggaattattctttgctttggcttgtttatctagaccttctgttcttgcctatgggcacaatagaacrtaaggaaacatggcctagtttgcttagcaatggacagatgcttagagaaatgaggggcaagctttggccttgtgcaaatgtggtggatgcttgctgaagc

SEQ ID NO: 187336 - DNA, 201 bp, Homo sapiens
cctcctctcccaaaaaagccatgcctggacctgcactctcaagcctcctccctttgtgccccagtagctctgatccaccaggtcattgacctttctctctktatcctctcaggtgtgacattttcttaccgggaatgattttatctgtgctcttccacttgctaggcctcactgcctcctcctctgcctcctcctctttgc

SEQ ID NO: 187337 - DNA, 201 bp, Homo sapiens
agtgtttaggcggttagctctttctgctagaaaactcaccttgggtgtgcctgccactctggcacatgtcttcaaaaatgtgctttgtcacatttaaataytgatgttttgttcctagttatggaaatgtaggagtgtctgtctgatggttcatttctaacccccaaattcctatcttatactttaaactgccctgaaaat

SEQ ID NO: 187338 - DNA, 201 bp, Homo sapiens
aaatgatatcaattcccctgagctttggaagggaaaaagattctatcttgcttaaactgttctactgtagagaaatcatatgctttagatgccagggcagkggggagatacccctggatcttcccaaaggtcatttgttgcaggcagagggattaaatacttaccactgcttgctggtatggaacactgaaaacacatctt

SEQ ID NO: 187339 - DNA, 201 bp, Homo sapiens
aagttttgaggattagtgagctctacataagggatgtcaggtacattataagcgttcaataaatggtggtgattattgttattagtccactatcattcttraatatcttgtttcttactgaactgctaggagttgcaaaaccatcctgttaagcaggaaaagcaaggaagccacttaacagatgcaaatggcatttcacaa

SEQ ID NO: 187340 - DNA, 201 bp, Homo sapiens
aaatccatcagagatccttcattggcgctgagcagtttatgtttcattctgaatgatggagttctcttccattaggcaacttcaggcaagaagaagaagaytgtatcaggggttcacaaaataaagaaaaaagaaagcaggaaggagagttctagaaagagccaccctttagaaaaattctggtgcaccttcatcttctca

SEQ ID NO: 187341 - DNA, 201 bp, Homo sapiens
aagcaggaggagatgagatgagatgtcctaatttaagcactgaggcagaaaaacaggttgttaatcctttccttaaccttttgtcctgttcaggccctcartggatctgataatgccaaccacactgggtaggaccagctactttactgagtccaccaactcaaatgctagtctcatccagaaacaccctcaagacacacc

SEQ ID NO: 187342 - DNA, 201 bp, Homo sapiens
gcagagaaaactaaggtttagaaatttgaatgacttccttaacaaatatttattgagaacttgccatgtgctaagcacaatattaagcactgagcttactyggtattagtcggaattctccagagaaacagaaacaataggacactcgcacacaaacacacacacacacacacacacacacacacacacacatggagcttt

SEQ ID NO: 187343 - DNA, 201 bp, Homo sapiens
acacagactcggatttccacataagcttcctcacctgctttgttctcccaagccaactggccttttttcttgcacactgggacctgataaaagcctctggkacttgagatgaaccactagacaataatcagaatggaattttctgggaaatgtggccatatgaaaaaaatgatcactttttcctcacaaggatttgcaaag

SEQ ID NO: 187344 - DNA, 201 bp, Homo sapiens
aaaccaggactttcaacccacatgcagctctttaggtaccacatgcagatttgatgggctctctggttacagaaacctggccaagttcgcagaactctgasagctccgtgcctcccactccagctgaaacacttgtgggaaaactgagcaaatggatctgcctcgcaggatcagaagaagtaggcaccagcaattccatgg

SEQ ID NO: 187345 - DNA, 201 bp, Homo sapiens
ttgtgaaccaaggaagagatttttatgacaaacttttctagatgctttttagctgaagttaaagaagattatgggtgaattagaaaagggatttataatasaactttggattaatttattcattcataaacatttattgggtgctttggctgaattaggcagtactctaggggatacaggaatgaagaaaaaaatggttcg

SEQ ID NO: 187346 - DNA, 201 bp, Homo sapiens
catggataatgggatactgtgagcagctttacattcataaatttggagaaatagaccaattctttagaaattacaaactaccaagcctcagccagaatagktctataaccattaatgaaattgaatttgcaactgaaaaactccagaggtatgcaatactaattcaccatttgaaagtcaataaatcattaacagagtaaa

SEQ ID NO: 187347 - DNA, 201 bp, Homo sapiens
ccggtacctcagatggaaatgcagaaatcacccgtcttctgcgtcgctcacgctgggagctgtagaccggagctgttcctattcagccatcttggctcctyctctcaggtttgggttttttatgatggtaaaatatacatattataaaatgtatcactttaattgtttttaagtgtacaattcagtggcattaagtacact

SEQ ID NO: 187348 - DNA, 201 bp, Homo sapiens
gaaataaatgttataattactataccttggtaagtgctaaaatattctctgtatcttacacatgcttctgatcacacaatattgcaatcatttttccacaygcaagtctccctgactaggttttacctttttgaggctaagaacataacttatcttggtatccacagaattgaaaactgtatctcagacatatgaaagcta

SEQ ID NO: 187349 - DNA, 201 bp, Homo sapiens
gcttatgaacaactgggaaagcaaaggctggagaccagagaaggaatgcttactgtttcccaggaacagaaaggagagggaaatcagccaggccggagaayagagagtagggtggggagtgaaatgagtgagggccatgaggcagacaagattccaaccaggtaattaactcagttttactctataagcaggggaagggag

SEQ ID NO: 187350 - DNA, 201 bp, Homo sapiens
tctgtaggttgttatcaatgtgagtttgaataagcatttattaatactgtgaataagatgcatattatcaatattaacgtctgcatccatacagttggagrtatttatgttgatgtagacaaagacacagacagtggaaatttatatgcctttcaaaatcccagtgactataaaattctgctcctctgactatacattagg

SEQ ID NO: 187351 - DNA, 201 bp, Homo sapiens
atgcaagatatttgtctatatctcaactccgggtctccctcctgcatatccaactacttactagacacattcccttgaatgccccgtaggtactttatttyaacatattcaaaataaaactcatcatctcagccttctcctgctcacccaccttggccctttactactgtttcctcattcttttttctattaatcatcgtt

SEQ ID NO: 187352 - DNA, 201 bp, Homo sapiens
ctcttctttcccaatccctttccccagaccaattcccacaaatgttccaccaactcatttccatcgtgttacatgtctgtgtcttcaggtactatatctgkattctaacattactctctcagtcccgatttgtggaagccaatgataacaagattgcttaggtacaactgaagaagccaattttcatggctttgggaacct

SEQ ID NO: 187353 - DNA, 201 bp, Homo sapiens
attttcccaaagtcaacagttggtaagtgatgggatttgaacccaagcaatcattattaaagacaactctgctgaataagtagcttttacataggacctgsaatgttgggttggctgtcaaaaactgcagctgggacagctgggagtgcatttcagatgaaggctattctaacaggaaaggcaaggacaggttacatttgg

SEQ ID NO: 187354 - DNA, 201 bp, Homo sapiens
cttgtccctacccacaggaaaatcagtggaggaaataaatgttataattactataccttggtaagtgctaaaatattctctgtatcttacacatgcttctratcacacaatattgcaatcatttttccacatgcaagtctccctgactaggttttacctttttgaggctaagaacataacttatcttggtatccacagaat

SEQ ID NO: 187355 - DNA, 201 bp, Homo sapiens
gacttgagcaaaacagtagtgttattgttagggctgaagcaagctgtttgtcgagactccataatgcatattggtgacaacaggaattaaactctccacctgcaggacagccagccagtggggtgtagaataagtgtgctggcagagactttagtatgtaaaagtgccgcaggaaaagggggcaagctttattctagaaga

SEQ ID NO: 187356 - DNA, 201 bp, Homo sapiens
aaaaatcagagccgcctccgccccattacccatcatggaaaccctccaggaaaaagtggccccggacgcgcgagcctgaggattctgcacaaaagaggtgyccaaaatgaagaccctgatggtgagtcagttgtggcaactccaccgggcaaagagggggatccccgggctcagggtccacgggacgcaccgtggagactc

SEQ ID NO: 187357 - DNA, 201 bp, Homo sapiens
tcctcaggtaagcgcctctcttgtcttagcaatgcctcggttctcaggccttgtttatctttctctgtaattgtgagtgaggagctttctgaactggatarctgcctctgattttaccccttcaaattcatcttccttgcagctgattgagtgatccctctgaagaacaaacatgattgattgaagaataaacgtgccctc

SEQ ID NO: 187358 - DNA, 201 bp, Homo sapiens; identical to SEQ ID NO: 32631

SEQ ID NO: 187359 - DNA, 201 bp, Homo sapiens
gtatgtttttattaaaacacaattccactctctatctgctttataaagctagaggatttcttgaaatctcccaattattctttttattttactaaattttrtggttgtgaaccgaagtaatatatagtagatgctccttttgtgtgcaaaggtcactctaaccatgcgtgaaaaagccaaactttttaaaaagtggcattc

SEQ ID NO: 187360 - DNA, 201 bp, Homo sapiens
taaattttgtggttgtgaaccgaagtaatatatagtagatgctccttttgtgtgcaaaggtcactctaaccatgcgtgaaaaagccaaactttttaaaaartggcattcaaaatattgccacacacctgtttaatgcataatgctaaggatttgaaaggtataaaagaatttaaggcaggacccagtcttacggatcttta

SEQ ID NO: 187361 - DNA, 201 bp, Homo sapiens
tgctaaggatttgaaaggtataaaagaatttaaggcaggacccagtcttacggatctttaaatacctgaggacagaacaatataccatgaaatgtgtgtaratggataaaccaatagataaaaatgtgtaataaatgctagatatgaacagtactgtaggggtgcaaaaatgagaacgatgacttccctggaaagatcaag

SEQ ID NO: 187362 - DNA, 201 bp, Homo sapiens
atttgaacgccttatgactagggtatcaatatctatttgccacaagctccaccacactctattgtcttacatcccctcatctcctatccatttcacacacrtatgtttcctgtcggatttagtttgcaggcccttgtgtagggaagaaaagaacttagaggaaaaggttacatttaagggtaggctctaagaactgatcat

SEQ ID NO: 187363 - DNA, 201 bp, Homo sapiens
actagtacctttggtaagaaaagtttttgcatggtgtggtgaaggcagagccaggctgccatgccagggaaagggagcagcaaagggtgaagaaaggaatrtgctccactctttcaagaagtttgatgtggaaagaaaagagaaaggaggactggctgcttttatagggagacatgctgaaagagttttctttgtatggca

SEQ ID NO: 187364 - DNA, 201 bp, Homo sapiens
acaactttctgagtttgggtaacaagaagacacattagtcttatacctggcatgaaataagtgttcaataaatgtttattgttgttacagttgtgattatmattattaggccctgagggcttcatattaagctgaaattcatgtgagtttgtgcctagtaagtaaaactgacatactggagcactggcgtggtacttgtac

SEQ ID NO: 187365 - DNA, 201 bp, Homo sapiens
aaaaacaactctatgtcctccctaagtgataacaatattaagagtggaaattgtcactcacaaagagcttgactaacaaattcccattctttcttacaggsaacttttgtctcctctccttcctctagccacagttaatgtttgctgagatgtaaattcaccctccactgctctaaatatattagaggtatcaattcattt

SEQ ID NO: 187366 - DNA, 201 bp, Homo sapiens
aagaaccagagttcttcgactacaggtactaatctctctactctgagccatgtaaaaaaataattgtagaagagagggaaattaaaaattaaagtgtgggkgtattgcattgaagctgcacatttacgtgagttaagagtccctgatcacagagcaccctctccaaacaagcctcccatctcctgaaggatgagaccccac

SEQ ID NO: 187367 - DNA, 201 bp, Homo sapiens
tacagttcagtatagctacccccaagtgttacgggcccagagcgaggagagtagcacacttgcgtgggatattgatttcacggaggatggtgagtgagaarccactaaatatttgctaaatattttggcatggatgaatgttgaaatttatataatgatttttctatatttattaagatgattatatcacatgatttttct

SEQ ID NO: 187368 - DNA, 201 bp, Homo sapiens
acttcctcctttcctgatcacagccacaaacctccattttccttttttgttgttgtttgggcttttggttctgaactttgtgtttttaactacatttagastctgggaaatggaggtttctgaggttacctttgaaacatctttgagtgacaggctccctttggccacacagaatatcaagagtggaataaaaagtgtgga

SEQ ID NO: 187369 - DNA, 201 bp, Homo sapiens
agaggagcacatgaaagaaacacttttcttttcctctgacctgcctggccaaataatatttataattcattactttcagtaaggacaagagaacagaactytctgtattccaatttgaacgccttatgactagggtatcaatatctatttgccacaagctccaccacactctattgtcttacatcccctcatctcctatcc

SEQ ID NO: 187370 - DNA, 201 bp, Homo sapiens
cctcctcaagtgggtccctgacccccttgtagcctaactgggagacacctcccagtaggggccaacagacacctcatataggtggctgcccttctgggacraagcttccagaggaaggatcaggcagcaatatttgctgttctgcaatatttgctattctgcagcctacattggagatacccaggcaaacagggtctggag

SEQ ID NO: 187371 - DNA, 201 bp, Homo sapiens
aaataggcccagtaggtgttgcttctctttcttcattgtaggagggcccaaatgcagcaactcatccttcaccttagaaggaatatctcaacaggcccctyaccactggacccctagaaattttactgaggtagaagttccctgaattttagttggatttatttccgatcctctggcatgcaaatgtctcaccaataagtc

SEQ ID NO: 187372 - DNA, 201 bp, Homo sapiens
ttattgtaattttctaagttattgatatattgggattttttccctattatttaaacactggctttgcattttatgcattctgtgctttgggcttttttttwaaactctccttttcccctggaccattttttccccttcttcttattccatttttagcctgtattagtttaaaaattaaatgcttgatttctattctttcaa

SEQ ID NO: 187373 - DNA, 201 bp, Homo sapiens
gattatggcatctctccagtaagacagcactagtacctttggtaagaaaagtttttgcatggtgtggtgaaggcagagccaggctgccatgccagggaaarggagcagcaaagggtgaagaaaggaatatgctccactctttcaagaagtttgatgtggaaagaaaagagaaaggaggactggctgcttttatagggagac

SEQ ID NO: 187374 - DNA, 201 bp, Homo sapiens
actgcctctagactccacctctgtgggcagggcatagctgaataaaaggcagtagacaacttctgcagacttaaatgtccctgtctgacagctctgaagasagcagttgttctcccagcattgcatttgagctcgagaatggacagactgcctcctcaagtgggtccctgacccccttgtagcctaactgggagacacctc

SEQ ID NO: 187375 - DNA, 201 bp, Homo sapiens
aatctttgggaatgagatttaggggtccatgtttaataagcttcctttttaaatattgcacacattaaactttgagaaacactgtttgaaatgtttttaakcatcacaatgtgtagttctgtagctaattcatttctaggtttttgaactaatcatagcccttggtaaatacttgttgaaggcctagtagtttcaaaattg

SEQ ID NO: 187376 - DNA, 201 bp, Homo sapiens
aaggtgattctctcctgtgcctggctcgatgggtcccacacccatagagccttgctcactgctagcacagcagtctgagatcaatctgcaaggctgcagcstggctgggggaggggcatccaacattgctgaggcttaagtaggtaaacaaagcagcctggaagctcaaactgggtggggcccaccacagcttgacaagac

SEQ ID NO: 187377 - DNA, 201 bp, Homo sapiens
tatattcagaagaatgaaactagactcctacctctcacgatatgcaaaaatcaactcaaattaagactgtaatgtaagactgggcatggtagctcatgccwgtaattccagcattttgggaggccaaggcgggcagatcacctgagatcaagaattcgagaccagcctggccaacatggcaaaaccccgtctctactgaaa

SEQ ID NO: 187378 - DNA, 201 bp, Homo sapiens
gaataatgaaacagaatagagaacccagaaataaatctatgcatttacaaccaattgattttcacaaagatgccaataacatacattgggggaaagagcascctcttcaataaatggtgctgggaaaagtgattatattcagaagaatgaaactagactcctacctctcacgatatgcaaaaatcaactcaaattaagact

SEQ ID NO: 187379 - DNA, 201 bp, Homo sapiens
gtcttgacctctgcttcagcaagtgtattgtagctacatccttagctcactttggttttagtctcaagatcatcccagtcccctcctctatatttggttcwtggtttcatatactgttaaccaggaatgctaaaaatattaatttggtgcattatatttatgcgaacacttgagatgtttcaagcatgcaggaccacctgc

SEQ ID NO: 187380 - DNA, 201 bp, Homo sapiens
tctataaaccaatagcaaactctctgaaaaagaaatcaagaaagcaatttcatttgcaatagctaaagaaaaaaacctaggaataaacttaactgaggagrtgaaagatccctatagtaaaaactataaaacatggatgaaagaaattgaataagacacaaaaaaaatggaaaggtaacatgtgattatggattggaagaa

SEQ ID NO: 187381 - DNA, 201 bp, Homo sapiens
cctttattttgagcctatgtgtgtctctgcacatgagatgggtctcctgaatagagcacactgatgggtcttgactccttatccaattttccagtctgtgycttttaattggggcatttagcccatttacagttaaggttagtattgttgtgtgttaatgtgatccagtcattatgatgttagctggttattttgcccatt

SEQ ID NO: 187382 - DNA, 201 bp, Homo sapiens
tctgtctaatattgatagtggggtgttaaagtctcccattattattctgcgggagtctaagtccctttgtaggtctctaaggacttgctttatgaatctgkgtgttcctgtattgggtgcatatatattaaggatagttagctcttcttgttgaattgatccctttgccattatgtaatggccttctttgtctcttttgat

SEQ ID NO: 187383 - DNA, 201 bp, Homo sapiens
gttggatttcagtgaatcactaagttaggaataaagaagtagcggtgaaatattcacttaggtaataactaaagggagacattgaactaaggaaagagttktccttaaatgatgcaagagatgtttatgtctgttggccttgacaagttaccagaagaggttatcatatgggaaaggaaaagagtaattgttaaagtgagg

SEQ ID NO: 187384 - DNA, 201 bp, Homo sapiens
gagttctgtagctgtctattaggtctgcttggtgcagagctgagttcaggtcctggatatccttgttaaccttctgtctcgttgatctgtctaatattgayagtggggtgttaaagtctcccattattattctgcgggagtctaagtccctttgtaggtctctaaggacttgctttatgaatctgggtgttcctgtattgg

SEQ ID NO: 187385 - DNA, 201 bp, Homo sapiens
tagcggtgaaatattcacttaggtaataactaaagggagacattgaactaaggaaagagttttccttaaatgatgcaagagatgtttatgtctgttggccytgacaagttaccagaagaggttatcatatgggaaaggaaaagagtaattgttaaagtgaggtccgggggttgagagggaatatgccgagtggcatcacaa

SEQ ID NO: 187386 - DNA, 201 bp, Homo sapiens
tgggagggtgtatgtgtccaggaatttatccatttcttctatattttctagtttatttgcatagaggtgttcatagtattctttgtatttctgcgggatcrgtggtgacatcccctttatcatttttattgcatctatttgattcttctctcttcttctttagcagtcttgctagcagtctatcaattttgttaatctttt

SEQ ID NO: 187387 - DNA, 201 bp, Homo sapiens
tatgccgagtggcatcacaaagaattagcttgagatggaatagaatacatctttctctgactagaggggaggaaactagcctacatgaggaagtagatgcrtcacaggtgtgggggataagtcagagaatgcacatgtcttcaattttcccatttgctgagagtaactagggtagggttgagtagggctttaggtaagtat

SEQ ID NO: 187388 - DNA, 201 bp, Homo sapiens
tccctgtatcagccatcagaggtacaagtgacatgaaagtttaactggaatctttttttttccttatgtctcaatgcatactttgcacttttaattcagtwttgtgtcaagttcatacatctaattcatggaaactacttataaaatatgaagacacattagcaactaagatttggttaatacacatttcaaatgttgttg

SEQ ID NO: 187389 - DNA, 201 bp, Homo sapiens
gcattatttaaccaatgttggggtgtgggtttgtgcacatagggttcccagcaggtaatttatctagtgatcatgtcctgatgaacacaagggccctattrcaggcaaatcaaaagaggtaggactatgtcccaagtgttgcttctcttaccccaaggttgcccaatgcaatagttttcattctggtacatgcaaacatgt

SEQ ID NO: 187390 - DNA, 201 bp, Homo sapiens
ctttattactgatctattgcctgcctaattgtgcataacattccaaatattattaatttttaattatttacgtttaattatctgcattacttaagcattcraattccacagctaatgttctcaatgaaatatttactaaacagtcaaacctcttggattccacagaattaaatgttttcaatttgcagcaaacctttcctc

SEQ ID NO: 187391 - DNA, 201 bp, Homo sapiens
accagaggatgtgggttttcacttaaaaatgaggatatgaacctgatgatactaagactgaaaagacaattcaagtcaggagactggaagagaagcagggygtgtgtgtgtgtgtgtgtgtgtgtgtgtgtgtgtgtatgtgttagaaaggggagctataagagacatattttggatacattcctcagagatgccgtgttg

SEQ ID NO: 187392 - DNA, 201 bp, Homo sapiens
gaacatgcttgaacacagtaaaggccacataggacaaattcatagctaacatcatactgaacagggaaaaattgaaatcttttcctctaagacttgaaacmagacaagaatgcccacttttaccacttacattaaacacagtactggaagttctaggcagagccattaggcaagagagagaaataatggacatccaaatct

SEQ ID NO: 187393 - DNA, 201 bp, Homo sapiens
ttgtctatttttgcttttgttgtctgtgctgtagaaatactcgacaaaatactaagaaaccaatctcatcaacacattaaaaagatgattcaccatgatcractgattcatcccagggatgcaaggatggttcaatatatggaagttagtaaatgtgatacatcacattaacataaccaagaataaaaactctatgatcat

SEQ ID NO: 187394 - DNA, 201 bp, Homo sapiens
ggatgaagctgacttgatcgtggtgcataagctttttgatgtgctgctggattcagattgccagtattttattgaggatttttgcatcaatgttcatcagygatactggtctaaaattctctttttttgttgtgtcactgccagcctttggtatcaggatgatgctggcctcataaaatgagctagggaggattccctctt

SEQ ID NO: 187395 - DNA, 201 bp, Homo sapiens
gttttggttactgtagccttgtagtagagtttgaagtcaggtagcgtgatgcctccagctttgttctttttgcttaggattgtcttggcaatgtgggctcytttttggatccatatgaactttagttgtttccaattctatgaaaaatgtcattggtagcttaatggggatggcattgaatctataaattaccttgggcaa

SEQ ID NO: 187396 - DNA, 201 bp, Homo sapiens
taacgaagggatccaatttcagctttctacatatggctagctagttttcccagcaccatttattaaatagagaatcctttcccatttcttgcttttgtcakgtttgtcaaagatcagatggttgtagatgtgtggtgttatttctgaggcctctgttctgctccattggtctatatatctgttttggtaccagtgccatgc

SEQ ID NO: 187397 - DNA, 201 bp, Homo sapiens
gggatgcattctctttctcagggatgttccttgctgagaaaaagaattcaacgatatttctcccatttgcttttgaaagaagagaaatatggctctgttcygcccggctcaccagcggtcagagtttaaggttacctctcttgttttctgaacgttgctgttatcctgttctttttcaagttgcccagatttcatattgtt

SEQ ID NO: 187398 - DNA, 201 bp, Homo sapiens
gacagcactagctctcatacaaagtcccaaaagcatggaattccagaatggaattcattctgcacatcattttcttcaagtggggagagagagagaggtaygggagtggggacgagagagagagagagagagagagagagagagagagagagaactactgaaataagaatttacccttatatttggaataagtaagaatat

SEQ ID NO: 187399 - DNA, 201 bp, Homo sapiens
agatacgatttatatggttttagtatgtgaaagtattagctgattctaatttcttcttgtgaaatactaagcgaatgaaacatacttattaaaactcaaamtgttattgacttatagtcatccatagttctaatctgggtgggtgacaattcaaagtcataacaataatttttttattagcagcaaattagctttgagaac

SEQ ID NO: 187400 - DNA, 201 bp, Homo sapiens; identical to SEQ ID NO: 32628

SEQ ID NO: 187401 - DNA, 201 bp, Homo sapiens
ttatgtggtcatgtggtggaaggagcattggactttggactttgtaccagaggatgtgggttttcacttaaaaatgaggatatgaacctgatgatactaaractgaaaagacaattcaagtcaggagactggaagagaagcagggtgtgtgtgtgtgtgtgtgtgtgtgtgtgtgtgtgtgtatgtgttagaaaggggagc

SEQ ID NO: 187402 - DNA, 201 bp, Homo sapiens
cacctctattatcctttgtacagaaggagggggcccatggtccacaaaatgtgaattggtttcagttcattttctaggagtggaaatggacagaattgtgytaatgtacctatgctcactaacggtgtctcccttctcaccaactacaaatcactgagagggttgatgatgtgatctgtacgcatagtggttaagactgag

SEQ ID NO: 187403 - DNA, 201 bp, Homo sapiens
aggtgtgcatgtatggtttcactaaaagcttgtacttgaggcctaacaaaattagcaatttaattatgagtgtttaataaacgctataattactggacacractctaagtagcagaagatatggccggggcgagcagatagatgttagagagtacaactttctgagtttgggtaacaagaagacacattagtcttatacct

SEQ ID NO: 187404 - DNA, 201 bp, Homo sapiens
ttgtacttgaggcctaacaaaattagcaatttaattatgagtgtttaataaacgctataattactggacacgactctaagtagcagaagatatggccgggkcgagcagatagatgttagagagtacaactttctgagtttgggtaacaagaagacacattagtcttatacctggcatgaaataagtgttcaataaatgttt

SEQ ID NO: 187405 - DNA, 201 bp, Homo sapiens
aattttcacatcactattcaggagtgaagatgtctatagttttctcctgtttttattctttttttgaggtttgatatgttgattatataaaaagaacttgragatttccattatttgtcttggctcagaaaatgttaaaaaatcactgtataattacccattctttaaagatttaataaaagttccctgtgccttcatctg

SEQ ID NO: 187406 - DNA, 201 bp, Homo sapiens
attttcttgagtgtttataaagaatggatttggatcattcaaatgattttttgtatctatggagattattatattactttcccttactgaaataaaagttwtatctatatatttcttgatattgaacaccacctttccatatctggagtaaactgcacttggtgagagtgatatttttaattcagcagggtgagaatgttt

SEQ ID NO: 187407 - DNA, 201 bp, Homo sapiens
cgtgttgagatgttttgtagataactgaatatcatctacctctcaagagagtggtatgggtgatagaatataggtctgttaacaacatagcagcactaatrgaagccaaagagaaaaacaaatgacttggggagaaggtgtgaaatgcaagccctaaactgaccctgcaagtggtttttattattttccttgtttcttttg

SEQ ID NO: 187408 - DNA, 201 bp, Homo sapiens
tcagggcctagccatgtgatcccaacctaaggcaagggagattggggagtgggtggcccacaagaggatgtgaagtggatcttaccactgtctctgctgcrggagaccttctagctcccttaagctcatctggcttaacagccagctctgtcttctctcctcagggctgtgctgtgggccctctgattctctagaaccaac

SEQ ID NO: 187409 - DNA, 201 bp, Homo sapiens
taccagaggatgtgggttttcacttaaaaatgaggatatgaacctgatgatactaagactgaaaagacaattcaagtcaggagactggaagagaagcaggstgtgtgtgtgtgtgtgtgtgtgtgtgtgtgtgtgtgtatgtgttagaaaggggagctataagagacatattttggatacattcctcagagatgccgtgtt

SEQ ID NO: 187410 - DNA, 201 bp, Homo sapiens
ttttgctgattttctactaagtgtcctctgacttattgagcaaccagtgcagcattggctgcctgggcagggaaggaaacagcaggggttatataggaatmtgagtgattctgcttcttggctcttgttcttatggtttaaaatagaaggaataatcttttcaccactgtctccaccacctccagttttcagtgggaagat

SEQ ID NO: 187411 - DNA, 201 bp, Homo sapiens
tcttctgtgaacccgggagaagagacgtatccttgacattagctgaggtcagtatggccagtcaattcttttctctgccaaaaaaaaaaaaaaaaaaaaaagcccagaaagtaaggaaaacaagagggcaggagcctcatagatgaggaaaatcatatctttaaaacacagtttcttgttgataaataatcctcttactgc

SEQ ID NO: 187412 - DNA, 201 bp, Homo sapiens
aataaaacttatctgtaatgttactgttaggagtcatcgtctcccatactttgaaaccggatatgataattccataatttcagggttagactctattaaartctctacttatgcctctacagcactttaagaccaatagaggaagccatatacctaagtgaggcccaagatccagaaaaaaaaaaagaaaagaaagcatag

SEQ ID NO: 187413 - DNA, 201 bp, Homo sapiens
tccgttacacctctgggggctgatgctggctggtggcttgcacctcagcaggagctataggcaggaacacctacagatgtcctcttgttgttacccggggktccgcacagcatggctgctggtttgcagcatcaagtatcccaagacagagagccaggcagaagccacatcaccaattctaatctagccacagaagccaca

SEQ ID NO: 187414 - DNA, 201 bp, Homo sapiens
agattgattatatgtagaaataatatttttgtagtttgaatttaataagatattattaaaactggggccaggagtgggggctcatgcctgtaatcccagcsctttgggaggtcaaggtggaagaatcacttgaacccaggagttcaagatcagcctaggcaacataatgatacctcatctctacaaaaaaataaaaattga

SEQ ID NO: 187415 - DNA, 201 bp, Homo sapiens
tttaagtgcttgtcatgagcaggcattaaactagtcactatgatggaatttagagttaaattagagctctgccctcaaggagatgatagtaatgtataacstaagccaaagacatgggtaacagttatataagggagagatgggaccgatgtcagaagacagagctggctagatttggggaaactcaaagaaagggatgta

SEQ ID NO: 187416 - DNA, 201 bp, Homo sapiens
atttaaagcagcgcttctcaaacattaatggtacatatgcatcacccggagaagcttcttaaaatgcagattctgaatctttagatctcggatggggcctracagtcagcatttctaacaggtgcctgagtgatgctgttgctgttggtccgagatccatctcttgagttgtaagactctgaagcataggaccaagatcag

SEQ ID NO: 187417 - DNA, 201 bp, Homo sapiens
ttgcaagatgttacaattggggaatactggtaaaaggcatataagatccctttgtattatttattgtaactgcatgtaagtctaattattgcaaaaaaaawtgctttaaaaattaaacaatattacctaatgaaaaaaaaaaaggagtgagtggacaatcaggaacagagaatggagacttacagccattggacggggttt

SEQ ID NO: 187418 - DNA, 201 bp, Homo sapiens
ggggtttatctaatgttttcctgtgcttagattgaggttatgcattactgagaaggataccacagaagccataggcccttcccagaatctcataacaggawgtatgtgatgtccatacgtcttattactggcaatgttaaccttcatcacttggttaaggtaatgtctgctgggtttacctattgtaaagatagtattttt

SEQ ID NO: 187419 - DNA, 201 bp, Homo sapiens
cccgtctctaataaaaatacaaaaattagctgggcatggtgccacatgcctgtagtctcagctactcaggaggctgaggcaggagaatcgcttgaaccccrggggcagagcttgcagtgagccgagatcacaccactgcactccagcctagtgacagagtgagactccatctcaaaaaaaaaaaaaaaaaaaaaagaatga

SEQ ID NO: 187420 - DNA, 201 bp, Homo sapiens
tgagtttctcttcctaagctatcatccccaaagctttgatagttgtttgcacaagacagtttcagcaagaactcttcaaaaggacccctacgcccaagttytgtcagagaagtgaagagtgtcatctggaggaaaggttcagtgctggagagagcattctgctcagtcataaagcctgttaaaggaaggttaagaaggaag

SEQ ID NO: 187421 - DNA, 201 bp, Homo sapiens
acacataactgaatttctctttttacgtttttgcacctcagcctgtccaattgtgcaaagaaggggaggaggattaaatatgcaactgagtagccagggcmtctagctgctggtagttcctcaaagctgtacatccctccctcaccataacttgtttgttctctccagcaaataccatttactagggtgcccagattcacc

SEQ ID NO: 187422 - DNA, 201 bp, Homo sapiens
atttttttctatttgagaatttggaatgttaacagaaaacatgttttctaccaaaataaaggtaacagtgatctggccatctgcattttaaaaaaaaaaaactcattgaaatactcctgtagaatagattgctcacttttccttgcttttgtagttcatagtttttaggaaaaaagtatcttttacctttaaaccaagaag

SEQ ID NO: 187423 - DNA, 201 bp, Homo sapiens
agcagacctttgatgtaaggtcagggtcaaaaatgctggggctaggctgcacaggtgtaaagcctggcctggtcacttacccacctagtatgaccttgaasaagtcacttagtgtctctaggtctcagcttcctcatccatagacgtggatgtgatagtaatagactctgcctcaaagggctgtaggcagagtaaataagc

SEQ ID NO: 187424 - DNA, 201 bp, Homo sapiens
tgcacatgtacccaaaaacttaaagtacaataataataaattaaaaaaagaatgaaaaataacaaaaaaaaaacaaaaaaacaaaaaacttccttggatartaataataataatttttttctatttgagaatttggaatgttaacagaaaacatgttttctaccaaaataaaggtaacagtgatctggccatctgcatttt

SEQ ID NO: 187425 - DNA, 201 bp, Homo sapiens
gttatcctaaggtgtagcatatggtagaagctcattacagatgtctgaatgggaaaattaatgaatggtggggtgcaccagttcattccttaaattttgtsaatttttggtctcctagtaaaaattttctgatatgtaaaatgaagcaaatgttcagttaaatataagcattcctgtggctcttttcctctggtcattagc

SEQ ID NO: 187426 - DNA, 201 bp, Homo sapiens
cctgggaggcggaggatgcagtgagccgagatcattccactgccctccagccggggcgacaaagtgaggctctgtctcaaaaaaaaaaaaaaaaaaaaaamaattttaaggggggcttcaaagacacagcttcttgcctcctggaggcttataataagccttacccatgccaaaatataaagaacacagcaaagccactta

SEQ ID NO: 187427 - DNA, 201 bp, Homo sapiens
gtgcacatgtacccaaaaacttaaagtacaataataataaattaaaaaaagaatgaaaaataacaaaaaaaaaacaaaaaaacaaaaaacttccttggatrataataataataatttttttctatttgagaatttggaatgttaacagaaaacatgttttctaccaaaataaaggtaacagtgatctggccatctgcattt

SEQ ID NO: 187428 - DNA, 201 bp, Homo sapiens
ttaatatccacagtagtgtagcatggtaggctgagtcattctcacaggatcaaattagaccttggtgttatgtctccacagttatcctaaggtgtagcatrtggtagaagctcattacagatgtctgaatgggaaaattaatgaatggtggggtgcaccagttcattccttaaattttgtcaatttttggtctcctagtaa

SEQ ID NO: 187429 - DNA, 201 bp, Homo sapiens
aaataagaagacgaacaagcaggtcatggtgagaattaaatgagataatagatgtagagtgttggatgcagttcctagcacacagtattcaggaaagagtrtcaatatcattaatattaataagatatgtaaaataatttatattattaatattatcccaagcacttgagagtttccctgaaagataccaagaattctgag

SEQ ID NO: 187430 - DNA, 201 bp, Homo sapiens
ttgtgcacatgtacccaaaaacttaaagtacaataataataaattaaaaaaagaatgaaaaataacaaaaaaaaaacaaaaaaacaaaaaacttccttggataataataataataatttttttctatttgagaatttggaatgttaacagaaaacatgttttctaccaaaataaaggtaacagtgatctggccatctgcat

SEQ ID NO: 187431 - DNA, 201 bp, Homo sapiens
gaacaagcagaaaggaatagcatcaacatcaacaaaaaggacaaaaaaggacatccacaccaaaaccccatctgtatgtcaccaacatcaaagaccaaagrtagagaaaaccaaaaagatgaggagaaaccagagcagaaaagctgaaaactctgaaaaccagagtgcttcttcctcctccaaaggattgcagcccctcgc

SEQ ID NO: 187432 - DNA, 201 bp, Homo sapiens
acatccacaccaaaaccccatctgtatgtcaccaacatcaaagaccaaaggtagagaaaaccaaaaagatgaggagaaaccagagcagaaaagctgaaaaytctgaaaaccagagtgcttcttcctcctccaaaggattgcagcccctcgccagcaacagaacaaagctggatggagaatgacttagaagagctgacagaa

SEQ ID NO: 187433 - DNA, 201 bp, Homo sapiens
cctcttggggctgtcttcaggactaggttagataacgtatgtattgggctcggaagaggtcctggcacattagttgaacacttagtcgtgttatgtggggtaacatcgttgttatagaataagtgggggaggcagtcaggaagggcctcctggaggaggtgacatttaagctgagacctgagcgatgaggagccaagctta

SEQ ID NO: 187434 - DNA, 201 bp, Homo sapiens
tagtaaatgtgatacatcacattaacataaccaagaataaaaactctatgatcattttaatagatgctgaaaaagcattcaataaaattcaacgtcctttmacgacaaaaactcttaacaaattgcatatcaaaggaacatgcttgaacacagtaaaggccacataggacaaattcatagctaacatcatactgaacaggg

SEQ ID NO: 187435 - DNA, 201 bp, Homo sapiens
agctgggactgattcatctcaggggcgtaattccagctttggcactggcttgtggaggtgtcattgagaggggttcagagggctaagcttaccaaccccccagaagaggggacacatagccttggctccatgtgccaagcagcagcataatatgcagggctctgcaaagtcagcagagaaaggacagcaggtgtcaaccac

SEQ ID NO: 187436 - DNA, 201 bp, Homo sapiens
agaatagatttccctcgtcttaagccaccaggtatgtggcaatttgttacgactgcctcagaaaactaatacacctgccagctgcaaggtggccctcctcygaatgcgaggtgttagaagggacagtgtctctcagagtcaattctgaaaaacactagttgtgtgggtgaagagataggcgggccttaaatggcagaagga

SEQ ID NO: 187437 - DNA, 201 bp, Homo sapiens
gccccctctctattcccttttttaatccccctaattatttattctgcaacttctcccccaacaagtatgtaagccacattagggccgggatttttgtttawtgtggcatccccagtgctggtatgtactctgtattaaaaatatattaatgaatgagtgaatgaatgaatgaatttcatctgaagaatgagccttccagac

SEQ ID NO: 187438 - DNA, 201 bp, Homo sapiens
aaactcctggcccacaatacatatgtgttcttttaagctgctagtttgtggtattattgttattcatcaataaataactaatacactggcatttttacttkcccaaatttaacctccaagcatattttatggcaaaagcaagacatatgcattgaaattattgggtgatttttccttttcttctttttactagcatcagag

SEQ ID NO: 187439 - DNA, 201 bp, Homo sapiens
ctctaaaagtattaaagcagtggcagccactgcatgcagacatgagggctaggctaaaacagtaaggtcaagttgtttggacagaaaggctacagggtgcrgtcctggctcttgtataagaattctgaccgcactaaccatgcctaggaaggaaaggagttgttgttttgtaagggattgaggtttagggattaatcagac

SEQ ID NO: 187440 - DNA, 201 bp, Homo sapiens
atttcatctgaagaatgagccttccagacgaattccttgttaaaataagccagcacattgtctataaagcagcttccttgattaaggggcaaggtctcagkttaacgtgagataagagtttctgatttcagcatccagccaaatgatactgttctttggaacgcactctcttcttccctccactagtttttcttccctagc

SEQ ID NO: 187441 - DNA, 201 bp, Homo sapiens
ggtgatttttccttttcttctttttactagcatcagagggatttaagtatatgatacttagcagtagaatcagtcactatatttataatatttcacagcayttaaaacagtatatacaccaaagactttaggttggcagacaatgattcagttattcatatgttgatctgatataactatgttgttaggaatgtatgagac

SEQ ID NO: 187442 - DNA, 201 bp, Homo sapiens
gcaaagaaggggaggaggattaaatatgcaactgagtagccagggcctctagctgctggtagttcctcaaagctgtacatccctccctcaccataacttgyttgttctctccagcaaataccatttactagggtgcccagattcacctctgtaggcccaagactgtgaggttcctagacaacaggattttgctctgaatat

SEQ ID NO: 187443 - DNA, 201 bp, Homo sapiens
tttcttcatggttgctaaaaagcaccaaaaagaatggtgaaattatttaccttgattgctcaacctagaaactaaaagaggaggaagagatgtcaacgtaycaacataccaaacttggtgcttttcatacatgcttgcttatttagctctcaagtagcccaggggacagagattcctatgcctcctttatagataagaaat

SEQ ID NO: 187444 - DNA, 201 bp, Homo sapiens
ggggggagggatagcattaggagatatacctaatgctaaatgacgagttaatgggtgctgcacaccagcatggcacatgtatacataggtaagtaacctgyacattgtgcacatgtacccaaaaacttaaagtacaataataataaattaaaaaaagaatgaaaaataacaaaaaaaaaacaaaaaaacaaaaaacttcct

SEQ ID NO: 187445 - DNA, 201 bp, Homo sapiens
tgaagctgtaagtgagctgtcatcctcttcctgggttccacatcctcccagttattcactcacccagattaggtctagaacacatggccagtgcattgtcrcagcccataggtgaaaacagcttctaacttaagggaagccacttcctcttcttaccctttgccattcagtcagctcttctccattccagctccttcagtc

SEQ ID NO: 187446 - DNA, 201 bp, Homo sapiens
gctgtacgctgtagcattctgaggacaggtctgacttctgagaagggaaagtggtaaaagtatcatccagtcctttttaagttggtggctgagcttggtgwggtgtgtttttaaaagacctttagtccgttctacttttcctgaaggcagaggactgtaagggatataaagctttcactgaatactaagagcctgaaaaac

SEQ ID NO: 187447 - DNA, 201 bp, Homo sapiens
tcacaatagcaaagacttcgaaccaacccaaatgtccaatgatgatagactggattaagaaaatctggcatatatacaccatggaatactacgcagccatraaaaatgatgagttcctgtcctttgtagggacatggatgaaactggaaatcatcattctcagtaaactatcacaaggacaaaaaaccaaacaccgcatgt

SEQ ID NO: 187448 - DNA, 201 bp, Homo sapiens
aagcactcagtaaatattaactgactggccagttttcctttgtgcccccagctttgctgtgctctccacagccccttactccgacttcagcagagcctccwctccttatactgtatcacactgtattgtcctcctttactgaccactgtccctcactaaagtgtaagctttcaaggctatttgccccatttttgcattctg

SEQ ID NO: 187449 - DNA, 201 bp, Homo sapiens
gcaatcattaaaaagtcaggaaacaacaggtgctggagaggatgtggagaaataggaacacttttacactgttggtgggactgtaaactagttcaaccatygtggaagtcagtgtggcgattcctcagggatctagaactagaaataccatttgacccagccatcccattactgggtatatacccaaaggactataaatca

SEQ ID NO: 187450 - DNA, 201 bp, Homo sapiens
cgccttacagtgtgatcttgagcaaactgcttcatttttctacccttcaatattctcatttgtaaaatgggagtgataatatactatcttagagtattatytgaaggattaatggaattatatttataaaaaatcagaacagtgcctaacacagttgtggctgaaaagcactcagtaaatattaactgactggccagtttt

SEQ ID NO: 187451 - DNA, 201 bp, Homo sapiens
cctcccagggcttctctttcttccatggcacttatgtggtttattttaaaggtcatgcatgctatctttgacctgtctgctgccattttctttggaaaaaagagccctgggagatatgattaaggagagagtcctggcctgttagccaggggagccctcctgcccagaccctgtaagcactctggataaccctctgctcct

SEQ ID NO: 187452 - DNA, 201 bp, Homo sapiens
taattgcattatagcacttacagcacagttctgtcatggtttgtctgggggcaccctcaatgtggactgtatgctcttttattgtgttattaaggttggcscaaaagtaattgtggttttggccattacttttaatggcaattagttttgcgctaacataatatctgtagcaccaggttcagtgcctggtacgtaatagga

SEQ ID NO: 187453 - DNA, 201 bp, Homo sapiens
atctgactattatgtgtcttggagttgctcttctcaaggagtatctttgtggcgttctctgtatttcctgaatctgaatgttggcctgccttgctagattsgggaagttctcctggataataccctgcagagtgttttccaacttggttccattctccccgtcactttcaggtaaaccaatcagatgcagatttggtcttt

SEQ ID NO: 187454 - DNA, 201 bp, Homo sapiens
agttgaatctctgaatagaccaataacaggctctgaaattgaggcaataattaatagcctaccaaagaaaaaaattccaggaccagaaggattcacagccraattctattagaggtacaaagaggagctgttaccattccttctgaaagtattctaatcaatagaaaaagagggaatcctccctaactcattttatgaggc

SEQ ID NO: 187455 - DNA, 201 bp, Homo sapiens
aatcacttgaacccagaaggtggaggttgcagtgagccgagatcacaccattgaactccagactgggcgacagagcaagactgtcttgaaaaaaaaaaaaatggatcatagagtagatcaattttgatcagaaaatgtcactaataaaggtctggaacatggggtgcatctgtagccacatgggatccttgggtggcccgg

SEQ ID NO: 187456 - DNA, 201 bp, Homo sapiens
taaatgttccctcatctttggtcccatggtcccttgtgcctaattgcattatagcacttacagcacagttctgtcatggtttgtctgggggcaccctcaaygtggactgtatgctcttttattgtgttattaaggttggcgcaaaagtaattgtggttttggccattacttttaatggcaattagttttgcgctaacataa

SEQ ID NO: 187457 - DNA, 201 bp, Homo sapiens
aagagggtggcttttggggactgggtcaacctggcatgttctagtggtgcccactaatcacagagggtcagtatggcaaggtcaggaaacttggccttctyggaaagagtgttcagctggcctgctctgggcaaagagaaagagagagcgccaggtccttggaaggcccctaaggcgatgtgtttcacctgccaaccagtc

SEQ ID NO: 187458 - DNA, 201 bp, Homo sapiens
tttaagaatgttgaatattggcccccactctcttctggcttgtagagtttctgccaagagatctgctgttagtctgatgggcttctctttgtgggtaaccygacctttctctctggctgcccttaacattttttccttcatttcaactttggtgaatctgactattatgtgtcttggagttgctcttctcaaggagtatct

SEQ ID NO: 187459 - DNA, 201 bp, Homo sapiens
ccgttacacctctgggggctgatgctggctggtggcttgcacctcagcaggagctataggcaggaacacctacagatgtcctcttgttgttacccggggttccgcacagcatggctgctggtttgcagcatcaagtatcccaagacagagagccaggcagaagccacatcaccaattctaatctagccacagaagccacac

SEQ ID NO: 187460 - DNA, 201 bp, Homo sapiens
tttgatgcatctgcacaactcaaagaacgagtgttagtgtctgacataatcaataccagagctcagatttctcaggtagcagaaatcaagagggtggcttytggggactgggtcaacctggcatgttctagtggtgcccactaatcacagagggtcagtatggcaaggtcaggaaacttggccttctcggaaagagtgttc

SEQ ID NO: 187461 - DNA, 201 bp, Homo sapiens
tgggtgcatatatatttaggatagttagctcttcttgttgaattgatccctttaccattatgtaatggccttctttgtctcttttgatctttgttggtttraagtctgttttatcagagactaggattgcaacccctgcctttttttgttttccatttgctggtagatcttccatccttttattttgagcctatgtgtgtc

SEQ ID NO: 187462 - DNA, 201 bp, Homo sapiens
tattccctgggtatgtagcccagttatttttgttttttaacatatatcccaagtgattcaagagcatgacaaggtttgggaattacagtccttgagcacartctcccattggtactttacaaggttatactttagactaattgaacttgttttatttttattttatctgtaatgatatttgatattcattttgtatataaa

SEQ ID NO: 187463 - DNA, 201 bp, Homo sapiens
cagtattaattaaatgatttttcttatgagtcaggatggaagagagactactaatctaggagtgaactaagatagatgcctatgtttcctaagaaggaacrgagtgtctcaccaaatgaggctttacggaaaatgttccaaagaatcggggaggctgaacactatgaggaaaaagtcagagagaaggccttgctcagcgga

SEQ ID NO: 187464 - DNA, 201 bp, Homo sapiens
gtctaatgttacagtggggtgttaaagtctcccattattattgtgtgggagtctaagtctctttgtaggtcactcaggacttgctttatgaatctgggtgytcctgtattgggtgcatatatatttaggatagttagctcttcttgttgaattgatccctttaccattatgtaatggccttctttgtctcttttgatcttt

SEQ ID NO: 187465 - DNA, 201 bp, Homo sapiens
ggagtggagaattggggatttaaaaatgtgattgctgaaggcagcaccatcttaacccctggagtcatcgagtgctcatttgctgctaggggacagaaaarccattagagatattccctgggtatgtagcccagttatttttgttttttaacatatatcccaagtgattcaagagcatgacaaggtttgggaattacagtc

SEQ ID NO: 187466 - DNA, 201 bp, Homo sapiens
agcctggagaacagtcactcttccatgtgctgtgcattttcctgggcatttttcacctcacaacagctctaatgaccttggcatcaagctcttactggggmttaataactggctgggcttaatggtccttactgtgtcccgggccattttcccagccagccattaattccaggcagtgccctggactctggtcattatggt

SEQ ID NO: 187467 - DNA, 201 bp, Homo sapiens
ctctttttttctttattagtcttgctagcggtctatcaattctgttgctcctttcaaaaaaccagctcctggattcattaattttttgaagggctttttasgtctctatttccttcagttctgctctgattttagtcatttcttgccttctgctagcttttgaatgtgttcgcccttgcttttctagttcttataattgtg

SEQ ID NO: 187468 - DNA, 201 bp, Homo sapiens
tttttctatatatctctagaagtgaattgctggatgatatggtaactctatgtttaatttattgaggaattatcattctatagaaatgtgtagttttttttgttgttgttgttgttttatttgtttgttgagacagggtcttcttctgttgcccaggctaggcttcagtggcatgatcacagctcactgcagccttgacct

SEQ ID NO: 187469 - DNA, 201 bp, Homo sapiens
tctctttttttctttattagtcttgctagcggtctatcaattctgttgctcctttcaaaaaaccagctcctggattcattaattttttgaagggctttttwcgtctctatttccttcagttctgctctgattttagtcatttcttgccttctgctagcttttgaatgtgttcgcccttgcttttctagttcttataattgt

SEQ ID NO: 187470 - DNA, 201 bp, Homo sapiens
gctttcagttttttctatatatctctagaagtgaattgctggatgatatggtaactctatgtttaatttattgaggaattatcattctatagaaatgtgtmgttttttttgttgttgttgttgttttatttgtttgttgagacagggtcttcttctgttgcccaggctaggcttcagtggcatgatcacagctcactgcag

SEQ ID NO: 187471 - DNA, 201 bp, Homo sapiens
ggagctgtggtgggctccacccagttcgagcttcctggctgctttgtttacctaatcaagcctgggcaatggcgggcgcccctcccccagcctcgctgccrccttgcagtttgatctcagactgctgtgctagcaatcagcgagactccgtggggtagtaccctccaagccaggtgcgggatataatctggtggtgcgcca

SEQ ID NO: 187472 - DNA, 201 bp, Homo sapiens
aagtatggaaggatgcctcataagataaaaatagttcctgttgtatcatcagtccagcaatagattagggaagattaaaaatggattgtaatgccttcttyggccttgagaaagctcttattgtgcccatggttcagtaggcctgctgatcatttccatcttaatgtaatctttaacattacactgctacaggtgagatgt

SEQ ID NO: 187473 - DNA, 201 bp, Homo sapiens
gctctcttcaaagctgtcagacagggacatttaagtctgcagaggttactgctgtctttttgtttgtctgtgccctgcccccagaggtggagcctacagasgcaggcaggcctcctggagctgtggtgggctccacccagttcgagcttcctggctgctttgtttacctaatcaagcctgggcaatggcgggcgcccctcc

SEQ ID NO: 187474 - DNA, 201 bp, Homo sapiens
ctataaagcagcttccttgattaaggggcaaggtctcaggttaacgtgagataagagtttctgatttcagcatccagccaaatgatactgttctttggaaygcactctcttcttccctccactagtttttcttccctagcatttgttttggatctgtagttacagcattttctgctcagaattcaactgagggaaaaaaaa

SEQ ID NO: 187475 - DNA, 201 bp, Homo sapiens
cttcaagtacacaattatggttgccagtaaaatgaatttcatgcttgaggtgatatttgtgggagaaaaaaaaaaggaagattaaaaaggctgtgtcaaamtagtgttttgattagaccagaagcatcattctagaaaatgcaaaatagtaggaacgcaataaaacaaacaaacagacaaaacccaaacaaacaaaaaatg

SEQ ID NO: 187476 - DNA, 201 bp, Homo sapiens
cctgttcatcatctcaataatttttagattgattatatgtagaaataatatttttgtagtttgaatttaataagatattattaaaactggggccaggagtrggggctcatgcctgtaatcccagccctttgggaggtcaaggtggaagaatcacttgaacccaggagttcaagatcagcctaggcaacataatgatacctc

SEQ ID NO: 187477 - DNA, 201 bp, Homo sapiens
ggcagtgaaggctggtgggtgggcttgtcatagaacaaaaaagaaaggaacagcttggaagagtaacacttttctagtgaatcacattaaataatcagcakggcttatacccagtgtcagcctgaactgagattgacagctaataaaaagcacagtaattacaggaaaacatcagattggaaagtacagagattcttgaaa

SEQ ID NO: 187478 - DNA, 201 bp, Homo sapiens
gaacctagttcttcagaaccttgcaactttgtaggaaagagagacattgaatcagtgattgtcaatatgatgagaattataaagggagaaacagggtgctwcagtagtcttggagtttagggaaggatccttgagaaagtgatgctttgaatgggagatgaaggagttccaaaaatcatagacagcgaaaggcagagaggg

SEQ ID NO: 187479 - DNA, 201 bp, Homo sapiens
gggatcattcatgcctcaaaactcagtatcacacaatatacccatgtaacaaatctgcatgtgtacccctgcatctaaaataaaagttaaaattataaaartaaatataaaaataaatataaaataaagtttggcttcttattccaaaagcaataagaagcaaatagtaagatctaagcaggtgagtgacataatttgatt

SEQ ID NO: 187480 - DNA, 201 bp, Homo sapiens
atcaaggatattggtctaaaattctcttttttggttgtgtctctgcccggctttgctatcaggatgatgctggcctcataaaatgagttaggaaggattcyctctttttctattgattggaatagtttcagaagaaatggtaccagttcctccttgtacctctggtagaattcggctgtgaatccatctggtcctggactc

SEQ ID NO: 187481 - DNA, 201 bp, Homo sapiens
gctttacatggcttatcattcacttattctttgcaaagtatatttgttgaacaccttctatgtgctgggcactgtccttggtgctgaagatactgtgtgamtaacacaaagtccctcctttcggggagcttaaacgtgtagatgtacaaatattatcttaagattattttaggtagtgatacatgaatttaaacaaaaacc

SEQ ID NO: 187482 - DNA, 201 bp, Homo sapiens
atacctaatttattgagagtttttagcatgaagtgttgttgaattttgtcaaaggccttttctgcatctattgagataatcatgtggtttttgtctttggytctgtttatatgctggattacatttattgatttgcgtatattgacccaggcttgcatcccagggatgaagcccacttgatcatggtggataagctttttg

SEQ ID NO: 187483 - DNA, 201 bp, Homo sapiens
ttgaaggaaatcacatcagggagttatttgaaggcactgaggtgagccagtgcgtaacatcaaccaatgtactagcatttcagaaaagaaacaaataggcytgtcccactgacaactcatccatgccccctttggacagagaaaaatcatctactgcttgctgagaaagtgaggcactgaggcacagagatttctttaact

SEQ ID NO: 187484 - DNA, 201 bp, Homo sapiens
ccttttctgtaggttgttatcaatgtgagtttgaataagcatttattaatactgtgaataagatgcatattatcaatattaacgtctgcatccatacagtkggaggtatttatgttgatgtagacaaagacacagacagtggaaatttatatgcctttcaaaatcccagtgactataaaattctgctcctctgactataca

SEQ ID NO: 187485 - DNA, 201 bp, Homo sapiens
tggaatagtttcagaaggaatggtaccagttcctccttgtacctctggtagaattcggctgtgaatccatctggtcctggactctttttggttggtaaackattgattattgtcacaatttcagttcctgttattggtctattcagagattcaatttcttcctggtttagtcttgggagagtgtatgtgtcgaggaattta

SEQ ID NO: 187486 - DNA, 201 bp, Homo sapiens
ggtgaccttgggcaagttccttcgcctcccagggcttctctttcttccatggcacttatgtggtttattttaaaggtcatgcatgctatctttgacctgtytgctgccattttctttggaaaaaagagccctgggagatatgattaaggagagagtcctggcctgttagccaggggagccctcctgcccagaccctgtaag

SEQ ID NO: 187487 - DNA, 201 bp, Homo sapiens
accttttctgtaggttgttatcaatgtgagtttgaataagcatttattaatactgtgaataagatgcatattatcaatattaacgtctgcatccatacagktggaggtatttatgttgatgtagacaaagacacagacagtggaaatttatatgcctttcaaaatcccagtgactataaaattctgctcctctgactatac

SEQ ID NO: 187488 - DNA, 201 bp, Homo sapiens
gaagggttgttgaattttgtcaaaggctttttctgcatctattgagataatcatgtggtttttgtctttggctctgtttatatgctggattacatttattkatttgcgtatattgaaccagccttgcattccaggaatgaagcccacttgatcatggtggataagctttttgatgtgctgctggattcgttttgccagtat

SEQ ID NO: 187489 - DNA, 201 bp, Homo sapiens
tctgcaggagagtagtgttttaattattctaatgaaagctttcacttgccattgaatccataaaagcagaaaattaaggaggttgcgaacacctctctgargcagaaaccttgctttataatatacctgcacctttcctagcaaaactgagaccccaagaaatttatagacacaggatattacccttccagtttaacacat

SEQ ID NO: 187490 - DNA, 201 bp, Homo sapiens
gaatcaaagagctaaatgtaagaaatagcactatgaaattctcaaaagaaaatgtaggtataaatctttatgaccttgattaggtatggattcttagatgygataccaaaaacacaagcaacataagaaaaaatagagaaagtggaaataatcaaaattaaaaacgtttttccttcaaaggataccatcaagaaaataaaa

SEQ ID NO: 187491 - DNA, 201 bp, Homo sapiens
gagaaagtggaagttatcactttcctcttaattccttttacatatttttcctctggatgagaaaatgttactttctcatatccagaaaagtgttataaaaygatacattgagatcatctgattccctctttattgtgattgtttctttaaaagaaaaaaaagcagaaaggggccatgaacttacaaagaaagttttaaaga

SEQ ID NO: 187492 - DNA, 201 bp, Homo sapiens
tatgttgaataggagtggtgagagagggcatccctgtcttgtgccagttttcgaagggaatgcttccagtttttgcccattcagtatgatattggctgtgrgtttgtcgtagatagctcttattttgaaatacctcccatcaatacctaatttattgagagtttttagcatgaagggttgttgaattttgtcaaaggcttt

SEQ ID NO: 187493 - DNA, 201 bp, Homo sapiens
taattgaataccctttatttccttctcctgcctaattgccctggccagaacttccaacactatgttgaataggagtggtgagagagggcatccctgtcttrtgccagttttcgaagggaatgcttccagtttttgcccattcagtatgatattggctgtgagtttgtcgtagatagctcttattttgaaatacctcccatc

SEQ ID NO: 187494 - DNA, 201 bp, Homo sapiens
ctccgttacacctctgggggctgatgctggctggtggcttgcacctcagcaggagctataggcaggaacacctacagatgtcctcttgttgttacccgggrttccgcacagcatggctgctggtttgcagcatcaagtatcccaagacagagagccaggcagaagccacatcaccaattctaatctagccacagaagccac

SEQ ID NO: 187495 - DNA, 201 bp, Homo sapiens
agcatgtaaaaatagaatggaaacccaaacagaaaacctgggagagactatcactctggaatggttctcacacatgcactaactaatttagttatttgtayagcaaatatatagtgagtacctactgtgtattaggtcctggggatattgtggtgacttaaacccaacacaaacatgaacctagttcttcagaaccttgca

SEQ ID NO: 187496 - DNA, 201 bp, Homo sapiens
tgaagggtgcaaaggaatagtaaagaaagcaggtttgagatctggaacagaataatggattgtggagggaggtattgaggataggagagtatatgggtttrgcaccatggggtggataggcaaaacaatttggttgataagtcatagatcctgaactaacttgtaaggcttgtctggttttagacagataaaatgggggaa

SEQ ID NO: 187497 - DNA, 201 bp, Homo sapiens
ctttgtcacatttaaatactgatgttttgttcctagttatggaaatgtaggagtgtctgtctgatggttcatttctaacccccaaattcctatcttatacwttaaactgccctgaaaatcaaaagcccttggaatcaaactccagatacacagccacattgccaacacactactttagcaaaagatccagaacatatttta

SEQ ID NO: 187498 - DNA, 201 bp, Homo sapiens
gcttgtccccaaactgatgaagagcaaggcaggcactgcgcacagtggtttgggtcatcagcagtccaagaatgttttccccagtgtaggtgctcccccargttgatgggagtctgggagaggtggtgctgacaagagagtttcttcacctccactccaaagacagaaagcaacgaaagttaatgacagaagcaagcagca

SEQ ID NO: 187499 - DNA, 201 bp, Homo sapiens
attttggaagttatgagaaatgtagagagtgtgttgagcatagtttgtgatttttagggcctctaaaagtattaaagcagtggcagccactgcatgcagayatgagggctaggctaaaacagtaaggtcaagttgtttggacagaaaggctacagggtgcggtcctggctcttgtataagaattctgaccgcactaaccat

SEQ ID NO: 187500 - DNA, 201 bp, Homo sapiens
ttttctcagctttctgtctctctcctagagttaaattttaatgaaaaaaaataatgtgaattatttgtgtgttatatatgtgtaacatttctatgtatttrtattattaatatgacataataatataatatttgtattattaatatttatttaaaaccatcagcacacacttagaacctccgttttgggtaatgtagttat

SEQ ID NO: 187501 - DNA, 201 bp, Homo sapiens
tgcactccagcctgggcgacagagcaagactctgtctcaaaaaaataaaaataaaaataaaaataaccttgcctcgtactgttggggtacacacttccaascagtgacccttggcagctctgggaagctctgagacgtgttcttccttggagtagtccctctcagcctgcgacactgtccatctaaatctgtggcacaggt

SEQ ID NO: 187502 - DNA, 201 bp, Homo sapiens
tattagaggtacaaagaggagctgttaccattccttctgaaagtattctaatcaatagaaaaagagggaatcctccctaactcattttatgaggccaacaycatcctgataccaaaggctggcagagacacaacagaaaaagagaattttagatgaatattcccaatgaacatcaatgcaaatatcctcaataaaatactg

SEQ ID NO: 187503 - DNA, 201 bp, Homo sapiens
ccagaggccttcctgcctccaaatattccctctctaatcctttctcttcactgcagccaattacctttctaaagggcaattgtggtccctctttaatttawttttattttatttgagaccggttctggctctgtcacccagtttggagttcgatggtgcaatctcagctcactgcaacctctgcctcccaggctcaagctg

SEQ ID NO: 187504 - DNA, 201 bp, Homo sapiens
gtctgacttctgagaagggaaagtggtaaaagtatcatccagtcctttttaagttggtggctgagcttggtgtggtgtgtttttaaaagacctttagtccrttctacttttcctgaaggcagaggactgtaagggatataaagctttcactgaatactaagagcctgaaaaactgcttggctgatttgactaataaaggct

SEQ ID NO: 187505 - DNA, 201 bp, Homo sapiens
acacacagacaccctgcctattcctgaattctcaaacttttaaaatatttcatggccttcatttttgttttctaacaaaaatagataaatgtatgaatggmatgtttttttggcagagaaataagtaaatatttttaaaatttcttcagtgttttctacaatgaaaaggaaatcaacaatttctatactctacgtaggggt

SEQ ID NO: 187506 - DNA, 201 bp, Homo sapiens
catagtgaatgagcaaaaactggaagcattcgctttgaaaaccagcacaagaaaacgatgccctctcacaccactcctgtgcaacatattgttggaagttmtggccaaggcaatcaggcaagagaaagaaagaaagggtattcaattaggaaaagaggaagtcaaattgtccctttttgaagatgacatgattgtatattt

SEQ ID NO: 187507 - DNA, 201 bp, Homo sapiens
catcttaaatcatgttgaaaaactaactcattatcttaagcattcccaaacaaccttctaactcacgcgtgtgcgcacacacacacacacacacacacacagacaccctgcctattcctgaattctcaaacttttaaaatatttcatggccttcatttttgttttctaacaaaaatagataaatgtatgaatggaatgttt

SEQ ID NO: 187508 - DNA, 201 bp, Homo sapiens
acatcttaaatcatgttgaaaaactaactcattatcttaagcattcccaaacaaccttctaactcacgcgtgtgcgcacacacacacacacacacacacacagacaccctgcctattcctgaattctcaaacttttaaaatatttcatggccttcatttttgttttctaacaaaaatagataaatgtatgaatggaatgtt

SEQ ID NO: 187509 - DNA, 201 bp, Homo sapiens
aatctcccccactagagtgaccaccgcacagttgtccccgctgggcgcgctcctccggtgtctgcgctcagccgctctcctcttctctctcccgcccgccygcagcgccatggtctggcagtgtgtttagcgctcaccaccatgtgcaccagcttgttgctagtgtacagcagcctcggcggccagaaggagcggcccccg

SEQ ID NO: 187510 - DNA, 201 bp, Homo sapiens
aaagagaagtcacttataattccactatcaagtgtgaatcacttttatctttgcatataaatcttttgcaaaagttaaaatagcatgcttatttagaaaaytcaactatcacccagcggcaaccattgctaatctattggtgaccacttggtcatctctttattcatacctacacacacaggtatctctgtaatttatgta

SEQ ID NO: 187511 - DNA, 201 bp, Homo sapiens
agggatctgcccccacgatccaatgcctcccagcaggcctcacctccagtactggaggtcacatttcaacatgagatttggagggcacaaatatccaaacygtatcacctggttttcttaaagcaatctatttgaacttgtcaattcaaagccaaagacatagtttattattaccatcagagtcactcaatcttgaagatg

SEQ ID NO: 187512 - DNA, 201 bp, Homo sapiens
ttggctgacaaactaggcttgtgttgtattttaccttagtatagttagaggaagaaaaaattaggattagttcttcagattggaaataaggaattccatakgtaggagatactctttgcaatggggtgtggcatgcccactttcttcactagacagtgtattgcagctttgctttcttcttcctgttggaaatatattttc

SEQ ID NO: 187513 - DNA, 201 bp, Homo sapiens
cagtcaccatccctgttttcccccaatttaagcgaaacaggcaagagccatccctcatcgttctctgagattgcttcttttggaaactgcacacattatawttcttagaggtagcttttttaaaaaagaagaatctaagaccatgaaactggaatttttgtccatttaatttcttaaatggaatcctgaaattttgtgtct

SEQ ID NO: 187514 - DNA, 201 bp, Homo sapiens
ccatgttcttctgccatggcttcagccggtccctccattcggggttcctgacttcctgcagaaagcagccacccagatcctgcccgaagttgcccataaascacttttggagaggctagattatggatccaattaagaatccctgtactgcaaattctaaagttctggcctagagtcctgtgagctatcctgcttacaatt

SEQ ID NO: 187515 - DNA, 201 bp, Homo sapiens
taagtatgaacaaattaaaatgaagagaggtgatggacaaaggctaggaaaaagaggctggctttagacacctaaaatctacagatttcagaagatttttkggttgtgaccagacagctaaacagtctgtgagtactttggcaagaacataaatggcgtaagaactgctgtgtccatatttttgaaagctgactctaagtc

SEQ ID NO: 187516 - DNA, 201 bp, Homo sapiens
atagtcctgccagcaaagattatttatttacttcaagagttaagagtggcagtttggggatagcaccaggagatatcagctgtgatggcttggagaaacastgtaaactggcagtgtaaacaagagcagggcatgtatgagtagttgagaacggtgaataggagtatgactagacagaagatagtagggatgacaagtttt

SEQ ID NO: 187517 - DNA, 201 bp, Homo sapiens
gcaaagctttaggttaaaggatcagcagttacccttagagcagccactgtctgcaatgcccattcattatgctagatttttacttcagtttttttttttttgagctctgtggagttcttttacttaactgttaacttgcttaataaaaacagatttaagaaacattttgaatgtttaaataccagcttttcttggtattct

SEQ ID NO: 187518 - DNA, 201 bp, Homo sapiens
aattttattcagaataaaatttcaaagctattttattctgtaccaaacattgcaaatgttggcttgcggaaagcaaatacaagattattctaaagaaaacrttaagcctgaggccatatatcaattacaaggtgaattttagggctcaacacagttatatatcatcaagttcaaatgaacaaatgcctggatttgaatgct

SEQ ID NO: 187519 - DNA, 201 bp, Homo sapiens
ctaaaggatctcccgtatcccatgcatactctttcttacctccgttgtggagtagtggactgatttcatcttgatagtctgggtcagtcaccccagccaayactgtaactcccttcttagcctgttgacttaaaggtaggaggaacccaaggtgtccaggtggcaatcttaactctcagtttaatggaatcattgttgtgt

SEQ ID NO: 187520 - DNA, 201 bp, Homo sapiens
cccttttctcagcactcatcctccctcctgctgccctgcgaagaggtgctttctgccatgattgtcagtttcctgaggccttcacagctatgcggaactaygagtcaattaaacctcttttctttataaattacccagtcttgggtatttcttcatagcagcatgaaaacagactaatacagtaaattggtaccaggagta

SEQ ID NO: 187521 - DNA, 201 bp, Homo sapiens
caaaaagttatcaatacttaaatgctgatatgcagtcaatacatcttatgtcacatgataaaggaaaaggaaacaaaattaagatattttcttagtacaartgtatacatgcacaaacgtttttaacagaagaaggaagaaatactcatgacaattacagtcctcgtttctgcagctgctcaagtagctagtaatgattac

SEQ ID NO: 187522 - DNA, 201 bp, Homo sapiens
tcttttgtaattatagaccgcagaatgtggaatagtttctgccgtttgaattacctacctgaggatactacttgaaagttccatcttccgtaaataacagycagcctgttatagaagacaggcagtgttttcatacctggaatagaaattattttagaatcatttccatgcaacattttttcattattactaagatctggt

SEQ ID NO: 187523 - DNA, 201 bp, Homo sapiens
gacatcttaaatcatgttgaaaaactaactcattatcttaagcattcccaaacaaccttctaactcacgcgtgtgcgcacacacacacacacacacacacacagacaccctgcctattcctgaattctcaaacttttaaaatatttcatggccttcatttttgttttctaacaaaaatagataaatgtatgaatggaatgt

SEQ ID NO: 187524 - DNA, 201 bp, Homo sapiens
ctttgggaaccttctgcatttagaactgtagcctaatgtataaccaagctaacacacacacacacacacacacacacacacacacacacacacacacaccmcacacattaaatcaagaaatactcagaggaaagctccaagtcttatagcagaatggaagggaacatggaacacagttcagtttccagtctggatctcgtc

SEQ ID NO: 187525 - DNA, 201 bp, Homo sapiens
agacatcttaaatcatgttgaaaaactaactcattatcttaagcattcccaaacaaccttctaactcacgcgtgtgcgcacacacacacacacacacacacacagacaccctgcctattcctgaattctcaaacttttaaaatatttcatggccttcatttttgttttctaacaaaaatagataaatgtatgaatggaatg

SEQ ID NO: 187526 - DNA, 201 bp, Homo sapiens
gctttgggaaccttctgcatttagaactgtagcctaatgtataaccaagctaacacacacacacacacacacacacacacacacacacacacacacacacmacacacattaaatcaagaaatactcagaggaaagctccaagtcttatagcagaatggaagggaacatggaacacagttcagtttccagtctggatctcgt

SEQ ID NO: 187527 - DNA, 201 bp, Homo sapiens
gtgaggctgagcacaggggcctggtagaactgggtcattgtagcgccaactagaagagtgtgagctacaaagcaggaagaacagtttctcaaaggggccgratgggggtagtcattggggtgccatgagcaggtgtcctgtgctgatgctggcagattaagcccgcatgggtttgcttcacattttaacttcaaaattcag

SEQ ID NO: 187528 - DNA, 201 bp, Homo sapiens
agccagcctgttatagaagacaggcagtgttttcatacctggaatagaaattattttagaatcatttccatgcaacattttttcattattactaagatctsgtgactatgaaagggagtaaacttacacagctggctcttttcagacagagagattcaatttattcttgttccaatactgtaggaaaataaaaaggttaaa

SEQ ID NO: 187529 - DNA, 201 bp, Homo sapiens
attttcacctggatgctttatagacatcttaaatcatgttgaaaaactaactcattatcttaagcattcccaaacaaccttctaactcacgcgtgtgcgcrcacacacacacacacacacacacagacaccctgcctattcctgaattctcaaacttttaaaatatttcatggccttcatttttgttttctaacaaaaata

SEQ ID NO: 187530 - DNA, 201 bp, Homo sapiens
caaacaccgcatgttctcactcatagatgggaattgaacaatgagaacacatggacacaggaaggggaacatcgcactcgggggactgttgtggggtgagrggaggggggagggatagcattaggagatatacctaatgctaaatgacgagttaatgggtgctgcacaccagcatggcacatgtatacataggtaagtaac

SEQ ID NO: 187531 - DNA, 201 bp, Homo sapiens
gctcagaaatcttggcactgaaggaggcaggagccttcacagttagattgagagtgggcagttttttctctatctgttgcactttattatattgttttttwaaattattatcatatccagcaccacagggaagggtgaggctgagcacaggggcctggtagaactgggtcattgtagcgccaactagaagagtgtgagcta

SEQ ID NO: 187532 - DNA, 201 bp, Homo sapiens
tttattcttgttccaatactgtaggaaaataaaaaggttaaaattaccttttggattcaatgtgatattttccctagatacctaaacaaatggaagacagrcagctttcccagctttggaataggggacagtaagggatttcccttgtagcgtgttgtgttttatctgaaatctggcccttttctgtaattaaaaaaggga

SEQ ID NO: 187533 - DNA, 201 bp, Homo sapiens
tgaggcaggaccaggtcagctttcctgtctagcatgcttgcccagtgcaaaggttcttcttttccacagtctccacaaaggtagaacgcttctcaaaaaaatgtgccttgtctttccaaatctttatttggccttgcttcttcttttttatgaaattcattatagtcccattagggtagaaggtcacatcctgcttctgcc

SEQ ID NO: 187534 - DNA, 201 bp, Homo sapiens
aggattttttttcctccaaattcatggcaagacatttgttcataactttcattggtatggtaatattttacagaaggatatactttattaatacattttttgccttttttcccttttgtcttggagtatagatataatttttattattcatctttgaatggttttcattttcctaagctctgtatttataagggctttctt

SEQ ID NO: 187535 - DNA, 201 bp, Homo sapiens
actgtattttgtagcagagaaaactaaggtttagaaatttgaatgacttccttaacaaatatttattgagaacttgccatgtgctaagcacaatattaagyactgagcttactcggtattagtcggaattctccagagaaacagaaacaataggacactcgcacacaaacacacacacacacacacacacacacacacaca

SEQ ID NO: 187536 - DNA, 201 bp, Homo sapiens
tagggacatggatgtgactggaaaccatcattctgagcaaactatcccaaggacagaaatccaaacaccacatgttctcactcataggtgggaattgaacratgagatcagttggacacagggcaagggaacatcacacactggggcctgttgtggagtgggggactgggggagggatagcattaggagaaatatctaatg

SEQ ID NO: 187537 - DNA, 201 bp, Homo sapiens
ctcaaggatctagaactagaattaccatttgacccagcaatcccattactgggtatatacccaaaggattataaatcatgctactataaagacacatgcayacgtatgtttattgtggcactattcacaatatcaatgacttggaaccaatccaaatgtccatcagtgatagactagattaagaaaatgtggcacatatac

SEQ ID NO: 187538 - DNA, 201 bp, Homo sapiens
accgcatgttctcactcatagatgggaattgaacaatgagaacacatggacacaggaaggggaacatcgcactcgggggactgttgtggggtgaggggagrggggagggatagcattaggagatatacctaatgctaaatgacgagttaatgggtgctgcacaccagcatggcacatgtatacataggtaagtaacctgca

SEQ ID NO: 187539 - DNA, 201 bp, Homo sapiens
aagagcttccgcacagcaaaagaaactatcatcagagtgagcagacaacctaaagagtgggagaaaatttttgcaatctacacatttgacaaagggctaayttccagaatctacaaagaacttaaacaaatttacaagaagaaaacaaacaaccccatcaaaaagtgtgcaaagatatgaacagacacttctcaaaagaag

SEQ ID NO: 187540 - DNA, 201 bp, Homo sapiens
taaaaccataaaaaccctagaagaaaacctaggcgatacctttcaggacataggcatgggcaaggacttcatgactaaaacaccaaaagtgatggtaacaraagccaaaagccaaaatagacaaatgggatctaattaaactaaagagcttccgcacagcaaaagaaactatcatcagagtgagcagacaacctaaagagt

SEQ ID NO: 187541 - DNA, 201 bp, Homo sapiens
tctcaaaataataagaactatttatgacaaacccacacccaatatcatagtgaatgagcaaaaactggaagcattcgctttgaaaaccagcacaagaaaaygatgccctctcacaccactcctgtgcaacatattgttggaagttatggccaaggcaatcaggcaagagaaagaaagaaagggtattcaattaggaaaaga

SEQ ID NO: 187542 - DNA, 201 bp, Homo sapiens
gcatgggcaaggacttcatgactaaaacaccaaaagtgatggtaacaaaagccaaaagccaaaatagacaaatgggatctaattaaactaaagagcttccrcacagcaaaagaaactatcatcagagtgagcagacaacctaaagagtgggagaaaatttttgcaatctacacatttgacaaagggctaatttccagaatc

SEQ ID NO: 187543 - DNA, 201 bp, Homo sapiens
agggaacctactcaacttgatacagaacatctacacagaaacccttacagcatatatcatacctaacagggtaagactgaatactttcctttaagatcagraacaatgaaaggacgtttggcatcattcgtattaagtatggtgctggaagttccaaccactgaaataaggtaagaaaaagaatataaaaagcatatgtat

SEQ ID NO: 187544 - DNA, 201 bp, Homo sapiens
ctgtcattgtagtcccagcctttaacataatgcctggcatataatgagtcttcaataagtacttgttgaatgaatgagaatatctacataaagattttgtrtttcttctaaaataagcctacctcaagagtttctaaccatttggagttactgaaaaggaatagctgcaagtcataaatatcaattcctcctgccacaatt

SEQ ID NO: 187545 - DNA, 201 bp, Homo sapiens
ttcctcaggtaagcgcctctcttgtcttagcaatgcctcggttctcaggccttgtttatctttctctgtaattgtgagtgaggagctttctgaactggatractgcctctgattttaccccttcaaattcatcttccttgcagctgattgagtgatccctctgaagaacaaacatgattgattgaagaataaacgtgccct

SEQ ID NO: 187546 - DNA, 201 bp, Homo sapiens
tgaatgtggatataattgtgttgaccacaagacagaatatttgcagtcaggtctgtcttagaaacatgatacctattataaaagagaatttccgtaacctstagggtgaagtgtcagtacaatttctgctttgcaaatactaggattatggaagattaaatgtgtgaaaggactttgaaaaattaaaacatatcattaatc

SEQ ID NO: 187547 - DNA, 201 bp, Homo sapiens
gaatgaaaagtcaggtgggcaaagctgtgagctccacctccttcaactatacaaattttgatttggtaaaggaaattttgacctcattatttcaccctgcyttgaaccaagtttttatgcacctactttattattgctctttgcatgtacattaaaacaaatattttattttgactttaacctagaatgagcactacagtt

SEQ ID NO: 187548 - DNA, 201 bp, Homo sapiens
accagaagaggttatcatatgggaaaggaaaagagtaattgttaaagtgaggtccgggggttgagagggaatatgccgagtggcatcacaaagaattagcytgagatggaatagaatacatctttctctgactagaggggaggaaactagcctacatgaggaagtagatgcatcacaggtgtgggggataagtcagagaat

SEQ ID NO: 187549 - DNA, 201 bp, Homo sapiens
ccaaaaacttaaagtacaataataataaattaaaaaaagaatgaaaaataacaaaaaaaaaacaaaaaaacaaaaaacttccttggataataataataatmatttttttctatttgagaatttggaatgttaacagaaaacatgttttctaccaaaataaaggtaacagtgatctggccatctgcattttaaaaaaaaaaa

SEQ ID NO: 187550 - DNA, 201 bp, Homo sapiens
tcatgggagtcagtgaatttatgatcaaatgattggtaaaacttttggggggaggtatgtgcatttatgagatgtgttcaaattcttctccataagctccragtcttaaacacttagtctgggcctgggacaaataaatatatttattgcctgttctattcaatatgtctttctaaataaaaaatcacaggaatgcatagt

SEQ ID NO: 187551 - DNA, 201 bp, Homo sapiens; identical to SEQ ID NO: 32627

SEQ ID NO: 187552 - DNA, 201 bp, Homo sapiens
ctggctgtcagagtgtgcatggcaggctgcagccacttggggaactggttctgtggttatctccattcctgcctccccagcccgcatatcctttccttcakctcacggggcccacaatgggaacttgagtaccagaattccttttacaactgcttcctcatgtggaaattccgctgaggtttattgtagttttcactgagg

SEQ ID NO: 187553 - DNA, 201 bp, Homo sapiens
tgtttcaacatacacaaatcaataaatgtaatccatcacataaacagaaccaatgacagaaaccacatgattatctcaacagatgcagaaaaggccttcgscaaaattcaacagctttcttgctaaaaacacgcaataaactaggtattgatggaacgtatctcaaaataataagaactatttatgacaaacccacaccca

SEQ ID NO: 187554 - DNA, 201 bp, Homo sapiens
ctgggacctgataaaagcctctggtacttgagatgaaccactagacaataatcagaatggaattttctgggaaatgtggccatatgaaaaaaatgatcackttttcctcacaaggatttgcaaagtggaaagagtaggattttaaaaactgtattttgtagcagagaaaactaaggtttagaaatttgaatgacttcctta

SEQ ID NO: 187555 - DNA, 201 bp, Homo sapiens
caaaaataaactggaaagtctagaagaaatggataaattcctggacacacacaccctcccaagactaaactaggaagaagttgaatctctgaatagaccawtaacaggctctgaaattgaggcaataattaatagcctaccaaagaaaaaaattccaggaccagaaggattcacagccaaattctattagaggtacaaaga

SEQ ID NO: 187556 - DNA, 201 bp, Homo sapiens
tggaaactgaacaacctgctcctgaatgactactgggtaaataatgaaatgaaggcagaaataaagatgttctttcaaatcaatgagaacaaagacacaaygtgtcagaatctctgggacacatttaaagcagtgtgtagagggaaatttatagcactaactgcccacaagagaaagcaggaaagatctaaaattgacacc

SEQ ID NO: 187557 - DNA, 201 bp, Homo sapiens
atccaggacctgaactcagctctgcaccaagcagacctaatagacagctgcagaactctccaccccaaatcaacaggatatacattcttctcagcaccacrtcgcacttattccaaaattgaccacatagttggaagtaaagcactcctcagcaaatgtaaaagaacagaaatcacaacaaactgtctctcagaccacact

SEQ ID NO: 187558 - DNA, 201 bp, Homo sapiens
agactttaaaccaacaaagatcaaaggagacaaagaacaccattacataatggtaaagggatcaattcaaccagaagagctaactatcctaaatatatacrcacccaatacaagagcacccaggttcataaaacaagtccttagagatctacaaagagacttagactcccacacaataataatgggagattttaacacccc

SEQ ID NO: 187559 - DNA, 201 bp, Homo sapiens
gaaacctccaagaaatatgggactatgtgaaaagaccaaatctacatctgattggtgtacctgaaagtgatgggcggatgaagccaagttggaaaacactyttcaggatattatccaggagaacttccctaacctagcaaggcaggccaacattcaaattcgggaaatacagagaacaccacaaagatattccttaagaag

SEQ ID NO: 187560 - DNA, 201 bp, Homo sapiens
aaagagtaaaaagaaatgaatgaaacctccaagaaatatgggactatgtgaaaagaccaaatctacatctgattggtgtacctgaaagtgatgggcggatsaagccaagttggaaaacactcttcaggatattatccaggagaacttccctaacctagcaaggcaggccaacattcaaattcgggaaatacagagaacacc

SEQ ID NO: 187561 - DNA, 201 bp, Homo sapiens
tagcgcctcaaactcctgggctcaaagtgatcctcctacctttgcctcccaagtaactaggattatagacatgcatcaccacactcagttgattttttaartttttttgtagagaagaggtttctcttcccaggcaggtctcaaacacctggcctcacgcaattctcccaccttggtctcccaaagtgttgggttccaggc

SEQ ID NO: 187562 - DNA, 201 bp, Homo sapiens
gcaaaaagagtaaaaagaaatgaatgaaacctccaagaaatatgggactatgtgaaaagaccaaatctacatctgattggtgtacctgaaagtgatgggcrgatgaagccaagttggaaaacactcttcaggatattatccaggagaacttccctaacctagcaaggcaggccaacattcaaattcgggaaatacagagaa

SEQ ID NO: 187563 - DNA, 201 bp, Homo sapiens
ctagtgcattatgatttcatttttaataggtatatcttaaattctcatgaaatgtttcttgtgtgtgtaaccagactcaattgtccaaatattgtggattsaatataatcatgatcatcttcttctgatttaagatgccaaccttttcctaaagtttcatgtgcatttagatatctttccaagttttatgttctgtttgga

SEQ ID NO: 187564 - DNA, 201 bp, Homo sapiens
ggtattagtcaattgtctgaacaaatgtttttcctagttcatgaaatgtatttgaattttttgatgggtagggtttttctgctttgtgttatttgcttgcytctggttttgtttggtatatagacaatttttctttgtatatggtagaatttttcataattcctacagtgtttgtcagtgttcttcagacaaacagaacca

SEQ ID NO: 187565 - DNA, 201 bp, Homo sapiens
actgtccatctaaatctgtggcacaggttctccaactctaggaggccaggaggcgctatgtctgacaatcgtttgaccctgtggctccaggacaccccagyactctggactaaacacactgcaccactcctctccttaaagatcttaaggattgtgctctaattagtttggaaatggaatttcttagactatttctaaaag

SEQ ID NO: 187566 - DNA, 201 bp, Homo sapiens
aggtagataaaaccacaaagatggggagaaaccagagcagaaaagctgaaaattctgaaaatcagagcacctcttctcctccaaaggatcacagctcctcrccagcaatggaacaaagctggatggagaatgactttgatgagttgacagaagtagtcttcagaaggtcggtaataacaaacttctctgagctaaaggagt

SEQ ID NO: 187567 - DNA, 201 bp, Homo sapiens
gttgaatacttgctgttttggcacagagaacatagtggtgagatgatagaaataatccctggcttcagtgagttacaatctcatgaaataattcattagtcttgtttctccaattcacatcctttcaagtttcaggttgggaaaacaaatcaaatctcccctcatattaaaaaaaagtaaactaaaatactgcctctagat

SEQ ID NO: 187568 - DNA, 201 bp, Homo sapiens
cactgtccatctaaatctgtggcacaggttctccaactctaggaggccaggaggcgctatgtctgacaatcgtttgaccctgtggctccaggacaccccarcactctggactaaacacactgcaccactcctctccttaaagatcttaaggattgtgctctaattagtttggaaatggaatttcttagactatttctaaaa

SEQ ID NO: 187569 - DNA, 201 bp, Homo sapiens
atttgctattctgcagcctacattggagatacccaggcaaacagggtctggagtggaactccagcaaactccaacagacctgcagctgagagacctgaccrttagaaggaaaactaatgagcagaaaggaatagcatcaacatcaacaaaaaggacatccacaccaaaaccccatccataggtaaccaacatcaaagaaca

SEQ ID NO: 187570 - DNA, 201 bp, Homo sapiens
atgtctgaagttgcatagagccctctgaaccacatgccccagcacctctgcaacgctctccatttgagggttcattcattaatttaataaatacttattgwgaatctactcgtgtctggaactcttctaggacctgggtatacagctattgacaaaatagtccaagttcctcttctccagggacttacattctactgcagg

SEQ ID NO: 187571 - DNA, 201 bp, Homo sapiens
atttcatccctacagcttcgaccataaaagatggccaacccccgaagcggccatttcagaggcctaccctcagggatgcattctctttctcagggatgttycttgctgagaaaaagaattcaacgatatttctcccatttgcttttgaaagaagagaaatatggctctgttccgcccggctcaccagcggtcagagtttaa

SEQ ID NO: 187572 - DNA, 201 bp, Homo sapiens
gtgattctcctgcctccgcctcctgagtagctgagattacaggcgccagccaccacgcctggctaatttttgtagttttttattttttagtagagacaggrtttcaccatattgcccaggctggtctcaaactcctgagctcaagcagtttgcccacctcaacctccaaagtgctggaattacaggcatggaccaccatgc

SEQ ID NO: 187573 - DNA, 201 bp, Homo sapiens
aatctgttctccatctccatagttttatttccagaatgttataaatataaaattatacagtacattaacttttgagatgacttttttcactaagaataatwccctagtttcgtctacatagttgcatgtatcatttcttttatttctgagtagtattccattgtgcagataaaccagaatttgtttaaccattcacccatt

SEQ ID NO: 187574 - DNA, 201 bp, Homo sapiens
tatagttctaacagtagttgtccacatccttgccaacatttggtatttccagactgtaaatttttgaccaactggtggatgtaaattatatctcattatgrtctttacgggtatttcccttattttttatgtagtttagcattttttcctattgttaattctctatgagtgttacttcatctgtgaaaatggctattcatc

SEQ ID NO: 187575 - DNA, 201 bp, Homo sapiens
attgatgggcatttgggttgtttccaacatttggcttttgagaagaaagatgctattgacattggtatacaaaatttctttgagcccatgctttcagtttkttctatatatctctagaagtgaattgctggatgatatggtaactctatgtttaatttattgaggaattatcattctatagaaatgtgtagttttttttgt

SEQ ID NO: 187576 - DNA, 201 bp, Homo sapiens
gtctctggagtgtctgttctttgtcaccatgtacttcttggcagaaatttaatcctataggcaacaatttctattaggatattcattatataatattcgayacacaccaaataatgtgatgagtatgtatattatgaaggaaacataaaaagaacattatcactacttttgaagctacctgagtatttcttctattgcctt

SEQ ID NO: 187577 - DNA, 201 bp, Homo sapiens
tacctttctcaaagaaacatttaatgttatcccagaattaaaatatacttttgcaaaataaaatgtttatcaagtctgccaaaaagagagccaattatttkggtttctctctaggattttaataaattcctttgatacctagtcaaagcagttgagcatcctcacattgaacaaaatgaaagcaaggaagcgatcaatctc

SEQ ID NO: 187578 - DNA, 201 bp, Homo sapiens
aggaactgaatcatcataaaatttttgaaatttgccttgaatctactttggagctgcatgaattgagatctcttggtaactgaccttgtgttgacccagakaggcctgttgcagtgtacggcatgtacaccgcacacctgccaccacccctgtggcagcaatgtttgcgagcctgaagagttttgtgtggggagttatgac

SEQ ID NO: 187579 - DNA, 201 bp, Homo sapiens
gggccctctgattctctagaaccaacatcccttcagagaaagagaacgttcagtgaaagaggaagagagagagatggaatgacagcactagctctcatacraagtcccaaaagcatggaattccagaatggaattcattctgcacatcattttcttcaagtggggagagagagagaggtacgggagtggggacgagagaga

SEQ ID NO: 187580 - DNA, 201 bp, Homo sapiens
ggatctgataatgccaaccacactgggtaggaccagctactttactgagtccaccaactcaaatgctagtctcatccagaaacaccctcaagacacaccaraagtaatgcttactctgtgaaccctgtagctcagtcctcacagggctcacagtccacccataaatatgtacatatattatgtatcaataaaaattgttct

SEQ ID NO: 187581 - DNA, 201 bp, Homo sapiens
agtttgttggaaaatttgacttttataaactgaaagtgtatgtcatcagtacctggagatgagatgggtttaatgtccagctggtgctcagaggggctggsactctctgcatgggttagtttgccagctaaaactcacttcatgcacaagagctttcattgaacaacagtcaagctttgcttcagggtaagcaggtatttc

SEQ ID NO: 187582 - DNA, 201 bp, Homo sapiens
ccagcaaagtgagaaacctgaactggggaaataccctgcagccccacttccaagctgttgccaaggccatccctcttgcacacatgcagactttgctcatscctcttggctgacaaactaggcttgtgttgtattttaccttagtatagttagaggaagaaaaaattaggattagttcttcagattggaaataaggaattc

SEQ ID NO: 187583 - DNA, 201 bp, Homo sapiens
gcctggtgctattctaggctccagataaggacccctgcttcagggagctaacattgttgtatgcatgcagaggggaaaaggaaagggagtgaacctgaaamtaaacaaatataatatgttttaaaaaaagatacattgaatcatgtttaagtatgaacaaattaaaatgaagagaggtgatggacaaaggctaggaaaaag

SEQ ID NO: 187584 - DNA, 201 bp, Homo sapiens
attttttggttgtgaccagacagctaaacagtctgtgagtactttggcaagaacataaatggcgtaagaactgctgtgtccatatttttgaaagctgactytaagtcaggagaaataactatcttctgtgaacccgggagaagagacgtatccttgacattagctgaggtcagtatggccagtcaattcttttctctgcca

SEQ ID NO: 187585 - DNA, 201 bp, Homo sapiens
ggcaagaagagagcgtgtgcaggggaactcccctttaaaaccatcagctcttgtgagacttattcactatcatgagaacagcatgggaaagacctcacccygtgattcaattgcctcccaccaggaccctcccatgacacgtgggaatgatgagatctacaattcaagttgagatttgtgtggggacacagccaaaccatt

SEQ ID NO: 187586 - DNA, 201 bp, Homo sapiens
tacatgcacacataaaggaaggatggaaaatggatgcagtcagctggctagtgcactgtgtgctcagctgctgttacttgttggagcaagatgttaggacygtgagaaaaaccactgtgaacctgtacctcacactgatgttagccccattgttaccagaggagcacatgaaagaaacacttttcttttcctctgacctgc

SEQ ID NO: 187587 - DNA, 201 bp, Homo sapiens
gtttgggaagttcacttgcagtagataaatcagtcacctaaaatgttactgtccaaaatcattggagcagttgataccgccagtatccatgactgactgcrttccttcatttggtctatggagatacttatcaagccctgtatgtgccagacactgtgtctggaatgaagtgaacagtggggcacagaacagatatggttt

SEQ ID NO: 187588 - DNA, 201 bp, Homo sapiens
gtctctaaaaaagtgaaattaaaaaaaagaaagactccataaatgacattttaaagggaaaaaatgtttatgacaattatattgtatattcaaacaaaatrtattcttatttcataaccaatgaaaatctgtgttgactggaaaagagattaattatggtcactgagaagcagaatgtaaagcattatttgcaggaaaaga

SEQ ID NO: 187589 - DNA, 201 bp, Homo sapiens
  misc_feature (1)...(201): n = A,T,C or G
cataaaaggaggaatctcagatttaatattctacggtaaatattcacccaagaaagcatacattaaaagaacattaggaggtaaatattcagcatgctgcntggagacttagctgtgtgatttccattaccgttaatgggcatttggcaactaagtccctgtgctttgctaaccctggtgtgtactcctaagggctacaca

SEQ ID NO: 187590 - DNA, 201 bp, Homo sapiens
aaatcagtcacctaaaatgttactgtccaaaatcattggagcagttgataccgccagtatccatgactgactgcgttccttcatttggtctatggagatayttatcaagccctgtatgtgccagacactgtgtctggaatgaagtgaacagtggggcacagaacagatatggtttggcccttctggagctctaagcacagc

SEQ ID NO: 187591 - DNA, 201 bp, Homo sapiens
ctctttgaatgctattgtgggtatcatgtcaagatccaatgttttctttccatgttatactaaagaaataaaacttaatgtctatagttcaggttatattygaaactttaatagttctagattgaagctagcataaaaacactgtatactgagcatggtggctcacacctgtaatctcaatgctttgagaggccaaggcca

SEQ ID NO: 187592 - DNA, 201 bp, Homo sapiens
caatagatagccattatgggcaaagatacgggaatttgcaaacaaaatcaatcacttcaaatggcccataaaaggaggaatctcagatttaatattctacrgtaaatattcacccaagaaagcatacattaaaagaacattaggaggtaaatattcagcatgctgcatggagacttagctgtgtgatttccattaccgtta

SEQ ID NO: 187593 - DNA, 201 bp, Homo sapiens
cgagccctcataagtaagatccaggcaaccaaattactactctttgaatgctattgtgggtatcatgtcaagatccaatgttttctttccatgttatactraagaaataaaacttaatgtctatagttcaggttatatttgaaactttaatagttctagattgaagctagcataaaaacactgtatactgagcatggtggc

SEQ ID NO: 187594 - DNA, 201 bp, Homo sapiens; identical to SEQ ID NO: 32629

SEQ ID NO: 187595 - DNA, 201 bp, Homo sapiens
caggaaaaagtggccccggacgcgcgagcctgaggattctgcacaaaagaggtgcccaaaatgaagaccctgatggtgagtcagttgtggcaactccacckggcaaagagggggatccccgggctcagggtccacgggacgcaccgtggagactccgagacgcctaaccctgggccgcgaggtcgcctgttacaaagggac

SEQ ID NO: 187596 - DNA, 201 bp, Homo sapiens
tgtacttgaggcctaacaaaattagcaatttaattatgagtgtttaataaacgctataattactggacacgactctaagtagcagaagatatggccggggygagcagatagatgttagagagtacaactttctgagtttgggtaacaagaagacacattagtcttatacctggcatgaaataagtgttcaataaatgttta

SEQ ID NO: 187597 - DNA, 201 bp, Homo sapiens
atcctcagagatgaaaggggaagaaaatggcactttaatgcatgagagtaatcttccaggatttgtaccaggatgtgttatattttaacaagaagagttcycagaagggtcagtttcaggaacatcacatgaacccctggagaaaagtaaatggttgattggctgtcacacttactgtttcaatatgctgggtaaagcaaa

SEQ ID NO: 187598 - DNA, 201 bp, Homo sapiens
accattagacattactacctttggaagttctcttagtaactgtggctcaatcatgttgcagtgttatagacacctttataatttacaaagaactttcacaracatggcctcattataaaggtgacaagcatgattgtcccccataccagtctgtagaagaagaaactgagacttggagaggctaaccaacttgtgcaaagt

SEQ ID NO: 187599 - DNA, 201 bp, Homo sapiens
cccttgttgttgtttactttccctaaagatagagagcacatcgtgtttatttctaatgcttattcaaaggggtagagactctgagaaaggatgaggtggcrggataactacttacaagagtcacagttacggggctattatttcctgggcatggaaagagtagatcccttccagcctagccatttcattcttattgtcttg

SEQ ID NO: 187600 - DNA, 201 bp, Homo sapiens
tctctgcagctgcttatggtaaatagactgtaagaagagtgaaaacaatactattgttgtgacttattaatatgtagggtctaaatctgaggagactgaaygttctgcagctcattttcaatctctttgatgaaaatgatgggcactgattttatttcacaacctcaaaacctctccacttccttattgtgtaatcagaaa

SEQ ID NO: 187601 - DNA, 201 bp, Homo sapiens
tctctataaaaactttaagaattagctggacacagtggcacatgcctgtagtcccagatacttgggaggctggggcagaaggatcatttgagcccaggagwttgaggctgcagtgagctatgatcatgacactgcactccagtctgggtgacagaatgagaccgtgtctctttaaatattaggaatcaccttcagaatggc

SEQ ID NO: 187602 - DNA, 201 bp, Homo sapiens
tggcctgttttagaaaccagtctgagaccaagactctttagtgcgtaaatatttattaaccctcaaacaagggcacctaccacccccacatgttaatcctrtgcacaccatcttgaagaaatgagccagtacttcctgtttgaggctgagacagagatatagaggcagaaaaacactcggagactctcaggccaccaaaca

SEQ ID NO: 187603 - DNA, 201 bp, Homo sapiens
ttttttccaaagagatggtcttcctgaataaggaaattgatcctgtagcatctttagctggtttccaattgccccctactcctaggtgccgaatcaatctyatgatatttttagaaacctaactgtttctttagtcagattgatgccaataaaatgtccaaaacttagatgaatcaaatttaaagtgatttgtgatggaat

SEQ ID NO: 187604 - DNA, 201 bp, Homo sapiens
tatggtccaattatcaaaagtaagaaattaacatgagtataatgctcagctaaactacaggcattattgagattttaccagtttctctactaatgtccttyatgtcctccaagaacgaatccaggttccctttgcatttatttatcaggtgtcctcagtctctaaatccatggccgttcctcaggctttccctgcatttca

SEQ ID NO: 187605 - DNA, 201 bp, Homo sapiens
gctgcatattagaatctcaaggagctttccaccatttgaatcttctaaaaagctttgttgttatgatatgtattatttaaaaatatgtttatttttgtttyaaataattttagagttacagaaaggttgcaaaaataatactgagagttcatataacttttatccagcttcccctaatgcggatttgcattcctatggtcc

SEQ ID NO: 187606 - DNA, 201 bp, Homo sapiens
tgctactccaactcccttgctgcctgtgcaccagcccctggcctcatttcagtttctcaaacattctgagcttctttccaccagagggtgtttgcatatgmcgttcccactcccttgaatgcagctactccctctttttccttagttaatgcttggatatctttcagatctcaggtcaaatttcacttcttcagaaagtct

SEQ ID NO: 187607 - DNA, 201 bp, Homo sapiens
tagcagcacacacatgtctctggaatgcgaagaagaaagaaaaaaagacaaggaacgtgaaaattgggtgatgtcagcctcccttggataaagcccatcartggttttcattgtcttggggtgaggaacaaatccttgatagaactaatatgatcctccatgatctgcccatgccgccttctccagcatcatctgctactc

SEQ ID NO: 187608 - DNA, 201 bp, Homo sapiens; identical to SEQ ID NO: 32630

SEQ ID NO: 187609 - DNA, 201 bp, Homo sapiens
gagatggagatagatggatagggatttcttctcaaagtgatgaaaatgttctgaaattagtggtgatggttgcacaatcctgtgaatgtaaaataaatatmactgaattacacactttagaaaatgaaattaaaactgtgtctgtgtgtctcaatcatgatgtaaaaatgtatttttcactataggttgaaagatttggaa

SEQ ID NO: 187610 - DNA, 201 bp, Homo sapiens
taaatttgtttaagttctttgtagattctagatattagccctttatcagatgggtagattgcaaaaattttctcccattctctatatttcccattcactcygacagtagtttcttttgctgtgcagaagctctttagtttaattagatcccatttatccagtttggcttttgttgccattgcttttgatgttttagtcatg

SEQ ID NO: 187611 - DNA, 201 bp, Homo sapiens
catgagtcaggctattctgattgctgctttgcctctgctgtccattaaggtagctatgcccaccttgcctttgacagttgagtgccatcacttggcccctkccacctcaggatccagttattcccactgtatttacattttgtagttgagtgacttggttcccactgttagatctgacatacagagaagaccaattatagg

SEQ ID NO: 187612 - DNA, 201 bp, Homo sapiens
ccttcatttggtctatggagatacttatcaagccctgtatgtgccagacactgtgtctggaatgaagtgaacagtggggcacagaacagatatggtttggmccttctggagctctaagcacagcagcacatcttctagatcttggctgactctggagttggtgttgcccaagatctcttcaggatctaactgagttggttt

SEQ ID NO: 187613 - DNA, 201 bp, Homo sapiens
gacaataatgaggtcataataatgcctaacataataaaactatccttcatacaactggaaacacaccaacccccaacccaaatactattacaaaaagttawcaatacttaaatgctgatatgcagtcaatacatcttatgtcacatgataaaggaaaaggaaacaaaattaagatattttcttagtacaagtgtatacatg

SEQ ID NO: 187614 - DNA, 201 bp, Homo sapiens
aacactctttgaatgcctcctttgtgcagatttatccaactctctcctctttctttcattaagcttgccctgtaaagccatattccttctgttttcaattrtgaatttatttcctctggagctttctgacttagaatctatttgaacttctatagaaactttggttgaaaaggaaaaaaagaaaaaaaagggcctattttt

SEQ ID NO: 187615 - DNA, 201 bp, Homo sapiens
cccagagccaggatgggaactcggggttgcctcgcctcctagatctccggcgagaggtccgagggggtggcggagagctgcaggagcgatggaggagtggrcagattgctcaagggatgggggtgcccaaaagcaacagcctgccaaaaactaagagggacggggaggggggacctttgcagactttcttcgttttcttag

SEQ ID NO: 187616 - DNA, 201 bp, Homo sapiens
aattctatacccaaaggttttgagggagttcacgtcaccacaagcaaaggaagaaaggcatatcttaaagtctatgtcttctgtttagacattatcccaawtgtcccactgaactaaatgtaaacttctcagaatgccttaactgattctctttaccgctactatttatctggctgcaaattgggcagagttcccttacag

SEQ ID NO: 187617 - DNA, 201 bp, Homo sapiens
actaggcggattatttatgtatttttctgtacgggtgcatcacttctaaaagtattgtttgtttgcttgttttcacacacttgcttccatttattccctcktctcatgtacatggtggaagaacactcataattggccttttgtcttctaacctgtaacataagaacaacttgaacttcagaaccagccattttggcatgc

SEQ ID NO: 187618 - DNA, 201 bp, Homo sapiens
ggcacatagctcatgtcttccctgcttggaactgtatgcccatgtctggcattaaaacagctatttcttgaatgagtaactctatgtcttttagctctatsctctaactatctccactgccagccctgcttcatctgattttagtcaataatttcttttctggtgtttgctttgaggacctatgtcaagatctgctgccac

SEQ ID NO: 187619 - DNA, 201 bp, Homo sapiens
gctccccttcactttctgctaggagtggaagcagcctggggctctccccagatgcccaaccttgaattttttgagacatcagaatcatgggccaaataagscttttttctttataaattacccagacttgggtattcttttctagcaacacaaaatggactgacactgtcttataggggtgttgtgaggactaaataagtg

SEQ ID NO: 187620 - DNA, 201 bp, Homo sapiens
aggcacatagctcatgtcttccctgcttggaactgtatgcccatgtctggcattaaaacagctatttcttgaatgagtaactctatgtcttttagctctaygctctaactatctccactgccagccctgcttcatctgattttagtcaataatttcttttctggtgtttgctttgaggacctatgtcaagatctgctgcca

SEQ ID NO: 187621 - DNA, 201 bp, Homo sapiens
cacagttcagtttccagtctggatctcgtctgggtagatgaggtcatttgccatctggtagaccctgtgaaatgaaaccgtgagctaattcccatttctaraggacaggctcttatcacagaaggcccactatcacccagactgccctttactgaaatggcttatgaaagggcggtgatcaatggggtctacagctaagca

SEQ ID NO: 187622 - DNA, 201 bp, Homo sapiens
aagagagtgtctaagagttctagagagaggcaaagacaccattctttcctcaggatatttgcagccttctgcatagtccagccccaaacccagtgggcagrgttaacctagatcacactataggagagaaaaagtaatttcttttcctcatccatcataggttctttgctgagactcctaggaaaaaaagacagattaaca

SEQ ID NO: 187623 - DNA, 201 bp, Homo sapiens
ccggtggttataaattcatggttaaggcacatagctcatgtcttccctgcttggaactgtatgcccatgtctggcattaaaacagctatttcttgaatgartaactctatgtcttttagctctatgctctaactatctccactgccagccctgcttcatctgattttagtcaataatttcttttctggtgtttgctttgag

SEQ ID NO: 187624 - DNA, 201 bp, Homo sapiens
aaattcattctctctagatggcctataaattgcgtgaaaagatctgttgtcgttgctttccaaactaagttatgctaagtatttaatctcattttccattrtaaattatttgtgataataatgggccaagcatttaaattctacctaataatcttatttctggtcatacttagcacattaccaagtttacaactctctgtt

SEQ ID NO: 187625 - DNA, 201 bp, Homo sapiens
tgggcatccctcttcctctgccttgccccatctcactgattggtttgtccatctcctttgtttgactctaggctccttaagaggagggccctgtctcaatycacatttgtatcattagcacttgtcattgtgtctggcatagagtgtatcttcagtacagattagttcaatgagaaacaaaaataagccctgtccatgggg

SEQ ID NO: 187626 - DNA, 201 bp, Homo sapiens
ggtaactttttctattctttgacatcagtttccacatcttctctagtgagatttcatactatttctttagctcagccctcccttatgaattctcagcccayagaacatagctgccaactggacattttcacctggatgctttatagacatcttaaatcatgttgaaaaactaactcattatcttaagcattcccaaacaac

SEQ ID NO: 187627 - DNA, 201 bp, Homo sapiens
cgcagcccataggtgaaaacagcttctaacttaagggaagccacttcctcttcttaccctttgccattcagtcagctcttctccattccagctccttcagyctcaaaggtcttatgaatatatagccttagtgagaaagaaggaaaatcattaatacctatgtaggctgaaggcttctgaatttcataattcctgccctga

SEQ ID NO: 187628 - DNA, 201 bp, Homo sapiens
catagacaggtaactttttctattctttgacatcagtttccacatcttctctagtgagatttcatactatttctttagctcagccctcccttatgaattcycagcccacagaacatagctgccaactggacattttcacctggatgctttatagacatcttaaatcatgttgaaaaactaactcattatcttaagcattcc

SEQ ID NO: 187629 - DNA, 201 bp, Homo sapiens
acagcaatttgcaggatagtctttgcttcaacttgggagtaactttggactcaaaaatacctagttttgaaagccggaagcacaactttattactggctargaataaagggcaactttggacaaatttgttaacatctctatgcttaagtatcttcatctgtaaaatgaccacgagagaaaccttgctgggttgatgtgtc

SEQ ID NO: 187630 - DNA, 201 bp, Homo sapiens
cgagggaagttggctgccctcgggtgctctcagtgtagttctgaagacacagccatgtctcaggaaactcccaaaataaacacaaaactgaatatatgcastactaagttggattcaatttcctgagacagtacaggaagccagcgtgtcctgttcaaagttaacagagaagaagcgcatagactctggaaaaaatctaac

SEQ ID NO: 187631 - DNA, 201 bp, Homo sapiens
gttagtgtcttaccaaggtcccacagctagtaggttgtggaagcaaggctgggcccatcctgctacatcccagagctgatgctttgaggcaccacaaggcragggaagttggctgccctcgggtgctctcagtgtagttctgaagacacagccatgtctcaggaaactcccaaaataaacacaaaactgaatatatgcagt

SEQ ID NO: 187632 - DNA, 201 bp, Homo sapiens
tattctaccatagtagaatgaggttttaacctcagttagagatgagaaaactgagacttgtggaggttagtgtcttaccaaggtcccacagctagtaggtkgtggaagcaaggctgggcccatcctgctacatcccagagctgatgctttgaggcaccacaaggcgagggaagttggctgccctcgggtgctctcagtgta

SEQ ID NO: 187633 - DNA, 201 bp, Homo sapiens
ttagatcagattaagcatttttgaaaagagttccccgcaggagacgctgtctactctggttgcctgacatcctgaggctcatgatgcccgtttgctctgcyggtcatgatgccacatgtgacagctttgctggggtggcggcaaccgcttctctgcacagtcatgcacattgtttcccagtcttttcaactctcgcttcac

SEQ ID NO: 187634 - DNA, 201 bp, Homo sapiens
tttgtctcactcatggcccaatatttactttgttcctattttgacttgttgtgtgatgtctgtcactcctgtcagtggaggaactgttttgtcccattatyctctttctagaactttccctccactcacttctactgaaggccagctgtatttccatgacctgccaatacaactcacaaccatctcctccaaaaatctggt

SEQ ID NO: 187635 - DNA, 201 bp, Homo sapiens
caggcctcctctttccacccttattttaatcctggagtttcctaactcagccttctcctctgctaattctactccttctcatagacaggtaactttttctrttctttgacatcagtttccacatcttctctagtgagatttcatactatttctttagctcagccctcccttatgaattctcagcccacagaacatagctgc

SEQ ID NO: 187636 - DNA, 201 bp, Homo sapiens
ggtgaattttagggctcaacacagttatatatcatcaagttcaaatgaacaaatgcctggatttgaatgctaaggcataggattatttcaatatgcacacwctgagcattttctgaaaatcatcaagcttttattaccattttatcctaaatcccctgaccacttctcattcaatttgcatgaacaggcctcctctttcca

SEQ ID NO: 187637 - DNA, 201 bp, Homo sapiens
gactactaattcatcctatgctaatatgaaccctcatttagggttgagagagagtagccaagggatagtgcagtagttggggatttattaatggcagagascctttaccatttcttgacctggaggggctaaatggcacaggaaacacccaagagtattgcatagctagggcttctggaaaggagcttcagccttcagtag

SEQ ID NO: 187638 - DNA, 201 bp, Homo sapiens
gaaatgcctcagaggaatcatcttggtgctggctccaaggctctgtgcagtcagccaggctatgaaagaaggcagcctgtgccttctccagactcattccygctccatcctcaacctaatcttcctgaatacactctccattcaagagccgatggaaaaatggatcactgacaaataacgaattattgtatgaattaacct

SEQ ID NO: 187639 - DNA, 201 bp, Homo sapiens
ctggtacgtaataggaatttcaccattgaataaattatcatggaactcttccctcttcatcatttatgtatgggatgtgcaagtaaaataagggaaaggaragttaagcatttcctccattttttggccactgaaattgcctctcatcccaacagttcgcccagggattcaggactccttactccagatttcagtagtttt

SEQ ID NO: 187640 - DNA, 201 bp, Homo sapiens
taatgccttagtttctttatacagtggccaaaaatagtacaagaatatcttcatggcaactacaggcattgctcattgtatggcaagctgatttatggaamttttccactacagaattgatggttctgagcatgaactcaaacagcagttacctgaaaatccagacacatgaggtcttatcccccaatctgtcagttctgt

SEQ ID NO: 187641 - DNA, 201 bp, Homo sapiens
caatgtggactgtatgctcttttattgtgttattaaggttggcgcaaaagtaattgtggttttggccattacttttaatggcaattagttttgcgctaacrtaatatctgtagcaccaggttcagtgcctggtacgtaataggaatttcaccattgaataaattatcatggaactcttccctcttcatcatttatgtatgg

SEQ ID NO: 187642 - DNA, 201 bp, Homo sapiens
cccagagcaagaccggtctcattactgagctaatggacattatgctctgaggtacttttccctctgccaaatatatcagaattttaaaaacggaagcctgrtattgccatgctgcaaatgtttacaaggacatcgctgagtgttttaggtgtcaagtttaatttcagttggcctggcctattctcttaaggaaggctccag

SEQ ID NO: 187643 - DNA, 201 bp, Homo sapiens
tattcatctttgaatggttttcattttcctaagctctgtatttataagggctttcttgaggcaggaccaggtcagctttcctgtctagcatgcttgcccartgcaaaggttcttcttttccacagtctccacaaaggtagaacgcttctcaaaaaaatgtgccttgtctttccaaatctttatttggccttgcttcttctt

SEQ ID NO: 187644 - DNA, 201 bp, Homo sapiens
ggggaaggagtgatggggcaagagttgaaaaaactattgagtactatcctcactacatttgtgatgggatcattcatgcctcaaaactcagtatcacacawtatacccatgtaacaaatctgcatgtgtacccctgcatctaaaataaaagttaaaattataaaaataaatataaaaataaatataaaataaagtttggct

SEQ ID NO: 187645 - DNA, 201 bp, Homo sapiens
gattttttttcctccaaattcatggcaagacatttgttcataactttcattggtatggtaatattttacagaaggatatactttattaatacattttttgscttttttcccttttgtcttggagtatagatataatttttattattcatctttgaatggttttcattttcctaagctctgtatttataagggctttcttga

SEQ ID NO: 187646 - DNA, 201 bp, Homo sapiens
atttcccaaaagaagtttgctaacataacaggcaatagatacctctagttgggtggcatattttgcacacgtttgttaactcaccgtattatttccttctycaaattgttctttgactattttccaagggtcttagcatttttacattcatttgaagctcattatacaattaaggtattatgcctttttcatgtgtactat

SEQ ID NO: 187647 - DNA, 201 bp, Homo sapiens
taggacctggaatgttgggttggctgtcaaaaactgcagctgggacagctgggagtgcatttcagatgaaggctattctaacaggaaaggcaaggacaggktacatttggatacgtgggtggtggtccagtgtgggcatgtgtagagttcttgaaatggatcagtggaaaataagctataaagggtcacttttagaaatat

SEQ ID NO: 187648 - DNA, 201 bp, Homo sapiens
ttcaagggttgcaattattaaatgcctgcaaagtccagacactttctagcccttgggatacagcgatgaacaaaattaagttctacttccatgagcttacrctgattaggcatggcttctgtgccagattatgggtataatataacatctcaggaatacttgctaatgacacaccagatgaagctgagattctgagtggcc

SEQ ID NO: 187649 - DNA, 201 bp, Homo sapiens
ttcctttgtcctgactttagataatctgatgactatgtgcctaggtgatgatctttttgcgaagaacttcccagtgttcttagagcttgttgtatgtggaygtctagatctctagtaaagccaaggaagttttcttcgattagtccctcaaatatgttttccaaacttttagatttctcttcttccttagaaacaccaatt

SEQ ID NO: 187650 - DNA, 201 bp, Homo sapiens
atttggggataaaattggtgttgtattggttggttgttatgatttaaattccttggttaattcctttttttcctcataaaggggaaattgcccagtttttkaataattgaactgcaaagttagcacaaaaactgaagacctttggccctagcatttatagaaaaacacttgggatttctataaaaaacctatagcaatgtg

SEQ ID NO: 187651 - DNA, 201 bp, Homo sapiens
attttttaaaaatcccaccaaagacccataaaacagtgagctctattctggagttattatttaggcaccgataatcagtagtggcaacattcagtgagtaygtcagagcatactcttgttgaatcaaataaatatgtatatgtaaaggtgcagattacaagttaattctactatgaagtgctaaataactagaaataatgt

SEQ ID NO: 187652 - DNA, 201 bp, Homo sapiens
cagaaatggaatctggctttgactagccccagggaatgtaaacagaaccttacctgtaattaacctagggcttctcttgttctcaatgcaaatggagttayaattgtatttctcttagtagaatagaaaggctgtgtttcagaggggagctggcagttgaatagaggacaagttatctgtctaactgtgacagctctctcc

SEQ ID NO: 187653 - DNA, 201 bp, Homo sapiens
attcatttggtgacatacagctcagttgttccattgaagcaattttttaagtgcttgtcatgagcaggcattaaactagtcactatgatggaatttagagwtaaattagagctctgccctcaaggagatgatagtaatgtataacctaagccaaagacatgggtaacagttatataagggagagatgggaccgatgtcaga

SEQ ID NO: 187654 - DNA, 201 bp, Homo sapiens
agcttactcggtattagtcggaattctccagagaaacagaaacaataggacactcgcacacaaacacacacacacacacacacacacacacacacacacayggagctttattatgagaagttggcttatgcaattacggaggccaagacatcccatgatcagcagattgcaagctggggactcaggaaagccagtagggta

SEQ ID NO: 187655 - DNA, 201 bp, Homo sapiens
cacatatttatggagtatgtgtgctattttgaaattttcctttcggtcactgtcaagcacttctggaggtaatgccttttctacaaagtgcacaatggtcrttgcacactcaaacatcccccaaccccctgccccctgaaagaaggccatatgggctaagtgatctgatcaaagtcacttggtgctaattagagatggagc

SEQ ID NO: 187656 - DNA, 201 bp, Homo sapiens
ggatggagctggaagccataatccttagcaaactaatgcaggaacagaaaaccaaacacttcatgtcctcacttataagtgggagctgaattataagaacwcatggacacatgtgggagaacaacccacactgaggcctgttggaaagtgggaggggagggagagtatcaggaagaatagctaattgatgctggacttaat

SEQ ID NO: 187657 - DNA, 201 bp, Homo sapiens
acagtggaaaaaacccaaatgtccataaattgatgaatagattaataaaatgtagtaacccatataatggaatattcatcagcaataaaaataaatgaagyacttgatgcttttgcctcacaactcttaagattctttcctttgtcctgactttagataatctgatgactatgtgcctaggtgatgatctttttgcgaaga

SEQ ID NO: 187658 - DNA, 201 bp, Homo sapiens
aacagcccaacagtggaaaaaacccaaatgtccataaattgatgaatagattaataaaatgtagtaacccatataatggaatattcatcagcaataaaaayaaatgaagtacttgatgcttttgcctcacaactcttaagattctttcctttgtcctgactttagataatctgatgactatgtgcctaggtgatgatcttt

SEQ ID NO: 187659 - DNA, 201 bp, Homo sapiens
aattttgatcagaaaatgtcactaataaaggtctggaacatggggtgcatctgtagccacatgggatccttgggtggcccggaggctgtggtggggtgacsagttgggggtaacatggtaaggatgcttggaagaagaaagtgagagaagggggtcaatggaaagacataggtcagtgggctcacagcctcgtccactgtg

SEQ ID NO: 187660 - DNA, 201 bp, Homo sapiens
ccaagttggaaaacactcttcaggatattatccaggagaacttccctaacctagcaaggcaggccaacattcaaattcgggaaatacagagaacaccacamagatattccttaagaagagcaaccccaagacacataattgtcagattcaacaaggttgaaatgaaggaaaaagtataagggcagccagaaagaaaggtcg

SEQ ID NO: 187661 - DNA, 201 bp, Homo sapiens
ggagaccaaggtgggtggatcacctgaggtcaagagtttgagaccagccaggctaacatggtgaaatcccctctttactaaaaacacaaaaattagccagktgtggtggcagatgcctgtaattccagatactctggagaatcacttgaacccagaaggtggaggttgcagtgagccgagatcacaccattgaactccaga

SEQ ID NO: 187662 - DNA, 201 bp, Homo sapiens
taattccagaactttgggagaccaaggtgggtggatcacctgaggtcaagagtttgagaccagccaggctaacatggtgaaatcccctctttactaaaaayacaaaaattagccaggtgtggtggcagatgcctgtaattccagatactctggagaatcacttgaacccagaaggtggaggttgcagtgagccgagatcac

SEQ ID NO: 187663 - DNA, 201 bp, Homo sapiens
tgcaatatttgctattctgcagcctacattggagatacccaggcaaacagggtctggagtggaactccagcaaactccaacagacctgcagctgagagacstgaccattagaaggaaaactaatgagcagaaaggaatagcatcaacatcaacaaaaaggacatccacaccaaaaccccatccataggtaaccaacatcaa

SEQ ID NO: 187664 - DNA, 201 bp, Homo sapiens
ctccgggcctcatattgcaggtgcctccaggcgggctggggagcatctcacctctgcctagcactgtgtgctctggatggccagggaaggtctccagggcrggatctgattctagggatttcgcaagggactttgatatgtgagacccagaagctccctgcagagaacaaaggggcagtgtggactgcctgtggagcctga

SEQ ID NO: 187665 - DNA, 201 bp, Homo sapiens
cagcatctcccaggggctcactgaaaagcctgtgcccttttccagcctccgggcctcatattgcaggtgcctccaggcgggctggggagcatctcacctcwgcctagcactgtgtgctctggatggccagggaaggtctccagggcgggatctgattctagggatttcgcaagggactttgatatgtgagacccagaagct

SEQ ID NO: 187666 - DNA, 201 bp, Homo sapiens; identical to SEQ ID NO: 32626

SEQ ID NO: 187667 - DNA, 201 bp, Homo sapiens
ccaagggaagccgtgacagactacctggaaaaatggggcactcccacccaaatactgtgcttttcccaaggtcttagcaactggcagacaaggtgattctytcctgtgcctggctcgatgggtcccacacccatagagccttgctcactgctagcacagcagtctgagatcaatctgcaaggctgcagcgtggctggggga

SEQ ID NO: 187668 - DNA, 201 bp, Homo sapiens
ttctcattttttgcattgatgatactgtttctacttcttaaaatttgttgaagttttctttgaggcctagtgggtggttaatttctatgactgttacacawaaaggtgtatacttcattatcaaggtatattttgaggcatatcaattagactatatctatgtcatttagcactatatattttgctacttagtacttctac

SEQ ID NO: 187669 - DNA, 201 bp, Homo sapiens
tatttatagttgacataataattgtatatatttatagagtgcagtgttatgttttaatgattgtataccttgtataatgatcaaatcaggttaattaccgkatttgttactttaaacatttatctctctttgtggaaatatcatacaaaatcttctctttttgctgtcttgaaatgtacacaacattgttatttattacag

SEQ ID NO: 187670 - DNA, 201 bp, Homo sapiens; identical to SEQ ID NO: 32624

SEQ ID NO: 187671 - DNA, 201 bp, Homo sapiens
tgagtaaattaaaaccatccaattccgtgaatttagtgggtgaattcacatagctgtgaattttatctaaattgtgaaaataaaacaggaatgtgatgctytaaccagcataggcccaggccgcatgcttctggggaagaaattccacctgaatacttgggctgtaaataggtcattttcatgggaaaaggatgaatagat

SEQ ID NO: 187672 - DNA, 201 bp, Homo sapiens
ttctgaagtcttgcactccccagccatcctattaaaaattttaaaatacctaatattccaccaccattatcccttttggctttagaatttacattcttacrcgtggacacaatttactttgtgagaatcaactgtgtctatgaacctgaaatagtctgttaaaaatggatcatggagcccgtgtgctcacgcttgtaattc

SEQ ID NO: 187673 - DNA, 201 bp, Homo sapiens
attagcctttctttataaatttatctgatgattcgtctaattcaatccttctcaaactttgatctctatacaaatcacctggagaccttgttaaaatactrattctgatttagtaggtctgagttggggcctgagattctgcatttgtagcatgttgccagtgatcccaacattgctggcccctactttgagtaataaggt

SEQ ID NO: 187674 - DNA, 201 bp, Homo sapiens
aagaaactgggtttgttttgcattttaacttaaaaattcagacccagttatatccattgtgaaaaagtaaatatttaaaaacttgggttttctggaattgygagatttcattcccaattttgttctcacctctgaaaatgggatacttttttgtattggcccttttaggagaagtgacatctcagacccctcctgtctttc

SEQ ID NO: 187675 - DNA, 201 bp, Homo sapiens
gacccacactgaaatccatcagagatccttcattggcgctgagcagtttatgtttcattctgaatgatggagttctcttccattaggcaacttcaggcaaraagaagaagactgtatcaggggttcacaaaataaagaaaaaagaaagcaggaaggagagttctagaaagagccaccctttagaaaaattctggtgcacct

SEQ ID NO: 187676 - DNA, 201 bp, Homo sapiens
tgttactactcttccatttttaagtaagtgatacatactttacacatgattatgcatcttcctttttaccttatatatttaaaagcatttcatagctacayatagaaaaatctttattttttcaataatgtatacgtttgtcccatattatatattatacttaaatcagtcccttacttataacattttgtgttgtttctg

SEQ ID NO: 187677 - DNA, 201 bp, Homo sapiens
acacaggatattacccttccagtttaacacatgctttggcattgaaattttacctttccagacccaagaaagtattttgtgaaaagttttaatttctcatktgaagtttgtacccctaaaatatgccagccaagaaagccaatataatgcagtatttgcttacaacaatattagattcagtgtgtcctttaaatgaaggct

SEQ ID NO: 187678 - DNA, 201 bp, Homo sapiens
agaccattactctagttgatagtgctaggttatcattggatcccatctccctctccaataagcctgtgattgatactaatcttcctcatgggacacatttyataggatgcacattggaaaccactctctaaatcttagctttctatgtgctgacaatttacaaggttgcacctcacacacatctcaggaggcttaagggga

SEQ ID NO: 187679 - DNA, 201 bp, Homo sapiens
cattgcactctgactttctacttctgtctttctttgtggatattcctttctcctctctgattgctttttcttcttagaccattactctagttgatagtgcyaggttatcattggatcccatctccctctccaataagcctgtgattgatactaatcttcctcatgggacacattttataggatgcacattggaaaccactc

SEQ ID NO: 187680 - DNA, 201 bp, Homo sapiens
gcggatgactgttagaaggaaaatgaacaagcagaaaggaatagcatcaacatcaacaaaaaggacaaaaaaggacatccacaccaaaaccccatctgtakgtcaccaacatcaaagaccaaaggtagagaaaaccaaaaagatgaggagaaaccagagcagaaaagctgaaaactctgaaaaccagagtgcttcttcctc

SEQ ID NO: 187681 - DNA, 201 bp, Homo sapiens
taggcaatatccaattgtgtgagaacctgcattgttcacatgagcctttgtcctggataacagctcctgttcatcaatatgatacattgcactctgacttkctacttctgtctttctttgtggatattcctttctcctctctgattgctttttcttcttagaccattactctagttgatagtgctaggttatcattggatc

SEQ ID NO: 187682 - DNA, 201 bp, Homo sapiens
ctatgggggcagggcatagctgaacaaaaggcagcagaaacttctgcagacttaaacgtccctgtctgacagccctaaagagagcagtggttctcccagcmtggtgtttgagctcagagaacagacagactgcctcctcaagtgggtccctgacccccgtgtagcctaactgggagagacctcccagtagtggccgactga

SEQ ID NO: 187683 - DNA, 201 bp, Homo sapiens
tctacatttgtggtagacagaacaaaggtccacaaagatatccatgtcctaatccccagaacctttaaatgtgttaccttaccttaccaaataatttaccrcgacttactaaaagggactttgcacatgtgattaaggttaggggccttgagatggggagataatcctgtattattccattgtgaacccaacctaatcata

SEQ ID NO: 187684 - DNA, 201 bp, Homo sapiens
gaatcattaaaggctccgttacacctctgggggctgatgctggctggtggcttgcacctcagcaggagctataggcaggaacacctacagatgtcctcttsttgttacccggggttccgcacagcatggctgctggtttgcagcatcaagtatcccaagacagagagccaggcagaagccacatcaccaattctaatctag

SEQ ID NO: 187685 - DNA, 201 bp, Homo sapiens
tcttactgaatgcacctagtaacaaactaccccacacttggtaattgttcattattattatctctcagaattctgaaatttgcagttagatggaggctgargctggaatcattaaaggctccgttacacctctgggggctgatgctggctggtggcttgcacctcagcaggagctataggcaggaacacctacagatgtcc

SEQ ID NO: 187686 - DNA, 201 bp, Homo sapiens
ctggggtcttgcactcgttaggcagtccaaagtatttttagcttccttctcattggagagctagcatttggggcgtagggagaatgaagcttatgccatgyttttgtttcctttgttgtttgtttgtttgttggggagtgtggggatacaggatctcactttgtcacccaggctggagtacagtggcacagtctcagctca

SEQ ID NO: 187687 - DNA, 201 bp, Homo sapiens
attgataaaatatataccaaaatgtattacaaacataaaacttcatgaggtcagtattattaatttcaaattttgggtttttttctaacattaaattattyaaaacttttatttaaaaatgccacattcaggtaaaaggtagtagatgggaaaatttcagcagtagatatttcagaatacaatggttgtagaaaaagggat

SEQ ID NO: 187688 - DNA, 201 bp, Homo sapiens
ccacatccttgtttcttaaacatcaaatggtgacttgaggagttaaacaagttaataaaacaaaagcattaatacttgacatatttctcttatcactaagwcatcatgccagttagtcaaaaaacaaaaataaattcagagtacctctttcacatgttaaactcattggattatttaaatactaagtgatttaacatagtt

SEQ ID NO: 187689 - DNA, 201 bp, Homo sapiens
ccccaccaaaatctcatctcaaattatagttcccataatccccacatgtcatgggagagacctggtgggaggtaattgaatcatgggggtgcttacctccrtgctgttctcatgatagtcagtgagttctcatgagatatgaaggttttataaggggcttttccccttttgctctcattcttctccttcctgccaccatgt

SEQ ID NO: 187690 - DNA, 201 bp, Homo sapiens
ttatatgagatttttacccaccctaaccttagactcagtgccacaacacagcatgctaaattaggttacatccttaaaaaataataataataattcacttkgggtggagtacagacctgcccgtagccatcagttttactgcaggcaaaataaagacacacctcttcctgaaaacacagacaacacaaattactgtggcca

SEQ ID NO: 187691 - DNA, 201 bp, Homo sapiens
gtagctgggactacaggcgggtgccaccactcccagctaatatttaaatttttatagagacagggtcttgctttgttgtgcaagctggtctccaactcccrggctctcacagtcctcctggcttgacctcccaaagtgccaccacacccaggctattttgaggacgtttctcttttcagaaaagttataagtattttgacc

SEQ ID NO: 187692 - DNA, 201 bp, Homo sapiens
ttaaatctctttattaaaatgaataccaataccaaattttattttataaggagtcatcatggcatagtatgaagagctgtgggttgacatcaggcataccyaaatttgaaaccagctctgctacttactcgctattttaactttagcatgttatttggcccctctgggtcatggtttaatcatctataaaacaaggatata

SEQ ID NO: 187693 - DNA, 201 bp, Homo sapiens
cctcctaaggatcttcacttcctccccctagaaaactacagagttgctctgttgtcacagtgtgaaaacacacacacacatgcatgcgtgcatacacatacacacacacacacacacacacttgatttggtgcataggaagtgacctaattcagtttgtcctcatcatagtgacaactagactgagccaatcagagacttt

SEQ ID NO: 187694 - DNA, 201 bp, Homo sapiens
tcattggattatttaaatactaagtgatttaacatagtttttctgagcatttcacacacaaaacattttttttttccacatgagaccattacttctgaatwttaaggaatttcatatggtgcatgtttgaggaatttcgtatggtgcctgctgtaataggatcttggcttatttgcatttgttgatcagatgcaactaggt

SEQ ID NO: 187695 - DNA, 201 bp, Homo sapiens
ttctgaatattaaggaatttcatatggtgcatgtttgaggaatttcgtatggtgcctgctgtaataggatcttggcttatttgcatttgttgatcagatgsaactaggtatagagattggatgagggaagagtaaagtaaaattacagaaaacttttaaggcttcccaagtttgttaccgtttgatagtattagaaacaat

SEQ ID NO: 187696 - DNA, 201 bp, Homo sapiens
tttttttactgttgtattccccagtgtctgcttccttgtaggtgatcaataaagatttcttgaataaatgaaagaataaggggctcccaacatctgtttgctctcttatccctctccttccctacccagtggttcctgttctctccattcccttaccaactggtatgttatttttaaaactaaaaatactctgttttatca

SEQ ID NO: 187697 - DNA, 201 bp, Homo sapiens
ctgggaaactttgggagaccttgtctctacaaaaattgaaaaatcagctgtagccctggctactcaggaggttgaggcaggaggattgctagctagatccyagaggttgaggcctatggtgatccgtgatcttgccactgctctgtagcctgggtgacagggtgagactcttgtctctaaaaataaataaacataagacac

SEQ ID NO: 187698 - DNA, 201 bp, Homo sapiens
ttttttactgttgtattccccagtgtctgcttccttgtaggtgatcaataaagatttcttgaataaatgaaagaataaggggctcccaacatctgtttgctctcttatccctctccttccctacccagtggttcctgttctctccattcccttaccaactggtatgttatttttaaaactaaaaatactctgttttatcat

SEQ ID NO: 187699 - DNA, 201 bp, Homo sapiens
aagtatacaatatattgttaacgatagtcaccctacagtacaatagacctcttgaacttatttctcctgtttaactgaaggtttgtatcctttgaccaatwtcttcccaactcccttagacctccaggccctgataaccaccattctactttctgcttttgtgagttcgactttttaagactccacatataagcaagatca

SEQ ID NO: 187700 - DNA, 201 bp, Homo sapiens
gtctagctctgacagtgagatcttgggcccactctgctatttttttgtcttattttctcattttcacaaacagataatgttttacctttgcaaaaagctgtatatatatatatattctaaagcttggatatcaatttttttttcttttttttttctgagatggggcttcactcttgttgcccaagccagagtgcaatgtca

SEQ ID NO: 187701 - DNA, 201 bp, Homo sapiens
taccaaattttattttataaggagtcatcatggcatagtatgaagagctgtgggttgacatcaggcatacccaaatttgaaaccagctctgctacttactmgctattttaactttagcatgttatttggcccctctgggtcatggtttaatcatctataaaacaaggatataattcctctctctagggttattatacagat

SEQ ID NO: 187702 - DNA, 201 bp, Homo sapiens
tctagctctgacagtgagatcttgggcccactctgctatttttttgtcttattttctcattttcacaaacagataatgttttacctttgcaaaaagctgtatatatatatatattctaaagcttggatatcaatttttttttcttttttttttctgagatggggcttcactcttgttgcccaagccagagtgcaatgtcac

SEQ ID NO: 187703 - DNA, 201 bp, Homo sapiens
agaagcaatataaactagtaatttaatgctttactccatttctacatagcatcttttaaaatttatttttagtatatcttgtcttagtggtttatgctggkgttaatattctggagataatattacatcagaattctatatcacacattttgtttttcactgtttaagaaaggtaagtaaataatacttcagaacagtgat

SEQ ID NO: 187704 - DNA, 201 bp, Homo sapiens
tcagcaaacataccttgactatttacatagccagagcacaagtaagtgctttggctgctaccactgttgctgccctttgacccattaaacacactggcctyccttccgtctctcatgtcctctccccatcttctcagaaacacaaggaatatgtctatatgtctattccttgtgtttctgtcctccacccgcttccttttt

SEQ ID NO: 187705 - DNA, 201 bp, Homo sapiens
atagttggattctcccatcttcttttctctgtcctctggcaaccactagtctgtgtccatctccacagttttgtcattctaaaaatgtcacagctgggcaygatggattgcatctgtagtcctagctactcgggaggctggggtgggaggatcccttgagcctaggggttcgaggctgcagtgagccgtgatcgtactgct

SEQ ID NO: 187706 - DNA, 201 bp, Homo sapiens
aacataccttgactatttacatagccagagcacaagtaagtgctttggctgctaccactgttgctgccctttgacccattaaacacactggcctcccttcygtctctcatgtcctctccccatcttctcagaaacacaaggaatatgtctatatgtctattccttgtgtttctgtcctccacccgcttcctttttctattt

SEQ ID NO: 187707 - DNA, 201 bp, Homo sapiens
ggattctcccatcttcttttctctgtcctctggcaaccactagtctgtgtccatctccacagttttgtcattctaaaaatgtcacagctgggcacgatggmttgcatctgtagtcctagctactcgggaggctggggtgggaggatcccttgagcctaggggttcgaggctgcagtgagccgtgatcgtactgctgcactc

SEQ ID NO: 187708 - DNA, 201 bp, Homo sapiens
gttgtttggtatctcccaaagtatgtgccaaagatcaccattaaaccatttatagatattctgccagaaataggaggggaagagttctatgggaaacaacragtgtcgtagtccattctggctgctataaccaaataacttagactgggcaatttttaaataatacaaatttattgctcacacttctgaaaactgggaagt

SEQ ID NO: 187709 - DNA, 201 bp, Homo sapiens
atccacatacaaacttttatgtgaacataagttttcatttctttagaataaagagtacaattgttgaatcatatgatatattagtttcctgttgctgctakaacaaattaccacaggctggaagcttaaacaacacaaatgtatcacagttgtatagcttaacaatccaacatatgtctcatcgggctaaaatcaaagtgt

SEQ ID NO: 187710 - DNA, 201 bp, Homo sapiens
taaaccatttatagatattctgccagaaataggaggggaagagttctatgggaaacaacaagtgtcgtagtccattctggctgctataaccaaataacttrgactgggcaatttttaaataatacaaatttattgctcacacttctgaaaactgggaagtccaggatcaaggtgccaacagatttggtgtctggtgagggc

SEQ ID NO: 187711 - DNA, 201 bp, Homo sapiens
ccagctttgttctttttggtcaagattattttgactattctgggcctttgtgattccatatgaattttaggattttttttttttttttttgcaaaggatcmtaagaaactactatgaacaattatatgtcaacaaatcatataacctagaaaaatggatagaaacatttaacataacaaaactgaatcaagagattggaaa

SEQ ID NO: 187712 - DNA, 201 bp, Homo sapiens
ggtttatattttgccgtccttgttgagaagaaaaacatggatgtatagatatacagtgatggatggactagcagcttaagaatcattttggggacattttwaaaaaaattttttgagacagagtcttgttccatctcccaggctggagttcagtggggcaatcgtggctcactgcagccttgacctcatgggctcaggtga

SEQ ID NO: 187713 - DNA, 201 bp, Homo sapiens
taaagctgtgtttgaagtaagactttgtgctgatttggatgtagttagagttggacccagtgatgtgcttgaactggctcttcccagtttgcaagaggcaygttctgaagtccaagaatgttgcaagttagtttttaaacagtcagtagccatgttgggagtatgtatacaatggaaattggcaatcactataaatcagtg

SEQ ID NO: 187714 - DNA, 201 bp, Homo sapiens
gcatccctcggttcagtcacacctaatattaactaaccgtcacaaccgccattccccatattagtacttagtgtgctaagtcagtgcaaaatgtgggacamttaatttacataatttctttttatattttaattcctgtgaataatatgtgtgctcttaagtatttataaacataaacatagaaaaacaaacacttgtgat

SEQ ID NO: 187715 - DNA, 201 bp, Homo sapiens
tgggcctttgtgattccatatgaattttaggattttttttttttttttttgcaaaggatcctaagaaactactatgaacaattatatgtcaacaaatcatrtaacctagaaaaatggatagaaacatttaacataacaaaactgaatcaagagattggaaatctgaacagaccaataattagtaaggagattgactcagta

SEQ ID NO: 187716 - DNA, 201 bp, Homo sapiens
gctgtgtttgaagtaagactttgtgctgatttggatgtagttagagttggacccagtgatgtgcttgaactggctcttcccagtttgcaagaggcatgttytgaagtccaagaatgttgcaagttagtttttaaacagtcagtagccatgttgggagtatgtatacaatggaaattggcaatcactataaatcagtgctcc

SEQ ID NO: 187717 - DNA, 201 bp, Homo sapiens
tttaaaaatcataaaatataactactgctataaaaatgtgttcatataagagactagaggataatattcagagcataaaacaatggttggagatccacagrcaaccaacactggtagtcaaatagtgattaaattcttgataagtcttgctgcttttttttctgaaattttatttaataatatcatataatgtttttcatt

SEQ ID NO: 187718 - DNA, 201 bp, Homo sapiens
ttcttgggatatttcctaaattcagtatgagattgttgatatagataagaaaactgacttgcaaagagatttcattgccccaggtaacacagctaagtggsagagctgcaatttgtactctgagtctggttttggggtctgcacatttgaccacaatgctactgcctgtattttacttaagataatagttatgtttatgac

SEQ ID NO: 187719 - DNA, 201 bp, Homo sapiens
aatcagatagacttagcttacatcccacctcaatttagtagctgtatgaacctggcaatattgtcttatatgtaaaattatgacagttattatacataatrcagtcagccccccaaatttacaggtttcaaatccgtggattcaacgaatcaagggtcaaaaaaaattttaagaaaaaaaaacagtaaaaaataatgcaac

SEQ ID NO: 187720 - DNA, 201 bp, Homo sapiens
atttacacattctttgagtgttctaatttcattgtcataaaagcttactattttctcatttttaagacatatttcatacttcttaagatagctcttaaatktattccagaaactttaaacatttttgatattgttgaactagttttggaatcaaaacaatttgtgattcccacataattgcagttaaattttttcagtgta

SEQ ID NO: 187721 - DNA, 201 bp, Homo sapiens
gacaatacagtatagtaactatttacatggcatttacattgtgttagctattacaagcaatctagagatgattttaagtatagggaggatatgcagaggtyatacgcaaataactacaccattttatataaaaaggacttgagcatctgtggaatttggtatcctggtgggggttagggaggggattggaaccaatcctct

SEQ ID NO: 187722 - DNA, 201 bp, Homo sapiens
tggaatcaaataacttttaaagatttgagaaaatcagcaccaatatttgaagattaaaacttgatccatctgtcagttagaattttgatttggaaaagccrcaggtaacagtgtaaattctagttttacaaatgtagtaataaagaatatacttcagtggcaatttaaacttcatattagtgaattaagatactcagtaag

SEQ ID NO: 187723 - DNA, 201 bp, Homo sapiens
atatcctaggaaatcagatgtcctacttgaaaattctaaccaggaacccattcccccaaatccccaaccaatttcctaaaagctaactaaatgcagtgaawtatttttaaagtaataaattataatttggggatgtaaaatgcttaaacagtggtttcctgatgacctaacaaatctagccttaaggaaccattgctaggt

SEQ ID NO: 187724 - DNA, 201 bp, Homo sapiens
cttttctttggtataccatagttcttgaaggctaaaattttggtaactgtttcaggaaaataaatactgtactatatttcgtttctttccttcaatcctgwtatgtaaagtaaacaaacctgttttcagaatatctaacctttagttgagtaaatgacaggtaggaaataaagctgttgatacaggagaatgagtaagtga

SEQ ID NO: 187725 - DNA, 201 bp, Homo sapiens
cctaggaaatcagatgtcctacttgaaaattctaaccaggaacccattcccccaaatccccaaccaatttcctaaaagctaactaaatgcagtgaaatatytttaaagtaataaattataatttggggatgtaaaatgcttaaacagtggtttcctgatgacctaacaaatctagccttaaggaaccattgctaggttgat

SEQ ID NO: 187726 - DNA, 201 bp, Homo sapiens
tctttccttcaatcctgttatgtaaagtaaacaaacctgttttcagaatatctaacctttagttgagtaaatgacaggtaggaaataaagctgttgatacrggagaatgagtaagtgaaaaaatccatcctttgtcaaccactcttattttttaaattgaatctgctttcagtttcagtagttgggagtgctagatgtaca

SEQ ID NO: 187727 - DNA, 201 bp, Homo sapiens
gttctgaatggccttgtagtcttctgttggttttggtttcatctttcagtagatggacctgtggaaaagtggaactggctttgaaaatgtactggaagcarttattttcctaagacaataattttttttctcttttccattttctttagaacatacaggctagaagatccactcagcatttaatgcatatgactttacatt

SEQ ID NO: 187728 - DNA, 201 bp, Homo sapiens
ctacataaaattctcttccaaatatttactcattttatagattaggaaactgatccccaatgaggtatatccttttggtatattggttaaagaataatatrtctacttgagagtggcatcctaattactgaaaactggactacgaacttttaaagtttaattaacagtaatttaatgtatttttatgttatttcttaatct

SEQ ID NO: 187729 - DNA, 201 bp, Homo sapiens
atagttatgaaactcaaaattaagctctctgtttaataatagacatcagagataacatgaacagatactgataaattgagaaaagagcttcagtaccaaaygaaacaaagaacacagatttccaggtgcttttttatctgatcatgttgcagcaccattggaaccattgtgtcactttaaccaagcctccaatatttttat

SEQ ID NO: 187730 - DNA, 201 bp, Homo sapiens
attcccctcaatgaatgaatatacttttaagatagggatgtgctacttttcctggttaattggcagttgagcagtggaaagaatatatgacttgtctgtgraaagagtcagtggtagaattgagacttttaacctttgcattcttgccctttccagtgacagatgctatcttggagtgttggtttgggtgtgccattttca

SEQ ID NO: 187731 - DNA, 201 bp, Homo sapiens
tttactcagttgcccaatttttgaatgaaactgaaaactgtggacagatacatcagggaagaggaacatacagagtaaaagacataaaagccttaaagttgcttcagtttcttcatttcatcttgtaaattacacaggagtccttcagataaaactcactggttatatgacaaattaagcaattagattactgcacaccta

SEQ ID NO: 187732 - DNA, 201 bp, Homo sapiens
gctgcttgctttacctctgaattcccttctccaatgccattttactccctgagctgctttcttggcagtttggggcaccccttgctgtttgtgcctgtgayagtctgacttccatctgctgctctgcagccaggagcctgctgtgctcccttcagtcacatctttcatgcctggccattcaagcacctttcatcaggtctc

SEQ ID NO: 187733 - DNA, 201 bp, Homo sapiens
aatggttgtaatatatgtcaccaaattcatggctaaatcatagaaattgatctgtcacagcttgttaaataagtattctttctcttacatgacttcttacrtgattttttccaaactgcttagtcaaagaagataatctttccagatagagaaaattttaaaatatctttattcctctttaaatttactgatttataaata

SEQ ID NO: 187734 - DNA, 201 bp, Homo sapiens
caaaatccaaaaaaaatctgaaatctgaaacactctggtcccaagcaattcagataaggggtattcaccctgtattattagtttttccagaaaaaaaaaaraaagattatcaaagatacacacccgactttagcactaaaatttttaagttgttgtaccttcaattgctttatttttccctttcaattctaatgttaaaaa

SEQ ID NO: 187735 - DNA, 201 bp, Homo sapiens
atgctcattggagcattttggatttcaaattttcagattacaaatgttcaaccagtaagtagaatgcagatattccaaaatctgtaacatgtctggtcccmagcatttcagataaggaatactcaacctgtatagtgttgcccaaaacttatttgaccatggaatacttctcctgaacacactgatttcttaacggaaatg

SEQ ID NO: 187736 - DNA, 201 bp, Homo sapiens
caaattttcagattacaaatgttcaaccagtaagtagaatgcagatattccaaaatctgtaacatgtctggtcccaagcatttcagataaggaatactcarcctgtatagtgttgcccaaaacttatttgaccatggaatacttctcctgaacacactgatttcttaacggaaatgctggcgtggaccatgagaagagcag

SEQ ID NO: 187737 - DNA, 201 bp, Homo sapiens
gcgttattttactccttgctatgtcacatttacatgtcagactcatttgctgtgatgtagcacactaggctggtgaaataattgcttgtgatgtccctaartccccgaggcttttttctacctcctgcttagatagtgaagagaagttgaagttgcgtcctctagtgttcattttgcgtaagagtgataggatgcggtagg

SEQ ID NO: 187738 - DNA, 201 bp, Homo sapiens
taaaatgcttaaacagtggtttcctgatgacctaacaaatctagccttaaggaaccattgctaggttgatacactcagaggacttttcgaaatgtctacayatgatcagacctttctaccagttgtgtttggaatgtaacaggagacttccctccatacattcttttgtttaaaatgttatgttaaatttgaggaatgtaa

SEQ ID NO: 187739 - DNA, 201 bp, Homo sapiens
gttaaaaccaagaggaattctatcagaaaatgttaaccacggagactctgtaagtgtgcccgatttttatttcctggtttatttactagatgaagtggatrtaactaacaggaaaacacctgattagtgctgcagactctgtgttcttatttaattctcatacaactttggaagttaaaagaccttaaattaattttgcaa

SEQ ID NO: 187740 - DNA, 201 bp, Homo sapiens
ttataaattcttttttttctcatctgacagtagcttttttctatacaatcagttacctttcactgtgtttttcacccatcctttttaaaatatttctgatrtcaggatttgctgcaaaagaattaacgaaaagtatcaagaagtttgctagagctttctttctactcttgcttctctcatggaatcaagtggaaaattggg

SEQ ID NO: 187741 - DNA, 201 bp, Homo sapiens
atttctgatatcaggatttgctgcaaaagaattaacgaaaagtatcaagaagtttgctagagctttctttctactcttgcttctctcatggaatcaagtgraaaattgggctttcttattttatttcattcactgagtaactactcacaagaatgtctacttcagtaaggtagttgaaccaagcatatcctgacagcctca

SEQ ID NO: 187742 - DNA, 201 bp, Homo sapiens
atcattaatacatttatgtaattgtacatgaatcattgtaatgctcattcaatccagaagaaacgtaatacttagaaccttatgttcatatgagtgaacaytttttaaaatttcaaaatatgtgcatatttttctaagaattattacaagatgatcagagaaagaaggaaattctattgggatagtagagtagaagtacaa

SEQ ID NO: 187743 - DNA, 201 bp, Homo sapiens
caccatggcacatgtatacctatgtaacaaacctgcacacctatgtaacaaacctgcacattctgcacacgtatcccagaacttaaagtataataataagmaaagataattagaagacaagctacaggctgggggagaatatttgcaaaagacacatctgataaaggactgttatccaaaatacacaaagagcttttgaaa

SEQ ID NO: 187744 - DNA, 201 bp, Homo sapiens
ttatatgtgaattggccacagctaagagtaaatgattgaaatcttttaaaacttttagttacattgtttacaatttggggtaaatgtctagataagtcatktaaattttttcacctaaactcataattttgcttctagagtcctaacgagtagtgaaatggagattaatcttgaaaatcccattagcttacatcactagaa

SEQ ID NO: 187745 - DNA, 201 bp, Homo sapiens
atgatttaaagtatacaagaggatgtgcgtaggtcataatcaagtagataccattttatataagagacttgaacatcctcagattttggtatctgcaggargtcctggaaccaatccctcatgaataccagagaatagtattttattttttgagcaactaaaatgttgtttttctgttagttttaaagcatagtttgattt

SEQ ID NO: 187746 - DNA, 201 bp, Homo sapiens
gtctagataagtcatttaaattttttcacctaaactcataattttgcttctagagtcctaacgagtagtgaaatggagattaatcttgaaaatcccattascttacatcactagaagcactttgtccacctgcttcctggacctagaagagtaaacctgtggttgtccagttctaggtggtagctttaagatactgcaggc

SEQ ID NO: 187747 - DNA, 201 bp, Homo sapiens
taaaaggacacaaaccaacctctttgtaaaacttctgccctccaaaggctttatgttctctaagatagttaagaagattaaaaaaaaaaaaaaagaaaaamaaagaaactcctgttcttaatgatcccatgctgatagtttttttttggataaagtgtaggctgctgttcatagagatgccaagtacatatgaaaggaggg

SEQ ID NO: 187748 - DNA, 201 bp, Homo sapiens
aaggagttcttctctatgggccacctgggtgctctaaaacaatgatagcaaaggctttggccaatgagagtggactgaattttctagctataaaggtaggrtgttaaattttttaatcgctactctctcttggcctcccccaacccccattctctgactcctacctttaggagaacgaataaaggcatcttaaggagcagt

SEQ ID NO: 187749 - DNA, 201 bp, Homo sapiens
ccgactgcttgcttcaaatcaaactgcactttcactgtgcttaacctcagtcaagttacttgcttcttttggctttaatgttatcttgcataaaaatcagkatatttaaaatacctcactagtttgttacatgattaaatgagacaatgtatataaaataacacagagcctgttatatggttacttttagccattaacagc

SEQ ID NO: 187750 - DNA, 201 bp, Homo sapiens
ccgaagtgctgggattactggtgtgagccaccgcacccagcctctacaagcttttattcatcataaccatacacatttattgttgcataccataagaagcrtaaagctttaaaagccttttctggactaggccacctctaccccctactttgtatggtttacattggtttctatgtgaatcatttgattattgcattcatg

SEQ ID NO: 187751 - DNA, 201 bp, Homo sapiens
attaatagaacagctggacaaatattttcacatgtgtttatgatatttttgttattttgtaaacttggatacttgaaatattggccatggaatgttaaaartaatgctattaaaaataactcaattaatggtacttattaatggcagtttttcttgatcattcttatcagtaaagcacatgctatctaggaggtaaaatat

SEQ ID NO: 187752 - DNA, 201 bp, Homo sapiens
gtcaagttacttgcttcttttggctttaatgttatcttgcataaaaatcagtatatttaaaatacctcactagtttgttacatgattaaatgagacaatgyatataaaataacacagagcctgttatatggttacttttagccattaacagcataatcataaaatatcacattataaagttgcaagagattctttccatac

SEQ ID NO: 187753 - DNA, 201 bp, Homo sapiens
caaaatttcttattgtactatactcaccgattttcagactgaggttgaccttgggcagctgaaactgcggaaagagaaactgagtctaggatgactttctrtctcaattcttgcattgtattgtacactccttaaggataaaagccatgtttcttcagaatcttatcccaaaaacttagcagagtgcctggtacataatca

SEQ ID NO: 187754 - DNA, 201 bp, Homo sapiens
ttgtatacatgcttaaaattcttaaaaatataaatttgtctctttttctatttttacaaaatatcaaggaactagaataatgttatcatcttcaaggtatwtatgcggtgaaaatgtaattcatactcctcccaaactttgctatggagagggggagtatttttagaaagaatctctttttatgtgtttgttcctgtccaa

SEQ ID NO: 187755 - DNA, 201 bp, Homo sapiens
atgtttgctttgactggactacttctatctcttggtagccattgctttgattgtgctttgtcttcaagatctgtagagctgtgtttcatttcctgttacarttctttgaagcagtacgtcaaaatcttgatcccacttgtttacagttttgattgaaagctctgcccttgtatgcagctgatctgggcataaggattttgg

SEQ ID NO: 187756 - DNA, 201 bp, Homo sapiens
ggaaaaatttttggacatttttgataatgaggaaaaaccatgtggcctagaaatataaaaaaaattaagaaaaaatgtcatgaatgtattaaatatgtatrtactagtctattttaccatttactaacatgaaatatacacaaatctattataaaaagttaaaattatcaaaacctacacacacaaacactactcagcctt

SEQ ID NO: 187757 - DNA, 201 bp, Homo sapiens
gaaaatggataatatgatagggagtgagacgttgagggaggaaggggagttgaattatactgggctaataataatattagataacattcctttagtgcttmttacatactagaaactacttacattgctttacagtaaagaaaaactcacagaaaggtccctgcattaatgcaaagtaggatattatacaattggcagttg

SEQ ID NO: 187758 - DNA, 201 bp, Homo sapiens
gggcgtggtggcagacgcctgtagtcccagttacttgggaggctaaggcaggagaatggcgtgaactcaggaggcggagcttgcagtgagctgagatcgcrccactgcactccagcctgggtgacagagcgagactgtctcaaaaaaaaaaaagaagaagaagaaggtttcaagaatttagtttctaaattcaggatgttt

SEQ ID NO: 187759 - DNA, 201 bp, Homo sapiens
ggctactcatatgtaaaagttactggaatggtcttcttatttttctgacctttttatatccatataaattcggatgatttctcattgatatttatgatatyctgctctgaaaataatataatcaattacttgcctttttaagtcaagtattctaccctagttgactataaagtgaattttttcaaaggaagtcttaaattt

SEQ ID NO: 187760 - DNA, 201 bp, Homo sapiens
aatttgaagctacaagagaatttagaaatcatccagtgcaacttattaaattatacttttgataggggatgctaaatggttagggaacttgtttggatctrtggatttcgttggttatatactcagctcttaattgccaaggaatagtcatgatgaaccagcagactttcctcacctagttggggagaaaagaattagatt

SEQ ID NO: 187761 - DNA, 201 bp, Homo sapiens
ctaacatgtaagcacatttatgattaatttttatatgagatcttctgaaaatcgtcacaggaaaagtagcagaaaattctatctttcctcaaattatattkttgtgttccataatgcttggattggggagggcatcccattgtggtcctatttataattagtatattattacaacttcatagaaattttgctaacagctac

SEQ ID NO: 187762 - DNA, 201 bp, Homo sapiens
gtgggtaacctgacctttctctctggctgctcttaacattttttccttcattttaactttggtgaatctgacaattatgtgtcttggaattgctcttctcraggagtatctttgtggcgttctctgtatttcctgaatctgaatgttggcctgcctcgctagattggggaagttctctttgataatatcctgcagagtgtt

SEQ ID NO: 187763 - DNA, 201 bp, Homo sapiens
ggtcctaagcagtaatagcttcctgcagtccctagactttggttccgtcagcatgccttaacctttccagcactttgggaaatattccctaagttgatttrtcttcagagtctctaacaggaccctgactaattttctattttatttttacaagtaaaaattgtatatatttatggtgtgtatgatgttttgatatatata

SEQ ID NO: 187764 - DNA, 201 bp, Homo sapiens
tcagctcactgcaacctacgcttcctgggttcaagcgattctcctgcctcagcctcccgagtagctgggactacaggcgcccactaccacacccggctaawtttttgtatttttagtagagatggggtttcaccgtgttagccaggatggtctcgatcgcctgacttcgtgatccatgcgccttggcctcccaaagtgctg

SEQ ID NO: 187765 - DNA, 201 bp, Homo sapiens
tatacatgctcataccttgttccttctaccactgtaccccaacctttccaccttacttttattagtctcttgtttcttcttccaattttttaacacaaacaaaaaatatgcaaatatatatgcaaatataaatatatgtttatgtgtgtgtatatataatatatattatatataattatattatatataatatatatatta

SEQ ID NO: 187766 - DNA, 201 bp, Homo sapiens
cactgtaccccaacctttccaccttacttttattagtctcttgtttcttcttccaattttttaacacaaacaaaaaatatgcaaatatatatgcaaatataaatatatgtttatgtgtgtgtatatataatatatattatatataattatattatatataatatatatattatattatatatattatatatatatatatat

SEQ ID NO: 187767 - DNA, 201 bp, Homo sapiens
tgtaccccaacctttccaccttacttttattagtctcttgtttcttcttccaattttttaacacaaacaaaaaatatgcaaatatatatgcaaatataaatatatgtttatgtgtgtgtatatataatatatattatatataattatattatatataatatatatattatattatatatattatatatatatatatatgtt

SEQ ID NO: 187768 - DNA, 201 bp, Homo sapiens
ccatttgtaattaaaattgaaaaaattttaattcttccatttaccttgactatcacaaatacatgtaatgattttttaaacccagtctagagctgaaccarttaagacaaaattgacataacagatttgcccacttttccattaaatatttttatccctaatcaggccctcaagttacctgctaatgctaattgtatgact

SEQ ID NO: 187769 - DNA, 201 bp, Homo sapiens
ctggctttttttcaatatcagacatcaccatattatgcttttttaaacgtatgtagataaaagtgaatgtggaacataaatttgcacagtcttcctggaargtggttaatatataatataaaaacttcaagtactcaccttttgtcctataaattctatttttaaaactttgtcctagataataagacaaataatccaaga

SEQ ID NO: 187770 - DNA, 201 bp, Homo sapiens
agtgactgggcttgttgacttgtacctaataggtttggttctaaatatagttttaaaacaaaccaactacagaattttctagtgtttgctcatctttagcyaatgtggcactctttccaccagaccttccgaaaagcaagagcagtggcgccttccattattttctttgatgaactggatgccttagcagttgaaaggggc

SEQ ID NO: 187771 - DNA, 201 bp, Homo sapiens
ataaatttgcacagtcttcctggaaggtggttaatatataatataaaaacttcaagtactcaccttttgtcctataaattctatttttaaaactttgtccyagataataagacaaataatccaagattgaatctgccttagagagttgctttaaggattattgcatatacactatatctacataacagaatgagaaactat

SEQ ID NO: 187772 - DNA, 201 bp, Homo sapiens
cttttccctggctagtcttagaagcaatcacatttttatataatgaactctgaggggtttaaaaatgagtgagacatggtatcctggagtgcagcatatgwctgctcagcatttacaggtttgtttgtttttttcctctctttacttttccatttagtagacactaggccataaacccgttttaatttattcactgagaag

SEQ ID NO: 187773 - DNA, 201 bp, Homo sapiens
tcttaattgccaaggaatagtcatgatgaaccagcagactttcctcacctagttggggagaaaagaattagattaattttcggttccttgaactctagaaktctataaatctatcaactgtaactatgtcaaatataatgctatggatgttactcttcttaattaactatgtctaccttcactttctcatagtccagctat

SEQ ID NO: 187774 - DNA, 201 bp, Homo sapiens
tttattcactgagaaggaaatgacataatattcactgctgtggctgcataggtcatcaattccctgggactcaggattacatctgagctgatatcagactscctcttcccaggatagtaaaatttgaagtctgtgtgtcaggggcctgcagtgtaagtattcgagaaagtttgttcaaagtatttcctttccaaaaagcag

SEQ ID NO: 187775 - DNA, 201 bp, Homo sapiens
tatatattatatatatttgatatatatacttacatatagatatctatatataatatacttatatgtaggtatctatatatatagctttttggggggtcctrcttagcctttctttctccataggtttaattgtagagctgtgtttcttttttttgtttgtttgtttgtttttgagacggagtctcgctctgttgcccaggc

SEQ ID NO: 187776 - DNA, 201 bp, Homo sapiens
taggatagttcctctactgcactgggcggggcttagactgggtctcctcaggatatgttgtgggatagaggctggtgagcatgtcggggaggatcagagtyccaggccatgagatttgtgtgaatctccccctggtttcttgtgtaagcaactataagctgggacctcagctagggaggcctggagcagtgtcacagttca

SEQ ID NO: 187777 - DNA, 201 bp, Homo sapiens
tatgcagctgatctgggcataaggattttggccctaatcatgtggaaagtttgcacaactttaatttttcagtcagaattgtttaacctgaaccaattgcrgtggctctggtggtgggtattgtttgtgctgttaatcatttatcttcttcaattagggaacaaacaagatgagttttttccttgcaaactgatgtggaag

SEQ ID NO: 187778 - DNA, 201 bp, Homo sapiens
aagaacaaaattttaaatctctctaagaggtttagtattgagtggcaattattttgtttacttgtctgtcttctctgttgactatgaactccttcgtggtrgagatggtgttgcttatgtttgataagtccaatcccagactcataaatgtttatttggttggataattagcaaattaattaattttgcctgttaatgcag

SEQ ID NO: 187779 - DNA, 201 bp, Homo sapiens
agagatgtggtttctccatgttggtcaggctggtcttgaactcctgaccttaggtgatccgcccacctcagcctcccaaagtgctgggattacaggcgtgwtccactgcatctggcctgaaacagtttttcaaaaagattaatcatcttgggttaatagaaaaaaatcaggcagaaagataaaactacttctgtcattact

SEQ ID NO: 187780 - DNA, 201 bp, Homo sapiens
gggtattgtttgtgctgttaatcatttatcttcttcaattagggaacaaacaagatgagttttttccttgcaaactgatgtggaaggtcagctgctggggkcttcatcttcaacatagtcttgttctttcagttatccatttgtaaactgctatctcattagggcattgtctcatgaacttttcataaagcatcaatagtt

SEQ ID NO: 187781 - DNA, 201 bp, Homo sapiens
tgtctgtatgctggagaataggaaatggttaactatggccagacctataccctagcatatctaaatctattacaaaagtgaattaaccactgtattaaagktttctagagagacagatccaataggagccatttattatctagatctatatatgagtttattagggagcactggctcatgtgataacactgtgaagtccca

SEQ ID NO: 187782 - DNA, 201 bp, Homo sapiens
attagcctcaaatattgatttttagactatgtataatctattactctgaaacagttttttggggtttttttgtttgtttgtttttgttgtttttttgagayggagtttcgctcttgttgtctaggctggagtgcaatggcgtgatctcggctcacagcaactgctgcctcccaggttcaagcgattctcctgcctgagtct

SEQ ID NO: 187783 - DNA, 201 bp, Homo sapiens
tgtgtataaaatatttctcaaagtagtactctgtaacaagaaaaccttgaccctgtttcttcaaatgaatataagctctaataaatagacatttgttcaawctctgaactatttaactgtaatgagttgaaaaaaaatttttttttttttgagacagagtttcgctcttgttgcccaggctggagtgcagtggtgagatct

SEQ ID NO: 187784 - DNA, 201 bp, Homo sapiens
ctgtcctgagttggtaaatgtctacttagatgccagtgatgcgaatagaaactgtcgtgtcagcttataacattctcagagggttgcactttcaatgcagrtggggggaaggacaaagtaatagcttcttgttgggattacagtaagtgagggctcaagtgaagatctcttagttccttgaatgatcctttaaaaggtaat

SEQ ID NO: 187785 - DNA, 201 bp, Homo sapiens
tgggctcaagctattcttctgcctcagcctcctgagcagctaggactacaggtgtgagccatcacaccagctaactttttaacatttttgtagagacaggktctcactgtgttgcccaggctggtctcaaactcctggcctcaagcagccctcccaccttaccctcccaaagtgctgggattataggagtgagctgctgca

SEQ ID NO: 187786 - DNA, 201 bp, Homo sapiens
atggggaagggaatttatatttaataccaacctacggcatgcctatattttaaactattaatcatccagtaacccataagcctaggaaggattagtccgasgtattacagtctcaaagagatagagcctggctatgcgcattgttctgtctgattatttttcattttctcttttgttttgtttttttgtttctagcctagg

SEQ ID NO: 187787 - DNA, 201 bp, Homo sapiens
ttctctgtttgtcctggcaaaacttatatttggaaaatgttctatttttcaggtatcctggtcagatataggaggactggaaagtatcaaactgaagttgsaacaggctgtggaatggcccttaaaacatccagagtctttcattcgaatgggtattcagccacctaaaggagttcttctctatgggccacctgggtgctc

SEQ ID NO: 187788 - DNA, 201 bp, Homo sapiens
tataataatacttgttacacctttaggaaaacatagttgttcaccatgctttatataccatgtgtgaacttttctatatttttttcctttcagagtgtatygttctttttgtttgtaaagcagcatacttgatgctgcaaccagtgactttttgccatgcattcttaatacttcttggaatatttggtttaggaagtgggg

SEQ ID NO: 187789 - DNA, 201 bp, Homo sapiens
atgtactcctaatttacttcttgttattcttggaattttttaaaggattttcctgattcttaaatggttctattcttttttgcagttcttctgttaatgayatgttttttatttttttttagttctctgtttgtcctggcaaaacttatatttggaaaatgttctatttttcaggtatcctggtcagatataggaggactg

SEQ ID NO: 187790 - DNA, 201 bp, Homo sapiens
cttgaacaggcgccgagttgtcacagatctcattagtctcatccgccagcgatttggcttccgttctgggggccctccgaggcctctacctggagcagggkttcctgccccccaccgagagcgcatgcctgatgagagacaatgactgcctcagagttaaattagaagagagaggagttgctgagaattctgtagtcatca

SEQ ID NO: 187791 - DNA, 201 bp, Homo sapiens
ttgcaacccctgcctttttttgttttccatttgcttggtagatcttcctccatctctttgttttgagcctatgtgtgtctctgtacatgagattttgagaygagtttcctgaatacagcacactgatgggtcttgactctttatccagtttgccagtccgtgtattttaattggagcatttagcccatttacatttaaggt

SEQ ID NO: 187792 - DNA, 201 bp, Homo sapiens
agccagcatggtccctgcaatgtaagttctgaagaaatgtgtcatttttctttttcctgaatagaatgaatgaatttggggaaggattgtattatactttwtgagaggaacagctcgaattctgttctcttccctgccagcccctcttgcatttcagggtttttacttgcccacagcattcttgcctagtaattaaaacct

SEQ ID NO: 187793 - DNA, 201 bp, Homo sapiens
cattgctttgattgtgctttgtcttcaagatctgtagagctgtgtttcatttcctgttacagttctttgaagcagtacgtcaaaatcttgatcccacttgtttacagttttgattgaaagctctgcccttgtatgcagctgatctgggcataaggattttggccctaatcatgtggaaagtttgcacaactttaatttttc

SEQ ID NO: 187794 - DNA, 201 bp, Homo sapiens
aaaagtttttgaccatcaagcagcagttgtcagtaggagtttataataccaagaatgtgctgcatatcttgtctcattaagttttaagtaacatttaaaamtattaaagcatgttacttgacctaattttatagcatttgagttgtcccattaaatggagcatctcgtaaatttcaagtattttatacttggcaatggtta

SEQ ID NO: 187795 - DNA, 201 bp, Homo sapiens
caatgagttaaggaatcctttcacgtttttcccaactttaaaattaaggattctcagggccctgtgtagagcagtaaaaataagacctcgtgtatgtgtakgtgtgtgtgtgtgtgtgtgtgtatgtgtgtctgtctgtctgtctggaggagaattgattggtgttccacttgggtgagagggttggctgtgagcctcaga

SEQ ID NO: 187796 - DNA, 201 bp, Homo sapiens
tattcctctgggttaagttttcctcttgttcttctttggtttctagctgacttacttgtgagagcagaaaattacctgggtgcttgagacccattgttcaygtgatggaactgtgatgcacatacatttgaatacatttaagttttttatttgccgtttgtaacttacactggaaagctaccctggtcctacagttaaaat

SEQ ID NO: 187797 - DNA, 201 bp, Homo sapiens
tgtgtgtgtatacatatatgtacattcacaatagccaagctatggaaacaaccagtgttcattgatagaagaatggacaaagaaaacatgatgtgtgtacwtatatatatatatatatatatgtgcatatatatttgcatgtgtacacacacatcacattttctttattcattctctgtcaatggacacaggttgtttcca

SEQ ID NO: 187798 - DNA, 201 bp, Homo sapiens
atatctcaaaataataagagctattcatgacaaacccacagccagtatcatactgaataggcaaaagctggaagcattccctttgaaaactggcacaagamaaggatgccctctctcaccactcctgttcaacatagtactggaagttctggccagggcaatcaggcaagagaaagaaataaagcgtatttaaataggaag

SEQ ID NO: 187799 - DNA, 201 bp, Homo sapiens
ccagcaccatttattaaagaggaaaatcttaaaagcaactggagaaaaaaaaaagataagatacagattaataaggtaataattcttattccctatagaarccatgcaaagcagaacacaaggaaatgacatatttcaagtgctaagtggatgaatctcagtcagattattcggaatactaatagcgttcatttatttagt

SEQ ID NO: 187800 - DNA, 201 bp, Homo sapiens
tctttatccttatggagcttataaatgtctaaggaaaagaaatgtggtaattctaggtacttctgaggatggttctaaggattaaatgatatattaaaaaraaccagcacaatttctggcatataacatttatgttcaataattttaagtatttaaaaaaatagttataagtagtctaagtgttctgaataagtgccaagt

SEQ ID NO: 187801 - DNA, 201 bp, Homo sapiens
agaaagaggggaaaggctgggagaaaagagaagcaaagacctctttgaatactcagcccttcccactcaccctgtgcatagcacttcacatttttacttgwctgcacaatctgtctgcttttcattggttttcagagtcctcgagtgatttttgtattttgtctgacatttttctttctttttttttttttttttaattga

SEQ ID NO: 187802 - DNA, 201 bp, Homo sapiens
aaatacacacttgtaacgcatgggccccacacttaccctaagttataaaaatggtacaattaggtaatttctaccctaagacagtcagtttttgctcagcratctaaccacgtaggcttgcttacttctgagacttgcttgacctatctcattgaactcgctctgtgcctgagatacatgtccaatttctcaaggcaagtt

SEQ ID NO: 187803 - DNA, 201 bp, Homo sapiens
cttaaggtgggatgtgtggttactgattttagatctttcttcttttctaatctaggcattcaaagccataaacattcattaagcactgctttagcggcatsacacatatttgatatagtgtattttcatttccatttagttcagcatattttagaatttcccttggtacatctttaaattatcacagtctacctttaagtg

SEQ ID NO: 187804 - DNA, 201 bp, Homo sapiens
caggagaatctggttctatattttgttacatataattattttcttttctaaaggtgttcttttattaagctcccaccataaaagaggggaaaataagcacrcgtcttacatgcctgatgtttagcacttcttacaaaagaaagaggaaaactttaacataatccactgataaaagcatatttgtcttggcttcagacagtt

SEQ ID NO: 187805 - DNA, 201 bp, Homo sapiens
atagctttatggaacaaattacagaactttactaaaggacgtaaatgaaaacttggttaaatgaagagctataacatgtctattggtggggcacataacarcataaagataccaattctccccaaatccaattccaattaaaattataataagacttttggggagcctcagttaactgactctgatgtagaaaaagtttct

SEQ ID NO: 187806 - DNA, 201 bp, Homo sapiens
agcctagaacatcagaatgtgacagtcagttgagtttcataggatgagctcattagcagtacatttctggtgcaaaggtttgagtgaagtagtttaattgrctataattatatttcattcttcatatccccttaggataattagaagaaattcattttagtttttattctttaaatacagtactgcattttatattttatt

SEQ ID NO: 187807 - DNA, 201 bp, Homo sapiens
gactttaagcatagaatctcttctcataagccagcccaggcacatcttactcaacaattcaagcaaaacctttggatctgtcagaaacagcttataggtckgcattaggtgattaattgccaggagaatctggttctatattttgttacatataattattttcttttctaaaggtgttcttttattaagctcccaccataa

SEQ ID NO: 187808 - DNA, 201 bp, Homo sapiens
ctgcaccctcaacctcctgggcccaagcaatcctcccacctcatccccctcaggtagctgggacaacagctgcatgccaccatgcttggctgatttttgtrgagatggggtttcaccattttgcccaggctggtcttgaactcctggggtcaggcaagccatcatgcccagcctattttctaatcttgatatgaggaagaa

SEQ ID NO: 187809 - DNA, 201 bp, Homo sapiens
taattttaggagaccacaagtgttagccacttacttaaatgtaatgtttccttcttttggagcttctgaatggtgattacagtgacattaaggtcaaatgygttttctttacagcatgaatccttacaatctaggaatatgctaatattcattgtgaaattccaattttcttatccagagataacagctgttaacattttg

SEQ ID NO: 187810 - DNA, 201 bp, Homo sapiens
gcaaggagtaatattgaatattcaaaaataaaatctattccttgacttcaaatcattaaagtagagctgcctatttaagaacttttatttgcacagtcctrttaattttaatgcctaaagcagtgttaatcgcatgacccacgtgaaaagattttaaaaattgctttgttagaaaatgtaatagacttgtcgttaaagttt

SEQ ID NO: 187811 - DNA, 201 bp, Homo sapiens
tttcaggaggcagagacaacgccatgattgattatcttaattaaatcatctgtaaggagggaagaattgagtgaagctaatggtgtagttggtgaagaagyagtcactcttactagctggaactgggaatatatgtttattttgtggcttggagagtgttcatattttgtccatacctgaatatgcagcggtcttgttttt

SEQ ID NO: 187812 - DNA, 201 bp, Homo sapiens
ccatcatcagtttcatcacagttgtactctttcttgcaaaaactctaccattagaattatttgaaaacttagagccttgttagagagtctggcctagttgyatcctttacctcactgtgtataggcgtttcagtatccatagttctcttggtcattaactaatgtttttaaattgttagctaaaaataaaacaaaaaacaa

SEQ ID NO: 187813 - DNA, 201 bp, Homo sapiens
ccagagcagctctcaaatatcccttctgtttttcagtactacaacaatacacaagatcttaaaaatgtagtagtgattattaaaaagggcttacagcaagwcctataacataatattatttatataaattacagacataataaataaaacagtagtatgtattattcaaggatgaatatatgtatacaagaccctatacca

SEQ ID NO: 187814 - DNA, 201 bp, Homo sapiens
acataataaataaaacagtagtatgtattattcaaggatgaatatatgtatacaagaccctataccaaatacaagggttttcatctctagtgtggtcggasggaaggggccagtagccaatattgggggtgaaaggaaatattaaataagagaagagccttgtatggaccaatgtgatagtgtgctatgtagattgaaaac

SEQ ID NO: 187815 - DNA, 201 bp, Homo sapiens
tccttgtgtcttcacttcatcttccttaataagtatttagaggcagtattttcgatattaacagcatagattctttaatttaggaaagaagaaaacttaaytttgatttttctaactttctgctcagctcttccaacgtgaatatgtaggtctctgtctcccggggtcctcattatgctttactttgccctttccagtgcc

SEQ ID NO: 187816 - DNA, 201 bp, Homo sapiens
agccagtatcatactgaataggcaaaagctggaagcattccctttgaaaactggcacaagaaaaggatgccctctctcaccactcctgttcaacatagtaytggaagttctggccagggcaatcaggcaagagaaagaaataaagcgtatttaaataggaagagaggaagtcaaattgtctctgtttgcagatgacatgat

SEQ ID NO: 187817 - DNA, 201 bp, Homo sapiens
tttaccggatgcagcaacaagaagggaaatatttaagctgcagtttcactccatgcctgtcagtaatgaagttgacctggatgaactcatccttcaaacckacgcatactcaggagcagaggtaagatagttcccttcaaaataccttagtgggaggaaagcggtggctcagggtcattaagcaaaataaattgcttgccc

SEQ ID NO: 187818 - DNA, 201 bp, Homo sapiens
gacattcacctgcagaagcttataaaagcacatgagatacaggcatcgtagcctactcagattgacatctacttgcagattctggtcatcagtgacttcawtgagcactgagagcagtttcattgaaggagcagtaagggcaaaaactagatcgtagagaactgaagtcaaaataatagttgagatttattgtggatatct

SEQ ID NO: 187819 - DNA, 201 bp, Homo sapiens
aaatcatcagtgaactcccattcacaattgctaaaaagagaatacctaggaatccaacttacaagggatgtgaaggacctctttaaggagaactacaaacsactgctcaaggaaataagataggacacaaacaaatgaaaaaatatcccatgtgctcatggatatgaagaatcaatatcatgaaagtggccatactgccca

SEQ ID NO: 187820 - DNA, 201 bp, Homo sapiens
ggtaactagagagatagtggtgggggcagggtatattcatagaatggaagagacttgaacatgtttataggttgaagagggagagtcagcagagagaatakagtgaaaatatccaagagaaaaatgagaaaggggataactaatgaaggaagatcacagaggactgtggtcatggacacaaagaaaggttttgccttcagc

SEQ ID NO: 187821 - DNA, 201 bp, Homo sapiens
agtgggtgaaaaagtgggcgaaggatatcaacagacactcctcaaagaaagacgtttatgcaaccaacaaacataagaaaaaaaggtcatcactggtcatkagagaaatgcaaatcaaaaccacaatgagataccatctctcaccagttagaatggtgatcattaaaaagtccagaaacaacagatgctggagaggatgtg

SEQ ID NO: 187822 - DNA, 201 bp, Homo sapiens
cacagtgaattagtctatatagtgtattagttataactcagtgtattcttaaagggtttcctcaattattttaatatttgacctgcaataatctgagaacsattttcattttctatacataatggctttgtagttcagtgttaaagctttggaatcttcagagtgaattgattgataaaagaaaactaatagtgcctggcc

SEQ ID NO: 187823 - DNA, 201 bp, Homo sapiens
tgatgtgggaattacggagattacaattcaagatgagatttgggtgtggacacaaccaaaccatatcatcttccaaacagaatttatcatcaacactgacragccatttcagttttatcttaattattgcaaggactggtcaagagaacgtgtttggaaattggaaattaatcatctatgttgaggaaataatttataaca

SEQ ID NO: 187824 - DNA, 201 bp, Homo sapiens
atcaaaaccacaatgagataccatctctcaccagttagaatggtgatcattaaaaagtccagaaacaacagatgctggagaggatgtggagaaataggaaygcttttacactgttggtgggagtataaattagttcaaccattgtggaagacagtgtggcgattcctcaaggacctagaaacagaaagaccatttgaccta

SEQ ID NO: 187825 - DNA, 201 bp, Homo sapiens
tacctttcagggaaataagatgtagaggtggaagacagtgatattgatgatcctgacctacgggcctaggctaatatatgtgtttgtgtcttcgtttttarcaaaaaagtttaaaaagtaaaataataaataaaatttaaaaataggaaaaagcctataggataaggatataaagaagaaaatatttttgtgcagctgtat

SEQ ID NO: 187826 - DNA, 201 bp, Homo sapiens
ggataaggatataaagaagaaaatatttttgtgcagctgtataacatgttgttttaacctaagtgttattataagagtcaaaaagttaaaaaaaaaaaaawaaataaaaaatttataaagtaagttacagattaattcctgaagaaagaaaagttttaaaataagtttagcatagtcttattgtaccgtgtttattataaa

SEQ ID NO: 187827 - DNA, 201 bp, Homo sapiens
gctggagaggatgtggagaaataggaacgcttttacactgttggtgggagtataaattagttcaaccattgtggaagacagtgtggcgattcctcaaggayctagaaacagaaagaccatttgacctagcaattccattactgggtatatacccaaatgattatgaatcattctataaagacacatgcacacgtatgttta

SEQ ID NO: 187828 - DNA, 201 bp, Homo sapiens
ccaaatgattatgaatcattctataaagacacatgcacacgtatgtttattgcagcactattcacaatagtaaaaacttggaaccaacccatatgcccatsaatgatagactgaaataaagaaaatgtggcacatatacaccatgaaatactatgcagccataaaaaagaatgagttcatgtcctttgtagggacatggtt

SEQ ID NO: 187829 - DNA, 201 bp, Homo sapiens
acccctataatcccagcactttgggaggcctagacgggcggatcacgaggtcaggagatcgagaccatcctggctaacatggtaaaaccccgtctctactaaaaaaaaaaatacaaaaaaattagctggggtggtggcaggcgcctgtagtcccagctacctgggaggctgaggcaggagaatggcgtgaacacgagaggt

SEQ ID NO: 187830 - DNA, 201 bp, Homo sapiens
aaaaaaaaaatacaaaaaaattagctggggtggtggcaggcgcctgtagtcccagctacctgggaggctgaggcaggagaatggcgtgaacacgagaggtrgagcttgcagtgagccgagatcgcaccactgcactccagcctgggcaacaaaagcaaaattccgtctcaaaaaaaaaaaatatatattagctgggcgtgg

SEQ ID NO: 187831 - DNA, 201 bp, Homo sapiens
actgagacttttgtctagaattgtatagaggtaaagagcatggatttacgtaggcttagtagaagaactaattttaaaataaatggtcacatcataagacytaagtcaggttatcaataaatatttataagtgtctgtaacttgcaaggccatgtcaggtaatgttcagcagtccccaacttcaatctagaatggagatgg

SEQ ID NO: 187832 - DNA, 201 bp, Homo sapiens
gacctaagtcaggttatcaataaatatttataagtgtctgtaacttgcaaggccatgtcaggtaatgttcagcagtccccaacttcaatctagaatggagrtggctaccaaaaagtatctttggattcctaggacccacagagattgactcagtgggtttgattgttaccctggattcatgggtaacactaaatggttacc

SEQ ID NO: 187833 - DNA, 201 bp, Homo sapiens
gaacagaaaaccaaacacctcacattctcattcataagtgggagttgaacaatgagaacacatggacacagggaggggaacataacacactggggcctgtygggggatgggggtgggaaaggggagggataacattaggagaaatacctaatgtaaatgatgggctgatgggtgcagcaaacccaccatggcacatgtata

SEQ ID NO: 187834 - DNA, 201 bp, Homo sapiens
aatttcctctgcagtgcttttccctcaggcagacccttgagtgattgtcttttttacctcctccaatttccaccattctcattttatgtgttcaagttaamtgtgaacaacagcaaacagctacactctgtaaaacataccatttctttccttgagtcaatgcattcacttttctggtaaatgattttgggggcctgcaga

SEQ ID NO: 187835 - DNA, 201 bp, Homo sapiens
aatggcgtgaacacgagaggtagagcttgcagtgagccgagatcgcaccactgcactccagcctgggcaacaaaagcaaaattccgtctcaaaaaaaaaawatatatattagctgggcgtggtggcacattcctgtaatcctcgctacttgggagactgaggcagaagaatcgcttgaacccaggaggcagaggttgcagt

SEQ ID NO: 187836 - DNA, 201 bp, Homo sapiens
caatgagaacacatggacacagggaggggaacataacacactggggcctgtcgggggatgggggtgggaaaggggagggataacattaggagaaatacctmatgtaaatgatgggctgatgggtgcagcaaacccaccatggcacatgtatacctatgtaacaaacctgcacacctatgtaacaaacctgcacattctgca

SEQ ID NO: 187837 - DNA, 201 bp, Homo sapiens
ggtatttggttttctgctgctgcattagtttgcttaggataatggcctccagcttcatccatgctgctgcaaaagacatgatcttgttttttatggctgcrtagtattccatggtatatatgtaccataatttctttacccaatctactattaatgagcatctagattgactccatgtctttgctattatgaatagtgcta

SEQ ID NO: 187838 - DNA, 201 bp, Homo sapiens
ttaaattgatatagttgaaactctaaagatacaactgcaagaatatatgtgggcaaatttttgaactattttgtggataaagggaaaaagggtaggaatcrgatgtttttcatcagtttttaggagtaattacaaagctaacaggaaaatatgtctcccttctaagataaaaggaacctgaatatttgtccctaatattag

SEQ ID NO: 187839 - DNA, 201 bp, Homo sapiens
taatagcaattatggtataaatagcattttgtatacaacttttatctattaatacatttggcctaaaaaagttttcagtttttgtaattttttcctcttayacccattaaattatttcatgtaattactgtatagtacttttatctatattggataaaaaccactgatacctgtctgggcatttgagttaatttttatagt

SEQ ID NO: 187840 - DNA, 201 bp, Homo sapiens
ggaacctgaatatttgtccctaatattagaaagcaaatggctcgcaaaaattctcaaagatagtgtgaatcatattcttttataacactggataaaggggraaaaaagtgacatttggggtattaaacctgagatgaacatcctaatccagagagtagctgatctttagacctacaggctgccagtgaggtgttgtcagat

SEQ ID NO: 187841 - DNA, 201 bp, Homo sapiens
gttggaggacatcctgtttttaggggaggactggagtagaacctgggctgttccagccggtccctccctgtctcaggatgttgcatttcctgcacatgctwcagttattcttgagagctacgatgggagagagagaacttggtcattccaagaccacccagagagctgtcctacaaaggatcttaaactaaaggaaatgaa

SEQ ID NO: 187842 - DNA, 201 bp, Homo sapiens
gataaagggggaaaaaagtgacatttggggtattaaacctgagatgaacatcctaatccagagagtagctgatctttagacctacaggctgccagtgaggkgttgtcagatgttggagtttaggcatagacaaatgcactgggaagagaacagtgccactggctagtcacttcacttctgggcctcagttttctcatacct

SEQ ID NO: 187843 - DNA, 201 bp, Homo sapiens
ttgcttttgcatctacagtttcaaccaactatgaattgaaaatatttggggtcggggaacaaaaattaacaatacagcattttcaaaatttaaattgttaaaaaaatagtataactatctgtagcatttacattgtattaggtattataagtaatctagaaatgatttaaagtatacaagaggatgtgcgtaggtcataat

SEQ ID NO: 187844 - DNA, 201 bp, Homo sapiens
ggaggggctggagctaagactgggcccccttggactctgctgtagggacggatttggaaagcttgtcttgttggctcagagtggcatgcatctcccagcakgtctcagcacagataggatagttcctctactgcactgggcggggcttagactgggtctcctcaggatatgttgtgggatagaggctggtgagcatgtcgg

SEQ ID NO: 187845 - DNA, 201 bp, Homo sapiens
ataccatgtttcttgtatcaagcctatcaagacacctaccaggatgttttataagattttctttgacacagaaggggaaagtcagtgtttcttctgtatcrgaacacttaatatatgaaaatgattttgcttcacaaaaactgtgaatataagtgtcttgcacttttatgttttgtccctggaagtctaggtcagatgctc

SEQ ID NO: 187846 - DNA, 201 bp, Homo sapiens
aaaaaaagtgggagtaagtgattggtgtcgcatgctgctgatagattaaatagattgagaactgaggattgaccataggattagtgaccttgacagagcamttcagtgggggagtgttcagaagtgtcatttcaatgggtttaaatgagaatgggaagagaggaaatagaaaatggaaaatgaagagagctcttccaagga

SEQ ID NO: 187847 - DNA, 201 bp, Homo sapiens
ttctgccctccaaaggctttatgttctctaagatagttaagaagattaaaaaaaaaaaaaaagaaaaaaaaagaaactcctgttcttaatgatcccatgckgatagtttttttttggataaagtgtaggctgctgttcatagagatgccaagtacatatgaaaggagggactcatatggaaggtgaacttattaccagaaa

SEQ ID NO: 187848 - DNA, 201 bp, Homo sapiens
tatttgaaaatagacatgatttctcttgttatagactatagaacctttaaaaattaatagataatagtatttgaagataagtaaagatattttttaaaccrtactttcaaaatcagttctttaggtgctgggaatgtagccgatcgtgttttggctcagctcttaacagaaatggatgggattgaacagctaaaggatgtg

SEQ ID NO: 187849 - DNA, 201 bp, Homo sapiens
ttcatttctctttcaggtagaactccctgtggaacatgaattttttttaactatacttttgttactactcagatgatatatactgtatcaaaagtgtatgyccttgtcaagttctctaaagtttgtgaaatacaagagaatatgcagtaaaattttaagtctgtttcctttccagatactttttctctgaagaactactgt

SEQ ID NO: 187850 - DNA, 201 bp, Homo sapiens
taaggtttgatagttaagactccttcatgtgaaataccagatgttttgagtccttgatataaaggtcagaagaaaagaaggatattggtttcataataaaytaacatgtttacagtaatgactatgcagtgtaagctgtggatattttgttatataagaatggcagggggtcctagaactgggggctggaaggcccattta

SEQ ID NO: 187851 - DNA, 201 bp, Homo sapiens
ctgcagaaacattttgctgcttttatctactattaaaaattcttattttagtaaggtaaacaaaaaatagtgcttttaatatttgtattcatatattatcrttgtgataagtttctctatgtacaccataacaattttcagtgataagtggcattcttaaccaaatatatacaaatggagtatcatcaagtttaattcttt

SEQ ID NO: 187852 - DNA, 201 bp, Homo sapiens
ttgactcaggtaaaaggaaatggaaccccatgcataaatagaaggattgatcttggcagcacagatacttcatctattgaaacaggaaagaaagttgagtrtgtacatacaagtagagggaaaggggtagactcaatggtgatagcatgttgaaagttcttctctgccacatgaacaaactttctttccagtgcttaaaca

SEQ ID NO: 187853 - DNA, 201 bp, Homo sapiens
tgtgcagaagtgttttagtttaattaaagttccatttgtctatttttgcttttgttgcttgtgcttttgaggttttagtcatgaattctttgcccagaccmatgtccagcaatcttccttaggttttctttagtatttttacagtttcagttcttacatttaagtatttgatccatcttgagttctttttttatacagtga

SEQ ID NO: 187854 - DNA, 201 bp, Homo sapiens
ccttctaaatgattgatatatgatgatatgttaggcttatttattgagtcaatgcttcacacctgttctgtgtcacaacacctcccttagaggataaggttttttttttttttaaaaaagcgattctttcttgtaatgccacaggcattataaatctctcaattgaaaaatactgaattaaatttgcttcttatttaaaac

SEQ ID NO: 187855 - DNA, 201 bp, Homo sapiens
ccaatggtttttttttttttttttttttttttttgagtcggattctcaccctgtcacccaggctggagtgcaatggtgcaatctctgctcactgcaacctytgcctcccaggttcaaatgattcttctgcctcagcctcccgcgtagctgggcttacaggcgcccaccaccacgcccagctaatttttgtatttttagtag

SEQ ID NO: 187856 - DNA, 201 bp, Homo sapiens
tacaaagattaatccctgctctgactggattagaagaaacagaaactgtaggccaggggtgcagggttcttcaggaaagaaatataagacaagaagttaaactaaataaaaataagacaaggatatatatgagtgatattgtaatgtataaagaaaagtgtctcattagacttgcaagctggtccatttacatttgatcat

SEQ ID NO: 187857 - DNA, 201 bp, Homo sapiens
acaaagattaatccctgctctgactggattagaagaaacagaaactgtaggccaggggtgcagggttcttcaggaaagaaatataagacaagaagttaaactaaataaaaataagacaaggatatatatgagtgatattgtaatgtataaagaaaagtgtctcattagacttgcaagctggtccatttacatttgatcata

SEQ ID NO: 187858 - DNA, 201 bp, Homo sapiens
tatgtctgttgttttaagtcgctaatttttggggtaattaactatcaaaagctaaaggatgcatatacttgttaactttttatataatgcagttgttttgyaaatttaggctgagaaacagtgctctatgggtaggaatattctctaaggacttattggtagcttaggttacttagtgtggttttgaattctttttgagac

SEQ ID NO: 187859 - DNA, 201 bp, Homo sapiens
atatatagttgattctcattatttgtggttagttatgttctattaaagttgccttgaacaccgttagcaaatactgaaccatttctcctagagggaaataygtatgtgtgtgtatatacatacatgcaacacacacaatatatgtagcgtatgtatatatataatatatatacatacacacacattttacatagattataa

SEQ ID NO: 187860 - DNA, 201 bp, Homo sapiens
gactctgatgtagaaaaagtttcttagatagctaagtctattttgaaatgtatcaggaagagggatgatttttttcaaccacattttaatccatatttgtaaaagtaatatggaactggcatagaaacagatgattacactaatgaaacagaagagacaggtcaaaaacagaaccatggtggggaaaaggaatgttgctta

SEQ ID NO: 187861 - DNA, 201 bp, Homo sapiens
accatgtgaactccacagagaacaaggacttaaaagtgacaggtataaccacagagctaatagaagaaaatgtaagagaatatttttctgatctttttttaaaaaaaaatatatatatatatattattttgagacacagtcttgctttgtcatccaggttggagtgcagtggcacgatcacggctcactgcaccctcaacc

SEQ ID NO: 187862 - DNA, 201 bp, Homo sapiens
aaagattaatccctgctctgactggattagaagaaacagaaactgtaggccaggggtgcagggttcttcaggaaagaaatataagacaagaagttaaactaaataaaaataagacaaggatatatatgagtgatattgtaatgtataaagaaaagtgtctcattagacttgcaagctggtccatttacatttgatcatatt

SEQ ID NO: 187863 - DNA, 201 bp, Homo sapiens
aagattaatccctgctctgactggattagaagaaacagaaactgtaggccaggggtgcagggttcttcaggaaagaaatataagacaagaagttaaactaaataaaaataagacaaggatatatatgagtgatattgtaatgtataaagaaaagtgtctcattagacttgcaagctggtccatttacatttgatcatattt

SEQ ID NO: 187864 - DNA, 201 bp, Homo sapiens
aggcgtggagcggtgagggttgtgtgggcaagtgagcccaggttcctgccactatgcacagtcaggcacacaagctgctgcatggggtgggcagctccagrcactgataacaggtgctggctccatgcaaggctgtggctggaccagatgtactgcacacatcttccactctgtgcacccgtgactggacgaggggaacac

SEQ ID NO: 187865 - DNA, 201 bp, Homo sapiens
gaggcgtggagcggtgagggttgtgtgggcaagtgagcccaggttcctgccactatgcacagtcaggcacacaagctgctgcatggggtgggcagctccasgcactgataacaggtgctggctccatgcaaggctgtggctggaccagatgtactgcacacatcttccactctgtgcacccgtgactggacgaggggaaca

SEQ ID NO: 187866 - DNA, 201 bp, Homo sapiens
ttggaaaagtttgagtttcactgccttttatttagaagtacctgattggaggtgtcaataaaacatttctaaatatgaatattttattaagagtaatcaartagctccacatagatgctacataataacagcatagaatcacaattttattaaaattcaaaagacttatgtatatattacctaaatttgctccctcattca

SEQ ID NO: 187867 - DNA, 201 bp, Homo sapiens
ctgtacctgtttatctcgtttaatttttattctatctcatatgaggtagatgttgttatgcccattttactgttttttattatctatctagtattcaaagrttcataacatcaaaaaagtcataataactgttacaatagctactgtagatccttatttttgacactaccctttactctgttttacatatcattttatttg

SEQ ID NO: 187868 - DNA, 201 bp, Homo sapiens
ctaatcctttgtcagttatatgttcacacatatcctctcccagtcctatttcttatctttatactttgtttatgttccatgtggccttttattgtaggagygtttaacatcatcagatttatcagtctgtttccttatgatttgtgggttttatgtcttcctaaagaaatccttcagtacacacaaaatcatatagtcttt

SEQ ID NO: 187869 - DNA, 201 bp, Homo sapiens
ccatttaaataacgttaatagaaacagattttgaagcctctaacatcatggtgcattaagagcataagagaaacgagccgggcgtgatggcttacgcttgyaatcccagcactttgggaggctgaggtgggcagatcatgaggtcaggagttcaagaccagcctggcgaacacagtgaaatcccgtatctgctaaaattac

SEQ ID NO: 187870 - DNA, 201 bp, Homo sapiens
atattgttaactgtagtcatcatgacatacaataggtttcttgaacttattgctcctgtctaactgaaattttgtgccctttggccagcactacctaatcyctctgctaaccaccatttactctctctgagttcaacttttttacactccacatataagtgagatcatgggatatttgaatttctgtgcctggtttatttc

SEQ ID NO: 187871 - DNA, 201 bp, Homo sapiens
atagtgctacaataaacatgggagtacagatagctctttgatatactgatttcttttcttttcttttagatatatacccagcagtgggtttgctagactayataatagttatattttttattttttgaggaccctctgtgctgttttctgtaattgcttatagaaattgactagttgacattcccatgtagaaaaagggat

SEQ ID NO: 187872 - DNA, 201 bp, Homo sapiens
agaaacctagggtgagaatacctgtgttaactgtttttaaaaatttccatgacatgtttggtcaggggagaagaatgttctgtgacaagtgccagttttaytggtgaggtagaaaaggccttagaaggtgctagtaagacagaaaaagaactgtaggaagaaatcagtatcggagagcacagagatcctcaatccttggat

SEQ ID NO: 187873 - DNA, 201 bp, Homo sapiens
gaggcacttctgtggatctgcagaaatgctgacattcatgtagagagggattgtgaacctaccccaaagtgctccagaaaggccatccataggtgcacccmagccaagctcctgtggaggagtcccagccacgtctgcagtgataggcaaagggtagaagtccccttctccaggtcccttcacgagcactggggctgccca

SEQ ID NO: 187874 - DNA, 201 bp, Homo sapiens
agttttgcctgttttgccttctcttctttcacttgttttatggtttgggagcttcatcattttattctgcatagcaggagttcatttttattgctgaattygattgtttaagtattatgagtaatgccatgaacattcttgcacatgccttttgctgcacaaatgtatgcatttctgtctattatttgtctaagagtggaa

SEQ ID NO: 187875 - DNA, 201 bp, Homo sapiens
ctccataggtttaattgtagagctgtgtttcttttttttgtttgtttgtttgtttttgagacggagtctcgctctgttgcccaggctggagtgcagtggcrcgatttcggctctctgcaacctccgcctcctggtttcacgccattctccttcctcagtctcccaagtagctgggagtacaggcgcccgccaccatgccca

SEQ ID NO: 187876 - DNA, 201 bp, Homo sapiens
atttaagtaaaagaggacactccaacaaaactagtattcactgcacctctgagcatagcacacatcctttctgagttcaggtgggtacaattagctgctastaaaaatgaaccattagtgaagtcagtgaatattaaatgtgggacttacaaggctaggaatgacaaataatgggaaaaaacattttgtactctaatttta

SEQ ID NO: 187877 - DNA, 201 bp, Homo sapiens
cttgtagaggcatttgctccattgttgagggttggtactgtctaaagttaaaccatttcagtgatgcctagcatggaacacttgacaaccaaccttccagstaggaaatgagacgtccttgccagcaagtccatataatactacaatttttatgactagactatttttgcagaagtacttattgcttaattgacattaaac

SEQ ID NO: 187878 - DNA, 201 bp, Homo sapiens
aagaagttcatgcatttattaactggaaaagtagattacaaaactataaataacacaacatttatgtaaaactatgtatgttacaatggtctggaaaattrttccccaaactgctaacagagccatcacgtttattatttttactttttttttttttttttaaagaaacaaagcctcactctgtcacccaggccagagcac

SEQ ID NO: 187879 - DNA, 201 bp, Homo sapiens
atagcgttcatttatttagtacatattgtaaaccagaaattatgctgattattttaatatgcattatctcatttaatccttacagcaacccggagaggcarctagaattaacacattttagaggtgaagaaaatgaggctaagagaagccaagggacttggctaataaatgttacacacttagcaaatggaaaattcagga

SEQ ID NO: 187880 - DNA, 201 bp, Homo sapiens
agagaagccaagggacttggctaataaatgttacacacttagcaaatggaaaattcaggatttcaaaccagatatgattaacataagccatgtctcctctyactattaaccataactggtagaacatatacataacttaaatttgataggtaagctgattggaggctatttgttgtggtacgaatgtttgaaaattgctgt

SEQ ID NO: 187881 - DNA, 201 bp, Homo sapiens
tatatttttatataattttttatgtttgcaaaccaagaaacatgccatttctcctagtaaaaatgggggaagtgaggactactttgccttttctcctggasagagtagtcctcatttcccccttttttctttataaaaaggaaatgatgataaaaaattgttaattggataccacttcaaatggggattagttatgcatag

SEQ ID NO: 187882 - DNA, 201 bp, Homo sapiens
aacaaaagtgtagttcatcttttccaatcctgctgaaaattagggcaagatacagacagaaaaggcatttcttaaaattttaacaacctggaattcattcrtgattttaacaagaatcattttggtggagtgagagggacagatttgagtcagctgagaaaagtgtgacaaatgaggaaccagagacagagcttaaacaat

SEQ ID NO: 187883 - DNA, 201 bp, Homo sapiens
ctattaccatctagatttgtgtaaggacagtctgtctacacaacagtgaaagcacctaacaatgcacttctcagaacatatccctgttgttgagcaacacrtgactgtatgttactgcactgtttgtaaattttctgaagttgtgctccattccagtgcagtttttttctatgacaatacaacaaagaagctcctgttcct

SEQ ID NO: 187884 - DNA, 201 bp, Homo sapiens
aggagccagcaagtaacaatgcatgaataggaatatctagagaaataagaggtataatgtggagtgtcagaagccaaaagcgaagtgtgttaagaacaaargtgtagttcatcttttccaatcctgctgaaaattagggcaagatacagacagaaaaggcatttcttaaaattttaacaacctggaattcattcatgattt

SEQ ID NO: 187885 - DNA, 201 bp, Homo sapiens
aagccagagtgcaatgtcacgatcttggctcactgcaacctctgcctcccgggttcaagtgattctcctgcctcagcctcccaagtagctgggattacagrcatgcaccaccacacccggctaattttttgtatttttagtagaaacggggtttcaccctgttggccaggctggtcaggtatccattttttagtcaaaact

SEQ ID NO: 187886 - DNA, 201 bp, Homo sapiens
tgaggcacttcaacttttaaatttagccagagggggaggagccagcaagtaacaatgcatgaataggaatatctagagaaataagaggtataatgtggagygtcagaagccaaaagcgaagtgtgttaagaacaaaagtgtagttcatcttttccaatcctgctgaaaattagggcaagatacagacagaaaaggcatttc

SEQ ID NO: 187887 - DNA, 201 bp, Homo sapiens
ctttaattgagcattttatgttattttattttatctcttttcttagactgttaagttttttgggtttttttgtttgtttgtttttcagttgttaccctaarttttgcaatatatttctactttcaaatagccctattcacttcacaggtagtgcaagtaccttataataaaaaaaattcctaagttatccttctcatgtcc

SEQ ID NO: 187888 - DNA, 201 bp, Homo sapiens
tttttacatttattctgctcagtgttcactggacttcctggatgtgtatctgacattaatttggggaaattctcagtgaatgtttcttcaaatattggttmtcttctttcttcttttggtgttgctattacacatgctacacctatttgcttcatagttcttagatattttgttctgtgtggttttattatttttttttta

SEQ ID NO: 187889 - DNA, 201 bp, Homo sapiens
tggtcgtatatgtcttttgaatagcaataatttggaaagggggcttgacttttgaaaggaaaagaaagttaatgctttgggaatgtctggcttatatattrgctgtacattttcccctattgtgttgcctatgtctagcagataataaagtcttatgaaatcatttcattatgttagtgattaagcatttgtatttaaact

SEQ ID NO: 187890 - DNA, 201 bp, Homo sapiens
cccttcctcggatgtgccagcggggcaaaccgcccatctggccatgtgaatcaaaacccagaaacgttgagaggttccaggcagccttttggttacctctytttttctcaaccctgctctttttccaacccccgccctggccaccatggtacacatgctcatctggccactctgttggatgtgtttccatcagactttaca

SEQ ID NO: 187891 - DNA, 201 bp, Homo sapiens
tagaggccccaagttacaaacattcacatttcaggtggtcactacttctctgaccataactgatcactaaagccgctttgtcattaccatgtaagccaccmcaaaacaacaatttatagctcatagaaaaatctatagaagcaggctgggctcgggggctcacacctgtaatcccaggactttgagaggccaaggcgggcg

SEQ ID NO: 187892 - DNA, 201 bp, Homo sapiens
ttgacatgtaaacatgctcatttctcttccatcttaaatcagaacaaaagctccacattttcttcctgcaaccgtctctctatccattgccaagcttcttraatggagtggtctctgccgcctcaccacttacatactctccctagcctattcctctttgacttccaccccatcattccatggaaactgttcctggtgtgg

SEQ ID NO: 187893 - DNA, 201 bp, Homo sapiens
ttgaactagatccttcccattgacatgtaaacatgctcatttctcttccatcttaaatcagaacaaaagctccacattttcttcctgcaaccgtctctctrtccattgccaagcttcttaaatggagtggtctctgccgcctcaccacttacatactctccctagcctattcctctttgacttccaccccatcattccatg

SEQ ID NO: 187894 - DNA, 201 bp, Homo sapiens
gtaactgcacactagtgttagcagtatatatagctcatctaatttctacagaagccgtgaccgatgggtatagtaatgacagttttatagagggaggaaasttaacgtgattccattcaggctacacaggtgctaagtggcagagccgatatttgagtccagatgtgtttgacttaaaagccattcctagatgacagctcc

SEQ ID NO: 187895 - DNA, 201 bp, Homo sapiens
gatcttcactgtgagaagctggtgtagttgctgaagataaaactcacaaatgtgtgagggaccccgctctatgactctcagacttgtcaaacactgaaccyccagcagtttgttaattgcatttccagttgtcctaccctggcactggctctcatggaggtttctctttgtgggtttccgctccagaaagttgtgattttc

SEQ ID NO: 187896 - DNA, 201 bp, Homo sapiens
tactgtcctaattgttgtttttaaagtaattagaataaaaataatggattattctatttttttaagaagttagtcaggctgtcacattaaattaagtagtrtaggtgcaaaaccagtctttttaaactattactaccactttttccctaggtcataatttaataaaggagttcagtaatttaagttcctcatctatatcta

SEQ ID NO: 187897 - DNA, 201 bp, Homo sapiens
gagagttcttaagagactcttatcttttaagcagcatactctactcaattacccagccttttaatggagggcagatagaatagaatatgaagttagtgaaktagtattttgggctagaatgaatctaaggatttttagcttaacattataatatctttataatattaagtgaattctaaatttgatatgttgcatttcagt

SEQ ID NO: 187898 - DNA, 201 bp, Homo sapiens
ttttaaagtaattagaataaaaataatggattattctatttttttaagaagttagtcaggctgtcacattaaattaagtagtataggtgcaaaaccagtcyttttaaactattactaccactttttccctaggtcataatttaataaaggagttcagtaatttaagttcctcatctatatctaatatgtaatattttataa

SEQ ID NO: 187899 - DNA, 201 bp, Homo sapiens
tcaggctgtcacattaaattaagtagtataggtgcaaaaccagtctttttaaactattactaccactttttccctaggtcataatttaataaaggagttcrgtaatttaagttcctcatctatatctaatatgtaatattttataaggatttaagttgagtaaacatttgctctcagagcgtgaaccagtttctctttttt

SEQ ID NO: 187900 - DNA, 201 bp, Homo sapiens
ttaggtattttgctatgtgataaagatcctttggtaaaattcaggaaagctttggaccttaaaaaatcattcccttcctgatgcagtattttattagaagrtaggtgagttctgagtatttatagaatctgggttggtgttaaggcatctctgaagtctatacaaagtataagactgtatcttaacaaggactgtagaaac

SEQ ID NO: 187901 - DNA, 201 bp, Homo sapiens
tacaccatctccctctcaaacaaccagttactttactctaggacaagaatccaccatgcaaggtccctcatacaaaatcactttctttatatccctccccmcaaaaaaaaaaaaaaaaaaaaaaaatatatatatatatatatgtgtgtgtgtgtgtatatatatatatatcttttatccacactttcctcacatccctct

SEQ ID NO: 187902 - DNA, 201 bp, Homo sapiens
aaagtatttaaggaatggatgcctattaatctttcacattgtttatcaaaatgatgtgaatagtctttggtgagccatattaagattaaagctggaaagcstcctgtacggttgttttccaatttcagctttgccatctttacacaagactctcataagtgtttttgttattgttgctggattcttcttttgtttgttttt

SEQ ID NO: 187903 - DNA, 201 bp, Homo sapiens
ctcattattattattatgttatcttgatctgagatcagtgatatttaacattattattgtaattgttttaggacaccataaaccacacccatgtaagacarcaaacctaataaataaacgttttgtgttctggttgctccaacagccagccatttttctgtctcttttcctctctttgggcctccctactccctgagacac

SEQ ID NO: 187904 - DNA, 201 bp, Homo sapiens
tctgcttaggacacaagctgtactttatataatcagtttgtaaatacatttcaaagctcttcagttggtaagctgatagaattgtattactgtttagccayggaaggtaaacagttttttttaataaatttaaataaaaggaattaatttttttagatcatgaaatgctttattatttggtgtttttgatggatggccact

SEQ ID NO: 187905 - DNA, 201 bp, Homo sapiens
gttattaattaggctattttttattcaaaaatattaacttttatggaatacctttattttcccctatgaacttgagaaaaatgagtttttattagaggctrtagtataacactaactaaaatgtagtttggaaagttttattgagtttttcttccttaaccttttctttggctggctgcaaacaactagtgataatgtgtt

SEQ ID NO: 187906 - DNA, 201 bp, Homo sapiens
atggggatttttaaaattatttttttattgcggtaaaaaagcacataacataaaagataccatcttaactgtttatttttcttttctatcttagcagtttytaagtttacagtttagtagtattaagtatattcacattgttgcacagcctccaaaactttttcatcatggaaaacagaaaatctgtacccattaaacaac

SEQ ID NO: 187907 - DNA, 201 bp, Homo sapiens
ctggattaatgactagtcattatgaggtgtacttttatctttcatttaagtcaaaacttatgttgcattacatgctttacaaaaattgccacattattacrttatggtttggccataaataggagcaattttgggaaccatttattttgtgaatggttactgattttctgaatcattcaagttctacattctattaaattt

SEQ ID NO: 187908 - DNA, 201 bp, Homo sapiens
acagggtttgagttcgttgcagttgctagggacatacacctagggactgactactagggcaacctatgctgtcatgtcacattgttcataagtcttccgtsagcaaagatctgtcccaacaaatgccccatactcctttcacttccaagttattttctatcctaaacaatttttccttcctttatactggaaactccaaga

SEQ ID NO: 187909 - DNA, 201 bp, Homo sapiens
caacaaatgccccatactcctttcacttccaagttattttctatcctaaacaatttttccttcctttatactggaaactccaagatctataacattttatsataaacttgatcttattttatattatatatttgtgttcccatttcactcttctgttatcttactctaacacttaaatgctgtatgatcaaagttaactaa

SEQ ID NO: 187910 - DNA, 201 bp, Homo sapiens
aagtaaaattaaatagaatataaattagtattaatagttttgctccaaaatctcaggcagtaaagaggattatctatgatgtcatttcaaacaaatatatatacacacacacacacacacatcagaactgttcataagtatgtttttttcctctacaaatgtatagcggtcctttaatatgttctacaagtggttcatgtt

SEQ ID NO: 187911 - DNA, 201 bp, Homo sapiens
acaaacccacacattaaatacaaaggaaaaaaagtaataattgtcattaacttcttggcagaaacagtgcaaaccaggaggcagtggaatgctgtctttaragttcttaaagaaaaaactgttaatctagaattccctttcaagcaaaaatatcccttaacatatgaaagtgtagtaaagacatttgtctttcaaagactt

SEQ ID NO: 187912 - DNA, 201 bp, Homo sapiens
agttcttaaagaaaaaactgttaatctagaattccctttcaagcaaaaatatcccttaacatatgaaagtgtagtaaagacatttgtctttcaaagacttytgaaagacaaaattatcggacaaattaaacttgtgagaatttcttgttagccaacttgaacaacaccatgagaaatgataccaagttcttgaggctggag

SEQ ID NO: 187913 - DNA, 201 bp, Homo sapiens
tattatttttatgtccattttgaaagttactaaaatcaatggcatttttctggtaaacagttttttccaatttatacttaattgcctcacatataacatartttcatattggtaaattttaaatagtaaacagtaaacaaatgctgaggaaaacaaagcaagagacgaaatggaaaatgtgtaacagattttctcttataa

SEQ ID NO: 187914 - DNA, 201 bp, Homo sapiens
attgtattaggtattataagtaatctagaaatgatttaaagtatacaagaggatgtgcgtaggtcataatcaagtagataccattttatataagagacttraacatcctcagattttggtatctgcaggaggtcctggaaccaatccctcatgaataccagagaatagtattttattttttgagcaactaaaatgttgttt

SEQ ID NO: 187915 - DNA, 201 bp, Homo sapiens
ctccggctgcgtggaaatgctggccagggatctgagtccagaagactgtcccaatcacccagatgagtgtgcctttcagcatatttctgcacaggcaggaygggctgctaactgcagtgagagggcctggagttgagactgggctgcgttgggatctgctgtgtgaaggagactggccccgacttatttgctcatatcagc

SEQ ID NO: 187916 - DNA, 201 bp, Homo sapiens
ttacagaaaaaggtgaggaaaaagttaatgtctggggatgggaataaaatgagaaatggggtttagctgtctataataaaacaaatagaaaatgaagaccraagctttttctctgcttcgatttgtacttttcaatttcataatatgtttgtctaaatcagtgattatcaaaagggctctaaggtgtgcatctgagaatta

SEQ ID NO: 187917 - DNA, 201 bp, Homo sapiens
attgttagatgttttcaacctaagcttgcttatggaaaatggaaataaaacagaaagaggggaaaggctgggagaaaagagaagcaaagacctctttgaayactcagcccttcccactcaccctgtgcatagcacttcacatttttacttgactgcacaatctgtctgcttttcattggttttcagagtcctcgagtgatt

SEQ ID NO: 187918 - DNA, 201 bp, Homo sapiens
cattggtctgtgtgcctgtttttatgccagtaccatgctgttttattactgtagctttgtagtataatttaaaataactttgttttatgcttccagcttcrttcttttagctcaggattgctttatctactcagggtcttgtgtggatccatatgaaatttaggattgctttttctatttctaccaaagaatgcccttggt

SEQ ID NO: 187919 - DNA, 201 bp, Homo sapiens
atgccaggtaaatcaggcccgattaaaagtatgtcttttatagctgttaaatggttctgaaaaactaattctgaaggatttatagataatttattatttcrttttcttttgtaaaagttttggcaagtttttaatctgatattatgatgcttttggaagctaacagatgttgctctgaaagtcatatttctcacttaatta

SEQ ID NO: 187920 - DNA, 201 bp, Homo sapiens
ccaaagaatgcccttggtattttgatagggattgagttaaatctgtagattgctttgggtagtgtagacattttaacaatacttattctaattcatgagcrtgggatatctgttcattttttatgtgtgtcctctttagttgttttcatcaatgttttatatagttttccttgtagagatctttgacttctttggtcaaag

SEQ ID NO: 187921 - DNA, 201 bp, Homo sapiens
cccaaaggttttacagacgtgagccactgcgcctggcccgagtttatttcttaaaaacttatatttagtaatttttttgtggtcaaaggacatgaagttaraggatagtgtgtttagaactggctttgtaatggacttggtacgtaaaccaaaggaaaaaaaactagcctgctttctttgcctgtttctcaagaaatcggg

SEQ ID NO: 187922 - DNA, 201 bp, Homo sapiens
actaagaaagaaaatgcagccaattaaactatgatatgcattgtctctgatttctgcatttaaaaaatgaagaaatatgtttcctatagtcattgaaatayagtaagtcgttggttaggaaaggtaaggacctttctaaaggggaagaagcagagtagaggtgagagtgcatagcatgtagagcctgggttacaggctcct

SEQ ID NO: 187923 - DNA, 201 bp, Homo sapiens
tatttttagtgtatatattatagtttttagctttgtaattaccttgagtcttataaaaatattatattaattatttcaaactggtaccaacttaactttgrttgcaagataagaaacaaatgaaaagaaaaatttgtacaccttaacttcctctcctccaacattttgaatttttgattttacaacttgctgtttttatat

SEQ ID NO: 187924 - DNA, 201 bp, Homo sapiens
tagtaataaatttcctcagcttttttttttttttttttttttggcctgggaaagtctttatctggcctttatttctgaaggatagttttgctgggtacacwattcttcgttaagttttttattttctttcagcattctgaataatttcactccctccaaccctaaggttcccactgaaaattctgctgccaagtgtattgg

SEQ ID NO: 187925 - DNA, 201 bp, Homo sapiens
atagtattccatggtgtatctgtgccacattttcttaatcctgtctatcattgttggacatttgggttggttccaagtctttgctattgtgaatagtgccrcaataaacatacgtgtgcatgtgtctttatagcagcatgatttatagtcctttgagtatatactcagtaatgggatggctgggtcaaatggtatttctag

SEQ ID NO: 187926 - DNA, 201 bp, Homo sapiens
ggttggttccaagtctttgctattgtgaatagtgccacaataaacatacgtgtgcatgtgtctttatagcagcatgatttatagtcctttgagtatatacycagtaatgggatggctgggtcaaatggtatttctagttctagatccctgaggaatcgccacactgacttccacaatggttgaactagtttacagtcccac

SEQ ID NO: 187927 - DNA, 201 bp, Homo sapiens
atcttctgaaatctaggcggaagttcccaaacctcaattctcgacttctgcacaaccgcaggctcaactccatgtggaagctgccaaggcttggggcttgyaccgtctgaagccatggcccaagctgtaccttgaccccttttagccatgcctggagcggctgggatgcagggcaccaagtcctgaggatgcactcagcag

SEQ ID NO: 187928 - DNA, 201 bp, Homo sapiens
tgtatgttttgatggtacctgtgcattgctctatcatagtacttgtcatacagtatgctaattttccttgtaatatggtgttttatatgaagccaaatacygcccataccagtttgggattagttaacattctgctagggtttgcctttgtgtttcagtcagtcagatttttaaaaattaatataaattgtttaggaaata

SEQ ID NO: 187929 - DNA, 201 bp, Homo sapiens
tttgcaagtttatctcttcatcatagttccttcaagtatgcttgtcatttctgttttgaacagaaaaaaaaaatggagcaaaatcttgaagttgtaatatrgaagtttgaaccaggggtagaatactgaaacaaacatgttaaaagatggggtctaggcttcacattacgtacgtaacccttcaagggcctattctctatg

SEQ ID NO: 187930 - DNA, 201 bp, Homo sapiens
aaataggaggtcagtggctaatagagctaggcaaggaagttgaaatcacattatggaaaagtttagaatttagtaggcagtagagagacgtaatttctgartagaaaaaaatactgtcatgagattttacaaagattaatccctgctctgactggattagaagaaacagaaactgtaggccaggggtgcagggttcttcag

SEQ ID NO: 187931 - DNA, 201 bp, Homo sapiens
ggaagttgaaatcacattatggaaaagtttagaatttagtaggcagtagagagacgtaatttctgaatagaaaaaaatactgtcatgagattttacaaagrttaatccctgctctgactggattagaagaaacagaaactgtaggccaggggtgcagggttcttcaggaaagaaatataagacaagaagttaaactaaata

SEQ ID NO: 187932 - DNA, 201 bp, Homo sapiens
gaatagaaaaaaatactgtcatgagattttacaaagattaatccctgctctgactggattagaagaaacagaaactgtaggccaggggtgcagggttcttmaggaaagaaatataagacaagaagttaaactaaataaaaataagacaaggatatatatgagtgatattgtaatgtataaagaaaagtgtctcattagact

SEQ ID NO: 187933 - DNA, 201 bp, Homo sapiens
gtgctaaatgattggaacaaagaaaggagagattactctggactggaatgatcaagaaaagctatataaggatacaacttgaggtggactgtgaactctgkgtagaaacagagttagggttcgttttggaggttctaacaattgtaatatttttagtagttacaagtagagctctgtcattcccatcatctaattataatg

SEQ ID NO: 187934 - DNA, 201 bp, Homo sapiens
gtctgttgttataaatattttcaacattatgactgtttttgtcaggatgggtttttttaaagcaatgcataaaagtactataaatatacatttgttctatrtaatggccaactaaggaaacaaaagcagataaggtaaaagcacaagaaatgaggaaacagaaagaaggcaaacaggaataggcagaaggataagtactaa

SEQ ID NO: 187935 - DNA, 201 bp, Homo sapiens
tagggttttgcaatactaacttgtatttttccataaatgcttttctaatattttccataaattttccacaaatatgccttgatattttatatatatatagrattccttgactgtgtgtgacgtagtttaaaattttcctttttctaaaatttttattttctttttaatttggaagtctccattcttattaaaattaagtgc

SEQ ID NO: 187936 - DNA, 201 bp, Homo sapiens
cacataccaatagagtgagggaagaaaatttagaaacatactcatgactattttatgtaccattctttttaatgtacacttttgtgttgtatacaatataytaatacaagaaggcatgtgtatgctttctgactaaacattaaaaaatgggggaaaagtgctcacatagtttttactaatatgaatgaatgatcaaaaaac

SEQ ID NO: 187937 - DNA, 201 bp, Homo sapiens
agttctggaggctggaaagtccaagatcaaggtgctggcaggtttgggctcagtctctttgcatccaagatggtgccttgaatgccatattctctaaaggrgaggaacgttgtgtcctcacatagcagaagggtaagaaaaagggcaagcctttcttatagctgtattaatccattcatgaggctggagacacctctcatt

SEQ ID NO: 187938 - DNA, 201 bp, Homo sapiens
cacagctcctcttcttctcattgcccaaaatgtggtgaccagtgggcgtgtttcagtcctgtttgtgttacagctctttcagtcctgccatttggaaggtyctgagttcttgtccagcctttaggaagaatgaggtatgtggacagctggagggtgagcaaggcagagaggagcttcattgagcaagagaacagctctcag

SEQ ID NO: 187939 - DNA, 201 bp, Homo sapiens
gtgatcagaggtaaggtttaaagtctaccacttagacctggtttttaacttctcatcaaaataccacagtctgcattgagtgttctgatcaggcttgtttycttattattgaggtaacttactttgctctttctctgcacatttaaccatggtgttctttttattgagaaaaccaccccttttgggctcttatataaattc

SEQ ID NO: 187940 - DNA, 201 bp, Homo sapiens
ttaagtttttagattctaattgaagtctctatgccaatactttattactttttttggttcatttgcctttgagaattttcttagcatttttaatttacttyaataattgagcgattatgacaggaaatcatttcatgtaaaaaacagaccaagtattctggttcctagccagttttctttcatttagatatgatggtacta

SEQ ID NO: 187941 - DNA, 201 bp, Homo sapiens
gatgggaggtagaatatgtagcaaagttctcttaaaatgtctctgaaataaagtgatgtgagaaaccagacaaggcactttgtagtaatatcttgctttcwtaggagtttagctcagtaggaattaccagatacataagagatgctaatgatttgcagcttctagatgttatttcctctggtagtcttcatcaaattgaac

SEQ ID NO: 187942 - DNA, 201 bp, Homo sapiens
cacttaaaattatgtagtaaacattttacattagaatttgttggcaaaactttttaaatgactacaccaaagacttttatatggataaactgtaattggtygatccttctttagtctcaaatatttaggcttttgtctatttttccataccattgttataaagatatttgtgtgtaaatctttgcatttatgatttttaga

SEQ ID NO: 187943 - DNA, 201 bp, Homo sapiens
tctttcagcattttggaaggcagataaagcaagtgggtatttgtaagatgtcctaaagaagtgacttgctgtctttaggaagcaggggatctatttttggwgtatgtttgtactattcactgctttttcttggtagagaaagatactcaaccctctgttttgtggagttttgtatcttctttttattaatgcttctgttta

SEQ ID NO: 187944 - DNA, 201 bp, Homo sapiens
aagcataaacttagccatcaaagtgtatccctaataacgttttacatctttagtgaaatgttgcctctttaatctgtacctaaaccaatttcactatcttyctataatctataggcgaaaaagagcattagcttagaccatcaaaatgaaatgattcaggaactgggttcagaggcaaaacatttctcacccattttatgg

SEQ ID NO: 187945 - DNA, 201 bp, Homo sapiens
tggctaattttgcaaggcttgtacaaccctaattccaaaagatagcacaagaacagaaaagtataggtccaccacacttatcattacaagtgtgggaattytaaatcaaatttagtgaataagtccaatggtttttttttttttttttttttttttttgagtcggattctcaccctgtcacccaggctggagtgcaatggt

SEQ ID NO: 187946 - DNA, 201 bp, Homo sapiens
ccctccagccagagactcctgggaacatacacctggagtggaacaagttgggtttattcctccttgtatggaggggtaatgcacaccttgcagaactgggrgtgtcttagcaagaggatgttaggagggaattataagagctgagcttgtatgagatgatatgggggagagcttaagaaagtgggcattgtactggattgc

SEQ ID NO: 187947 - DNA, 201 bp, Homo sapiens
aagagctgagcttgtatgagatgatatgggggagagcttaagaaagtgggcattgtactggattgcttactttcaggaggcagagacaacgccatgattgrttatcttaattaaatcatctgtaaggagggaagaattgagtgaagctaatggtgtagttggtgaagaagcagtcactcttactagctggaactgggaata

SEQ ID NO: 187948 - DNA, 201 bp, Homo sapiens
ctggattgcttactttcaggaggcagagacaacgccatgattgattatcttaattaaatcatctgtaaggagggaagaattgagtgaagctaatggtgtarttggtgaagaagcagtcactcttactagctggaactgggaatatatgtttattttgtggcttggagagtgttcatattttgtccatacctgaatatgcag

SEQ ID NO: 187949 - DNA, 201 bp, Homo sapiens
tgcttactttcaggaggcagagacaacgccatgattgattatcttaattaaatcatctgtaaggagggaagaattgagtgaagctaatggtgtagttggtraagaagcagtcactcttactagctggaactgggaatatatgtttattttgtggcttggagagtgttcatattttgtccatacctgaatatgcagcggtct

SEQ ID NO: 187950 - DNA, 201 bp, Homo sapiens
atttactttttaactgtagaaaagagcttgatttgatttttttttttttttttttgagacggagtcttactctgtcaccaggctggagtgcagtggcacgrtctcggctcactgcagcctccgcctcccaggttcaagcaattctcctgcctcagcctcccgagtagctgggactacaggcgtgcaccaccatgcacagct

SEQ ID NO: 187951 - DNA, 201 bp, Homo sapiens
ctcttgaaaatttctatgtgttttctctctgaatatgtagaaattccatgtttgttctatgtagataggattaagatggaactgtgttctaaaaattgggytgttttttataaattgtccaaatttacattttcctaaaaaatatattaagaatgttagcttgcaacctcttttaaatccataatatgctgacatattatc

SEQ ID NO: 187952 - DNA, 201 bp, Homo sapiens
cactgcactccagcctgggtgacagagcgagactgtctcaaaaaaaaaaaagaagaagaagaaggtttcaagaatttagtttctaaattcaggatgtttcrcaattgagcaaagaatcatgatatttgctagtctttactgtcttgctcatgctaaatcaaattattttgactacttaaaattactgaaaagataagacat

SEQ ID NO: 187953 - DNA, 201 bp, Homo sapiens
ctatatgtttctgaaaaatgcccatcatttcaaaattgtatacattatttattttaaggttgcaggtggattattcttttgactaagtctatattataacyatatacatgtaattttacatcacagtttagtttctggtgtacctaatgctgatttctgttcccttcttatccttttacagtgacaaagatatggaaatta

SEQ ID NO: 187954 - DNA, 201 bp, Homo sapiens
acccaggctggagtgcagtggcactatctcagctcactgcaacctctgcctcccgggttcaagcaattcttgtgcctcagcctcccaagtagcttagtagrgacagggtttcactatgttggcaaggctggtcatgaactcctgacctcaagtgatccacttgctttggcctcccaatagaaaaagtaattttttttgtat

SEQ ID NO: 187955 - DNA, 201 bp, Homo sapiens
caacaaagcaaaagaagacaccaaaccgaccaacagcaaggagtaatattgaatattcaaaaataaaatctattccttgacttcaaatcattaaagtagarctgcctatttaagaacttttatttgcacagtcctattaattttaatgcctaaagcagtgttaatcgcatgacccacgtgaaaagattttaaaaattgctt

SEQ ID NO: 187956 - DNA, 201 bp, Homo sapiens
ccttccagcatttgaagctatgtcaccagtggcagtctttttgacttcatataccttccaaataagtagttttattttcaaaaagctgaatgctatagtartggtgtttatcaaatatgttaccaatatttgaagttttgataccatttcttatatgcagattgatcttcgtgtacaagctaaagctaaaccatgctaaca

SEQ ID NO: 187957 - DNA, 201 bp, Homo sapiens
cttctcattgcccaaaatgtggtgaccagtgggcgtgtttcagtcctgtttgtgttacagctctttcagtcctgccatttggaaggttctgagttcttgtscagcctttaggaagaatgaggtatgtggacagctggagggtgagcaaggcagagaggagcttcattgagcaagagaacagctctcaggagacctgaagtg

SEQ ID NO: 187958 - DNA, 201 bp, Homo sapiens
ctatagtagtggtgtttatcaaatatgttaccaatatttgaagttttgataccatttcttatatgcagattgatcttcgtgtacaagctaaagctaaaccrtgctaacaatatttaatgggtatacatcctgtatagaataaaatatttcctgaatttcattttccttttccagaattttatacatacatgctcatggaaa

SEQ ID NO: 187959 - DNA, 201 bp, Homo sapiens
tgttaccaatatttgaagttttgataccatttcttatatgcagattgatcttcgtgtacaagctaaagctaaaccatgctaacaatatttaatgggtatayatcctgtatagaataaaatatttcctgaatttcattttccttttccagaattttatacatacatgctcatggaaacacacacaagcacacctctctgtgc

SEQ ID NO: 187960 - DNA, 201 bp, Homo sapiens
attaggtatgcagtatgcattaagtctatgctatgtgttttacatatgatgtctagttaattttagtcaaatatgagcactttacatgtattttacacaayactagtgcattccttgtttaattgtgcaagtttagaagtacggtgtgtgtttgttctttcttaaaaaaattatgacgtatcatcagccagtgtagtagct

SEQ ID NO: 187961 - DNA, 201 bp, Homo sapiens
tgttttacatatgatgtctagttaattttagtcaaatatgagcactttacatgtattttacacaacactagtgcattccttgtttaattgtgcaagtttaraagtacggtgtgtgtttgttctttcttaaaaaaattatgacgtatcatcagccagtgtagtagctttattcataatttaagtgatactgtttcattttta

SEQ ID NO: 187962 - DNA, 201 bp, Homo sapiens
aagacctgtttgtaatgtttatagcaactttatttataacacctaaacaacccaaatgtctacctacgtgaatgaataaataagttgcaacatgtccatayagtgaaatactactcagtcatgaaaaggaacaaattattgatatatgcaaagatggataaatttcaaaagcattatgctaagtaaaaatagtcagatata

SEQ ID NO: 187963 - DNA, 201 bp, Homo sapiens
agacctgtttgtaatgtttatagcaactttatttataacacctaaacaacccaaatgtctacctacgtgaatgaataaataagttgcaacatgtccatacrgtgaaatactactcagtcatgaaaaggaacaaattattgatatatgcaaagatggataaatttcaaaagcattatgctaagtaaaaatagtcagatataa

SEQ ID NO: 187964 - DNA, 201 bp, Homo sapiens
gaacaggctgtggaatggcccttaaaacatccagagtctttcattcgaatgggtattcagccacctaaaggagttcttctctatgggccacctgggtgctmtaaaacaatgatagcaaaggctttggccaatgagagtggactgaattttctagctataaaggtaggatgttaaattttttaatcgctactctctcttggc

SEQ ID NO: 187965 - DNA, 201 bp, Homo sapiens
ttcttcttctgccagtttgattactgtgtgttgagagtgaaagcctgtctgacaattggttcccttcctcggatgtgccagcggggcaaaccgcccatctsgccatgtgaatcaaaacccagaaacgttgagaggttccaggcagccttttggttacctctctttttctcaaccctgctctttttccaacccccgccctgg

SEQ ID NO: 187966 - DNA, 201 bp, Homo sapiens
tcactacttctctgaccataactgatcactaaagccgctttgtcattaccatgtaagccaccacaaaacaacaatttatagctcatagaaaaatctatagmagcaggctgggctcgggggctcacacctgtaatcccaggactttgagaggccaaggcgggcggatcacaaggtcaggagatcgagaccatcctggctaat

SEQ ID NO: 187967 - DNA, 201 bp, Homo sapiens
tactagaggccccaagttacaaacattcacatttcaggtggtcactacttctctgaccataactgatcactaaagccgctttgtcattaccatgtaagccmccacaaaacaacaatttatagctcatagaaaaatctatagaagcaggctgggctcgggggctcacacctgtaatcccaggactttgagaggccaaggcgg

SEQ ID NO: 187968 - DNA, 201 bp, Homo sapiens
ccgccctaggacatacagacagctgcactccttcctctacacagaagaagtcacgttcatattgaggtccttgagtacccatgtttctcttttcattaacwctcagaagttctctaggtcatccctatctcatccaaccattagtgatctggtcaaaactctgtccaagttttctatatctcaagtttcgtagttctccaa

SEQ ID NO: 187969 - DNA, 201 bp, Homo sapiens
gactggctaattatttgtagtgtcctggttacatttccctcagttactggcagtatattgctaagtaaatgtgataggaaagtaagagtggcagaagaagrtgaccttattgactagttcttcagagcatcctttataaataaaaagaaacagagtaatgtttattgaagcaagtgttgaattcaggcagtgtttctcccg

SEQ ID NO: 187970 - DNA, 201 bp, Homo sapiens
taattcttccattatctcagtgggcaattgagtcatgtcctagcttcctcttttaggtggaaacttgacaggcctagaatgtccacagtggctcacctatrtgtctggcttatctgggactttctcctgtagcaccttcgaactcttccacatggcctttctacagcatgggcttctcacagcatggcagccgagttccaa

SEQ ID NO: 187971 - DNA, 201 bp, Homo sapiens
catctgtagatggacatttaagttgtttccacatcttggctcttgtgaatagtgctgcatgaacgtgagggtgctaatatgtctttgagatcctggttttrattcttcttgacaaatacccagaagtgggattgctggattaatatggtaattctattttaattttttgaggaacgttcttactcttttccatagcaggtg

SEQ ID NO: 187972 - DNA, 201 bp, Homo sapiens
agagcagcaccaaggggaacattctcccccatggtccaatcacctcccaccaggccccacctccaacactagggattatgatttaacatgagatttgggcrgggacccaaaccatatcatgggttattggggtattttttaaattgagttgtaggggttccttatatattttggagactaacccctaatattggatacatg

SEQ ID NO: 187973 - DNA, 201 bp, Homo sapiens
gagttttacagctttaagtcatatgtttaaatctttaatcctttttgagttgatttttgtatatgatgtaagataagggtccaatttcattgttttgtttktgggtatctagttttcccagcaccatttatttatttatttgttttgttgagtcatctctcctttttctttttttcttttctttttttaaattatacttta

SEQ ID NO: 187974 - DNA, 201 bp, Homo sapiens
gcttcctgagtagctgggactaccagcatgtgcccctgcacctggctatcaacaggaacttagaaggtggaaggagaaagaggtcaggatatgtattccckctccctccctgccctagaacctcaattctagtattggctgtatccctttataactgtatctcttgtcctttgagccttcaccccacttcttcaacagctt

SEQ ID NO: 187975 - DNA, 201 bp, Homo sapiens
ttacaacctgtctcctttttaccaccaaagttcttaaaagtctagcacacctactgcctctacttcctcactcataattcgcttctcaaaccctggcagtmtgggctttccctccctctgcacactgctaagctgacctcactatttccttctctccaattataataaccagctctaagtcctcagctttcctgacctttt

SEQ ID NO: 187976 - DNA, 201 bp, Homo sapiens
actgtgagtcaaacagaaacaagttttaattaagactatgcaagcaaagaacctgattgtatattttaacttgttgattattcgatttagtaaaacaaacsgtcattactatcagattttaaaataatccctcaccacagggtaattgtttgaatctacctatcaaggtagttaaggtatatcatccatcctcctggatat

SEQ ID NO: 187977 - DNA, 201 bp, Homo sapiens
gcagttagttgtttgcgtgttgatctttctctactttttagtgttcttaaaggtaaggaccaagtcatatgcttctgtattttcctcacagtgctttgcamaaaaaaaaaaaattgtctagtaggtgtctttttagttacttttaaagtatcttgtgggtagttaagacttttttattcaaattttatataaaatctgttt

SEQ ID NO: 187978 - DNA, 201 bp, Homo sapiens
agtatagtaacatgccttacaggtttgtagccttgctgtatagtaggccataccatctagattttcataagtagactctttgatgtttgcacaatgataaratcacataaagacacatctctcagaatgtatccctgtcattaagcaatgcatggctgtatctagaaaaagtaaaaaaaaaatttttttttttttttgaga

SEQ ID NO: 187979 - DNA, 201 bp, Homo sapiens
tgatttgcaaggcttagaaatgtaatgaagaaatagctataaaccttgtgtgctttgtgcatcaaggaatttaggtgcatgttgctttcccatttacttaytctttttaggttcttcagcgaaataatgcaaaaaacatagctcatggaattaaagaggaatacttaagcaggaaaaaaaataaagattttaaaaagaaag

SEQ ID NO: 187980 - DNA, 201 bp, Homo sapiens
ctgcactgtgcaaaaacagggagatatcagtcatatagcaaatgaaatagtacagtaattaatatttgtccactcacatagtaggtgctcaataaatgttyccaaccattatgtgccaggctctctattctctgagggagtctcagctatgaggggtgggggaggtatgcaggagagagaaagagagctccgtcacctggc

SEQ ID NO: 187981 - DNA, 201 bp, Homo sapiens
catgaaaatgtaaaagataaaatagtagagcatgacaataactatttagtctgaaaaatgatttatcattggtggatatttaaaaaatgccaactctgtgrcctttactacatgtataccttctgtggggaagggtactccctaactgaacattttgtgaattgattaatgtttaatattgatttgcaaggcttagaaatg

SEQ ID NO: 187982 - DNA, 201 bp, Homo sapiens
actgaccatcattagtagcctttgtaaaacctttaaaattctattgtgcaccatggggaacagaatatatacaggttgagtatcactaatctgaaatccasagtgctccaaaattcaaaacttttgagtaccaacataacacacaaaggaaatgctcattggagcattttggatttcaaattttcagattacaaatgttca

SEQ ID NO: 187983 - DNA, 201 bp, Homo sapiens
ccatctagatttgtgtaaggacagtctgtctacacaacagtgaaagcacctaacaatgcacttctcagaacatatccctgttgttgagcaacacatgactrtatgttactgcactgtttgtaaattttctgaagttgtgctccattccagtgcagtttttttctatgacaatacaacaaagaagctcctgttcctgtggga

SEQ ID NO: 187984 - DNA, 201 bp, Homo sapiens
atgtgtagttcctgaaatactttaatagcagaatctttcccctccatcaaataaagccgtatgtgggaagcctattatattggatctactttggtggggtscctgtcctgcatgcctcttcctcctgcccgggcatgctgcatcctgtgaggcaccttggagattccacagagcagtttaaaaactgttactgtagcaaaa

SEQ ID NO: 187985 - DNA, 201 bp, Homo sapiens
tttgtctccttggcttattaggggctagtatgcattgcaaacattgcaacagatgtttacttattatttgggtacattaagttgtgctatgtttattacaraatcagtctttgtactttacttttttggagacagggtctcacctgtcacccaagtttagtgactgagtgcagcagcatgatgatggctcactgcggtctt

SEQ ID NO: 187986 - DNA, 201 bp, Homo sapiens
ctgaaggctgagttcatggatgccacctggcactgaggtgggccttgaattcaggaccatagtggtgggtctagagcctgagaccagcctgggtctacagwggctggttcggaatttggggctgcaggtccaagcctggctcttgtgtaggcctagagcctaagtctgcagggatccatcctgggctgtgggggctgacct

SEQ ID NO: 187987 - DNA, 201 bp, Homo sapiens
aaaataatacatcttttacgtgaactttttgaagacccctcatatattaaacctcttaatattgttgttattaagggacctgtgtctctgaggatgtcatktttttttttgtcaatcttttttgtttctatgcttactttgaatggttgttctgtctccaaatttactgatttttttcttcagcttgtaagcttatttagt

SEQ ID NO: 187988 - DNA, 201 bp, Homo sapiens
tagtgtccagaattttactggaggttagtcacgttggtatactacagtgctggcgtgactgacctcagctatccagattccagtacttcccagggcaaaarcaagcattcaccataaatcacactgtcagtataaacttatctggtcagattggtacagcatggcccaaggtacatacatactgggatattgtgcctgata

SEQ ID NO: 187989 - DNA, 201 bp, Homo sapiens
ggggagagacacagagagaaggggtgggtgagcagccaaagcaggtgtccccacaattgacttgccaccaagggaatgtgggtgaatgaccaaggcaggcstccctgcggtgatcagacaccaatgaaatgtgggtgaataatcaggcaggcatccccgcagtgattaaacaccgagggaagactgtcttctcaagtctgt

SEQ ID NO: 187990 - DNA, 201 bp, Homo sapiens
ctttcagggcttccagatgagcttggaaactgatttacagagataattaagaccatttgccatgaacttccttatgtatccccatcattaacaagacatarcttggctctattattatctgctgctcctttcctacactgtcagagaaggacattttttgcctaaagttaattgttccatctagtttctgtagctcatctc

SEQ ID NO: 187991 - DNA, 201 bp, Homo sapiens
tcttttccttcttttttttttttttttttttttgagatggagttttacccttgttgcccaggctggaatgcagtggcgaggtctcagctcactgcaacctmcgcttcctgggttcaagcgattctcctgcctcagcctcccgagtagctgggactacaggcgcccactaccacacccggctaaatttttgtatttttagta

SEQ ID NO: 187992 - DNA, 201 bp, Homo sapiens
tgtgggacattatccttcatatagacctgttttcataaatctgctctgatgaattctgaaatatggaggctactgcattttcaattaaaaatcttaaaggsaatactttaagacaaaagagctaagtaattcaaacaagtattaactaatatggtagtttcatggtatcagaaattcagattacttctgtgccatccctta

SEQ ID NO: 187993 - DNA, 201 bp, Homo sapiens
acctaatttttcttctatttctttgtcctccttgactcctttacatatttattctggtctgcctagccacagaatgttgcagtttgtcaaggctgggcacrggacccatcttctctcatccacatccatggcttcagttgtcagctgtgattcagtgcctaattcagctcagatctttgctctgaccgattcaaccatcta

SEQ ID NO: 187994 - DNA, 201 bp, Homo sapiens
ttaatttctttaactgacacaggcctattcaatttgtttattcttgtgtgggttttggcagattgaagtttttaaggaatttattcatttcatctaggttwtcaaattttgggccataggatgtcttagttttttaaaattatccttttaatatatatagatctgtagtgatgtgtcctctgtcatatctgatattaggaa

SEQ ID NO: 187995 - DNA, 201 bp, Homo sapiens
gtggtgcaatcatagctcattgcaacctcaaactcctgggctcaaaccatcccccacctcagtctcccaagtagcagggactataggtgcaggccacagtkcccagctaatatatatatttttttaatttatgtagatatgaggtctctctatgttgctgaggctggtttcaaactcctggcctcaagcagtcctttcacc

SEQ ID NO: 187996 - DNA, 201 bp, Homo sapiens
tttattatttctttcgttctgcttactttagcttgctcttctagttgcttaaggtgaaagcttagtattgattttagatcttctctaatatatactctcartactataagttttgctttaagtactgctttctctgcattgacaaattttgataagttctattttctttgtatatttatagacaatagaactttgataagt

SEQ ID NO: 187997 - DNA, 201 bp, Homo sapiens
tgaggctggtttcaaactcctggcctcaagcagtcctttcacctcagcttcccaaagtactgagatgacaggcgtgagacacgatgccaggttcagttctrtcagttttgataaatgcatagaattgggtaaccaccaacacaatcacaatgcaaaacaatttatttactccaaaaatttattcttgcagccaccactggt

SEQ ID NO: 187998 - DNA, 201 bp, Homo sapiens
cactggtgggatgtcttctttccaccactgacccctggcaactactgatctgtcctgtagttttgcccatttcccaaatgtcatataaatgtaatcatgcmcatgtcatctttgagtataacctcttttatttcacatgttttcgagattcgtctgtgttactgtatcagtagtttgttccttttttattattgggtatta

SEQ ID NO: 187999 - DNA, 201 bp, Homo sapiens
tgaaagttttgaaccttctctatagaaaaatatataatatgtatacatgggtgtatgttttcataagtttcaatgtattcttagatccatctagatatccrtagactctcagttaagaatctttactatgtggccaacaaacacacaaaattagtgaaataccaattgaaatagtatctagttcatgtaacaaagattgct

SEQ ID NO: 188000 - DNA, 201 bp, Homo sapiens
caccagttcttatgggaactaagagtgaaaacttactcactcctggagaatggcaccaagccattcatgagggatctgctgccacaatccagacagctctyacctaggccctacctccaatattggggatcaaatttcagtgagatttggcaggaccaaacaaaccatatccaaactatagcaagacagaaaggtaaataa

SEQ ID NO: 188001 - DNA, 201 bp, Homo sapiens
agagaatgagagccaagtgaaaggggaaaccccttataaaaccgtcagatcgggctgggcgccgtggctcacgcctgtaatcccagcactttggcaggccraggtgggcgaatcatttgaggtcaggagtttgagactagcctggcccacatggtgaaacgctgtctctactaaaaatatagaaattagctgggcgtggtg

SEQ ID NO: 188002 - DNA, 201 bp, Homo sapiens
ttttctgtgggatacttattaaattaaggttgagccatttttaaaaaacgtattttctctgtgaggaaaagcaaatctgtcttaatgagttacatgaaatkatatgaagttatatgaaatctaagggatttgaaaatttcaaaaagatttaaaggaaatacatcagaattttggttgcatttcagttaacagatttattta

SEQ ID NO: 188003 - DNA, 201 bp, Homo sapiens
tctgtgggatacttattaaattaaggttgagccatttttaaaaaacgtattttctctgtgaggaaaagcaaatctgtcttaatgagttacatgaaatgatwtgaagttatatgaaatctaagggatttgaaaatttcaaaaagatttaaaggaaatacatcagaattttggttgcatttcagttaacagatttatttatct

SEQ ID NO: 188004 - DNA, 201 bp, Homo sapiens
tgataaaataaaacaaaagcatgaatacttgacatatttctctcatcactaagacaacatgccagttagtcaattaaaaaacaaaaataaatgtatcaaamcacgtggtattatgtggagaagacttgatcccaaatgttcccttttctcgaagttatttgctgttgtccatactatccacgctatccaagtttacctgga

SEQ ID NO: 188005 - DNA, 201 bp, Homo sapiens
ttccattggaacatttgttgatgtgtgtggggggtttaaattccacaaatattattaaaatgagcaatcagcagcaagatgttttaaaatattttgtttcmgcatgtaaaatctcgttttattacagaattattttgttaaaggcacagctatgccaggttgctgccagagtgataggatcataacagcccagttaatttt

SEQ ID NO: 188006 - DNA, 201 bp, Homo sapiens
aaaagcaatataattctattacatatttatcttaacaagtaacattttaaaagtccatgtaatttatagatttatttgctttctctaacaagtaatgcttytaataaaaatctgggcctggtggggtggctcatgcctgttatcccagcattttgggaggctgaggtggacgcatcacaagatcaggagttccagaccagc

SEQ ID NO: 188007 - DNA, 201 bp, Homo sapiens
tggtctcaaactcgtaggctcaagcaatcttcctccctcagcctcccaaagtgctagaactacaggcgtgagccactgcacctggcctgagatgtcttttrtacaccagattttgaagactattcaaaaacaatgtaaaatatttttaaacaattgttaacattgatttttaaatgatgatattctggaatattggattga

SEQ ID NO: 188008 - DNA, 201 bp, Homo sapiens
gatgatattctggaatattggattgaatatattacatttgttttacttttttaaaaacctttaaaatatagtttcttaaaaaatgtaaaaatggccaggcrcagtggctcacacttgtaatcctagcactttgggagaccgaggtgagcagatcacctgaagtcaggagttcgagaccagcctggccaacatggtgaaacc

SEQ ID NO: 188009 - DNA, 201 bp, Homo sapiens
attcagtgcagtgttggagataggattacagtgtagatgcaacaaaattggtcatgagttggtcattgttaaagctgggtagcaggcgagtgatttcactstatactgttctctgtactgttgtatgtgtttgaattttctatcgttaaaaaatattaagaagaaaacaaatagcattatcttttccctaagtgttcacaa

SEQ ID NO: 188010 - DNA, 201 bp, Homo sapiens
cagcctggccaacatggtgaaaccccgtctctactaaaaatacaaaaaaattagacaggcatagtggcacgtgcttgtaatcccagctactcaggaggctraggcaggagaatcatttgaacccgggaggcggaggttgcagtgagccaaaattgcgccactgcattccagcctgagcaacaagaacaaaaactccatctc

SEQ ID NO: 188011 - DNA, 201 bp, Homo sapiens
aaaaaaaatcaaacctgaaactccccaagcctctagatcttaatacaagttaataagaaatacaggaggcaggagatgttaaataacaccagagggatgcrggaagcaaaataaggaatatgggagactggataggatatataattctgtttcttgaacataaattttaagggaaaagagaaagagaaatcccttagatat

SEQ ID NO: 188012 - DNA, 201 bp, Homo sapiens
aggatagcatcattttgcagcccttcatgaatcaaaagacctggacaatcataagtggctactaacacatgaaaagaagagcagccatacattatgtgcawctcagcaatacctatgaagtacttgttcaaaaaaaaaaaaaatcaaacctgaaactccccaagcctctagatcttaatacaagttaataagaaatacagg

SEQ ID NO: 188013 - DNA, 201 bp, Homo sapiens
acacccactcccaccgtaatggcattaatccattcctgaggattaatgttgttacggtctcatggcctaatcgcctcccagtggtcctacctcttaatacmataaaaatatcaattaaatttcaacatgagttgtggaagggacattcaaaccattgcagttattttagagctttagttcagaaatacaaatgcaataact

SEQ ID NO: 188014 - DNA, 201 bp, Homo sapiens
aaggatcctgagcagaacaaagtcccacaacctatgtgcacgaatatggcagccgctactacagctcaggcctagggcaagagggaagggacactatgcaracaaggcagtgccctcaagaagtccccaaatcgcaatccactcctgtacttgtgcttacaagggcagagacactctgcctgagttcagatgccagcagtc

SEQ ID NO: 188015 - DNA, 201 bp, Homo sapiens
tgacattcatgtagagagggattgtgaacctaccccaaagtgctccagaaaggccatccataggtgcaccccagccaagctcctgtggaggagtcccagcsacgtctgcagtgataggcaaagggtagaagtccccttctccaggtcccttcacgagcactggggctgcccaactgctggggtagaatgacagtctttcta

SEQ ID NO: 188016 - DNA, 201 bp, Homo sapiens
ttttaaaaccatcatatctcatgagactcattcactatcacaagaacagtgcaggaaagacccacccccataattcaatcacctcccaccgggttcctccyacaacacaagggaactgtgggagttaaaaatcaagatgagatttgggtggggacacagcctcaatgatccatctactgctgttggtggagcgtttaagtc

SEQ ID NO: 188017 - DNA, 201 bp, Homo sapiens
aaatcttttgtttttgcgccttgatgtggttgccttttagccaaatgcttctcaagctctctgtggtgaagactttaaaatttataataggtcacagatcrgcacttttctaaaatacagtaaaaatgattttctagaaaaataaggaaaaatttttattaaacagatgtgaaattactctgtaaatttcaataaaagctt

SEQ ID NO: 188018 - DNA, 201 bp, Homo sapiens
aggtgttgttaactggcctgaattctggaccccctttttcagccaaaagttgaaatcactagtggtgtgtgttcgtataaggaagacgacttctgttactmtctttacgtattcttggtaatacaaaagaaaaagatctggtgaccataatgtggggcagaagtagaaacataacttaatcctctagagccagatagatgt

SEQ ID NO: 188019 - DNA, 201 bp, Homo sapiens
tttgaaaatatttacgatacctgtttttaagatcttgtttgccaattttatcacttcttttatttctatatctatttgtattgaactttttttctccaatrtttttatatttggatcaagtttttgtttatttctttaagatctctaaactttacagaaaatttgcaagaacagtcacaaacatttttttcttcaaccatt

SEQ ID NO: 188020 - DNA, 201 bp, Homo sapiens
caatcttccttaggttttctttagtatttttacagtttcagttcttacatttaagtatttgatccatcttgagttctttttttatacagtgagagacaagrgtccaatttcattctcctgtgtatggcaatacaattttcccagcaccatttattgaaaaaggtgtcccttctccagtgtacgtttttgtcataaaagatt

SEQ ID NO: 188021 - DNA, 201 bp, Homo sapiens
tgatatatgatgatatgttaggcttatttattgagtcaatgcttcacacctgttctgtgtcacaacacctcccttagaggataaggttttttttttttttwaaaaagcgattctttcttgtaatgccacaggcattataaatctctcaattgaaaaatactgaattaaatttgcttcttatttaaaactacttaagggtaa

SEQ ID NO: 188022 - DNA, 201 bp, Homo sapiens
tgtctcaaaaaaaaaaaaaaaaaaaaaaaggagttccattccaagagggccaaataggaacagctctggtctgcagctcccagcatgatcgacacagaagwtgggtgatttctgcgtttccaactggggtgactagttcatctcattgggactggttggacagtgggtgcagcccacggagagtgaactgaaatagggtgg

SEQ ID NO: 188023 - DNA, 201 bp, Homo sapiens
tgtgagggggttctagagcccagttgaaaaaaagtgggagtaagtgattggtgtcgcatgctgctgatagattaaatagattgagaactgaggattgaccrtaggattagtgaccttgacagagcaattcagtgggggagtgttcagaagtgtcatttcaatgggtttaaatgagaatgggaagagaggaaatagaaaatg

SEQ ID NO: 188024 - DNA, 201 bp, Homo sapiens
atcattgttactcttgggttacaacctgtctcctttttaccaccaaagttcttaaaagtctagcacacctactgcctctacttcctcactcataattcgcytctcaaaccctggcagtatgggctttccctccctctgcacactgctaagctgacctcactatttccttctctccaattataataaccagctctaagtcct

SEQ ID NO: 188025 - DNA, 201 bp, Homo sapiens
atttgatttatacattatttaatttcctcctgaaaattggaagcaggactttcaggaatagaagtcagtatttttcatttgttttagaatacttctaggtstaatataatcatcagtggtagatgtcagcatgattagggggtgacttaaggtaaagcaaataaaatgtgaatacaaaggaaaattatttgacaatggaga

SEQ ID NO: 188026 - DNA, 201 bp, Homo sapiens
accgacacacatattcttcctatcatctctttctccttccttcccttcttctcttcctcttcacacacacatacctcattttgaatttggcaattatgatyacttacagtaaaggtaagcggaaatacattttaattttcctttgtcatttctctcctccctgtctgctttccctttcctctactgcctttatatagaatg

SEQ ID NO: 188027 - DNA, 201 bp, Homo sapiens
attatgaagattggaaataatatatagggtacttagtaaataatagctattggtgttattctaccactactttttttaaattaataaactgtgtactaccrccattttaattaataaagttcggttcctttacaaataaacattagttttctatccctgctgtaacaaattgccatacacatagtagcttaaaacaacaaa

SEQ ID NO: 188028 - DNA, 201 bp, Homo sapiens
agtataatatatagaaagtctgatccctctttttaaataatatatagaaatccaaactttatcagtgtaaacatactgagtttgaggtgtctatagatcakcttaatggagatgtcatacagattagttttcatttttaaatttctccctatttcattgaaaatatgattcactatataaaattgtaattaatatagatat

SEQ ID NO: 188029 - DNA, 201 bp, Homo sapiens
ctacgttaacattgggttttactgtacattatgcgtagtataatatatagaaagtctgatccctctttttaaataatatatagaaatccaaactttatcartgtaaacatactgagtttgaggtgtctatagatcatcttaatggagatgtcatacagattagttttcatttttaaatttctccctatttcattgaaaata

SEQ ID NO: 188030 - DNA, 201 bp, Homo sapiens
ggagaatgttttcagagcttatagtaacagtttaatgaacaataaaaagcagaagggacaggagacaatatgttgagtaccggctgtatacagaagctttktatatattgcatgtatgtatacacacacacacatttacccttttctttttaaacagatgaaatagtctgaggagaacttgcctaatattttatgaggtag

SEQ ID NO: 188031 - DNA, 201 bp, Homo sapiens
atttaagaagatttgaaatatagttactatagagcagtgattcctaacccctttttggttttggatcctttttagactataatgaaagttttgaaccttckctatagaaaaatatataatatgtatacatgggtgtatgttttcataagtttcaatgtattcttagatccatctagatatccatagactctcagttaagaa

SEQ ID NO: 188032 - DNA, 201 bp, Homo sapiens
atgaacaataaaaagcagaagggacaggagacaatatgttgagtaccggctgtatacagaagctttttatatattgcatgtatgtatacacacacacacakttacccttttctttttaaacagatgaaatagtctgaggagaacttgcctaatattttatgaggtagttaatagtactgttgagattaaactggattattc

SEQ ID NO: 188033 - DNA, 201 bp, Homo sapiens
ggctttccatccctagcagttcagccctaatatacagcagatgtcacaactgatttcacatatttggagaaataggagtagctgagacagaatttagtctrccttgctcagagacattcacagatagtgtgaaaaccactcatgagtcccctttgcttaaagttaccctggtcatgtttattacagcatgtaaaggtacat

SEQ ID NO: 188034 - DNA, 201 bp, Homo sapiens
  misc_feature (1)...(201): n = A,T,C or G
caaatgatattttcatggctatatgtttctgaaaaatgcccatcatttcaaaattgtatacattatttattttaaggttgcaggtggattattcttttgantaagtctatattataaccatatacatgtaattttacatcacagtttagtttctggtgtacctaatgctgatttctgttcccttcttatccttttacagtg

SEQ ID NO: 188035 - DNA, 201 bp, Homo sapiens
ggaagtaatgtgctgggcacatgaacagtctcaccattaagtttttatctaatgtgtttatccttaggatgaggccaaggacaaagtacaaccatcaaagratcccttccaaacctatctttacccattagttaaccccatctagacaggattgtaatttctaagtattcacatgatcccaggtaaatcaacatcaaaacc

SEQ ID NO: 188036 - DNA, 201 bp, Homo sapiens
tggacaggtctgcaggatgtgcagtggcttgggctctgctcttagcttcagaggggagtgatgttgcgtggagctgaactgaacttcctctggtctcccaraagcaagtgcaagcaccagctctgatgagggtggcaggggagcgacatagactctgtaagatttctttggttttaaatagccctagtgtggctcagtgag

SEQ ID NO: 188037 - DNA, 201 bp, Homo sapiens
gaggaaatagaaaatggaaaatgaagagagctcttccaaggagagttgctaatgggaatgaaagcagatatggagacaaggaagggactagattacatctrtaaggtgagaaattacaacgtgtttttatggtggtggtaaagcttgactcaggtaaaaggaaatggaaccccatgcataaatagaaggattgatcttggc

SEQ ID NO: 188038 - DNA, 201 bp, Homo sapiens
ccagcctggtcttaaactcctggcctcaagcaatcctcctatctcagcctcctaaagtgttgggattacaggcctgagccactgtgtctggcctctgtagwtattttaatatgagcagctgcctcatctccccaaacacagattctctagggcagagatcagttcttgtacttcttaaagtctggcaaaacagctgtctca

SEQ ID NO: 188039 - DNA, 201 bp, Homo sapiens
ctgttgggaaagacagacagtaaacaaacacacaaatacacaataaagaagaatgggtagaagtgacaggtttaagagagatttaagtagtgttagccagrtctatgcattagttggatttagaggaagaaatagatacctagaataaatccaaggtttctttgagataattcagagccgttaccaaagatccacctttct

SEQ ID NO: 188040 - DNA, 201 bp, Homo sapiens
caacataaaattaatactggcagacttgaggcacaatagtactggtgatgctgtgagtgagtggtagagaaggagtggtctcttgagcccattgatgaagsctggcggtctggggaagtgaatctaagtccaagtgtacagaattcatacttaacctctttggaaaagggcagactcctccacatcagagctactccttga

SEQ ID NO: 188041 - DNA, 201 bp, Homo sapiens
ggactctgttcagacatgttttaacaagttagtatgaatttattttggtgcaaaaataactgaaatccatgcataatttttaaaataatacatcttttacrtgaactttttgaagacccctcatatattaaacctcttaatattgttgttattaagggacctgtgtctctgaggatgtcatgtttttttttgtcaatcttt

SEQ ID NO: 188042 - DNA, 201 bp, Homo sapiens
tttgtaaactgctatctcattagggcattgtctcatgaacttttcataaagcatcaatagttttaccatttttctatccaagcttcaccataaatttgctkcttcttgcttcaattttaacaaaattcatgtggctctgacaaactgttttcaaactggtatcttacccttagtgcctcaaactggactctgttcagacat

SEQ ID NO: 188043 - DNA, 201 bp, Homo sapiens
gaaatccctcatcttctgcgttgctcacgctgggagctgtagaccggagctgttcctattcagccatcttggctcctccccactattttgaatgttttctrtgttatcttttgagataatctagtgtttcttagtctgtcaatatgaattatattaattgattttcaatgtttgaatcagtcttgtagtcctggaatgaac

SEQ ID NO: 188044 - DNA, 201 bp, Homo sapiens
agatttctttaacagcggttataatagctaacatttattgaatacttaagtggcatgcagtgtcttgaatgcttatgttaaattatatatcttcccaatarcaaccacatgtatctgattatcaaagaattttcctcttgattacttttgtcattcagatatttattaattcttccattatctcagtgggcaattgagtca

SEQ ID NO: 188045 - DNA, 201 bp, Homo sapiens
agagcaaccccaagacacataattctcagattcaccaaggttgaaatgaaggaaaaaatgttaagggtagcctgagagaaaggtcagattacccactaacrgaagcccatcagactaacagcggctctctcgggcagaaatcatacaagccagaagagagtgggggtcaagattcaacattcttaaaagaattttcaaccc

SEQ ID NO: 188046 - DNA, 201 bp, Homo sapiens
ataatccattctctttgtgtatgtatgtatgtaatgaaaatagccaccgtgagctcagtaaacccctccttactaaatgtacacaaaagtccattttcagrtgtttgttatttgtgaaacttggttatgtacaatatcatgaacatataaacttcccccttcatgctcatttgctgtttaccaatatgattccccttgaga

SEQ ID NO: 188047 - DNA, 201 bp, Homo sapiens
cagaagctctaaaatagaaggctcaattgttccttaattgaaaatgtaaaacattcaggtagaaataaaaaataaatggaagaattggatgatcaagttgmaagtctcccagaaagtcaaacaaaaagacaaagagatgagaattgtagacatggtaacatctgactaatagaggtctcagaaggaacaaagaaatcagaa

SEQ ID NO: 188048 - DNA, 201 bp, Homo sapiens; identical to SEQ ID NO: 32633

SEQ ID NO: 188049 - DNA, 201 bp, Homo sapiens
acaaggtgtcttatttttgtcttctccacctttatctccctcacaatgcctagcatagcaccttatatagagttattgtcattaaataaacaaatggagaytttacatctcaaatatataaactactttctgtaactttaacatttacctcatgagcccttggataaaaataaattgggactattaaagatgtcttttgta

SEQ ID NO: 188050 - DNA, 201 bp, Homo sapiens
atacaagctttacatctgtacaaggtgtcttatttttgtcttctccacctttatctccctcacaatgcctagcatagcaccttatatagagttattgtcaytaaataaacaaatggagactttacatctcaaatatataaactactttctgtaactttaacatttacctcatgagcccttggataaaaataaattgggact

SEQ ID NO: 188051 - DNA, 201 bp, Homo sapiens
ggggacactgcagtgacagggaggagccgattgggacaggcccttcctgggagcaggcatgcaactcatgatgtggcagtcaggagcaaaaaaaacacctycttttctttaaaatgtaaaaatttgcttactatagtggtttttttattgcaatcttatgaatgtagctctagaagatctttttaaagcaattcattagag

SEQ ID NO: 188052 - DNA, 201 bp, Homo sapiens
ttggtctgaataggtaggcagttcacacagttgttttaggaaaattattatttctttaaaagtcttaaagttaataaacaggagatttaggagacgttaaktaatgcttaagataaaaggtttcatttctctctctctgtttctctgtcttcacacagaaccttctacatggtgtgtgtttaacaagcacttgataaactg

SEQ ID NO: 188053 - DNA, 201 bp, Homo sapiens
ttgttttggtctgaataggtaggcagttcacacagttgttttaggaaaattattatttctttaaaagtcttaaagttaataaacaggagatttaggagackttaattaatgcttaagataaaaggtttcatttctctctctctgtttctctgtcttcacacagaaccttctacatggtgtgtgtttaacaagcacttgata

SEQ ID NO: 188054 - DNA, 201 bp, Homo sapiens
ggcgtgagccaccatacctgtccttaaaccatattttagtagttatttaaggaagttacaaaaaaaattccttttgatataatgagtgcaaattatttgcrcatttttgaaaagagaatagtcatcttttattcacctgataattgctgagaagggcaaacctcccataagtactgcttttctattttttttttttttttt

SEQ ID NO: 188055 - DNA, 201 bp, Homo sapiens
aggtaccttttgaagagaaattttgttttgatttttgtaaagaccagtttgtccatgtttttcttttatacttctagaagttttatagttttagctcatamatttcaagtttatttttcagtatggtgtgaggtaagggtcaatgttcatttttttcatatggatttctagtattcacagtaccatttcttaagataattt

SEQ ID NO: 188056 - DNA, 201 bp, Homo sapiens
gggtgagaaatgctatacttgaacttggacttttttctttgatgtgcaattaaatgattagaaaataggaagttaaggtatttgcagttaaaatgatcacrttagccatgatgtagataaagcaaggaaaaagaaggaaagaataagactgcaggcagaaaaacaactagcacagcagttatgatattctagacaaatgat

SEQ ID NO: 188057 - DNA, 201 bp, Homo sapiens
taattagttgcatagccttttattaattccctcaaaatttataatgttttaaattaacaacatagataagcatactgcattttttgggaaaacatgaaatrttaattatgtagcagtgacataagtttcgtaaactctgttgaatgttagaagatgcttacaacaatgttttccaaatatagggatttattataaacttat

SEQ ID NO: 188058 - DNA, 201 bp, Homo sapiens
caagcatgtttcttctatctattaggaaagggttatgaattgagcatttcagaggctatggtaagaagcagggagagaagggggcaagtagagaattgctraatatcaattctttttaaatattgagatttagaaataaaaatcaagaatctgtattttgacttgacttttcaatctattattctaacctcgtagctcatt

SEQ ID NO: 188059 - DNA, 201 bp, Homo sapiens
aggccttgataaggtagcataacagaacaggaagaattaaaactcatatttaaataattattttgttattacagcacttaaatctgtctagtagcaatacygaatctaataattgtaactttttctgagatggaaaattttatctcttgtccagtgttctgagatatttttagctcatttgtccctccacccccaactagc

SEQ ID NO: 188060 - DNA, 201 bp, Homo sapiens
gatttaatatatacaggaatgttctgggcctctgtaagagctgatccctctatcaggtttctgtgcagacaagcatgtttcttctatctattaggaaaggkttatgaattgagcatttcagaggctatggtaagaagcagggagagaagggggcaagtagagaattgctaaatatcaattctttttaaatattgagattta

SEQ ID NO: 188061 - DNA, 201 bp, Homo sapiens
tacgtatatttatgcatttctctggtagaagcttgtttggattttggcaatttttctgatatgaagtgttcttgattatcctagtataaaagatagggaamtctggcagaatcctttgctttgctaaagtagtgattttcactgaatctgaatcagtaaaaatcttgcctgtcagtaagaatatgcagactagagatatgg

SEQ ID NO: 188062 - DNA, 201 bp, Homo sapiens
ttccaaaaaagttttatgtatgggttaggtaaatgtttctggttttatctcattaaatgattggcttttagtatcagcatgaatcaagtataatttgactyacctcatccttaaattcttacttaatttggtaattattgtgtattttatcattttctactagtgtcttagcctgttgatcaaagcttgctgcagttagtt

SEQ ID NO: 188063 - DNA, 201 bp, Homo sapiens
tgtgtgtgcttacttgcgtgcgtgtgtgtgtgtgtgtgtgtgtatcactactactaatactaacataaatatatatatcattactacccacttagctataytctaaagttaaaagatctcaaaatacttcttgtgaaaaggtttactaagcccaaagttctaagagaaaaattatgaaaattggtttcctttgtttaacag

SEQ ID NO: 188064 - DNA, 201 bp, Homo sapiens
taaggttacacctactgtaccaataatgattttgtttttaaaaatacaaataaaaatctcccttccttggctttttggaaacagtttctttcccccgtaarttatattgcccatggtttcataaatacacatctcaaatgggttacttatgtaaagggtgtgtgtgcttacttgcgtgcgtgtgtgtgtgtgtgtgtgtgt

SEQ ID NO: 188065 - DNA, 201 bp, Homo sapiens
gagatctgaaggaaacaatatcttaagcataccctctaatccattcccagtacaaccactgggaaagtctgccctacatgtgaccacagtaaaccttttcrcctcccaggaatggtttgtgcactgcttttcttctttgcttataatattcattctgccttttcacagtttctcaatctggtaaatttcccctccttgtca

SEQ ID NO: 188066 - DNA, 201 bp, Homo sapiens
tcttgattatcctagtataaaagatagggaaatctggcagaatcctttgctttgctaaagtagtgattttcactgaatctgaatcagtaaaaatcttgccygtcagtaagaatatgcagactagagatatggcttgtttttgggtagcctccttgacagattttctttctttttgagacggagtcttacgctttttgccca

SEQ ID NO: 188067 - DNA, 201 bp, Homo sapiens
gaccaaactccttggcattacataccatatgtaatgtaattatacctgtggattttttttctcaatctaccttcatgtccccatgtttctaagcatcctcwaccagtgcttcccaaaatttttcatgacatgtcacacatggaataataaccagatgataccactgtctgactgcctgaagtctctggcttctctgagctt

SEQ ID NO: 188068 - DNA, 201 bp, Homo sapiens
aaatgaggtaagcactcagtgaggaaataatgggtattggttcacactcattgagtacttggattatgtcaaccactgtttgaagcaccttgtatgtactracacatttcttcctcacagcagctctctgaggttctctttattttgtagttgaggaaacttatgtcagattaaggaaatttcccaagatcacacaggtaa

SEQ ID NO: 188069 - DNA, 201 bp, Homo sapiens
ttgcacagtgctacaggtttttgcagaactgagcaagcccaacattagacagatagcctaaagactgattgatttatttgttttaatacaaatatacgctmacatgttgacatacagaaatctgtttcaaatgaattattttttaaagaacaaagaactttataaccctagtacctaatcctatgcctgacacatagtaga

SEQ ID NO: 188070 - DNA, 201 bp, Homo sapiens
tttttattctctgtagtatctttttgaggaacagaaagtttataattatatatttattataatatatattgatataaaggatccagttcatcagtcttttycttcgtggctggtgatttttgtagctagcttaagaaatcttggtcaaatctactgttaggtatattttctcttaccttcttgatgcttttattgtttttc

SEQ ID NO: 188071 - DNA, 201 bp, Homo sapiens
tatggagagggggagtatttttagaaagaatctctttttatgtgtttgttcctgtccaaacttattttctctcaggtggttgtactcattactacttcttygtcaaagaaaactgactctttctcaagtatataggtttcttaatcttagtaatttattttgaaagaagttcacgtcggatttttcaggtcaactaaagaa

SEQ ID NO: 188072 - DNA, 201 bp, Homo sapiens
tttacaagaggaagaatttggattagtgctggatacatactgttttgacttgtaaaatgactctttaatagaaatggacaaagaaaatatgctaataaaayaacttaagtatgtgtatgtgtgtgcatgctaaatttttttttcttctgttctcttcattttgtgctcatcatcaattgctgctatttactgtggtgcatt

SEQ ID NO: 188073 - DNA, 201 bp, Homo sapiens
actcattactacttctttgtcaaagaaaactgactctttctcaagtatataggtttcttaatcttagtaatttattttgaaagaagttcacgtcggatttktcaggtcaactaaagaaaaggaaaggcaaaacagaatctaaaacatttagatgtattgttgacatttttaatgagtgagcatttacaggtgtgtatgcaa

SEQ ID NO: 188074 - DNA, 201 bp, Homo sapiens
atgtcttttgcactctattctgtttccattcttttttttttttttttgtcactttgtgtattcatttggatgctttctagtaaccagtcttccattttaaraatcctctgttctgttttcactaatctcccattaagactatcttttgagttcttaatttttattatagtttttaggtttaggatttccctttgatggttt

SEQ ID NO: 188075 - DNA, 201 bp, Homo sapiens
tctagtaaccagtcttccattttaagaatcctctgttctgttttcactaatctcccattaagactatcttttgagttcttaatttttattatagtttttargtttaggatttccctttgatggttttctaatggattccaagtccctggtgaaattcaactttttaaaaattttgctgtagttcatgtggatttttgtttt

SEQ ID NO: 188076 - DNA, 201 bp, Homo sapiens
ttttatttttttaatccatctgctgttgtcattgtttaaattcaagtacttaatacatttatatttagggtaatatcttaaaatacttaggtttaatgtasttccttatttgccccacttgtatgttttttttcctgttttttttttcattcttttggaataggcaagtatttttattatttcatcctcttcccattgtct

SEQ ID NO: 188077 - DNA, 201 bp, Homo sapiens
ttgcttgagcctgggaggtggagattgcagtgagctgggatcgcgccactgcactccagcctgggtgacagagtgagactgtgtctcaaagaaaaaaaaaagttaccaataagatattttgcatcctttttttcaagctaagtcttcaaaatcaatgtgtatgttacacttgtagcacatcacagtttggactagccccat

SEQ ID NO: 188078 - DNA, 201 bp, Homo sapiens
atccttttgtaagttcttttgtctaaagtttgttaagaggaaagccaaagattattttgttgtatactaaaagctgtaaatattattaatttatgtcctakacttccctatggaaaagggaaactcagtattaccatgaacaggatccattctttatatgagtagttagaagctaattgtaggttattgagatttaattta

SEQ ID NO: 188079 - DNA, 201 bp, Homo sapiens
cttttcgttttcttaaaggtaccttttgaagagaaattttgttttgatttttgtaaagaccagtttgtccatgtttttcttttatacttctagaagttttrtagttttagctcataaatttcaagtttatttttcagtatggtgtgaggtaagggtcaatgttcatttttttcatatggatttctagtattcacagtacca

SEQ ID NO: 188080 - DNA, 201 bp, Homo sapiens
ctgataactaatgatgttaagtatcttttcacatacttacctcacaaaggaagctgtgtggttagcaagtatgttcaaatttttagtccagttactttggrttattttcttattattgaattatgaggattctttatatattttggatacaagccctttgcaaatatgcatattgtgaatattttatcccagtctgtgacc

SEQ ID NO: 188081 - DNA, 201 bp, Homo sapiens
atctttatttcctaagtcctgtatttgttttaggtagaaagaagtgatttccatgattgaaatggagttttgaattctttgataaaatacattttaaggtrtacagaattgtctgcaaagaattaaaacactcatttttaagcaagggaaatatatttattttatgattttcctaattgaatttttgccagctaatttgta

SEQ ID NO: 188082 - DNA, 201 bp, Homo sapiens
gctacagctaaaaaaaataaataaataagcacacacagatgtatgctgagtgttccagtgacttagctgacatgtatgctgtatatcctttgctgtgttcyttcaactattagaaaggaaattttaaaatagcctagaatttattattccaatagggtgaaaaggacaacttcaactttaaaaaaataaccaagctctcca

SEQ ID NO: 188083 - DNA, 201 bp, Homo sapiens
atgcacataggcacctgtaattaaagagccgccttcattttcacacatgaggaaactgaggctgttacagatgtagagacttgcccaaggtcttgaataasttctcagaaagggagtttgttctatgatttgtgttttttaataaagttttaatggacagaccacgatatccaacatggccttggagccatagggttcaga

SEQ ID NO: 188084 - DNA, 201 bp, Homo sapiens
catttaaaaggtcatccaatacgataatttttagtctggagcacacaagcagagttcaggtgaactccctggaattatttgcaaaattgggagtatttttygtatgtatagtttgaggggaatttctgtcaaatgcacataggcacctgtaattaaagagccgccttcattttcacacatgaggaaactgaggctgttaca

SEQ ID NO: 188085 - DNA, 201 bp, Homo sapiens
acagtaatgactatgcagtgtaagctgtggatattttgttatataagaatggcagggggtcctagaactgggggctggaaggcccatttaaaaggtcatcyaatacgataatttttagtctggagcacacaagcagagttcaggtgaactccctggaattatttgcaaaattgggagtattttttgtatgtatagtttgag

SEQ ID NO: 188086 - DNA, 201 bp, Homo sapiens
tcaaaatgcaaaattggtttgcctttagtttaaagtgatcagaacaaaaaaaaattaagataatttaatggcttatctttttcagtagtcctccagaatayaaactttataatcatctctcagacatttaaataaagtatctagtatttattaaatatttaccacatgccaggcaaagtacaattaatttaacatatgctc

SEQ ID NO: 188087 - DNA, 201 bp, Homo sapiens
ttctcacagggtgagaaatgctatacttgaacttggacttttttctttgatgtgcaattaaatgattagaaaataggaagttaaggtatttgcagttaaartgatcacgttagccatgatgtagataaagcaaggaaaaagaaggaaagaataagactgcaggcagaaaaacaactagcacagcagttatgatattctaga

SEQ ID NO: 188088 - DNA, 201 bp, Homo sapiens
atagaagtttcaataaaagagaagacttttaagctgagacttgaacaagaagtggagcttccctgatagacaaagagataaaatgtcattctgagcagagkgagaaatatgtgcgaaaacagggaggcagaaagcagcgtggtgagttttactaactgggtgtttaggtgctcctaagcaagtccaagttcaagtatagca

SEQ ID NO: 188089 - DNA, 201 bp, Homo sapiens
ggacaggccatttgtccccactgccactactcccttacccccattaagaacccatgggtttatatatttttaaatatcttaaaatatgtaaatatctaagkaagttcttcactcctattctatcttatggagaccctttttaaagagtgaattttatagagacataggaaatgttagtttgcattgttttcactttgcccc

SEQ ID NO: 188090 - DNA, 201 bp, Homo sapiens
agccatagaaagagttatcatttttttggctttcaggtactaaaatcaaaatgcaaaattggtttgcctttagtttaaagtgatcagaacaaaaaaaaatkaagataatttaatggcttatctttttcagtagtcctccagaatataaactttataatcatctctcagacatttaaataaagtatctagtatttattaaat

SEQ ID NO: 188091 - DNA, 201 bp, Homo sapiens
aaaactcagtaagtaatagagccagaattttgaactatgaataggtaagattaaaaaaaaagacattattttgtaatgtcttgtattatcagacaaggtaycagagacaaggaaaaagaaaggtgcactgaacagccaaagcaggactgacggaactcagaaatgggctgggaccagcctgggagaaagaaaacgcaaggc

SEQ ID NO: 188092 - DNA, 201 bp, Homo sapiens
tttaaaaaaatggtcatcaaaattttcttgactattgttggcactttgcattcccatagaagttttaaaatcaatgtgtcgggttcttccttctccccacmcagtaaactggcttgcattttgattggaattattaagtctttcaatcaatttggagagatttgggaagttaataccttgtaatccatgaacttcttagat

SEQ ID NO: 188093 - DNA, 201 bp, Homo sapiens
gttatccttctcatgtcccttgtatcatttttgtcattcatttcacttgtccgtaaactataggtatcaaatacattgttgttattttgaacaagcttttsttagatcagttaaaagtaggaaaaattaaagtttttatcttctttatttcttctttctctttctttatatagatcaaaatttctgacctatattttcttc

SEQ ID NO: 188094 - DNA, 201 bp, Homo sapiens
tttagaattttgtatattcttggtgaattgacccttttattaccccgagtgtctggtgatgcctcttacttaatgcctatttgatagtagatataggtgcrctgttatccttccatgtatatttcattctgtgtatatttgcatagtattccttttattcttttactttcaacctttgtatattcttatatttcagataca

SEQ ID NO: 188095 - DNA, 201 bp, Homo sapiens
tttttttttttttttatttgagacggagtctcactctgtcgcccaggctggagtgcagtggcgcgatctcggctcactgcaaactccgcctcccaggttcrcgccattcttctgcctcagcctcccaagtaggtgggactacaggcacccgccaccgcgcctggctaattttttgtatttttagtagagacggggtttcac

SEQ ID NO: 188096 - DNA, 201 bp, Homo sapiens
ttcttcaaatattggttctcttctttcttcttttggtgttgctattacacatgctacacctatttgcttcatagttcttagatattttgttctgtgtggttttattattttttttttaaatctagtccagtattttgttttcataaagttttccttatccttgcttttcagttttggaagtttgtatatacatatccgtaa

SEQ ID NO: 188097 - DNA, 201 bp, Homo sapiens
ggtctaagatatgatctatccttcagaatgtgtcatgtgcacttgaaaagaatatgtatttgagagccccatagatggttcacatcacaggactctgtacrgacaacccccagtaccaacccagagctgggtagacttgctgggtggctagacctagaagacagacaacaatcactgcagttaggctcacaggaagacaca

SEQ ID NO: 188098 - DNA, 201 bp, Homo sapiens
tcttcaaatattggttctcttctttcttcttttggtgttgctattacacatgctacacctatttgcttcatagttcttagatattttgttctgtgtggttttattattttttttttaaatctagtccagtattttgttttcataaagttttccttatccttgcttttcagttttggaagtttgtatatacatatccgtaag

SEQ ID NO: 188099 - DNA, 201 bp, Homo sapiens
ttcaaatattggttctcttctttcttcttttggtgttgctattacacatgctacacctatttgcttcatagttcttagatattttgttctgtgtggttttattattttttttttaaatctagtccagtattttgttttcataaagttttccttatccttgcttttcagttttggaagtttgtatatacatatccgtaagtg

SEQ ID NO: 188100 - DNA, 201 bp, Homo sapiens
gaacacatatagaatactttcacttcagctttaacaatgcatatagaatactttaaattaaaatctttaaattagagtctcttatgggtagcataattttkaatcttgttgtttaatccattcagccactctgtcttttgactggagaatttaatgttccatttgaagtaattattgataggtaagggcttactagagcta

SEQ ID NO: 188101 - DNA, 201 bp, Homo sapiens
tgtgggatcattcttgatctttagaaaaagatgtaatatttattaaaaagtttatttttcatgagcccatgtagtatttaaattttttaaaaaatgcaatktatcttattgcaattggtatcagattgtaactctttttgggtaaagactgtattttgcatatcttaagtgcttgactgtgcttagcattctaccttataa

SEQ ID NO: 188102 - DNA, 201 bp, Homo sapiens
ctatgggtgtacagtttgaatttttgttgttgttgttttattttgttttggggtgtttggctaggaagaactaactataggatgtttgtcagggacatgtkccttgggaaatttatctcactgctctgtgcttgtttgacagctgttcttgcacttctgactttaattcaaaaagttataaagccatatgtgagcagctgt

SEQ ID NO: 188103 - DNA, 201 bp, Homo sapiens
catagaagtttcaataaaagagaagacttttaagctgagacttgaacaagaagtggagcttccctgatagacaaagagataaaatgtcattctgagcagakggagaaatatgtgcgaaaacagggaggcagaaagcagcgtggtgagttttactaactgggtgtttaggtgctcctaagcaagtccaagttcaagtatagc

SEQ ID NO: 188104 - DNA, 201 bp, Homo sapiens
agacagcagctaaagtcaaagatacagcaacattttcaaaagttagctttgtacatctcttggctgagtaatgtgaacccacacatggaaagatttaatakatacaggaatgttctgggcctctgtaagagctgatccctctatcaggtttctgtgcagacaagcatgtttcttctatctattaggaaagggttatgaatt

SEQ ID NO: 188105 - DNA, 201 bp, Homo sapiens
caatggagtggcattgtcaaaaggggaaagtgtctaataataagttgaaaacattgtgcagttatacttcaaagacatctcttaaattgtcctgttcaggwtcactgcctctgctattattcatgttctaatttagggcctcgaaattgtattagttgcctaactggaagttgcacttcgttcctgtgcttcttccacact

SEQ ID NO: 188106 - DNA, 201 bp, Homo sapiens
tttcttgcacagtgctacaggtttttgcagaactgagcaagcccaacattagacagatagcctaaagactgattgatttatttgttttaatacaaatataygctcacatgttgacatacagaaatctgtttcaaatgaattattttttaaagaacaaagaactttataaccctagtacctaatcctatgcctgacacatag

SEQ ID NO: 188107 - DNA, 201 bp, Homo sapiens
gatgacctctgcaagtgcaggcaggcagtatccacagctctgcatcaccactcggcgtcaccactgtgcaacccatcagtcctgtggtgcccgttcaagtyacattgtataaatctgtcctacggcatctgtatcctcaccatctaataactttagcacagaatattgtttaagaatgatggagagggaaaagaagacttt

SEQ ID NO: 188108 - DNA, 201 bp, Homo sapiens
aatattggttctcttctttcttcttttggtgttgctattacacatgctacacctatttgcttcatagttcttagatattttgttctgtgtggttttattattttttttttaaatctagtccagtattttgttttcataaagttttccttatccttgcttttcagttttggaagtttgtatatacatatccgtaagtgcaga

SEQ ID NO: 188109 - DNA, 201 bp, Homo sapiens
tttttttgtaaggatataatgccaaaaattttgaaaaaaagaaaacaggcactgtggctcacacctgtaatccctgcactttgggaggctgaggtgggagratctcttgaaccaaggagttcaagaccagcctgggcaacatggcaaaaccccatctgtccaaaaaatacaaaaattagctgggtatagtggcacatgctt

SEQ ID NO: 188110 - DNA, 201 bp, Homo sapiens
ggttcaggtgatcatcccacctcagcttcccaagtagctggaaccacaggcgtgcaccacacctggctaatttattttttttaagagacagggtctccctrtgttgcccaggctggtcttgaacttctggaatcaattgatcctcccactgcagcctcccaaagtgctgggattacaggtgtgagacaccacgcccagctt

SEQ ID NO: 188111 - DNA, 201 bp, Homo sapiens
tgaggcaggagaatcgcttgagcccgggaggtgcaggttgcagtgagccaagattgtgccactgcactccagcctaaacgacagagctacactccgtctcaaaaaaaaaaaaagagcaaccagctggagtcaccgagcatgtagctgcccagagcctcctccctacatcatgtgtgtagcttgttccatattgtgaagggt

SEQ ID NO: 188112 - DNA, 201 bp, Homo sapiens
cctgagtagctgggactacaggcacgtgccaccacacctggctaatttttgtatttttagtagagacggggtttcgccatgttggccaggctggtctccarctcctgacctcgtggtctgcccgcctcaggctcccaaagtgctgggattacaggcatgagccaccacacccggccgatatactcagagttctaatgtttt

SEQ ID NO: 188113 - DNA, 201 bp, Homo sapiens
ataattttatggccagcagatgacttttttctttcctcttattttgtaacttttaattttgacatatgatacgtacacataaagttgaaaaaaatagtacrtagtaccccataagccatagcccagcacccccaatggtgatatcttatatctgtagaacaatatcaaaaccaggaaattgtcattagtacaatattatta

SEQ ID NO: 188114 - DNA, 201 bp, Homo sapiens
atctcagctcactgcaacctccgctcccaggttcaagtgattctcctgccccagcctcctgagtagctgggattacaggtgcgctccaccacgcccagctratttttgtatttatttatttatttgagacggaatcttgctctgtcacccaggctagagtccaatggcgcagtcttggctcactgcaacctccgcctcctg

SEQ ID NO: 188115 - DNA, 201 bp, Homo sapiens
tgggattacaggcacccaccaccgtgttggccaggctggtcttgaactcctgacctcaggtgatgcacctgcctcggcctcctaaagtgctgggattatargcgtgagccactgcgcccagccagttgtaccttttttattcctgagtagttacactgctttatggatgtaccagagtttaaccatttatctgtctaagga

SEQ ID NO: 188116 - DNA, 201 bp, Homo sapiens
tgatgtcctccagggtcatccatgttgtcaaaacataacagactttccttctttttttaggctgaatagtattccattttgttgcacattttctttatccrttcatttgttgatggacgcttaggttgatttcatatcttggctattgtgaatagtgctacaataaacatgggagtacagatagctctttgatatactgat

SEQ ID NO: 188117 - DNA, 201 bp, Homo sapiens
gagaggaggcaagcgtctgacacaggtagaaagagaaagccagaagtctcagcaaactgcttataccccttctcctgcctgttttgttgtagctgctggcrgccattggatggcacctgcattgaagggtattgctttcagtccatcaactcaaatgtcagtctcctctgacaacaccctcacagacacacccagtaacaa

SEQ ID NO: 188118 - DNA, 201 bp, Homo sapiens
ttatttaataatatcatataatgtttttcatttgaaaaggaaaaagatgttatcaagttcctgcctatttaactttagagagaacttagtttggtttattmagttagacatgtagtcagtgtagcactttaatcttttaactttaccactttaattattttacaaatacaagttcttgatgatcttttatgtttttctagg

SEQ ID NO: 188119 - DNA, 201 bp, Homo sapiens
aagtcttaccttttatatttaggtccttatctgaagttttcgacctgacattcagtgtacagtgaacacactcatacatctcctcatgcagatatgcaccrtctaaagatggaggctactagctacatttaactgtttaattttcaactgattataattaaatagaatttaaaattcagttccttagtttcacagtagcca

SEQ ID NO: 188120 - DNA, 201 bp, Homo sapiens
cctaatctctactgtttttatttggctactagctatttagtgtaaccccatttttgtggaaggctggccaagagcacacttcaactcaatagtagtcaaakccagctctactgaacctacatgaacacatgagcacacaaattgtgtggttctgaagtttgtgggggtattttttagttcttgataaatgttcatctgcct

SEQ ID NO: 188121 - DNA, 201 bp, Homo sapiens
ttagggatatgatttccctcttgttctgctgtctctctgtccctcagtgattacaggtagagcatcacttcaataactcttccagtcagtattggtggtgwcagccagtctgacctgaaaagaaaccaataccccttcccaacctggaaatgctggtaatttatttcaccatccccagcttccctatatttttccccatcc

SEQ ID NO: 188122 - DNA, 201 bp, Homo sapiens
aagaaaaccttgaccctgtttcttcaaatgaatataagctctaataaatagacatttgttcaatctctgaactatttaactgtaatgagttgaaaaaaaatttttttttttttgagacagagtttcgctcttgttgcccaggctggagtgcagtggtgagatcttggctcactgcaacctccgcctttctgtttcaagcga

SEQ ID NO: 188123 - DNA, 201 bp, Homo sapiens
ggagaccgaggtgagcagatcacctgaagtcaggagttcgagaccagcctggccaacatggtgaaaccccgtctctactaaaaatacaaaaaaattagacrggcatagtggcacgtgcttgtaatcccagctactcaggaggctgaggcaggagaatcatttgaacccgggaggcggaggttgcagtgagccaaaattgcg

SEQ ID NO: 188124 - DNA, 201 bp, Homo sapiens
tgtaatcccagctactcaggaggctgaggcaggagaatcatttgaacccgggaggcggaggttgcagtgagccaaaattgcgccactgcattccagcctgrgcaacaagaacaaaaactccatctcaaaaaaaaaaagtaaaattatatttgtagctcatactatatttcttttgaacaacactgatctaaagtgctatgt

SEQ ID NO: 188125 - DNA, 201 bp, Homo sapiens
tttgtttagtttttactaaattggctctacaaatcttttttctctagcttacttgtcttctgtaccacctagcttagttcttgatgttctctaatagttcrtgtgttccaggtttttcctgtctttctaataacatgtaagtatcttgaggtcagagagattgatacagtttggctgtgtccccaccaaaatctcatctca

SEQ ID NO: 188126 - DNA, 201 bp, Homo sapiens
tttaatttaggtatatctcctaatgctatccctccaccctccccccatcccacaacaggccccggtgtgtgatgttccccttcctgtgtccatgtgttctyattgttcatttcccacctgtgagtgagaacatgcggtgtttggttttttgtccttgcgatagtttgctgagaatgatggtttccagcttcatccatgtcc

SEQ ID NO: 188127 - DNA, 201 bp, Homo sapiens
gtgaatatgtgccacattttcttaatccagtctatcattgttggacctttgggttggttccaggtctttgctattgtgaatagtgccgcaataaacatacstgtgcatgtgtctttatagcagcatgatttataatcatttgggtatatacccagtaatgggatggctgggtcaaatggtatttctagttctagatccctg

SEQ ID NO: 188128 - DNA, 201 bp, Homo sapiens
atgtgccacattttcttaatccagtctatcattgttggacctttgggttggttccaggtctttgctattgtgaatagtgccgcaataaacatacgtgtgcmtgtgtctttatagcagcatgatttataatcatttgggtatatacccagtaatgggatggctgggtcaaatggtatttctagttctagatccctgaggaat

SEQ ID NO: 188129 - DNA, 201 bp, Homo sapiens
gtgtctttatagcagcatgatttataatcatttgggtatatacccagtaatgggatggctgggtcaaatggtatttctagttctagatccctgaggaatcrccacactgacttccacaatggttgaactagtttacagtcccaccaacagtgtaaaagtgctcctatttctccacatcctctccagcacctgttgtttcct

SEQ ID NO: 188130 - DNA, 201 bp, Homo sapiens
atgagtagattgcaaaaattttctcccattctgtaggttgcctgttcacgctgatggtagtttcttttgctgtgcagaagttctttagtttattagatccyatttgtcaattttggcttttgttgccattgcttttggtgttttagacatgaagttcttgcacatgcctatgtcctgaatggtgttgcctaggttttcctc

SEQ ID NO: 188131 - DNA, 201 bp, Homo sapiens
gtagttttttccaattctgtgaagaaagtcattggtagtttgatggggatggcattgaatctgtaaattaccttgggcagtgtggccattttcacgatatygattcttcctacccatgagcatggaatgttcttccatttgttcgtatcctcttttatttcattgagcagtggtttgtagttctccttgaagaggtccttc

SEQ ID NO: 188132 - DNA, 201 bp, Homo sapiens
tgattcttcctacccatgagcatggaatgttcttccatttgttcgtatcctcttttatttcattgagcagtggtttgtagttctccttgaagaggtccttyacatcctttgtaagttggattcctaggtattttattctctttgaagaaattgtgaatgggagttcactcatgatttggttctctgtttgtctgttattgg

SEQ ID NO: 188133 - DNA, 201 bp, Homo sapiens
gttacaaacattcacatttcaggtggtcactacttctctgaccataactgatcactaaagccgctttgtcattaccatgtaagccaccacaaaacaacaayttatagctcatagaaaaatctatagaagcaggctgggctcgggggctcacacctgtaatcccaggactttgagaggccaaggcgggcggatcacaaggtc

SEQ ID NO: 188134 - DNA, 201 bp, Homo sapiens
gtttgaagtcaggtagcatgatgcctccagctttgttcttttggcttaggattgacttggtgatgcgggctcttttttggttccatatgaactttaaagtmgttttttccaattctgtgaagaaagtcattggtagcttgatggggatggcattgaatctataaattaccttgggcagtgtggccattttcacgatattga

SEQ ID NO: 188135 - DNA, 201 bp, Homo sapiens
attttagatcttctctaatatatactctcaatactataagttttgctttaagtactgctttctctgcattgacaaattttgataagttctattttctttgyatatttatagacaatagaactttgataagttctatttatatatttatagatatatatctataaaactagtgtatatatgtaaatagtatatatatatgtg

SEQ ID NO: 188136 - DNA, 201 bp, Homo sapiens
cacctgagctccacctcctgtcagatcagcggtggcattagattctcataggtgtgggaaccctattgtgaactgtgcatgtgagggatccaggttgtgcrctccttatgagagtctaatgcctgatgatctgagatggaacggattcatcctgaaaccacccgcactcctccgccccctgtccatggaaagattgtcttc

SEQ ID NO: 188137 - DNA, 201 bp, Homo sapiens
tgtgtgtgtgtgtgtgtgtgtgtgtatatatatataaagagagagagacagagacagagacagggtcttgctctgctgtccacacctcagtgcagtggtgygatcacagctcactaaggcctcaacctccctggctcgagtgatcctcctgtctcagcctcccaactagctacaactacagacatgcatcaccaagcttga

SEQ ID NO: 188138 - DNA, 201 bp, Homo sapiens
actggtccgtagcatgtcaggaaccaggccacacggtaggaggtgagcagtgggcaagtgagcattaccacctgagctccacctcctgtcagatcagcggyggcattagattctcataggtgtgggaaccctattgtgaactgtgcatgtgagggatccaggttgtgcgctccttatgagagtctaatgcctgatgatctg

SEQ ID NO: 188139 - DNA, 201 bp, Homo sapiens
ttgggatctgctgtgtgaaggagactggccccgacttatttgctcatatcagcatgcatcactcagctggtcattgcaaaagtgcttgactgtaacagggsggtctggtactgagactgggctcccttggaatctgctgtgggatggaggttggtgttcttgtcacattggctcagatgggcatgtgtctcccagcaggtc

SEQ ID NO: 188140 - DNA, 201 bp, Homo sapiens
gttttatattctgcttttttcacttaaaattatgtagtaaacattttacattagaatttgttggcaaaactttttaaatgactacaccaaagacttttatrtggataaactgtaattggttgatccttctttagtctcaaatatttaggcttttgtctatttttccataccattgttataaagatatttgtgtgtaaatct

SEQ ID NO: 188141 - DNA, 201 bp, Homo sapiens
aggaatagaaggaaactttacaaactagttatatacaaaagcctacaacaaatatcaataccaaagctttaatcaaactttatacaaagcaagacaaatayatattcttgatatagatctgactagtccaataagaaaaaaaaagtgaaataaaggtggacagagaaatggtggagcagaaaagagaaactaaaatagata

SEQ ID NO: 188142 - DNA, 201 bp, Homo sapiens
tggcttctttcatgtagtagtatgcatttaatattcctccatgccttctcataacttgatagcttatttccttttagcacagaataatattccattgtctrgacctacctcagtttacccattaacctactgaaggacatcttggttgcttccaagttatgaagactgtgaataaagcttctgggaacatctgtgtgcaag

SEQ ID NO: 188143 - DNA, 201 bp, Homo sapiens
attcagtatgatattggctgtgggtttgtcatagatagctcttactattttgagatacgtcccatcaatacctaatttattgagagtttttagcatgaagsgttgttgaattttgtcaaaggccttttctgcatctattgagataatcgtggtttttgtctttggttctgtttatatgctggattacatttactgatttgt

SEQ ID NO: 188144 - DNA, 201 bp, Homo sapiens
agtaaaattaaatagaatataaattagtattaatagttttgctccaaaatctcaggcagtaaagaggattatctatgatgtcatttcaaacaaatatatayacacacacacacacacacatcagaactgttcataagtatgtttttttcctctacaaatgtatagcggtcctttaatatgttctacaagtggttcatgttg

SEQ ID NO: 188145 - DNA, 201 bp, Homo sapiens
ggtttgccagtattttattgaagatttttgcatcgatgttcatcagggatattagtctaaaattctctttttttgttgtgtctctgccagtctttggtatyaggatgatgctggcctcataaaatgagttaggaaggattccctctcttcctgttgattggaatagtttcagaaggaatggtaccagctcctccttgtacc

SEQ ID NO: 188146 - DNA, 201 bp, Homo sapiens
tatgaccattacagctttgagaagataaaatgacttgttccaaattacttttggcagagaaaataacctgaatctcaggtcaagttgtgctctatttcttytgtacatttaaaagtgtggggatcctcttggaattagcctgtgaaatgtatttgcattgaaaggtcaatctcaggaatttcagagcaaaggttttgtttg

SEQ ID NO: 188147 - DNA, 201 bp, Homo sapiens
atccatctggtcctggactttttttcgttggtaagctattaattattgcctcaatttcagagcctgttattggtctattcagagattcaacttcttcctgktttagtcttgggagggtgtatgtgtcgaggaatgtacccatttcttctagattttccagtttatttgcatagaggtgtttataatattctctgatggtag

SEQ ID NO: 188148 - DNA, 201 bp, Homo sapiens
gagagctttacttccaactatgtggtcaattttggaataggtatggtgtggtgctgaaaagaatgtatattcggttgatttgaggtggagagttctgtagwtgtctattaggtccacttggttaagagctgagttcaattcctgggtatccttgttaactttctgtctcgttgatctgtctaatgttgacagtggggtgtt

SEQ ID NO: 188149 - DNA, 201 bp, Homo sapiens
tgcaacccctgcctttttttgttttccatttgcttggtagatcttcctccatctctttgttttgagcctatgtgtgtctctgtacatgagattttgagatkagtttcctgaatacagcacactgatgggtcttgactctttatccagtttgccagtccgtgtattttaattggagcatttagcccatttacatttaaggtt

SEQ ID NO: 188150 - DNA, 201 bp, Homo sapiens
gattttgagatgagtttcctgaatacagcacactgatgggtcttgactctttatccagtttgccagtccgtgtattttaattggagcatttagcccatttmcatttaaggttaatattgttatgtgtgaatttgatcctgtcattatgatgttagctggttattttgctcgttagttgatgcagtttcttcctagccttga

SEQ ID NO: 188151 - DNA, 201 bp, Homo sapiens
cagactttcttgttactgtaacgtttatttcttcaaacagatcataaagcaagcagatattatccaggtgtgcaaaagtgattaaccatgtgattttcagaaaaaaaaaaaaaaaaagaaaaagcaatcaatcagcctttaaggctgttgttgtgtaataaaaaccttgcttgacagttgaagtacaccttaactttttca

SEQ ID NO: 188152 - DNA, 201 bp, Homo sapiens
cccggctaattttgtatttttagtagagacgtggtttctccatgttggtcaggctggtctcgaactcttgatctcaggtgatccgcttgccttggcctccyaaagtggtgggattacaggcatgagccaccacacctggccataaagttgaaaagtcttaagttgaatcctaagtcagggactgtctttatcactgaatat

SEQ ID NO: 188153 - DNA, 201 bp, Homo sapiens
tgtcattatgatgttagctggttattttgctcgttagttgatgcagtttcttcctagccttgatggtctttacaatttggcatgtttttgcagtggctggkaccggttgttcctttccatgtttagtcccagcaccatttattaaagaggaaaatcttaaaagcaactggagaaaaaaaaaagataagatacagattaata

SEQ ID NO: 188154 - DNA, 201 bp, Homo sapiens
acttataaatttgaaaaagcttcttgtcttctattgttaatgctcctagaatctcatgtttgagaacgaatgttcagtgtagccaaaacctaaatctgggrctatatgttgaatgttttaaagtcactagtagaagggcaatttggtggctaattttaaagtacataaagagtattaacaataatgaagtgtcattttgtt

SEQ ID NO: 188155 - DNA, 201 bp, Homo sapiens
tttccagaaagttttccgtttactttgcccatattcattagaggaatcactatctatgactgctgtagccctacaagatgtatttcttaataagacttggragtctaaattattctttaattcatgagttgcagaatggatgttgtgttaacaaggcttgaaaacaacactaatctacatctccatcagagttgttggctg

SEQ ID NO: 188156 - DNA, 201 bp, Homo sapiens
tggtttgatcttttatccagatcactcgaagtttctccatatcatcagtaagactgttttgctctcttagtattcatgtgttcactagagtagcacaattyccttgaagagtttttccttagcattcacaatttgcttactgattggcagaggaggcctagcttttggcctttctcagttttcaatgcacctgcttcacaa

SEQ ID NO: 188157 - DNA, 201 bp, Homo sapiens
gagtagctcctttctgtaggcaggtcatctcgttgagtgttgagctctcagcagagaggaggcctggagtgggtggctcctctctgcaggcaggttgtccygacgaatgttcagctcttagcagagagggtagctcctctctgctgctggtcatcctgttgtctgcagctctcagcagagaggaggccctgaagagggtag

SEQ ID NO: 188158 - DNA, 201 bp, Homo sapiens
tgatcttttatccagatcactcgaagtttctccatatcatcagtaagactgttttgctctcttagtattcatgtgttcactagagtagcacaatttccttsaagagtttttccttagcattcacaatttgcttactgattggcagaggaggcctagcttttggcctttctcagttttcaatgcacctgcttcacaaagctt

SEQ ID NO: 188159 - DNA, 201 bp, Homo sapiens
ttggggggagtatgggaaggagtgttccatggtcctgtgattaggtctgagtcttttagtgagtctatacccttggactgtgaacttcacaattttctccygttaggtgggacaggatggctagatggagctggagttttttattttcattctcccatgggaaaggctagagagggctgaagttgggtatttctcttcctc

SEQ ID NO: 188160 - DNA, 201 bp, Homo sapiens
aaattgtgaaagatatgtagaagtcttaaataattttggtttcaggattattttctattgttgtgttagactcatggaggtagtaaattggcattaatttyccttacagtttttctggaagaggaaatatgcttaatgagctaaataagacataacattttgttttcttacattgttgcaaattgaagttgggttttgttg

SEQ ID NO: 188161 - DNA, 201 bp, Homo sapiens
aattttgggggcagtgatttgccctgtgaccttactaatatgatgtatctaagaagagttggtttttcagtttgttcagctttttacttgctgttaggacrgagcgaagacttccgagctcttaacgttctggaccagaaattggaacaatgctgtccttttattgtctcttctctacactgcaggcagccatggtgtttc

SEQ ID NO: 188162 - DNA, 201 bp, Homo sapiens
acaattaaaggcctccgatgtaatttattggcagcctgaaatatttactatgcttgtagtaattatgaaagacctcctaaagcttttgccaactgtgtttmtacttgacagttaaactcccacgtggaaaagttatattatggagattcttttgaaggatgttgatagtgtttggctctgtgtccccacccaactctcatg

SEQ ID NO: 188163 - DNA, 201 bp, Homo sapiens
actatgcttgtagtaattatgaaagacctcctaaagcttttgccaactgtgtttctacttgacagttaaactcccacgtggaaaagttatattatggagawtcttttgaaggatgttgatagtgtttggctctgtgtccccacccaactctcatgtcaaattgtaatccccgtaggttggaggagactcctggtgggaggt

SEQ ID NO: 188164 - DNA, 201 bp, Homo sapiens
cagtgattcctaacccctttttggttttggatcctttttagactataatgaaagttttgaaccttctctatagaaaaatatataatatgtatacatgggtrtatgttttcataagtttcaatgtattcttagatccatctagatatccatagactctcagttaagaatctttactatgtggccaacaaacacacaaaatta

SEQ ID NO: 188165 - DNA, 201 bp, Homo sapiens
tgtaccggcagagtagctacctgcaagaattagtgcccaaaacagttctcattgactttgcaagtactctttggtcccatatattttaaatactggagaaraccatgttaaattaataaattagcgttgtgatttgtatgacaacctcatgtgcatttgattagtgtgagttagaggctattctcctgtggatacactaag

SEQ ID NO: 188166 - DNA, 201 bp, Homo sapiens
caagtactagttagactccagttgccatcaacacaagaactttgaagaagtactgtcctaattgttgtttttaaagtaattagaataaaaataatggattmttctatttttttaagaagttagtcaggctgtcacattaaattaagtagtataggtgcaaaaccagtctttttaaactattactaccactttttccctagg

SEQ ID NO: 188167 - DNA, 201 bp, Homo sapiens
cacattctttcagttttaaaagatgtgatttttaaaaaagacccctttgaatgtaactattatgtggcaagaaagccttgctttggttaggtattttgctrtgtgataaagatcctttggtaaaattcaggaaagctttggaccttaaaaaatcattcccttcctgatgcagtattttattagaagataggtgagttctga

SEQ ID NO: 188168 - DNA, 201 bp, Homo sapiens
aaagggtaacttctgggtcactgccatggaaacgggtggtaacttttgagtcattgccatgacatttgtcaactgccatggttctggtggcagtgtcttakgccaatgagcattgagcgcagctagagatcgcttttgttgccatctgctggctttggccagtttcttcactttgccccatgtggactagatcctgttttg

SEQ ID NO: 188169 - DNA, 201 bp, Homo sapiens
agcttttatttacatttttattgcttatgattcagtattaatgaaactatttcataactcttcaatatctactccccaatcttgtatcttacttttagcayatttctctagagaattgaagttttgaaattctttgtttcatctaatttattcttccagagttttcaacattttcatctatacgaaggtacattctagcta

SEQ ID NO: 188170 - DNA, 201 bp, Homo sapiens
agaggctggttcggaatttggggctgcaggtccaagcctggctcttgtgtaggcctagagcctaagtctgcagggatccatcctgggctgtgggggctgaycttgggctgggatagggcaagtactggaatctgtggggagagctggatgcttatgtcatccttcttccatgtggacagtatttctctccacattgtgctg

SEQ ID NO: 188171 - DNA, 201 bp, Homo sapiens
aaattccaattttcttatccagagataacagctgttaacattttgttatagttcctgtaagatttgtgtgtgtgtgtgtgtgtgtgtgtgtgtgtgtgtgtatgtgtgtgtgtgtgtatgtatattagagatggagtctcactctgtcgcctatgctggagtgcagcagcacgatctcagcttactgcagccttcacctac

SEQ ID NO: 188172 - DNA, 201 bp, Homo sapiens
gaaattccaattttcttatccagagataacagctgttaacattttgttatagttcctgtaagatttgtgtgtgtgtgtgtgtgtgtgtgtgtgtgtgtgtgtatgtgtgtgtgtgtgtatgtatattagagatggagtctcactctgtcgcctatgctggagtgcagcagcacgatctcagcttactgcagccttcaccta

SEQ ID NO: 188173 - DNA, 201 bp, Homo sapiens
tgaaattccaattttcttatccagagataacagctgttaacattttgttatagttcctgtaagatttgtgtgtgtgtgtgtgtgtgtgtgtgtgtgtgtgtgtatgtgtgtgtgtgtgtatgtatattagagatggagtctcactctgtcgcctatgctggagtgcagcagcacgatctcagcttactgcagccttcacct

SEQ ID NO: 188174 - DNA, 201 bp, Homo sapiens
gtgaaattccaattttcttatccagagataacagctgttaacattttgttatagttcctgtaagatttgtgtgtgtgtgtgtgtgtgtgtgtgtgtgtgtgtgtatgtgtgtgtgtgtgtatgtatattagagatggagtctcactctgtcgcctatgctggagtgcagcagcacgatctcagcttactgcagccttcacc

SEQ ID NO: 188175 - DNA, 201 bp, Homo sapiens
agttttcaatgcacctgcttcacaaagcttcatcacttctagctttttatgtaaagtgagagatgtgggactcttcctttcacttaaatacttaaaggccrttgtagggttattcattggcctaatttcattattattgtgactcagggcataggaaggcccaaggagaggaagaaaagcagggaacaaccagttggtgga

SEQ ID NO: 188176 - DNA, 201 bp, Homo sapiens
ttaagcaattagattactgcacacctaataatagtagcaaataatgcactttcaatctgctaatatgttaagcacttttcattatctcttccttttacatraggggaatctgaagtttagggaatttaaaacttccacaaagttagtagtcagtagtttatatactagtattaaatctgtttaaatccaaagccggtgaca

SEQ ID NO: 188177 - DNA, 201 bp, Homo sapiens
gctttttatgtaaagtgagagatgtgggactcttcctttcacttaaatacttaaaggccattgtagggttattcattggcctaatttcattattattgtgwctcagggcataggaaggcccaaggagaggaagaaaagcagggaacaaccagttggtggaacaatcagaatacacacaacatttgtcagttaagtttacca

SEQ ID NO: 188178 - DNA, 201 bp, Homo sapiens
tcttcctttcacttaaatacttaaaggccattgtagggttattcattggcctaatttcattattattgtgactcagggcataggaaggcccaaggagaggragaaaagcagggaacaaccagttggtggaacaatcagaatacacacaacatttgtcagttaagtttaccatcttatatgggcatggtttgtggtgaccca

SEQ ID NO: 188179 - DNA, 201 bp, Homo sapiens
agtgacgccacttgaggccaggagttcaagaccagcctggccaacatggtgaaactgtgtctctactaaaagtacaaaaattagccaggtgtggtggtgcmtgcctgtaatcacaactacttgggaggttgaggcatgagaatcgcttgaacctaggaggtggagtttgcagtgagctgagatcatgccactgcactccag

SEQ ID NO: 188180 - DNA, 201 bp, Homo sapiens
tggttactcaaggctctgatggaaatgcacaaggagaattaatgtttttgtgtctgctaaaacagtatctattctgcagcctatggatgaaggagtaataytgactttcaagtcttatgatataagaaatacgtttcttaaggctattgctgctgtaatagtagatatgggcaaagtaaacctccttgaaaggagtcacca

SEQ ID NO: 188181 - DNA, 201 bp, Homo sapiens
ctaaaagtacaaaaattagccaggtgtggtggtgcatgcctgtaatcacaactacttgggaggttgaggcatgagaatcgcttgaacctaggaggtggagkttgcagtgagctgagatcatgccactgcactccagcctgggcgacagagtgaaaccttgtctcaaaaaaaaaaaaaaaaaaaaaaaggagttccattcca

SEQ ID NO: 188182 - DNA, 201 bp, Homo sapiens
ggtagatacagcaaaagagctagaattagaagtggagtgtgaagttgggactgaattgctgcaatctcatgaacaaattagaatggatgaggagttatttsttatggctgagcaaataaagtgatttcttgagatggaatctactggtgaagatgctgtgaatattgttgaaatggtaactgaggatttagtatatcgtgt

SEQ ID NO: 188183 - DNA, 201 bp, Homo sapiens
cacggagagtgaactgaaatagggtggggcattgcctcacccaggaactggaaggggttgtgggatttccctctcctagccaagggaagccatgacagacrgtacctggaatatcgctacactcctgcccaaatactgcgcttttcccatggtcttagcaactggcagacaaggagattctctcccgtgcctggcttggca

SEQ ID NO: 188184 - DNA, 201 bp, Homo sapiens
agaggattgactccatctttaaaagaagttctactgtggtttaccctatcaaatagcattacatgctacaaagatatctttcatgaaaggaagagtcagtygatgtggcatactttattgttgtctttttttttagaaattgccacagccaccccagcctgcagcaactaccaccctgatcagttagctgtcatcaacatc

SEQ ID NO: 188185 - DNA, 201 bp, Homo sapiens
ttgtgggatttccctctcctagccaagggaagccatgacagacggtacctggaatatcgctacactcctgcccaaatactgcgcttttcccatggtcttarcaactggcagacaaggagattctctcccgtgcctggcttggcagatccaacacccacggagccttgcttgctgctagtgcagcagtttgagatcgacctg

SEQ ID NO: 188186 - DNA, 201 bp, Homo sapiens
gcatccgccattgctgaagcttaagtaggtaaacaaagtggccaggaagctcaaactgggtggagcccactgcagctcaggaaggcctactgcctccatgwactgtacctctgtagacagggcatagctgaacaaaaggcagcagtaacttctgcagacttaaacgtccctgtgtgacagctctgaagacagcagtggttc

SEQ ID NO: 188187 - DNA, 201 bp, Homo sapiens
ctcaagtgggtccctgacccccatgtagcctaactgggagacatctcccagtaggggctgacagacacctcatacaggcgggtttccctctgcgatgaagyttccagaggaaggatcaggcagtaatatttgctgctcggcagcctccgctggtgatacccaggcaaacagggtctggagtggacctccagcaaactccaa

SEQ ID NO: 188188 - DNA, 201 bp, Homo sapiens
cttcaaatattggttctcttctttcttcttttggtgttgctattacacatgctacacctatttgcttcatagttcttagatattttgttctgtgtggttttattattttttttttaaatctagtccagtattttgttttcataaagttttccttatccttgcttttcagttttggaagtttgtatatacatatccgtaagt

SEQ ID NO: 188189 - DNA, 201 bp, Homo sapiens
cagcatcacattatttatctgtgtgtttgtgaaataatagctttaagtcttctagaggtttgtaagttatggtgtcttcctcttatgcctgcagcgacttrcaagaaacaggtttaatcctggacagctgtatccagctagtgattctctaatgtttgacagcagtggaggtccttaacaatacctgataggggtccttcc

SEQ ID NO: 188190 - DNA, 201 bp, Homo sapiens
cccatctgtaggtcaccaacatcaaagaccaaaggtagataaaaccacaaagatggggagaaaccagaacagaaaagctgaaaattctaaaaaccagagckcctcttctcctccaaaggatcacagctccttgccagcaacagaacaaagctggatggagaatgactttgacgagctgacagaagtgggattcagaaggtc

SEQ ID NO: 188191 - DNA, 201 bp, Homo sapiens
aatcaagctatactgggggaaaagtgttcctgtagatctctaaggcaaaacactctagtatcaggccataacagcagtcagaaccagaggagaaacaagtyacaggagctgacaaaaaagctaaaggaaagagttacacaaatctgagaagctttcaaaagaaataaatcacagaattgaaaaagcaaaaattctggtaag

SEQ ID NO: 188192 - DNA, 201 bp, Homo sapiens
tgtagcacactaggctggtgaaataattgcttgtgatgtccctaaatccccgaggcttttttctacctcctgcttagatagtgaagagaagttgaagttgmgtcctctagtgttcattttgcgtaagagtgataggatgcggtaggacagatgaagattaatgagattgtgtgatatcaagtaggctcattgtctttagat

SEQ ID NO: 188193 - DNA, 201 bp, Homo sapiens
acttattgcaaagcttatggtgagctctacattcagatgctatcattatactttatcagctgataaacattgagcaagctgttcaacctcttgggttttayatcctcaccagctaagtagggataacactatatggttttaagagttcttatgaggtttagtaatatagcctggcagcagtggtgatggtttatataggcc

SEQ ID NO: 188194 - DNA, 201 bp, Homo sapiens
agttaaatgcccaaacttttggaatttatgttgttcattgttaacaactgctgtgtggcccctttagaagtgtccagtccatgacattttatacatttgtsttgaatcttaaggaaaacatgatcatgtcttctttctcgggtgataagcatgcctcaaaatagttttaattctgtgaatatctttgaattcagtttattt

SEQ ID NO: 188195 - DNA, 201 bp, Homo sapiens
aagtccagggaaataatgggacttattgcaaagcttatggtgagctctacattcagatgctatcattatactttatcagctgataaacattgagcaagctrttcaacctcttgggttttatatcctcaccagctaagtagggataacactatatggttttaagagttcttatgaggtttagtaatatagcctggcagcagt

SEQ ID NO: 188196 - DNA, 201 bp, Homo sapiens
aataattttggtttcaggattattttctattgttgtgttagactcatggaggtagtaaattggcattaattttccttacagtttttctggaagaggaaatrtgcttaatgagctaaataagacataacattttgttttcttacattgttgcaaattgaagttgggttttgttgtttgtttgttttgagatgcaggtctggc

SEQ ID NO: 188197 - DNA, 201 bp, Homo sapiens
atttgattcgctgatttaggcaagtggttctccaacctatgtaagaagcatttgtagagctcgtgaaaacacagttctggggtctatcctgctgattcctstaggtccagaaggtccaagtggggccccagatttgcatttctaacaagcttgcaggtatgtcattgctgctggtccaagaactgtactttgagaatcact

SEQ ID NO: 188198 - DNA, 201 bp, Homo sapiens
ttaatgagctaaataagacataacattttgttttcttacattgttgcaaattgaagttgggttttgttgtttgtttgttttgagatgcaggtctggctgtkttgccaggctgaagtgcagtgtctattcacagatcattaagttgtgcagccttaaacctttggactcaagcaatctcctgcctcagcctcccaagtagct

SEQ ID NO: 188199 - DNA, 201 bp, Homo sapiens
gtttaactgaaggtttgtatcctttgaccaatttcttcccaactcccttagacctccaggccctgataaccaccattctactttctgcttttgtgagttcractttttaagactccacatataagcaagatcatgcactatttgcctttctttgtctggcttatttcacttagcataatgtcctccaggttgatccatatt

SEQ ID NO: 188200 - DNA, 201 bp, Homo sapiens
acctaccacattggattgttggatagattcggtaacttatgtgaaggcagagaacacttggaaatcagtggtggtggaggtggtagtgctaatagtgctawtatcaccatcgtcaatataattatttccacagcagcattttgtttctcatatgtcagttacgtcactgtacttattgtcttgttctcatttcagaatttc

SEQ ID NO: 188201 - DNA, 201 bp, Homo sapiens
ttcaggtttgtttcacatgtttttaattcaggaccaatcacttagagcaaagagtcttaaacattattatatgagaatcacctgtagaatttactaaactmggttactgaatccccctgacaagagtttctgattcagtaggtctgagctggtgcctgagaatgctaacaagttcccaggtgatgctaatgctggtgctaa

SEQ ID NO: 188202 - DNA, 201 bp, Homo sapiens
gtagtttttcagttttagctctttattcgtctttaattcattttgagttgaatgagccacagagtttttttttttaaagattgtttaaaatgtttaacacrtacgttttctgaagatacattataagtcgtatttgagtaaaaaatataatactgaacttaaataatagtagggaggctgaattaacttatttcaagcata

SEQ ID NO: 188203 - DNA, 201 bp, Homo sapiens
attcccagtaatctagtgtcattgtccatgtcccatcaggcttccacatgggccgtacatggctgttgtatgggctgtgcactggccttgtaatgcctccytgggctaactccttaacaatccctgtggtttcattatgtccccccagcaggcagtattgcctcagtgctactacttgctgtgtggggttggcaactatac

SEQ ID NO: 188204 - DNA, 201 bp, Homo sapiens
tttcaagcatacaccatcccctcttgaaagctctcttaatctttaattttttaaaatacattttcttccactaaatacttattttttccaactgactccckaaaactcataaatctacaattgttattacatgagtaatgtaaatatttattcatgccacctgaatcttaaagttccattggttattagctttttgtagtt

SEQ ID NO: 188205 - DNA, 201 bp, Homo sapiens
ttctaatctaggcattcaaagccataaacattcattaagcactgctttagcggcatcacacatatttgatatagtgtattttcatttccatttagttcagyatattttagaatttcccttggtacatctttaaattatcacagtctacctttaagtgttattataccatgtgtacagtataagaaccttagaacaatatat

SEQ ID NO: 188206 - DNA, 201 bp, Homo sapiens
gaaggcattggttaaatcaataacagagtggtagtggtatgtgtccagtgcctctcccaccctctttagaagggaggtgatattgggaacatgtgcatacrttggggggactgccttacttaattcccagtaatctagtgtcattgtccatgtcccatcaggcttccacatgggccgtacatggctgttgtatgggctgtg

SEQ ID NO: 188207 - DNA, 201 bp, Homo sapiens
ttgatgttgtcaacgtgaattgaagtatgtttaatattagagaaagtaataccataataaaatacatgttgctgtcaatacccaaggtctaaaagaaattkgttttttcaagactggagaggacatagaaggctccatggtctagatgacccatctgatacactgacacctgttgtaaaatcccaacccatcatttcttca

SEQ ID NO: 188208 - DNA, 201 bp, Homo sapiens
gtgattgtgtttttaattctgtttatgtggtgtatcacatttattgacttgcatatgttaaaccatccctgcatccctggtatgaaacccacttgatcatkgtggattatctttttagtatgttgttggatttggttagctagtagttttttaagtaaggattttagcatcagtgttcatcaaggatattggtctgtagtt

SEQ ID NO: 188209 - DNA, 201 bp, Homo sapiens
tgcaaattggtcttgactctctgcggcaatggggatgctgaagaaggcattggttaaatcaataacagagtggtagtggtatgtgtccagtgcctctcccrccctctttagaagggaggtgatattgggaacatgtgcatacgttggggggactgccttacttaattcccagtaatctagtgtcattgtccatgtcccatc

SEQ ID NO: 188210 - DNA, 201 bp, Homo sapiens
acggggtttcaccatgttggtcaggctggtctcaaactcctgacctcatgatccgcccacctcagcctcccaaagtgctaggattacaggtgtgagcaccrcgcccagcctactttaatcttctttcttttttttatagtagtctaggcaaagatttgtcaattttgcttatcttttgaaaaaacaactaatgttgatctt

SEQ ID NO: 188211 - DNA, 201 bp, Homo sapiens
tatttactttaatcttcttcttttttttttttttttttttttgagacggagtctcgctctgttacccaggctggagtgcaatggcaccatcttggctcackgcaacctccgcctcctgggttcaagtgattctcctgcctcaacctcctgagtagctgggattacaggcacccgccacaacgcccagctaatttttgtatt

SEQ ID NO: 188212 - DNA, 201 bp, Homo sapiens
taggtttatttaaacatgttctttcatatgtataagactgaactctggagacttaggattttatcttttattattctatagggcctcctaatctctaaagygctatgctcattcttgtctctatttatatgctgttccccctgcttggaatagtcggctgcctctttggccccaattcccattttatcaggttaacatcga

SEQ ID NO: 188213 - DNA, 201 bp, Homo sapiens
atctgaaggcctgtggcaggggtctccaggatctctcacgtttttatagcttttgcaaatcagtaaacttacctattgttcttttctcctttctaacaatscaccatactttatatcctcacatacctacaaacgaagtaatagagttggatgtaggtttatttaaacatgttctttcatatgtataagactgaactctgg

SEQ ID NO: 188214 - DNA, 201 bp, Homo sapiens
tttgttgtgtaaaataggatacgtttatatagagtccagaatcaatacttcagagtgggaaagaatctgaaggcctgtggcaggggtctccaggatctctyacgtttttatagcttttgcaaatcagtaaacttacctattgttcttttctcctttctaacaatgcaccatactttatatcctcacatacctacaaacgaa

SEQ ID NO: 188215 - DNA, 201 bp, Homo sapiens
ttgcttgaacccaggaggaggaagttgcagtcagccaaaatcatggcactgcacttcagcctgggcaacagagcaagactgtctcaaaaaaaaaaaaaaaagtaattgcaaaaactgcaactagaatagaataatcgactactctttcagagataatttagtacattcccttatttcacagatgaggagagactatgtgat

SEQ ID NO: 188216 - DNA, 201 bp, Homo sapiens
taggggtcctggaaccgataccccatagatactaagggatgactgtatcctatcagacttttccaaagtacacacacacacacacacacacacacacacamgcacgcacacacatgtaatcagatgcattgttggcagtattgatgaagacaatatttattgatatatcgtgctgtggaaatcagggagaaatgtgtactg

SEQ ID NO: 188217 - DNA, 201 bp, Homo sapiens
ccatagatactaagggatgactatatcctactagacttctccagagtatacacacacacacacacacacacacacacacacacacacacacacacacacacggacatgtaatcagatccattggtggcggtattgatgatgacaatatttattgatatattgtgctgtgctgtggaaatcagggagaagtgtaaactggag

SEQ ID NO: 188218 - DNA, 201 bp, Homo sapiens
ccatcgatgctttgaagaaactgcatcaattaacaggcaaaatacccatctaacatcataatgacaggattaaattcacacataacaatactaaccttaartgtaaatgggctaaatgctccaattaaaagacacagactggcaaattggatagagtcaagacccatcagtgtgctgtattcaggagacccatctcatgta

SEQ ID NO: 188219 - DNA, 201 bp, Homo sapiens
actgcatcaattaacaggcaaaatacccatctaacatcataatgacaggattaaattcacacataacaatactaaccttaaatgtaaatgggctaaatgckccaattaaaagacacagactggcaaattggatagagtcaagacccatcagtgtgctgtattcaggagacccatctcatgtacagagacacatacaggctc

SEQ ID NO: 188220 - DNA, 201 bp, Homo sapiens
atggaggaagatctcacaagcaaaaggaaagcaagaaaaatcataggttgcaatcctagtctctgataaagcaggctttaaaccaacaaagatcaaaagaracaaagaaggtcattacataatggtaaagggatcaattcaacaagaagagctaactatcctaaatatatatgcacccaatacaggagcacccagattcat

SEQ ID NO: 188221 - DNA, 201 bp, Homo sapiens
cctatggggttgacaacttttccagttgctctaggaattactgtaatcattttctttctgttatactgccttatagatctgatggaaattttgaaaagagygtgttctcattgtttagctctatatatctgttggcttcatttgcttttaatatttttttctaatagatacctttctggcttgcacagcaaagttcaatta

SEQ ID NO: 188222 - DNA, 201 bp, Homo sapiens
cattcttctcagcaccacgtcgcaattactctaaaatcgaccacataattggaagtaaagcactcctcagcaaatgtaaaaacaggaatcacaacaaactstctctctgaccacagtgcaatgaaattagaactcaggattaagaaactcactcaaaaccgcacaactacatggaaactgaacagaacagcctgcccctga

SEQ ID NO: 188223 - DNA, 201 bp, Homo sapiens
ttatttacatgctgtaagtaatatagtaatgctaactgggctttccttggcttttgtttcattgtgatctgagctcagattatagtttgatctgctatgcrctgacctgggtgccagatgcaagggaagccagtaaataatactataaagagagatgctagctttagttttgaaaggacgatgacttgtaagtgagactgt

SEQ ID NO: 188224 - DNA, 201 bp, Homo sapiens
gacatcacaattaaaagaactagagaagaaagaggaaacatacaaaagctagcagaaggcaagaaataactaagatcagagcagaactgaaggagatagasacacacaaaaaacccttcaaaaaatcaatgaatccaggagctggttttttgaaaagatcaacaaaattgatagactgctagcaagactaataaagaagaa

SEQ ID NO: 188225 - DNA, 201 bp, Homo sapiens
aagaagacatttatgcagccaacagacacatgaaaaaatgctcatcatcactggccatcagagaaatgcaaatcaaaaccacaatgagataccatctcacrccagttagaatggtgatcattaaaaagttgggaaacaacagatgctggagaggatgtggagaagtaggaacgcctttacactgttggtgggagtgtaaat

SEQ ID NO: 188226 - DNA, 201 bp, Homo sapiens
caaccacattgagccgcatggccgcataggggactatgaagatcagctcatgcatttgtgaagcactgcctccttgtgtcttactgttctctttcttaatkggctgtgttctggaatggtgtcttggtgttatgttttaaaacattattttgcgtaatttatgtcattttatagtcagccaggagaaagtacactacatta

SEQ ID NO: 188227 - DNA, 201 bp, Homo sapiens
ttgacccagccatcccattactgggtatatacccaaaggattataaatcatgctgctataaagacacatgcacacgtatgtttattgcagcactattcacratagtaaagacttggaaccaacccaaatttccatcagtgatagactagattaagaaaatgtggcacagatacaccatggaatactatgcagccataaaaa

SEQ ID NO: 188228 - DNA, 201 bp, Homo sapiens
ccataacagatccccaggttttttccttgtctattaggaactgtttaaaaaattttgtttaagaaacaaatgtatctccattcatattcttgaacaacacytctaattaatgaattactcagaaattttgctgatgaaaacatgttatgaaatctgtatattgtataagacctttgcttccctgagagaaatcactcccat

SEQ ID NO: 188229 - DNA, 201 bp, Homo sapiens
atactatgcagccataaaaaaggatgagttcatgtcctttgttgggacatggatgaagctgggaaccatcattctcagcaaactatcagaaggacagaaarccaaacaccacatgttctcactcataggtgggaattgaacaatgagaacacttggacgcagggcagggaacatcacacactggggcctgtcaggtggtgg

SEQ ID NO: 188230 - DNA, 201 bp, Homo sapiens
  misc_feature (1)...(201): n = A,T,C or G
tactacttacttacttacttacttacttacttacttacttatatatgtctgtaagtacgtgacagagtctcactgtggcacccaggctggagtgcagtatnatgatcttggcttactgtaacctctgcctcctgggtccaagtgattcttgattctcatgcctcagtctcccaggtagctggcaatacacgtgtgcacagt

SEQ ID NO: 188231 - DNA, 201 bp, Homo sapiens
gatgttgtcaacgtgaattgaagtatgtttaatattagagaaagtaataccataataaaatacatgttgctgtcaatacccaaggtctaaaagaaattggktttttcaagactggagaggacatagaaggctccatggtctagatgacccatctgatacactgacacctgttgtaaaatcccaacccatcatttcttcatc

SEQ ID NO: 188232 - DNA, 201 bp, Homo sapiens
tttgcgtgttgatctttctctactttttagtgttcttaaaggtaaggaccaagtcatatgcttctgtattttcctcacagtgctttgcacaaaaaaaaaamattgtctagtaggtgtctttttagttacttttaaagtatcttgtgggtagttaagacttttttattcaaattttatataaaatctgtttttgttttctga

SEQ ID NO: 188233 - DNA, 201 bp, Homo sapiens
ttacctgtgtgtgatgttgaacaaatttacctaaaggctttcaaatcagtttcttcatttataaattgggggtagggggaaggattttacctaccacattrgattgttggatagattcggtaacttatgtgaaggcagagaacacttggaaatcagtggtggtggaggtggtagtgctaatagtgctaatatcaccatcgt

SEQ ID NO: 188234 - DNA, 201 bp, Homo sapiens
  misc_feature (1)...(201): n = A,T,C or G
cctggctaatttatttcattttattttatttgtattttagtagagatagagtttcaccatgttgcccaggctggtctggaactcttgagctcaggcagtcngcccacctcagcctcccaaactgctgggattacaggcgtgagccactgcccccaaccaactcacacatactttaagtgggactttatttaatatcttcat

SEQ ID NO: 188235 - DNA, 201 bp, Homo sapiens
gttgtaatatatgtcaccaaattcatggctaaatcatagaaattgatctgtcacagcttgttaaataagtattctttctcttacatgacttcttacgtgattttttccaaactgcttagtcaaagaagataatctttccagatagagaaaattttaaaatatctttattcctctttaaatttactgatttataaatactgg

SEQ ID NO: 188236 - DNA, 201 bp, Homo sapiens
tcccaacccatcatttcttcatcctttgcttattcacccacactgatggggaactattaattcacgaaatagaccatttcatttttgtgtcagactattargaagttctttaatctgatgaacaagcagctgtttgtctccctaaaccctctatacctctacctgattttattccaaagtctgtaaagagcagtttttaat

SEQ ID NO: 188237 - DNA, 201 bp, Homo sapiens
tcttcatcctttgcttattcacccacactgatggggaactattaattcacgaaatagaccatttcatttttgtgtcagactattaggaagttctttaatcygatgaacaagcagctgtttgtctccctaaaccctctatacctctacctgattttattccaaagtctgtaaagagcagtttttaatccttcttctatatgg

SEQ ID NO: 188238 - DNA, 201 bp, Homo sapiens
tattgtatttaattcctcctttataaagaagttttaactaaactttaaaattattttttattatctggtgtaccaggattgtgtgggtaatattctttttrtttttaggtctcattcagtatctctgtttttttgataaaacaagggtcagcaaactttctctgtaaaggtctgggtagtaaatattttaggctatgcagg

SEQ ID NO: 188239 - DNA, 201 bp, Homo sapiens
tcagactattaggaagttctttaatctgatgaacaagcagctgtttgtctccctaaaccctctatacctctacctgattttattccaaagtctgtaaagarcagtttttaatccttcttctatatggtgttcctttattttttaaaactgttagttatcttgtctttacactttatctcactaaccagtcttttgtttttc

SEQ ID NO: 188240 - DNA, 201 bp, Homo sapiens
tattttttaaaactgttagttatcttgtctttacactttatctcactaaccagtcttttgtttttcaggcttgacattttggattatttcatatgccattstttttccgtctaaagcattctcatctttttcttgtgaactatttgtcctttttgctctgaagttgtaacatccaccaacaaatatatattgattggttgt

SEQ ID NO: 188241 - DNA, 201 bp, Homo sapiens
ggcctcccaaagtgctgggattacaggtgtgagccactgcgcctggccctcctcctctattttttttttacagccctttaaaaatgtagaagctggccaascacggtgattcacacatggtagttccggcactttgggaggcaaggtggacagattgcttgatcccaggagctcaagaccagcctcggcaacatggcaaaa

SEQ ID NO: 188242 - DNA, 201 bp, Homo sapiens
ctctaccctgaataccttgcttctcctaatgcattccaggattttgttagctttgttgtcagctgcacattgagattgctattgaataaagtcatcaggarcaacaacaaaggtgaaaagcccaggtctttcttcaaagtctgctaaataatagttttcacgccttgggcttgtgcagttaatttgatttaagtttcagca

SEQ ID NO: 188243 - DNA, 201 bp, Homo sapiens
aaataataataaattaataaaaatgtagaaatgattccaagctaaagtgctctatgaaaataggtttggcccactggctgttttggggcctagttctagaycaagttctgccccaaactaattgtgtgctttggggtagtttgtataattggttttatcttctctggctattttatgaagataatctagtagtcacttcat

SEQ ID NO: 188244 - DNA, 201 bp, Homo sapiens
aggcctcccaaagtgctgggattacaggcgtgagccaccgcgcccggccccagcatgatcatttctaaagtgaaaataaacagtgaaaagccattagtaasttgccaataatgttgattctttggttagcgtgataaatcaaatttcccagaggcagtcacataaattatagcattatgttgctaagatgaatttggccaa

SEQ ID NO: 188245 - DNA, 201 bp, Homo sapiens
cagggagcccctaggtctgggctccccagagggctgcaactcttctccttctcatcaccctcaatgtggcaagtcagggttgggggtgtttttcagctttstttgtgttactgctctttcagtccctccgtttggtgggtcctgagttcttgtcccgtgtccaggaccagtgaggtatgtggacaactggagggtgagcaa

SEQ ID NO: 188246 - DNA, 201 bp, Homo sapiens
tccatagatactaagggatgactatatcctactagacttctccagagtatacacacacacacacacacacacacacacacacacacacacacacacacacacggacatgtaatcagatccattggtggcggtattgatgatgacaatatttattgatatattgtgctgtgctgtggaaatcagggagaagtgtaaactgga

SEQ ID NO: 188247 - DNA, 201 bp, Homo sapiens
agggctgcaactcttctccttctcatcaccctcaatgtggcaagtcagggttgggggtgtttttcagctttctttgtgttactgctctttcagtccctccrtttggtgggtcctgagttcttgtcccgtgtccaggaccagtgaggtatgtggacaactggagggtgagcaaggtggaaaggactttaattgaacaacaga

SEQ ID NO: 188248 - DNA, 201 bp, Homo sapiens
ctccatagatactaagggatgactatatcctactagacttctccagagtatacacacacacacacacacacacacacacacacacacacacacacacacacacggacatgtaatcagatccattggtggcggtattgatgatgacaatatttattgatatattgtgctgtgctgtggaaatcagggagaagtgtaaactgg

SEQ ID NO: 188249 - DNA, 201 bp, Homo sapiens
tgctccattgttgagggttggtactgtctaaagttaaaccatttcagtgatgcctagcatggaacacttgacaaccaaccttccaggtaggaaatgagacktccttgccagcaagtccatataatactacaatttttatgactagactatttttgcagaagtacttattgcttaattgacattaaacttaagtaagtctat

SEQ ID NO: 188250 - DNA, 201 bp, Homo sapiens
actccatagatactaagggatgactatatcctactagacttctccagagtatacacacacacacacacacacacacacacacacacacacacacacacacacacggacatgtaatcagatccattggtggcggtattgatgatgacaatatttattgatatattgtgctgtgctgtggaaatcagggagaagtgtaaactg

SEQ ID NO: 188251 - DNA, 201 bp, Homo sapiens
cggctgctttgtttactgaagcaagcctgggcaatggcgggcgcccctcccccagcctcactgccgccttgcagtttgatctcagactgctgtgctagcamtcagcgagactccgtgggcgtaggaccctccgagccaggtgcgggatataatctcctggtgcaccgtttcctaagcccatcggaaaagcgcggtattagg

SEQ ID NO: 188252 - DNA, 201 bp, Homo sapiens
ctgaagccttcctctctcaacttgtcaaagtcattctccgtccagctttgttctgttgctggtgaggaactgcgttcctttggaagaggagaggcgctctsctttttagagtttccagtttttctgctctgttttttccccatctttgtggttttatgtttgtttggtctttgatgatggtgatgtacaggtgggtttttg

SEQ ID NO: 188253 - DNA, 201 bp, Homo sapiens
tagtctcaatggtctttacatttttgcatgattttgcagcagctggtaccggttgttcttttccatgtttagtgtttccttcaggagctcttttagggcasgcctggtggtgacaaaatctctcagcatttgcttgtctgtaaagtattttatttctccttcacttatgaagcttagtttggctggatatgaaattctggg

SEQ ID NO: 188254 - DNA, 201 bp, Homo sapiens
ccatcaatacctaatttattgagagtttttagcatgaaggttgctgaattttgtcaaaggccttttctgcatctattgagataatcatgtggtttttgtcwttggttctgtttatatgctggattacatttattgatttgcatatattgaaccagccttgcatcccagggatgaagcccacttgatcatggtggataagct

SEQ ID NO: 188255 - DNA, 201 bp, Homo sapiens
gagatttgcaacaatttgaaaaagcttgctttttctttagcttactttattgtaagaatacagcatataatacatataaaaaatatggttaatcagctgtktatattattggcaaggcttcaggtcaacaataggctattagtagttagtttttgggggagtcagaagttatgcatagttttttgactgcacagggattgg

SEQ ID NO: 188256 - DNA, 201 bp, Homo sapiens; identical to SEQ ID NO: 32635

SEQ ID NO: 188257 - DNA, 201 bp, Homo sapiens
cagccactagggaggctgaggcaggagaatcttgcagtgagctgagactgcgccactgcactccagcctgggtggcagagtgagactctgtctcaaaaagaaaaaaaaaaaaacaccaagtgctgggattataggcgtgagccaccatacctgtccttaaaccatattttagtagttatttaaggaagttacaaaaaaaat

SEQ ID NO: 188258 - DNA, 201 bp, Homo sapiens
tgagtgcaaattatttgcacatttttgaaaagagaatagtcatcttttattcacctgataattgctgagaagggcaaacctcccataagtactgcttttctatttttttttttttttttttttttgagacagagacctcctgctccacccacctcagcatcccaaagtgctgggattacaggcgtgagccaccgcgcccag

SEQ ID NO: 188259 - DNA, 201 bp, Homo sapiens
gagtgcaaattatttgcacatttttgaaaagagaatagtcatcttttattcacctgataattgctgagaagggcaaacctcccataagtactgcttttctatttttttttttttttttttttttgagacagagacctcctgctccacccacctcagcatcccaaagtgctgggattacaggcgtgagccaccgcgcccagc

SEQ ID NO: 188260 - DNA, 201 bp, Homo sapiens
caccatctccctctcaaacaaccagttactttactctaggacaagaatccaccatgcaaggtccctcatacaaaatcactttctttatatccctccccacaaaaaaaaaaaaaaaaaaaaaaaatatatatatatatatatgtgtgtgtgtgtgtatatatatatatatcttttatccacactttcctcacatccctcttt

SEQ ID NO: 188261 - DNA, 201 bp, Homo sapiens
accatctccctctcaaacaaccagttactttactctaggacaagaatccaccatgcaaggtccctcatacaaaatcactttctttatatccctccccacaaaaaaaaaaaaaaaaaaaaaaaatatatatatatatatatgtgtgtgtgtgtgtatatatatatatatcttttatccacactttcctcacatccctctttt

SEQ ID NO: 188262 - DNA, 201 bp, Homo sapiens
ccatctccctctcaaacaaccagttactttactctaggacaagaatccaccatgcaaggtccctcatacaaaatcactttctttatatccctccccacaaaaaaaaaaaaaaaaaaaaaaaatatatatatatatatatgtgtgtgtgtgtgtatatatatatatatcttttatccacactttcctcacatccctcttttt

SEQ ID NO: 188263 - DNA, 201 bp, Homo sapiens
ccaaagtgctgggattacaggcgtgagccaccgcgcccggccccagcatgatcatttctaaagtgaaaataaacagtgaaaagccattagtaacttgccartaatgttgattctttggttagcgtgataaatcaaatttcccagaggcagtcacataaattatagcattatgttgctaagatgaatttggccaaattatgc

SEQ ID NO: 188264 - DNA, 201 bp, Homo sapiens
agttaacctttagctactgagttggtgctgtacctgtttatctcgtttaatttttattctatctcatatgaggtagatgttgttatgcccattttactgtkttttattatctatctagtattcaaaggttcataacatcaaaaaagtcataataactgttacaatagctactgtagatccttatttttgacactacccttt

SEQ ID NO: 188265 - DNA, 201 bp, Homo sapiens
cagttactttactctaggacaagaatccaccatgcaaggtccctcatacaaaatcactttctttatatccctccccacaaaaaaaaaaaaaaaaaaaaaawatatatatatatatatatgtgtgtgtgtgtgtatatatatatatatcttttatccacactttcctcacatccctctttttattcattgattccctcttat

SEQ ID NO: 188266 - DNA, 201 bp, Homo sapiens
ttgagatggagtctcgctctgtcgccaagctggagtgcagtggcaccatctcggctcacggcaacctctgcctcccgggttcaagcgattcttctgcctcagcctccggagtggctgggactacatatgcccgccaccacgcccggctaattatttgtattttagtagagatgtggtttcaccatgttggccagggtggtc

SEQ ID NO: 188267 - DNA, 201 bp, Homo sapiens
atagtgccttttcagaatgaggcaatttgacatcattgtttttgcctaagacagcttttagagtttagtctagaagttgttcaaatagaagttggtgacaygttgaagctgaatgccttcttttcttaaaaggtaggaaatgctcttctcatttgtaagttttagttttctacagtctaataatcttataaaaggtacatc

SEQ ID NO: 188268 - DNA, 201 bp, Homo sapiens
agttctcactctgggccgaggtctccacatggaactggcagcccagcccccaggcttcaggctgtccatgtcttgaaggtggggtttcaccagggacccayccctttgcacccaggagcctgtctgccttctgtcaccaggaatgtgccatccatggcccccaggctgtttgtgccaaggagtgcctgaagccctatggca

SEQ ID NO: 188269 - DNA, 201 bp, Homo sapiens
tgtgcaggtttgttacataggtaaactgcatgtcatgggggtttcatgtacagatcatttcatcatgcaggtaataatcacggtatctgataggtattttwtctgatcctctccttcctccaaccccctagcctcaagtaggccccagtgtctgttgttcccctctttgtgtccatgtgttcttgttgtttaccttcttat

SEQ ID NO: 188270 - DNA, 201 bp, Homo sapiens
caaagctctaatgaatgccactacatggtggagcttgagaactcactgagctacccaaaagactagtttgtcattgcagtggctcctagacattgctttaygaggaaagaaaagaggaaagaggatgagcctagatacaaagggaaaggcttgggaaaaagaaactacatccatgatttttatagtgcctcttttgttact

SEQ ID NO: 188271 - DNA, 201 bp, Homo sapiens
tataatagttatattttttattttttgaggaccctctgtgctgttttctgtaattgcttatagaaattgactagttgacattcccatgtagaaaaagggaycccttttttctacatccttgccaaccctaatttttttatcttccaacttaatttttttttcctgttggctaatacaactttggcctgtcaaatcatggta

SEQ ID NO: 188272 - DNA, 201 bp, Homo sapiens
gtgagccccgccctcccaactcagtaggggccagggctcctgcccgttcgcagccttgacggcttggcagagcttgcaactctagccgcacctacccagtrcagcgggcgtcctcacagccgcgctccagacgggccgctgctgccatcattactcccaagtttcgggtcagaaataagtagaattttagtgctggagaga

SEQ ID NO: 188273 - DNA, 201 bp, Homo sapiens
ggaaccaatcctctgcagataccaagacaactgtatatactttgtaaagcttgtataagatgatactcataaagcatttaacagataatgtctcaataagtgttttaattgttatatcattacaactatcaccattataatctcaacagggaaagcctttcataatcacagctgattaaaatacctttttagtattcaggc

SEQ ID NO: 188274 - DNA, 201 bp, Homo sapiens
aaagaggatgagcctagatacaaagggaaaggcttgggaaaaagaaactacatccatgatttttatagtgcctcttttgttactattgttttgtaaataarataggtagcaaatccagtcattcaaaattataaataaccactaaagggagaagtcaatgctcactttagcttggtttctgctgttgttctttatggtgtg

SEQ ID NO: 188275 - DNA, 201 bp, Homo sapiens
tcttagagaatttgatttcttaataaaaatttggctaactagatattttacatgtaaatcttttagagaatttattcagcaacaaaaatcagttatgtgtrtattgacagtttctaatctaattttcataaatataactaaaattatgaaaatgtacttaaaaaaaaaagctagattatactcctgtctcctagaagggac

SEQ ID NO: 188276 - DNA, 201 bp, Homo sapiens
cagaaaaacccagaaatattactctaagataataacaattattaccacttttatttgagcacatgcactataccaggcacagcacaccgtgctttatgtayataatctgtaactctcctgacaaccctgcaaagtagtacctctgtttacattttgaagatgagaaaattactgctcaaagagattaaatagcttgccatg

SEQ ID NO: 188277 - DNA, 201 bp, Homo sapiens
ccaaaaattttgaaaaaaagaaaacaggcactgtggctcacacctgtaatccctgcactttgggaggctgaggtgggagaatctcttgaaccaaggagttsaagaccagcctgggcaacatggcaaaaccccatctgtccaaaaaatacaaaaattagctgggtatagtggcacatgcttgtagtcccagctactctgcag

SEQ ID NO: 188278 - DNA, 201 bp, Homo sapiens
atactttttatccatactttatttaaaaattttatgtgttagaaaacttatactctagacatttaaaatttaaattttcataacatagtatgcttctgaawaacctgagaagaatgttacacaaaaggagatggcttgctgattccgtggagtaataaatgcctacctgttttcattttgaagttgaagccattgcttcta

SEQ ID NO: 188279 - DNA, 201 bp, Homo sapiens
cccataactcattttctcataaattgtttcctagagaagcctcctttttcagctagagccctttggatgccttttttcttttcttttttttaatttgactyttccaacgtagttgaaacacagaatctccgttaaccctcaatgtacactggtcttaatcagatcaagtttttaaccacaaggtaaaatgtttcactttgc

SEQ ID NO: 188280 - DNA, 201 bp, Homo sapiens
tcattttctcataaattgtttcctagagaagcctcctttttcagctagagccctttggatgccttttttcttttcttttttttaatttgacttttccaacktagttgaaacacagaatctccgttaaccctcaatgtacactggtcttaatcagatcaagtttttaaccacaaggtaaaatgtttcactttgctcatgaat

SEQ ID NO: 188281 - DNA, 201 bp, Homo sapiens
aacttaactgcttccttctttcacatatcagtttctcttccatcagagagaatagtgatatggaatcattttgtctgaatggttggctaaaagtacatacygtagaaggtagaaacttaaatacaggataatgaattttttttatatctgattcccattagcattgacattttttttttctgtttccagaccataaaagct

SEQ ID NO: 188282 - DNA, 201 bp, Homo sapiens
tctcagcagagaggaggccctgaagagggtagactcctctctgatgttgatcatcctgacctcagcagctctcagcagagagggtagctcctctctgcagycggtccctccactggctctgctctgctctggctgagtccagggcttttatgagcctcagaggggaggaagtgcatgccgattggtccatgggcctgcggt

SEQ ID NO: 188283 - DNA, 201 bp, Homo sapiens
tttatttttcatgagcccatgtagtatttaaattttttaaaaaatgcaatttatcttattgcaattggtatcagattgtaactctttttgggtaaagactstattttgcatatcttaagtgcttgactgtgcttagcattctaccttataaattgatggtattctatgaatatttattttctaacatttttatttcctctg

SEQ ID NO: 188284 - DNA, 201 bp, Homo sapiens
ggtggggcgcgaggttgaggctgcaatggcggctccgaacttagtagcaggtcctgctacctgtgcgagggtggaggtggcacagtccaccttgaggacaygggacacaggagactgttgccactgctgctctcacagttgcttctgctatcctgtctgcctccttgcagcctggagcagggctccaggccatcgctgggc

SEQ ID NO: 188285 - DNA, 201 bp, Homo sapiens
tcaacttgaatctttagttgttccctaagttcattctggaatggctgaaaccacttataaagaagaaagtattaagggcattgagttacccaacgtattarttgttatcgctgaattctacttttaaccaggaatatactttggtcttcgttcaaaagcacatcatttttttgtaattaaaatatatatggagacaatata

SEQ ID NO: 188286 - DNA, 201 bp, Homo sapiens
tcttacgctttttgcccaggccggagtgcagtggcgcagtcttggctcactgcaacctctgcctcctgggttcaaatgattctccttcctcagactcctgmgtagctgggattacaggcatgcactacaacgcctggctaatttttgtatttttaatagagacggggttccaccatgttgaccagtttggtcctgaattcc

SEQ ID NO: 188287 - DNA, 201 bp, Homo sapiens
ataattatatatttattataatatatattgatataaaggatccagttcatcagtcttttccttcgtggctggtgatttttgtagctagcttaagaaatctyggtcaaatctactgttaggtatattttctcttaccttcttgatgcttttattgtttttcctttcatgttgctatctttaattgcttcactttttttcata

SEQ ID NO: 188288 - DNA, 201 bp, Homo sapiens
ctcttccacatggcctttctacagcatgggcttctcacagcatggcagccgagttccaaggcagaacatttcaagccttggaaaggaaaagctgcagatcyctgaaggctcactctgaatttatactatgtcactttgccaattctcttgtcctttgttttgatagagcatctcacagggctagcccaaatttcatgtaga

SEQ ID NO: 188289 - DNA, 201 bp, Homo sapiens
aaagcctacttgatcatggtggatttgctttttcttgtgctactggattcggtttgctagtattttgttgaggatttttgtatcgatgtctatcaagtatrttggccttaagttttctttttttgttgtgtttctgccaggtttgggtatcacaatgatgctggcctcatagaacgagttggagagggatccctcctccct

SEQ ID NO: 188290 - DNA, 201 bp, Homo sapiens
atgtcaaagaaatctgaaatgttttaatttttctcctactgtgagtttgcttcatctctacttgaaaaatgaagagtttcttttaggccaggcgcggtggytcatgcctgtaatcccagcactttgggaggccaaggcgggtggatcaccttaggtcaggaattcgagaccagcctggccaacatggtgaaaccccatctc

SEQ ID NO: 188291 - DNA, 201 bp, Homo sapiens
aggaaatcacttgaactcaggaggcagaggttgcagtgagccaggatcatgccacggcactccagcctgggtgacagagcaagactccatctcaaaaaacaaaaaaaaaaagcttttatagaactaatgtatataaaatatacatacaagttggaagtatagcaaagagataaataactcagtttctgaaattaggaaaag

SEQ ID NO: 188292 - DNA, 201 bp, Homo sapiens
gaaggactggaggactgatgtggtttctcaaggccgacctcattcctgctgattctaacacctagcccttcagtgtttctgctggcatgtgtggtttcaacccctgtcacattcagacactctcatctaacagggcccagggtatttaatcagtttcatttgctaatcaggcctcattggtcccggcctttggtatctgtt

SEQ ID NO: 188293 - DNA, 201 bp, Homo sapiens
tgttttttgtctttttagtaacagctattctgaccggggtaagatgatatctcattgtggttttaatttggagttctctgatgaatagtgctgctaagcatttttttatacggttgttggccatttgtatgtctttttttgtgtgaaaaatgtccatctgtgtcctttcccacttttttttttaagttccagggtacatgt

SEQ ID NO: 188294 - DNA, 201 bp, Homo sapiens
agaaaaaggataattttaaacttataagaagtttaaaaataagcacattttattgttgggtttaattttttattcatggataaattagctgatgtagagaractagttttttctttctatctcaattcctttttgaatgaaatttagaggtgaaataaatattacaatgtcatgtctgtaatacttttaaaaatatttgta

SEQ ID NO: 188295 - DNA, 201 bp, Homo sapiens
tggtggacagaagtcccagccttgacagaagcaactgggggagctctccttgaaaggcactgaggtctttgcaggagaaagggagggagccacctcagctyctcttccagaccagcacgaaagcaatctgcctccctgtcacactcatgtcgcaatgttctggatattcagatcagacgaggcacttctgtggatctgcag

SEQ ID NO: 188296 - DNA, 201 bp, Homo sapiens
gtggctcctctctgcaggcaggttgtcccgacgaatgttcagctcttagcagagagggtagctcctctctgctgctggtcatcctgttgtctgcagctctyagcagagaggaggccctgaagagggtagactcctctctgatgttgatcatcctgacctcagcagctctcagcagagagggtagctcctctctgcagccgg

SEQ ID NO: 188297 - DNA, 201 bp, Homo sapiens
ccaaagtgctgggattacaggtgtgagacaccacgcccagcttcatttgaatattggaaatacactgttcctaagtaatggtcctgggaactttacaacartactgtgactattctcttttcaaaaatgtgtatcggcttaaatatttaagagatgggaaagagaagttcctgatgacattgtatgcaccacggtagcagg

SEQ ID NO: 188298 - DNA, 201 bp, Homo sapiens
ggatgatatctgtggcctagaaatcagttgtatagcccaaaatgttacctagactactaatgaacagcaaggtctaaggaaatggcaactagaggccgggygtggtggctcatgcctgtgatcccagcactttggggggccgaggctgtcagatcacaaggtcaggagatcgagaccatcctggctaacggtgaaagcctg

SEQ ID NO: 188299 - DNA, 201 bp, Homo sapiens
tgaggcaggagaatggtgtgaaccccagaggcggagcttgcagtgagccgagattgtgccactgcactccagcctgggggacagagtgagactccatctcaaaaaaaaaaagaaaagaaaaaagaaaatggcaactagaaacaagcagccccattgcagcacgctgaacaccgttttttggaagcatgcaccactgagcag

SEQ ID NO: 188300 - DNA, 201 bp, Homo sapiens
atgcagctaaacccactctggactcttttttttttttggcaactacctagacgcacagtggttccatagtgcctgctctaccatgctataagcttagggarggctttgctccagaaaaggaacctgtaattagctcatgtgagtgagtagatagccacatctaataaaaggttaagtattaggaaattcttgtgactatac

SEQ ID NO: 188301 - DNA, 201 bp, Homo sapiens
ctatccagccctcctaaggatcttcacttcctccccctagaaaactacagagttgctctgttgtcacagtgtgaaaacacacacacacatgcatgcgtgcrtacacatacacacacacacacacacacacttgatttggtgcataggaagtgacctaattcagtttgtcctcatcatagtgacaactagactgagccaatc

SEQ ID NO: 188302 - DNA, 201 bp, Homo sapiens
attgcagataaactattattacaggttattcctaataaacttttagttgctgaatgttaacaataacaatctttacttttaaagcactatagacaaaagtktaatttttatttagcaccaataaataaatgatttaacattttaaagtatttaataagactgaaacccacagcaaagctgttctctggtgtacaattactg

SEQ ID NO: 188303 - DNA, 201 bp, Homo sapiens
tgacattgccgcaagttccccctgtggacccggctctcggtggcagcctggggctcctcctcgcacagcttgagaccctgccggggggcacctctggggcrgatcgcgggccccaaacccagttgtcgggagcgccaggctgaacagtcactccgacgtggggtggatcctggggttgcagcgtcggtggcccgggctgag

SEQ ID NO: 188304 - DNA, 201 bp, Homo sapiens
ccctcctaaggatcttcacttcctccccctagaaaactacagagttgctctgttgtcacagtgtgaaaacacacacacacatgcatgcgtgcatacacatacacacacacacacacacacacttgatttggtgcataggaagtgacctaattcagtttgtcctcatcatagtgacaactagactgagccaatcagagactt

SEQ ID NO: 188305 - DNA, 201 bp, Homo sapiens
ctcccttcactctgtgcgcaactgcagcacccctgggtccaactctgccttgagacccctccatgccagaccgtgctcttcccccgcctgcaggtaggtcrgcccggccccacctgagtggatcccagggttgggcttccagggcagcaggccccaggtaccgttcgccttggagtccacctgaggatccacagcctgcac

SEQ ID NO: 188306 - DNA, 201 bp, Homo sapiens
ggcccggccccacctgagtggatcccagggttgggcttccagggcagcaggccccaggtaccgttcgccttggagtccacctgaggatccacagcctgcamccccacctgcacccacacccgtgccccaccacagccggtcccggctgccaaagtggcagtgactactttggatggcccgctgctgccatcaatttgaatg

SEQ ID NO: 188307 - DNA, 201 bp, Homo sapiens
ccagcttccctatatttttccccatcctaccagcaaactttgtttatataaaatgcagccaaatacaattaagccaaatacaagtcaaatcttcctcatcmttccattcatttcctcattctttcatttgttaccatccttgtttttttttttttattgagacggagtctctgtcacccaggctggagtgcagtggtgcat

SEQ ID NO: 188308 - DNA, 201 bp, Homo sapiens
gtttatattttgccgtccttgttgagaagaaaaacatggatgtatagatatacagtgatggatggactagcagcttaagaatcattttggggacatttttwaaaaaattttttgagacagagtcttgttccatctcccaggctggagttcagtggggcaatcgtggctcactgcagccttgacctcatgggctcaggtgat

SEQ ID NO: 188309 - DNA, 201 bp, Homo sapiens
tcattttttaaaagatattttgttaagatggtattttgaattggtaacatatgtatataattcagagatcaaaactgtatggaaagatatacatgctcatwccttgttccttctaccactgtaccccaacctttccaccttacttttattagtctcttgtttcttcttccaattttttaacacaaacaaaaaatatgcaaa

SEQ ID NO: 188310 - DNA, 201 bp, Homo sapiens
tataaaatgagttgaaaagattattaataatcttacacagaatgatgtccttcagttcaaagatgttaccagtattaacagtggcacttgttttaaaagartaaatatcctactcttgtttttcattagaactctaagcaagactacaaacaaagttttcattgcaataataaatctttttgaaagggttttctgaaacca

SEQ ID NO: 188311 - DNA, 201 bp, Homo sapiens
aaaagtgaataagaatatacaaaacaataataataacagaaacagtgcattagatgaaagttcaaagtcttttgtggctgattgaaaaatgtaataggacygctaatgccttttatggaaagaagcaatataaactagtaatttaatgctttactccatttctacatagcatcttttaaaatttatttttagtatatcttg

SEQ ID NO: 188312 - DNA, 201 bp, Homo sapiens
ggaaactatgtatacccttcagtactttgcttttttgatttagctctgtttcttgcagatctttttctctcagtaaatgggcattttcctcatccttttgwaggatgcatggatgaagaactaccatagttattcaaccagtgccttattttatggattcttaggctattgtcagtcttttgccactattaacagtactac

SEQ ID NO: 188313 - DNA, 201 bp, Homo sapiens
taattgttaaactagaattttggaatcagtattttttactcatgttttgtttaccggtaagtcaccttgcttattacagtgtctcaacgtattaagtgttyagtaaattttcattgaatggaatagaaggaaaagaggtagtatggaaatagactcaactgattctaattatgcacccaaaacaagaaagcaaaggttacg

SEQ ID NO: 188314 - DNA, 201 bp, Homo sapiens
tagaaatttaagtctttgaagagaggaaactgtattattggatattttttgttttattttttgtttttgagacagagtctcgccctgtcacccaggctggmgtgcagtgacacgatctcggctcactacaacctccgcctcttgggttcaagtgattctcctgcctcagcctcctgagtagctgggattccaggcacctgc

SEQ ID NO: 188315 - DNA, 201 bp, Homo sapiens
tttatcttaattattgcaaggactggtcaagagaacgtgtttggaaattggaaattaatcatctatgttgaggaaataatttataacatttgagtttctcyggtgaatcattaacatagtttccatatttaaatttctgccattatattttttcacattgtctgtcttctttccaaataacttctcagagaaactcttaga

SEQ ID NO: 188316 - DNA, 201 bp, Homo sapiens
ggcaaattatttatagaagctatgtggaataagctgtatctatttagattttatataatttggtaattagcatacaatagcttacatgaaataaattcttkaaatagtagaaattatgagtaattccactgggcttactcttgtcttagattacatagatataagtattcttgggcattttgatgctagaccaatgattta

SEQ ID NO: 188317 - DNA, 201 bp, Homo sapiens
ctctggcggggggaggtgggggggcctttcttaagacacccataatgctacacattgcttatgatcagactgtcaagaactgaactcttcaggaatgaggmcccaaaaggctcacttggcttgagtggagacaggtacctggagcgggcctggcaaacatggcagctctatgggccttgtatggaggggctctggtcaggt

SEQ ID NO: 188318 - DNA, 201 bp, Homo sapiens
gcctatgaccgggaatgaacaaggacagcttggaggttaaaagcaagatggagttggataggtcagatctttcactgtctcagtaatattttgccatgggkgtttcatgtttgtgggtcaggagttgggataagctgagctaggtgtcctgccttgggtcatgctttcctgctcatgtggttgtttgcagcgttcggttcc

SEQ ID NO: 188319 - DNA, 201 bp, Homo sapiens
gctcattgcaacctctgtctcctgggttcaagcgattctcctgcctcagcctcctgagtagctgggattacaggcaccagccaatgctcctggcctgcatytttttttttttttttgagatggggtctcactctgtatcctgggttggagtgcagtggtgtgatctcagctcactgaaacctccatctcgcgggttcaagt

SEQ ID NO: 188320 - DNA, 201 bp, Homo sapiens
gaagatgatcagtggtatgtacctgggtgaaatcgtccgcaacatcttaatcgacttcaccaagaagggattcctcttccgagggcagatctctgagacgmtgaagacccggggcatctttgagaccaagtttctctctcagatcgagaggtgagtgggcagtgtcttccctgccagcgcccacccttcagaggtcgcctg

SEQ ID NO: 188321 - DNA, 201 bp, Homo sapiens
ccttgtgaagatttgcatcagctctctttgaggttagagaaggcagctgctggaagaggaaaggggtttatctggaccaactcttctgccaaatccatgtrctggagtttgttgtatgatcactctcctgagtttccagctgtcccttttcatgagtctcctggtcagtggctgggaaggaaggggagcgggagactcgtg

SEQ ID NO: 188322 - DNA, 201 bp, Homo sapiens
tgatgtctggtgtctgggactgggcgccttcccatttccatcccagcctgaccagactgaccagagtcccacatattcgtctcagacactggtttgagagkgagcatttgagggcctgggtttctgtcatgactcctgggaacctctgtcttctgatagatggtccacagaccgaggcttgcagtggaagcagctggaagt

SEQ ID NO: 188323 - DNA, 201 bp, Homo sapiens
aactcctgaccgcaagtgatctgcccgccttggcctcccgaaatgctgggattacgggtgccagctactgcctctggactgcattttttttttttgagacrgagtcttactctgtcgcctgggttgtagtacagtagcacgatctcacctccctgcaacctctgcctgccaggttcaagcgattcttctgcctcagcctcc

SEQ ID NO: 188324 - DNA, 201 bp, Homo sapiens
cgggggtccaactttgggagccgctgagagcttcaaggcccccttggtccacaagaaggagaatccaggacaagtgtctggaaagtgtttgagcaagagcrcccgccctgtgcagccggtctggctaccctcataggaagggctcttcactctgggcagcggtggacagaggccctggaggctggatgcgggttctcaggc

SEQ ID NO: 188325 - DNA, 201 bp, Homo sapiens
atggtgtctcctgcctgtgcctgctgcctcacccccagccccatttgcttagtgttgatgagccccttccacttgggaaggaaatggatccgataaggtcrttaacagtgaaatgttaggaatttgccctgtttttcaaatctcccttttcatttgtctccctctcccattcttgtctgcatttaaaagaggaccccccag

SEQ ID NO: 188326 - DNA, 201 bp, Homo sapiens
tttggcttaactgcacagccctaggttccacctgcctcatgtggggttcataacagctaccttacacattgtgcagatttggatggaggagcttagagcasccagcgtgggccctgtccacattcacgttgctagaacgtcagtttcttcatcaagaatggggatcctggctgggcgcagtggctcacgcctgtaatccca

SEQ ID NO: 188327 - DNA, 201 bp, Homo sapiens
gccccagattccagtcctgatttctgagtctgctttccaggtcagggaatgcactggggctgacgacaaggctggaacgtcccgggattgaagcttggatmcgaactgttggacggcgtctggagttttgcacaaaagagaattgaattgtagatcagctgggaagttactgtggtagtcctggtgccctgcggcctccag

SEQ ID NO: 188328 - DNA, 201 bp, Homo sapiens
cgcagtggctcacgcctgtaatcccagcactttgggaggccgaggtgggcagatcacaaggtcaagagatcaagaccatcctggccaacatggtgaaaccstgtctctactaaaaatacaaaaattagctggacatggtggtgtgcgcctgtagtcccagctactcaggaggttgaggcaggagaatcgcttgaacccggg

SEQ ID NO: 188329 - DNA, 201 bp, Homo sapiens
aaaaagagccctgcgtgattttgtacgtagaaaatcctagaatacccacaaaaacctattagaactaataaacaatttcagcaaggttataggatacaagrttaatatacaaaaatcaattgtagccaggcacggtggctcacgcctgtaatcccagcactttgggaggctgaggcaggtggatcacaaggtcaggagttc

SEQ ID NO: 188330 - DNA, 201 bp, Homo sapiens
agcttggatccgaactgttggacggcgtctggagttttgcacaaaagagaattgaattgtagatcagctgggaagttactgtggtagtcctggtgccctgyggcctccagcgactggaaccctgtgggagcacatagctggcattttttgctagagattaggaagtcttttgcttcctctgtgaaaaggcttgaattcaat

SEQ ID NO: 188331 - DNA, 201 bp, Homo sapiens
gcctcccgcccagcacaggagccacccaacctggcccaggagccaccacgtggtgcctcctagggctcctgggcacacaaagggcccagagggcatggctyctgtacccctggcactcacggtctagctggcggtgtggaccatgcatgtgtccctgcaacgcccaggaaagacacacaccacgaagtgtctcccaggcag

SEQ ID NO: 188332 - DNA, 201 bp, Homo sapiens
tgctcttgagagcatcagccaggacattaatgtgcaccactgtggtggcgtggaaagatggcaaaaagagccctgcgtgattttgtacgtagaaaatcctrgaatacccacaaaaacctattagaactaataaacaatttcagcaaggttataggatacaagattaatatacaaaaatcaattgtagccaggcacggtggc

SEQ ID NO: 188333 - DNA, 201 bp, Homo sapiens
tacaggtgcctgctaccatgcccagctaatttttttgttttgtatttttagtagagacagggtttcactgtgttagccaggatggtctcgacctcctgacyttgtgatttgcccacctcggcctcccaaagtgctgggattacaggcgtgagccaccacgcccagcccggaaaaggttttttaaagagtgaggtagcacct

SEQ ID NO: 188334 - DNA, 201 bp, Homo sapiens
taagctccatgaagacaggatatacgaatagtaggaaaaaaggaagggtttgggtggggaatggtggtgagtcacccttaggattgtgcacaataaaagasagtgaaacaacagattttgtccccaaagaataaaggaaggggagggaggaggaaggaaaaaggtggcctggaatatccattagaacgttggctgccaagt

SEQ ID NO: 188335 - DNA, 201 bp, Homo sapiens
tcagcattgttgatgctcttgagagcatcagccaggacattaatgtgcaccactgtggtggcgtggaaagatggcaaaaagagccctgcgtgattttgtaygtagaaaatcctagaatacccacaaaaacctattagaactaataaacaatttcagcaaggttataggatacaagattaatatacaaaaatcaattgtagc

SEQ ID NO: 188336 - DNA, 201 bp, Homo sapiens
acagagtgggcatttcatctctccacgcattttaaaatcctagttgtttctttttttagctctgagctacttacccgctctaagcctcagctacagcaccsataaaacaaagaattaaggctccatggctgaagagacctaagtacaacacccagctctgctactgttgcatttccatgagtgcctgaattaactcctgta

SEQ ID NO: 188337 - DNA, 201 bp, Homo sapiens
tgtctctcttttcagcattgttgatgctcttgagagcatcagccaggacattaatgtgcaccactgtggtggcgtggaaagatggcaaaaagagccctgcrtgattttgtacgtagaaaatcctagaatacccacaaaaacctattagaactaataaacaatttcagcaaggttataggatacaagattaatatacaaaaa

SEQ ID NO: 188338 - DNA, 201 bp, Homo sapiens
gactgagaggatagagcacaggaccaggaatcagggagcttgctgtccaccccagtctctgcaagtatgtcgccctggccagttgaggaacctcctggccmctcattcttgcccagggtgttggaagtgatggtacctgctctgcttctgcagacaggatgctgtaaggaccaacaggtaaacgcgctgtgccaattagag

SEQ ID NO: 188339 - DNA, 201 bp, Homo sapiens
tgtgacaggtggtttactcacatgctctcctcccagtgtggctccaagtctgtggtggtcagagatgtggtgcccactcttcctctgagtctgtgctgtgycctaaagggaggagttgcagcttctcctctatgtttgctatggggttctccccttgaaagtctggagtcttggggttactggctgccaagaggcacttag

SEQ ID NO: 188340 - DNA, 201 bp, Homo sapiens
aagcctgttctgggtgacatggatgacagcagttgaatgaccttccgccatgcgatgtgccagcgtgcgtgttcctgtgcctgtgggagctggctatctcrgcgggtgggtgcctcaccttgccctgtcctccccctcgacctcactctccttccttctcatccccctccagattgacaagtatctctatgccatgcggct

SEQ ID NO: 188341 - DNA, 201 bp, Homo sapiens
tcaccagtcagggggctgtctgtgctttggtgttttcgggtaggcccagcgtctctcatcttcctccaactaccttctgttttctcgtcctttttagcttytccagaatcatgcaccagacggtgaaggaactgtcaccaaaatgtaacgtgtccttcctcctgtctgaggatggcagcggcaagggggccgccctcatca

SEQ ID NO: 188342 - DNA, 201 bp, Homo sapiens
ttctagtttggtacttttttcctccagtattttaagaatgtcatttcattttcttctggcttccataatttattttgggaagtcagttataattcttattrctgtttttctgcaagttttttttttttcccctttctagctgtttgtaagggtttctctttctctttagtttccaacagtcatttaactataatgtgcttg

SEQ ID NO: 188343 - DNA, 201 bp, Homo sapiens
cgcattttaaaatcctagttgtttctttttttagctctgagctacttacccgctctaagcctcagctacagcacccataaaacaaagaattaaggctccakggctgaagagacctaagtacaacacccagctctgctactgttgcatttccatgagtgcctgaattaactcctgtaagcgtcggcttccctcctgaaaagg

SEQ ID NO: 188344 - DNA, 201 bp, Homo sapiens
atggcgtgatctcggctcactgcaacctccgcctcctgggttcaagtgattcttctgcctcaccctcccaagtagctgggattacaggcatgtgccaccakgcctggctcattttgtatttttggtagagacagggtttctccatgttggtcaggctggtcttgaactcccgatctcaggtgatccaccagcctcggcctc

SEQ ID NO: 188345 - DNA, 201 bp, Homo sapiens
acttcataaccatgaagcactgtctgaatgtcaagggcatccaagtgccccatcccctgcccacaagtcctggagtaacatccaaggatgccttccttccycaggacgctggcgcaggctcaaccccttgcaagcctttggtgactcttgattttacgacaaatacatcttttgtctcttctgttttcaggacttcaacta

SEQ ID NO: 188346 - DNA, 201 bp, Homo sapiens
ttttctccagtgcctccgggccacttaaaggcccacagtccagaggggcatgtctgctgagtcctgcaccaggtgcctgcctggctgggcagtgtggcagrtaccagggagctgacttctcccctggcagcccagccccaggcctagggtatttgctggttcagtggccccttctgatctcccgaggaccagtggaaagaa

SEQ ID NO: 188347 - DNA, 201 bp, Homo sapiens
atcctaagtcgaatcatcaccagtcagggggctgtctgtgctttggtgttttcgggtaggcccagcgtctctcatcttcctccaactaccttctgttttcwcgtcctttttagcttctccagaatcatgcaccagacggtgaaggaactgtcaccaaaatgtaacgtgtccttcctcctgtctgaggatggcagcggcaag

SEQ ID NO: 188348 - DNA, 201 bp, Homo sapiens
tcaggagtttgagaccagcctggccaacatggtgaaaccccttctctactaaaaatacaaaaaaaaaaaaaattagctgggtatggtggcaggcgcctgtratcccagctacttcggaggctgaggcaggagaatcgcttgaacccaggaggcagtttgtggtgagccaagattgcgccactgcactccagcctgggtgac

SEQ ID NO: 188349 - DNA, 201 bp, Homo sapiens
tccagtattgagtgccgtctttgccgtctgctgagtgaacttagacattgctatttacctaatgtgcctcatgctccatctgtgaagtgggattatttcaracccctatgaggatggtgaggagggtctattcatattttattggtttgtcctcagatgtttgaactccgtctccgatgttgtaagccctcagcagttgtt

SEQ ID NO: 188350 - DNA, 201 bp, Homo sapiens
cttatgtcctgataaacccatcacaaagtcgaagaatcctaagtcgaatcatcaccagtcagggggctgtctgtgctttggtgttttcgggtaggcccagygtctctcatcttcctccaactaccttctgttttctcgtcctttttagcttctccagaatcatgcaccagacggtgaaggaactgtcaccaaaatgtaacg

SEQ ID NO: 188351 - DNA, 201 bp, Homo sapiens
gatcgcaccactgcactccagcctgggtgactgagtgagaccctgtctcaataataataataataatataaataaaaataaaaataaagagctggctgggygtggtggttcatgcctgtaatcctagcactttggaaggccaaggtgggcagattacttgaggtcaggagttcgagaccagcctggccaacatggtgaaac

SEQ ID NO: 188352 - DNA, 201 bp, Homo sapiens
actctcagttaggccttggtgttctcctgtggaacacaaacaatttcacagagtccacaaacaattgcagagcagaaacatcagacacagccactccgtcygggaccatgatggatttagacaagaataagaccagtctgtaaccatagaattgcccctggttcctgacaatatccaatccagagcaaagccccacttctt

SEQ ID NO: 188353 - DNA, 201 bp, Homo sapiens
cctgctgaaaactgtgacaatgggattgaccgtgggcccactttcctcccagccattctcaactggccacagctgcttctaagcagcctgcctcccaaccrtgttcaccctccttgttgttgggttcagagtctctttgacttccgatgcttatgtcctgataaacccatcacaaagtcgaagaatcctaagtcgaatcat

SEQ ID NO: 188354 - DNA, 201 bp, Homo sapiens
atcctggggtttaagcccacttattttacagatgaggcccagagagaggcaaacactttcccaaggatacacagtaatttgtaactgggccaaagctcactatagttaagtctttttgtttgaggtgactgagataatgccatctatgattttttcttttaaggcaaatgctgtgctgatattcctcacagtttgagactt

SEQ ID NO: 188355 - DNA, 201 bp, Homo sapiens
cgtcatagtggtgcacaacctgtggtcccacctactgaggaggctgaggtgggcggattacttgagcttaggaggttgagtctgcagtgagccgtggttgyggtagtacactccagcctgggtgacagagcaagatctgtctcttaaataagaaaggatacctgctgatctatttttgcctgcttcacaactattagtgtt

SEQ ID NO: 188356 - DNA, 201 bp, Homo sapiens
cggggtgcccacatggatttgtgtccttgtggcccagaagcaccagatgctttttgccatgcctggcttgtgacactctggtggctgagaagattctggaraaggaggctcactctgcatgtgtgtggggtgtgttttcctacgtgtgtgtgtgtatacacactttggtccatgtgcactgataaaattaaaaccacagag

SEQ ID NO: 188357 - DNA, 201 bp, Homo sapiens
gccataatgctttaaactccaaagggaagaagctatttgaccattgccccttgtctctcctattctatgattcctctaatagtatcatcatctgtaaaatrggtagaatactttcccttccttagatctcatgtttcagatatatccttaatagcaggggtttagtctgtgaaggaacattcattacctttttgtaggctg

SEQ ID NO: 188358 - DNA, 201 bp, Homo sapiens
cagtggcaccggcagtcacgtgatgaccaaaatccgccacggggtgcccacatggatttgtgtccttgtggcccagaagcaccagatgctttttgccatgmctggcttgtgacactctggtggctgagaagattctggaaaaggaggctcactctgcatgtgtgtggggtgtgttttcctacgtgtgtgtgtgtatacaca

SEQ ID NO: 188359 - DNA, 201 bp, Homo sapiens
ggagtgcaatggcgtgatctcggctcaccacaacctccacctcccgggttcaagcagttctcctgcctcagcctccccagtagctgggattacaggcatayacaaccatgcccagctaattttgtatttttagtagagacggggtttctccatgttggtcaggctggtcttgaactcccgacctcaggtgatccgcctgtc

SEQ ID NO: 188360 - DNA, 201 bp, Homo sapiens
cagcatggcttttcagacagggccaccaggtcccaggagtacgagcactttgtttgggtagatgtattcctttctgtgtgtgtgggagggaatggtttatrtttttctatgaaatgctaagcctgctttggggccccctgactgctctcatgtttccttcagctttttgatcatgttgctgagtgcctgggagatttcatg

SEQ ID NO: 188361 - DNA, 201 bp, Homo sapiens
agctgggattacaggcatacacaaccatgcccagctaattttgtatttttagtagagacggggtttctccatgttggtcaggctggtcttgaactcccgayctcaggtgatccgcctgtctaggtctcctaaagtgctgggattacaggtgtgagccaccgcaaccagcccttatagtctttttcttttcttttcttttct

SEQ ID NO: 188362 - DNA, 201 bp, Homo sapiens
cagctgaaaaaccaaaacttcatctacttgctgaaagtgaggtaagaaagctatttttttttttatttccttctgtaacattttctgtaaaagatagtgcrtggcaatcccctttgggataatgattttcagccagccaagcagctgtgcagtggcttctccagggtgtggagcagtattgacctccaacttgctccctgc

SEQ ID NO: 188363 - DNA, 201 bp, Homo sapiens
gccaccgcaaccagcccttatagtctttttcttttcttttcttttcttttttttttgagacagagtctcaccctgttgtccaggctagagtgcagtggtgygagctcagctcactgccacctcctgggttcaagtgattctcctgcctcagcctcccaggtagctgggattacaggtgcacggcaccacgcccagctagtt

SEQ ID NO: 188364 - DNA, 201 bp, Homo sapiens
gcaccatgatgacctgtgcttatgaggagcccacctgtgaggttggactcattgttggtgagtgtcctggaaggtctctttccctgcagaagggaaggctrgggtttccccgttttgtggggccttggcccagcagcttggtcctctgtatggggtagtcttatctgtcagtatcatttcttgaccagctccagagttcag

SEQ ID NO: 188365 - DNA, 201 bp, Homo sapiens
aacctgggaggccaaggttgcagtgagctgagattatgcctctgcattccagcctgggcaacaagagcgaagctctgtctcaaaaaaaaaaaaaaaaaaarggatgaaattctattgggggcagggtggctcatacctgcctatagtcccagttacttgagaggctgaagtgagaggatcttgggagcccaggagcttgag

SEQ ID NO: 188366 - DNA, 201 bp, Homo sapiens
gaaatgctaaatttcagttacagactatcagaaattaatttgtatttttttcccacagaagcttacggatatcaccttctacctgaagggtctctgatgcycaggttattaatctctgatcagaatgttctaatggagctggcacttatttagagacagatcttagatggcagatctaagcaattttagcattccttgtag

SEQ ID NO: 188367 - DNA, 201 bp, Homo sapiens
atacacaggattataagggaaattaatggcatgaattacatttattaaaatgttaaagtggcaccatggtaatacatgcatgtatttattaatgcattatkcagcaagatccagcaggaacctaataacaatgacaattttgaagtcttttttttttttttttgagatggagtctcgctctgttgcccaggctgaagtgca

SEQ ID NO: 188368 - DNA, 201 bp, Homo sapiens
acgcagtatcataggagatggacagcttggtaaaaggataatcatgatgtgtgaggagtgtggtcgttggggcgtgtccaaaatgctggagtagcaatgtrccttttttaaaattaaaattaaaaaaaattttttgagatggagtcttgctgcattgcccaggctggagtgcgatggcgcgatcttggctgactgcaatct

SEQ ID NO: 188369 - DNA, 201 bp, Homo sapiens
accccttggacaatcaagaatacaagaaaccttgtattctttctcagaataatgtttttaaatgcataaaatacacaggattataagggaaattaatggcrtgaattacatttattaaaatgttaaagtggcaccatggtaatacatgcatgtatttattaatgcattatgcagcaagatccagcaggaacctaataacaa

SEQ ID NO: 188370 - DNA, 201 bp, Homo sapiens
gctgggtttaaggtttctgtgctctgggcctgccaccctgtgttctcagaagggtcctagccctttggccgccatttctgtctttctagaagtcttgcccrtggacacctgccagtactactgtctcatgttaataataatagctgatgtttattgagcagttactgtgttctaagtgcttgtgtctcatttgaacttgtc

SEQ ID NO: 188371 - DNA, 201 bp, Homo sapiens
gagctggctatctcagcgggtgggtgcctcaccttgccctgtcctccccctcgacctcactctccttccttctcatccccctccagattgacaagtatctstatgccatgcggctctccgatgaaactctcatagatatcatgactcgcttcaggaaggagatgaagaatggcctctcccgggattttaatccaacagcca

SEQ ID NO: 188372 - DNA, 201 bp, Homo sapiens
caactctgctttgaatgaccttcaaagcgaatgccctgggccagtcccaagggttccttcccctcctcctactccgtctcctgggtaacaacattgtaagmctgggaagaaaggaggtgatagcataatcttctctgtcatgttacagacccagggagcttttaagaaataaataccaatgggaaagaggtaacatgcatt

SEQ ID NO: 188373 - DNA, 201 bp, Homo sapiens
atgaccttcaaagcgaatgccctgggccagtcccaagggttccttcccctcctcctactccgtctcctgggtaacaacattgtaagactgggaagaaaggrggtgatagcataatcttctctgtcatgttacagacccagggagcttttaagaaataaataccaatgggaaagaggtaacatgcattctctgcaagtactt

SEQ ID NO: 188374 - DNA, 201 bp, Homo sapiens
gccaacattcgtaaggtccattcctgatggctctggtaagtctgtcacccagagattgaaccctgagggctaaatgttctgtgaaatcttccttctaactwcatttgttcatacatttgctcattcattcattcaccattccatcaatctgctctcccatccatccatccatccatccgctgatccatctgctgatccatc

SEQ ID NO: 188375 - DNA, 201 bp, Homo sapiens
tgagaccaggggttcaagaccagcttgggcaacatagcaagacactgtgtctacaaaaaaaaaaaaaaaattaaaaattaggctggcatggtggcccatgmctgtggttgcagctactcagcaggctgaggcaggaggattgcttgtgtccaagagttcaagtttgaggctgcagtgtgctacgatggcaccactgcactc

SEQ ID NO: 188376 - DNA, 201 bp, Homo sapiens
gataaagaggccttgtgctgttcactgtggccacgggtggggtctacttcatgctcacatattagcatgtatatctctgatgtaagcctactccacctccmcccttttgtttaggtgttgattactagcacctacttctagctttttaagaactactgaagagattctggccatcagagtgaatagactgtggtctaccct

SEQ ID NO: 188377 - DNA, 201 bp, Homo sapiens
tactcagcaggctgaggcaggaggattgcttgtgtccaagagttcaagtttgaggctgcagtgtgctacgatggcaccactgcactccaacctggtcaacrgactgagactctgacttggccttttggagatgtctttgctaatttccacttctattggatttcctctccaaagcatgactctttctttggacatagtcat

SEQ ID NO: 188378 - DNA, 201 bp, Homo sapiens
ctcacctggcctgtttttatttttattttttagttgttcttcaataatctgtatatcattaaaaaaaccccaaaaacctaaagtggctttttgctgctgcrtatcatttttgaggtagtggatgaatgaataataaagaaggaaaatattgaagcctcttaacattggtgatttggctaaatagaattccctcttcaaagc

SEQ ID NO: 188379 - DNA, 201 bp, Homo sapiens
ttgcagtgcagtggcatgatctcggctcactgcaacctccgcctcccgggttcaagcaattctccggcttcaacttcctgagtagctgggattacaagtgygcaccaccacgctgggctaatttttgtatttttagtagagacgaggtttcaccatgttggccagactggtctcgaactcctgaccttgtgatctgcccgc

SEQ ID NO: 188380 - DNA, 201 bp, Homo sapiens
gatattgccctgtcacccaggttggagtgcagtggcacaatcatggctcactgaagccttgaactcctgagctcaactgatcctcttgcctcagcctcccwagtagctgggactagaggcgtgtgcccccacaaccagccagtttttaatttttttttgtagagacagggtcttgctatgttgcccaggctgttcttaaat

SEQ ID NO: 188381 - DNA, 201 bp, Homo sapiens
gtgtggtcagattcttcagtcttcttttctgcaatagataatgagataacagggagggtaaggataaagttctccttggagggtctgcgtggtctttatgyagataggagaaaagcattttccagcatctgttgatctttaagggcctttagttcaaaatactcattataccagggagccatattttggggtgaagtattt

SEQ ID NO: 188382 - DNA, 201 bp, Homo sapiens
caaccagccagtttttaatttttttttgtagagacagggtcttgctatgttgcccaggctgttcttaaatccctggcgtcaagtgatcctcctgcctcagyctcctaaagtgctgggattacaggtatgagccactgcacccagcttaggaccttgattatgtgaggtaggacaagaagtgctggaaagatcatccctgcc

SEQ ID NO: 188383 - DNA, 201 bp, Homo sapiens
aataggaatcgatacttcttggtttcggcttcattgttcctacacagcctttacccaaaagagaagtttttacccaaaggagaagtaaaaaaaaaaatttkctagaagcttggatgtgccattatcttttttcatgcaaagcagagccatttacagtgtagtcacggttgttttggggccctaaatattcatactactgtt

SEQ ID NO: 188384 - DNA, 201 bp, Homo sapiens
aaattagccagttgtggtggcacacgcctgtaatcctagctacttgggaggctgaggcatgagaattgcctgaacccgggaggtggaggttgcagtgagcygagatcatgccactgcattccagcctgggtagcattccagcctgggtaacagagtgagactttgtctcgaaaaaaaaaataaatgcatacattacggtca

SEQ ID NO: 188385 - DNA, 201 bp, Homo sapiens
attacaggtatgagccactgcacccagcttaggaccttgattatgtgaggtaggacaagaagtgctggaaagatcatccctgccctccaggggagatacayacatggattacccctgattcttacagggactacctgcatgtccatgggctgctatgcaagcttccaggaacttcagtctccttccttatagagtgggatt

SEQ ID NO: 188386 - DNA, 201 bp, Homo sapiens
gatttggcctccactggctccagagcaggcatgctggctacactcccaacactcatttctggaggtgtgacttgagcccattaccaagcatttttattcayccccctgctccctatctggcatcttctgtatgtggggacgtttatcaactctgtgctccttgggtagccttcttctgtgcccagtgacacaggacagctc

SEQ ID NO: 188387 - DNA, 201 bp, Homo sapiens
gcactggggaagaggtgagattacaaaaccatagtgcatgtgcactgcacacacggccagtggcaccggcagtcacgtgatgaccaaaatccgccacgggrtgcccacatggatttgtgtccttgtggcccagaagcaccagatgctttttgccatgcctggcttgtgacactctggtggctgagaagattctggaaaagg

SEQ ID NO: 188388 - DNA, 201 bp, Homo sapiens
agactcttaagccaggtaattaaggaaactgtgaggttttcatcatttaatcaccatgctctgatctagttaatttgagtaccagctgtaatgaaaccagyaccactcacaaaagcaggggttctgaaaacgggagcacttctgccaagcgctgttaaggtgtgtgatctctgctcccatgtgtgagtggacaatgacacc

SEQ ID NO: 188389 - DNA, 201 bp, Homo sapiens
ggccctaaatattcatactactgttttccagtcaacggaaggaaaatatttaccttctcttcttgcagcatttgggtggtctcagttttcttatatggaargatagttgggttatctcaagtattctctctatctgtgaaacctcctgagttgaaggcgtggagttcccatcatgcagctggattgtagatgggcaggaat

SEQ ID NO: 188390 - DNA, 201 bp, Homo sapiens
cttcttgcagcatttgggtggtctcagttttcttatatggaaggatagttgggttatctcaagtattctctctatctgtgaaacctcctgagttgaaggcrtggagttcccatcatgcagctggattgtagatgggcaggaatgcctgtgtatctcatgtacagaattaattcattgaggctgggcacggtggctcatgcc

SEQ ID NO: 188391 - DNA, 201 bp, Homo sapiens
gcaggaatgcctgtgtatctcatgtacagaattaattcattgaggctgggcacggtggctcatgcctgtaatcccagcactttgggaggccgaggcaggcrgatcacctgaggtcaggagttggagaccggcctagccaatatggcgaaaccccgtctctactaaaaatacaaaaattagctgggcatggtggccggtgcc

SEQ ID NO: 188392 - DNA, 201 bp, Homo sapiens
tctcggctcactgcaagctccgcctcccgggttcacgccattctcctgcctcagcctcccgagtagctgggactacaggcgcccaccaccacgcccggctrattttgtgtatttttagtagagacggggtttcaccgtgttagccaggatggtctcgatctcctgaccttgtgatccacccgcctcggcctcccaaagtgc

SEQ ID NO: 188393 - DNA, 201 bp, Homo sapiens
ctcactgcaagctccgcctcccgggttcacgccattctcctgcctcagcctcccgagtagctgggactacaggcgcccaccaccacgcccggctgattttktgtatttttagtagagacggggtttcaccgtgttagccaggatggtctcgatctcctgaccttgtgatccacccgcctcggcctcccaaagtgctgggat

SEQ ID NO: 188394 - DNA, 201 bp, Homo sapiens
aggattcgctggcatctctgtgatgttacaggggaaggaggcagagaaaaggggcaagccaaggcaggctgtctcacccccaacccctgagctagccacayaaaatgtgggtgagaccacaggctacagctccagtacctctgcaagggggtgactggacacgacagctctgaatcagggagccaacccgaggtaaaaggg

SEQ ID NO: 188395 - DNA, 201 bp, Homo sapiens
ggactacaggcgcccaccaccacgcccggctgattttgtgtatttttagtagagacggggtttcaccgtgttagccaggatggtctcgatctcctgacctygtgatccacccgcctcggcctcccaaagtgctgggattacaggcgtgagccaccgcgcccggccctgcacaagcatatttcaagtgtctgtttgcatggc

SEQ ID NO: 188396 - DNA, 201 bp, Homo sapiens
acggggtttcaccgtgttagccaggatggtctcgatctcctgaccttgtgatccacccgcctcggcctcccaaagtgctgggattacaggcgtgagccacygcgcccggccctgcacaagcatatttcaagtgtctgtttgcatggcattgctattgtcctatgagcccaagcaagtcacatggccagttctggagttgct

SEQ ID NO: 188397 - DNA, 201 bp, Homo sapiens
agtcacatggccagttctggagttgctgtgagtggagactatgtaaaagcatgggtatagggaggagaattagtgtggctgttttttgcaaacaatttacyacaccctccctatccattcagctatcatcaggaaaaaattcatatgagcttttctcttgattggcagcagcttccaaaatttgtgaggcaaaggaagtta

SEQ ID NO: 188398 - DNA, 201 bp, Homo sapiens
cacatctgtgatcccagcactttgggaagttgaggcaggtggatcacttgagcccaggagtttgagaccagcctggtcaacacagagggactccatctgtrcaaaaactaaaaaatgtggccaggcacggtgcctcacacttgtaatcccagcacttgggaagctgaggcaggcagatcactcaaggtcaggagttcaaga

SEQ ID NO: 188399 - DNA, 201 bp, Homo sapiens
ggtacctggagcgggcctggcaaacatggcagctctatgggccttgtatggaggggctctggtcaggtattgcagggggatggggtggggagggagtctgsggctggaaaggaagtagagagcacctcccatgctgaccacacttagagcatggaaaggggcaggatggtcttgggcaccattttgcctttagtagccact

SEQ ID NO: 188400 - DNA, 201 bp, Homo sapiens
cacggttgtctttcatcttggactctccagcttccaacacagtgcctggtacatttgtaagaacctagtgtttgtgtgaataaattcatgaattgcacatkactgagctctgctgcatttcatccagagaactggtaatcatgatagaatttgcttagacattccaaggttacttgtaattacttttgttttctgagcgtg

SEQ ID NO: 188401 - DNA, 201 bp, Homo sapiens
gagtctgcggctggaaaggaagtagagagcacctcccatgctgaccacacttagagcatggaaaggggcaggatggtcttgggcaccattttgcctttagyagccactgtgtgcgcacggtcccagccactgaagggggttgcagaggggttgtctctgcagctcgttgccttgtaatccaaaacacattaggggtctggg

SEQ ID NO: 188402 - DNA, 201 bp, Homo sapiens
ttccaacacagtgcctggtacatttgtaagaacctagtgtttgtgtgaataaattcatgaattgcacatgactgagctctgctgcatttcatccagagaaytggtaatcatgatagaatttgcttagacattccaaggttacttgtaattacttttgttttctgagcgtgattgattagttataagcatcaatatgttgtg

SEQ ID NO: 188403 - DNA, 201 bp, Homo sapiens
cttgaaagtctggagtcttggggttactggctgccaagaggcacttagctgtttttgacattctttacgcttttgactgcaacagagaatggtgacttctyggccctggatcttggaggaaccaatttccgtgtgctgctggtgaaaatccgtagtgggaaaaagagaacggtggaaatgcacaacaagatctacgccatt

SEQ ID NO: 188404 - DNA, 201 bp, Homo sapiens
ctgtctggcagtagcaaggagcttgagctggaggaagccttgggcatccaggaaaccagagagggggtagggggcataagtgtagtgagacctccaggatrtgtgctgtgcaagatgatctacttcccagtgggaagaaagtacagttgaccctgaagcaatgagggggttatggacactgaccacccccacatcatgcag

SEQ ID NO: 188405 - DNA, 201 bp, Homo sapiens
aggccaaagcaggtagatcacctgaggtcaggagtttgagaccagcctggccaacatggtgaaaccttgtctctaccaaaaatacaaaaagtagctgggcmtggtgtcacacacatgtaatcccagctaattgggaggctgaggcaggagaattgcttgaactcaggaggcagaggttgctgcgagccgagatggcactcc

SEQ ID NO: 188406 - DNA, 201 bp, Homo sapiens
actttctactcccccaaaaccaaactgctaaaactactgttgaccaaaagccttactgataacataaagtcaattaacaaatattttgtatgttttatatwctatattctgtattcttacaataaagtaagctagagaaaagaaaatgttattaagaaaatcataaggaagagagatagatttactattctttaagtggga

SEQ ID NO: 188407 - DNA, 201 bp, Homo sapiens
aaatattttgtatgttttatattctatattctgtattcttacaataaagtaagctagagaaaagaaaatgttattaagaaaatcataaggaagagagataratttactattctttaagtgggagtggatcaccatgaaggtcttcatccttgtagtcttcactttgtgtaggctgaggaggaggtagaggagggcttagtc

SEQ ID NO: 188408 - DNA, 201 bp, Homo sapiens
agggtcaactgtattacaattccattgtcaccaactttttaaagacaaatcaacgttggtggccttgcaggtacccaggactctcacaatgaggaggggtygatagtggccccctcctttatttcctagaccatctttagcatattctgaagcatcgcagctttagaattgcttggttgaggccggatgtggtggcttatt

SEQ ID NO: 188409 - DNA, 201 bp, Homo sapiens
cccgtctctactaaaaatacaaaaattagccaggcgtggtggcaggcacctgtaatcccagctactcgggaggctgaggcaggagaaatgcttgaacccargaggcggaggttacagtgagctgagatcatgccattgcactccagcctgggcaagaagagagaaactccatctcaaggaaaaaaagaaaaaaaaagaatt

SEQ ID NO: 188410 - DNA, 201 bp, Homo sapiens
ctgagatcatgccattgcactccagcctgggcaagaagagagaaactccatctcaaggaaaaaaagaaaaaaaaagaattgcttggttgaagtagtcttaygtatcatgttatttgggtttaattagactgatcctcacaaaataggcaagtggttttaaaagatttctgcataaaaaatgtgggttgagacaggtgtagt

SEQ ID NO: 188411 - DNA, 201 bp, Homo sapiens
tgagatcatgccattgcactccagcctgggcaagaagagagaaactccatctcaaggaaaaaaagaaaaaaaaagaattgcttggttgaagtagtcttacrtatcatgttatttgggtttaattagactgatcctcacaaaataggcaagtggttttaaaagatttctgcataaaaaatgtgggttgagacaggtgtagtg

SEQ ID NO: 188412 - DNA, 201 bp, Homo sapiens
ctcatacctgtaataccagtgctttaaaagaccaaggagaggatcacttgaggccagggtcttgagaacatcctgggcaacatagcaagacctcatctctwaaaaaaattgtaaaaattagctgagcatggtgatgtgtgcctacaatcccagctacttgagaggctgaggcaggagaattgcttgagtccaagagtttga

SEQ ID NO: 188413 - DNA, 201 bp, Homo sapiens
tttgttggcagaatggtttgcatgtctggtatttttaaagaaacatttgcagaagttagtgtggtatcatgatatagtgtttactttttcacttaaacttyagttatttatgtatttttggagacaaatcagggtatttttggccaccaggtagacagaagcatttattaatcttaggcaagcaaaggaaaataaagtagt

SEQ ID NO: 188414 - DNA, 201 bp, Homo sapiens
gttttctcgtcctttttagcttctccagaatcatgcaccagacggtgaaggaactgtcaccaaaatgtaacgtgtccttcctcctgtctgaggatggcagyggcaagggggccgccctcatcacggccgtgggcgtgcggttacgcacagaggcaagcagctaagagtccgggatccccagcctactgcctctccagcact

SEQ ID NO: 188415 - DNA, 201 bp, Homo sapiens
aaaactaccaaagcccttttggtctggccagggggtgtgtcttgtgccctcccgatgaaagttcacctacatcccaccctggatgggtggatggtgctccygggcgcatcattagcatcatcctgggagcttgttagagatgcaggctctcaggtcctggccctagcctcttgaatctggatctgcttcttagggtcccca

SEQ ID NO: 188416 - DNA, 201 bp, Homo sapiens
tttaaaatagttcatctttatctctttatttatttattttttggaaacagagtctcactctgttgcccaggctggagtgcagtggcatgatctcagctcaytgcaacctctccctcctgggttcaagtgattcttctgcctcagcctcccaagtacctgggattacaggcgtgcgccaccatgcccgacctatgtttttat

SEQ ID NO: 188417 - DNA, 201 bp, Homo sapiens
gagcagccctaggagagttaggtagggtcacctacctctgtaaaccagttaatccagttacatcgctgacttgggacttttttcttctgaaacccttttakagctcaggagttagatctgtttgtttgtttttaaagcatttcacttataccttcaccttggattcatcatagtcaacacacacccagtgtactttcttcc

SEQ ID NO: 188418 - DNA, 201 bp, Homo sapiens
gagtgcagtggcatgatctcagctcattgcaacctctccctcctgggttcaagtgattcttctgcctcagcctcccaagtacctgggattacaggcgtgcrccaccatgcccgacctatgtttttattttttttaaatgaaagtataatttactaccagtcaaacacacaaattctgtaagcttaataagtgtgttgttgt

SEQ ID NO: 188419 - DNA, 201 bp, Homo sapiens
gtggcatgatctcagctcattgcaacctctccctcctgggttcaagtgattcttctgcctcagcctcccaagtacctgggattacaggcgtgcgccaccaygcccgacctatgtttttattttttttaaatgaaagtataatttactaccagtcaaacacacaaattctgtaagcttaataagtgtgttgttgttgaaaca

SEQ ID NO: 188420 - DNA, 201 bp, Homo sapiens
ccattcctattgaaatcatgcagggcactggggaagaggtgagattacaaaaccatagtgcatgtgcactgcacacacggccagtggcaccggcagtcacrtgatgaccaaaatccgccacggggtgcccacatggatttgtgtccttgtggcccagaagcaccagatgctttttgccatgcctggcttgtgacactctgg

SEQ ID NO: 188421 - DNA, 201 bp, Homo sapiens
ggttcaagtgattcttctgcctcagcctcccaagtacctgggattacaggcgtgcgccaccatgcccgacctatgtttttattttttttaaatgaaagtayaatttactaccagtcaaacacacaaattctgtaagcttaataagtgtgttgttgttgaaacagggtctcgctctgtcatgcaggctggagtgcagtggtg

SEQ ID NO: 188422 - DNA, 201 bp, Homo sapiens
aaatgttaaagtggcaccatggtaatacatgcatgtatttattaatgcattatgcagcaagatccagcaggaacctaataacaatgacaattttgaagtcttttttttttttttttgagatggagtctcgctctgttgcccaggctgaagtgcagtggcgcaatctcggctcaccacaagctctgcctcctgggttcatgc

SEQ ID NO: 188423 - DNA, 201 bp, Homo sapiens
ttttttgtatttttagtagagatggagtttcaccgtgtcagccaggatggtctccatctcctgacatcatgatccgcccacctcggcctcccaaagtgctrggattacaggcatgagccaccgctcccagcctaacttttgtatttttagtagagatggggtttcaccatgttggccaggctggtgtcgaactcctgacct

SEQ ID NO: 188424 - DNA, 201 bp, Homo sapiens
gccaccgctcccagcctaacttttgtatttttagtagagatggggtttcaccatgttggccaggctggtgtcgaactcctgacctcaggtgatccccctgycttggcctcccaaagcgctgggattacaggcatgagccactgcgcccagccagtttgcataatctccaataactagtcttcaagttcagtgacagatttt

SEQ ID NO: 188425 - DNA, 201 bp, Homo sapiens
cagctacttgggaggctgaggtgggaggatcacttgggccctggaaggtcaaggctgcagtgagctgtgattgatccactgcactccagcctgggcaaaasaatgggaccctgtctcaaaaaaaaaaaaaaaaagtttgtaggtttcatttgtttgctttgtttgtttgttctgagatacatttacaggtagaattcttag

SEQ ID NO: 188426 - DNA, 201 bp, Homo sapiens
cttacatcctatatcctaaccaccaattctaaatattttaaattcccattacaatgtcttattttattcatgagttattaaaaaaaaaaaaccaaaaaacaaaaaaccttttaaggccgggcacggtggctcacgcctgtaatctcagtactttgggaggccaaggtgggaggatagcttgaggccaggaatttgagacca

SEQ ID NO: 188427 - DNA, 201 bp, Homo sapiens
tgcctggtacatttgtaagaacctagtgtttgtgtgaataaattcatgaattgcacatgactgagctctgctgcatttcatccagagaactggtaatcatratagaatttgcttagacattccaaggttacttgtaattacttttgttttctgagcgtgattgattagttataagcatcaatatgttgtgaatgcaagttg

SEQ ID NO: 188428 - DNA, 201 bp, Homo sapiens
aggtgggaggatagcttgaggccaggaatttgagaccagcctgagcaacatggcgagaccccatctctactagattaaaaaatacataaaaaataaaattwaaaaaaaaaacaacttaaatttgtacatttgtaatttccaagtatattgttttaaatttgatcattttgttaattttaacttaattatatgttgatttat

SEQ ID NO: 188429 - DNA, 201 bp, Homo sapiens
gtttgcttgagcccaggagttcgaaaccagcctgagcaacagaagctgcagtgagctatgatggcgccactgcattctagtctgggcaacagagcaatackctgcctcaaacaaacaaaaggagaaactttatgacattttacctgggtttacgaatactctagaaatgtgtctgcactatgtcttggttctcagtattag

SEQ ID NO: 188430 - DNA, 201 bp, Homo sapiens
tataattcaaaatgagatgtgggttgggacacaaagcctaaccatatcacacattcctcagtacatatattttaattattttgagattatatatctttatragtccacttatgcgaaatggccagaaggcaaattcacagacacagaaagtagattagtggttgccaggggctgggggaaggatcgaatgagaatggctgg

SEQ ID NO: 188431 - DNA, 201 bp, Homo sapiens
ttctggaggtgggtcttaggccagggtttaaggcttaatgagcagccctaggagagttaggtagggtcacctacctctgtaaaccagttaatccagttacrtcgctgacttgggacttttttcttctgaaacccttttagagctcaggagttagatctgtttgtttgtttttaaagcatttcacttataccttcaccttgg

SEQ ID NO: 188432 - DNA, 201 bp, Homo sapiens
gtcctttggaaggccacagtctagtgggggagccgagtccctaacaccagcggctccagctccatgctgtcagggctggggagtggattctgggcagaagraaccaatggtgcagagtcacggaggcaagacccagcctgtcacgctggaagagctgtaggtagctctgggtgtcacaggtggagacgtgaccaggcagga

SEQ ID NO: 188433 - DNA, 201 bp, Homo sapiens
tcccattcttgtctgcatttaaaagaggaccccccaggagggcaatgcttaacctgcatgaaaaccccctcaatgctccttgcgatgcccactcctggcckctgcctgggggtactgtaagcagctgtcgattccatcaattgattgacacatggggcttgtcttcagccatgttattcacccagacctcatgtccctgat

SEQ ID NO: 188434 - DNA, 201 bp, Homo sapiens
ctcagagctgaaggttacagctcctgtcctttggaaggccacagtctagtgggggagccgagtccctaacaccagcggctccagctccatgctgtcagggytggggagtggattctgggcagaaggaaccaatggtgcagagtcacggaggcaagacccagcctgtcacgctggaagagctgtaggtagctctgggtgtca

SEQ ID NO: 188435 - DNA, 201 bp, Homo sapiens
tcgcctgaggtcaggagttgagaccagcctggccaacatagtgaaatcctgtctctactaaaaatacaaaaaattagctgggcgtggtgccaggtgcctgyaatcccagctactcgggaggttgaggaaggagaatcgcttgaatccaggaggcagaggttgcagtgagccaagattgtgtcattgcactccagcctgggc

SEQ ID NO: 188436 - DNA, 201 bp, Homo sapiens
ccttatagccagcgatctctgtgcaaagagcaggccttgctccccatggacctgtgatggtcttggagagggctgtgattggcttacttgggttatgtgcycatcctgaaccaatcacgatggacaagatgggtgacttgggatgcccctggatcccatgcctggattacgcattggtacccctggagctggagtggggat

SEQ ID NO: 188437 - DNA, 201 bp, Homo sapiens
gaggaaggagaattgcttgaacctgggaggcgaaggttgcagtgagccgagattgtgccattgcactccagcttgggcaacaacagcgagactccgtctcaaaaaaaaaaaaggtttgttttatagtgaactgtggagggataagggacaaagctgggcacaaaaatagatctgatggtagggttaggactgagggggcag

SEQ ID NO: 188438 - DNA, 201 bp, Homo sapiens
acaaacaaaaggagaaactttatgacattttacctgggtttacgaatactctagaaatgtgtctgcactatgtcttggttctcagtattagggtgtttagsttcctaattggtgaggacaaaaatgagaccgacaatcctctgaccctgccttctttgaacttggcctttctctaggcgttcaagacccagctgttgagag

SEQ ID NO: 188439 - DNA, 201 bp, Homo sapiens
ttggaaactgcctgccatttcctctgacatctgaagcacttgctgtaaagcactcactgcttacactatggctgcctggctggctttccttgagaatatgtatatttaatctgtattttgtctatgaagctttttgagggctctgtagttctactccacacattgcccactcacccatcccattttcctccggtagctgct

SEQ ID NO: 188440 - DNA, 201 bp, Homo sapiens
cctgctgactactgattggctgggctcagagctgaaggttacagctcctgtcctttggaaggccacagtctagtgggggagccgagtccctaacaccagcrgctccagctccatgctgtcagggctggggagtggattctgggcagaaggaaccaatggtgcagagtcacggaggcaagacccagcctgtcacgctggaag

SEQ ID NO: 188441 - DNA, 201 bp, Homo sapiens
gattgttgccttgcttataacacttcttacacagttagttcttagtgtcttttgtttctgctagtggtagactccgtgagcaaggacctgtatccctgcaygccctagcacagtgtccaatcagaggagataataaatgtttgttcaatatatgagatgaatcagggtccaggatcagagcttgagcacctgctgactact

SEQ ID NO: 188442 - DNA, 201 bp, Homo sapiens
ctaacatggtctctactgaaaatacaaaaaattagccgggcgaggtggcgggcgcctgtagtcccagctactcaggaggctgaggcaggagaatggcgtgmactcgggaggcggagcttgcagtgagccgagattgcgccactgcactccagcctgggcgacagagagagattccatctcaaaacaacaacaaaaaacaaa

SEQ ID NO: 188443 - DNA, 201 bp, Homo sapiens
acagtggctgacacctgtaatcccagcactttgggaggctgagggaggagaatcgcttgagcccaggggtttaagaccagcctgggcaacatagtgagatyccgtctctacaaaaaattaaaaaattagccagctgtggtagtttgagcctgtagtcccagctgcagaggctgaggtgggaggatcacttgagctctgaag

SEQ ID NO: 188444 - DNA, 201 bp, Homo sapiens
catgcagttttcctgcctcagcctccccagtagccgggattacaggctcccgccaccacgcctggctaattttttgtatttttagtagagacggggtttcrccaagttggccaggctggtctcgaactcctgacctcaggtgatccacccgcctcagcctctcaaagtgctgtgattacaggcgtgaacctctgtgctcag

SEQ ID NO: 188445 - DNA, 201 bp, Homo sapiens
ggaaagaaggagcccttctaaacctggaagcttgtttgggatgtcattgccacctctcatggcccccttcttgtgcccctgcctggctttgccagtcccaggcagaatgccaccaggaatttaaagcaggccaggccagccttggagaggtggcacaaagcagccagtgtcacaggcgccatgtggcagtcagcaggtttg

SEQ ID NO: 188446 - DNA, 201 bp, Homo sapiens
ccccgaagcacaagcatatttctttcttttttttttttttttttttttttgagacagagtctcccactttggctcaggctggagtgcagtggcgtgatctyggctcactgcaagctccgcctcccgggttcacgccattctcctgcctcagcctcccgagtagctgggactacaggcgcccaccaccacgcccggctgatt

SEQ ID NO: 188447 - DNA, 201 bp, Homo sapiens
cgggaagttgcctggggatcagaaaggaaggcaaaaatgtgtgtggaatttgtcaaaatttgttaagcccatatagcataataaggagaacatctatctayaaaaacaaagttaaatcataaattatagctgagtacagtggctgacacctgtaatcccagcactttgggaggctgagggaggagaatcgcttgagcccag

SEQ ID NO: 188448 - DNA, 201 bp, Homo sapiens
tcctgggtaacaacattgtaagactgggaagaaaggaggtgatagcataatcttctctgtcatgttacagacccagggagcttttaagaaataaataccartgggaaagaggtaacatgcattctctgcaagtactttggtaactcatagcagtgttttaactagactcgggaagttgcctggggatcagaaaggaaggca

SEQ ID NO: 188449 - DNA, 201 bp, Homo sapiens
ccagccagtttgcataatctccaataactagtcttcaagttcagtgacagattttttttctgctgtggccaacctgctcttaagcctagccaatgaattcktaatttaaaacattatatttttcaattgtagaatatccatgtccttttttagagatttaatttctctattgacattatttatcttttcgtccattttttc

SEQ ID NO: 188450 - DNA, 201 bp, Homo sapiens
caccatacctggctaatttttgtatttttggtagagatggggtttcaccatgttgactagactggtctcgaactcctggcctcaagtgatctgcccgcctyggcctcccaaagtgctgggatcacaggcatgagccgccacgccgggccagagttacctgtttctttggaccttcatttccttatgaaggcttctgcgtca

SEQ ID NO: 188451 - DNA, 201 bp, Homo sapiens
aggcctcagccaccgtacccggcctatttttaattttttttttcagtagagacagggtcttgccatgttgccccggctggtcttgaactcctgagctcaarcaatccacctgcctcagcctcccaaagtgcttggattacagatgtgagccaccatgcccggctgtttaagaagttttaacacacgtatacacctatgtaa

SEQ ID NO: 188452 - DNA, 201 bp, Homo sapiens
gggactccatctgtgcaaaaactaaaaaatgtggccaggcacggtgcctcacacttgtaatcccagcacttgggaagctgaggcaggcagatcactcaagktcaggagttcaagaccagctgggccaacatagagaaatcccatctctactaaaaatacaaaaaaaataattagccgggtgtggtggcggatgcctgtaat

SEQ ID NO: 188453 - DNA, 201 bp, Homo sapiens
atcccagcacttgggaagctgaggcaggcagatcactcaaggtcaggagttcaagaccagctgggccaacatagagaaatcccatctctactaaaaatacaaaaaaaataattagccgggtgtggtggcggatgcctgtaatcccaactactcagaaggctgaggcaagagaatcgcttgaacctgggaggcagaggttgc

SEQ ID NO: 188454 - DNA, 201 bp, Homo sapiens
ccaactacttgggagggtgaggtgggaggattgcttgagcccgggaggtcgaggctgcagtgagccttaatcatgccaccgcactccaagcctgggcaacrgagagagagagagagagagagagaaagagagaccctgtctcaaaaaaaaaaaaaaaatagcgaggggagggcagaatgctaactcatctttcgcagaccc

SEQ ID NO: 188455 - DNA, 201 bp, Homo sapiens
aacactttacttgtcctgtctttctctaaggctacagcagctgaaaaaccaaaacttcatctacttgctgaaagtgaggtaagaaagctattttttttttyatttccttctgtaacattttctgtaaaagatagtgcgtggcaatcccctttgggataatgattttcagccagccaagcagctgtgcagtggcttctccag

SEQ ID NO: 188456 - DNA, 201 bp, Homo sapiens
ggagaattgcttgagtccaagagtttgaggctgcagtgagctatgatttgtgcccctgcaccccagcgtgggtgacagtgagaccctgtctcttaaaaggaaaaaaaaaagtagaagcttttgaagctaacacaaatgaacaatgagaaaataagatggctgataattttcctacccctggtacagactattcagctacat

SEQ ID NO: 188457 - DNA, 201 bp, Homo sapiens
gttaatgatgaactaatcactatgtgtacagagtgccttgagagaattagctaatgacactactaggccaccaaattttaaaatagttcatctttatctcwttatttatttattttttggaaacagagtctcactctgttgcccaggctggagtgcagtggcatgatctcagctcattgcaacctctccctcctgggttca

SEQ ID NO: 188458 - DNA, 201 bp, Homo sapiens
tgaactaatcactatgtgtacagagtgccttgagagaattagctaatgacactactaggccaccaaattttaaaatagttcatctttatctctttatttatttattttttggaaacagagtctcactctgttgcccaggctggagtgcagtggcatgatctcagctcattgcaacctctccctcctgggttcaagtgattc

SEQ ID NO: 188459 - DNA, 201 bp, Homo sapiens
ccgtgggctcaagtgaccctcccacctggtctcccaagtagctgggactacagccatgtaccagcctgcccatttttttgtttgtttgtttgtggtttttktttgtttgtttgtttgtttgtttgagacggagtctctctctgttgcccaggctggagtgcaatggcgtgatctcggctcctgcaaccttcgcctcctggg

SEQ ID NO: 188460 - DNA, 201 bp, Homo sapiens
ctagatctttgagttgcacatcaaatctggggctgatcatgccacacttgtttagactgcctgtgaggttcacaacaatttgcctagctctgtgatcatcmatgatttcaaattcgccaatataaccatgcttcatcatcacagtgagaaaccagacgatgactttggagcatggcctaagaacctggtgtttgtctctct

SEQ ID NO: 188461 - DNA, 201 bp, Homo sapiens
tgcgtgattttgtacgtagaaaatcctagaatacccacaaaaacctattagaactaataaacaatttcagcaaggttataggatacaagattaatatacawaaatcaattgtagccaggcacggtggctcacgcctgtaatcccagcactttgggaggctgaggcaggtggatcacaaggtcaggagttcaagaccagcct

SEQ ID NO: 188462 - DNA, 201 bp, Homo sapiens
ccctgcctgtggaacctcaggccccagaccccaggcccagttgcaagacccccaaatgcaaggccaccgctcctcattgccccctcgtgtgttccagggascggcagcaatgcctgctacatggaggagatgaagaacgtggagatggtggagggggaccaggggcagatgtgcatcaacatggagtggggggcctttggg

SEQ ID NO: 188463 - DNA, 201 bp, Homo sapiens
gcatgaaaattaataaatatgaatggttcaaaaatgcttccccaacaaagcacaggaaagttagtgtaaatgtaaggtttaaaaaatatctctatgctgtmgtcacgagtgttgctgttcatggtaagagaggccaacatggtatgtggggcatctaagggagatgagtgtccattcattcatcacatatttattgagcac

SEQ ID NO: 188464 - DNA, 201 bp, Homo sapiens
tttcagagagcgtggcgtcgggcggggcgggaaggccactccacctggtggctggtggagatccgtgacctgtgtgttatgaaggcatagctggttttctrttatttttccatttttctcagtacccagatgttgcatattagtgaccactgagaggccagttctgttgaaggctttgaattgcttcttaagagctgtact

SEQ ID NO: 188465 - DNA, 201 bp, Homo sapiens
caaagtgctggattatagatgtgagccactatgcctggccatagtgtgtgtatttctcaaataaagagtgtgttgtcaggcaagaagagaaaataatgttkttttttttttttttaagacactaaagctttgagttcagagcggttaggtgactttttttcctggttgatcgcagacatagtctagcctggggcgggtcac

SEQ ID NO: 188466 - DNA, 201 bp, Homo sapiens
ctacaagagcagatgttagaggcattctctaaaatcaggagcgagacagtatcaccagtttctatttggcatcgtactggagtcttagccagtgggttttygtttttgtttttgtttttaaagaaaagacgagagataaattaaaggtatgagaatcaaaaaagaagtgaaactgtcattatttgcaaatggtaaaagtct

SEQ ID NO: 188467 - DNA, 201 bp, Homo sapiens
tgaggcaggagaattgcttgaacctgggaggtggaggttgcagtgagctgagatcacaccagtgtactctagcctgggtaacagagtgagactctgtctcaaaaaaaaaaaaaaaaaaaaagaaaagaaaacaattccatgtataatagcatcaaaaagaacaaattacttaggaataaacaagagaagtatagactttta

SEQ ID NO: 188468 - DNA, 201 bp, Homo sapiens
aaaaagaaagagagagaaatagttttgtgttgctgaggggatagggtttgagccaaggacgtaattgtatttttaaaatatttttaaagtatttgcaaaawtcttgataatgaaacttttattagccatttctttcttttttctttgtaatttcttggctaattttttggacaagaaagcctagggatttgcagcatcaca

SEQ ID NO: 188469 - DNA, 201 bp, Homo sapiens
tcctctcactaatgattcagttggcctgggttgcccagtcctctgtattgtaaaagctccctgggcgattccaatttttaaccagggttttttttttgttkttgttgttttgttttttgagacagtcttgctctgtcacccaggctggagtgcaatggcgcaatctcagcttactgcaacctttgcctcccaggttctacg

SEQ ID NO: 188470 - DNA, 201 bp, Homo sapiens
gaggcaggagaattgcttgaacctgggaggtggaggttgcagtgagctgagatcacaccagtgtactctagcctgggtaacagagtgagactctgtctcaaaaaaaaaaaaaaaaaaaaagaaaagaaaacaattccatgtataatagcatcaaaaagaacaaattacttaggaataaacaagagaagtatagacttttac

SEQ ID NO: 188471 - DNA, 201 bp, Homo sapiens
cctgcctgtggaacctcaggccccagaccccaggcccagttgcaagacccccaaatgcaaggccaccgctcctcattgccccctcgtgtgttccagggacyggcagcaatgcctgctacatggaggagatgaagaacgtggagatggtggagggggaccaggggcagatgtgcatcaacatggagtggggggcctttgggg

SEQ ID NO: 188472 - DNA, 201 bp, Homo sapiens
caggcatcctctcactaatgattcagttggcctgggttgcccagtcctctgtattgtaaaagctccctgggcgattccaatttttaaccagggtttttttkttgttgttgttgttttgttttttgagacagtcttgctctgtcacccaggctggagtgcaatggcgcaatctcagcttactgcaacctttgcctcccaggt

SEQ ID NO: 188473 - DNA, 201 bp, Homo sapiens
gaggtgggaggatcacttgggccctggaaggtcaaggctgcagtgagctgtgattgatccactgcactccagcctgggcaaaacaatgggaccctgtctcaaaaaaaaaaaaaaaaagtttgtaggtttcatttgtttgctttgtttgtttgttctgagatacatttacaggtagaattcttagggtttggtaacaggtta

SEQ ID NO: 188474 - DNA, 201 bp, Homo sapiens
tctcagttgtattagtctgttttcacactgcctataaagacatacccgtaactgggcaatttacaaaagaaagaggtttaataaacttacagttccatgtrgctggggaagcctcataatcatggcacaagtcatgtcttacatggatggcagcaggcaaagagaaattgtgcaggggaactcctctttataaaaccatca

SEQ ID NO: 188475 - DNA, 201 bp, Homo sapiens
ggatggatggatgggtggctgatgatggatgagagatgagtgggtggctaaatgggggtacagatgagaaagtgaaaggttggggcaaaatctcttttctygaatatgtttctcagttgtattagtctgttttcacactgcctataaagacatacccgtaactgggcaatttacaaaagaaagaggtttaataaacttaca

SEQ ID NO: 188476 - DNA, 201 bp, Homo sapiens
cttagggtttggtaacaggttacatgtggagcccatgggagtggaaggagttcaaggatgatggcagattttcagcagaggcgatgaggggctagttctgcctggaacactcttttcctagacactggcatagtgtccctcatcttattctggtttctgctcaaatgccacatcttcagaggtccttccctgtccatcctg

SEQ ID NO: 188477 - DNA, 201 bp, Homo sapiens
tctttttgctaatttgttagtccttcaaaggcagtctgatctccagacaagaagagggtttgttttggaaaagggctgttatcatcttgttgtatttttatttttattatttatttatttatttatttatttatttatttatttatttttgggggacagagtctcgctctatcgcccagaatggagagcagtggcccagtc

SEQ ID NO: 188478 - DNA, 201 bp, Homo sapiens
ctttttgctaatttgttagtccttcaaaggcagtctgatctccagacaagaagagggtttgttttggaaaagggctgttatcatcttgttgtatttttatttttattatttatttatttatttatttatttatttatttatttatttttgggggacagagtctcgctctatcgcccagaatggagagcagtggcccagtct

SEQ ID NO: 188479 - DNA, 201 bp, Homo sapiens
ttgctaatttgttagtccttcaaaggcagtctgatctccagacaagaagagggtttgttttggaaaagggctgttatcatcttgttgtatttttatttttattatttatttatttatttatttatttatttatttatttatttttgggggacagagtctcgctctatcgcccagaatggagagcagtggcccagtctcggc

SEQ ID NO: 188480 - DNA, 201 bp, Homo sapiens
tgctaatttgttagtccttcaaaggcagtctgatctccagacaagaagagggtttgttttggaaaagggctgttatcatcttgttgtatttttatttttattatttatttatttatttatttatttatttatttatttatttttgggggacagagtctcgctctatcgcccagaatggagagcagtggcccagtctcggct

SEQ ID NO: 188481 - DNA, 201 bp, Homo sapiens
taatttgttagtccttcaaaggcagtctgatctccagacaagaagagggtttgttttggaaaagggctgttatcatcttgttgtatttttatttttattatttatttatttatttatttatttatttatttatttatttttgggggacagagtctcgctctatcgcccagaatggagagcagtggcccagtctcggctcac

SEQ ID NO: 188482 - DNA, 201 bp, Homo sapiens
acaaccagctaatttttgtatttttagtagaagcagcgtttcaccatgttggccaagctggtctcgaactcctgacctcaagtgatccgctcgccttggcytcccaaagcgctaggattacaggcgtgagccactgcgctcagcctcatctttgttttaaactataaactaagttcctcccaaagttagttcagcctatga

SEQ ID NO: 188483 - DNA, 201 bp, Homo sapiens
taaaaaggaatgaggtactgatccacgctacagcatggatgagccttgaaaaccttatgccgggtgaaagaagccagacacaaaggacctaatattatacrattccacttatatgaaatgtctggaataggggcatctgtagagcagaaagtacattagtggttgctgggagatagggaggttgggaggaaatggtgaatg

SEQ ID NO: 188484 - DNA, 201 bp, Homo sapiens
tccacttatatgaaatgtctggaataggggcatctgtagagcagaaagtacattagtggttgctgggagatagggaggttgggaggaaatggtgaatggtygttaatgggtatggaatttcttttgggatgatgaaaattttctaaaattagatagtggtgatggttgcacaactctgtaaatatgctgaaaaccactgaa

SEQ ID NO: 188485 - DNA, 201 bp, Homo sapiens
aaaacccttgtaatttcttgagcaatacaggtgctaggagaatctttgatcctggtcctgactcagagctcctaaatcccttggaatttcttgggtgatakgagagtctcttttgttccttggtgggaccctggatagcctcaggatggggggctggttgccagggggaaccaaccatgtgatcagagggttgctgtcagc

SEQ ID NO: 188486 - DNA, 201 bp, Homo sapiens
gtacaggctccaggcccacccaccctgaacgtggtgacgttattgctggggttagctgggatggactggcaaagtcatcttgactttggcgttcagacagrtggagttctacaggtgaaaggcaggagtgacaggccttgattttctgcccggcaagccatagggtgttccatcctcttcctgtgcatctaagacgactcc

SEQ ID NO: 188487 - DNA, 201 bp, Homo sapiens
aggcaggagaattgcttgaacccgggaggcggaggtcacagtgagccgggatcacgctactgcactccagcctaggcaacaagagcgaaactccatctcawaaaaaaaaaaaaaagagattgtaccactgaactccagcctgggtgacggagtgaaactccatctaaaaaaaaaaaaaaaaaaatctggccaggcatggtg

SEQ ID NO: 188488 - DNA, 201 bp, Homo sapiens
gcttgaacccgggaggcggaggtcacagtgagccgggatcacgctactgcactccagcctaggcaacaagagcgaaactccatctcataaaaaaaaaaaaragagattgtaccactgaactccagcctgggtgacggagtgaaactccatctaaaaaaaaaaaaaaaaaaatctggccaggcatggtggctcacacctgta

SEQ ID NO: 188489 - DNA, 201 bp, Homo sapiens
ggatcacgctactgcactccagcctaggcaacaagagcgaaactccatctcataaaaaaaaaaaaaagagattgtaccactgaactccagcctgggtgacrgagtgaaactccatctaaaaaaaaaaaaaaaaaaatctggccaggcatggtggctcacacctgtaatcccagtactttgggaggccaaggcaggcagatc

SEQ ID NO: 188490 - DNA, 201 bp, Homo sapiens
tgaggcaggagaatcacttgaacctgggaggcggaggttgcagtgagccgagactgcaccactgcacttcagcctgggcaacagagtgagactccgtctcaaaaaaaaaaaaaaagtgataaggggttgtggagaccaaggttttatacagatgaagcctccagatagcaggcttcagagaaaagattgtaaatgtttctt

SEQ ID NO: 188491 - DNA, 201 bp, Homo sapiens
agacaggtggagttctacaggtgaaaggcaggagtgacaggccttgattttctgcccggcaagccatagggtgttccatcctcttcctgtgcatctaagaygactccctcatctggcaccataggaaacaggcctactgagggcagcgaccttatcaaggtcacccagtgagttagaggcagagccagtcagggggatcca

SEQ ID NO: 188492 - DNA, 201 bp, Homo sapiens
ttatgaaaaatctgtgggttcttgcagtggcaaagaaaaaaaagaaaaaattatgaaaagtcagcctgggcaacaaaattaaacctcatcttaaaaaaaawttttttttagcctgctttggtggcatgcacacacctgtagtcacagctactcaggaggctcattgagcccaaaagattgatcccaaaacagtgagctgtg

SEQ ID NO: 188493 - DNA, 201 bp, Homo sapiens
tgggaggtggaggttgcagtgagcccagatcacgccactgtactccagcctgggcaacagagtgagaccctatttcaaaaaataaaataggaaaggaggakagccactctcttgttcatctgctgaatcagtttgctaagacttggaagggcgggagcggtttgggccctgggcttcatggcagggaggggtagggagtgg

SEQ ID NO: 188494 - DNA, 201 bp, Homo sapiens
ctacaggcgcctgccaccactcccgtctaattttttgtatttttaggagagacggggtttcactgtattagccaggatggtctcgatctcctgatcttgtsatccgcctgcctcgacctcccaaagtgctgggattacaggtgtgagccaccacacccggccatgtattttcttattctttttttttgagatggagttctg

SEQ ID NO: 188495 - DNA, 201 bp, Homo sapiens
attacaggcatctgccaccatacccagctaatttttgtatttttagtagagacggggtttcaccatgttggccagactggtcttgaactcctgacctcagrtgatccacctgccttggcctcccaaagtactgggattacaggcatgagccacctcgcacttggccccatctgacttttgaacaccgtgcttttgaccact

SEQ ID NO: 188496 - DNA, 201 bp, Homo sapiens; identical to SEQ ID NO: 32654

SEQ ID NO: 188497 - DNA, 201 bp, Homo sapiens; identical to SEQ ID NO: 32658

SEQ ID NO: 188498 - DNA, 201 bp, Homo sapiens
gatcaaaggccccaggatgcctctgggcttcacgttctcatttccctgccagcagacgagtctggacgcggtgagtctctgttcttagggctcagtgatcrggcagcactgagtcccctgtggcctgggtgggctggcccttgaggccttctccagcctcagtgtcattcctagatgacagtcacagtcacagtgggttga

SEQ ID NO: 188499 - DNA, 201 bp, Homo sapiens
tctctgttcttagggctcagtgatcaggcagcactgagtcccctgtggcctgggtgggctggcccttgaggccttctccagcctcagtgtcattcctagakgacagtcacagtcacagtgggttgagccaggctttatttcacagcctgcagggcatactgagactcttctctcttcttttctctttgaaagtgtcacctt

SEQ ID NO: 188500 - DNA, 201 bp, Homo sapiens
ttcctagatgacagtcacagtcacagtgggttgagccaggctttatttcacagcctgcagggcatactgagactcttctctcttcttttctctttgaaagygtcaccttttctgggaaaccttctggtcctccaagcaaaaaaagaacctcatcctcttctgtgccccctgttcatttgattgttgccttgcttataacac

SEQ ID NO: 188501 - DNA, 201 bp, Homo sapiens
accatcagggtgctgggggttagtggttgctttagggaccccactagatcagggctgcctcccctcgtggccatttccctccctgctcagagaccggctgccgagagcaggacagaaactaggttcccggctgccacccacactactgaggtggggctgggcagccgcagaagccatgtgcagtcaggaagaggagtccgg

SEQ ID NO: 188502 - DNA, 201 bp, Homo sapiens
gaggctgaggcacgagaatcacttgaacctgggaggcagagttgcagtgagctgagatcacgccactgcactccagcctgggcaacagaaactctgtctcaaaaaaaaaaaaaagaagaatcaattcattgagctggactcaggcaggcatttcccgcaggcagagtttttgcttgccctgtattccagcacaggctggta

SEQ ID NO: 188503 - DNA, 201 bp, Homo sapiens
aggctgaggcacgagaatcacttgaacctgggaggcagagttgcagtgagctgagatcacgccactgcactccagcctgggcaacagaaactctgtctcaaaaaaaaaaaaaagaagaatcaattcattgagctggactcaggcaggcatttcccgcaggcagagtttttgcttgccctgtattccagcacaggctggtac

SEQ ID NO: 188504 - DNA, 201 bp, Homo sapiens
ctctactaaaaaatacaaaaattagttgggcgtggtggtgcatgcctgtagacccagctactcgggaggctgaggcaggagaattgcttgaacccgggagktggaggttgcagtgaaccaagattgcgccattgcactccagcccgggcaacagtgtgagactccatctcaaaaaaacaaacaaacaaaaacatgaaataa

SEQ ID NO: 188505 - DNA, 201 bp, Homo sapiens
ggaggctgaggcaggagaatgatgtgaacctgggaggtggagcttgcagtgagccaagatcacgccactgcactccagcctgggcgacagagcgagactcygtctcaaaattaaataaataaataaataaataaataaataaaaccaaagctaggccaggcacggtggctcacgcctataatcccagcactttgggaggcc

SEQ ID NO: 188506 - DNA, 201 bp, Homo sapiens
gagcttgcagtgagccaagatcacgccactgcactccagcctgggcgacagagcgagactccgtctcaaaattaaataaataaataaataaataaataaawaaaaccaaagctaggccaggcacggtggctcacgcctataatcccagcactttgggaggccagggcagtcggatcatctgaggtcaggagtttgagacca

SEQ ID NO: 188507 - DNA, 201 bp, Homo sapiens
gtattagggtgtttagcttcctaattggtgaggacaaaaatgagaccgacaatcctctgaccctgccttctttgaacttggcctttctctaggcgttcaaracccagctgttgagagtagaaaagcagaagaaaggacccgaggtcagcaagtgccctccccacaatggggcagatctgccagcgagaatcggtaagctct

SEQ ID NO: 188508 - DNA, 201 bp, Homo sapiens
cctccacctggtctctttcttgatatgtgggcattgtgggggttacaactcaagatgagatttgggtggggacacaaagcctaaccatatcaggtgccttdaatgaatgaatggaccaccagtccctgtgaccaggcagctaatgagcatttgctgagctgtcctgggtgccaaggacagagaatcccaagttgtggtctt

SEQ ID NO: 188509 - DNA, 201 bp, Homo sapiens
ggaagtagagagcacctcccatgctgaccacacttagagcatggaaaggggcaggatggtcttgggcaccattttgcctttagtagccactgtgtgcgcayggtcccagccactgaagggggttgcagaggggttgtctctgcagctcgttgccttgtaatccaaaacacattaggggtctgggcctcgagcacataattc

SEQ ID NO: 188510 - DNA, 201 bp, Homo sapiens
ccacacttagagcatggaaaggggcaggatggtcttgggcaccattttgcctttagtagccactgtgtgcgcacggtcccagccactgaagggggttgcasaggggttgtctctgcagctcgttgccttgtaatccaaaacacattaggggtctgggcctcgagcacataattcctgaagcatattgatttgggctatgag

SEQ ID NO: 188511 - DNA, 201 bp, Homo sapiens
ggcaggatggtcttgggcaccattttgcctttagtagccactgtgtgcgcacggtcccagccactgaagggggttgcagaggggttgtctctgcagctcgktgccttgtaatccaaaacacattaggggtctgggcctcgagcacataattcctgaagcatattgatttgggctatgaggaaaccatttgtcctgctggcc

SEQ ID NO: 188512 - DNA, 201 bp, Homo sapiens
tctttggctggaggacattgaaaaaatataaaatgaaaaattcccaagatttaatttaactcattaattaatgagggagtcagtaagagactgttttaaattttttttttgactttttttcaaatcccattacactgagcaaagtaagaactttaaaaaacaaaacaaaacaaaacagaacacttcaaataacagtctaaa

SEQ ID NO: 188513 - DNA, 201 bp, Homo sapiens; identical to SEQ ID NO: 32656

SEQ ID NO: 188514 - DNA, 201 bp, Homo sapiens; identical to SEQ ID NO: 32659

SEQ ID NO: 188515 - DNA, 201 bp, Homo sapiens; identical to SEQ ID NO: 32643

SEQ ID NO: 188516 - DNA, 201 bp, Homo sapiens
ttgatcatgttgctgagtgcctgggagatttcatggagaaaaggaagatcaaggacaagaagttacctgtgggattcacgttttcttttccttgccaacartccaaaatagatgaggtaaggatgttctgggattatcgggctctgcagatgccccgggatggaaaagctaacaagcccttttctccacaacttttcccct

SEQ ID NO: 188517 - DNA, 201 bp, Homo sapiens
gctggagctcccctaccctgtctaaagggggcggtggctgctcagctccagcatatgcggggaaggcgctggctaagataaggagctagtgccatgatgaycacgttgccacaggatcaagtgggtcctgtgtggtgtcacctttaggtgcctgaaatctagattttattttatttattttattactatacatattttttg

SEQ ID NO: 188518 - DNA, 201 bp, Homo sapiens
atcagatgatgaggaggatggtgggttagaattttatttgtggtttacaatgctaactcgaaggaaaggattgaggactttttcctggccctgtgaaggtsgttgtgtgtgggtgctgggagaactatcccaggaaactcagggtaactggcaaggtgatttgagattgctctggtccaaaagataacgatttcatttggg

SEQ ID NO: 188519 - DNA, 201 bp, Homo sapiens
tcatatgatccgcccacctcagcctcccgaagtgctgggattataggcgtgagctactgcacccggccaatttttttttttttttttttaaattttaacasagacaaggtcttactatgcttcccaggctggtgttgaactcctggcttcaagtgatcctcccacctcatcctcccaaagtgttgggattacagtgtgagc

SEQ ID NO: 188520 - DNA, 201 bp, Homo sapiens
ggagtgcaatggcatgatctcggctcactgtaacctctgcctcctgggttaaagtgattcttgtgcctcagcctccctagtagctgaaattacaggcgtgygccaccatgcctggctaattttgtatttttttgtagagatggggttttgtcatgttgcccaggctggtctcgaaaccctggcttcatatgatccgcccac

SEQ ID NO: 188521 - DNA, 201 bp, Homo sapiens
attcctgcatctgcagtcagctgttgagtcagctgggaggcagatctcagacgcccttccccacatgtccagcagttggctgtcagctggggtgcaggggmccctggccctgtgtctcatccttcagtgggccacctggctgttcaagtggtggcagcaagggctgcgagggagaggggaagacttcaaagcctcctggaa

SEQ ID NO: 188522 - DNA, 201 bp, Homo sapiens
agcaatacaaatctgccagctggagattaggcggggcacgccggggagaggtgatgcactgccgctgaagacccaggtaggccggtgcgttcggcctgggygaggaaggcgcgggacccgggtgcgaggactgcgtagcgtccccggctcccgcttccgcccgctttccacgcccacttctgcaagtcccctccggcacct

SEQ ID NO: 188523 - DNA, 201 bp, Homo sapiens
ctggtcactccaaccccaacttgtgtaggaggtaccacagtaaatgagtagagagagttcaggggacttgaagggaagtggagggccatctggagagggarggaactaaggactccctgtgggttggggtcttcctgaggatccagggagtaactgtcaaggagccttagcagggatctaagagctatgcaagagcaaaaa

SEQ ID NO: 188524 - DNA, 201 bp, Homo sapiens
cagtaaccttcaccccactgagctcaggatctgcagagccactaagaccctggagcaactgccttcagcatccaacagaagctgctaaaaggattatgggycaattcattttagacatttcttccagatgttcccatggaaagctagggtctaaatcagtggtcctcattcctggcagcacctgagtttcacctggggaac

SEQ ID NO: 188525 - DNA, 201 bp, Homo sapiens
aaaaagagaacggtggaaatgcacaacaagatctacgccattcctattgaaatcatgcagggcactggggaagaggtgagattacaaaaccatagtgcatrtgcactgcacacacggccagtggcaccggcagtcacgtgatgaccaaaatccgccacggggtgcccacatggatttgtgtccttgtggcccagaagcacc

SEQ ID NO: 188526 - DNA, 201 bp, Homo sapiens
caccctccaggggacgggagcgcggagaccgggagagcgcgagctgtcgccgcgccccgggccgagggggaggagccgggggaggaggaggaggaggagcmgccgagcagccgccggaggaccacggctcgccagggctgcggaggaccgaccgtccccacgcctgccgccccgcgaccccgaccgccagcatgatcgccg

SEQ ID NO: 188527 - DNA, 201 bp, Homo sapiens
agtcccctgtggcctgggtgggctggcccttgaggccttctccagcctcagtgtcattcctagatgacagtcacagtcacagtgggttgagccaggctttrtttcacagcctgcagggcatactgagactcttctctcttcttttctctttgaaagtgtcaccttttctgggaaaccttctggtcctccaagcaaaaaaag

SEQ ID NO: 188528 - DNA, 201 bp, Homo sapiens
tcctggcccctcgtcagccaggatgtgggggctgaatctggctcacatatggcatcgagccctggttcttgccagctcccggctgggccttcagcaatgcrtgttggcttctatctctacacctggctgcctctcccctgcagcattgggctcattctgtcattggtcggtgcttgaccggggctggagctgtgcggtgag

SEQ ID NO: 188529 - DNA, 201 bp, Homo sapiens
aagggggtggggtgagggtggctgggcggcaggttggtgtgaagcagaggccctgtcgcaatcgtcctttcctccgtgagcctcctgcaccacctagtggycttgtggagctttgcagctcaggtctcaggtaccatgtctgaaatggcagtgtctgccctttgtctcaagcccccaggaatcaggccatcctctgccacg

SEQ ID NO: 188530 - DNA, 201 bp, Homo sapiens
tgtgtgattcttcttgtatgaaatatccagaataggcaagttcatagagacagagagtagaatcgtggatgctggggactgagggtgaggggaaatggaarttattgcttaatggttatagagtttgtgttggggtgatgaaaaagttttgaaaatagtggtgatggttgcacaacattgtgaatgtacttaatgctactg

SEQ ID NO: 188531 - DNA, 201 bp, Homo sapiens
gggtgtctggatgatatcaggacacactacgacagactggtggacgaatattccctaaatgctgggaaacaaaggtaaccccgcctggtggagaggacacycacagtcagggtgggggcagcacttggctgcattctgccacttgcagtggaagaagtttctaggaggagaggtctgaacagaggtttcaagactggaccc

SEQ ID NO: 188532 - DNA, 201 bp, Homo sapiens
ttggatttggcaatagagtcttagctacaactccaaaagcacaaacaataaaagaaaaaacgtaaaactggacttcatcaaaatttaaaacttggccatgyttggtggctcatgcctgtaatcccagcactttgggaggccaagcaagaggatcacttgagcgaaggcatttgagacagcctgggcaacatagtgagacct

SEQ ID NO: 188533 - DNA, 201 bp, Homo sapiens
tgacaagaatgctaggactattcaatgagggaaagaatagtcttttcagcaaatggtgctgggacactggatatccacatgcaaaagaatgaagtttgacmtacacctcataccatatataaaattaacttgaaatggatcaaatacctaaatgtgggagctaaaactaataaaactcttagaacgaaatacaggtttgaa

SEQ ID NO: 188534 - DNA, 201 bp, Homo sapiens
agagtgagactttgtctcgaaaaaaaaaataaatgcatacattacggtcaattgacttttgacaagaatgctaggactattcaatgagggaaagaatagtyttttcagcaaatggtgctgggacactggatatccacatgcaaaagaatgaagtttgacctacacctcataccatatataaaattaacttgaaatggatca

SEQ ID NO: 188535 - DNA, 201 bp, Homo sapiens
tgagaccctgtctctactaaaaattaataacaataataacaacaataatagtaagacccccttggttaaaaagcggggggatcagcaagtgttggaagggkttaaggacatgtcagcaccaaactggggtggtctttgtggtggaatgagaaggactgggtgggacttcgtagtggtggcccacccctctgtgattccatt

SEQ ID NO: 188536 - DNA, 201 bp, Homo sapiens
tgggacttcgtagtggtggcccacccctctgtgattccattctgtttcatgttcttccatggaccacatgaaataggaggaatcctggagttccaaattcyaggggactcttctcagctttgggacactgggcttgggcatgtgccatggaaatgaatcaatcctttgttatttcttgagatccttgagcatggagagggc

SEQ ID NO: 188537 - DNA, 201 bp, Homo sapiens
aagcaggggtgctgtattagtccgttttcatactgttaaaaagaactgcctaagactgggtaatttataaaggaaagaagtttagttgactcacagttcakcatggctggggaggcctcaggaaacttacaatcatggtggaaggagaaaaggcatcttcctcacaaagcggcaggaaggagaagtgctgagcgaaggggg

SEQ ID NO: 188538 - DNA, 201 bp, Homo sapiens
ccaggccacccaggagctgatgcccctcagcaagttgttccaccttctttctacttttctcctgtccagggtacatttcttcctggcctttgctgtcttcyaaggcacgctgtgtgagaaggaggaaaaaagggtcagaaaaaacaaaagcaattgtgcaaatactgtgttcttcttagaatggtcataataacctaacgt

SEQ ID NO: 188539 - DNA, 201 bp, Homo sapiens
ccacatgcatccagggtcacaggtgtgttctgtgttgtggtgagtagagaaaaggaaaaacatactctggtttttcctctgtgtgtgtctcacatgatggygtaactgctttgtgcttaataaacagcaagcaggggtgctgtattagtccgttttcatactgttaaaaagaactgcctaagactgggtaatttataaagg

SEQ ID NO: 188540 - DNA, 201 bp, Homo sapiens
ctgtgtaggctgggcacggtggctcatgcctgtaatctcaacactttaggaggccaaagcaggtgaatcacttgagttcaggtgttcgagaccagcctggktaacatggcaagaccccatttctacaaaaagtgcaaaaactagccgggcgtggtggcacattcctgtggtcccagctatttgggaggctgaggtgggagg

SEQ ID NO: 188541 - DNA, 201 bp, Homo sapiens
gcctgggcgacagagcgagactccgtctcaaaattaaataaataaataaataaataaataaataaaaccaaagctaggccaggcacggtggctcacgcctrtaatcccagcactttgggaggccagggcagtcggatcatctgaggtcaggagtttgagaccaacctggccaaggtggtgaaacctcgtctctactaaaaa

SEQ ID NO: 188542 - DNA, 201 bp, Homo sapiens
tggtcccagctatttgggaggctgaggtgggaggatggcttgagcccggtggcggaggttgcaatgagctgaggttgcaccactgcactccatcctgggcracagagacagactctgtctcaaaaaaaaaaaaaaaagagaaagaaaagaaaaaaaatattaaaccttaaacaaaaaaaaacctaacaagcctatacattg

SEQ ID NO: 188543 - DNA, 201 bp, Homo sapiens
tgagaccaccctgggcaacatagggttgagaccctgtctctactaaaaattaataacaataataacaacaataatagtaagacccccttggttaaaaagcrgggggatcagcaagtgttggaagggtttaaggacatgtcagcaccaaactggggtggtctttgtggtggaatgagaaggactgggtgggacttcgtagtg

SEQ ID NO: 188544 - DNA, 201 bp, Homo sapiens
ccctgtccatcctgactaaaatgaaatccctaccctttatttgttcaacgtgtgtatcagttagtattagatttggctggcagtaacagaaaactccaaamtagcatttggataaacacattggaattttgtttttctctcaaattttagaaatatagaggtaatgtggtggggggaggggggaggctgatatggggcagc

SEQ ID NO: 188545 - DNA, 201 bp, Homo sapiens
ctcaagcactatcttaggctttacaatagtgatgtaatccccaggatcaatttgggagggtcagaatcttgtagcctccagctgcatgactcctaaaccayaatttctaatctttttgctaatttgttagtccttcaaaggcagtctgatctccagacaagaagagggtttgttttggaaaagggctgttatcatcttgtt

SEQ ID NO: 188546 - DNA, 201 bp, Homo sapiens
ggcccagtctcggctcactgcaacctctgcctcctggattcaagcgattctcctgcctcagcctcccaagtagctgggattactggcgcccgccaccacamccagctaatttttgtatttttagtagaagcagcgtttcaccatgttggccaagctggtctcgaactcctgacctcaagtgatccgctcgccttggcctcc

SEQ ID NO: 188547 - DNA, 201 bp, Homo sapiens
agtcagcgggaaggaggaatggcaaagaagcaggaaagccacagaatagctgtgtctcttaagggaggctccagaagctactgagacactctcactttcayctctggccagagcttggtcacatgcctgcatccgactataggggaggctggaaatggaatctttattctgggaggcctgagttcacctaaaaattggagc

SEQ ID NO: 188548 - DNA, 201 bp, Homo sapiens
cactttttccaaagagggtttgaggacttcaatatttaaagaggaaagggtggggctgggtgcggtggctcacgcctgtaatcccagcactttgggaggcmaaggcgggcagatcatgaggtcaggagattgagactatcctggctaacagtgaaacaccgtctctactaaaaatacaaaaaaaaaattagccacgcattg

SEQ ID NO: 188549 - DNA, 201 bp, Homo sapiens
ccaaggcgggcagatcatgaggtcaggagattgagactatcctggctaacagtgaaacaccgtctctactaaaaatacaaaaaaaaaattagccacgcatkgtggcgggcacctgtagtcccagctactcaggaggctgaggcaggagaatggtgtgaatccgggaggtggagcttgcagtgagctgagatcgcaccagtg

SEQ ID NO: 188550 - DNA, 201 bp, Homo sapiens
ctactaaaaataaaaaaaattagccaggcatgctggcggatgcctgtaatcccagctactcgggaagctgaggcaggagaatcacttgaacctgggaggcsaaggttgcagtgagctgagattatgcctctgcattccagcctgggcaacaagagcgaagctctgtctcaaaaaaaaaaaaaaaaaaaaggatgaaattct

SEQ ID NO: 188551 - DNA, 201 bp, Homo sapiens
aacccacttatagcccctctggccttgcagatctgcctctctgtttggtttgagaattccccttataaaggaactctgcagggcccagatccacttgccaygctttaggaatctaagccacgactcagtctcctcggtgcaggttcttggaccccttcactggacctgagtgaaataagagaaataaggacaatatagtaa

SEQ ID NO: 188552 - DNA, 201 bp, Homo sapiens
ggcggatgcctgtaatcccagctactcgggaagctgaggcaggagaatcacttgaacctgggaggccaaggttgcagtgagctgagattatgcctctgcaytccagcctgggcaacaagagcgaagctctgtctcaaaaaaaaaaaaaaaaaaaaggatgaaattctattgggggcagggtggctcatacctgcctatagt

SEQ ID NO: 188553 - DNA, 201 bp, Homo sapiens
tggggatattacgagtatccacctcattgtgttgttttaaggatcaatcagtcaataaataagtaaataatttagaacaatggtgtatagtaagttctacytaagtgctagctattaatataaagccaaatgtatttagcttacaaagcaaccattatttttacttctctgttttaaaatatattttcttttctttttttt

SEQ ID NO: 188554 - DNA, 201 bp, Homo sapiens
tagtgggaaaaagagaacggtggaaatgcacaacaagatctacgccattcctattgaaatcatgcagggcactggggaagaggtgagattacaaaaccatrgtgcatgtgcactgcacacacggccagtggcaccggcagtcacgtgatgaccaaaatccgccacggggtgcccacatggatttgtgtccttgtggcccag

SEQ ID NO: 188555 - DNA, 201 bp, Homo sapiens
taatggttatagagtttgtgttggggtgatgaaaaagttttgaaaatagtggtgatggttgcacaacattgtgaatgtacttaatgctactgaattgtacrcctgaaaatggttgcagtggtaaattttatgctatgtgtatgttaccacaataataaaacacaaccctgaggagtaagcagaaccctggaataattgatg

SEQ ID NO: 188556 - DNA, 201 bp, Homo sapiens
ggaggctccgcagctctgttgggtaaatgcactcattccctgtggatcctggggtcggttccccagtgcaggtttagcagagccctgggtgaaaatgcccytttctcctggtcattggcctcacccacttactggaggccccggccttgtagggtatggctgtggccttgtcgggcaggaatgaggtctcacagctctggg

SEQ ID NO: 188557 - DNA, 201 bp, Homo sapiens
gtttagcagagccctgggtgaaaatgcccttttctcctggtcattggcctcacccacttactggaggccccggccttgtagggtatggctgtggccttgtygggcaggaatgaggtctcacagctctgggctatttgggggcttcttgttacctgatttagaataccattgcacaagcccttggcacagaaagcagaggaa

SEQ ID NO: 188558 - DNA, 201 bp, Homo sapiens
ttaggtgactttttttcctggttgatcgcagacatagtctagcctggggcgggtcacttcctgcctctttgggcaggcttgtcaccctggatcaccagcaytccagaaacggcctttccttctcaatggtgcactctggggagttgtgtttggcctggatccgggaactggtgacaggtcccattcatgggaatccatttg

SEQ ID NO: 188559 - DNA, 201 bp, Homo sapiens
ggtcatgtgtcaactcagcctaagatgccagctgctctgcagcctgagtaatagtgactcagggatagaaggtcctacattaaaattgaccaggcgttctwttactctggcaacaaagtccgactttagagctggcttgggggggatctggggaaagatgggaacagcagtaatgacttctggccccctcatgaggccctg

SEQ ID NO: 188560 - DNA, 201 bp, Homo sapiens
tgtgcggcaatgagaatgaacagttgtcaaagacaactccgtggatgactgtcatccacatggtgtcgagtgaaagaacacagacaccaaagagcacacayggtctcatttccctttagacacaccaaacaaacaggcagatgtaactgagggtgatagacgtcggggtggctggcagttgcccttgggctgggtggtagc

SEQ ID NO: 188561 - DNA, 201 bp, Homo sapiens
ctctggatacttcatataaatagaatcatacagcatttgtcctttgtgactggcttaattcacttagcataatgtcttaaggttcatccgtattgtggcaygtgttagaatttccttatttttttatttttattttttgagacggagtttcactcttgttggccaggctggggtgcaatggtgcaaacttggctcgccata

SEQ ID NO: 188562 - DNA, 201 bp, Homo sapiens
ttgcgggatcatatggtaattccctgttcagttgtttgtggaaccaccatgttgttttccacagtggctgtaacattttacattcccaccagcagcccgtgaaagttctagtttctccacatcctcgccaacacttgttattttctgagttgagaatagccatcctaatgggtatgaagtggtatggaaagtcttttcaag

SEQ ID NO: 188563 - DNA, 201 bp, Homo sapiens
gggtaagtggggagaggatattaagaaaggggaggagctgggtgcagtggttcacacctgtaatccagcactttgggaggcctaggtgggaggactgcttsagtccaggagtttgagaccagcctaggcaacatagtgagaccttgtctgtacaaaaaaattttgaaaattagccagggatggtggtgaatgcctgtagtc

SEQ ID NO: 188564 - DNA, 201 bp, Homo sapiens
aggactgcttcagtccaggagtttgagaccagcctaggcaacatagtgagaccttgtctgtacaaaaaaattttgaaaattagccagggatggtggtgaaygcctgtagtcccagctactcgggaggctgagggaagaggattgcttgagcctgggaggtggaggttgcagtgagcccagatcacgccactgtactccagc

SEQ ID NO: 188565 - DNA, 201 bp, Homo sapiens
tgccttaatgatccatgtcagcccctaacatcctccttggttttgaggtccccctggagcctcaagctccgatgtgggtgtgtgtgttattcatgtcctarccttcataagccatacagagcagttgtgtttggattcgcagttgggcctccctgctgaaaactgtgacaatgggattgaccgtgggcccactttcctccc

SEQ ID NO: 188566 - DNA, 201 bp, Homo sapiens
ctaatatgcctagaagaaaacacagtgattaccctaacccttcaatggagtacagaagcttatatagccttttatttctgagacagaggctcactctgtcrcccaggctggagggcagtggcatgagcttggctcactgaaatctctgcctcccaggttcaagtgattctcctgtctaagcctcctgagtagctgggatta

SEQ ID NO: 188567 - DNA, 201 bp, Homo sapiens
caggggcctttatgatacctgagaggactggggcttggatggagcaagagaggcactgatggagtaagattcaggtacaagacttaagtcttgcatcctakgcacggctcttgcctcatcctcatcccagccctaataatgggaggctttttgccggtaaattcccattattaggagctgaaaatgtcaatgccttacagg

SEQ ID NO: 188568 - DNA, 201 bp, Homo sapiens
tcaggactgcatctaagctcctccttttctgtgggtgatggtggctgtcaggcccctgaacctacgtcatccctccctctgatttgactgtacctttgctrggcctggtcaagggctagggactcctaaagtcaagagctagggtagaggttgggggttggatctcagggcaccatatggtgcagacttggttgcaggaaa

SEQ ID NO: 188569 - DNA, 201 bp, Homo sapiens; identical to SEQ ID NO: 32665

SEQ ID NO: 188570 - DNA, 201 bp, Homo sapiens
tttttctaacttttcttttatttttctttaacataattacaaaaatcatcttaaagtccttgtctgctaattccaacatctgggttacctgtaggactgtytgtgttgtctattttttctcttgcttacaggccacatttttctacttctttgcatttttttttaatattaagcataaatagccatagagtctgatgtaga

SEQ ID NO: 188571 - DNA, 201 bp, Homo sapiens
ggcctcactgagcttcaatttccttacctgtctaaccagaatagcaacaacttgtttgtatatttgagctcattacatgtcattttgtaaggcactaaagytcctggaggcttccggaacacagaaataattaatctaagaatcctaaagtggctgtcctggtagcacctctagggagtcctcccatcctacgtaacttcc

SEQ ID NO: 188572 - DNA, 201 bp, Homo sapiens
ctccggggctctggagacagacctggcatccctcagtaactctcatctatcttcttgccctcagagccagaggtaggagaagggaagctggggaccatgcyggggaagtttttgggattgcttagaatccaaacgtgatcatgaaaatggtgtcatttctttcttcattgcctatgaggcacatcaataattcaactccat

SEQ ID NO: 188573 - DNA, 201 bp, Homo sapiens; identical to SEQ ID NO: 32649

SEQ ID NO: 188574 - DNA, 201 bp, Homo sapiens
caacctcacccgactcagtgtagacattacctgcttacctcatggccgtggcttggggtggaaccatctgtcttgctccatcctcacctctgtctctcccscttaatagctgtccttgccatcagctgaggcagcacacaggagtggtttagagctaggctttggagccacatactcttggatttaaccctggcaccgtca

SEQ ID NO: 188575 - DNA, 201 bp, Homo sapiens
aaagtaacattatgacagtctgaattgttaagtcactccagtgggctagaggctgtggaattgccctcagagtttctgaaattttcagagagcgtggcgtygggcggggcgggaaggccactccacctggtggctggtggagatccgtgacctgtgtgttatgaaggcatagctggttttctattatttttccatttttct

SEQ ID NO: 188576 - DNA, 201 bp, Homo sapiens
ttttccaatttttattttgctagatttgccaaattctccacagtttaacatgtaacacttgcccttgactctgtctgtggatgagtacagtgattgggggyggggggcgtcctttggacgtggtctccaggctgctcttgtgggtcctgcttcatccagccctctggctcttgtcccccacagtgaccgattagcactgct

SEQ ID NO: 188577 - DNA, 201 bp, Homo sapiens
tatggatttgtttttatttttttatagagacagggtctcaccatattgcccaggctggtcttgaactcctgggctcaggcagtcctcccgccttggcctcmctaagtatgcttattgatttgaaaaccctgaagatcaaatctgatcacaggagctcaatcatttctttaaaaaatgtttgatttttttattatgtgcaga

SEQ ID NO: 188578 - DNA, 201 bp, Homo sapiens
taacattatgacagtctgaattgttaagtcactccagtgggctagaggctgtggaattgccctcagagtttctgaaattttcagagagcgtggcgtcgggyggggcgggaaggccactccacctggtggctggtggagatccgtgacctgtgtgttatgaaggcatagctggttttctattatttttccatttttctcagt

SEQ ID NO: 188579 - DNA, 201 bp, Homo sapiens
aatcccagcactttgggaggccaaggcaggctgatcatttgaggtcaggaggtcgagaccagcctgaccaacatggtgaaaccccgtctctactaaaaatwcaaaaaaggtgccagatgtggtggctcatgcctgtagtcccagcttctcgggaggctgaggcagaagaatcacttgaacctgggaggcggaggttgcagt

SEQ ID NO: 188580 - DNA, 201 bp, Homo sapiens
tcccaaagaagacaagtatttcagcatgcttttatgtattttagtctctcttacccctatagcccatcatactgaaatggtctagaattttagttatgtgytattattcataaactttcacttatttggcttcctctaagtgttttgacggagagatattatgtggcaagctgagggtttaaatcactgagaatattttta

SEQ ID NO: 188581 - DNA, 201 bp, Homo sapiens
cagtctgaattgttaagtcactccagtgggctagaggctgtggaattgccctcagagtttctgaaattttcagagagcgtggcgtcgggcggggcgggaakgccactccacctggtggctggtggagatccgtgacctgtgtgttatgaaggcatagctggttttctattatttttccatttttctcagtacccagatgtt

SEQ ID NO: 188582 - DNA, 201 bp, Homo sapiens
tcattggttgcaagtctaatgccaatctggttcttgtttctttttgagtaatctgttttgtgtctctgaaagcatttaaaattttctttttggctgggtgmagtggctcatgcctataatcctggcactttgggaggctgaggcacgaggattgcttaaggccaggagctcgagaccagcctgggcaaaatgttgaaaccc

SEQ ID NO: 188583 - DNA, 201 bp, Homo sapiens
atggccaaggagggcctcttatttgaagggcggatcaccccggagctgctcacccgagggaagtttaacaccagtgatgtgtcagccatcgaaaagtaggyaccatcccctcaaggctttcttggggtgttggggcagagaagagcaattggtcccttgttacttcttgagtccaagtttggtggcttttccttcaagagt

SEQ ID NO: 188584 - DNA, 201 bp, Homo sapiens
gcagtagtgccaaagcctgaagacccaggcaggggagagttgagggctcacagtgtggaatgatgaggatggggatggtgcaaagcccagctctcggaggygctgcctggagcacccaggcctggagcagggggtcacctcctgacaggagtgctgggctattcagggagtgggtgtcacggatgcagcctgctgtgctta

SEQ ID NO: 188585 - DNA, 201 bp, Homo sapiens
gtggctcatgcctataatcctggcactttgggaggctgaggcacgaggattgcttaaggccaggagctcgagaccagcctgggcaaaatgttgaaaccccrcctctattaaaaatacaaaaattagccaggcatggtggtgcccacctgttgtcccagctactcagaggctgaggcaggaggatcacctgagccttgggag

SEQ ID NO: 188586 - DNA, 201 bp, Homo sapiens
gtgatgtgtcagccatcgaaaagtaggtaccatcccctcaaggctttcttggggtgttggggcagagaagagcaattggtcccttgttacttcttgagtcsaagtttggtggcttttccttcaagagtgtcatggctttctgggtccgtgtcctctcactcttagttgacccattctgggccggactccctgaaggcactt

SEQ ID NO: 188587 - DNA, 201 bp, Homo sapiens
cagggctcacgcctgtaatcccagcactttgggaggccgacacaggcagatcacctgaggtcaggagttcgagaccagcctggccaacatgacgaaacccygtctctactaaaaatacaaaacttagctgggcgtggtggcaggcgcctgtaatcccagctactcaggaggctgaggaaggagaattgcttgaacctggga

SEQ ID NO: 188588 - DNA, 201 bp, Homo sapiens
gcaccaatgcttgctacatggaggaactgaggcacattgatctggtggaaggagacgaggggaggatgtgtatcaatacagaatggggagcctttggagaygatggatcattagaagacatccggacagagtttgacagggagatagaccggggatccctcaaccctggaaaacagctgtgagtccttgacttttgcttct

SEQ ID NO: 188589 - DNA, 201 bp, Homo sapiens
ctcctatccacagggcttggggtctcccataggagtggaggtgaaagttctttgaaaagtatagcatacaagccaggtgctgtagcttgcatctgggaggrtcgcttgggcccatgagttcgaaaccagcctaggcagcataaggagactccccctctacaaaaatttttaagaattagctgggcgtggtggtctagctac

SEQ ID NO: 188590 - DNA, 201 bp, Homo sapiens
atgaaactctcatagatatcatgactcgcttcaggaaggagatgaagaatggcctctcccgggattttaatccaacagccacagtcaagatgttgccaacwttcgtaaggtccattcctgatggctctggtaagtctgtcacccagagattgaaccctgagggctaaatgttctgtgaaatcttccttctaacttcatttg

SEQ ID NO: 188591 - DNA, 201 bp, Homo sapiens
gaaagcatgtatattataataaaggctatctcaaaaaaaaaaaaactataaaaacatcctacaagagcagatgttagaggcattctctaaaatcaggagcragacagtatcaccagtttctatttggcatcgtactggagtcttagccagtgggttttcgtttttgtttttgtttttaaagaaaagacgagagataaatta

SEQ ID NO: 188592 - DNA, 201 bp, Homo sapiens
acatttgctcattcattcattcaccattccatcaatctgctctcccatccatccatccatccatccgctgatccatctgctgatccatccatccatccatycatccgctgatccatccatccaatatgtgtctactgagaccttatgccagtcactggggataccatggttgggcaaggctgacctgctgtcattgacttt

SEQ ID NO: 188593 - DNA, 201 bp, Homo sapiens
ggacccagtgttccaggctctttctagcagattcctaagatatgtatgtacctgataagtcatagataacatgttatagcacaggcaagcttaagctacartgcggtagataaattgtggtatattcataccaaggaatactgtgcggcaatgagaatgaacagttgtcaaagacaactccgtggatgactgtcatccaca

SEQ ID NO: 188594 - DNA, 201 bp, Homo sapiens
tacaggccaggaactagggctcagagcatttgcaagcctgttctgggtgacatggatgacagcagttgaatgaccttccgccatgcgatgtgccagcgtgygtgttcctgtgcctgtgggagctggctatctcagcgggtgggtgcctcaccttgccctgtcctccccctcgacctcactctccttccttctcatccccct

SEQ ID NO: 188595 - DNA, 201 bp, Homo sapiens
ctcatctggacaagctccccagttctcagcactccagtcaccctgtttttgctgatgactcccatatagacatctgcccagtgtcagcttcatatcagcayttggacagctttacagtggtcccaaacaggctcctcctcctggatccctgtcttggtaaatggcatcagctgccagcagccagccagtcaccagcacaac

SEQ ID NO: 188596 - DNA, 201 bp, Homo sapiens
ggcaggagtgtacctcttctccaggtacagtcactcatggcttcccttggctaggaaagggaaatcccccaaccccttgcacttcccaggtgaggtgacamcctgccctgcttcagcttgccttccgtgaggtgcacccactgtccagccagtcccagtgagatgaaccaggtacctcagttggaaatgcagaaatcccct

SEQ ID NO: 188597 - DNA, 201 bp, Homo sapiens
gatgtgcctattgagatacatgtagctgttcaaaaaataaatagtagtacctttttttttttctgaaagatacatctttaaactactatatgttctgttgrgtcatagtgtcagatgttagcactagaagacacctcagagttatccgtccccttgtttacagatgaggaagttcagaccccgcattttcagtggccagtc

SEQ ID NO: 188598 - DNA, 201 bp, Homo sapiens
ttgaatattggcccccactctcttctggcttgtagggtttctgccgagagatccgctgttagtctgatgggcttccctttgagggtaacccgacctttctytctggctgcccttaacattttttccttcatttcaactttggtgaatctgacaattatgtgtcttggagttgctcttctcgaggagtatctttgtggcatt

SEQ ID NO: 188599 - DNA, 201 bp, Homo sapiens
gcaatcttggctcactgcaagctctgcctcctgggttcatgccattctcctgcctcagcctcccgagtagctgggactacaggtgcccgccaccatgcctrgctaattttttgtattttttttagtagagatggggtttcactgtgttagccaggatggtctcgatctcctgacctcgtgatccacctgcctcggcctccc

SEQ ID NO: 188600 - DNA, 201 bp, Homo sapiens
cctcctgggctcaagcgatccttccatctcagcctcctgagtagctgcactacaggcatgcaccaccatgcctggctaatttttgttttttgtttttgggttttttttttggctttttttattattattatttgtagagactaggtattgccatattacccaggctggtctcgaacttctaggatcaagtgatccacctgc

SEQ ID NO: 188601 - DNA, 201 bp, Homo sapiens
gtcacccatctgaagccagaggcatgacagtagtaaaagtctattttttgaagttttataaataaaattctaaagattcaaagataccaatagtttttttwaaaaataattgtatatgttgttaaatatccagaataccttgttggctaacttagtgtgttattccattctcacactgctataaagaaatacctcagactg

SEQ ID NO: 188602 - DNA, 201 bp, Homo sapiens
tagtcccagctactcgggagactgaggcaggagaatgatgtgaacctgggaggcggagcttgcagcgagcctagattgggccactgcactccagcctgggstcagagggagactccgtctcaaaaaaaaaaaaaaaaaaaaaaaaaaaagagtaaggagattgaggttcaggggaggtgagtagcatgcctcctacagctt

SEQ ID NO: 188603 - DNA, 201 bp, Homo sapiens
caggatttcaaacagatgtaaaaggaagtaaatttctgagccctcaactttgacagttctcccaatttatttggctagatgtgacagtaaaagccacaaaragagggcacttgaagaaaatgttttggccacagtgtttacagttagtgcacttggaaccttcacatgccaggcacagatggcaggtgtctgtaaggagcc

SEQ ID NO: 188604 - DNA, 201 bp, Homo sapiens
ctctagttttcttatctttttgccttcttgtttttctttttaggagatttgatcaacgttatttttcagatttttttaaacctatcatattttaaatttcyaattaaatgtttaaagttaatttatattctttctctctctcttttttttttttgagacagagtcttgctgtgtcgcccgggctggagtgcagtggcgcaa

SEQ ID NO: 188605 - DNA, 201 bp, Homo sapiens
gtcccagctactagggaggctgaagtggaaagatcacttgagtgagccatgattgtgccactgcactccagcctggacaagagagtgagaccctgtctaakaaaagaaaaaatgagtatgtttaaagacaaccagatgattcctgagattaacttgacttttcctgagcaagcctattcttaaatgatttctatgttgttc

SEQ ID NO: 188606 - DNA, 201 bp, Homo sapiens
gtcagcattcttgtgcacatacctttgccacttttgggattacaaaatcaaagaatatgcacatttacagtttttacacacactgtcttactgccctccakaatggccaatcctttgttcactaaggaatcccccttcaattcctggtcagcacccgatcttccaagcctcagttgctattcttcttggactcattttcct

SEQ ID NO: 188607 - DNA, 201 bp, Homo sapiens
gttgcatgacagtagtagttgtaatgtctgtgtgtgttgttggtattatattagcacaaacacctcagatctctggacttttagatagatgcccctgttgyactgaggataatgtccttgattttctgcattggaacttgggatttgattttcccttcctttcttttttgtgtggagaactgggaactagggcatcaacac

SEQ ID NO: 188608 - DNA, 201 bp, Homo sapiens
ttccatgacatggtagctatcttcccccagagagagcactttcagacagagcaagcaggcagctatagtgccttttatgaccagtccttcaaagtcatcakacgtgccaccttcacatttttttctatagaggtgaggcattgagcttagcctgcacttggggtggggaattagtctccaccttttgaagggagtatcaaa

SEQ ID NO: 188609 - DNA, 201 bp, Homo sapiens
agaatcacaacagacagttcttacctatccacgtgtacattgtctattctgtgggttatgtatgacatatgtaaactctgggctgcttttttctcttcacscaggatgcttgtagagaaagcatttcccacttatatctgttagtgtgtattctgaaatcaaatcagtattgatatttttgtagactacactagatattta

SEQ ID NO: 188610 - DNA, 201 bp, Homo sapiens
aatgagcgttttttttttgtttgtttttttgttttgtttgtttttgcctttatggcctcttctttcttttgcaaatgatagcatatcatcagtactctttrcactttgctctttcattaagtatcatttttagggagctgtatttccagtatttttgtaaagagatttgtaatattttttaaaagatactttgataatatt

SEQ ID NO: 188611 - DNA, 201 bp, Homo sapiens
cacttgtacttaagagctctgacaactaatttatttaactatttttttcattcactttttacatatgtcaggggcgggtgattcatagaccaataagatayatttcctgtcctcaagaaattttttatcttgtagctcatttgtataaaatcacgtgctgatcttcagtccataaaacaatatcagatgggcgcaatggct

SEQ ID NO: 188612 - DNA, 201 bp, Homo sapiens
acactgctataaagaaatacctcagactggataatttataaagaaaagaggtttaactggctcacaactctgcaggctgtacaggaagcatggctagggargcctcaggaaagttacaatcatggcagaaggcaaaggggaagcaggcacatcttacacggccagagcaggaggaagagagagaagggggaggtgctacac

SEQ ID NO: 188613 - DNA, 201 bp, Homo sapiens
ttccagcttcatccatgtctctgcaaaggacatgatcttgttcctttttatgactgcatagtatttcatggtatatatgtatattgtatatttctgtatgyaccataaagaaatatacaattttatagcagagcataacgcatcatttatcctagtgaagagtattacaaagcagctaacaagtcatctttagatttaatt

SEQ ID NO: 188614 - DNA, 201 bp, Homo sapiens
agcctgtacaggaaccaaaacctgcttctggggaggcctcaagaagcttccaatcatggcagaaggcaaaggagggggcaaggtgtctcatatagtgggaktgagagcaagagagcgtgagggaggagggggtgccacacacttttaaacaaccagattgggaaaactcactatcaggaggacagcaccaaggtgatggtg

SEQ ID NO: 188615 - DNA, 201 bp, Homo sapiens
aaaataaaaagagggggcatgtaactagcatttgttgaatacctgctatgtgccatactatgataggcaatgttgtttgttagctccgcattcataaaaawgacctctagtcattagaatgcttatatgtgctatgcattacctaaattacatatataatctcatttattttttggagtaaaaagattttagtttaatcca

SEQ ID NO: 188616 - DNA, 201 bp, Homo sapiens
aaggaatcccccttcaattcctggtcagcacccgatcttccaagcctcagttgctattcttcttggactcattttcctcctcgttaactgtgaggacctakttttctacctgttaagagtcaggatttgtactggatacctactgtcctagctgctgcagacccttgaggtgtagggtaaggttgtattttggtctgaaac

SEQ ID NO: 188617 - DNA, 201 bp, Homo sapiens
ggtcaggctggtctccaactcccgacctcaggtgatctgcccatctcagcctcccaaagtgctgggattacaggcgtgagccaccatgcccagcctaattmtttaaatgttaatagtacgtgacctatatcttttgttgggatgtttaccctcattctgtataatatacaaagtgaagtatgactttaagtaatatcattt

SEQ ID NO: 188618 - DNA, 201 bp, Homo sapiens
tttaaaaaatttactttggaaaagtattacattgttataaaaattaatcttgttttatttcttagattaacctgtttatatttaatggcatttaaaaatayatggtagacttgctcctctatgctgtctgtttcattctcctgcagttgctatgcccagaattataattatagatacagtctaggtgatgtgcctattgag

SEQ ID NO: 188619 - DNA, 201 bp, Homo sapiens
ctcccaaggagtacaaactttacctccttttaaatattctctcaggtactttttataacactatttgcctgtgaaaatcctacagatgcattgtcgggtgwtagaatcgcagtgtgttaaagaaactctttagggaagattacatcgaatgctttcatttgtaacttcagacccaaagagccagggatgctgccccaggtc

SEQ ID NO: 188620 - DNA, 201 bp, Homo sapiens
gttccacttaggaaattccttctttggcactagctagaggagaagattcatttgctttgaataccttcttcattctgagtcaaaaaactacctatcagaarcattcaggaatatagtcagtatggaatctggaaaatctttagcttaaacatacttcactgaacctcagaattctttaagaaattaattagtataaatatg

SEQ ID NO: 188621 - DNA, 201 bp, Homo sapiens
tagacatgaggctggagcctgaaaatagagagatgaggcagagccctgtgctcagggagttcaaagtctagtaggagagaccaacaaataaaacagtaacscaatctggtgtaataaatgctgtaattgacaaccaaaatctaagaaaattagaggaggaagatcacttaaagtgagagtgggttttttctgaagggtaga

SEQ ID NO: 188622 - DNA, 201 bp, Homo sapiens
tataaatccctggaggacctagataacaatatttttgtaccctttaaaagacatttatttttgtacttgatgcttaagatatgtgatttttacttaacttrttagagacaccacccacttggagattgaacccttcactcttctcggcgtgtgtgctggacttatcccataccctcaccataaccagtcaccgagaaacac

SEQ ID NO: 188623 - DNA, 201 bp, Homo sapiens
ggcgtggtggcctgtaataccagtagtttgggaggccaaggcgggcggatcacttgggctcaagagtttgagaacagcttgggcgacatggcaaaaccctrtttctacaaataatacaaaaattagctgggtgtggtggcgtgcacttgtcccagcaactcaggaggctgaggtggaaggatcacttgagcctggaaggtc

SEQ ID NO: 188624 - DNA, 201 bp, Homo sapiens
tcaacttgattataaaacaatatatgaatgtatttgttaaccacttaaataaaattcccccatttaaaaaatttactttggaaaagtattacattgttatraaaattaatcttgttttatttcttagattaacctgtttatatttaatggcatttaaaaatacatggtagacttgctcctctatgctgtctgtttcattct

SEQ ID NO: 188625 - DNA, 201 bp, Homo sapiens
gcttttgaaatgttgaacctgaagattttgttcattttaattagtgatgttaatgtatttatctctatattcattactaccttattatttcacataatagmatgttgtattttgttttctcccatatcaatgcaggtactataggatacaaccagcgaaacagaattgatactctcatgtatctactagcatatccacaaa

SEQ ID NO: 188626 - DNA, 201 bp, Homo sapiens
tctgctgtcctaataataatgatagtgatggtaatagtaatggtgttttctgtgattatatattaatatgttattacatcatatgatattatgcaattatrtattcatttaaccataacaaccatcaatattacatcttttctcaattgaggctctttgggataggtgtgcttatgcacttttacaaatgaggctaagcag

SEQ ID NO: 188627 - DNA, 201 bp, Homo sapiens
gagaatgaggtgctcagctgtgcacatgaggacatgtacactggctttagtgctgagcattgaaagggacgagcaggaagagtagtaaggaagtattgccrcagaccagctgaaagattatgagggcctcaactggcacaggagcagaggataaatgcgaggaaggttaaaaggaggtcgactcagtagaatttttgtttt

SEQ ID NO: 188628 - DNA, 201 bp, Homo sapiens
gtggcacaatctcagctcactgcaacctctgcctcccagactcaagtgattctcccacttcaacctcctgtatagctgggacccataggcacgtgccaccrtgcctggatagttttttgtattttttgtagagatgaggtcttaccatcttgtccaggcttgtcttgaactcctgggctcaagttctccacccacctcggc

SEQ ID NO: 188629 - DNA, 201 bp, Homo sapiens
cagtggcatgaccatagctcactgcagcctcaacctaggttcaagcagtcctcctaccgcagcctcctgagttgttgggactgcaggcctgtgcatctttscctagttcgtaatctttgtattccacacagatgataacgatgtgcctaacacttttctttttttctcaggtgagaaagtagaaaacaaacaagtgcttgt

SEQ ID NO: 188630 - DNA, 201 bp, Homo sapiens
gagacagggtctcagtctgtcactgaggctggagtgcagtggcacaatctcagctcactgcaacctctgcctcccagactcaagtgattctcccacttcarcctcctgtatagctgggacccataggcacgtgccaccatgcctggatagttttttgtattttttgtagagatgaggtcttaccatcttgtccaggcttgt

SEQ ID NO: 188631 - DNA, 201 bp, Homo sapiens
gagagaaagggttaacattctgatttcatgttcagttgacagtgacccaataacacccatccgaggaacaatcaggtggaaagactgattgctaaggaggraagagcccacccctgattgggctgtaccctagatttcttaaggaaggggccaagccttttctcattttatctccagtttttggcacagagtagatgttta

SEQ ID NO: 188632 - DNA, 201 bp, Homo sapiens
cctatttgctatattctgtccttgttggtatttttgttttagaactgtaccgggttgcatagatgtttaaaaagatttcttttcttttcattttgaaatarttttagatatacaaaaaagtgatgaaactggtacaaagattttccacaatctttcatctagattcccaactgtgaacatcttatgtaaccatagcactgt

SEQ ID NO: 188633 - DNA, 201 bp, Homo sapiens
cttcatctgtaaaatgaagaaatataggacctatctcataggggtattgagaggcgtaaaattagatcacacatgtcaagcttaaatactgcttctattartttattactgttattaatagtggtcgtggggaaatgagctggagataaataagcagagagagtgcttgtgccacagggaggtgctcacttaatttgttca

SEQ ID NO: 188634 - DNA, 201 bp, Homo sapiens; identical to SEQ ID NO: 32806

SEQ ID NO: 188635 - DNA, 201 bp, Homo sapiens
cattttgaaataattttagatatacaaaaaagtgatgaaactggtacaaagattttccacaatctttcatctagattcccaactgtgaacatcttatgtarccatagcactgttatcagcctcatgacattgaacaatactataatctatggatcttattcaaattttgccagttgtcccactgttgtcttttttctgatc

SEQ ID NO: 188636 - DNA, 201 bp, Homo sapiens; identical to SEQ ID NO: 32807

SEQ ID NO: 188637 - DNA, 201 bp, Homo sapiens
tccatgtcttcccactatctgtaactttggagccaaggcaatttgaatttgaatcctaaagctttgttttctagttatgaggcactggaatgtgcagttasttagcttctctaagccttggtttcctcataagtgattttgagacaatacttcagtttgactatgtagaagattagagctaatgtaagtaacatgggtaac

SEQ ID NO: 188638 - DNA, 201 bp, Homo sapiens
ggttcagatttctggagctctttcaaaacagtatattggcaaatgttttacattttaaggagaaagggctggatgtgtggtaacaactgactcaacttgcrtgctttaaacactggagggaatggtgtttgtttcctcttttcttttgcttccttggatgtttctttttttctgggcacatacgtacttatatgatagtgc

SEQ ID NO: 188639 - DNA, 201 bp, Homo sapiens
tttggtctgaaacctgaaagaataattcactttctccccagggacccttctacagttgtagccattgattaagaactaagttcagtttaccagctcttccrgaaagaagagaaattaaagtcctaattggaatatgaggcaaagtggttaggaacatggactgttgttgctagggttaagtgggaacatatgtgcacatgc

SEQ ID NO: 188640 - DNA, 201 bp, Homo sapiens
tacattatttagtgaaattacttagcagcaacaacaaaatgtatgaaggagaatgcttgcttgttttttttttttttgaatgcaatctattgatttattgycatagtgataaattttataaaagagatttcattgggattttactaaatgattaaggtaagtaaagaagaaattttaaaatagtatgtatcatctgtggaa

SEQ ID NO: 188641 - DNA, 201 bp, Homo sapiens
gtgatgtggttaatggaagataccaagttagggaatgatgtgtcagccaaatcatcttttaggaatttagagtctatgttgttggtgacaattctacttakgagatcagtctttgtggttgtcacagagggatgatggtatggttgatggaaagaggatgccaagtttccttaataactaaagatatggtaacttagggat

SEQ ID NO: 188642 - DNA, 201 bp, Homo sapiens
cttacctgttctttctttttgcctaggtaacatcttaggtgtcattcgagaccacaaaaagctagtgaatacatttcgactcatgagaagagcaggatatrtcaatgaatttgtttccatctcaacaaatcttacagatcgatgtgtctatatttcttctgatgggggaaggctatgcaggtatatatgcaggttactaaa

SEQ ID NO: 188643 - DNA, 201 bp, Homo sapiens
tatttgaatggctccctctgaaagcagtgaggtcactacagtgagatgtgatgtggttaatggaagataccaagttagggaatgatgtgtcagccaaatcmtcttttaggaatttagagtctatgttgttggtgacaattctacttatgagatcagtctttgtggttgtcacagagggatgatggtatggttgatggaaag

SEQ ID NO: 188644 - DNA, 201 bp, Homo sapiens
acagtgctaagatgtatcccatgttcaggatgggatacaaaagtaaaaaaaaaaaaaaaaaaaaaattccaatcagtgaaatatagtaattccagtatctratgttctaaagctgctgagttagttgtttttgattactcttactcaagatagattggttccttgtgagtttagtgatctttgtttatgaactcatattta

SEQ ID NO: 188645 - DNA, 201 bp, Homo sapiens
ctcttctgccccttgccagataaacaggcttccagcccctaacgattctgggccactcccctctacataaagaatgaggagcacatctatacctccctttragagtggagtcttctgagtgatgaatttacccctcagcaaaagagaatcccttgtcttgaacctaaatggatctccctttcagtgattatttttagtgat

SEQ ID NO: 188646 - DNA, 201 bp, Homo sapiens
gtttttgctttttaagcctgctaagcgtataatgaacagttatgaatgtattggtcagtttggagagaattttaacattaaaccacttttaataccattgmatcatccagtccacgaacatgtcatgacccttaatttatttaggttttgttttctgtcagcactgttttgtagctttcaatgtaggggtcttacatggta

SEQ ID NO: 188647 - DNA, 201 bp, Homo sapiens
gaaacacatggtgctagataaaatgcatgcccgggcccggggcccacgagccgtccttaccaggtaagagaaaagtacttacaaaaagaattgataatgcmgtcaagtccaccttgtattttccagatatggcaaaaagcagactcaacaaagtttctgttttcctgagatgtcaaaatttggcaagtttggcattaagaa

SEQ ID NO: 188648 - DNA, 201 bp, Homo sapiens
tctgtgcaacagagcgttctggactttagtgtctcaggactctaagagaaaggaagaggaaactgccagttgacttaaagattaattctggaattggctgstatcatttcagctgtattctcttggttaaattaatcataggccaatcccaagggagtgatagattccacctttaatgaaggaatggcatgaagtttatat

SEQ ID NO: 188649 - DNA, 201 bp, Homo sapiens
actgagtacttacctggtggtgtattattcacagggtttatacaagttcaaaaaatgtgttttctgcctcccagtgtgttataggcttatagagagagacrtgtaagcaagtggaataacatgcaataggtactgtgatacaagtaggcgaggggtattttggtattacaaatggtagctaggatgtgatgcctgaactga

SEQ ID NO: 188650 - DNA, 201 bp, Homo sapiens
ataggcttatagagagagacgtgtaagcaagtggaataacatgcaataggtactgtgatacaagtaggcgaggggtattttggtattacaaatggtagctrggatgtgatgcctgaactgagtttgccagatgtggatgaagtgtggtggtgcggaagcattccagatagaaggaggaggcgtaggcacaagtacagctgc

SEQ ID NO: 188651 - DNA, 201 bp, Homo sapiens
ttttaaatgatggagaagtatttaataatagagaagattaaagggctttctggaatatgaatcagtacatatggaaatttaaaatagattagcttggatcrgagtcattgggtaatgtactagtcaggagaagaagcgaaaggtacccccgttaaatgcatttccccaatttaatgaaagcatgaacatgattcctagata

SEQ ID NO: 188652 - DNA, 201 bp, Homo sapiens
tgggtgctgggcacagtggctcacgcttgtaatcccagcactttgggaggccaagacaggcggatcatttgaggttgggagtttgagaccgactagcctgrccaacatggtgtaaccccgtttctactaaaaatacaaaaattagctgggcatggtggcgggcacctgtaatcccagctactcagaaggctgaggcacctg

SEQ ID NO: 188653 - DNA, 201 bp, Homo sapiens
cactaagggcataagtcacaaaagagaggtccaaaaggaagacttcaggaagaagaaaatccctattaaggtaattagctcatagaggatgtttcactggrcagtcatttctcgtgtgaagccacagcctcccctttttgctacctttgccctaaaaaagccgttcattttattgttgttcacgtcaagtttctacctttg

SEQ ID NO: 188654 - DNA, 201 bp, Homo sapiens
gcacagtggctcacgcttgtaatcccagcactttgggaggccaagacaggcggatcatttgaggttgggagtttgagaccgactagcctggccaacatggwgtaaccccgtttctactaaaaatacaaaaattagctgggcatggtggcgggcacctgtaatcccagctactcagaaggctgaggcacctgaactgcttga

SEQ ID NO: 188655 - DNA, 201 bp, Homo sapiens
atcatgtgtgctgggttgagtgggagggagcatgggcgtcgttggaggaagtcgctctttaatgagccacacaatgaaggctaggtaattagagcagttcrgaaccttgaaactggccttttgtcagggatttgcacattagtgaggcattgctatggggatgtttacagcacgactgttgttctacagaagacactaagg

SEQ ID NO: 188656 - DNA, 201 bp, Homo sapiens
acagtggctcacgcttgtaatcccagcactttgggaggccaagacaggcggatcatttgaggttgggagtttgagaccgactagcctggccaacatggtgwaaccccgtttctactaaaaatacaaaaattagctgggcatggtggcgggcacctgtaatcccagctactcagaaggctgaggcacctgaactgcttgatg

SEQ ID NO: 188657 - DNA, 201 bp, Homo sapiens
aaacagtcaacccgattcacttatgtgctttgaaaaccttcccctctccgccactggttacccagggaaggtaatgtaagcaagaagacctgtaagcagcrattgatccttcagcattattctgctaaatgtatatcttctttcctgcttcatttctgtctcatttagagagcatctgatggcagtgtctgattttgaagc

SEQ ID NO: 188658 - DNA, 201 bp, Homo sapiens
gagtacaaactttacctccttttaaatattctctcaggtactttttataacactatttgcctgtgaaaatcctacagatgcattgtcgggtgttagaatcrcagtgtgttaaagaaactctttagggaagattacatcgaatgctttcatttgtaacttcagacccaaagagccagggatgctgccccaggtcttatagca

SEQ ID NO: 188659 - DNA, 201 bp, Homo sapiens
cagataaaaatgtatagatgtgctcagttatgaagtttccactataatgtgtttatttagacgtatttgtaagttattcatgtgtatatttcctttcaacragtaatctacaacttctttgatttcacattgaaactcaaccacaacaatttaaaaaaatcttaaaatttcagtatgtgttggcataccctgtgttcacct

SEQ ID NO: 188660 - DNA, 201 bp, Homo sapiens
caccacggtatcaaaaggggcaagtgcgccaaagggtcaggttgagacagggccggagtgacgatgccaggtgggaggaggacttctttagatgtggtatkcagtgaaagtctctctgagcaggtgaaatgtttgacagagccatatgaatacctggcgggagagtgtttcaggcaaaggaaacggtaagtcagaggcccc

SEQ ID NO: 188661 - DNA, 201 bp, Homo sapiens
atacaaaatacagttcctattggctaccttcattcacagctatcagggaagacaggcatatgtaattatggcaccatttggtaaggggtctagaagtccakatttttatggaaacatgcaggtttaacaaatcctcctatacttccctcaaaggaaggggtaatttgtattgtttctctccttagtcttcacttagaaaaa

SEQ ID NO: 188662 - DNA, 201 bp, Homo sapiens
accactcaccagttcttatctgacctgtcgggcgctctgtgtccatttcttcatcttcaaaatagaggtgacagttcttcctccctggatcgttgtgtggwttaagtagcacatggtagttgcttccttccctttgaagaagaaagtttgaggcagttaaaaaaaaattttttaagacatcagttctctggttgttcttgc

SEQ ID NO: 188663 - DNA, 201 bp, Homo sapiens
actaattaaaatagagctgagcttttgttgtttaggttaagggcattcgattctgttcaggatgcttattcaagttccttttgccagtttccacaggaagytgctggaataggcttcttcatcccctctcacccctctgcacctgcttccattcccatattctttctttccaagagtgaaactgctgggtctcactgtaag

SEQ ID NO: 188664 - DNA, 201 bp, Homo sapiens
gagacaccacccacttggagattgaacccttcactcttctcggcgtgtgtgctggacttatcccataccctcaccataaccagtcaccgagaaacacttaycagtgtgccatggggaaacaagccatgggtaagatttccttcttgaaagttggttctaaatacttggaaatacttttggaaaaagccttacatctttatt

SEQ ID NO: 188665 - DNA, 201 bp, Homo sapiens
agtaataaaaaaaagcctttgttactgtttgttattataaaacacctgactggaaagaaaagcagcgagataaaagtacatttagagttggcatataatgyagcagcatttctctgtggacactgaaatagctgcagaagtattgagcaaagtctgcttgaaaaatgacaaaaggaaaaaggtcagcagagggagaaaacc

SEQ ID NO: 188666 - DNA, 201 bp, Homo sapiens
cattaagcccaatattgtcattggcagagaaacccaagggtatgcagaaggctgcggttattgtccttgatgtcaacgtcaaaggctagcgacaaaacccwacatgttctaattccatttagtaatcaattatgacattatcctctatgatttacttcaatcttttaaaaggtatatttgtattatcatattgtgccctct

SEQ ID NO: 188667 - DNA, 201 bp, Homo sapiens
gtaataaaaaaaagcctttgttactgtttgttattataaaacacctgactggaaagaaaagcagcgagataaaagtacatttagagttggcatataatgcrgcagcatttctctgtggacactgaaatagctgcagaagtattgagcaaagtctgcttgaaaaatgacaaaaggaaaaaggtcagcagagggagaaaaccc

SEQ ID NO: 188668 - DNA, 201 bp, Homo sapiens
cccctacaagagagtgaagaaatgagagaaagtcattttctatcactacgaaggagaccaaggccagcacaaaccacagagatggaaagccttaccttctrtgtaagagagctaatccacgataaaacaccagcagagggtgttttttaaatcttaggcgctttattaataaagttcgagtttccacacagcatcttactg

SEQ ID NO: 188669 - DNA, 201 bp, Homo sapiens
tacctccacttgcagacttatttgagtaagctagaggaggttaggggccacatgtgccccattcacaggtgtaccctcaatcccaagcacaatgtctgtgkgttaatgaatggataaatttcttgggaaagagaattatagctactaagtttcacatgttcttagtgctactttttccagttggagatgcatagtcgaggg

SEQ ID NO: 188670 - DNA, 201 bp, Homo sapiens
ttggtaaggggtctagaagtccagatttttatggaaacatgcaggtttaacaaatcctcctatacttccctcaaaggaaggggtaatttgtattgtttctytccttagtcttcacttagaaaaataagtaagatattaaaatgttcatcttggttttagcaggactgtttatcagtgttttttttgttttattgttttttt

SEQ ID NO: 188671 - DNA, 201 bp, Homo sapiens
gttttttcaggtagagctcttctgccccttgccagataaacaggcttccagcccctaacgattctgggccactcccctctacataaagaatgaggagcacrtctatacctccctttgagagtggagtcttctgagtgatgaatttacccctcagcaaaagagaatcccttgtcttgaacctaaatggatctccctttcagt

SEQ ID NO: 188672 - DNA, 201 bp, Homo sapiens
ctggaagcatagggtactgattttaaaatttcagtgatgggagtctgagacattgtttgaaaagtcactgtttaagctgaattttatgttagcttatagarcatgaaaggagatttaaaaaaaaataaataaaaccactcttcagtttttcacactccttttcagccttttatgctccttttcagccttttaccatttaca

SEQ ID NO: 188673 - DNA, 201 bp, Homo sapiens
agaggcattgcctttaaggaagaagcaggcagttagtttagttagagtgagtggaggtgacgaggactctgaagctgttttttcaggtagagctcttctgycccttgccagataaacaggcttccagcccctaacgattctgggccactcccctctacataaagaatgaggagcacatctatacctccctttgagagtgga

SEQ ID NO: 188674 - DNA, 201 bp, Homo sapiens
atttcagtgatgggagtctgagacattgtttgaaaagtcactgtttaagctgaattttatgttagcttatagagcatgaaaggagatttaaaaaaaaatawataaaaccactcttcagtttttcacactccttttcagccttttatgctccttttcagccttttaccatttacatgtgtattcctgcatcagtatgatcag

SEQ ID NO: 188675 - DNA, 201 bp, Homo sapiens
ctgcaggcctgtgcatctttgcctagttcgtaatctttgtattccacacagatgataacgatgtgcctaacacttttctttttttctcaggtgagaaagtrgaaaacaaacaagtgcttgtaaataagtccatgcccacagtgactcagattcctttggaaggaagtaatgtaccacagcaaccacagtacaaagatgtac

SEQ ID NO: 188676 - DNA, 201 bp, Homo sapiens
cgtgtgatcctcccgccttggcctcccaaagtgctgggattaggtgtaagccacagcgcctggccttaaatatcttttaaaagaaacacacagaaaataasgttctgtattgattagttgaggaaaatgttgtgaccataggctcacaggaacctagccctatatttttcctggagcaatggttcagtattcactattcag

SEQ ID NO: 188677 - DNA, 201 bp, Homo sapiens
agttcgttgaaacggaaaagcattttgggtataagcctcagaggagtaagaaagaagggaatgagtctttactgttaaagttgtaatcaggtgacagagtrtaggagtcagggaggaaagtagccctcaaatcagtctggtgattgggatttagggagagagtattggtaagagtattcataagtattgaatggacattga

SEQ ID NO: 188678 - DNA, 201 bp, Homo sapiens
tggcatgatctcagctcactgcaacctccgccccccaggttcaagtgattcacccacctcaacctcccgagtagctgggattacaggtgcccgccaccacrcctggctaattttttttttatttttagtagggacagggtttcaccacgttggccaggctggtcatgaactcctgacctcatgtgatccactcgcctcggt

SEQ ID NO: 188679 - DNA, 201 bp, Homo sapiens
agaaagaagggaatgagtctttactgttaaagttgtaatcaggtgacagagtataggagtcagggaggaaagtagccctcaaatcagtctggtgattgggrtttagggagagagtattggtaagagtattcataagtattgaatggacattgacaagtcaggttctttaactcaggaagcatccatgttctaaatgcaatt

SEQ ID NO: 188680 - DNA, 201 bp, Homo sapiens
ttttttctctgagtattattataaacttaggaattttaacatttttacttaagttttagaattagcttctccattttcacaaataaataaataaaagcctscaagctttttcattgagattgcatttgaatttgtaggtcaatttggggagaactgatatctaaataatatttagctttccaatccatgaacatatcatct

SEQ ID NO: 188681 - DNA, 201 bp, Homo sapiens
ttatatcttcatgtcatattacataactttagtcagtatgttcatttcccttggtataaaatgagaatattcttatttctatcttcccattacgatttccyttttaacgtgagttatttagaagacttaagatttcccaattggtgctttatgtcaatttttggaactttgtagagacctgtttctataaatgtttcatgt

SEQ ID NO: 188682 - DNA, 201 bp, Homo sapiens
aaataaaaaatacctttattctcttcctggcaacaaagaccttagaaagctttaacttggatcaaatcaatcactttgacttacatgcttttgttgtaccmaatttttgttctatcttgttttgttttggtctttttgagacagggtctcactctgtcacccaggccagagtgcaatggtacactcatggctcactgcagc

SEQ ID NO: 188683 - DNA, 201 bp, Homo sapiens
agttgaatgttatagtattgatacttttcttgaggtacgttaaattttaatgtccattttctcaaaatttttctccaatttctgacttacaggttaaggarttcaatttccgagccaaatgtatctatactgcagtgatggtgcgaagagttattctggcccaaggagataataaagttgacgacagagattattatggta

SEQ ID NO: 188684 - DNA, 201 bp, Homo sapiens
ccttcctcacctttcgtcccattcccaacttcataactatttctgttatttttttctgggggttattacatccataactttattttgtgtgtgtgtgtttkgtttttttttttttttttgagatggaattcactctgttgcccaggctggagtacagtggcatgatctcagctcactgcaacctccgccccccaggttcaa

SEQ ID NO: 188685 - DNA, 201 bp, Homo sapiens
tttttaagaatctctttatatttgctcttgaaagaaatagacttgtttttatttttgaaactgttttaacctctttcattgtgaagataaatttaattccktgagcaaacacttcatgaatatgcatattaggtaccgaggattcagattaatgggagacagagtctgccctcagagagctcagtctgccgggaaaggcag

SEQ ID NO: 188686 - DNA, 201 bp, Homo sapiens
ggactgcatcaggcctaaaggagttggatattggcaagtaaaatgtgagtgaaacagaaaatgtagtccacaacatcagttatgctatttgtagttgtcaygaaatgagctgataaaaatttcaaagtgttgagttttcagggtatatgtgtcacaccacgattcctgcagaggtttgtttgtttgtttgtttctgttttg

SEQ ID NO: 188687 - DNA, 201 bp, Homo sapiens
ttgaagaaaatgttttggccacagtgtttacagttagtgcacttggaaccttcacatgccaggcacagatggcaggtgtctgtaaggagccacacaataayccagcgcttagtgtgggccctaagggggactgcatcaggcctaaaggagttggatattggcaagtaaaatgtgagtgaaacagaaaatgtagtccacaac

SEQ ID NO: 188688 - DNA, 201 bp, Homo sapiens
actgacttctacagtatgaaaagctattttgcagttacagaggtgcctctgctggttggctctcttcccgtcttgaaggaggatatctctttttctgtgcraagttcatctctccttttggtttcttaatttcattcactcttttcagagacctttttctgtcatcttctcttttatcctcccatattttcaacctgtttc

SEQ ID NO: 188689 - DNA, 201 bp, Homo sapiens
gtgccacggatttgtctctggaggaggagcaccaaagagaagatgggcagctctgcttaggggatgggtccagactctacactgacttctacagtatgaamagctattttgcagttacagaggtgcctctgctggttggctctcttcccgtcttgaaggaggatatctctttttctgtgcgaagttcatctctccttttgg

SEQ ID NO: 188690 - DNA, 201 bp, Homo sapiens
agtgagactctgactcaaaaaaataaaaaatgaaaaaataaatcattgtcttttattaactataaagtgctcaaattaaatttttaactggcaaattatartgagctatggttgggaaaattttgaaactattaggttttaaatatttaaatttttattttgaaataatgttaagcttaaaagaaaaattgcaaaagtagt

SEQ ID NO: 188691 - DNA, 201 bp, Homo sapiens
gtttcaacatactaggatctttctaactcctgcctgaaggttggagctgggaatgagggtggggcagtgcttaaggctgtcagctgacctccaggagtcakgcaggggcagggactggagcttactcttcagtgcatagactttaattcctctgtatcaggcttttgaccagcccaccctctgctgcgcttgctacccttg

SEQ ID NO: 188692 - DNA, 201 bp, Homo sapiens
tagcctaatgtgcttttgagttctataaatgagatggagccattttcttttcaggatgatgatgatgatagtcttagtagcagtaccatgatatcagaggrcccaggaagaattcttaaatatactttttcttttctttctttacggtttgcattttttaagcacaaaagtaattttgacttttcttgtagggatcccaca

SEQ ID NO: 188693 - DNA, 201 bp, Homo sapiens
tgaatctgcatcattatttttagtgactgttgtgtagaagttgcatacttgtggtggaatttacttaaccactttcctctagtggggcatttaggcgtcatttttttccccaaggctttactcttaaacacaaccctaggatgactgttatacatacctgtttgtgcacattgctgattgttttgtaagactttattcctg

SEQ ID NO: 188694 - DNA, 201 bp, Homo sapiens
gctggtttgctcttctatccagaccactaaaaccatctccatatcagcaataagcctgtttcactttcttatcatgtatatgttcactggaatagcacttktgatttccttcaagaacttttcctttgtgtgcacaacttggtgcaggaggcctagcttttggcctgtctcagcttttgacacgccttcctttctaagctt

SEQ ID NO: 188695 - DNA, 201 bp, Homo sapiens
caggaggcctagcttttggcctgtctcagcttttgacacgccttcctttctaagcttaatcatttctagcttttgatttacggtgacagacatgcaacccttttttttacttgcacacttaagaagccattcttgggttattaattgacctaatttcactattgttgtgtctcaaggaataaggaggctcaaggagaaggg

SEQ ID NO: 188696 - DNA, 201 bp, Homo sapiens
gttctcttattacctgctgggactactgtgagtaataatagattgattttggtctactttaaagaaacattagagatttctgaatattagatattttaagmagttatttcctttcctgccttcacacaatatatttcaacctgtcaccattagtgtgtgtatcagtctcttttgctcattagtattctttttgtctttaaa

SEQ ID NO: 188697 - DNA, 201 bp, Homo sapiens
aggcaagagaatcacttgaatccgggaggcagaggttgcactgagttgagattgcaccactgtactccagcctgggcaacagagtaagactctgtctctgraaaaaaaaaaaaagcaaaacaaaaaaacaagcagaaaaactctctccccccccagtttttttttaagtttcatattttggagcattttggattttcagat

SEQ ID NO: 188698 - DNA, 201 bp, Homo sapiens
gggtgtggtggcgcacatctgtaatctcagctacttgggaggctgaggcagaagaatcgcttgaacccgggaggtggaggttgcggtgagccgagattgcrccactgcactccagcctaggcaacagagtgagactccatctcaaaaaaaaaaaagagagagaaaaaaaaaaagatcattgatcacaggtccccataacag

SEQ ID NO: 188699 - DNA, 201 bp, Homo sapiens
aacccgggaggtggaggttgcggtgagccgagattgcaccactgcactccagcctaggcaacagagtgagactccatctcaaaaaaaaaaaagagagagaraaaaaaaaagatcattgatcacaggtccccataacagtgaaaaagtttgaaatattgcaagaattaccaaagtgtgacacagagacatgaagtaagcaca

SEQ ID NO: 188700 - DNA, 201 bp, Homo sapiens
acatttttttctatagaggtgaggcattgagcttagcctgcacttggggtggggaattagtctccaccttttgaagggagtatcaaagaatctatgaaggtttttaaaaccaccaatgttggcctaaaagggacatgggatctattcagatttcccccaaatcttcaaaactttctataagtttacatcggatcctaaagt

SEQ ID NO: 188701 - DNA, 201 bp, Homo sapiens
tggaagggatctggtttttcatttatgcaaatgagaaaacaaaggcgaagaggttgcatgacagtagtagttgtaatgtctgtgtgtgttgttggtattayattagcacaaacacctcagatctctggacttttagatagatgcccctgttgtactgaggataatgtccttgattttctgcattggaacttgggatttgat

SEQ ID NO: 188702 - DNA, 201 bp, Homo sapiens
tgatggcatctgtagtttgaaagtttttgtggaaaagagaatcaaatttcaagggtgctgggcagtgtttcctggaaactaacttatatggaaatttatcttttttttttttgagatggagtcttgctctgtcaccaggctagagtgcagtggcgcgatctcagcccactgcaacctccaactccctggttcaagcgattc

SEQ ID NO: 188703 - DNA, 201 bp, Homo sapiens
ccactgtactccagcctgggcaacagagtaagactctgtctctgaaaaaaaaaaaaaagcaaaacaaaaaaacaagcagaaaaactctctccccccccagtttttttttaagtttcatattttggagcattttggattttcagattagggaaaattaacctgtattatttaaacaccaaagaaaggaattctgttctaata

SEQ ID NO: 188704 - DNA, 201 bp, Homo sapiens
tagtatccatttgataaatgtttccatatcaaattggaggttaaaaaaaaagactgctaaaactatagaaaaaggtcttgcatcctgagaacttgtttgcaaaaaaaaaaaaaagaacaaaataaattgttttaaattcagatagtgaatttaattccaaaagttggtatattagttatctgtgctgtgtaacagattata

SEQ ID NO: 188705 - DNA, 201 bp, Homo sapiens
cagattatagcatagcttctattcattgggaatttaagacttgcttagctgggtggttctggctcagagtctttcatgtgccaggatgtcagccacaagcygagcatagtagcatgtgcctgtagtcccagttactcaggaggctgaggtgggaggttcacttaagcccaggagcctgaggctgtagagcactatgattgc

SEQ ID NO: 188706 - DNA, 201 bp, Homo sapiens
caccttgtattttccagatatggcaaaaagcagactcaacaaagtttctgttttcctgagatgtcaaaatttggcaagtttggcattaagaaaatcatatrtgtatgattaaaatgaaaaagtagcagccaattaaaaaatatttcacaagcgcaagagcaaacccaccataggtcttgccagtggactcctaacacaact

SEQ ID NO: 188707 - DNA, 201 bp, Homo sapiens
gcctgttttccaacaaaggggtctttctcaggttttctcctcactgcagcctttcatgagcactccacagaaaggaacttgtgagtgggagtggacacttsttgtgcctgggcttcagaagaattctgaacttgtgtggcagtccacatttggcctttaagaagtccttaaaattttagctgattccttcaattacactat

SEQ ID NO: 188708 - DNA, 201 bp, Homo sapiens
cactggccagttattttatacagtctctcatttcaggccagaagttttatatttttatgtagctgcatttattaatgttttcctttacttattttatacartgtcatcataatgactgtaatgttccaatgtctgggagtaattgttaatgtaatcagttttgttgggcatttatgatgtcgtcagcatttacaattacaa

SEQ ID NO: 188709 - DNA, 201 bp, Homo sapiens
ctgcaggtgctcattggctgttggtaagaggacatagtttctcaccaccggaccttgccacagactgcttgtgtgtttccatgacatggtagctatcttcycccagagagagcactttcagacagagcaagcaggcagctatagtgccttttatgaccagtccttcaaagtcatcatacgtgccaccttcacatttttttc

SEQ ID NO: 188710 - DNA, 201 bp, Homo sapiens
gaatgaaaacatggaggcatgaagaaataaaataacactagatccaatggaaaagtaggttccttttattcattcagtaagtatttattaagggcctattrtgcacaggtactatctaggagccggaggtacagagacgaatgtgacatggtgtctggtttgaggggctatgcagagacatcagctgaggacattgccttg

SEQ ID NO: 188711 - DNA, 201 bp, Homo sapiens
ccagcccagaacgactgtcctctcttacttcctaactggcctacctggcacctgacttgtcccaatccagtctgttccttgctctgcagccagagctgtcygtttaaacacacaaacatggttatgttgctcccttggttaaagttcttcaatctctgcctattgctcttagggcaaaatctagtgtttaccatgtttgta

SEQ ID NO: 188712 - DNA, 201 bp, Homo sapiens
gcttgatgcagggaggcggacgttgcagtgagccgagatcgcaccactgtactccagcctgggcaatagagcgagactctgtctcaaaaaaaaaaaaaaattttttttttgttaaaaactaagatacaaatacacacattagcccgggccagaatcatcaatatcactgtcttccatctccatgccttgtcccactggagg

SEQ ID NO: 188713 - DNA, 201 bp, Homo sapiens
tcacctttcgtcccattcccaacttcataactatttctgttatttttttctgggggttattacatccataactttattttgtgtgtgtgtgttttgttttkttttttttttttgagatggaattcactctgttgcccaggctggagtacagtggcatgatctcagctcactgcaacctccgccccccaggttcaagtgatt

SEQ ID NO: 188714 - DNA, 201 bp, Homo sapiens
gtctaaaatccatcttaaactaatttttatatttgttttgaggtaggggtcaagattaattttttagtttatggatagttgtttcaacaccatttgttgaraagatttttccttcctcattgaattgctatgatactttcatcaaaagtcaactgaccatttagtatgtgtttatttctggactttttattctctttcatt

SEQ ID NO: 188715 - DNA, 201 bp, Homo sapiens
ttttatggtattattgcataggatgaagcttagcttaaaattggttgtttaaagatgattagacgtattacataaataagtactacagagatatgctgatrttcgtgatggtggaacttgaatgactagcatttggaaagtattgtttaggtgtgtctgtgtagagggaaaaacacgggcagatattcagtagttctcagt

SEQ ID NO: 188716 - DNA, 201 bp, Homo sapiens
tatttttgtagactacactagatatttaggaagatcgaaataggtcagtatatatatataattccaaagcacaaatcagtaaggattattctcatcaccgycttcctctttttctacagttaattaatagttgactgcagttacagggcaggcagcaccaggaagggtggtttggatttaggagattctatttttggcctt

SEQ ID NO: 188717 - DNA, 201 bp, Homo sapiens
tttttgcaccatagattagttttacctattttacagcattgtgtatggaattaggccatatatactcttttgtgtctagcttttgctgagcttattgtctragattcatccaagttatttcttttcattcctttttatgtcagttatccatgtagttcatttctttttattgctgagtagtatttcgttatatgaatatac

SEQ ID NO: 188718 - DNA, 201 bp, Homo sapiens
aaaacctgcttctggggaggcctcaagaagcttccaatcatggcagaaggcaaaggagggggcaaggtgtctcatatagtgggagtgagagcaagagagcrtgagggaggagggggtgccacacacttttaaacaaccagattgggaaaactcactatcaggaggacagcaccaaggtgatggtgctaaatcagacatgag

SEQ ID NO: 188719 - DNA, 201 bp, Homo sapiens
aaacaagccatgggtaagatttccttcttgaaagttggttctaaatacttggaaatacttttggaaaaagccttacatctttattcctgcttcaccagtaytatatgttcccaaccaggcactgggaacacctgagggttaccaagcccagggagttgcctatggaactctgcaaggcttggtgccctgctatgtctaaat

SEQ ID NO: 188720 - DNA, 201 bp, Homo sapiens
aaaaactgaaaaaaaattaaatgaatggctaactagaataaccaatgcagagaagtccttaaaggacctgatggacctgaaaaccaaggcacgagaactaygtgacgaatgcagaagcctcagtagccgatgcaactggaagaaaggctatcagtgatggaagacgaaatgaatgaaataaagcaagaagagaagtttaga

SEQ ID NO: 188721 - DNA, 201 bp, Homo sapiens
ggtgacagacggcacctggaaaatcgggtcactcccaccctaatactgcactttcccaacgggcttaagaaacggcacaccaggagattatatcccgcacmtgactcggagggtcctatgcccacggagtctcgctcattgctagcacagcagtctgagatcaaactgcaaggcggcagcgaggctgggggaggggcgccc

SEQ ID NO: 188722 - DNA, 201 bp, Homo sapiens
aagaaaagaattttcaacccagaatttcatatccagccaaactaagcttcataagtgaaggagaaataaaatactttacagacaagcaaatgctgagagaytttgtcaccaccaggcctgccctaaaagagctcctgaaggaagcactaaacttggaaaggaacaaccggtaactggtaccagccactacaaaaacatgcc

SEQ ID NO: 188723 - DNA, 201 bp, Homo sapiens
ccaatatccttgatgaacattgatgcaaaaatcctcattaaaatactggcaaaccgaatccagcagcacatcaaaaagcttatccaccatgatcaagtggrcttcatccctgggatgcaaggctggttcaacatacacaaatcaataaatgtaatccagcatataaacagaaccaacgacaaaaaccacatgattatctca

SEQ ID NO: 188724 - DNA, 201 bp, Homo sapiens
ttgatgaacattgatgcaaaaatcctcattaaaatactggcaaaccgaatccagcagcacatcaaaaagcttatccaccatgatcaagtggacttcatccstgggatgcaaggctggttcaacatacacaaatcaataaatgtaatccagcatataaacagaaccaacgacaaaaaccacatgattatctcaatagatgcg

SEQ ID NO: 188725 - DNA, 201 bp, Homo sapiens
actaacattcttctcaaccaaaactaacttcttttctcatttttttcctgtccattgtggatcacgatcaggctgccttttctggtagaatgtaaattatmagcccctcgaagtcaggagctccgttacttattacaggttgaatatcccttatctgaaatgcttaggaccaggagtgtttcagattttggatttttttga

SEQ ID NO: 188726 - DNA, 201 bp, Homo sapiens
aaatggccatactgcccaaggtaatttatagattcaatgccatccccatcaagctaccagtgactttcttcacagaattggaaaaaactactttaaagttyatatggaaccaaaaaagagcccgcatcgccaagtcaattctaagcccaaagaacaaagctggaggcatcacgctacctgacttcaaactaccacaagtct

SEQ ID NO: 188727 - DNA, 201 bp, Homo sapiens
cagaattctaacatcctacattatttagtgaaattacttagcagcaacaacaaaatgtatgaaggagaatgcttgcttgttttttttttttttgaatgcartctattgatttattgtcatagtgataaattttataaaagagatttcattgggattttactaaatgattaaggtaagtaaagaagaaattttaaaatagta

SEQ ID NO: 188728 - DNA, 201 bp, Homo sapiens
ttcttttctcatttttttcctgtccattgtggatcacgatcaggctgccttttctggtagaatgtaaattataagcccctcgaagtcaggagctccgttayttattacaggttgaatatcccttatctgaaatgcttaggaccaggagtgtttcagattttggatttttttgattttgaaatatttgcatatacataataa

SEQ ID NO: 188729 - DNA, 201 bp, Homo sapiens
tctctactaaaaacacaaaattagccaggtgtggtggtgcatgcctgtaatcccagctacttgggaggctgaggcaggagaatcgcttgaaactgggaggyggaggtagcagtgagccaagatcacaccattgcactccagcctgggcaacaagagcaaaactccgactcaaaaaaaaaaaatcatttgtgcttttctgtg

SEQ ID NO: 188730 - DNA, 201 bp, Homo sapiens
atcattcttatccagtcagtcataaatgagtaaggacctgccagtgatgggtccaaaggctgtctcttgttagcccaaacttagtttcttaacccacaacwattgatctttctttcagtgagcccttagaagcatacatctattttggccccgtgtactatcagaagctgaaacacatggtgctagataaaatgcatgccc

SEQ ID NO: 188731 - DNA, 201 bp, Homo sapiens
tacgattgtaagagggttttttttttttttttttttttttcttgaggatggacaagagccttttctttttaaagaccttcttattgatgtaattgttttgkgggtacaagataacaaagtagcttttagggctactttttcttttaccacattcaaacacatttcttttaacacattccagagttctcagtaatagagagt

SEQ ID NO: 188732 - DNA, 201 bp, Homo sapiens
gtaccttataggattgttatgggattagatgaatgatgtataccgtaccttgaatggcacagaaccattgtagttccttcacaggtgttctgtcttatctytctaggtacttttaagatattcttttggcttttgttattctgcagttttctttatgatatgccttggtgtgaatttcttttattttttttttgcttggta

SEQ ID NO: 188733 - DNA, 201 bp, Homo sapiens
ataccaattgaaaatgtaaattacttatagctgcccagacactgagtttttctgcttggttttgtggtaactggtgttacgattgtaagagggtttttttkttttttttttttttttcttgaggatggacaagagccttttctttttaaagaccttcttattgatgtaattgttttgtgggtacaagataacaaagtagct

SEQ ID NO: 188734 - DNA, 201 bp, Homo sapiens
atctgttaatgtgaatttgacacctgtaatttatatagttccctgagatactaacccttaatgccctttgagtgtttttaaaagtatcttgagtttctaaygttttatatggcttgccagtaaaaaatcaaattctgtatattgaaactgtttccccttttatcttggtcttgacagttgctgagtcaattatggggtaac

SEQ ID NO: 188735 - DNA, 201 bp, Homo sapiens
aagtattgccgcagaccagctgaaagattatgagggcctcaactggcacaggagcagaggataaatgcgaggaaggttaaaaggaggtcgactcagtagamtttttgttttcctgttgattaagaagagtcagaaagttaggactcccgggtatctaatttgggattgactgggataaatggtgatattcattgagattga

SEQ ID NO: 188736 - DNA, 201 bp, Homo sapiens
gaacttccatcataatctcaaagtcaaagaaaaatttatagtgtttttaaatgttcactgaagtggcagcagggcaggaaaggaattgtctttttaaagtmcttattagaaaggaccttgtgattgttgttgatcagttgacccttattgattaatgatcattgctattattgcatgttactagcttgaaactaagtgggg

SEQ ID NO: 188737 - DNA, 201 bp, Homo sapiens
ttcattaacaggcatggtttctaatttgcagtgatctgaaacagcagattttagagaactgttcattcttaggggagctttgacttgtacgtctctttgcraaactgaaggagtcctcctgggtctagctgacctttcccttgtagtgaggagttttgtcttgctacttttttttttccagatggcttttaatccaagggt

SEQ ID NO: 188738 - DNA, 201 bp, Homo sapiens
cttcagttctaggacattttcttatatttatttagttaataatttcctcttcctcattttccccataccctttctggttttcttagtgatcaaatattggracttccagattgatgctctagttttcttatctttttgccttcttgtttttctttttaggagatttgatcaacgttatttttcagatttttttaaacctat

SEQ ID NO: 188739 - DNA, 201 bp, Homo sapiens
aaatttcagtgatgggagtctgagacattgtttgaaaagtcactgtttaagctgaattttatgttagcttatagagcatgaaaggagatttaaaaaaaaawaaataaaaccactcttcagtttttcacactccttttcagccttttatgctccttttcagccttttaccatttacatgtgtattcctgcatcagtatgatc

SEQ ID NO: 188740 - DNA, 201 bp, Homo sapiens
ctggatagctttggctgtctgctttgcttgatcctgcttgaatggaagtttctaagtgggaggggagaaggaggctggtagggctatccgtatgagccccrtcataaggtgtatgatgccaaatgatccatcagagtttcagtccaaaaccaaaactccagcagctcttactttaatgttattaaatcagggtttcttcgt

SEQ ID NO: 188741 - DNA, 201 bp, Homo sapiens
gtggtagtggttaatgctagccaccatttgtcattttaatggagacactatatgtgtaaggctttaacttcttcattcaaccctatgaggttggattattcttgtcatttaagaaatgaggaaactgaggttcagtgaggctaagtaacttactgaaagctaaagagtggtggaatctgttttttatttgaaagtccttag

SEQ ID NO: 188742 - DNA, 201 bp, Homo sapiens
atgtgcgtgttcctgctacccaaggattaatgtctttaatcagttcagaaaaattctcagctattatctcttcaagtgttgcctattctcccttttttctrttctcttttttctattatctttgttcctttactgcattctgtgcgattgtttttctaatttagctcttagttcattttctattcagccatgttcagtaat

SEQ ID NO: 188743 - DNA, 201 bp, Homo sapiens
cagggaatagtgctgacctggaacttctaagtcttcttacatgattctgaggattatgagtttcaagttcacatccttcatcttgtcactgaactctgatwtagtctccaggtccctaagctgatatcagtatttattctcagggcaactctgccatttgggtttgcttattgctccctactccctaccatggcttcacct

SEQ ID NO: 188744 - DNA, 201 bp, Homo sapiens
tacataataagatatcttggggatgggacccaagtctaaacacgaaatccgtttaagtttcatatacactttatacgcatagcctaaaggtaatttatacratatttttaataattttgtacatgaagcaaagtttgactaagttttgactacaacccatcacctgaggtcaggtgtggagttttccacttgtggcggcat

SEQ ID NO: 188745 - DNA, 201 bp, Homo sapiens
cttattgctccctactccctaccatggcttcacctcatttttaatatgttttatccagaatctagtcatattgtagtaaccagactcctcagagaatccamcccagtatgctgcaagcagcagaggtcccttcattttcacagtagacttgaagcttcatgaggacagagactgtatctttcttgttcatcttactaaact

SEQ ID NO: 188746 - DNA, 201 bp, Homo sapiens
taaagtcttttcaacaaaataaatatctgtatacttatatggaaaaaaggaacattagctcctacctcatagcatatgaaaattaacaaaaaatatattayagccctaaatgtaagagctaaaaccgttactcttgaagaaggaaacctaggtgaaaaccttcatagcttgagttgagctaagatttccttacataaagag

SEQ ID NO: 188747 - DNA, 201 bp, Homo sapiens
gccctctctgaaactgtgacctcctaggtgcagttagttgctctgtcttccttaggccagtaacagtttattcaagtctttatttgcatgctaaattaacwtgtaattctttacttccatgcttcttcccccttttagattgtaagctcattgaggaaaggaaccatttatattcatctcgttatttccacatatgtgcag

SEQ ID NO: 188748 - DNA, 201 bp, Homo sapiens
tgtgtggtgtgtatgtgtcactatggaagcgtgtgcaagagagagagacttaaagctgccttagctattcacagggggagaaaagagatacctaggagaarttaaagaggctcagtagcccacactcaagctcagcagtagagcaagcctgagttttccaactttaacatctctttgtagcatcagttctgtgtccacaag

SEQ ID NO: 188749 - DNA, 201 bp, Homo sapiens
ttggcattgcattggaactgtagatcaatttggagaagattcgtaatcttaaaatatgtaggctttttatccatgaatattttcttttcatttattttggytttctttgatgtttttcaataaagatttataattttattcatgagggtcttgcacctctttcagatttatttctaagtttttaagggtttttggtagaca

SEQ ID NO: 188750 - DNA, 201 bp, Homo sapiens
aaaattattttgaataatagttttatttgtcaacatatccaaaatattatatcaacaggtaattaatataaaactaatgagctattttacactttttttcytactataagtcctcaaaatctggtgtgtgcttacagcacatttcaacttggatgccaattttttatcagaaatactagatctcatttcataacatttaca

SEQ ID NO: 188751 - DNA, 201 bp, Homo sapiens
ccaagtgacgaaagttaaaaatacacggccacaaactctggcgtggagtttttctgcttttctttctgtttttgacaatactttcacaagtcaccacctcrtggtttgttagacatcacctgatctgaagtctgacttctctattcataatctcgatttctctttttccttcctggcgtacccactatgccttccccttcc

SEQ ID NO: 188752 - DNA, 201 bp, Homo sapiens
tccacctgccttggcctcccaaagtgctgggattacaggtgtgagccactgcacccagcccatttttttttaattacaataataatcctttgaaatataayacatacttttttttgttctgacaaggaagctgaatcccagttttgttgagtaacatataaaaggttttctatgtcttctatgtaatgttacctataaaac

SEQ ID NO: 188753 - DNA, 201 bp, Homo sapiens
tgtggccctctgctctgcctggagttcttgttaactgtccatctgcctccaggctggtaccactcagggtctctctgcatcactgctagggtgattttttytttttgagacggagtctcgctctattgcccaggctggagtgcagtggcacgatcttggctcactgcaacctccacctcctggattcaagcgattctcttg

SEQ ID NO: 188754 - DNA, 201 bp, Homo sapiens
ttctaggatttttatgatcctaggtcttatgtttaggtctttcatccatcttgagttgatttttgtataaggtgtaaggaaggggtccagtttcagttttstgcatatggctagccagttttcccaacaccatttattaaatagggaattttttccccattgcttgtgtgtgtcaggtttatcaaagatcagatggtggta

SEQ ID NO: 188755 - DNA, 201 bp, Homo sapiens
tattcctttctgtttgttagttgtcattctaacagacaggcctgtcagctgcaggtctgttggagtatgctggaagtccactccagaccctttttgcctgkgtatcaccaatggaggctgcagaatagcaaatattgctgcccgatccttcctctggaagcttcgtcccagaggggcacctgcctgtatgaggtgtttgtc

SEQ ID NO: 188756 - DNA, 201 bp, Homo sapiens
cagcctcggcgacaaagggagatcctttctcaaaaaataaaataaaataaaataaaaaataaaatcagcaacccctttgaatcaagtgttagccagtgccrtgaagcagtagtagaaaaggtaatctctgattcacaagattcctgccattactaaatcaacactggttgaggaataaatgatgaagtttttcttgtttcc

SEQ ID NO: 188757 - DNA, 201 bp, Homo sapiens
atttagtgaaattacttagcagcaacaacaaaatgtatgaaggagaatgcttgcttgttttttttttttttgaatgcaatctattgatttattgtcatagkgataaattttataaaagagatttcattgggattttactaaatgattaaggtaagtaaagaagaaattttaaaatagtatgtatcatctgtggaaaagcct

SEQ ID NO: 188758 - DNA, 201 bp, Homo sapiens
cacctttaatgaaggaatggcatgaagtttatatgaagggaagaagttgatgtagtcatctttgacacagaggtactcacaggttactgaggacaatgatsaaaagtcatcatctcagctcaggaaatttccagactagttgaatttatttgaatggagagaatcataacaattcagtattttcttagttgaatgttatag

SEQ ID NO: 188759 - DNA, 201 bp, Homo sapiens
gctcagaagcaggcaggattcactcacagtgtactttttagatgaggacatttcaatacagtcttctactgagacattcaaagaatcttaatgaagtacarccttcctttgggcattgtgaggtcagttatatatcttatcagtaaatgtgcagtgagtctgcatccccccaaaagagctggacctttgattaagaatctc

SEQ ID NO: 188760 - DNA, 201 bp, Homo sapiens
aaacctcattttctggattcttggaactgctctcgttccttttctttctgaggctgagcatttcacctttttctttgattcttatccttccattaaattatttttttttttttgagacagagtctcactttgtcacccaggctgcagtgcagtggtacgatcttgagtcactgcagcctccgcctcccaggttcaagcgat

SEQ ID NO: 188761 - DNA, 201 bp, Homo sapiens
tgatttccttgttgcccaagttaaattggtggtggcttattactggttgaaataactataaataaaaataagtgaccaaaacttaacaccctaagagatayataaaattgctatttactgagatgatgtttctcatgttcatgtagtactctgaattattttcttaattttatatagactatgatgtgtgtgtgtgtgtgt

SEQ ID NO: 188762 - DNA, 201 bp, Homo sapiens
tctcattatgaggtttctaaggtcagaattttttttttaagaagtggggactaggttcacaagagttacagacagacactttgctgtttttatttcagcartttgtggttactgtgtgagctaagaataacatgtttcaggtatcccaatgtaatgatattctctgggagagaaaggtgctttgggcctaaacgaaagcca

SEQ ID NO: 188763 - DNA, 201 bp, Homo sapiens
gcttccctgccgctttgtttacactgtgaacatggaactgcctcctcaagcctcagcaattgtggatgcccctgcctctgccacactccaccatcccaggytgatctcagactgctgcgctaacagtgagcaaggctccgtgggcatgagaccaaccaagcccaggcacaggaggggatctcctgctctgccggttgtgaa

SEQ ID NO: 188764 - DNA, 201 bp, Homo sapiens
ttaggtcttgtcctttcctcaggaaagcctttactttctacccttccccccacctaagttggttccaatataatattgaacataccttattagcaaacttyttgcttatccataacacttataacactgtaacttattttatttctgtctttttttttaggcagagtctcgctctgtcgcccaggctggaatgcagtggca

SEQ ID NO: 188765 - DNA, 201 bp, Homo sapiens
ccaagtagctggaatcacaggcatgcgctaccatgcctggctaattttttttatttttagtagagacggtttcaacatgttggccagaactcctggcctcragtgatctgccctcctcagcctcccaaagtgctgggattacaggcacaggccaccgcgcccagcctgaatatacatattttagaaataatagtatttaaa

SEQ ID NO: 188766 - DNA, 201 bp, Homo sapiens; identical to SEQ ID NO: 32835

SEQ ID NO: 188767 - DNA, 201 bp, Homo sapiens
ccaaaaggaactaaaagggatccagctttgaattctggtgtctctcaaaagcctgatcctgccaaaaccaagaatcgccgcaaaaggaagccatccacttbtgatgattctgactctaattttgagaaaattgtttcgaaagcagtcacaagcaaggtgagtgttgatcctagtcagtccttttgctgtagatgttctgaa

SEQ ID NO: 188768 - DNA, 201 bp, Homo sapiens
tacattggcatttaagccaatcaaaaaaggaaagaagagaaatccctggtctgattcagaatcagataggagcagtgacgaaagtaattttgatgtccctbcacgagaaacagagccacggagagcagcaagtaaggaaaactaaagaacattatagataaactgtaagagtggaatggccaatatacttcagggtacttt

SEQ ID NO: 188769 - DNA, 201 bp, Homo sapiens
ctaggggcaggagtccgttggtcccgtagtggatccatgttacagcggcccgggtgcgacgttattgagtcgcgcgtacagatgctttcccctcctgccckctgcttgaaaacggtcttgaatgtccccgatcttggaaagggcagagcctagcacagtgtttctctggagcagctggccagcttacaaaagcgccccctt

SEQ ID NO: 188770 - DNA, 201 bp, Homo sapiens
agttctcctgcttcagcctcccaagtagctggaatcacaggcatgcgctaccatgcctggctaattttttttatttttagtagagacggtttcaacatgtkggccagaactcctggcctcaagtgatctgccctcctcagcctcccaaagtgctgggattacaggcacaggccaccgcgcccagcctgaatatacatattt

SEQ ID NO: 188771 - DNA, 201 bp, Homo sapiens
ctcgtagaaacagtactatggacaaaaattgctaaattaacaccttgttaatgccactcctgtgctgtttgggaacttttttttctatatcttacttagarttacagaatgttttttaaaacactaatttcttacaaatgtatattttattttctttcagttaatgctgcggacaacaaacaaagggacccaaaaatgtct

SEQ ID NO: 188772 - DNA, 201 bp, Homo sapiens
gtatcatttctaccaaacctgctgtagccagggctcctgtcatttcaatcagttgataaaggtgagctggtttcctggagcccaggaggttgagcttctcstagaaacagtactatggacaaaaattgctaaattaacaccttgttaatgccactcctgtgctgtttgggaacttttttttctatatcttacttagagtta

SEQ ID NO: 188773 - DNA, 201 bp, Homo sapiens
atcttgggtggcacttttctatattgttaaagactatgtattgtacaatgtttatgtttcacattttctaataaagctagattttaattaatcctttaggytccagatgaagaagaaaatgaagagagtgacaacgaaaaggaaactgaaaagagtgactccgtaacagattctggaccaaccttcaactatcttcttgat

SEQ ID NO: 188774 - DNA, 201 bp, Homo sapiens
tgttgaatggcaccgagaagacacctcctctcataacagactatagggaataccatacagataccactgtgaaatttgttgtgaagatgactgaagaaaarctggcagaggcagagagagttggactacacaaagtcttcaaactccaaactagtctcacatgcaactctatggtatgtatttgttttgtgagatgtacac

SEQ ID NO: 188775 - DNA, 201 bp, Homo sapiens
atggagaagattatacatgtatcacctttcagcctgatttgtctaagtttaaaatgcaaagcctggacaaagatattgttgcactaatggtcagaagagcrtatgatattgctggatccaccaaagatgtcaaagtctttcttaatggaaataaactgccagtgagtattttcctggatgttaaggataataagggatttt

SEQ ID NO: 188776 - DNA, 201 bp, Homo sapiens
taggtatttatagtttgaaagagatgatgtttccttgactgagcatcttgagaaatcaagatttagttgacaattagacatgaggagaatagagagctaghagaccttgcataaactgattgaccaagagaatagatacactaatcatgtctacaggaacagaaaataaaagagacagagaagagataataaatctgatgg

SEQ ID NO: 188777 - DNA, 201 bp, Homo sapiens
gggaggccgaggcgagtggatcacctgaggtcaggagtttgagaccagcttgaccaacatggtggaatcccatctctactaaaaatacaaaaaattagccrggtgtggtggcacacgcctgtaatcccagctactcaggaggctgaggcaggagaatcgcttgaacccaggaggcagaggttgcagtgagccgagataaca

SEQ ID NO: 188778 - DNA, 201 bp, Homo sapiens
gtggatcacctgaggtcaggagtttgagaccagcttgaccaacatggtggaatcccatctctactaaaaatacaaaaaattagccgggtgtggtggcacaygcctgtaatcccagctactcaggaggctgaggcaggagaatcgcttgaacccaggaggcagaggttgcagtgagccgagataacaccactgcactccagc

SEQ ID NO: 188779 - DNA, 201 bp, Homo sapiens
gtgcagtggctcatgcctgtaatcccagcactttgggaggccaaggtgggtggatcacctgaggtcaggagttcgagactagcctggccaacatagtgaamcctcatctctactaaaaacacaaaattagccaggtgtggtggcacatgcctgtagtcagctactcgggaggctgaaacaggagaatcacttgaacccagg

SEQ ID NO: 188780 - DNA, 201 bp, Homo sapiens
gtctcaaaaaaaaaaaaaaaaaaaaagggacagattattaaatactacttagaatacaaggccgggtgcggtggctcacacctacaatcccagcactttgkgaggccgaagcaggcagatcacctgaggttgggagttcgagaccagcctgaccaacatggagaaaccctgtctctactaaaattgcaaaattagccaggc

SEQ ID NO: 188781 - DNA, 201 bp, Homo sapiens
ttagtggtgaagtagctattcttaattctacaaccattgaaatctcagagcttcccgtcagaacatggacccaggtaaataattgtggatttcttttttargtttgtgatcaaaagaaataccttttgtactattgctgttgactattcagaagcctatattttagaaacttcaggattatttctttctttagacatacaa

SEQ ID NO: 188782 - DNA, 201 bp, Homo sapiens; identical to SEQ ID NO: 32845
  misc_feature (1)...(201): n = A,T,C or G

SEQ ID NO: 188783 - DNA, 201 bp, Homo sapiens
gaaccgagaggcagaggttgcagtgaaccgagatcacaccactgcactccagcctaggcaacacagcaagactccgtctcaaaaaaaaaaaaaaaaaaaaagggacagattattaaatactacttagaatacaaggccgggtgcggtggctcacacctacaatcccagcactttgggaggccgaagcaggcagatcacctg

SEQ ID NO: 188784 - DNA, 201 bp, Homo sapiens
agttacctgggcttttctcttttagaaatccaagggggagagtgatgacttccatatggactttgactcagctgtggctcctcgggcaaaatctgtacggkcaaagaaacctataaagtacctggaagagtcagatgaagatgatctgttttaaaatgtgaggcgattattttaagtaattatcttaccaagcccaagact

SEQ ID NO: 188785 - DNA, 201 bp, Homo sapiens
ttgtttttctgttgttcgttctttgtagaaggatattttggaacctattagcctattagtaccagtgacatcttttcatcctttaatttataggcctttakcaaaaaacagatagatgatcgaaaggaatggttaactaatttcatggaggatagaagacaacgaaagttacttgggcttcctgaggtaaaagttttaaat

SEQ ID NO: 188786 - DNA, 201 bp, Homo sapiens
atatccacatggttcagtccctcagtttgttttttgttgtttttttttcttttgagatggagttttgctctttttgcccaggctggagtgcagtggcgcawtttcggctcattgcaacctctgcctcctgggttcaagtgattctcctgcctcagcctcccgtgttgctgggattacaggtacacgccaccatgctcagct

SEQ ID NO: 188787 - DNA, 201 bp, Homo sapiens
gagaacagtaactcccgtctcaaaaaaaaaaaaaaaggaaaacagtatttttgtttttctgttgttcgttctttgtagaaggatattttggaacctattakcctattagtaccagtgacatcttttcatcctttaatttataggcctttagcaaaaaacagatagatgatcgaaaggaatggttaactaatttcatggagg

SEQ ID NO: 188788 - DNA, 201 bp, Homo sapiens
cgtgccatcacattccacaagagtgaaactccatttcaaaaaaaaaaaaatacaaaaattagctgggcgtggtggcgggcgcctttaatcccaggggctcrggaggctgaggcaggagaatcgcttgaacctaggacgcagaggttgcagtgagccaagatgacaccattgcactccaggctgggcaagagaacagtaact

SEQ ID NO: 188789 - DNA, 201 bp, Homo sapiens
gggtgtggtggcacacgcctgtaatcccagctactcaggaggctgaggcaggagaatcgcttgaacccaggaggcagaggttgcagtgagccgagataacrccactgcactccagcctggacgatagagtgagaccccatctcaaaaaaagagcagctgtgacaaatgcctgtattgaattgcaggtcagtcttccacctc

SEQ ID NO: 188790 - DNA, 201 bp, Homo sapiens
cacaggcatgcgctaccatgcctggctaattttttttatttttagtagagacggtttcaacatgttggccagaactcctggcctcaagtgatctgccctcstcagcctcccaaagtgctgggattacaggcacaggccaccgcgcccagcctgaatatacatattttagaaataatagtatttaaatatttttaaatgtta

SEQ ID NO: 188791 - DNA, 201 bp, Homo sapiens
aaaagtaaaaacaaaaagtatcatttctaccaaacctgctgtagccagggctcctgtcatttcaatcagttgataaaggtgagctggtttcctggagcccrggaggttgagcttctcgtagaaacagtactatggacaaaaattgctaaattaacaccttgttaatgccactcctgtgctgtttgggaacttttttttcta

SEQ ID NO: 188792 - DNA, 201 bp, Homo sapiens
  misc_feature (1)...(201): n = A,T,C or G
ccaaatcaatatgtgattagtggtgaagtagctattcttaattctacaaccattgaaatctcagagcttcccgtcagaacatggacccaggtaaataattntggatttcttttttaggtttgtgatcaaaagaaataccttttgtactattgctgttgactattcagaagcctatattttagaaacttcaggattatttct

SEQ ID NO: 188793 - DNA, 201 bp, Homo sapiens
gacagatcaggtcagatttgttattaaatttttagattgttcaactaaattaagcatgtcttaatttaatttcattgttttttgccatgaaaataaattasttaaataggagctttattcatcatctctaatcaacatctaatcagatatgcttatatcatatgtatgttgcaaatacaggttaagtgagtctggatttga

SEQ ID NO: 188794 - DNA, 201 bp, Homo sapiens
gcctcccaagtagctggaatcacaggcatgcgctaccatgcctggctaattttttttatttttagtagagacggtttcaacatgttggccagaactcctgscctcaagtgatctgccctcctcagcctcccaaagtgctgggattacaggcacaggccaccgcgcccagcctgaatatacatattttagaaataatagtat

SEQ ID NO: 188795 - DNA, 201 bp, Homo sapiens
tatattttattttctttcagttaatgctgcggacaacaaacaaagggacccaaaaatgtcttgtattagagtcacaattgatccgtacgtcttttgcttartttttgttatgtagctcgttgctattgttagctgcatgtattttgattactggtgaagttggcttttcctaaacagaagttgagaaaagtacacaaaagc

SEQ ID NO: 188796 - DNA, 201 bp, Homo sapiens
ctaaaactctagttacgccaaactttctttaaacatttttggtgagagtaatggtggagaaagaggcaaaatccatttaattcacctggtcacttatacabgcatttctttaaaatatctgattaggtatttatagtttgaaagagatgatgtttccttgactgagcatcttgagaaatcaagatttagttgacaattaga

SEQ ID NO: 188797 - DNA, 201 bp, Homo sapiens
taccagggacaaagcagaaaatggattttcatgtgttgcttaaatgtactattttcctttccatttgaaataatagaccttgaagctgatgatgttaaggrcagtgtaccactgtcttcaagccctcctgctacacatttcccagatgaaactgaaattacaaacccagttcctaaaaagaatgtgacagtgaagaagaca

SEQ ID NO: 188798 - DNA, 201 bp, Homo sapiens
tcccaaactcgatgatgccaatgatgcaggtatatatttaataatgtttccaaacttttaagtcttatagttgttattttattcattaatggcataccacrgatatttatttttcccttgacagaataactatattcaacagaataacttgttaaaaatcggcccgtttcctattatggaagatttaggtcatttccatgt

SEQ ID NO: 188799 - DNA, 201 bp, Homo sapiens
aaatttgtattactgcacttcagtatagatgcctagctcattgtaatcagttggttggataagtgtgcatcacttcctttcatattttgtatgtgagtttrcaaatatatatgtatatacatgttttatttttagtttctcccttgttttcctcaaaaaggttaagtggtagaatcaggaataaaacccagtccttctgtc

SEQ ID NO: 188800 - DNA, 201 bp, Homo sapiens
caaatttgtattactgcacttcagtatagatgcctagctcattgtaatcagttggttggataagtgtgcatcacttcctttcatattttgtatgtgagttyacaaatatatatgtatatacatgttttatttttagtttctcccttgttttcctcaaaaaggttaagtggtagaatcaggaataaaacccagtccttctgt

SEQ ID NO: 188801 - DNA, 201 bp, Homo sapiens
aaaatcacatgtggatttttgtaaatgccttaattgaaaacccaacctttgactctcagacaaaagaaaacatgactttacaacccaagagctttggatcracatgccaattgagtgaaaaatttatcaaagctgtgagtacttagaggaaaataaaaatagaaacacctgactttattttccattgcacttcttagctct

SEQ ID NO: 188802 - DNA, 201 bp, Homo sapiens
ttacttgcttcaaacggaatgacaagcgagaagtaaaggttgcccaattagctggatcagtggctgaaatgtcttcttatcatcatggtgaggtaaacacrcaatccatgtttccagaaagcattatatcagaaatccctgcagagtcattctcaaaacagatttggtgaaagtataagctcatatattcatagtaaagaa

SEQ ID NO: 188803 - DNA, 201 bp, Homo sapiens
tactttagatttattgttaaacgctgttgtgatttccgtctagtatcacatttagaaaacatactgtttttttaaatgccaatttagcttccaagttacargaacttcaagggtactattgaagaactggctccaaatcaatatgtgattagtggtgaagtagctattcttaattctacaaccattgaaatctcagagctt

SEQ ID NO: 188804 - DNA, 201 bp, Homo sapiens
aaaattaactctcatattctgttagcttttactgtacatatttagttttaacaaagttaaatatgccacttatttgggcaatggaagagttggccttagakctgcttcttattacttggtagaaaatagaaaactccttgaatatagtgtcttgatacatttttttacattacaattatgttgtcagatttacaatgtgca

SEQ ID NO: 188805 - DNA, 201 bp, Homo sapiens
taatttataatacaagactttatgcttatatttaattccctcattaggcattttaaaatatattttagacaatttgtgcttattttgagaaattaggtacrttgtagcctattttaacagacctttctgatgtagtaaattataagctaatagctcaaaatactggagctcaagaaaatccaagcaacatatactgttaaa

SEQ ID NO: 188806 - DNA, 201 bp, Homo sapiens
aatgtttttgttaacatttaaacttgctttcttatatcccttctgtaggctgttgaagccaaggaaaaacaagatgaacaagtcggacttcctgggaaagkggggaaggccaaggggaaaaaaacacaaatggctgaagttttgccttctccgcgtggtcaaagagtcattccacgaataaccatagaaatgaaagcagag

SEQ ID NO: 188807 - DNA, 201 bp, Homo sapiens
cttgaacccagaaggcagaagttgcagtgagccgagattgcgccactgtactccagcctgggtgacagagcaagactccatctaaaaaaaaaaaaaaaaaaggagaaagcagggctatccagatggtttcagaaggttatttgttacttaaatcttcctaataacatttgtttctcaacattattttaacataagaaaaaa

SEQ ID NO: 188808 - DNA, 201 bp, Homo sapiens
tttaaacttgctttcttatatcccttctgtaggctgttgaagccaaggaaaaacaagatgaacaagtcggacttcctgggaaaggggggaaggccaagggraaaaaaacacaaatggctgaagttttgccttctccgcgtggtcaaagagtcattccacgaataaccatagaaatgaaagcagaggcagaaaagaaaaata

SEQ ID NO: 188809 - DNA, 201 bp, Homo sapiens
ggccaggctggtctcgaacgcctgacctcaggcgatccgcctgcctcggcctcccaaagttctgggattacagatgttagctaccacgcccagcctaacarttcttttgaactttggctttcaaatctttctaggaccaagatggttcccacatcaaaggcttgctgattaattttatccatcacaactggccctctcttc

SEQ ID NO: 188810 - DNA, 201 bp, Homo sapiens
actatggacaaaaattgctaaattaacaccttgttaatgccactcctgtgctgtttgggaacttttttttctatatcttacttagagttacagaatgtttyttaaaacactaatttcttacaaatgtatattttattttctttcagttaatgctgcggacaacaaacaaagggacccaaaaatgtcttgtattagagtcac

SEQ ID NO: 188811 - DNA, 201 bp, Homo sapiens
gtttaacctgacacctggggacctggccgcagcgaatttaaattgtcctatttgtacaaaactggcaactccaccactgcctactaacagattgcaatgcrtgttgacatctcactatggtaggcattttgttcctagtttagggtaaacttatgattaaaaattcccttctttctctctttttttttaattgctagcctg

SEQ ID NO: 188812 - DNA, 201 bp, Homo sapiens
gattgcaggcggatgccaccacacccaactaatttttgtatttttagtggagacagggtttcaccatgttggccaggctggtctcgaacgcctgacctcargcgatccgcctgcctcggcctcccaaagttctgggattacagatgttagctaccacgcccagcctaacagttcttttgaactttggctttcaaatctttc

SEQ ID NO: 188813 - DNA, 201 bp, Homo sapiens
gtgaactatgatcatgtaccattgtactcagcctgcgtgtctcttaaaaaaaaaaaaacaaaaaaaaaaccaccaaaagctttatttcttaaatttaacaygcaaatttgtattactgcacttcagtatagatgcctagctcattgtaatcagttggttggataagtgtgcatcacttcctttcatattttgtatgtgagt

SEQ ID NO: 188814 - DNA, 201 bp, Homo sapiens
actgcattcagtatactaaaagtaatcatagtgcttgccaggtactttgctaggtgctagagatacaaaaaataaaaactgttcttgctgataaaaaattsagaaattagaacaaagttttaagagtatgttttaaatattccagaaaagtcacatatttggtgtttaaataggaattcataccagggacaaagcagaaaa

SEQ ID NO: 188815 - DNA, 201 bp, Homo sapiens
cagcttctggagtagctggaaatgcaggcagcaccaccatgcccagctaatttttttttttctttttaatagaggtggggatctcactatgttgcccaggstggtcttgaactcctgggctcaagtgatccacccacctcggcctgtgtcctttaatgaccattcccttatgcctatcagtgaacatcattgcattggttt

SEQ ID NO: 188816 - DNA, 201 bp, Homo sapiens
aaaaactaaaatattcatgaaatgttatgtcaacctatgaattgtttctcctactaccctctttgatttttttgtatatggtttttttactagcaaaaacmaaattcacaatggatttggattcagatgaagatttctcagattttgatgaaaaaactgatgatgaagattttgtcccatcagatgctagtccacctaaga

SEQ ID NO: 188817 - DNA, 201 bp, Homo sapiens
cctctttgatttttttgtatatggtttttttactagcaaaaacaaaattcacaatggatttggattcagatgaagatttctcagattttgatgaaaaaackgatgatgaagattttgtcccatcagatgctagtccacctaagaccaaaacttccccaaagcaagtatcttatctaatatgggttttgtcatgattgtttc

SEQ ID NO: 188818 - DNA, 201 bp, Homo sapiens
attgtattctcagaactatcacaggagttaataaatttgaaggatggatggatgatagatggagaaaagtgggtctaatatataaaggtgattaatttctrtctcccctctaggtacaaagacaaagaaacaaactacattggcatttaagccaatcaaaaaaggaaagaagagaaatccctggtctgattcagaatcaga

SEQ ID NO: 188819 - DNA, 201 bp, Homo sapiens
ggatagccgcccaaactgctgctgccgaactagaattatttacggtgtcgtgtgctcgggacaccgtaaataatttataataataggcactcggtaaatamtgtatgcaggaactgaaagaagtgggtgtattttattgatgacatctaccatgttgctcaagaaaagaggtttccagacagacccacttggtgagataat

SEQ ID NO: 188820 - DNA, 201 bp, Homo sapiens
ttccagattgcccccagaaccacgcttatgagctagaagtttctatattctaacaactctctacacaatgacttaactgtaatgtgagaaaaaggaagaarattcctaatactttttgggcagttttgcataatgtttattcttaggaaagcatggttaaaatgcaactcaaagtacgaccatgaaattactgaaaaggtt

SEQ ID NO: 188821 - DNA, 201 bp, Homo sapiens
tgtgtttcaagcccaaagcaagtggaaaggtgcaggaaaattcatccttaagctaaaggagcaggtgcaggtaaagtttaaagttattttgctctgttctwaagttatctgatacccataattacactgtagccagatctggaagctggtgaaatttaggagaaagttcctgagtcaaggaatggagttaggagaaaattg

SEQ ID NO: 188822 - DNA, 201 bp, Homo sapiens
tatgattcttaggttaagcatttgtggttattgaaaacagatactccaattgatagctatcaagattgagttgatactgcaacaacataaaagtgtgtcaraaaataatgttattgggagtggaggaattagggagatttcctggtagtggaaaaatggctccatttgttgcttatctgtttgtgttcttttgagataaat

SEQ ID NO: 188823 - DNA, 201 bp, Homo sapiens
gatgatcgctttggcagattccagcatctaaaagcctgtctggtcatagctatggaaagaccatttcagcacagtaagcagaaagcatagcatattataaygatgtgaggcagtgtcatgtccaaataggttctttcacttgaaatgttttagaaaaaatattggtttttgaatttgtatattgaaccatgtttagaaacg

SEQ ID NO: 188824 - DNA, 201 bp, Homo sapiens
catgtggccgagcttgcggttaagcagtcctagaggggagctcctcagccctactctctccaaagctctagagagaagaggaaagcgctcttctgaaatartgtcatgtgacagaggaacctgagtttaacctaacaccaatggaaggttctttgttcccacaggcatctcgagaagataaaaagaaaggcatttctttcg

SEQ ID NO: 188825 - DNA, 201 bp, Homo sapiens
actgctgataaaaaccccctcagggtaagggaaatttcagctcactttggaaaatcaaatttttccttgacaaagcacatctcccctctcagagcagataytgtattctttccctggaacatttcacagcacattccaggagtaacagatattttactccagaaatttcttgactaaaaaaaatacagtaggcaaataaac

SEQ ID NO: 188826 - DNA, 201 bp, Homo sapiens
gcttgcggttaagcagtcctagaggggagctcctcagccctactctctccaaagctctagagagaagaggaaagcgctcttctgaaatagtgtcatgtgasagaggaacctgagtttaacctaacaccaatggaaggttctttgttcccacaggcatctcgagaagataaaaagaaaggcatttctttcgcaagtgaactc

SEQ ID NO: 188827 - DNA, 201 bp, Homo sapiens
ccttctcagctcttgacctcagaaagtatccaaaccaaggaggagaaacctgtgggtggcttgtcctccagtgacacaatggattaccgacagtgactaasggcagcatgtttaacccaggtatagtaagtcattgcaccatcctggaacagggcttaacttaaactactttgtaaggaaggcataattagtacaatgtct

SEQ ID NO: 188828 - DNA, 201 bp, Homo sapiens; identical to SEQ ID NO: 32858

SEQ ID NO: 188829 - DNA, 201 bp, Homo sapiens
gataagcgttggtccatgcttaaagcaatgtgtccgagacactgtatgtgagtatcgcgccaccctccaaaggacttcaatatcgcagtacatcaccggtwctctcctagaagcaaccacgtctttgggagcaagaagtggccttctcagtacttttggaggatccactggacgaatgatgctgaaaggtaatgcctgaaa

SEQ ID NO: 188830 - DNA, 201 bp, Homo sapiens
taatgcatgagccgagtgctcagagtgtttgcacttggagcatctgagccttctttcttaataagtcatcttggcattttgtcaacaagttaatttgcttycctaagaaactagattaatacttcctgtactttgtgctattcacagatctacaatgcagtgagaagagaagaaacagaaaatacagttggatctctactc

SEQ ID NO: 188831 - DNA, 201 bp, Homo sapiens
agacctgggtgcaggaagatccatcaggagagagttgcagtaaacaacagaagatgacaaggggcctgatttaggatgacagtgagaatataagggaaaartggctcccagatgcctagaagaaagagtcccagtaattcagtgactgttcacatagggaggctgaaggagagggaggggtcaagactgaattcaggcttt

SEQ ID NO: 188832 - DNA, 201 bp, Homo sapiens
ctggagggggaggccatctagggtagatttaagcatcaacctgattttaatttttttttaatatgagcttagatagaaccaaatataatttaatagtctcyattttttgttacagaagatttttggtaatttggtccaaaagatgtattaaaatgcttagagtcaaccaggaccaacctggtttccatttttctgtcccat

SEQ ID NO: 188833 - DNA, 201 bp, Homo sapiens
actccagagttcccctcttgtaaactttgagtcagtaatgccatcttcccctatatgagacaacacactattataacttactgtgtgaattttgactcaastattcctttttacccaatgtaatcagaaatagatgagtgatcagtgacagatactgataaaacagttaattaatttgccataaaaagaacagatgagaaa

SEQ ID NO: 188834 - DNA, 201 bp, Homo sapiens
gaagctctgtgtacgccatagttgaggaatttttattgaggcttcatcacctcagcatgattaatttagtcagtcttcagttcctttcccctccctagagsatggtgggtggggcttaaacttccaagcttgtaatcatgccttggtttttctggtgcccagccctcgtcttgaagctatccaggaacccaccaaaagtta

SEQ ID NO: 188835 - DNA, 201 bp, Homo sapiens
caaaaattttatccaaatgctcgtaacaacattagtcataacagccaaaaaatgtaaacaaaccaaatgtccatcaactgatgaataaacaaaatgtggtrtatacatacaatggaatattattcagttattaaaaagaaatgaaatatttatacatattacaacattgataaaccttgaaatcattatgctaagtgaaag

SEQ ID NO: 188836 - DNA, 201 bp, Homo sapiens
atgtggtcaattttggaataggtgtggtgtggtgctgaaaagaatgtatattctgttgatttggggtggagagttttgtagatgtctattaggtccgcttsgtgcagagctgagttcagttcctggatatccttgttaaccttctgtctcatcgatctgtctaatgttgacagtggggtgttaaagtctcccattattatt

SEQ ID NO: 188837 - DNA, 201 bp, Homo sapiens
tctctaaagaaaatgtgcaaatggccaataagcatgtgaaaagatgcacaacatcattagtcgttaggaatattaacatcaaaaccataaagtacaggacrggcatggtgactcacgcctgtaatctcaacactttaggaggccaaggtggaaagattgcttgaggccaggagttcaagcccagcctagtcaacgtggcaa

SEQ ID NO: 188838 - DNA, 201 bp, Homo sapiens
tcaaaggccttttctgcatctattgagataatcatgtggtttttgtcattggttctgtttatatgctggattacgtttattgatttgcatatgttgaaccrgccttgcatcccagggatgaagcccacttggtcatggtggataagctttttgatgtactgctggattcggtttgccagtattttattgaggatttttgca

SEQ ID NO: 188839 - DNA, 201 bp, Homo sapiens
gttctaatacatttctgacaattaaaaacatttctcgccccaggaagttagacaaggcacatgtaatgccccttctttcttctttccctacacccatgtcmcgattatgagcagagaccatatcctgagtgactaacttgattaattgattaataagcagataggcctatgtacacaattatcctaatgttacacagaaca

SEQ ID NO: 188840 - DNA, 201 bp, Homo sapiens
tttttctttttttttttttttttttgagacggagtttcgctcttgttgcccaggctggagtgcaatggcgcaatctcagctcacctcaacctccgcctccygggttcgagcgattctcccgcctcagcctcccacaaattttcttctttatacttctttatattttccacgttttcacagtgagcatgtttctttggaact

SEQ ID NO: 188841 - DNA, 201 bp, Homo sapiens
tagtctgagtcataatttaaacttctactggaattgagtcttcaaaccaagaaatagtgaataaattattacagttaaagtaacaaaaagatatttttaayggtgtttagattttggtaattgaattctaattacagatattatactatcatcaggaaagtctaacaagttttgtcaactggaaatatatatttggtattt

SEQ ID NO: 188842 - DNA, 201 bp, Homo sapiens
tctctctctctctctctctctccccacccctccctctctccccacgcccctctctctctttctccctttctctctctttctcttggaagcttcttattaasaatcctggctgggcacggtggctctcacatgtaatcctagcactttaggaggtcagggaaggaggatcacttgagcccccaggaattcgagaccagcctg

SEQ ID NO: 188843 - DNA, 201 bp, Homo sapiens
agtgcgagactagcctggccaacatggggaaactctgtctctactaaaactacaaaaatcagccaggtatggtggtaggcacctgtaatcccagctactcrggaggctgaggcaggagaatcacttgaacccaggagatggaggttgcagtgagccaagatggcgccactgcactccagcctaggcaacagagggagacct

SEQ ID NO: 188844 - DNA, 201 bp, Homo sapiens
tgcacctgggattccctatctgtaaaaggggtgtaacagtcctaacttaaaggattgctgtaaaaagtagcaataaagtatctagtgtgattagcacatcktcgggagcatggtgggtggatcacttgaggtcaggagttcaagatcagcctggacaacatggtgaaatgccgtctctactaaaaatacaaaaattagtgg

SEQ ID NO: 188845 - DNA, 201 bp, Homo sapiens
acacctgcagtcccagctacttaggaggctgaggcatgagaactgcttgaacccaggaggaggaggttgcagtgagccgagaacacaccactgtactccckcctgggcaacacagtgagactcccatcaagttttcaacttattttctttcactacaataagcttgtatattctatttgtatctttctctaaagttaatag

SEQ ID NO: 188846 - DNA, 201 bp, Homo sapiens
tctgttcctctgacaaacaaactgcctgtgaggccgggcatcgtggctcatgcatgtaatcccagcactttgggaggccaaggcaggtggatcacctgagrtcaggagttcgaggccaacctggccaacatggtgaaaccacatctctactaaaaataacaaaagttagctgggcatagtggcacgtgcctgtaatcccag

SEQ ID NO: 188847 - DNA, 201 bp, Homo sapiens
ttgcctttcaaattgatatcaggaggatagaccctttcctttttttcttttttctttttttttttttttttttttttttgagatggagtctcgctctgtcrcccaggctggagtgcagtggtgcgatctctgctcactgcaaggtccacctcctgggttcatgccattctcctgcctcagcctcccgactagctgggacta

SEQ ID NO: 188848 - DNA, 201 bp, Homo sapiens
tctttttatgaaaaaaaacactcaacaaaataggaatagaaaggaacttccccaacctgataaagtgtatctatgcaaaacccacagctgacatcacacakgctgatgaaagactaaaaactttccgcctaagatcaagaaccaaaaaagatgtactgtcagttctagccagggcagttaggcaacaaaaataaataaaag

SEQ ID NO: 188849 - DNA, 201 bp, Homo sapiens
tgagaccccaccagattagcccattcataaagatattttggtgctgcttgtatagaaaccagctgcataggttgatttgctcagacatccagaagcctctmtggtttgtatttggttctgagggaaagtataatctgagtcattctctcttttctgtctttcatcctcacagaggtgaatgccatcgctaaccctccaaac

SEQ ID NO: 188850 - DNA, 201 bp, Homo sapiens; identical to SEQ ID NO: 32854

SEQ ID NO: 188851 - DNA, 201 bp, Homo sapiens; identical to SEQ ID NO: 32857

SEQ ID NO: 188852 - DNA, 201 bp, Homo sapiens
ggaaaggtgtccttattagcattctagaaggggtggctggatctccaaggatcctctgttctttccaggttcctaaggtaatattagatgttttagattgsttctgttctcatacctccccattgtcctcaagtaagccaggaagctcacactgcctgccctctgtgttcctccaattctgcaggtgcagattggtagtct

SEQ ID NO: 188853 - DNA, 201 bp, Homo sapiens
atatttagctatattaaagttatttatcacatgtcagctataaatagaatattgatatgaaaacaaaaataccttacagatacaatatttttgtttgaaargagggaatattttatttcagatagaaaagtctaccagcactttgagaggtcgaggcgagcacatcacttgaggtcagaagtttgagaccagcctggctaa

SEQ ID NO: 188854 - DNA, 201 bp, Homo sapiens
tgtattagaaaaaaaaactaaactgttcatttttaaccagtctgagtgtgtggtatgtgtgtctgtagactatatttagctatattaaagttatttatcayatgtcagctataaatagaatattgatatgaaaacaaaaataccttacagatacaatatttttgtttgaaaagagggaatattttatttcagatagaaaag

SEQ ID NO: 188855 - DNA, 201 bp, Homo sapiens
gatgcctggaaaagatcaaacagcaactgtctgggaacctgagaatgctgccccacacacctagggcccaaatgtgggctcttgctgaggatgtaacctaraggagagtgacaacaaggacgaagaccctgacaagtgcatctccatctgttcctctgacaaacaaactgcctgtgaggccgggcatcgtggctcatgcat

SEQ ID NO: 188856 - DNA, 201 bp, Homo sapiens
actatgttgggtgccaagttggtttgttttctggagttgcccgaacttcaggggattggttataaatgaatgaagaataacagaaggtgtgggaacactartggcttcatgtttttcagccattcaacacattttttgagcccctattaggtgttaggtgctggaaaaggaacaaaacataattcctgccctcatggaatt

SEQ ID NO: 188857 - DNA, 201 bp, Homo sapiens
acagagtgagactccatctcaaaaaaaaaaaaaaaaaaagatttttgaaactttttttcaaatgaagtaaatggttaaaacgctatctttaattttttttwaaatgattcaggcaggtagtttctcctagtggtagtttatgacaaatgtcaattactatgacaagatgctaggaaacaaatatagtcaagcagtcatatt

SEQ ID NO: 188858 - DNA, 201 bp, Homo sapiens
tcactctccattgctgaagccaataactgtagatcatcctggccttctgccccatttaagacttgatcattctatttccttagtatctttcaaatccattyatcttgatctgtctttattgccttggccctggttcattctcacctggcttgtggtagagtcttcctaattggtctcatttcctctgggtttgccacctct

SEQ ID NO: 188859 - DNA, 201 bp, Homo sapiens
aatagttcccatggaatattcagtgctctgcacttacttctcttagcactgaatgccagaacggccactagcaggggcaggatgggaaactgtagtagccygtcacgagcaggctgatcatccagggcctggcctggaagacagactgggtaagtatagtcttcatttggccattgtgctcaactggcaatgtgcccacag

SEQ ID NO: 188860 - DNA, 201 bp, Homo sapiens
ggtctcagcaagttactaaacttctttgcatctcactttctttccaggtaaaacagagatcataaaggactttatgatataggctatccagggatgtttgrggaattagatgaaatactttagggaaagatagtgccagaaagacccagggcagaaaccaagagaagccaagaactgaagtccttccattctcacctctat

SEQ ID NO: 188861 - DNA, 201 bp, Homo sapiens
atgatcaactaaaactgctagacttttatcatataaacagccatcaagctcatcatttctctgcataggttgtttcatttattattttctcacatgggcayagtattttatatttaagtctactacattttaattttggggcattcaggcctatcaaaataattttgaatcttaattcagctctgtattgaattaactaac

SEQ ID NO: 188862 - DNA, 201 bp, Homo sapiens
attagtttatgaatataaagagactttatatttatcatcgcttttattagtcaccacactccttatgataccgggcattttattatccccatcttatgagygaggaaataagagtctcagggtaggtaggaaacttgctcaaggtcacagaaatagtgaaaggcagagccaagaaatgaacctacattcctttggctccac

SEQ ID NO: 188863 - DNA, 201 bp, Homo sapiens
cgctctgtccttcctgctccatcattattgttggctggttgtcggtctccttctacttgctcaccattcacattctaattggtgaaaatttgcatttcacygcaagtgaaaaagtgacttgcgggcttacttttgcttaccagtgacaggtgcacacctgcccgaggaccaagagtgaatcacagcatggtctccaaacat

SEQ ID NO: 188864 - DNA, 201 bp, Homo sapiens
atctgtaggatcagcatattggttagtgggtcttgaactctgatggccatgtactctgccagaggatcaggagtacatgcagctgctgtgatgtggttgtsagcttttttttcttctttagtatgtgtcctgtggcatagatttggccaacagcttttagctattggggaatatataatacactcttagtcttcagtttat

SEQ ID NO: 188865 - DNA, 201 bp, Homo sapiens
caaatggaggaaatggacaaataaacgtgcaaattttaagatagtataaatgttataattgaaataagcacaggatatagggccccagagggaagtccctataccatcttcattgacatctgaggtttctacaaccatttaagtacctgaagaaatctaaacaggtatttaaccagggaaaacaagccctgacccatatta

SEQ ID NO: 188866 - DNA, 201 bp, Homo sapiens
gtcttataagaatccagttataggacaagctggatttagtgggatgaaatcataaaatgcttttacttttctgatttgattgcctttcaaagcttccaacyagctctccctccctcaaccctggattatgctacattgagagatcctgtagttttccagtcactttcctagttaacacacaatctcattctcctatgctct

SEQ ID NO: 188867 - DNA, 201 bp, Homo sapiens
ctgtcaaagccattgacttattggagacatgtttaattctgttttaaagcaggtatcagttaacacctctgtcctgagactggtagaaacaataatggatscggtggaaatcagcaaatagatgaataggaattttgacctatgtgagcagtgttattactattaaaaataataaacatgacccagagaagcactgcagca

SEQ ID NO: 188868 - DNA, 201 bp, Homo sapiens
ggagttttgctcttgttgcccaggctggagtgcaatggcacgacggtcagctcactgcaacctccacctcctgggttgaagtgattgtcctgcctcagccwctctagtcgctgggattacaggcacctgccaccatgcccagctaatttttgtatttttcgtagagacaggctttcactatgttggccaggctggttttga

SEQ ID NO: 188869 - DNA, 201 bp, Homo sapiens
tgaaaagagagtactggaaaatagcttcaatcttaaataacttgcactcatccttttgctcatattgctaattggagcaagtctggtgggacagaatcacwacagtggcctgcccttgtgcccatgaaggccttgtctttgttgcagtgcttggagcagtagtagctggcacgggcggatcaaaggcggcatgaagggatt

SEQ ID NO: 188870 - DNA, 201 bp, Homo sapiens
tagagctttgcttaaggtgtcattggatcaccaaaaagaacatgattatttcttgccggaacccagggaaggccacatggaggaggtaaaattttaataawagggatgtggattggaagaagttgtatggaagggcatttgcagctgcgaaattcccaagttttcaaatgtcctggggcatcctctaacttcttctgagat

SEQ ID NO: 188871 - DNA, 201 bp, Homo sapiens
agtgaatgggactttaagattcaactgagtttaaatccaaaatccaagaagaccatagaacctggtgatttccctaaatgaggaataatctcaaaccaggrcagacctcaacattgatcccagtgcattttgtctcacaccccagacccactgctgcctagtttcatgctcctatatttggcttaaaactaaactgatctt

SEQ ID NO: 188872 - DNA, 201 bp, Homo sapiens
ccttgtcttgtccaatgtatgattttccctggaacttttatgagctgagtaggatgagcaagagaggaagtgttctttaagagagtcaatgtgcggccacyctcagctgcgtggtgttgcctatagcaactaagatttattttataaacacatatatggtccttactgtacagcaggcactgctcaaaacagtgtacaaat

SEQ ID NO: 188873 - DNA, 201 bp, Homo sapiens
catgtgaactcagtagcaaaagcacaaagaaacaaataggcagtgactcagttgcaagaaagtattcatcatacaatgttacttcactaaagggggaaaasaatcctgcagcctcagaaacagacagtcagtgtccattaattaaataaatgccatgtgaaggatttgaaaactaatcagcttttgagttcctagctgcac

SEQ ID NO: 188874 - DNA, 201 bp, Homo sapiens
attatgaaaaatagtcaataaacctcaagaatcttgtcaatgaattttttttaaaaaaggttaactgccaaacaccttttcagaaacacaaaatatgacargattcaaaaaatcattttgagaggcacgggtgagaagaactaggtttttttccctaccccaccttctttgtccaataaagtaagaagaaacaaccgacgc

SEQ ID NO: 188875 - DNA, 201 bp, Homo sapiens
ctttaatttattggaaatcaaatgttttcattagatgtaggggactgtgactctccagctttggttgagtgggacgaggtctatgcactcagtggttcttyttgtttttgttcggtgagccctttcagcctatgtcgtcctgtttttctttttggaaacagactggcagcagtctcttgcgttttgtgttactttaatcta

SEQ ID NO: 188876 - DNA, 201 bp, Homo sapiens
gacctcatgaaccacccaccttggcctcccaaagtgctgggattacaggcgtgagccaccatgtgtggcctgctcattctttaaaagattggcaatagctrcaacattttgcatgcttgctctgtttcatgcttagcaaacattaccaaatctgacctccacaacaatacctctaggaggtagtctttttgtcttagttta

SEQ ID NO: 188877 - DNA, 201 bp, Homo sapiens
tttgaccattggccctgtgtgtgtgtttgtgtgtgtgtgcgtgcgtgtgtgtgtgtgtgtgtgtgttacctccatgctaagctgcttctgcggtagctctrgagagcctcataaaagagctaaataaataaaaggggtacgggatatccttattagagagaagagtgtttagtaggaggttattatctgttttcttgagag

SEQ ID NO: 188878 - DNA, 201 bp, Homo sapiens
gttaagaacattagtgtaaggggtccccaaatatctgctattccactcactgaacccacccctctctgctaatggctccatcctaaggaggaagagatggrcttccctctctttcccaggaatgctgatcccccagcacaggctagtttgttcttcctagtgcctctcagctggccccttctctctttcctttattacttt

SEQ ID NO: 188879 - DNA, 201 bp, Homo sapiens
gtgtgtttcatttgcattaaacatttgttagagattgcagaatgtttactcaggtacctttgctgatagtagactgtttcattttggtgatgtctgaaagrcaacaatataataataagaaaatgccaaggttcctatttctataaacattatatagtagaatatattctttctatgtagaataattgttttgctaaatat

SEQ ID NO: 188880 - DNA, 201 bp, Homo sapiens
acggtcagctcactgcaacctccacctcctgggttgaagtgattgtcctgcctcagcctctctagtcgctgggattacaggcacctgccaccatgcccagstaatttttgtatttttcgtagagacaggctttcactatgttggccaggctggttttgaactcctgtccttaggtgatctgcctgcctcagcctcccaaag

SEQ ID NO: 188881 - DNA, 201 bp, Homo sapiens
tcctggaaaatagtgatctcatttctgtcccaatggatttgcctattctggatattttgtataaattgaatcacacaataagtggccttttttgtctggcrtctttcacttaagatagtgttttcaaggttcatcagcattgtagcatgaatcagtacttcatttcttttatggctgaataatatttcattatgtgcgtat

SEQ ID NO: 188882 - DNA, 201 bp, Homo sapiens
ggttttctatatttttgatattttctagattttctacaatgagtagtatctttataatcataaagatgaataaaagttttaaaaatagtttcaattctcawttcaacaataaagaattgatctttgctgaagtttgccctttgcccccaagtgaaccataactacttcattactcacacaataagaaaccagtgagaacca

SEQ ID NO: 188883 - DNA, 201 bp, Homo sapiens
tgaagttgcagatttgttgtatgtttttagaccagtgcagagatggggttcagaggaacatttcacatgggctttgatgttagaatcctttggcaaatcaygtttgcctttcaaattgatatcaggaggatagaccctttcctttttttcttttttctttttttttttttttttttttttttgagatggagtctcgctctg

SEQ ID NO: 188884 - DNA, 201 bp, Homo sapiens
accacatattgtttattggtaaaaataatgatggccatttgaattatgtatactttttggccattacaaatagtgctgctatgaaattcaagaaaaatgtwtgagcatatgtttttatttatcttgagtatgtacctaggagtggaattgctgggtcatacaactcaatgtttagcattttgaggaattgccaaactgctc

SEQ ID NO: 188885 - DNA, 201 bp, Homo sapiens
taggagtggaattgctgggtcatacaactcaatgtttagcattttgaggaattgccaaactgctccaaagtgtctgcaccatttgacattcccaccaacartgtatgagggttctgatttatccacattcctatcaacacttgctagtcctacaacacatacctacagccatcctagtaggtatgaagtgatacctcatgg

SEQ ID NO: 188886 - DNA, 201 bp, Homo sapiens
gccttttggcatgcagtttgaattttgacaatgcatacagttgcgtaatgaccaccacgatcaggatagagaatatcattacaaagggatgatactgatcycaaaagttttcatcccaaaagttccttttgcctcctttgtagtcattcctcccctatctcaaacctctgggatctgatttctctttttatccttttgcct

SEQ ID NO: 188887 - DNA, 201 bp, Homo sapiens
aatgaccaaatacagagtttgttcattgatttgattcatcctgacctaagtgtggctcatcacagtttcattctgaaaactgacatctctgcagctacttsaacctcaggggattaagtctgtcctctgctaaaagtaccagtacctgttcagtgccttctgcaactagtgtgtcctctcgggtttttctttgtgattctt

SEQ ID NO: 188888 - DNA, 201 bp, Homo sapiens
tgtctatccctaataacctcagcaatatttatatgcccatatagacaagaatagaagaaatactgaaagaaaatatacctaatgtctgtgtgtggtagaaytgtaagtgggttttctatatttttgatattttctagattttctacaatgagtagtatctttataatcataaagatgaataaaagttttaaaaatagtttc

SEQ ID NO: 188889 - DNA, 201 bp, Homo sapiens
gaagatagctggtgacttcagaccctttgttgttctgaaccccaaactttcctgcctcagtctataagcccaaggccctgtggttaggcttagtaggttcrattattttagcaggctgtttgaagaagatgtagtgatcccaatccacttccactcagaggcacaccaaagtatttgttccagccacataggatactttac

SEQ ID NO: 188890 - DNA, 201 bp, Homo sapiens
taactatattatccccattttacaggtgaggaaactgaggcgcagagtggttaagtaagtttcactggattaccaagctaataattagtagagacaggatktagagccaggcagtctgcttaacaacactgccataaagctttatggcactagtaccactcgactgtattaatttgttacatgcctatcttcctctactcg

SEQ ID NO: 188891 - DNA, 201 bp, Homo sapiens
gaattgttcattacatggctgtgcttgttgagggtcagggagcattcagagtccctgtgcagtaagaaacagagtagcccaagccctttttcagctgtgtsccaccttttcctggcagagccctgagcaataactggggtgggagttcaggtttattgatgttttattctgtgactgctttcttagggtatgagccaaaaa

SEQ ID NO: 188892 - DNA, 201 bp, Homo sapiens
tctcttggagcatgccatttagtgaggggaagatatattacatacataaattaattacagttgtgagaagtgtttgaagaaaaaagtgcaggattttatgyggcctaacctacgggcgatgagggtagccagtgagggcttttattagggagtgaggttcaaatctgtacttgggaggcaatagtaattagttaaagtcaa

SEQ ID NO: 188893 - DNA, 201 bp, Homo sapiens
aacaccccctgacatggcagatcataaaaggatccagtgagaaggatcatgtgggcatcacaagagaatcaggcaagtgtgggtgatgagaaattaagggrccccagcctcatagggtgactaaaagaaaaaagaaaaaccaatggggaaaaattttaaagatgattatcatattaccctgagccagggaagctgagaagt

SEQ ID NO: 188894 - DNA, 201 bp, Homo sapiens
taatgtgcaaagaaaaaggagaaaagaagtttgactggatagacacagtcatgatggagaaggagaaaactagacatgtggaaaggaaagagctgagagcmttgaatgacttggggctaaaaggcagcccttgttcattcatgaggataggaataacattatgaacggtatggtttagaccagttgcttaggctgtagtgg

SEQ ID NO: 188895 - DNA, 201 bp, Homo sapiens
attattttggtttcattttaaaaatgcagcctcttgtgtttaaatttatacaaattactcttagatttagtccatgttaaaaagagaggattgaaaaaaakcagagagagggttggattagataagtgcttttcagatggggttggaagagcccctagaatttatgattgtctttgtcaaacaccgtgtaattctgtcctt

SEQ ID NO: 188896 - DNA, 201 bp, Homo sapiens
aacccttttctgtgtcagtttgtttgaattctctaaaagctagagatttattattttggtttcattttaaaaatgcagcctcttgtgtttaaatttatacwaattactcttagatttagtccatgttaaaaagagaggattgaaaaaaagcagagagagggttggattagataagtgcttttcagatggggttggaagagc

SEQ ID NO: 188897 - DNA, 201 bp, Homo sapiens
taaagaacatattcatctatctgaagtagtagttagctgaaggaattccaccttttcttaaagttgaacagtttatttgatgtgatcttttttaaaaaaayaaactttctaaagaatgtgaaatatttatttccaaggcagaaataacctaatgttctacttcctagaaacatcatgttctaacattgtgagtacagagga

SEQ ID NO: 188898 - DNA, 201 bp, Homo sapiens
tgaacccaggaggtggaggctgcagtgagccaagatcatgccactgcactccagcctgggcaacagagcaagactccatctcagaaaaaaaaaaaaaaaaacccacagctaataggagcagataaattggcttgttatggatctatcaacatcatcagaagcacagtagtttcctcctctcaggagataggtatatccttt

SEQ ID NO: 188899 - DNA, 201 bp, Homo sapiens
ttcccatttttccagattaacaatgaattttaaccttttgtatatgggagcctcacatttatctctatttctgctcttcttggttttggtatattattacrtcctacaaagttctttgtgaattttgtttctgtcatctggtacatttattagcagtttctcaaactgtgtcttcatcccaagttgcccttgagtcagcca

SEQ ID NO: 188900 - DNA, 201 bp, Homo sapiens
attggcaaaatggtatattgtctttctacaaatttacctacagtcaacttggactctcaaaatccacagctaggcggggcacagtggctcacacctgtaaycccggtactttgggaggccgatgcaggtggatcacaaggtcaggagttcaagaccagcctggccagcatggcgaaaccctgtctctattaaaaatacaaa

SEQ ID NO: 188901 - DNA, 201 bp, Homo sapiens
taattggttacataaaatagttattgtctggcttcaatagtcgctctaacctgacttaggtgataatagctacaattagttgaacacttctgcaagccagsatggtgctatgtgcttcacgcatatgtgaagcctttttaaatatcctgcatgctccttaggtcattctcaatttacaggatttggaaaacttagaactta

SEQ ID NO: 188902 - DNA, 201 bp, Homo sapiens
ttgatgatgatgaagagaagagcaaacaggccacagacctggcttcccttcccaagaggaggacataaaggaaagcatgctgagtgaatatccacaacctrtgaaggcagaagaaatattagtctctaatttgaaacagcatcaagtaatggaaagggcaggaaccctcaggtttaatctgaaagtttcttctaactagtt

SEQ ID NO: 188903 - DNA, 201 bp, Homo sapiens
tattttgtctctttcaaattgaagagacctgaaccttaggggagagataatgtctgttgtgtgcaaagggaccaaccgctaataaattcatcttctgagtygtaatttttatggatgataaaatatccattgagccccactgttcaatgttgtaagggattgctgttgagatagcaacatgtcttgttttctggtctggaa

SEQ ID NO: 188904 - DNA, 201 bp, Homo sapiens
atgctgagtgaatatccacaacctgtgaaggcagaagaaatattagtctctaatttgaaacagcatcaagtaatggaaagggcaggaaccctcaggtttartctgaaagtttcttctaactagttgtttgtggctgatagcaaaggcaacctcttggggccttattttccttacctataaattgtaaaatatcagcattgg

SEQ ID NO: 188905 - DNA, 201 bp, Homo sapiens
gcatcagtggggggaggtgcacccactgacccccacgactagactaactggtggctcagacagcgccctctctcaaaagctgttcttagacagcggtgctrggcttattttctggcaccatgacaaccaaatggtgcccctttcagtggttctttattctagtggcttgcttaaacacattcagagcttcacattaaatat

SEQ ID NO: 188906 - DNA, 201 bp, Homo sapiens
agaccctggttgaaccagccagttctccttttgatggccacaaaccaaatatgggcagtgtaatgatggtatgactctggcctgactaatatttttgtgargagaatgccattattatggtgaccatattttccaaacaaaaaattgggaactttttattcagaggaaagaggggcagaatatttgaaattgagactgacc

SEQ ID NO: 188907 - DNA, 201 bp, Homo sapiens
agagagagtatatgtatataaatagatttgttaaattcaatatgatagttgttccttatagtatgtgaacaatactcactataaagtttaatgtctttctrcaaaatggccttatcctcatgcttcatttgaaaatacgaaaaccatctttggccagagtctgctgcatgtaacaattgagatgctttctgtggctataac

SEQ ID NO: 188908 - DNA, 201 bp, Homo sapiens
gctcatagtactgccatggaggacttcattttgaaacaggaggaaaatggtttctatctttggggtcatccattagtgcagatacttgagaattgttccaygtacatttaaataaatgtaatgggttgttttccctgccttcatttcttttttattttattttattttttgagacagagtctgactgtcacccaggctgga

SEQ ID NO: 188909 - DNA, 201 bp, Homo sapiens
aatgtgaatgaaccagtgcaaatctaattggttgctagaaaagtcaggagcctcaaaatgaatgacttgctagtggtggcaaagaatcaccatctacatgyaaagaaaacacattagatgccctgagaatccagtgactgtttttctcagagtttttatttttctgtatttttgccgagtacatttagtagctaccatgtt

SEQ ID NO: 188910 - DNA, 201 bp, Homo sapiens
ctcttccccactggaacagagaagctgaggagattagaattccagttttcatcagatttattcccttacgagtttcattcacagatgctcacccaacatayatgtactggacagactgctgatttaattatcttcttcttaatggtctgttctatctaccagtgtccagtggggccaggatgaattgatcttggtgggatg

SEQ ID NO: 188911 - DNA, 201 bp, Homo sapiens
  misc_feature (1)...(201): n = A,T,C or G
aggtgagctctcaacaaaaaggcaggatggtatgttggcccttgttttgcaattgtcattgggttgttttgttttgttttgttttttgagacagagtctcnctctctcacccaggctggagtgcagtggtgcagtcttggctcactgcaacctctgcctctgaggttcaagcgattgtcctgcctcagcctcccgagtagc

SEQ ID NO: 188912 - DNA, 201 bp, Homo sapiens
ttggaaggcagaggttgcagtgagctgagatcacaccattgcactccagcctgggcaatgagagtgaaaactccgtctcaaaaaaaaaaaaagaaaaaaawatatatatatatgtaacttgagcttttgtaattttagaccccttatttattttgtagataaataagcaaagctcccaagaagtcaatcaacttgcccaaa

SEQ ID NO: 188913 - DNA, 201 bp, Homo sapiens
tttagaagagcactttggccaaagtggagggaggtgtggcttccaccttgtgcagaggattgacaagcaagggcagggccgcgtggtacaaagagcaggartcacatgctttcagaaaggcagagcagggccaaatacccaattctgagctgggtgacctcgatatctgttacagctgaagattccacagatgccacaaat

SEQ ID NO: 188914 - DNA, 201 bp, Homo sapiens
ctggccaacatggtgaaaccctgtctccactaaaaatacaaagattagccaggcatggtggtgcacacctgtaatcccagctactcgggaggctgaggcaygagaatcacttgagcctgggaaggcggaggttgcagtgagccgagatcacgccactgcactccagcctgggcgacagagggagactctgtctcaaaaaaa

SEQ ID NO: 188915 - DNA, 201 bp, Homo sapiens
agatttaatttgtggaatagttcccacatagaatatacctccgttatttaatttattctgagtgggatgaagtgtgactgttgtgtctgaaactgagcttmgggggttgttcatcccataatggctgctatagtcccctttagggagagtccccttaggggagcccttggcatggggcctgtagtagaagcccaaaagcca

SEQ ID NO: 188916 - DNA, 201 bp, Homo sapiens
ttgcacctcagtgcttggcagatgcagaagctgctcccttgagaatggaagaaggacactgtagaaagtgccatagttgcagaatctgcttttttttttttccagagacagtgtgtctctgtcacccagtgtcactctgtcacccaggttggagtgcagtggtgccatcctggctcactgcagcctcgaccttcctggctc

SEQ ID NO: 188917 - DNA, 201 bp, Homo sapiens
caggacttccccacctaccaagccatgtccctgtgtccctacctcctcagagagccctgacccagacctcttcctcttctgcttcccacccttcactgccractttccttggatgttccattgatatgttctttctgaacatttttcttgccccttttcctctgcctctcctttctggcttctttgaaagaaatgaaggat

SEQ ID NO: 188918 - DNA, 201 bp, Homo sapiens
acttggaaggcagaggttgcagtgagctgagatcacaccattgcactccagcctgggcaatgagagtgaaaactccgtctcaaaaaaaaaaaaagaaaaawaaatatatatatatgtaacttgagcttttgtaattttagaccccttatttattttgtagataaataagcaaagctcccaagaagtcaatcaacttgccca

SEQ ID NO: 188919 - DNA, 201 bp, Homo sapiens
cttagtccctcatttaaatgcccattctcacagcacccctgaaccttgagatgtctttagattctgcatgaacacctcacaggtccaaactcctctctgcytcaggccctttgtatgtgctagtccctctgtctgggacacactctcctagctaccagcctctttttacctggttgttaacttcagtttatgttctcaggg

SEQ ID NO: 188920 - DNA, 201 bp, Homo sapiens
cctctactttacctcaagctccttgaggggtgtgttcttcatcatatatcagagcccagcacagtgcctgagacatagtaggtgctcataatgtatttttraatgaatgaatgttatttgtaatttctgtcaatgaaagccaatgggtggatacaagatcaatacacaaaaattaataattttttccatacattagcaatg

SEQ ID NO: 188921 - DNA, 201 bp, Homo sapiens
agggcttaccacatacctccatggtgccatgctagtgccaggaacaccagggaaaagacaaggtccgcagaaggacatagacatgtaaacaaacacagtgygagctaaaaagagacatcgttgagtcacccacaaagtgctgtgggggcagagagaaggaaaatagagagctgaggggcaggcacagagggctccacagag

SEQ ID NO: 188922 - DNA, 201 bp, Homo sapiens
gtgcctgtaatcccagctaccagggaggctgagcaggagaaatgcttgagtctaggagttcaagcccagcctgggcaagatatatagcaagacctcatctytaaaaaataataattaaatttttaaaatcacagttaggtaatagtgagcttttcacacatcagagtaaaaaaaatcatattatttaatgatatgataaaa

SEQ ID NO: 188923 - DNA, 201 bp, Homo sapiens
tacttgctgatattatgttatggagatgacttctttccttaaacctcatgaaccaacctctgctagcctccaacttttcttctgcagcttcctcacttctytcaaccttcataaaacagaagagagttcagggccttactctcaattaggctttggcttaaaatatgttgtggctggtttaatcttctatccagaccacta

SEQ ID NO: 188924 - DNA, 201 bp, Homo sapiens
ctgaggcaggtggatcacaaggtcaggagatcgagaccatcctggctaacacggtgaaaccccatctctactaaaaatacaaaaaaaaaattagttgggcrtggtggcgggtgcctgtagtcccagctactcaggaggctgaggcaggagaatggcgtgaacccgggaggcggagcttgcagtgagccaagatcgcaccac

SEQ ID NO: 188925 - DNA, 201 bp, Homo sapiens
cttctctagctatgaaagtcctaggtggcatcttcttccaatagaaggctgtttcatttacaataaaaagttgttgtttggccgggtgtggtggctcatgyctgtaatcccagcactttgggaggctgaggcaggtggatcacaaggtcaggagatcgagaccatcctggctaacacggtgaaaccccatctctactaaaa

SEQ ID NO: 188926 - DNA, 201 bp, Homo sapiens
agccttggctatgaaataacagttggccttcatctcctcactttggagtctaaagaaaaatcttccttcatgtcttggttttagagttcctccaatgacakattgattctggatttatgacaccaattataaaatcctatgctgctgtttctgtttctacctcctataacccacccaccccaagcggtttctagagaagga

SEQ ID NO: 188927 - DNA, 201 bp, Homo sapiens
gtaggaaacaaccattccagagagccattggtccagaagaggagatcatgcaaattttaagcagctggtttccagaagagggatacatgggcaggattgtsttaaaaacccagcaggaagtaagtgtgtctgggtgcagcctacacagtaacgactcattatgtgattagccatttaccactcacaacctccctgaaattc

SEQ ID NO: 188928 - DNA, 201 bp, Homo sapiens
gaatatttgtccagtcaacagaccaaaaaaatgatcttttttttggctttggtttcgtttggtgtttttttgtttgttgtttgtttgttattggtataagwtgtcacgttttaatatttgaatggtgtttttttttttttacttttcagtttctatcatctatgccgtaagcacttcccaagtaaatatttcttgaaagag

SEQ ID NO: 188929 - DNA, 201 bp, Homo sapiens
ggagtagagtggtaccatcttggctcactgcaacctctgcctccgaggttcaagagattctcctacatcagcctcccaagtagctaggattacaagcccawaccatcaagcccagccaatttttgtatttccagtagagatggggtttcaccacgttggccaggctggtctcaaactcctgacctcaagtgctccgcccgc

SEQ ID NO: 188930 - DNA, 201 bp, Homo sapiens
cgcctcacacccagacttacaatgtgtaaacatgcaaccctagtcaaaagaaaaacttctttttttaaagaatttattaagcttttttgaatgacagacttccaatcctcaaatataaggataaacattatgtgaatggtgtctacataatgcagagtattttaatgggtagaagaccatcaaggcaatggtatgtttatc

SEQ ID NO: 188931 - DNA, 201 bp, Homo sapiens
cgccatctctattaaaaatacaaaaagtagccgggtgtggtagtgcacacctgtaatcccagctactagggaggctgaggcaagagaatcgcttaagcccrgaaggcagaggttgtggtgagctgagatcgcaccactgtaccccagcctgggtgacagagcaagattctgtctcaaaaaaatattaaaaaattaaaaaat

SEQ ID NO: 188932 - DNA, 201 bp, Homo sapiens
ccatatattaaactatttaatcttcacaacagttccattttactctcatagctagcagggccaggatttaaattcaggcagactggttccaaaacccacaractactcacatataataagagaatgcttatagtcaaggaaggtgctaggttaattaaaagcaagaattttccagaagagagcattaaaaacgctagattt

SEQ ID NO: 188933 - DNA, 201 bp, Homo sapiens
gccgtttattttaattttgctacattatcaatttcagtgtatgtcacctttcatcatcccaagtcccttcttacaagccatatgcaaaaaaaaaaaaaaaacccttcattgcaatgaggcactcaacaatcatgtggtatgaggcccacagaaaggaaggaacttccccaccatcagaagctaggtcagtggcagggcaag

SEQ ID NO: 188934 - DNA, 201 bp, Homo sapiens
caaaaacagaacattcgggccaagagggcagcctggtatgtccagggaattgcaagaagttttaaaggcatttgggatgaccaagaagataaacgggccakatagcagaggaatgacactgagaataggaagataaatgagatacccagaccctatcctcaagtgcctcacagtttatagactctgagcaaatctttagac

SEQ ID NO: 188935 - DNA, 201 bp, Homo sapiens
aacagacaaaaacagaacattcgggccaagagggcagcctggtatgtccagggaattgcaagaagttttaaaggcatttgggatgaccaagaagataaackggccatatagcagaggaatgacactgagaataggaagataaatgagatacccagaccctatcctcaagtgcctcacagtttatagactctgagcaaatct

SEQ ID NO: 188936 - DNA, 201 bp, Homo sapiens
ctgtatgcacacacatacattatatatagtatatattagcacacatgtatgcacacatacacatgcagaattatatatgtgtgtatatataatctatatartatattcaatgcataaatattgaataaaagaatttgttcacttcctttgttcaataaatatatatcaattattttttcatatctcattctctccagcaga

SEQ ID NO: 188937 - DNA, 201 bp, Homo sapiens
gtagatagtggtgctgatattagggttggttctactgtctttatctggattcatagaatataggaactttatctaaagtaaagttttctcaacactctttrgcccagaatgttaaagaaaaaaacgttgtatccacatttaatatgatttgaaacttcaaaatagatttgctagcatgaataaaaccatttataacgctga

SEQ ID NO: 188938 - DNA, 201 bp, Homo sapiens
gtggaaacaagggtgagttttgatatttcatgtggtgaaatgaaaaaatgtttttcctggaggctcttgttttctttcccataaaataggcacaaatgccmttatttattactttatgatttcatttccctagccaagtatgttatccaggcatattaagttgcaatagcaaattctcgatttttttttgtagtttgtagc

SEQ ID NO: 188939 - DNA, 201 bp, Homo sapiens
agagtcaggcacacaaatataacaaaaataaaccagaggcagatccatgcagtggtgagaatacaagtgaaactttgaactcaaggtcctacattaagtcraagagaagtaggaagaaatggaatgaaaggtgctaggtgaaccatgagaaaagcctccctagaggaggtaagcttcattcattcattcattcattcattc

SEQ ID NO: 188940 - DNA, 201 bp, Homo sapiens
cactgtgccagtaacattaggaagtcctaacaacattttttaagaagtgtctttactattcctggccctttagttaccctgtctgtctgtctgtctgtctstctctctctctctctcataattattgttgaagtataacacatctacagaaaaatatgcaaatcatataaggtgtacaggtcaatgtatttcacaaagtaa

SEQ ID NO: 188941 - DNA, 201 bp, Homo sapiens
agcatagtatactaatcagcatttatattaccttttccatgagcaaacatgttttgaattccaagtaaccaacttactttataaacttctaaatgttatgyctaaagttatatggtgctcagtgaggactggaaattgtcaggaatggcttcatggaaagtggggcttgagttagacctagaggggtctgtagaaggaggt

SEQ ID NO: 188942 - DNA, 201 bp, Homo sapiens
ttaccatttgaattcaacctttgcagttagaatgaccagatacccattacaaatgatcatctctttgaaaacttctgcttggcattttcaagaaacttttyggcagaaagtcatttgtctcctttttctggacctgggaacagcactgggaagtgttcaggccttttcccaaatataatccctgagcgtttggaagctgag

SEQ ID NO: 188943 - DNA, 201 bp, Homo sapiens
accccctacacaaggaatcagattgaaatgagcctaagaatagacaaagaatagaaaatgatacacatagtacaattggattgttatctggataagtggcrggtaacagtaaaaaattaatactggagacgtaaatttagagcaaatagtgccatccttgaaagccaaaaagagatttagagtttgttctgaagacaaatg

SEQ ID NO: 188944 - DNA, 201 bp, Homo sapiens
tttgtatgtgctagtccctctgtctgggacacactctcctagctaccagcctctttttacctggttgttaacttcagtttatgttctcagggaagccttcytagaccaccacaccccttctcctagctaagatcagctattagttgtgattctttcatgagtcagtctctaccatgagattggacatgctattagcccagg

SEQ ID NO: 188945 - DNA, 201 bp, Homo sapiens
tcagttcctgctctgcaccaggcactgtgccaggcatgaagcatccagggagttgttagaccaggagtgagaaagagaagccataaacatcattatcaccrtatttcccatcttcagagtaaccatatgagtgagttcctatcattacacacattttgtagataaggaaactgaggaccaaagaaggaggtgttatgtcaa

SEQ ID NO: 188946 - DNA, 201 bp, Homo sapiens
gttttccagtcactttcctagttaacacacaatctcattctcctatgctcttgaatatgaatgagtcttgcaaatttaaggctgtataaaaaaaaaaaaaagcaagttgtttaaaacagggatccccagcctttttagcatcagagaccagtttcatggaagacaatttttccacagactcggggtgtgggggtgggggca

SEQ ID NO: 188947 - DNA, 201 bp, Homo sapiens
aaacatacataattccagggtcaaacacaactgtattacacgagttcttaaccttggtaatatccacaaatagaatttagggagtctacgaatataaatgraaaaaaattacatctttattttcactaacctctagctgaaatttagcatttcctctgatcataaatgtagggaataaactacagtaatataggcaatacc

SEQ ID NO: 188948 - DNA, 201 bp, Homo sapiens
catctgtcagttgtatgtggaaaagctgaaaatatctcagggcaagtaagtcaaatcttataggagaagatcatcttttttttttttttttttttttttttgcgatggagtctcgctctgtcacccaggctggagtgcagtggtgcaatctctgctcactgcaagctctgcctcccaggttcacaccattctcctgcctca

SEQ ID NO: 188949 - DNA, 201 bp, Homo sapiens
gtagaaaatgcaacttcctatgtacttattcccaaaatattgtttgttttgcttttcagtttgttaaataatcaatctatccctatggtaaccaaaaaaaatgcagaaaaaaatctacacagactttaggcactgtccctacacattaaattcatcagaatgttctttgaaactcagtaggttctctagactagaaaaagt

SEQ ID NO: 188950 - DNA, 201 bp, Homo sapiens
tctggctattctaataatttgctgctaaatgtttattctttctatacttctttccaaagcctttaaatctgggacagatatacagttttgtttttttttttgtttttttgggtgtttttgagacagagtcttactctgtggccaggctggagtgcagtggtgtgatctcggctcactacaacctccgcctcccaggttcaa

SEQ ID NO: 188951 - DNA, 201 bp, Homo sapiens
atcatgccattgcgctccagcctaggcaacagagtgagagcttgtctcaaaaaaaaaaaaaaaaaagaaagaaagaaagaaagaaaaagaaacagaaaatagaaagaaaaaagaatcctacagtaaattatcttttaaataaaaattctttcacaatgtgagcaatgaacttataatttatgctttatacattcacattct

SEQ ID NO: 188952 - DNA, 201 bp, Homo sapiens
tctattttctaatcttcaactttcacataaactgttttctccactgcactccagcctgggcaagagtgcgagactctgtctcaaaaaaaaaaaaaaaaaaactgttttctaaaattgaacatgtgccttcacttacagtagtccatctcccacattaaaaaaagaaggtaggccaggtgcggtggctcagagctgtaatcc

SEQ ID NO: 188953 - DNA, 201 bp, Homo sapiens
attaagttaaaaaaaaagatgggtcttcaaagtcaaagagtgtttacagaatctgtaggatcagcatattggttagtgggtcttgaactctgatggccatrtactctgccagaggatcaggagtacatgcagctgctgtgatgtggttgtgagcttttttttcttctttagtatgtgtcctgtggcatagatttggccaac

SEQ ID NO: 188954 - DNA, 201 bp, Homo sapiens
gaggcggaggttgcagtgagccaagattgcaccattgcactccagcctgggtgacagagcaagactctgtctcaaaaaaaaaaaaaaaaaaaaaaaaaaawtttaagaacatgaaagagctgatgatgaaacctgttggatgaactgatgaaccaccccccaccaaaaaaaaaaaagatataatctcattctttatagatt

SEQ ID NO: 188955 - DNA, 201 bp, Homo sapiens
atctattttctaatcttcaactttcacataaactgttttctccactgcactccagcctgggcaagagtgcgagactctgtctcaaaaaaaaaaaaaaaaaaactgttttctaaaattgaacatgtgccttcacttacagtagtccatctcccacattaaaaaaagaaggtaggccaggtgcggtggctcagagctgtaatc

SEQ ID NO: 188956 - DNA, 201 bp, Homo sapiens
ggggagaataaatgaaagagaatagacaaatctgtgcaaaagaactccaaataactcatgaatactccaccctctagaaggtggagcctaactccctactygttaaagtatgagctatgcatattgacttccttccaggaagtacagtagggaaagggagtaaaaatgagtaactttacagtaaggaaagctgagaaatat

SEQ ID NO: 188957 - DNA, 201 bp, Homo sapiens
ccgcgcccggcctcggtatttcttttgagctcctagaatgtaccaggcattgtacgaggtatacaaatatgaacaagacagccaccgtgttagagagaaacagtaaacaattacagtagagcagagttcctcaacctagacactaggttgacatccaattatttcctagaggcaaaattgcctctgtttgagaaccactgt

SEQ ID NO: 188958 - DNA, 201 bp, Homo sapiens
ttaacttggcatctgcagtttacaattattgctattttacaggctcatcagttagcatctatgcaagtgcaggcttataatggtgggaatgccaacccccsacctgccaataatgaggaagaggaagatgaggaggacgaatatgattatgactatgaatccctttctgatggtaagagaaacagatccctatgctgtgca

SEQ ID NO: 188959 - DNA, 201 bp, Homo sapiens
  misc_feature (1)...(201): n = A,T,C or G
aatgaggaagaggaagatgaggaggacgaatatgattatgactatgaatccctttctgatggtaagagaaacagatccctatgctgtgcacaggaaaattnttggatgatttgccacatttttctttctaaaataagtctagagcgccaaagaccagtaatacggatggttgtaatattgtccaggagtttctgaattcag

SEQ ID NO: 188960 - DNA, 201 bp, Homo sapiens
tgcgatactaaatcttgagtgagaaattagctttcttgtttttcattttaaaaggtcatcatcacgatacacttctaatacctttagagtcattccaaatrgaaaagcaaaaaaagagcaaaatataagattatatcttatgatataatattcagatatattttattttctgttatgattatcacttagtaaattaataac

SEQ ID NO: 188961 - DNA, 201 bp, Homo sapiens
aattgcaaattcaaacagatagataaggccaggtgcagtggctcatacctgtaatcccagcactttgggaggccgaggtgggtggatcacttccggccagsagttcgagaccagcctgtccagcatggtgaaaccccatctctactaaaaatattaaaacaaaatagtggggcttggcggtgtatgcctgtagtcccagct

SEQ ID NO: 188962 - DNA, 201 bp, Homo sapiens
cccagctacactcaagctgccatccttggagctcacaaacacattacagtttcctacttttgtgatcttttcctgtttctcttctgtgtgcaagtagcccrtggtcatttaattagtctgctcaggctgccatcatggaataccacagactaggtggctgaaccacagaaatgtatttcctcgcagttctgaaggctggaa

SEQ ID NO: 188963 - DNA, 201 bp, Homo sapiens; identical to SEQ ID NO: 32848

SEQ ID NO: 188964 - DNA, 201 bp, Homo sapiens
tggagatttctagtttattcattaacagcagaaggatggaagaaaattcctctggcaataccatgtcagcctcttcggtaatgaagttctgtttcactcarcatatttatggggattgctacactgaaggtgggcttttttgtggcccagcaaagtggtcggtgtgagttattaattaggtagctatggaaattaataaca

SEQ ID NO: 188965 - DNA, 201 bp, Homo sapiens
ttaatatatttacttccccattgcttgatgcttcctattgtgttcaccatgtggctctttcacaggaggatggacggtatgaaggcccaactttggctcaygctgtggagttgtttggtggcagacggtggagtgctcgaaaccccagccccggaacatcagcaaagaatgctgagaagcccaatatgcagagaaacaata

SEQ ID NO: 188966 - DNA, 201 bp, Homo sapiens
tacacagatgcacatgaatgcgcaaaagtccatgtggatgatatgccttttgattatttggaaatgtgttattcaacattgagatccactccaagaatcayctgatggatcttggtaccactagacaaactaccttcaacctgtagagaagatttttaatgattcttaagctatataaaataccaggctctagaatgataa

SEQ ID NO: 188967 - DNA, 201 bp, Homo sapiens
agagaaacaataccctgggcataagcactaccaagaaaaagaagaaaatcctcatgagggtagagtgttatttgtttattaagcattaaacccatcttccmggaccgctgtatggtgaacatcaccataaaacacttaaggttgtttgggttgaggacaaagtcaggtataaaatagaagatacaagggcttaccacatac

SEQ ID NO: 188968 - DNA, 201 bp, Homo sapiens
tggaatatccttcatttgctctttcagtcattcttttagaaatattgactgagtgcccactgtgtgccatgcactgttctaggctctacggatccagcaaygaaaaaacaaataaaactccctacccacatggagcttccattgcagttagatggagacagattagagaaataagataaatataccctatgataagcgcca

SEQ ID NO: 188969 - DNA, 201 bp, Homo sapiens
ttcgccctaagcctagacatggcctaatcttccttcttcacgcagagattattaatcaatcagaatttgcacattaggtgaatggaatcttcttgccatcygaggagctgaatcaaattcttagagcttcaggatgggccacgtggaccaaggagacattttctgcccctccagcctaaggccttcctttgcatgttgagc

SEQ ID NO: 188970 - DNA, 201 bp, Homo sapiens
aataggcattactacagagatataaataaagtgctttgggagggcaactgggaccaagaagtggtagaagaaccagatttctaaagatgacagcatataartggtaaagtaattatccaattattatatcaatcatacttttatatataattataaaataataattttatatataattataaaaaatctgactataaaaat

SEQ ID NO: 188971 - DNA, 201 bp, Homo sapiens
ttgaaggtgggtaggtcagaaaatagagacctacctgaactaaagcagtgatgggagagaaatacaggcttggaaccatcgtgagctttgtgttcccaggktgagagtggagaggtaactgacgatgagatggcaacccgaaaggccaagatgcacaaagagtgtcgaagccggagtggttctgatcctcaagacattaat

SEQ ID NO: 188972 - DNA, 201 bp, Homo sapiens
ctatgttttatttattcgtttctcttttgagtctggaatataatcagttggaaatgaggaaggaagccccattcattcgcctctttgtgatgccatgaaartgatagcatgtttgagctgatggagggccttggaaataatcagaggagaccctttcattttatagaaggattctgaggcccagagaagtgcagtttgcct

SEQ ID NO: 188973 - DNA, 201 bp, Homo sapiens
tgcttgtatagaaaccagctgcataggttgatttgctcagacatccagaagcctctctggtttgtatttggttctgagggaaagtataatctgagtcattstctcttttctgtctttcatcctcacagaggtgaatgccatcgctaaccctccaaaccccctcccttccagaagagcccactctttgaccacagctgggtc

SEQ ID NO: 188974 - DNA, 201 bp, Homo sapiens
gagggccttggaaataatcagaggagaccctttcattttatagaaggattctgaggcccagagaagtgcagtttgcctgggttcctccaatcaaaggtggkgaacatgggcttaaaaccaggttgcctgactctaggccaactgagttggacagtgttgaggtaaactctgaaaagctggtgttcctgcccaccacagctc

SEQ ID NO: 188975 - DNA, 201 bp, Homo sapiens
caagacagagtatgcttcttactttttttttttttagttttgcttacattttatttttacttatacacaagggtaagatattatagaaattggtgtcactrtaagtctaaaagagcactttcagtaaatataaaataaaatttcataatgatgcatcttagcacaaatgaagcaaatgatgtctacaaatccatatccatt

SEQ ID NO: 188976 - DNA, 201 bp, Homo sapiens
aagcaaaatctatccataagcatttctttggaactgcaaaggagagccagcctgaaatgtttttgaagagtaaacacagtacatggaaattaatttttaargagcccgcttatacagtgtatgaaatatcaatatcatctttagctcataggcaactttttgtggttttattaactgacttatggggagaatcattgacaa

SEQ ID NO: 188977 - DNA, 201 bp, Homo sapiens
aggagaacattaaagaactgcagctacccctctcatactattacatcgaatcttcgcacaatacctacctcacgggccatcagctcaaaggagaatcctcrgtagaactctacagccaggtacagggaatgccacttggaatgtggtttttattaaacctaattatttatgtaacccccaaagtcaaaaaaacctgacccc

SEQ ID NO: 188978 - DNA, 201 bp, Homo sapiens
gcctactgtgtgcctttgaaggaagagtcagggaggccaggagcctcagcctgagccctggctcacaggttctgtgctgtcaccgagctacttacttcacycctactcttgcctggtctttcccttgggctgtgagtcagaagacagtggttgaagtctctgcttactcattttgcagccataagattctctagcactcaa

SEQ ID NO: 188979 - DNA, 201 bp, Homo sapiens
atctcagcaggaagggaattgggttgaaaaaatcttgaaatgtcaatggggtcttcaagtaggcttgtctaacttctgtacagatgaagttgtgcctagcragctgaagtcgcttgtctgactaataaacagtagagccgggtcatgagcctgaccatgtgttcagtcacaggggaggatcctttgtcctaaaatgcttaa

SEQ ID NO: 188980 - DNA, 201 bp, Homo sapiens
tatttggctaattccactgtacatatattatcagtatctagaaatttcggttggcctctttcatcaagccacattctgattcaattttcaggaaacttagkcagtttctaaactattcagaaagctggagggggaggccatctagggtagatttaagcatcaacctgattttaatttttttttaatatgagcttagataga

SEQ ID NO: 188981 - DNA, 201 bp, Homo sapiens
tgaaaattatgcaaagaggaaaagaaattgatttataaatggtcccacaataggatcaggatagttcggagctaacagctcagttatatcaagacattttatgtaaactgttagtgatggattttaatctcatcatattaaagtgggatgaaataagtaggaccctattctagggccatcaattaatacaattacaaaagg

SEQ ID NO: 188982 - DNA, 201 bp, Homo sapiens
ctatagttcgagatcatgtcttagagttggttacttctgagaagagttcttatatttggctaattccactgtacatatattatcagtatctagaaatttcrgttggcctctttcatcaagccacattctgattcaattttcaggaaacttaggcagtttctaaactattcagaaagctggagggggaggccatctagggta

SEQ ID NO: 188983 - DNA, 201 bp, Homo sapiens
agaatgcttatagtcaaggaaggtgctaggttaattaaaagcaagaattttccagaagagagcattaaaaacgctagattttattagagagaacagctgtrgcaagtcctttggaaaggacatagatttacttctatcttaaaaaattaaatttacgcttgtttgtcacgtggtaattcatgttcaagggattatgttaaa

SEQ ID NO: 188984 - DNA, 201 bp, Homo sapiens
ggaaacctacatgaaaggttgacattgtttcaaagcttctagcattcaatttgtgttcctttgagtgtgatgtcatgcttatactgagatacatgcttatrctgggaccgccagatttattagggttacactgaccaggtttctttttattctttaatttatttgggcctctcttattgctgtttcccaccagtcactaga

SEQ ID NO: 188985 - DNA, 201 bp, Homo sapiens
tatcttggtttcttttaaaccccatgatcctttcaaatgatcaatttcatgaaaaattagtagagagaatagatcagattaagtcctttgactctaagccmatcagcaaatgataatgaaatgttgttaaactgttggtggatttatcagaaatggccaagtttggttactagcaattaaatccacatttggctacagcta

SEQ ID NO: 188986 - DNA, 201 bp, Homo sapiens
ttccagttaaaatttgtatattttaatgaagatgacttactcattacaataaaattaaaggatttttttcaatacatgacacttctacttttgagtgtttytaaattgtttattgtttttaaagagtaagcctcattttaatgagctatgaaaattcttgctcttgggaacatttatagaacataataaaatgcttataat

SEQ ID NO: 188987 - DNA, 201 bp, Homo sapiens
tgcaatgattatggaggcagagcttatatgtgcacttttaggtttgaaagtgtttaggttccaagcaattaactattaccaacataatagagattttttttattttttaagcaattaaatgggaagagaaagcatacttattaagtgactttggtttttttatggacattgtacattttgcttcctctaactaaattctta

SEQ ID NO: 188988 - DNA, 201 bp, Homo sapiens
ggtggaggttgcagtgagccgagatcatgccattgcgctccagcctgggcaataagagggaaactctgtatcaaaaaacaaaacaaacaaacaaaaaaaaacagaaaaaagaaaatatgtattacatttcttttaagaaaagaattatcatattttgataaagtcattttattttaatgatgcttatcattctgtgtctgg

SEQ ID NO: 188989 - DNA, 201 bp, Homo sapiens
gaaccaggaggtggaggttgcagtgagccgagatcatgccattgcgctccagcctgggcaataagagggaaactctgtatcaaaaaacaaaacaaacaaamaaaaaaaaacagaaaaaagaaaatatgtattacatttcttttaagaaaagaattatcatattttgataaagtcattttattttaatgatgcttatcattc

SEQ ID NO: 188990 - DNA, 201 bp, Homo sapiens
ggctgaggcaggagaatcgcttgaaccaggaggtggaggttgcagtgagccgagatcatgccattgcgctccagcctgggcaataagagggaaactctgtmtcaaaaaacaaaacaaacaaacaaaaaaaaacagaaaaaagaaaatatgtattacatttcttttaagaaaagaattatcatattttgataaagtcatttt

SEQ ID NO: 188991 - DNA, 201 bp, Homo sapiens
gcttatcaacccagatgctagtcaggatagagaaggtaacttaggtggacaccagcatctaagcaccaaagtaaaggtggcagcaaaataatcatagagcagaagcagatgatttagaggctgcatatcataaggggagggtgtagacatggattatttttaaatattgtcctccagtctgtgtagcaggaaaaacgaatc

SEQ ID NO: 188992 - DNA, 201 bp, Homo sapiens
atattcatataaaaatgaatgtagagttaaacatgaaaatcaatcaatgcaatatatcatatgaatagaacaatagacgaaaaccacatgggcatctcaayagacatagaaaaaggatttcacaaaatccaacatctttttatgaaaaaaaacactcaacaaaataggaatagaaaggaacttccccaacctgataaagtg

SEQ ID NO: 188993 - DNA, 201 bp, Homo sapiens
acttagtaaatgtgaccaccttttatgctttggtcaacattttgacatttgtcactgaatcttcatttcctttttgtgtcatttattattttataactagyggtggccctctcaccatttaatgcttataaaattatgaatacatcagaccataataagaattgtccgtgaggcttgtaaacagatgttggggtgtgtgtg

SEQ ID NO: 188994 - DNA, 201 bp, Homo sapiens
ttcatgtgcttataaacaagtagatgttaacacactcccgatgtatatgacaacctccgtggaggtcatatggaaacatgcgggccttccactacggcccygccgctgtgctgagtgttgtatgcatgtcttctgtacttctcaaaacaacctggcaaggtagaattataatcctcatttcaaagatgggaaaactgtgac

SEQ ID NO: 188995 - DNA, 201 bp, Homo sapiens
gaagttctggttgatgattcttccttcagagacagcaggggctgggcagtcgggtcccttcaggtgaagggattacagagtaattagatatgattcaccakctgtctcaaagtagtatcttcttgtattttttatatttatatctgtaactgtagacagaaaggaaattgccctgaaagaaataactggccagtaagtaat

SEQ ID NO: 188996 - DNA, 201 bp, Homo sapiens
gaaaagcaaaaggaaggaaaaaaagatattttgggaggggcagttgtggaggagttgtgggcatggtccagggggttatgatgtcagggtaagcccagaascttctgggagaggtgcttaaagaattgggctgggggccagattctctcctcattctgtgcttactattgaaataagcaaaataatctgctaccattaaca

SEQ ID NO: 188997 - DNA, 201 bp, Homo sapiens
tacaagggataaattatctagaagtgagtgtgcagcctatggacaggcacgtcccctccaccccatagacttcttactctatggagagggcacagctggaygacagccagtgtggagccttctgaaacctggggtccagggcaggatcctgatggcatggtctcagggcagtgctgcctaaaggatgagtagggttcaatg

SEQ ID NO: 188998 - DNA, 201 bp, Homo sapiens
gatgctggccctcttgtggaggtggcccagaagcttcacatcctgaattatccctatagtatttgccttggcccccttttgagtcaacagcatttcatcakttatagaccaagggctggggtggagagatttcagtcttcctgagaaccttcactcccactgccctcagtccatcacattctgcttttcctcctggtgaga

SEQ ID NO: 188999 - DNA, 201 bp, Homo sapiens
aaacagcccttgcagaccagcagtgggcttggtgctgtttggacagggaatttgggaagcgtgggtttacaagggataaattatctagaagtgagtgtgcrgcctatggacaggcacgtcccctccaccccatagacttcttactctatggagagggcacagctggacgacagccagtgtggagccttctgaaacctgggg

SEQ ID NO: 189000 - DNA, 201 bp, Homo sapiens
taattgatgaagcactttttttttcccctgaattaactgagaaaaccctactaacttaagaatgacatataaggtcatttctctagcatagacagtcatgygtcatgacatgttgatagtcaagcagttgagtctattcaacaatttgattacataaatattgagcacctaatatgtaccaagccctgttctgggcacatg

SEQ ID NO: 189001 - DNA, 201 bp, Homo sapiens
cagtgcatttgagtgctctcagtgcagtcggcacagccagagcagctgggagcaaggccttctccaggcttacataaagcataggtcttgaccaaatgtgraaaacctttagggacatgaaaaccattagggatccgtagccctgacttgaaccaagcagaataaacaaacccctgcccaaattggaactcactggacgcc

SEQ ID NO: 189002 - DNA, 201 bp, Homo sapiens
cagtcatgcgtcatgacatgttgatagtcaagcagttgagtctattcaacaatttgattacataaatattgagcacctaatatgtaccaagccctgttctrggcacatgatctgctcctttggggcatgtaatagtgcttgcctgatagaaggtgcctcaggcccatgcttgctagggcacagtgaagataatagccaatt

SEQ ID NO: 189003 - DNA, 201 bp, Homo sapiens
cagttaagaatggaggaatttttactatgacacagcaccattgtaaaaaatctcccgcctcgtgccaaggggtccgtgctgctaaactcctcccctgagtyagtgcatttgagtgctctcagtgcagtcggcacagccagagcagctgggagcaaggccttctccaggcttacataaagcataggtcttgaccaaatgtgg

SEQ ID NO: 189004 - DNA, 201 bp, Homo sapiens
tatatcctggaatctacttaacctgtcttaagtataagcttcctcgtctgaaattcaggataataacacctaattcatagactgttgcaaagctaaatgargtaacgtgggaaattacattacaagctacaactatacaactgcaaaatgagttggatgaaatgatctggaagatccccttcatctctagtctgggccatt

SEQ ID NO: 189005 - DNA, 201 bp, Homo sapiens
  misc_feature (1)...(201): n = A,T,C or G
taatcccttgcagaagttcgagcctagcatcagtatgtgtcatcagggactaatgtcatttgaagggtttgccaggtaacttttaaaatatcttttgcccntcttttaagagtagatgcatttttcccatgcagtcttaagaaaatttgtttcacctaggtttctgatggataaagaaaattttgcctcaaaaaatgatga

SEQ ID NO: 189006 - DNA, 201 bp, Homo sapiens
caggaggctgaggcagaattgcctgaacctgggaggcggaggttgcagtgagctgagattgtgccactgcactccagcctgggcaacagagcaagactccrtctccagaaaaaaaaaaaaaaaaaagcccctctagaggaacagctgggctgggctgaggtagcctagagaagaggaagtgagaaaggaaaagtgcaaaga

SEQ ID NO: 189007 - DNA, 201 bp, Homo sapiens
gctggtctcaaactcctgacctcaagtgctccgcccgcccctcagcctcccaaagtaccgggattacagacgtgagccaccgtgcctggccttcattcttyatttaaatcagtgacttgaccaaattacaccttagatcaagggtctttatgctgggtctaaatgaagacttcccaaaagtgtttgctgtatcatgtggaa

SEQ ID NO: 189008 - DNA, 201 bp, Homo sapiens
tgatggaagtcagcaggaatggagtcagcatgacagacaatgtgacgtgctgtggaagaaataaaggcagccctaaccaggcagtgtccccagggtaaggygctgaggatgactgcacagcagcaaagagggctaatatgctccactatggtgagtctgggagagttggtgagaaaactgacaaagcactaatttcaactt

SEQ ID NO: 189009 - DNA, 201 bp, Homo sapiens
cagggaccatagtctaaactgaggagtatcaacaagccccatgatactgtcgttgcctcatcaagaggcagtaggtggcccaagtgtctcctgagcatgaragccttccttcccagagacgcgtggaccagcctatgtaccagctccttcacaattttactcaccactttgctggtgatgtctgtggaccaaatagcagaa

SEQ ID NO: 189010 - DNA, 201 bp, Homo sapiens
  misc_feature (1)...(201): n = A,T,C or G
aatttttgtatttttagtagagatgaggtttcgccatgatggccaggctgctctggaactcctggcttcaagtgatccacccatctcggcctcccaaagtnctgggattataggcgtgagacactgcacccagccgtcattaggtttaaatgaggcctttgtggactatgctgcaattagaccttggctgtgaagcatata

SEQ ID NO: 189011 - DNA, 201 bp, Homo sapiens
ctttccaggttcctaaggtaatattagatgttttagattgcttctgttctcatacctccccattgtcctcaagtaagccaggaagctcacactgcctgccytctgtgttcctccaattctgcaggtgcagattggtagtctagtttccttttttggatactattttctttttgtgagactttgtaataaaatggtacattt

SEQ ID NO: 189012 - DNA, 201 bp, Homo sapiens
ctcaagtagctgggactacaggcatatgccaccatgcctgactgatttttgtatttttagtagagagggggtttcaccatgttggccaggctggtcttgawctactggactcaagtggtccaccctcagcctcccaaagtgctgggattacaggcgtaagccaccacacctggcctcggttattagaagttactgtgtgct

SEQ ID NO: 189013 - DNA, 201 bp, Homo sapiens
taagaaactgtgaagggggcaggagcaggggacagcttctttcctagttcctcttcctaagactttttaaataattcaaccagtctaaaatatctactatrtttatgaagtgtacatatatttatcaattatagataaaaggcattgattgtatgttttccttcattctttttagactgtgtttggagaaaagctggtgac

SEQ ID NO: 189014 - DNA, 201 bp, Homo sapiens
cagaacaaagccagttttagttaactcgtctaaaatggaaaacaaatacctgactgtgtgtggcggcttatgcctgtaatcacagcactttgggaggctgmggcggtagatcacttgaggtcaggagttcgagaccagcctggccaacatggcaaaatcccgcctctactaaaaatacaaaaaattagtcatgcacctata

SEQ ID NO: 189015 - DNA, 201 bp, Homo sapiens
ggaaaatccaagaaagtaaactgcagagatgttgatgtggggtgtggaggaaagaccaatgtcttgagctttggcccaaggttatcatggacagaactgayggcccataatcctgggtatttggaaggtgctctgggaggctaagaaagttaaatatggaattaccaggtaaatatctttggttataagcaaaaaagattc

SEQ ID NO: 189016 - DNA, 201 bp, Homo sapiens
tagaacagtaacactaaaagggaccttggagataataactggccagcctcttcgtgataaagataagaaaactggggcaaagagtaggttatgaggaagarggtttcagttatttgcccagtatcacacaattacacagtacagactgtgggtctctccagggcagagtcttttttctttttaaaatcattgttctccagc

SEQ ID NO: 189017 - DNA, 201 bp, Homo sapiens
ctgccactgaagaaggggctgggtatgatatagggtaaaatcccagcacgctgggacgctgaggcgggaggcttgcttgagctcaggagtttgagaccagygtgggcaacatagcaagaccacatctctacaaataatataaaattagcccagcatagtggtggtgcctgtagtcccagccactcaggaggctgaggtggg

SEQ ID NO: 189018 - DNA, 201 bp, Homo sapiens
ggagaatagacagttaaagtaaaatcggggtatggttagagaagggagaaacagatcatggacagccataagtcacaatgtcccactataagaggtcaccmaaaggtttctttgtcaagtacccaagttattcagcatcctgggatccacagcaggatgcaggaagtgggaatgcacaagtcataacatcagatagttatt

SEQ ID NO: 189019 - DNA, 201 bp, Homo sapiens
ccctaatttgcaaagtaagtctaaatgaattttcctacagtggtagttctgcaatttaacctctgtaaatgggatgggaagtttttgttccccagttgatrtattaaagcatgtcactggaactcagcagtgatgtgaccaggacaacgggggacatgatgaaattcctgacagagaatcttgtgagttagaaaacagtca

SEQ ID NO: 189020 - DNA, 201 bp, Homo sapiens
tttcctacagtggtagttctgcaatttaacctctgtaaatgggatgggaagtttttgttccccagttgatgtattaaagcatgtcactggaactcagcagkgatgtgaccaggacaacgggggacatgatgaaattcctgacagagaatcttgtgagttagaaaacagtcacttgggtggccagatcattattcttctgtg

SEQ ID NO: 189021 - DNA, 201 bp, Homo sapiens
agctaataacaaaatcaccattctgttcatcaggttgcctgctttatccccttttagcctcagctacctggcataaagtaactgttcttactcctgtgggwggcagcatggtatgtgaggaagaagagcatgagttcttaagttagaatcaaattaggaatcaaatccttatccaggaatcaaatcctgattcccccaagg

SEQ ID NO: 189022 - DNA, 201 bp, Homo sapiens
aatggtgctggggaaactggatatccatatgccaaacaatgaagttggacccttaccttccaccctgtataaaagttaactcaaaatgaatcaaagacctrcacagaagacctagaactataaaactcatagaaaatatagaggaaaagcttcacgacattgggtctggcaatgatttcttggatatataccaaaggtaca

SEQ ID NO: 189023 - DNA, 201 bp, Homo sapiens
agtcagtggggaatatggttatcttggcacaatcgcttctcatcacctgaatggcactgaattaattgtccagggactcacctttacccaagccaggtaaytggaaatgattaacttgggaaatgtattatcttctttcagcaccaaaggccctgtccctcaaagatgctgcagaattcagcccctgtgggccagtcacaa

SEQ ID NO: 189024 - DNA, 201 bp, Homo sapiens
gggaaaggtcattttgaatgatgcaagaaaattccttccaaaatgagcatgtgtgacaccaataaggtatttgatgtgaggagagggagtaaactgttctrtttggctaagcccaagagtactgagaaaagcaaaaggaaggaaaaaaagatattttgggaggggcagttgtggaggagttgtgggcatggtccagggggt

SEQ ID NO: 189025 - DNA, 201 bp, Homo sapiens
aaccctgtccacacatcacccccacccccactgccctctggcctggctttaggcctaggggttacaatctaccctctgaaggactgatccagataaacagyccttgcagaccagcagtgggcttggtgctgtttggacagggaatttgggaagcgtgggtttacaagggataaattatctagaagtgagtgtgcagcctat

SEQ ID NO: 189026 - DNA, 201 bp, Homo sapiens
aaaatgatgtttttatcagactcctgaaggcagcctcaccctttcctttagggggccagggcgtgagtacaagggaggccccagcatgttggccttcccascttctcttcccatcctggcttgtgtgccagagtatgtatacctcaggcctcaagttcaaaccctgtccacacatcacccccacccccactgccctctggc

SEQ ID NO: 189027 - DNA, 201 bp, Homo sapiens
tccctaaaaggagggatataggggagaggtgaggtgattggagaatggacaggggcctggtgggccaaagtaaagatttggctttgcagaggacacaagcragacatggtggaccagggaaaggtcattttgaatgatgcaagaaaattccttccaaaatgagcatgtgtgacaccaataaggtatttgatgtgaggagag

SEQ ID NO: 189028 - DNA, 201 bp, Homo sapiens
acactccaggtgggaagtcaaggaagttctgctcaagaaaatgatgtttttatcagactcctgaaggcagcctcaccctttcctttagggggccagggcgygagtacaagggaggccccagcatgttggccttcccaccttctcttcccatcctggcttgtgtgccagagtatgtatacctcaggcctcaagttcaaaccc

SEQ ID NO: 189029 - DNA, 201 bp, Homo sapiens
ttcatatgttcactccttcgctgactcttgtttaaacttaccgagggcagatcctgacaggtcaccgacactgctgcttacccgtgagcatagcagatccrgcatctgccttaatgaggatcacagcactaaatgtgcgctagggtcagggtgatgtgggggcaccacagagcatgcagtgtgtggacacactccaggtgg

SEQ ID NO: 189030 - DNA, 201 bp, Homo sapiens
gagacaatgaagaaatgatgcagtggacatagtgagaggtaaggtccatttggtagctgtggttacagtttggagaatgaggtgaaaatttgaacctaaarcattagagagccattgcagacccttaagcaggttgaattttgaatagtggcacattaggaccaatagcctggaggcaccctctataggaaggagagtggc

SEQ ID NO: 189031 - DNA, 201 bp, Homo sapiens
gatgacagcatataaatggtaaagtaattatccaattattatatcaatcatacttttatatataattataaaataataattttatatataattataaaaaatctgactataaaaattttaattataattatattattatataattaaatataattaaaatataattaattatagttatatataaataattattaattgtta

SEQ ID NO: 189032 - DNA, 201 bp, Homo sapiens
atgttctctaccctcaaggaggtgacaatttagagaaaatggacatatacacaactggtttaattgcaagacagagtatgcttcttactttttttttttttagttttgcttacattttatttttacttatacacaagggtaagatattatagaaattggtgtcactataagtctaaaagagcactttcagtaaatataaaa

SEQ ID NO: 189033 - DNA, 201 bp, Homo sapiens
ggagttgtattctgagattcacacaagctttggggcacttcagttcaaggatttaggaggctgaactgggagttgggacaaaaaggagaagggctgtaaayacagacaggtcatctgtgaacaaccttctggttgggttcttcctgggagatacaggaagcgttccaagcagggaaagcaagtgagatagtgccagggtga

SEQ ID NO: 189034 - DNA, 201 bp, Homo sapiens
gtcacaagtgattccttgaacaaatgtatgctcaaacaccactaaggatctacctttgaattttacagtcaccagaaacaccctgtgtgacagtagcgggyattttgcccctgtttatactcagagacacattttggcatcaataagcagactcatctaaaatccatttcaaatagatgttgttgtggatgatctgggaac

SEQ ID NO: 189035 - DNA, 201 bp, Homo sapiens
aagttagcattcctggacccatctttacatttgctacatatttccatgcaaggaagcataaaggtccaaacaggaacttttacttcatattcatgttttaagcagaaattattcgtttaaaatctggttgatcagacttgctttgagattataaactaccattttgtaaactttgaaatgtagagttcttcagcttgcatt

SEQ ID NO: 189036 - DNA, 201 bp, Homo sapiens
aaaggctacagaatttgcccaatatcacataggttgaaagtggctaagccaagatgaaacatatatgtgtgtgtgtgtgtgtgtgtgtgtgtgtgtgtgtkcgtgcacacacattactgcatctagttgcaatataaatacttgtaataggaaatatcatgaataaagaaacatgggcattaaattctggtttgttggaag

SEQ ID NO: 189037 - DNA, 201 bp, Homo sapiens
atagctctaattccaagatttgtttatttaaagaaatatcctgacttgttagtattgtgaccttgaaattattttcttggtatttaaaagtatgctttaawgtaatattgggtgtgtttctctaccagttaatcaactaaaaagtattcattagctgcccactgtggcctagtgctatggcacctaagaatggagaagatc

SEQ ID NO: 189038 - DNA, 201 bp, Homo sapiens
gctaaaatgcattttctcctcaacttggtttcctatttagcattcctaaaactcctgtatgctatattggcatgggcatgagttgataactgtgtttacayatacacataaatatatgtgacatatgtcttattgcctcaaataaattataaactctttataagcaagaaagtattttatgcttaattatgtttgctgcta

SEQ ID NO: 189039 - DNA, 201 bp, Homo sapiens
tgaggaagaggaagatgaggaggacgaatatgattatgactatgaatccctttctgatggtaagagaaacagatccctatgctgtgcacaggaaaattctyggatgatttgccacatttttctttctaaaataagtctagagcgccaaagaccagtaatacggatggttgtaatattgtccaggagtttctgaattcagtc

SEQ ID NO: 189040 - DNA, 201 bp, Homo sapiens
tacctgggaggctgagacacgagaatcgcttgagcccaggagtcacagaggttgcagtgagctaagatcacaccaccgcacaccagtctgggtaacagagygaaaccctgtctcaaaaaaacaaacaaaaaacaagtatgtaagtgttcttctttaacatattattagtgtattattacataatatgtttttctttaacat

SEQ ID NO: 189041 - DNA, 201 bp, Homo sapiens
catctgcagtttacaattattgctattttacaggctcatcagttagcatctatgcaagtgcaggcttataatggtgggaatgccaacccccgacctgccartaatgaggaagaggaagatgaggaggacgaatatgattatgactatgaatccctttctgatggtaagagaaacagatccctatgctgtgcacaggaaaat

SEQ ID NO: 189042 - DNA, 201 bp, Homo sapiens
ttatcttgatcagaataaaaaggaaagcagacagattgcaccagagctttctgaccttgtaatctattgtcaagcagtaaaatttccaggtaagattaggmaatatcatctataacttttaaagatatcaaaggttaaaaatatgccatttatttaattgggcattgtgaacactctcaaaataactaaattgtgttgctg

SEQ ID NO: 189043 - DNA, 201 bp, Homo sapiens
ctaggttgcatcccaatttagttgtttatcacattttgaggtgaaagtacatacttcattgtatttgagtctttgggattacagaaagaacacattgtttyaaaatgtaaagagttggctgggcacagtggctcatgcctgtaatcccaacactctgggaggctgaggtgggtggatcacctgaggtctggagttcgaggc

SEQ ID NO: 189044 - DNA, 201 bp, Homo sapiens
atatcactatgaagtgataatatatttgcttcatggctatttgtttgtttgtgttgctataaagaaatacttgaggctgggtaatttataaagaaagaagkttaattgactcacagttctgcaggtgtacaggaagcatggtgccagcatctgcttctggtgacagcctccggaagcttacagtcatggcagaaggtgaag

SEQ ID NO: 189045 - DNA, 201 bp, Homo sapiens
aaactgacaaagcactaatttcaacttttttcaaatttgaaaatcacttttttccatgttagaaacaaaaagctgtaagaaacaagccaaacgttacctcyttaacatcagaatggactaattcttagtgtgttacaaagatggttacatatagaaatatctatagatacacatatatacacaagttagtataacatacat

SEQ ID NO: 189046 - DNA, 201 bp, Homo sapiens
  misc_feature (1)...(201): n = A,T,C or G
ttgtctgcctccctcccctgaggagtactgctgtatagtaaagaacaactgaaataatatgacatgagaatactcggtcagccttaatgtaggtctttacnggttttaccaggaagaggcagtattgaaggtgggtaggtcagaaaatagagacctacctgaactaaagcagtgatgggagagaaatacaggcttggaacc

SEQ ID NO: 189047 - DNA, 201 bp, Homo sapiens
aaggacctactctggaccagtcactgttctaagtagtttatgtatattttctcattcaacaatcttgtgtttgggggtactattattgtatttatttaaamatgaggacaggcaggatttggggggacattagaccctgcaaaattctttggctttgggggtcctagtggtagagaggctttgccccatctggtactggct

SEQ ID NO: 189048 - DNA, 201 bp, Homo sapiens
ttctatttcttttcaaaatctcctgtgtgtctatcttttttctacttctctttctgatttttatccagtttcccattatctaggttcctgccattactccytcattcattcattcattcactcaagagatttatttatttcaattttttagttttaatttttgtgggtacatagtaggtgtatatatttatgggatagaga

SEQ ID NO: 189049 - DNA, 201 bp, Homo sapiens
ttagcagggttgagagtcacttcaacaaactatatattttatatttatagtcttaaatatatagtttttagattatatatttaatatacataaaatagacytcatgatattctctatactttcttatatatttgaaatatttcaaaaaaaacttttaaaatccaagacaaaaaaaaacaggtcctctagaactagaaatac

SEQ ID NO: 189050 - DNA, 201 bp, Homo sapiens
acgtcaccacacccggcctaatctctcatctttaaatggggctaataatatatctaccccaaatgctttatatgagtattcagagaaatgacatgtttaargcacttatcagggaccaaagacacagtagtggtttgatgttagttcccaaaaaaaaaaaaaaccactaacataacagcattattagaataactaatgata

SEQ ID NO: 189051 - DNA, 201 bp, Homo sapiens
ctgtctgaatgattgtccaggatatatttcctactgtataaacaagaatgtctcattcttctatctcactcaccaccaccaccattactatcaccacccaygcattttctaaccacttatgcatttccagcctatcattttcctcctctgttcttcctggaaactataaacacaaatagcaaaacaaaaaactttcctctt

SEQ ID NO: 189052 - DNA, 201 bp, Homo sapiens
cggcatgtttacatctgagatttttgttttttaatttttgtgggaaaaaaagtatacatttggttttaaattgtgatttaagcattgcaaacatttctaayaaaactctttgtcctaaccagacaatgaaacctaaaggtacttctgcaagcatagtgtgcttggaataaaatccccattaattaacttgccattactgac

SEQ ID NO: 189053 - DNA, 201 bp, Homo sapiens
atgggacaatataatccctattgccagttttctaagactgcttgcaacctttcatgatgacttcccaaggggtaccagcaatgattccacagtcacatccrtaaggcctttctgttttctggtagatcatgggtctagacctagtgatgatctgacctcaaataaaccaggtgatccagagctccagtgggctcagaccta

SEQ ID NO: 189054 - DNA, 201 bp, Homo sapiens
atataggcaatacctattgtcatcaatagaaatggcaactttttcattatacttcacagttgtcgctaatatctccaagaattatttatgctcaatttatmttttcaaaaatgttaattaacttactactatgttttctactgtgttaataaacacatatattctaatagcacaaatttgttcctataacatgtgatcact

SEQ ID NO: 189055 - DNA, 201 bp, Homo sapiens
atatctaccccaaatgctttatatgagtattcagagaaatgacatgtttaaagcacttatcagggaccaaagacacagtagtggtttgatgttagttcccmaaaaaaaaaaaaaccactaacataacagcattattagaataactaatgataataaattccgttttttattattatgatcacccccacttaacaggtgaga

SEQ ID NO: 189056 - DNA, 201 bp, Homo sapiens
caaatttgttcctataacatgtgatcactgtattcaacagtatttcctttgtaaccatttcattttatgcatttaaaacatcattctgagaagggatcctrtctcaccagacaaccagagaagtctgtgatgcaaaaacaagtgaagaacccctgccatattaacatttaatatctaggacttcgtgactgtcattttata

SEQ ID NO: 189057 - DNA, 201 bp, Homo sapiens
tgataataaattccgttttttattattatgatcacccccacttaacaggtgagaaaactgagacacagagagactaaatgaatgacctgtggtttcagagstgacagttgaacccagttgttctggcttccagagccagcattcttggctcatctgcttgatacttttgaatcaaaagctgagggaccttctttccaccac

SEQ ID NO: 189058 - DNA, 201 bp, Homo sapiens
gttttggctctcaagaaagcttgtgcccatttcaccacccctcacatggaatgagaatgaaagataaagtttctgaaacataggtacatggagattctgcygggttttgataagatataatttaaaatcatgatcagaaggttgctcagctggcttggggaggagatgccttctaaagtcagaatcctgtaaggtattcct

SEQ ID NO: 189059 - DNA, 201 bp, Homo sapiens
acccactctcacatccttaggaccctatcttgtctttatttttaaatttcgacctgaacttaaaagtgaattgccaaaacttttaaaatctaattttaaaytaaacttggatttcttccattcacttccataaccttgggaatcaaagacgaatcagtgatttcactaattcagagttagagatgatatgacctacagctg

SEQ ID NO: 189060 - DNA, 201 bp, Homo sapiens
accttaaagtagaaaagttccattacatcaaaagagaattttcaaattcagatttttcacctattttgagtgaccttgccttgaaattagcatggctttayatactgtaaagaaaaggaagaaatggagtttgcatttatttaatagatgctctggactggacattttcacatttcttaaaatctcattcagttcttatga

SEQ ID NO: 189061 - DNA, 201 bp, Homo sapiens
gaaaggctacagaatttgcccaatatcacataggttgaaagtggctaagccaagatgaaacatatatgtgtgtgtgtgtgtgtgtgtgtgtgtgtgtgtgygcgtgcacacacattactgcatctagttgcaatataaatacttgtaataggaaatatcatgaataaagaaacatgggcattaaattctggtttgttggaa

SEQ ID NO: 189062 - DNA, 201 bp, Homo sapiens
gtcatccttacgaactttgctgttacccagtgtccaggctggatgacaggtatttccaggaagagaatgagtgacatgaatatgtgacatttccccaactcaggtgaccacaaaactgtttttcttgtaaatgccagtattccagagatcattctttggaaaactctgttctagggctcatcagagactttccgtttgttg

SEQ ID NO: 189063 - DNA, 201 bp, Homo sapiens
agtcatccttacgaactttgctgttacccagtgtccaggctggatgacaggtatttccaggaagagaatgagtgacatgaatatgtgacatttccccaactcaggtgaccacaaaactgtttttcttgtaaatgccagtattccagagatcattctttggaaaactctgttctagggctcatcagagactttccgtttgtt

SEQ ID NO: 189064 - DNA, 201 bp, Homo sapiens
agttgcttatcagcttaaggagattttgggctcagacaatggggttttctagatacacaatcatgtcatctgcaaacagggacaatttgacttcttctttycctaactgaataccctttatttccttctcctgtctgattaccctggccagaacttccaacactattttgaatatgagtggtgagagagggcatccctgtc

SEQ ID NO: 189065 - DNA, 201 bp, Homo sapiens
tccatcttgaattaattttcgtataaggtgtaaggaaggcatccagtttcagttttctccatatgggtagccagttttcccagcaccatttattaaatagrgaatcctttccccatttcttgtttttgtcaggtttgtcaaagatcagatagttgtagctaagcagcattatttctgagggctctgttctgttccactggt

SEQ ID NO: 189066 - DNA, 201 bp, Homo sapiens
acatgtttgaagtgaattaaacggagttggtaaaggtagagaaaaaggaacagggaaaaacaaatgctgtatgatttcccttatatgaagtacttagggtrgtcaaaatcatagagaccttaagtagaaaggtggttaccggggatgaggaagggcaatgggaatggggagttagtgtttacgggctatagagtttctgtt

SEQ ID NO: 189067 - DNA, 201 bp, Homo sapiens
ggggactaagagtagtttcttcatagattcttgtaaaggtttagaaagaatgtatccaagccgagtgcagtggctcatgcctataatcccaatgggtggaytgcttgagctcacaagttcgagaccagcctgggcaacatggtgaaaccccatctataaaaaaatacagaagttacaggcgtggtagtgcccccctgtgat

SEQ ID NO: 189068 - DNA, 201 bp, Homo sapiens
agctttttgttatggctaattacacttcaaaacttgtacctatatgaaggagtcagaaaattgccccagtaattttttcctaatgttttttaacgagatgyttataaatggtatgaagaaggatggaaggaggtagcacaagatttaaatttttccccagagataaagaaaaaggaataagttcaaaagaataacctcttc

SEQ ID NO: 189069 - DNA, 201 bp, Homo sapiens
cacacttgaattgacatttgcaggagaatttcactagagcagagaggaccccccctgccccaaacagaaaaaccatgttgtacaacagtagttaaagaaayttgggctggacgggcacaggggctcatgtctgtgatcccagcactttgggaggccaaggcaggaggatcacttgtgtccaggagtttgagacgagcctgg

SEQ ID NO: 189070 - DNA, 201 bp, Homo sapiens
ctattctctacccttactcaactcctccatcctgtctgggagactcaacaattcctcttccaggctccatgtcctcctgccctgcctaaacttggtgacasctctagctcctgggaatctggtgatctctattcacccaccactacctatttcatttgctctgcctgaggtgtgttcactaacaggttgttgaatatggct

SEQ ID NO: 189071 - DNA, 201 bp, Homo sapiens
ataagcagactcatctaaaatccatttcaaatagatgttgttgtggatgatctgggaacatggagggtaagagagagtataacaagtttcagagaccctakcaactcacaagatctaggctgatacactaccaagtctagacccaaaatccttaactagggttgaccagcttgtaggagcaaagccagtatttgatcctaa

SEQ ID NO: 189072 - DNA, 201 bp, Homo sapiens
ggggattttctgaatgttcttgtttatacaatgtgcagaaaatttttgcacagagagtcatgcttttgttggcaaaagaaagtgagcacttgctgattttytggcaatcctaacaaaaatactgaggtgtatttatactctgggggccaaaacgaatttcaaaatgacagtgcttagctctgtaaccatcccagctttcct

SEQ ID NO: 189073 - DNA, 201 bp, Homo sapiens
gagaagggaaggtgaagggaaggcgaagggaaggtgaagggaaggctaagggaaggtgaagggaaggctaagggaaggtgaagggaaggctaagggaaggyaaagggaaggctaagggaaggcaaagggaaggagaaaggaaggcagaagggaggaaagaaagaaggaaggaaagaagaaagggagggagggaggaaagaa

SEQ ID NO: 189074 - DNA, 201 bp, Homo sapiens
agagagagagggagagggagagggaggagaaggagaagggaaggtgaagggaaggcgaagggaaggtgaagggaaggctaagggaaggtgaagggaaggckaagggaaggtgaagggaaggctaagggaaggtaaagggaaggctaagggaaggcaaagggaaggagaaaggaaggcagaagggaggaaagaaagaaggaa

SEQ ID NO: 189075 - DNA, 201 bp, Homo sapiens
gagaggtcgaggcgagcacatcacttgaggtcagaagtttgagaccagcctggctaacatgatgaaacctgttactactgaaaatacaaaaaaaaaaaaaagttaaccaggcgtggtggcatacacctgcagtcccagctacttaggaggctgaggcatgagaactgcttgaacccaggaggaggaggttgcagtgagccg

SEQ ID NO: 189076 - DNA, 201 bp, Homo sapiens
ttctgcatctacaaaatgggaataaaagcaacaacttcggagagttgttttgaggaataagtgtgacaatgtatataaagaacttaggccaggtggctcakgcctgtaatctctgtactctgggaggcaaagccaagaagatcacgttaggccaggagttcaagacgagtgtaggcaacatggcgtgatgctgtctcaaaa

SEQ ID NO: 189077 - DNA, 201 bp, Homo sapiens
aaagaaagcagataactctgcttgcaacaaaggaaaggtgggtgaacggtttctgttaaatgacactttgaccatgtggtactcttgtcagtttcagatgrgattccacttgctccctgtccctccctttcacctttcccctcactttcccttagatacctgccaaagttcacttggtgatattaaaagacacccaccttc

SEQ ID NO: 189078 - DNA, 201 bp, Homo sapiens
aaataactaaattgtgttgctgaaatcattgttataatacctcctaaatatctttattattataatttgccttgatgctcatgaagaaaaataccataaartattcatttttcaggtcacacaatgtctttttataatagttaataattataaaagttataatactcataatttctaattgctaaatgtattaaatactta

SEQ ID NO: 189079 - DNA, 201 bp, Homo sapiens
taataattataaaagttataatactcataatttctaattgctaaatgtattaaatacttaagtactaggatttgtgctattttacgtacatctcctttacygttcataatgattctacaaggtaggcggtattatctccattttaaaataaagtctgagagggatgaagtaatttgccccaagtttcagagtatatcagtc

SEQ ID NO: 189080 - DNA, 201 bp, Homo sapiens
gaaggtcttcagggacaataacaagcatggagctatcatctcccatgataacaacgctttcttctggaatacttcctgaaggacctgcctgaggctgtttyacagttaacatatatatatatatgtaacttaaaaaaaagtatatatatatatacacacacacatatatacacatgtaatgtagaatgagtatactctaaa

SEQ ID NO: 189081 - DNA, 201 bp, Homo sapiens
cctgctgccacccgcatcgactcttccaacccgaaccccctcatgttctggctccatgggatacagcttgtggcactcaactaccagactgatggtaaggrgcctgcatgctcacctcgctcctttgcatcttacatttcagtaaatgcagtttgacagcattttttcaaaggggcaagattccagactggggcacaccat

SEQ ID NO: 189082 - DNA, 201 bp, Homo sapiens
gtcaacacacccccgaaattttttaactgaccaccctgaagaaaacaagcaggctttaacttgagcttgctcaccaaaatcactcaagtccttccagctgyatggccccagtctccaaaataaatccccttcctctgctggtctgaggctcacttcagcctccccacgtcctaggctttgaactcctgtgacttttaacct

SEQ ID NO: 189083 - DNA, 201 bp, Homo sapiens
gaaggggcctgtaaggtctcctggtcctgccccttttttaatgcagtttttcaaataccaagctgctcttgacaaagccatgcccggtttatgtttaaagytctttttggagcagggatttcctaacactgcccagttaacctgtctcactacgcagttgttcttgcagtcaaaaggtagtgtcactccaaccactttgca

SEQ ID NO: 189084 - DNA, 201 bp, Homo sapiens
cttctgatacttaatgtataaggtgcattgtaagtaatactgaatccaaactaacctatatacactacctccttgctatacaccttcactctgggctcagrggcttgccttctatagggtgagggttacagtgagagttttgctgttgctctatcctatatattatagcataaagtgttctcttcttcgttcctttgagat

SEQ ID NO: 189085 - DNA, 201 bp, Homo sapiens
gagcagctgctccctcctttcctaaaacagatcctagccagaattttccctgaagggctcttcctgccagcttcctctcttctaggaagcagaggaagttytcttcctttggcttctccctctctggccattcctaatgaagacaaatagcaatggcaccattatttctcctgttttccttgttggggcctcccttctaga

SEQ ID NO: 189086 - DNA, 201 bp, Homo sapiens
agttcgagaccagcctgtccagcatggtgaaaccccatctctactaaaaatattaaaacaaaatagtggggcttggcggtgtatgcctgtagtcccagctrctcggaaggctgagcgggaagcagaggttgcagtgtatcaagattgtgccactgcatttcagcctgggtgacagagcgagacactgtctcaaaaaataca

SEQ ID NO: 189087 - DNA, 201 bp, Homo sapiens
atacactacctccttgctatacaccttcactctgggctcagaggcttgccttctatagggtgagggttacagtgagagttttgctgttgctctatcctatrtattatagcataaagtgttctcttcttcgttcctttgagataatgatttcttgtctgatccaccctcagcctggttgtcacagctgggtagtgcccccag

SEQ ID NO: 189088 - DNA, 201 bp, Homo sapiens
tatcaagattgtgccactgcatttcagcctgggtgacagagcgagacactgtctcaaaaaatacatagctaggggccgggcacgatggcttatgcctgtawtcccagcactttgggaggccaaggtagatggatcacctgaggtcaggagttcaagaccagcctggccaacatggtaaaaccccatctgtactgaaataca

SEQ ID NO: 189089 - DNA, 201 bp, Homo sapiens
gattgtatcaatgttaatttcctggttttgacaattgtgctatgattatgaaagatgctaacattagaggaagctgagtgaagggtgtacaagaactctcygtactgtcttttgcaacttttctgtaaatctaaaattacttcaaaataaaaaaaaattgtaagcagtgagctcagagagattgagtcacttgtctaagta

SEQ ID NO: 189090 - DNA, 201 bp, Homo sapiens
ctgggtgacagagcgagacactgtctcaaaaaatacatagctaggggccgggcacgatggcttatgcctgtattcccagcactttgggaggccaaggtagrtggatcacctgaggtcaggagttcaagaccagcctggccaacatggtaaaaccccatctgtactgaaatacaaaaactagccgggcgtggtagtgcatgc

SEQ ID NO: 189091 - DNA, 201 bp, Homo sapiens
cccaggaggcaaaggttgcagtgagccgagatcgcgccactgcacttcagcctgggcgacaaagtgagatactatctcaaaaaaaaaaagaaaaagaaaawtatatatatagatagatagatcgaatagatcgataagagtcaacagtggaagcaccatttttcaattgttgaaaagaatttccaggctggaaagtgcttg

SEQ ID NO: 189092 - DNA, 201 bp, Homo sapiens
taaaaacaagataaagttaaaagggagagaaaaaattgagataactgatggtaatgtgaagtactaaaaatggcaaaattagaaaaataaagtgatgacaagaggatttttcatataaggcagctaagtgttttcaaatgtgcatattgtaccagccaacataataaattgagtgtgttaaactcaatttttccttctcaa

SEQ ID NO: 189093 - DNA, 201 bp, Homo sapiens
ataaaaacaagataaagttaaaagggagagaaaaaattgagataactgatggtaatgtgaagtactaaaaatggcaaaattagaaaaataaagtgatgacaagaggatttttcatataaggcagctaagtgttttcaaatgtgcatattgtaccagccaacataataaattgagtgtgttaaactcaatttttccttctca

SEQ ID NO: 189094 - DNA, 201 bp, Homo sapiens
tgaacctgagaggtggagcttgcagtgagccgagctcacgccactgcactctagcctaggcaacagagtgagactccatctcaaaaaaaaaaaaaaaaaaagatttttgaaactttttttcaaatgaagtaaatggttaaaacgctatctttaatttttttttaaatgattcaggcaggtagtttctcctagtggtagttt

SEQ ID NO: 189095 - DNA, 201 bp, Homo sapiens
gaactaggaattgccagcttagtaatctttttaagacaaaaccattttagcattattcctttgctgaaaacaaaccagcgaaaacaaaaacaaaaacaaaacaaacaaaaaacaaaaaaaagcatcaaggggtgccctcctctgatgggtgaaatctccttgctttaacattccaggtctcctttatcaggccagctgacc

SEQ ID NO: 189096 - DNA, 201 bp, Homo sapiens
ctaatgatgttgagtatcttttcacctgcttatatttgtatatcttctttggataaatctctgttcaaatattttctggcaatatttctgacaatgaagcrtgacattaagatataatctcattcttggctgggtgcagtggctcacgcctgtaatcccagcactttgggaggccaaggcaagtggatcacctgaggtcag

SEQ ID NO: 189097 - DNA, 201 bp, Homo sapiens
agcccaagaatttgcagttccaacaaactcctgggtgaggaggatgatgctggtctggggaccacactttgaggaccatagctctaagtcttcaattatttctccactgtgccctttctccattgcttgcagcatgctaagcagtgccctgtgctggggacaaaatgtttattaaagcttggtccctgttccagtggggaa

SEQ ID NO: 189098 - DNA, 201 bp, Homo sapiens
gatcatgctcacttcaatgcaaaacttgtttcccacatgagctagatgtttcattttttcccctacatcttggcaaaataagttataacaagtcttagacrgcaaaaaggtttgtcttagatgcattgtggagtttgttttggctccagtttttgaacttttcacagaaatgaataaatgaccaagatgtaaatcattaag

SEQ ID NO: 189099 - DNA, 201 bp, Homo sapiens
agctcttaagtctactttttatacaatagagcttcataccattattctgtatataatcttttcaccaaaacactgtcgcctgattgtttcaacaaaagacctctttgttttgatagccaagaaaaaccttaagctcagtagagacatgagagcaagctttttaaattacaaaatgtaagtgctaaaaccatatttttggaa

SEQ ID NO: 189100 - DNA, 201 bp, Homo sapiens
tataacaagtcttagacagcaaaaaggtttgtcttagatgcattgtggagtttgttttggctccagtttttgaacttttcacagaaatgaataaatgaccragatgtaaatcattaagcgtgagtcagttttgtcaagaaaaatgaccctgtgtgatggaagtcagcaggaatggagtcagcatgacagacaatgtgacgt

SEQ ID NO: 189101 - DNA, 201 bp, Homo sapiens
taaatgggtatgagacttaacttggaggtgaaaaaaggacctaaaattgattgtggtgtaactatattaaaaactattgacttgtgtactttaaatgaatraattgtatggaatgtgaattatatctcaataaagctgctgttaaaaaaaaaaaaaagccaagggttccttttggcatgaggacttcacactgaataagta

SEQ ID NO: 189102 - DNA, 201 bp, Homo sapiens
ggtcatctataaagtttctgtttgttttatctgttgtgaatttccatgatttttgtccccctttgatggctaatttattttccatcctgtattagagatayatatttaataaaatttaaaatattcttttttaaaaatgcatgaagcacaaggaaggtgaatgggtgattaacaagatagtgattcagattgaatattaaa

SEQ ID NO: 189103 - DNA, 201 bp, Homo sapiens
attatgctacattgagagatcctgtagttttccagtcactttcctagttaacacacaatctcattctcctatgctcttgaatatgaatgagtcttgcaaayttaaggctgtataaaaaaaaaaaaaagcaagttgtttaaaacagggatccccagcctttttagcatcagagaccagtttcatggaagacaatttttccac

SEQ ID NO: 189104 - DNA, 201 bp, Homo sapiens
gattggatattattttggcattttatagtgcttgaataataagtttattattttaaatgtttgtagtgccgccgaaggtttataaaggtttatggctgtcrcagttttgctttcatgacctgttgttgatcgtatctttgatttatgtgaggcctagacaggaacagaatccctaatcatgaaatttttcctatgggaaaa

SEQ ID NO: 189105 - DNA, 201 bp, Homo sapiens
aaaagcaagttgtttaaaacagggatccccagcctttttagcatcagagaccagtttcatggaagacaatttttccacagactcggggtgtgggggtgggrgcagatggttttcagatgaaactgttccacatcagatcatcaggcattagattctcataaggagcgtgcaacctagatcccttacatgcacagttcacag

SEQ ID NO: 189106 - DNA, 201 bp, Homo sapiens
gagcagaagcagatgatttagaggctgcatatcataaggggagggtgtagacatggattatttttaaatattgtcctccagtctgtgtagcaggaaaaacraatcacattagaataactttaagcccagaactgaagaacattagagtttgtgtaaacacatcaggcattttgtgagtggttgataatgcaacctctggag

SEQ ID NO: 189107 - DNA, 201 bp, Homo sapiens
tatgtgaatggtgtctacataatgcagagtattttaatgggtagaagaccatcaaggcaatggtatgtttatctatcattatgtgcattgtttcagaggtrtagcagggttacactgatttgtgcacactttttcacttgattggaatgatgatttttaaactatagccccagatgaagttctgggaccatgtccagggga

SEQ ID NO: 189108 - DNA, 201 bp, Homo sapiens
atttattgagcaccttgcatgtgccaaatctcatttactgtatccacacccctataagatgtacattatatggctcagtagttaagattgggaacaatggktgaggccatctgggctcgatttatagcatccaccacttactcgttatgtttcttgggtgttttcactttttctgcttcagtttcctcatccataaaaatg

SEQ ID NO: 189109 - DNA, 201 bp, Homo sapiens
  misc_feature (1)...(201): n = A,T,C or G
gcatatagtagtcatttatcaatctgtgggacgaatgggtgattatctctttttcatgctggagcttagggaaaattgatgcaaagttcttttgaactttnaatttataaggtgatacttaagcgacaaagtaacaagctatattggctttctttgttgtttgttttacagatctccctttacatttaaatgctgcaatgt

SEQ ID NO: 189110 - DNA, 201 bp, Homo sapiens; identical to SEQ ID NO: 32860
  misc_feature (1)...(201): n = A,T,C or G

SEQ ID NO: 189111 - DNA, 201 bp, Homo sapiens
atacagtgagcaacctttcatgttaataactatacatgtacattaccatttttaccagctgtgtattattccattctatacttacacttacagtcataccrtaaattataaccaatcttccattgtgggaatgttctattatcactaaagctgctctaagatggaacatttgtaaaacagggactgttagtctgttagtgc

SEQ ID NO: 189112 - DNA, 201 bp, Homo sapiens
gtgagcaataggctctgctggcgatgcataacttgcacctcagtgcttggcagatgcagaagctgctcccttgagaatggaagaaggacactgtagaaagkgccatagttgcagaatctgcttttttttttttccagagacagtgtgtctctgtcacccagtgtcactctgtcacccaggttggagtgcagtggtgccatc

SEQ ID NO: 189113 - DNA, 201 bp, Homo sapiens
gggatcgatcacacaagcaaatttttgacttcataacctgtcaccacccacaccacttccaggcactcttttgtgtaacagacagttgatatctctggctrgaaagtgattttcaaggggccataagcaggttcacttttttctatgtcctaagagggcagtttttgcttgttgggtggttcttggcaacaccattcagca

SEQ ID NO: 189114 - DNA, 201 bp, Homo sapiens
cacccagtgtcactctgtcacccaggttggagtgcagtggtgccatcctggctcactgcagcctcgaccttcctggctcaagcaattctcccacctcagcytcctgagtagatgggactacaggtgtgtgccactatgcccagataatgtttttctatagagatggggtctcactatattgcccaggttggttttaaactc

SEQ ID NO: 189115 - DNA, 201 bp, Homo sapiens
aaattccacttgtcagtccccaggaggaatagtaaaaattatatcttcctttggtttggttctcttgaggctggacattccccatatcttcagaacttacrtcatctggcaaaaggtaaaaatggggcttcctcatctgttctgaacagtgagtctcttccttctctcaattgggtaattctccgctcttaattcctgcta

SEQ ID NO: 189116 - DNA, 201 bp, Homo sapiens
tggctagagagcccctgcaaggcactgcccactcagtagtgatacttactgtgaagggccgtgggtctagactgaggcatttacacttggttctggaagagaggaaagaagccaaaccagttttcctataggaaagatctctagaagtggatcaaagaatgtacactttttgaatttcgatgggtagtactcagttgcctt

SEQ ID NO: 189117 - DNA, 201 bp, Homo sapiens
aaaaagtaaattaatgaatataaagtgattagaacactgtccaaaaaaagtggagatggagcgaagaaggcactcagaaatggcaagaacaaaggcttagmtgcaggatatgtctcaggatgggggctggaggggtcatgtttggcaggagcagggaacatacagggggccttgagaaatggagctggaatggatgtcctg

SEQ ID NO: 189118 - DNA, 201 bp, Homo sapiens
cccaaatacccactccctgggagactcagcaagaggtggcagtgggtattcagttgtacacagcaatggagtatgtagaaatctagaaattcgttcactcwctcatgagacatttattttccagaaaggtgtttggcatcagaaaaatgtggcaataggaagcagggttccttccagctgcagggtgggattcagtgggag

SEQ ID NO: 189119 - DNA, 201 bp, Homo sapiens
ttcataaaagagaaaatggaaggcagtagcatggtaatgtaaaagcacaggcttttgatttggctcattcctactttgcaggtgtgtaaccttgggcaagstagtttactcactctgaatctcacctttctcatctgtaaaatggcagcagtattagtaccagccttgtagagctgaaaggataggataagcagcgtccct

SEQ ID NO: 189120 - DNA, 201 bp, Homo sapiens
cactgtccaaaaaaagtggagatggagcgaagaaggcactcagaaatggcaagaacaaaggcttagctgcaggatatgtctcaggatgggggctggagggktcatgtttggcaggagcagggaacatacagggggccttgagaaatggagctggaatggatgtcctggtttgcaggtgcattgggccctaggtcagggcaa

SEQ ID NO: 189121 - DNA, 201 bp, Homo sapiens
aaagtgcactatagagtttttttaagttagaaaaaaatgtgttctctgatcctaattttgtgaatattgtgtgtgtttatagaaaaatatgaaatgtaacracaaaaacattagcagagattacctctgggtatgagattattattttaaattttcttcttctttttctttttttttttttttttttgagacggagtttcg

SEQ ID NO: 189122 - DNA, 201 bp, Homo sapiens
attatagaaattaaatccccagatttgagtggggacacaaccaaaccatatcaccaaccataaaccctacctgattgtctcaactgattgccctgggcacraaatcacatgatggttatgaagacaggctgaaaagatgcacaacttaccatcgtaaagagatactgtgtcaacaataaaggggaaaaattccttattgaa

SEQ ID NO: 189123 - DNA, 201 bp, Homo sapiens
aacctcctaattttctttttcttttgtagagagagggtcttgctctgacatccaggctggagtgcagtggtgtgatcacagctgtaacctcaaactcctgrgctcaagttatcctcctacctcagcctgtcaagtagcggagactacaggcgcacaccaccatgcccagctaattttaatgtttgtagaggtggtggggga

SEQ ID NO: 189124 - DNA, 201 bp, Homo sapiens
gttttggctccagtttttgaacttttcacagaaatgaataaatgaccaagatgtaaatcattaagcgtgagtcagttttgtcaagaaaaatgaccctgtgkgatggaagtcagcaggaatggagtcagcatgacagacaatgtgacgtgctgtggaagaaataaaggcagccctaaccaggcagtgtccccagggtaaggt

SEQ ID NO: 189125 - DNA, 201 bp, Homo sapiens
aaacaagccaaacgttacctctttaacatcagaatggactaattcttagtgtgttacaaagatggttacatatagaaatatctatagatacacatatatamacaagttagtataacatacatatattcccttgctctgtcatctgagagggcatagaaacaactgacatcccagtagcaacaaggacaccttgtgctcaga

SEQ ID NO: 189126 - DNA, 201 bp, Homo sapiens
agtgatgtgctcaaggccaaatcctagtcaatggaaaagtctgagacccaaattcaagtctttttgaccattggccctgtgtgtgtgtttgtgtgtgtgtgcgtgcgtgtgtgtgtgtgtgtgtgtgttacctccatgctaagctgcttctgcggtagctctggagagcctcataaaagagctaaataaataaaaggggta

SEQ ID NO: 189127 - DNA, 201 bp, Homo sapiens
cctggagcatctggtagtgccaagcagtaaggaggtgcttcaacggaaacacaagtgatggggtgtgtcaaagagataagataactgaaagagctcccaasagccaaagctggagcaacttgcaagacaaagtaaaggaaaaatatattataaccaaaagtataaaataaatattcttgactctatgctgacatgattgaa

SEQ ID NO: 189128 - DNA, 201 bp, Homo sapiens
aagtgatgtgctcaaggccaaatcctagtcaatggaaaagtctgagacccaaattcaagtctttttgaccattggccctgtgtgtgtgtttgtgtgtgtgtgcgtgcgtgtgtgtgtgtgtgtgtgtgttacctccatgctaagctgcttctgcggtagctctggagagcctcataaaagagctaaataaataaaaggggt

SEQ ID NO: 189129 - DNA, 201 bp, Homo sapiens
aagaaaaatgccgtgttcaggccgagtgcagtggctcatgcctgtaatcccagcactttgggaggccgaggcaggcggatcacgaggtcaggagatcgagrccatcctggctaacaccttgaaaccccatctctactaaaagtacaaaaaattagctggacgtggtggtgggtgcctgtaatcccagctattcaggaagct

SEQ ID NO: 189130 - DNA, 201 bp, Homo sapiens
cagcctagtgagcagttaagagctgggctctggaaggagtcccggctccaccgttaactagcagtggagccttcagcaatttacttaatctccctaagccwcagtttttctcacctctataatgagaatcatgaaaataacacctaatctagagagtcatgaggattcggtatctgaaaaagcaacatggcacatagaaat

SEQ ID NO: 189131 - DNA, 201 bp, Homo sapiens
aatgaggaaagtccaaagtgtcttttcctatttggactgaaaaattaattatggctttgggaataaaggtagtgagcatcatatctcatttctagttaacyggtagttccctttacatataaagagcaattacttttgaagactcaaaaaatatatagtcttaaggtgtgcttcatattatttccccatggtttcattttt

SEQ ID NO: 189132 - DNA, 201 bp, Homo sapiens
ttttctttctttctttttctttttttcttttttaagctagaaaaaaggaatgaggaaagtccaaagtgtcttttcctatttggactgaaaaattaattatkgctttgggaataaaggtagtgagcatcatatctcatttctagttaaccggtagttccctttacatataaagagcaattacttttgaagactcaaaaaata

SEQ ID NO: 189133 - DNA, 201 bp, Homo sapiens
ttgcagaagagatttgcagtttttcatgtgtaagaaccgtgcatgaagattttgccagctgctctggtctagttagatgattaaacatctgcttcatcatygaagctcattgtaaaagaaactgatccatctaaaaaagaagtcatgcccatccaaaggatacgtcattcaaataattttgtagataagtatatgcatccc

SEQ ID NO: 189134 - DNA, 201 bp, Homo sapiens
ccagcctttaagtccttgcctgagctagttccctcttcttgtcatatctctatttactccacgtattagtccattttcacactgctataaatatactactsgagactgggtaatttgtaaacaaaggaggtttaattgactcacagttccacatggctgcagagggcttaggaaacttacaatcaggcggaaggggaagca

SEQ ID NO: 189135 - DNA, 201 bp, Homo sapiens
taaagttttatgaacactgctttttgtttattaaatgttttctctctacctaaagtctaagatattcacttatattttctgctagaagctttaaagttttrtttttgacatcgaattccctaacccatttaaatctttgattttgtatatggtgtgacgtaggcaggaatccattgtcattttctgtgtcaatattcattt

SEQ ID NO: 189136 - DNA, 201 bp, Homo sapiens
tcagaggagctggggaggtgagggacacccaaatgcaatttaaatgtataccacaacaagctgggcacggtggctcacacctgtaatcccagcactttggraagccaaggcaggctcaggagtttgagaccagcctggccaacatggcaaaactccatctctactaaaaatacaaaaattagcagggcgtggtagcaggca

SEQ ID NO: 189137 - DNA, 201 bp, Homo sapiens
aacttctgtgttcaaaagatcctccctacttcagcctcccgagtagctgggactacaggcatgcatgcctggctatttttttttatttttagtagggatgrcatctcactgtgttgcctaggctggtcttgaactcctgagctcaagctatgctcctgcctcagccttccagaatactgggattataggcatgagccagtg

SEQ ID NO: 189138 - DNA, 201 bp, Homo sapiens
aaagttaaaatagattatatatctttatttatttaacaaaaaatcatgtaattataaggccatgattgcaaagttaattaaatgattggggcaagcttcaraagccagtcctttctggccctggttgcagttttggcgccacctggtggcagttatctattctgactttaatcaatgggtacaattctagttggaacttcc

SEQ ID NO: 189139 - DNA, 201 bp, Homo sapiens
cttcaaaatggtgattactatgtgaattcatgtcaaaaaaaacttcagattttaaattttagttgttttgaagtttatataaaggtacactgtgtacaatmttttgggacttattttacactgtattttattcctaagattcatttatacttttgtaggttgctgtagttcatttgttttaattgctgtattatattcctg

SEQ ID NO: 189140 - DNA, 201 bp, Homo sapiens
ccaccgttttctttcacaggagtccatgggatttattccaaaaataatattgatttctgaggcccttttgccattttgttttagccagttcttttcctccygccttttatgacttcacataaaatttaaagggatataattgctctcaatagaattgaaattttcctgttgtgttttcaaagcatctattttgaaaattgc

SEQ ID NO: 189141 - DNA, 201 bp, Homo sapiens
ttggatctctataaagcattgataataatggatttaggaagtgactctgcagtgacaatgtcatggtcccagaaatacctaagccagtaggtactgaccayctctcaaggatcctacagaggacaagtaggaggcctactctgatcctctcccctcctctaaatcacgcttctctgagagtttacatggtttcagagaagt

SEQ ID NO: 189142 - DNA, 201 bp, Homo sapiens
ttccttgaaggttaagtatatgtaagatgtttaatacaatgcctagcaaatggtaaacattacttaagggttacttgctgttcttactgtatgataacttrgttaatattagccatcttattcaactgactttgaattccaaagggcccagacttacatttctttaacttatctttgtctcccctaaaagtacagcacagt

SEQ ID NO: 189143 - DNA, 201 bp, Homo sapiens
caagtggaaaggtgcaggaaaattcatccttaagctaaaggagcaggtgcaggtaaagtttaaagttattttgctctgttcttaagttatctgatacccataattacactgtagccagatctggaagctggtgaaatttaggagaaagttcctgagtcaaggaatggagttaggagaaaattgtttggctttgttttcact

SEQ ID NO: 189144 - DNA, 201 bp, Homo sapiens
tctgcctttatgacaatgaggaacttctgatataaaactgccaaactgcagaaactcacaattaaagaactcagtgatgcctcttcccagagccaaatttkacttaaaacagcccaaaagaaggcccaatacattgagatcatgtttccacatttaaagagcaactcctaaaataactgatgtcctatattacactctgca

SEQ ID NO: 189145 - DNA, 201 bp, Homo sapiens
tcaactggatgtgaatctccttaactctacaatcatccaacaaatgtttctccattttgtgtctcctctgtgaaacctcttcctaaaaccaagatacatarttgatatgcaagtcaaattatcttatcaaaagggaaaaaaacttaatttgacaattagctacttgaggacatctaatttctctcgcattcgttgatatga

SEQ ID NO: 189146 - DNA, 201 bp, Homo sapiens
taagtgatgtgctcaaggccaaatcctagtcaatggaaaagtctgagacccaaattcaagtctttttgaccattggccctgtgtgtgtgtttgtgtgtgtgtgcgtgcgtgtgtgtgtgtgtgtgtgtgttacctccatgctaagctgcttctgcggtagctctggagagcctcataaaagagctaaataaataaaagggg

SEQ ID NO: 189147 - DNA, 201 bp, Homo sapiens
ttaagtgatgtgctcaaggccaaatcctagtcaatggaaaagtctgagacccaaattcaagtctttttgaccattggccctgtgtgtgtgtttgtgtgtgtgtgcgtgcgtgtgtgtgtgtgtgtgtgtgttacctccatgctaagctgcttctgcggtagctctggagagcctcataaaagagctaaataaataaaaggg

SEQ ID NO: 189148 - DNA, 201 bp, Homo sapiens
tctgtctaaaaacaaacaaacaaacaaacaaacaaataaacagactagagatatggaacagaaagaaagttctaggtcagaattcaggttaatatccaaaragttgggatttaagaaccacagttctggaagcagaggacagacatttgaatagcggattattttgacagcatctgagacaatcccctctttttgaagcta

SEQ ID NO: 189149 - DNA, 201 bp, Homo sapiens
ccatcttggctcactgcaacctctgcctccgaggttcaagagattctcctacatcagcctcccaagtagctaggattacaagcccataccatcaagcccasccaatttttgtatttccagtagagatggggtttcaccacgttggccaggctggtctcaaactcctgacctcaagtgctccgcccgcccctcagcctccca

SEQ ID NO: 189150 - DNA, 201 bp, Homo sapiens
tcacccttaaaggaaaaggtgtcccttggcctcttcaaaacaaaacccctatctctgcttctgattttcctccccaaccctcaggtcctctaggaccagamcctgttacctcagatattctctccttcttcttgatctctgctggatcttcctaacatactggttagtgacccggacaaccatgagactctgtcataatca

SEQ ID NO: 189151 - DNA, 201 bp, Homo sapiens
atttcccaccccagcttctcacccaactcctgccttcacccgtcctggattctggacctttgtcttccctggtcactggaacctgattgtctttgtttcarctgtccaccaatttggtcccagactcttggattgcactggattggtgataccatttattccttttcctccctttgacctctcggctctggggccatagct

SEQ ID NO: 189152 - DNA, 201 bp, Homo sapiens
agctctgcctcctacttgttataaccttgggcagtgtacttaatctctctgattctcatttcttcacccataaagtattgatggtaatgatacatactttrcagagttatttatggatcccttctcagggcccaacgtaatgagtaacaaatttatggcctttttacttcaagttgttttaggatccatagagatactcca

SEQ ID NO: 189153 - DNA, 201 bp, Homo sapiens
gtgatggggtgtgtcaaagagataagataactgaaagagctcccaagagccaaagctggagcaacttgcaagacaaagtaaaggaaaaatatattataacmaaaagtataaaataaatattcttgactctatgctgacatgattgaataaataaatgggggagaataaatgaaagagaatagacaaatctgtgcaaaagaa

SEQ ID NO: 189154 - DNA, 201 bp, Homo sapiens
cgtgaatctgggaggcagaacttgcagtgagccgagatcgggccactgcactccagcctgggtgatagagcgagactccatctcaaaaaaaaaaaaaaaaagaaaaatgccctgttcagtaacacaatacaagggcaagcctaaatagattacagagtcacttttaaggagttgaaatttcaactgtgatctgaaagagga

SEQ ID NO: 189155 - DNA, 201 bp, Homo sapiens
gtaggatattggtgcattcctagaatagtgcctcacaaatactaataaattaccagagagaaaatggtaactgtgtggcggagacacctggcagacaccarcctgaccaggtgatcaagattgacatcaccagtgatgcaaaagttccacatcctgtaccctctgcggtgatgcaccaagcagagcccagcttcattctga

SEQ ID NO: 189156 - DNA, 201 bp, Homo sapiens
gtagggtttctgtactaggttccaagggagtagtaggacttcaaaataaatattaatggggatggaaaatgttgagttgccttgcttgtagtttttggctwatttattttcattttatgggaacaggactgtcaactctaaatgcatctggctctagcagaggaaaagaaaggaaaagcaggaagtccatttttggcaaca

SEQ ID NO: 189157 - DNA, 201 bp, Homo sapiens; identical to SEQ ID NO: 32855

SEQ ID NO: 189158 - DNA, 201 bp, Homo sapiens
ccttctttgattcttgtcttgatttttaaccacaatgctatattacctccaggtaaataaagatttttctctagggaccctgacagaatagctataaaacktggtatactgtctcttaagtgctatatgagtggcagggtaatttgggtagtcttagaaggcttcatgggagaagtgggatattagttcctgccaggggcc

SEQ ID NO: 189159 - DNA, 201 bp, Homo sapiens
aaaggtatgaggttaggggcatgcctagtttcaaattctgacctggcacttactatttatagctctgaggcttaatgcaagttacttaccctctctgtgcygctatttatttctaaataattgtacctacctcttagagttgttgtaaagattagtagacttttatacgttgaatgttaacatatgttaacaaacacgtta

SEQ ID NO: 189160 - DNA, 201 bp, Homo sapiens
ccgttgttctttttcttttatttgtgagaagcagagccaaatgcaagacactgagcccagcaggaggggccagacctggcccaggaagagccagtatggtstgggctgcaaggaattgagccaggaaccccaggctcataaaacatcagcactgcaagggccttagagaccatcaggtccaacccttcattttcagaatag

SEQ ID NO: 189161 - DNA, 201 bp, Homo sapiens
aataacattgtcaattctttaagtgctcagagatgcccttttaatttggatgtagccaggttttgtgagttcatttctccccttagtctagtttctttccmtccttcacttggcaggtagttctctctggttaatgagtgtgagtgcttcaaagcatacagagcagccatggggtccctcccagtctctcaggaggatatt

SEQ ID NO: 189162 - DNA, 201 bp, Homo sapiens
ttctcctcttactccatgctctaaaggattcagagtgaggcacctggaggaaaaacagacacaaaactacagaggaggcaacaaaacaaaaccagaggcascctgttttcctttcataaatgctgcaagcgcagtcgaacccgctatggaaacccgacgctttggtttgcctttcagggtgctggcatgaatgaataataa

SEQ ID NO: 189163 - DNA, 201 bp, Homo sapiens
ttataaattaacacttcctcttaagtctaaaattgtgccagtctgtggcttcctgatttaaatcctgaccctgagtttcaggttgagtattctacctcccycagcaatgcctccttgaggtttgatttggaatgaatcttgtgactcactccctgacgctgtgtagtagaagggcagaggatttggctaagcctggaaatg

SEQ ID NO: 189164 - DNA, 201 bp, Homo sapiens
tatttttcagtattaaaaaaagagggagggcagacatgtattcattgcctgctgtatgtcaggcactgtgtctataatttgcatatagtaatttaacaaaktataaattaacacttcctcttaagtctaaaattgtgccagtctgtggcttcctgatttaaatcctgaccctgagtttcaggttgagtattctacctccct

SEQ ID NO: 189165 - DNA, 201 bp, Homo sapiens
aatcaaaagaaggatactatttcatgacatgaaaattatatagaattgaaattgtattgctcattaataagggttagggagcacagccatactcattcttytatgtattgtctgttggtgcttttaccctctaatggcagagttaaatagccacaacagacactgtatgacctgcagaaactaaaatatttgttatcttgt

SEQ ID NO: 189166 - DNA, 201 bp, Homo sapiens
catcctacagaatgtaaggcctgtaatctttgaaattacataaagacatgaaagacagggaacagtagaggaactattccagattggaagagacagaagaraacaaaatgcaaagtgtggtcccccgaccagcacatcagtgtcatctgggaatttgctgaaactgcagaatcttctgctcctacccccacccactgaatc

SEQ ID NO: 189167 - DNA, 201 bp, Homo sapiens
tctagactcactgcaacctctgcctcctgggttcaagcaattctcatgcctcaacctgaggcatgagtatttgggattacaggtgcgtgccactatgcccrgctaatttttatatttttagtagagacagggtgtcaccatgttggccaggctggtctcaaactcctgacctcaggtgatccgcccaccttggcctccgaa

SEQ ID NO: 189168 - DNA, 201 bp, Homo sapiens
ggcaggagaatcgcttgaacccgggagacggaggttgcagtgagccgagattgcgccactgcactccagcctagcgacagagcgagactccgtctcaaaamaaaagctagggaggcttctcttatagtcattggtgcatctatgtgaattgacatcccatgttatgacctcctttacaatggtcttttcaagaaagagcac

SEQ ID NO: 189169 - DNA, 201 bp, Homo sapiens
ctaattggtctcatttcctctgggtttgccacctctgtctgtcctcatctagggcatcccaaacagatctatctaaatatgatcatgtcactcctctgtgraaaaccctccatcagttctccattgctttcagggtatagtttataccagaagtaacaaattcacatgccaggaggatcccaagaagatgatgtgcaggca

SEQ ID NO: 189170 - DNA, 201 bp, Homo sapiens
tatttctgtcacctaggtaggtagctgaatcttactaagcctcagttttgtcatctgtaaactggaaatgacaatactacttgatagggtttttgtgaggwttataaattaagcaaattgcacggcatactataagtgccaatatagatggtggctatcgtgattaatgtgtgtatcacacccttaaaataccaagctgaa

SEQ ID NO: 189171 - DNA, 201 bp, Homo sapiens
atgcaaattttaagcagctggtttccagaagagggatacatgggcaggattgtcttaaaaacccagcaggaagtaagtgtgtctgggtgcagcctacacartaacgactcattatgtgattagccatttaccactcacaacctccctgaaattcagaatttcttgtaattgcaacttggtttatattcttcttaagtaaat

SEQ ID NO: 189172 - DNA, 201 bp, Homo sapiens
atagaaataaatcttttagtccattttaaaggcaaatagttttcagatattctttgttttatattatatactgagctttcatcaactcatagcaaaacttsctttgcagatctcaatttgcctatagtacctcatgggcataaaaatatcctttacaaatttctgacctcttccagaaaagatataaaagcatagaattcc

SEQ ID NO: 189173 - DNA, 201 bp, Homo sapiens
caattttacccagaatggtacaggaagtcattgaaagttgtgatcaaattgcatgtgtccttttctgacttgtttctgtcattcagcccagttgatatgcrtagccatggttgattcttttccattgctctatcttattctactgggtacagcttggccctgtgggtggtttgggccatacatcaaccgtggacagtggac

SEQ ID NO: 189174 - DNA, 201 bp, Homo sapiens
ggaagaaagaaaggaaggaagaaaagaaggaaggaaggaaggaaagaagaagggagggaggaaggaaggaaggaaggaaggaaggaaggaaggaaggaagsaaaataatgtgtgctgtagaaaatgatggtgtcttcaagagcagttttgagggcagaaacattggcaaaagcaatctccttttgaccatattttatattg

SEQ ID NO: 189175 - DNA, 201 bp, Homo sapiens
cattcccttactttccttttatacagtgttattgcatctacatgtattcttaagaactgtatattttaataaatgccactgaattgtacacttcaaaatgrtgattactatgtgaattcatgtcaaaaaaaacttcagattttaaattttagttgttttgaagtttatataaaggtacactgtgtacaatcttttgggact

SEQ ID NO: 189176 - DNA, 201 bp, Homo sapiens
gatcacaaggtcaggagatcgagaccatcctggctaacatggtgaaactccgtgtctaataaaaatacaaaaaattagccaggcgtggtaaaaaaaaaaaagtaataataaccttagttggtgcatagtttctcaggtttgtcctgccttctctgatccattatggttttcttggctgatcctgtcttcatttctttaaga

SEQ ID NO: 189177 - DNA, 201 bp, Homo sapiens
tgttatctaaattgttttttttattatccaaactctgcaccccagagcagtggctgggaatgagattgtcagtccacaaccttgggcacaaggacatcatccaacacagtgatggttgaggaagaggtcgccacatcacaataatgcactccgttatgcacaggtacaagcagggccatcactagggtgagacaagtgagt

SEQ ID NO: 189178 - DNA, 201 bp, Homo sapiens
gtctttcttttttatcctcggtgactttgatcccttttgtctccctcaccctagattgtctctggtcagaatgtgtgccccagtaatagcatgggaagccygtgcattgaagtcgacgtcctgggcatgcctctggacagctgccatttccgcacaaagcccatccatcgaaacaccctgaaccccatgtggaacgagcag

SEQ ID NO: 189179 - DNA, 201 bp, Homo sapiens
ttgttatctaaattgttttttttattatccaaactctgcaccccagagcagtggctgggaatgagattgtcagtccacaaccttgggcacaaggacatcatccaacacagtgatggttgaggaagaggtcgccacatcacaataatgcactccgttatgcacaggtacaagcagggccatcactagggtgagacaagtgag

SEQ ID NO: 189180 - DNA, 201 bp, Homo sapiens
gttgttatctaaattgttttttttattatccaaactctgcaccccagagcagtggctgggaatgagattgtcagtccacaaccttgggcacaaggacatcatccaacacagtgatggttgaggaagaggtcgccacatcacaataatgcactccgttatgcacaggtacaagcagggccatcactagggtgagacaagtga

SEQ ID NO: 189181 - DNA, 201 bp, Homo sapiens
ttacctcacttggtctatatttttgcaagagtttctgttggataatatcctagaagtaagatttctagtacaaagaatacacgtttaaaattttgttttgsctctcaagaaagcttgtgcccatttcaccacccctcacatggaatgagaatgaaagataaagtttctgaaacataggtacatggagattctgccgggttt

SEQ ID NO: 189182 - DNA, 201 bp, Homo sapiens
tttgaagcatcagtggggggaggtgcacccactgacccccacgactagactaactggtggctcagacagcgccctctctcaaaagctgttcttagacagcrgtgctgggcttattttctggcaccatgacaaccaaatggtgcccctttcagtggttctttattctagtggcttgcttaaacacattcagagcttcacatt

SEQ ID NO: 189183 - DNA, 201 bp, Homo sapiens
gtaactcagggggcagcactctcttggcgaaaagacgcctgttggttgcatgcctgttgccatccctgcccattttaaggtctttctacctgtcatttgcygacttccaggagcatcttcttttcagtagccatggttaacaagcttttcccaattctgtattactccaggatatcgacatcttcagctgcgaaaccttca

SEQ ID NO: 189184 - DNA, 201 bp, Homo sapiens
aagcacagtagtttcctcctctcaggagataggtatatccttttagaacagtttatgaaataataacatagtatatgagatattaagctaagaagtttctrcatcaccaagatacaagctcagatttttgctagatttgtctttctttattctgcataaacctattatttactcacattttttctttttaaacatagaacc

SEQ ID NO: 189185 - DNA, 201 bp, Homo sapiens
cctgggcaacagagcaagactccatctcagaaaaaaaaaaaaaaaaacccacagctaataggagcagataaattggcttgttatggatctatcaacatcakcagaagcacagtagtttcctcctctcaggagataggtatatccttttagaacagtttatgaaataataacatagtatatgagatattaagctaagaagtt

SEQ ID NO: 189186 - DNA, 201 bp, Homo sapiens
gagtgcagtggcacaatctagactcactgcaacctctgcctcctgggttcaagcaattctcatgcctcaacctgaggcatgagtatttgggattacaggtrcgtgccactatgcccagctaatttttatatttttagtagagacagggtgtcaccatgttggccaggctggtctcaaactcctgacctcaggtgatccgcc

SEQ ID NO: 189187 - DNA, 201 bp, Homo sapiens
caccagcaatgcaaaagggttctagtttctccatatcttttttttttttttcccggagacggagtcttgctctgttgcccaggctggagtgcagtggcacratctagactcactgcaacctctgcctcctgggttcaagcaattctcatgcctcaacctgaggcatgagtatttgggattacaggtgcgtgccactatgcc

SEQ ID NO: 189188 - DNA, 201 bp, Homo sapiens
caaacccttccttcttatttagcccatcactcctcaaaccctgagaaagctcagcagaaaacctcctcagccttcagcaatacaaagtcatgctatcattkttcaaggatagggaaagccagtcctttgaaacacaatagcagatttccttgaaggggaggagaaatgctttggtgtcttcttattttttttaacagcttt

SEQ ID NO: 189189 - DNA, 201 bp, Homo sapiens
taaatataggtcttctagagctcaggcaccagaaccctgaacccctaaccccaaggctcagtcccttacaaggaaccccaaacccttccttcttatttagsccatcactcctcaaaccctgagaaagctcagcagaaaacctcctcagccttcagcaatacaaagtcatgctatcatttttcaaggatagggaaagccagt

SEQ ID NO: 189190 - DNA, 201 bp, Homo sapiens
gttgcacaggtgaattataactagtttttcccagctcctatgaattacttccttcaaagatgcggatcttaatgatatgctccttttcctgtgttttggtwattacatatgtgtccgttctggttcctcaatcagattgtaaatcgattaaggacaagaaataagttctgcattattttactctccataatgcaagcataa

SEQ ID NO: 189191 - DNA, 201 bp, Homo sapiens
gcattcaacaaatgccagatattgggctaaataatttacatattccatgttgtacaatcatcttaactaccttaggattttgatatgataattaacacttytattgctaagcaaactgatttcctgagaaattatgtacctcatcaaggttacttagctagtaagtgaaataactaagatttaatccaggcagctgacact

SEQ ID NO: 189192 - DNA, 201 bp, Homo sapiens
tttgagcaaagaaattcatcattgtgtggttctgcccatgtatttatttaaccaataaagccttccagtcattctgacaaccaaaaaccctttcccgactrtattagtccattttcatgctgctgatgaagacatacccaagactgggtaatttataaggaaaaagaggtttaaggggctcacagttccacctggctgggg

SEQ ID NO: 189193 - DNA, 201 bp, Homo sapiens; identical to SEQ ID NO: 32861

SEQ ID NO: 189194 - DNA, 201 bp, Homo sapiens
ctgtctgagggtctgtcatgtggttgcagtcaagatataggttgcagatacaatcatctaaagccttgactatagctggaggatccgcttccaagatggcrcactcacatgggtgttgtcaagagtcctccatactttccacagggatctcttcttacaatatggcagcagattacccccagagcatgcgagagaggagta

SEQ ID NO: 189195 - DNA, 201 bp, Homo sapiens
ggtggcaggcgcctgtaatcccagctactcgggaaactgaggcagagaattgcttgaacccaggtggcggaggttacagtgagccaagatcacgccactgyacttcagcctgggtgacagagtgaaactctgtcccgaaagaaagaaagaaagatacacaggaagaaagaaaggaaggaagaaaagaaggaaggaaggaag

SEQ ID NO: 189196 - DNA, 201 bp, Homo sapiens
ggctcacgcctgtaatcctagcactttgggaggctgaggcgggtgaatcacgaggtcaggagttcaagatcatcctggccaagatggtgaaactgcgtctytactaaaaatacaaaaaattagccaggcgtggtggcaggcgcctgtaatcccagctactcgggaaactgaggcagagaattgcttgaacccaggtggcgg

SEQ ID NO: 189197 - DNA, 201 bp, Homo sapiens
tctcggctcactgcaagctccgcctcctgggttcacgccattctcccgcctcagcctcctgagtagctgggaccacaggcgcctgccaccaagcccggctrattttttttggtattttttagtagagacggggtttcactgtgttagccaggatggtctcgatctcctgacctcgtgatccacctgcctcagcctcccaaa

SEQ ID NO: 189198 - DNA, 201 bp, Homo sapiens
tcacccaggctggagtgcagtggcatgatctcggctcactgcaagctccgcctcctgggttcacgccattctcccgcctcagcctcctgagtagctgggaycacaggcgcctgccaccaagcccggctgattttttttggtattttttagtagagacggggtttcactgtgttagccaggatggtctcgatctcctgacct

SEQ ID NO: 189199 - DNA, 201 bp, Homo sapiens
atgctaacctaagacattaataaacggggacttgggtgccaggattatgggaattctctgtactattcttgctatttttctataaatctaaaaatattccrgttgctccacatccacaccagcccttgtcaaaaagctcagtttcttcatttgtaaatgggacagcagtccctaccctaccactcactcaggattgttgta

SEQ ID NO: 189200 - DNA, 201 bp, Homo sapiens
tcacttttatggtgagaactttttaaagtgtattttgtttttataatttcaacttttattttaaattcagtggatgtatgtgcaggtttgtttcatgggtrtgctgtatgacacttgaggtttggggtacaaatgatcctgtcacccaggtagtgagcatagtacccaataggtagtttttcagcctttgcccacctccct

SEQ ID NO: 189201 - DNA, 201 bp, Homo sapiens
aggagaatttcactagagcagagaggaccccccctgccccaaacagaaaaaccatgttgtacaacagtagttaaagaaacttgggctggacgggcacaggsgctcatgtctgtgatcccagcactttgggaggccaaggcaggaggatcacttgtgtccaggagtttgagacgagcctgggcgacatagcgagacccggtc

SEQ ID NO: 189202 - DNA, 201 bp, Homo sapiens
tgaaataaaatccaagataacaagaccctgcatggttttgctcctgcctacttctccaacttaactttatttatttatttatttagaaatggagttttgcycttgttgcccaggctggagtgcaatggcacgacggtcagctcactgcaacctccacctcctgggttgaagtgattgtcctgcctcagcctctctagtcgc

SEQ ID NO: 189203 - DNA, 201 bp, Homo sapiens
aaacatctgacatttatactgcttttctagccccattctatttctcttttagtgaatgtagtgagtggttgctatttcaacccaagcacttggtgttcacrtcttgcttgttccttggtggcttctgtttgttagtttctattgtggcttttgaagaaggtacctgggtttgattaaatttgttacacccttcaattatat

SEQ ID NO: 189204 - DNA, 201 bp, Homo sapiens
cctcccaggttcaagcaattctcgtgcctcagcctcccgagtagctggatcacagatgtgcaccaccacccttggataatttttttttttttttttagtaragatggggtttcaccatgttggccaggctggcctcaaactcctggccttaagcaatccacctgccttggcctcccaaagtgctgggattataagcctgag

SEQ ID NO: 189205 - DNA, 201 bp, Homo sapiens
agcgtgcgagccacgctcaggcgctcccagacctggggccccgcgccgccgccgaagttctaacgcggtctctggagccgtctggcgcgcaaggaggaggmtacaggccggggtcgtctcgctggcagtcgctgtcagaggggttttctaactggatgccagtgtttttgtgatttttgtttttgtttttgagacggagtc

SEQ ID NO: 189206 - DNA, 201 bp, Homo sapiens
tggataatttctgacagggcatttgctactgaacattaagctcactcaggctcagagggccagattaggacagaaaatttacccattgggcatatgactaytacaaagggtggttcttaaaggatagttccataaacttggtataattgagtgcactaaatgtacatacttcttgatattgcatctgtaattagaaacaat

SEQ ID NO: 189207 - DNA, 201 bp, Homo sapiens
tgggcatatgactattacaaagggtggttcttaaaggatagttccataaacttggtataattgagtgcactaaatgtacatacttcttgatattgcatctrtaattagaaacaatgatggagacaattctcatttgttgagtttttttccttttcagcctttatgcagtatacacccatagtacaatgcaattggataagt

SEQ ID NO: 189208 - DNA, 201 bp, Homo sapiens
gttcttgggtaaaggagtgtcattaggataagataattttttttttcttattattgttacagctagggctggatatcagcatttttgcagaaataattcayccatttgggagctttataaaaatggaggtttttaaaggatgatagttaacttttaagcgtcacccaactctgagatttaataattctgttatgtttagag

SEQ ID NO: 189209 - DNA, 201 bp, Homo sapiens
aaatcaggaaaacctggttagaaattgtttgaatgtcttctgtgaaataattatttttctccctattctaggagtctatgaactagctgtttttcagatgraacctggtgggccagctctgtggggtgatgcatttgaaagagcaattaatgcccatgtcaatttaggctacacaaaagtagttggtgttttccacacaga

SEQ ID NO: 189210 - DNA, 201 bp, Homo sapiens
gaaaagtcttgtttggattctaatgtacttaaaactccccttaactttcagcactaagtaaaacagttgacttctcagtgtcaagtcttattaatagttcscttcctctatgttgttcataattctttagtaactttgtatttctttcctttttcttgtccaatctaccttgtcctctagtttctttctctccacccatct

SEQ ID NO: 189211 - DNA, 201 bp, Homo sapiens
ggctggtaagctgtttcactaagcacgaattatttttagaacaaatgtgattcaaccaataactgtatgccttcttatgaaatgtttttccagttcgggaragtgtcaactacctagtttctcagcagaatatgcttctgattcctgcatcattttcaccattgaaatagttttctactgaaatacaaaacatttcattaa

SEQ ID NO: 189212 - DNA, 201 bp, Homo sapiens
gggaggggcggggggtatttctgaagcgtgcgagccacgctcaggcgctcccagacctggggccccgcgccgccgccgaagttctaacgcggtctctggarccgtctggcgcgcaaggaggaggctacaggccggggtcgtctcgctggcagtcgctgtcagaggggttttctaactggatgccagtgtttttgtgatttt

SEQ ID NO: 189213 - DNA, 201 bp, Homo sapiens
tttgtattttattttagattataagagatttgaaaagtcttgtttggattctaatgtacttaaaactccccttaactttcagcactaagtaaaacagttgrcttctcagtgtcaagtcttattaatagttcccttcctctatgttgttcataattctttagtaactttgtatttctttcctttttcttgtccaatctacct

SEQ ID NO: 189214 - DNA, 201 bp, Homo sapiens
tcttgggtaaaggagtgtcattaggataagataattttttttttcttattattgttacagctagggctggatatcagcatttttgcagaaataattcaccyatttgggagctttataaaaatggaggtttttaaaggatgatagttaacttttaagcgtcacccaactctgagatttaataattctgttatgtttagagac

SEQ ID NO: 189215 - DNA, 201 bp, Homo sapiens
ttttctaatcctctccctcctcccatcttccattctcaagtagaccccagtgtctgttgtttccttctttgtgttcataaattctcatcatttagctcccrtttataagtgagaacatgtggtatctggttttcttttcctctgttggtttgctgaggataatagcctctagctacatccatgttcccacaaaagttataa

SEQ ID NO: 189216 - DNA, 201 bp, Homo sapiens
ccttgcacgtttgctgaactgagtaaaattcaagtaaaaatatgggcgattttaaataaaaaaacattttcttaactattttcctcccatagataattttsctcatcgagctgaagttcggaaagccttagccaactgtaaggaatggcaagaacaatctatcattccaaatttggctcgcattgataaacaagagacgga

SEQ ID NO: 189217 - DNA, 201 bp, Homo sapiens
tagagcctataaagcccattctatgtcaattaagttagttttttacatttcaactccccttttagaccatgagtaacttgagagcagttgtcacatatatytatgttggcatctccagcgacataataacatggggttcccatatggccttgcacgtttgctgaactgagtaaaattcaagtaaaaatatgggcgatttta

SEQ ID NO: 189218 - DNA, 201 bp, Homo sapiens; identical to SEQ ID NO: 32880

SEQ ID NO: 189219 - DNA, 201 bp, Homo sapiens; identical to SEQ ID NO: 32882

SEQ ID NO: 189220 - DNA, 201 bp, Homo sapiens
tttttaatccctaatacaatatagatactatgtaagtagttgttatactatattatttcacttgtatttttaaaaaatatttttaatctgcagttggttgmatccacagatgcagaacctgtggagagggagggctgactatactaggcccatatcttggtaaatgtatatacctgtttgggtaacttagaaagaagagaa

SEQ ID NO: 189221 - DNA, 201 bp, Homo sapiens
atctgtaattgtaccttcccaagatatttacatttgtcttacctccttcaggtgtgttcatcttttgctacgggccctagacaatacgatggaacgttctwtgaatttcgtacttattaccttaaaccttcaaatatgaatgcgttcatggaaaatcttaagaaaaacattcatcttcggacctcttactctgaattggtt

SEQ ID NO: 189222 - DNA, 201 bp, Homo sapiens
aaatctaacggatgcctaacaaaagttgacatggtcaatacaggtgaaaaagtggggcttgggagctaggaaaacaggtgtaggtagatgagtcgtagttyatgaaattttgtcacagttttaaaatgtataaacttttaaatataaaagtattttttccacaaagtcagctaatcttaaatcattaagtacatctttgct

SEQ ID NO: 189223 - DNA, 201 bp, Homo sapiens
taatctgctttttttaaaaaataaaacatagtaggaagtcattaaactcgggtctagtcttaattgtgccttaagctgtgtttctttgcattctctcttcrgccttatgtttccagtttaacttataaatttatcttccaaatttctgatccctctgaaatcttataactaacatatttagttttaccttttgattttgat

SEQ ID NO: 189224 - DNA, 201 bp, Homo sapiens
gttagaaattgtttgaatgtcttctgtgaaataattatttttctccctattctaggagtctatgaactagctgtttttcagatgaaacctggtgggccagstctgtggggtgatgcatttgaaagagcaattaatgcccatgtcaatttaggctacacaaaagtagttggtgttttccacacagaatatggagaactcaac

SEQ ID NO: 189225 - DNA, 201 bp, Homo sapiens
aattttttttaaaggaaacacaccatatgttgataaaggtttatctaggcagttaagattatactaacttttattttttctttgtatcacctaaattttcyacagtaaacaattttttataatctgctttttttaaaaaataaaacatagtaggaagtcattaaactcgggtctagtcttaattgtgccttaagctgtgtt

SEQ ID NO: 189226 - DNA, 201 bp, Homo sapiens
ttgtaccttcccaagatatttacatttgtcttacctccttcaggtgtgttcatcttttgctacgggccctagacaatacgatggaacgttctatgaatttygtacttattaccttaaaccttcaaatatgaatgcgttcatggaaaatcttaagaaaaacattcatcttcggacctcttactctgaattggttggattctg

SEQ ID NO: 189227 - DNA, 201 bp, Homo sapiens
tgaactcttatgttatcataaatgagaaaacatgcagtctcatatatcaaaccataaaattgtgaattagactttaatcctcagaaaaatgttagaatcgyttgctataaagatagctcatgaaaaatttaaagcagtaattgtaaatgttcaagtgggttaagatcaccgttgggcctgccaaaagacatgtatatttaa

SEQ ID NO: 189228 - DNA, 201 bp, Homo sapiens
aaaaaataaatttagcagatcttcttcccagtggtacacctctaaccaccccttgcttgaactcttatgttatcataaatgagaaaacatgcagtctcatmtatcaaaccataaaattgtgaattagactttaatcctcagaaaaatgttagaatcgtttgctataaagatagctcatgaaaaatttaaagcagtaattgt

SEQ ID NO: 189229 - DNA, 201 bp, Homo sapiens
acctgataccatggtccaaattagaaaagcctccaaaagaaggtgagttcttccctcttagactatgagttttaatgagtaaaatactaaagacctaaagytataaagagtaaagttctataggaaaaaaatatataattctttgttttatataataatatatgatgagtctggagataaaaatgaattagagactgggcg

SEQ ID NO: 189230 - DNA, 201 bp, Homo sapiens
tgggccagctctgtggggtgatgcatttgaaagagcaattaatgcccatgtcaatttaggctacacaaaagtagttggtgttttccacacagaatatggaraactcaacagaggtacagttgtccatttgttctatgaagttgccatgtgtattagatcagttcgtctctctttttcattttggtacctgttttaattttt

SEQ ID NO: 189231 - DNA, 201 bp, Homo sapiens
aaggtagaatggtttttaagcatttacctggatatttaggaagaataaaaccatctccttgagggttttctttttttccttaaaggctcagacatgacttygggtcaactagaaatagaatcctaccggagaaaattatacaaaggaaaaagttatttcctctcaaaattgaaaaggagaaggaaatgtaggatatcagaa

SEQ ID NO: 189232 - DNA, 201 bp, Homo sapiens
atgttcccacaaaagttataatctggttcttttttatggctgcatggtattccatggtgtgtatgtaccacattttctttatccaatctgttgttggtggraatataggttttcatgaaaagattccaagtttttgctattgtgaatagtgctgcagtgaacattcacgtgcacatgtctttatggtaaaatgatttatat

SEQ ID NO: 189233 - DNA, 201 bp, Homo sapiens
tgttcccacaaaagttataatctggttcttttttatggctgcatggtattccatggtgtgtatgtaccacattttctttatccaatctgttgttggtggamatataggttttcatgaaaagattccaagtttttgctattgtgaatagtgctgcagtgaacattcacgtgcacatgtctttatggtaaaatgatttatatt

SEQ ID NO: 189234 - DNA, 201 bp, Homo sapiens
atagaggctggatattaggcctttgtcagatgcgtagtttgcaaaaattttctcccattctggaggttgtctgtttactctgttgacagttttttttttgtttttttttttgctgtgcagaagctcttaagtgtaattagataccatttgtcaatttttgtttttatcatgattgtttttggtgtctttgtcattcaaaat

SEQ ID NO: 189235 - DNA, 201 bp, Homo sapiens
gtatccctggaacttctcttcatattgccaggtgcaggaggcctcatttgagagggaaagtgtagcagctaagagcttggactttggagacaaacaaattmgagttctttctctggattcatttccttgtgtgtagaacagggttaataatgcctgcctcataggaacgattttgtgaagatttaaaccatgtggtggatc

SEQ ID NO: 189236 - DNA, 201 bp, Homo sapiens
tctgcctgccttggcctcccaaagtgctgggataacaggcataagccaccgtgcccagcccagatttttcatatttacttctagtctttttttttttttttcatttttaatgaagaaagcatggcagatctccctaaagtctcccagccagtttccatctctgctgccctgcctagactgaggcagaccacatcatgttgt

SEQ ID NO: 189237 - DNA, 201 bp, Homo sapiens
tttaaataacttatttgggaaaagtagattctgtatctttttttgctgaagtatattttgcatgtctattaatatttacttttcaaaacctaaagataaamggcttttttttttttttttttttttttgagacatgatcttgccctgttgcccaggctggagtgctgtggtgtgatctcggcccactgcatcctccatctc

SEQ ID NO: 189238 - DNA, 201 bp, Homo sapiens
ttgggaggctgaggcaggtggatcacttgaagtcaggagttcgagaccagcctggccaacatggtgaaaccccatctctactaaaaatacaaaaaattagycgggcatggtggatgtgcctgtagtccagctgtttgggagtctgagacacaggaatagcttgaacccgggaggcgaaggtggcagtgaggtgagatcgcg

SEQ ID NO: 189239 - DNA, 201 bp, Homo sapiens
attaaaataataaaaacttcaatatctgcttattagcaagtgctcagtgacattcagtagtacaatagaacaatacagaaatgcaaatttaataaattgtstaaaaatttaatgtatggttttaatgaatgtttttatcattcatttaatttcgagttcagtattaacagttaaataaaaatataaaaacttgaatataga

SEQ ID NO: 189240 - DNA, 201 bp, Homo sapiens
tgaatctttgtaaaatctagcccgacttgtgtttttattttgatgtttgtattttcagttatttgttccatagcggcaaccaagaacatcctggagatatwctgctaaacacaactgtggaagttttgccttttaaggtatgactgctatttcctcttacctttccctaacaactaatactagtagacttagcttgaagct

SEQ ID NO: 189241 - DNA, 201 bp, Homo sapiens
cctccttcatgtatttctttcttatttctttacataagtatgaactcatggatatttatttaattctggggttatggtcctttattacagtaacttattttgttgtttaaattgtctcagaggtggccattaggagcttcctcaagttggcttctgagccttttgttgtgcccctatcatttttttcaaatttattgaggt

SEQ ID NO: 189242 - DNA, 201 bp, Homo sapiens
tcttctttgacccattggttgtttaggggcgagttgtttaatttccacacatttgtgtattttctgggtttacttttctgctattgacttctagtttcatyttgttgtagtcagagaagatacattgcatagttttagtcttcttaaatttgttggtgggcggcactggctcacacctgtaatcccaacactttgggaggc

SEQ ID NO: 189243 - DNA, 201 bp, Homo sapiens
ccctctgagatctgacaaatcataactatctcagagcagaggggtctccatggtaactgagcatgtgggctctgatgtttctccactgagtagggaagccrgccctccacttagcgggggacctgcaactcacttatctttttcctctttttctcccattcccccatcttctcttccctcttccctctctccactgtcaag

SEQ ID NO: 189244 - DNA, 201 bp, Homo sapiens
ggaaagtgaattttctttgactcttcgtcctaagtgagtgtgtgtgtatgtgtgtgtgtgtacacatatacatagatgacatgttatgtagacatttgacrtttatacatttaatcttattttactaaatttgagtctgattcctaacttactttttgaaaatgtttatttcagatggagaacaaagcaaaacctagatta

SEQ ID NO: 189245 - DNA, 201 bp, Homo sapiens
tggtggaagtcatatcaccccctgaaagctattatcctgacttgacaaacctaaaggagacatttggagactccaaagaaagagtaaggtgagcatgtgcygtttaaaatcctccacacttgtgagtgtaaatatttaatacatgtagtttttatttatcgaagctgaaaacattttagagttgaatttggtaaaatattc

SEQ ID NO: 189246 - DNA, 201 bp, Homo sapiens
ctggttgagaatgacatgtggtctataacccacaagcaaagcttcttgaagatgtaagagctttggtttttgcaaaatatacgtatttaaagacacatacrtacttatttgtttttcttcaattttctattttctgtgagaccttgattttttttttttaattcagatacattttaggaacgttaatgcctgcagttggct

SEQ ID NO: 189247 - DNA, 201 bp, Homo sapiens
aatacccttgaacaaagtgtgtatcttctcaaatcagtggttgcactagtcaataattagaaggtgttgttatttttaaaactataagcaaaattatgaargcctttaaaaaatctatcataataatgaaaaagaggttgtctcccaacagtgctgtccctcaaagaaaagactggttatgtggaaacagcacgtttggag

SEQ ID NO: 189248 - DNA, 201 bp, Homo sapiens
gttgtggcaaccagaacgtcttcagacattgctaaatgtcttccagagggacagaatcacccccagttgagaaacactggttgagaatgacatgtggtctrtaacccacaagcaaagcttcttgaagatgtaagagctttggtttttgcaaaatatacgtatttaaagacacatacatacttatttgtttttcttcaattt

SEQ ID NO: 189249 - DNA, 201 bp, Homo sapiens
attgttatttgtttggttttcctgaagtgctgagtttcttggaagtccttatagaaacaaaatttggcatagacttcttaaggaacagggcagtaatgatyggtcccctttcccactgacctcaggggcaagtctgtgggcttatgcaaggattctggtgatttacatcttccttagtgtgtagaaaaccaagctcagaca

SEQ ID NO: 189250 - DNA, 201 bp, Homo sapiens
catatatatctagttatgtgatgggataaattggtttatttcattatagaaaagacttgaatgtcctatgtatgtaacactattaaataacagtctttaaycttgaagacagtgaatacagagagagtcatatgagattaaatctttcacactgtatttaccaggcaaaatcttcctgctctcagggtagatatttaacgt

SEQ ID NO: 189251 - DNA, 201 bp, Homo sapiens
acctttcgcatcttagtattcttacctcaagaatcatggtggtagatccatggtctttacgctcccttctggcattagaattcttttttttttttttttttgagatgagatggagtcttgctgtgttgcccaggctggtgtgcagtggcgcgatcttgactcactgcaacctccgcctcctggatttaagcaattctcctg

SEQ ID NO: 189252 - DNA, 201 bp, Homo sapiens
atagatacattttttttctttcccagacagatattgattatgtacatggtgttgtagccaacctggagaaagagtaagttcttcttaattataaacatacraatattttggttactattatctcttgggtttcttgctaaaagaaaatgccttccttgatagttcatttctctgtggagttcattgtttattagatcacct

SEQ ID NO: 189253 - DNA, 201 bp, Homo sapiens
ttcagcagtagggcaggtctagtggtgatgaactcactcagcttttgtttatctgggaaagtcttaatttctttctttctttctttctttcttttttttttgagatggagtcttgctctgttccccaggctggagtgcagtggcacaatcccagctcactgcaacctccaccttgctgcgcccagcctgaacattcttttt

SEQ ID NO: 189254 - DNA, 201 bp, Homo sapiens
cttcagcagtagggcaggtctagtggtgatgaactcactcagcttttgtttatctgggaaagtcttaatttctttctttctttctttctttcttttttttttgagatggagtcttgctctgttccccaggctggagtgcagtggcacaatcccagctcactgcaacctccaccttgctgcgcccagcctgaacattctttt

SEQ ID NO: 189255 - DNA, 201 bp, Homo sapiens
aaattgtaatattgttttttggtgaaatatattattagtagtatattttccaaaatgattttattgtagtatgaactgataagtgagtcccgtgtccaagwgactgtatttattactcttaaacacgctattccaaatgatattactactataaacaaagaatattaccggtctcagcaatcagtgatctttataaaagta

SEQ ID NO: 189256 - DNA, 201 bp, Homo sapiens
gcccactgcatcctccatctccaggctcactgcagcctctgggctcaagcaatcctcccaccttaacctcttgactagctgggactacaggtgtgtgccaycacaccaggctaattttttaaaaatgtatttttagtagaggtgaggtctcacagtgttgccaaggctgctctcaaactcctgagctcaagcaatcctccc

SEQ ID NO: 189257 - DNA, 201 bp, Homo sapiens
ccttcagcagtagggcaggtctagtggtgatgaactcactcagcttttgtttatctgggaaagtcttaatttctttctttctttctttctttcttttttttttgagatggagtcttgctctgttccccaggctggagtgcagtggcacaatcccagctcactgcaacctccaccttgctgcgcccagcctgaacattcttt

SEQ ID NO: 189258 - DNA, 201 bp, Homo sapiens
gtttttattttgtatttaaggcctttttggaattgagaattaacagctttatcataccttttatgattttgtatttcagattcatattaaaaaagccaccractgatcatctgagaaaccaacacattttttcctgtgaatttgttaattaaagatagttaagcatgtatcttttttttatttctacttgaacactacctc

SEQ ID NO: 189259 - DNA, 201 bp, Homo sapiens
aaaatgttccttcagcagtagggcaggtctagtggtgatgaactcactcagcttttgtttatctgggaaagtcttaatttctttctttctttctttctttcttttttttttgagatggagtcttgctctgttccccaggctggagtgcagtggcacaatcccagctcactgcaacctccaccttgctgcgcccagcctgaa

SEQ ID NO: 189260 - DNA, 201 bp, Homo sapiens
cacacagccctcttttacagtagaggatcatgctgtatgtactgtctgataaccttttttgctgtcacttaacatactgttgataggtaccttgctatgcsagtaaatacagattggtgtgatttttaatcccttcttgaagtcctgttattcagatatcataatcaaccttcttgttggtcatttagattgtttctaatt

SEQ ID NO: 189261 - DNA, 201 bp, Homo sapiens
ggtcctttgcctattttttcagtgttttttcttactcttgagctgtttgagttccttatatattttggatattaactgtttatcagatgtgcagcatgcaratattttctcctaacccataggttgtcaggcatgctgttaattatttcctttgccatgtagaagagttttagttagatgtgatcctatttgtctattttt

SEQ ID NO: 189262 - DNA, 201 bp, Homo sapiens
agttaaagactctggagccctttgagccttttctggggccatgtcctctctgcttgtgggtgtaatctcctaattgaagttgactggtttctagtcaggakctctgcagcactgtggccttgttggtattgtagtaagctgcagtactggagctccacctagtttctgtctctggtactgcagcctctggtgccaactgat

SEQ ID NO: 189263 - DNA, 201 bp, Homo sapiens
  misc_feature (1)...(201): n = A,T,C or G
gcttcctcctgtccatgtttgtgtctttcatgaacttggacatttttgatgggcactggtcagttattttgtaaaatgtctcagtttggatttatctgatnattatattttgactatgcatttttggcaagaataatatgacttgcctttttaaaaaggatcctgctgtctgctttggtaagggcaaaagaaaggagacta

SEQ ID NO: 189264 - DNA, 201 bp, Homo sapiens
tcagatggactctggagaaatctttgagctatttgaagcaattcgtgctcttaaaccttatttataatacagaacatacatagtttcctagtggatacttkaggagtatctggcctgtttcttctctgagaaatcctggtcagagtaagatgagggcaagtgatctctctttctgtgctcttctttatctgataattaaat

SEQ ID NO: 189265 - DNA, 201 bp, Homo sapiens
gttattttgtggagcattgccccagtttggatttttctgatgtttctttacggttaagttgaggttatgcattgttggcaagaacaaccacagaactgatrttgtgctcttctcggcatgtcacatgcttgaagtcgagagataagacattagtttttaagatatgtttagtgtttttaagttttagttgtaaaatacagt

SEQ ID NO: 189266 - DNA, 201 bp, Homo sapiens
agtctttgtactccatgagttagcattttctaggaatgctcctcatcctagttgttacgctggtaattttttttttttttgagacagggtcttgctctgtygcccaggctggagtacagtggtgtgatcacagctcactgcagcctctacctcccaggctcaagtgatcctcccaccccagcctcccaagtagctaggact

SEQ ID NO: 189267 - DNA, 201 bp, Homo sapiens
cattctgtttaaaaaaaaccacaaaaattttaaaaaaccccaacacattcttagttagaggaaatcatggaatctagcaatggcagagtatctgttttccsacaattagttgaacatataaattgttttaaacaaatcattttttagagatctcagtccttatgcacattttcactgtgacttatagaaatttttattgta

SEQ ID NO: 189268 - DNA, 201 bp, Homo sapiens
tacctgagactgggcaatttacaaaagaaagaggtttaattggacttacagttccatgtggctagggaggcctcacaatcatggcagaaggcaaggaggarcaagtcacatcttaacgtggatggcagcaggcagagagcaagcttgtgcaggggaactcctctttttaaaaccatcagatcttgtaagacttattcacta

SEQ ID NO: 189269 - DNA, 201 bp, Homo sapiens
tgaacccgggaggcagaggttgcggtgagccaagactgcgccattgcactccagcctgggcaacaggagcaaaactccatctcaaaataaaataaaataarataaaataaaataaaataaaataaaataaaataaaataaaataaaaataaaataaaaagccagggagaacctcctgatgtgattcctctagcaggcttta

SEQ ID NO: 189270 - DNA, 201 bp, Homo sapiens
gttaatgatttaaactgcatgcattgacagattactccttaggcaaaagtatttaagaagggataagtagaaattctgattggaatattaaaacatttttwaaaaattaattatgtttagactgttgaaccgtgtttatataattttaggataatggatttatttgcttttttttttttttaagagaaactacttgaagta

SEQ ID NO: 189271 - DNA, 201 bp, Homo sapiens
gatttgagagactcaattctaatatacccataaaccacgtgctctgatttttattttgaaagtgtggtttctataagctttgatgttgctaaactaatggkttttttttgttgttttttcattcattcatgggtcccttacatgtacctatcttgcacctagccctatattatatgctattaataagaaaagcaataagta

SEQ ID NO: 189272 - DNA, 201 bp, Homo sapiens
ttttgtgaatgaaaccttgagacctagataagtggcatgccccaaatcatgtaagtaatgacagagctgggtcaagggtccaggtcttttgacccttatatattgtattctgtcaattttcttattaaaaaaatttcctattattgtgcaataggaaaactggagagagtgaagattatgttactcaggaaccattgtgtg

SEQ ID NO: 189273 - DNA, 201 bp, Homo sapiens
cgtcatctttaacctcctacaatacacttgcattccattcgtcctgtgcaattttatttaatatgtggttaggttctaaaatgagcctgtgaggtgaaaamatctatagtagaaattaaaaccacaaaaaccctctaaatcctccataaatttgggtacatgaacttttggacgatttcatccattccttcactcttctgt

SEQ ID NO: 189274 - DNA, 201 bp, Homo sapiens
tatcatttaatctcataatctgtaaggtatttcctttttttcatagaataggttgaaactcagagaaatgactttagagtatgcagttcagtagctacagrggcaaaccttgaacctaggttttatgattccaagtagaaaaatctttcttcatatcgtgcagcatctgtcactaatgctattcacaatagtttggatgtt

SEQ ID NO: 189275 - DNA, 201 bp, Homo sapiens
gtgaaaacatctatagtagaaattaaaaccacaaaaaccctctaaatcctccataaatttgggtacatgaacttttggacgatttcatccattccttcacycttctgtagtccatgtttttgtgtggcctctaattcttcagttgcttcccctagaatctcgagggtgctgtcgccacatccttgacagtggcctgggaaa

SEQ ID NO: 189276 - DNA, 201 bp, Homo sapiens
tgcagatctgataaatgtttatttctaactgattgaagtgctcttgattcagttctcagtgtcagtgtaatattaatatggtgtaataatagcagtttttyattacatagttttatcatttaatctcataatctgtaaggtatttcctttttttcatagaataggttgaaactcagagaaatgactttagagtatgcagtt

SEQ ID NO: 189277 - DNA, 201 bp, Homo sapiens
gaaaccccttataaaaccatgagatcttataagccttattcactatcacaagaacagtatgggggaaactgcccccatgattcagttatctccacagggtmcctcccagaacacatgggaattatgggagctacaattcgagatgagacttgggtggggacacgccaaaccatatcaatagggctctggctggctcaaaaa

SEQ ID NO: 189278 - DNA, 201 bp, Homo sapiens
actctaattgaatatttgaatatgcttttaaaaacgctttttaaaaaatgtgatgagtaaagcttaggtaatatattctatctggtagtttaatgtaaatygaactcacttctgtcctgcaattacaaaccaggaatagtaatatttgttgtcaataggatgttacacccgtagatctttaagaacgtgtgcctatttcta

SEQ ID NO: 189279 - DNA, 201 bp, Homo sapiens
aatttacaaaagaaagaggtttaattggacttacagttccatgtggctagggaggcctcacaatcatggcagaaggcaaggaggagcaagtcacatcttaacgtggatggcagcaggcagagagcaagcttgtgcaggggaactcctctttttaaaaccatcagatcttgtaagacttattcactatcacgagaacagcac

SEQ ID NO: 189280 - DNA, 201 bp, Homo sapiens
gagatttaattggacttaacagttccacgtggctggggcggcctcacaatcatggcggaaggcaaggaggagcaagtcacatcttacgtggatggcagcargcaaagagagagcaagcttgtgcaagggaactcctccttttaaaaccatcagatctcgtgaggcttattcactgtcaggagaacagcacagcaaagactt

SEQ ID NO: 189281 - DNA, 201 bp, Homo sapiens
tctcgatctcctgacctcgtgatccacccgcctcggcctcccaaagtgctgggattataggcatgagccaccacacccagcccctggcattagaattctgkgaattataagtattttttagtatctccaaaaaattgttgcatgattaagactaagttgtttttaccatatttaaaatacttctgtattgatacatagcgt

SEQ ID NO: 189282 - DNA, 201 bp, Homo sapiens
agtcatgtagaatagtttataagccagccctttcagagagaaaaaccaccacacaaaactttcttttctagtaaattacaaaaaaaaaaaaaaaaaaaaaatttattacctgctaaatctgattttaagagagtcatattaagttaaattggctgggtgtgttggctcacacctataatcccagcactttgggaggccgag

SEQ ID NO: 189283 - DNA, 201 bp, Homo sapiens
tatttttagtagagacagggtttcaccgtgttagccaggatggtctcgatctcctgacctcgtgatccacccgcctcggcctcccaaagtgctgggattayaggcatgagccaccacacccagcccctggcattagaattctgggaattataagtattttttagtatctccaaaaaattgttgcatgattaagactaagtt

SEQ ID NO: 189284 - DNA, 201 bp, Homo sapiens
aagtcatgtagaatagtttataagccagccctttcagagagaaaaaccaccacacaaaactttcttttctagtaaattacaaaaaaaaaaaaaaaaaaaaaatttattacctgctaaatctgattttaagagagtcatattaagttaaattggctgggtgtgttggctcacacctataatcccagcactttgggaggccga

SEQ ID NO: 189285 - DNA, 201 bp, Homo sapiens
ttttgttttattttagagtgaaggtttggaaataagcaaagaaaccaaagacaaacgattagaagatggctatttcagaataggtaatatctactttagtwaaatggcctttatttttctggacttactcctaaagtacttttcagttcttttcagatgttaagcaacttgaggattacaattaccagtgtcctccaggtt

SEQ ID NO: 189286 - DNA, 201 bp, Homo sapiens
aaagtcatgtagaatagtttataagccagccctttcagagagaaaaaccaccacacaaaactttcttttctagtaaattacaaaaaaaaaaaaaaaaaaaaaatttattacctgctaaatctgattttaagagagtcatattaagttaaattggctgggtgtgttggctcacacctataatcccagcactttgggaggccg

SEQ ID NO: 189287 - DNA, 201 bp, Homo sapiens
cacagattgggctgtctttctcgctccttccgtgctgtgtgtcatgctcttgttgatgctccctgatagagagtctgcctgcactgcctcctactggatgsgtttagctcctctccagcctcagctcacattgacaggccagaatctgtgcttcgggccccttccctcctccccagcgtcacatctgtgttgagatgtcca

SEQ ID NO: 189288 - DNA, 201 bp, Homo sapiens
gaaagtcatgtagaatagtttataagccagccctttcagagagaaaaaccaccacacaaaactttcttttctagtaaattacaaaaaaaaaaaaaaaaaaaaaatttattacctgctaaatctgattttaagagagtcatattaagttaaattggctgggtgtgttggctcacacctataatcccagcactttgggaggcc

SEQ ID NO: 189289 - DNA, 201 bp, Homo sapiens
acagtatgtggtcttttgtgactggcttttttcacttagtgtaatctatgcaatgttcacccgtgttgtggcagatcacttcacagtggggttgcttcacstacacagaaaggatgtgtgcttcctcccttcttacagctgaataatagtcccttgtatggatgtaccacactgtttatccatccatccgctggtgaactt

SEQ ID NO: 189290 - DNA, 201 bp, Homo sapiens
tgaaagtcatgtagaatagtttataagccagccctttcagagagaaaaaccaccacacaaaactttcttttctagtaaattacaaaaaaaaaaaaaaaaaaaaaatttattacctgctaaatctgattttaagagagtcatattaagttaaattggctgggtgtgttggctcacacctataatcccagcactttgggaggc

SEQ ID NO: 189291 - DNA, 201 bp, Homo sapiens
tgtgccagagtccaatctaggatcccatggtgcgtttagttgtcatgtcctcctactttcttccagtatgcaaaatttcctccatctttttttttttttttgagatggagtctcgctatgttgcccaggctgcagtgcagtggcacgatctcggttcactgtaacctccacctcccacgttcaagcgattctcctatctcg

SEQ ID NO: 189292 - DNA, 201 bp, Homo sapiens
taaatacctgtttcttattagactttcacctgttagttttagcatgcatttttgatgcttgcctgagtcagttattgctatgatggttgcaaagtggtggtttttttttttttttttttttttttgagatggaattccactcttgttgcccaggctggagtgcaatggcgccatcttggctcactgcagcctctgcctccc

SEQ ID NO: 189293 - DNA, 201 bp, Homo sapiens
ctgaggcgggaggatcacttgagcccaggagttcaagaccagcctgggcaatatagtgagaccctgtctctacaaaaaaagaaaaaaaccacaaaaattasctgagtgtagtggcatgtacctgtacttcagctactctggaggctgaggtgagatgatcacttgagccaagaaggttgaggctgtggtgagccttgatca

SEQ ID NO: 189294 - DNA, 201 bp, Homo sapiens
cagtaatgaaaggtaatctttcagtgtgctgattaagatctagaagctcaataaaccctcttctcaggggagcttcttggaatcaaggtaagtaacttggrtttccttatcggaaagctagggttaatgataaggtagaaatgcagcactccagatgtcctcctgtcacctgccttaagggatgtttgttcccaatgtcag

SEQ ID NO: 189295 - DNA, 201 bp, Homo sapiens; identical to SEQ ID NO: 32888

SEQ ID NO: 189296 - DNA, 201 bp, Homo sapiens; identical to SEQ ID NO: 32889

SEQ ID NO: 189297 - DNA, 201 bp, Homo sapiens
aattagccaggtgtggtggcacatgcctgtaatcccagctgctcgggaggctgaggtgggaggatcatttgaacctgggaagcagaggttgcagtgagccragatcgtgccatcgcactccagcttgggtgacagagtgagactctatctcaaagaaaaaaaaaagaaaactagtttttgctgcagacttaatattgtttc

SEQ ID NO: 189298 - DNA, 201 bp, Homo sapiens
cagtggaataaatttcattggcactggtgaagaatgtgcatcttttgaaaatgagattaaattattcaaaatgagattaaaatttaatttttcgtgtataygtgtttctgtgatgacttatgtgtggacttcagatggactctggagaaatctttgagctatttgaagcaattcgtgctcttaaaccttatttataataca

SEQ ID NO: 189299 - DNA, 201 bp, Homo sapiens
tgacttatgtgtggacttcagatggactctggagaaatctttgagctatttgaagcaattcgtgctcttaaaccttatttataatacagaacatacatagyttcctagtggatactttaggagtatctggcctgtttcttctctgagaaatcctggtcagagtaagatgagggcaagtgatctctctttctgtgctcttct

SEQ ID NO: 189300 - DNA, 201 bp, Homo sapiens
tctggagctagttgattagcccagcaatttggttgaaatgataaatttgacagagtatgactattcttagtcaatagttttacaaatgctaggttattttyggtacaccagggagaaatttacagccattttatgtttttgagcatttatgttcattttacaaaatttaggactttcttccttttttttttttgagacagt

SEQ ID NO: 189301 - DNA, 201 bp, Homo sapiens
ttccttggcccagtgcccatgagcaaatttcattcaaaaacaggaataaccttttgtcataaaattttggcaccagcttggtatactaaattactgcaaarataactgagtaccagaagtaaaaatctctgcaggtgggcttaggagtactcttgggtccctggttcctcagttgccaactctggtttcatgaagaaagac

SEQ ID NO: 189302 - DNA, 201 bp, Homo sapiens
acttttaaccatgcaactgaactagagttaggtttagattcagacatactttgcatgtctgacctagtttcctcccttccccacaccctgagaacgcataygcatacttactagtttgttttcagagtatcaaaaacagagtattatactcacacccagaaagtattttagatctgtcaccatatatcgataattagtcat

SEQ ID NO: 189303 - DNA, 201 bp, Homo sapiens
aattatttttctaatgaaatgagctcatcaggtgacagtattcaatgtcacattggttaaaatgttccaagttttgcaatatttttaagatctgaatcccmtgcctaattcaatattcaataataatttttggtagcacctacctgctacccaagtccagcaccaagtatggacaaacttctatgaaataagtttattaat

SEQ ID NO: 189304 - DNA, 201 bp, Homo sapiens
agtgctgggattacaggcgtgaaccactgtgcctggtcacaaagttttcatatgcccttacccagtgtccctacatgaccatagtatagcgatcaaaaacyaggaagttaacgttgatgctacactgttcactaaccttagctcttactccgattttgtcatgtgtttcattgttgctgtttttctctttcaggatccaaa

SEQ ID NO: 189305 - DNA, 201 bp, Homo sapiens
cagtgtcctccaggttttatgtgtgctgtgttgtagtacttgcttttattatttgacccaagtaggatttcatatcacagattgggctgtctttctcgctscttccgtgctgtgtgtcatgctcttgttgatgctccctgatagagagtctgcctgcactgcctcctactggatgggtttagctcctctccagcctcagct

SEQ ID NO: 189306 - DNA, 201 bp, Homo sapiens
ttctttgatttcttttagaaatgttttgtagaaaaattttccacctccccagttaggtttattcctaagtattttatcttttttgatactacagtaaatgrcattgttttcttgattttttttttggattggtcattgttagtatacaaaaatacaactatttttgtgtgttgattttgtatcctgaaactttgctgaaat

SEQ ID NO: 189307 - DNA, 201 bp, Homo sapiens
agaagctctagcgttgtcaactttgcttgcttagagtcttgtgtagaaaagctgactctgaggtaaggtcattttcttgaatctttgtaaaatctagcccracttgtgtttttattttgatgtttgtattttcagttatttgttccatagcggcaaccaagaacatcctggagatattctgctaaacacaactgtggaagt

SEQ ID NO: 189308 - DNA, 201 bp, Homo sapiens
atgggaccatgtgttttcatggtatatggctggagtagagtggtgattgtctgacgttttctgtcctgctgggttgccctttactgagtcctttgcatagrgttagcaggcttttcttggtccttttttttttgtgctcctgttggtattttcaggttgccgacttttctagttcccattctaggatatatgaggcagaaa

SEQ ID NO: 189309 - DNA, 201 bp, Homo sapiens
gcagggaccttacctatgttatttaccattgtatgcttaacacctagaatagtgccttgcagtaaatatgtgcaaaacaaatagagcaaatatcttttttkggggggacggagtctcatagagcaaatatctttttgagtgcttgagaactcttcttgcctaaaatggaagagagggttgtgtcacgagaccttggggcag

SEQ ID NO: 189310 - DNA, 201 bp, Homo sapiens
agcagctaagagcttggactttggagacaaacaaattcgagttctttctctggattcatttccttgtgtgtagaacagggttaataatgcctgcctcatakgaacgattttgtgaagatttaaaccatgtggtggatcaggcacataggaaacatttcataagttgtagtggctgtcattattagtactatgcccctgtga

SEQ ID NO: 189311 - DNA, 201 bp, Homo sapiens
ctcaagtgtgttgttctgagtgaaagttgcccccgtccagttactcaagtcacccttgattcctccccttctcttgtctgccagctgaagccctatttgcragggtctccatcatccactcatctccacctcttcaaacaccctacagcctcattcaaaccaccatcttttccttcagttagtacattaacttcctaacca

SEQ ID NO: 189312 - DNA, 201 bp, Homo sapiens
cgatataaggaaaattaatactaagtctaggacttggaatacgccgtcatcattctggcttaccaaaattgtcgacctgtgttttttgagtgccttcggcrtgccaggcactgtttgtggtctgggatgcattagcattagaacatgttagaggaatatccttgccgtagtgtaggagaggagggaggagagagctgcaga

SEQ ID NO: 189313 - DNA, 201 bp, Homo sapiens
agcataaacgcataaagaatggaagtagacaaaagttttaatgttcatctggtagtcatttcagaaggagtgaacaaagagagtgaaaagagggaattacyagcttatagaagtaaatttctttgagttgaagaaaccttcaggttttcaggttaaagggcccattcagggtagagcaagagggctgagcaaagactctca

SEQ ID NO: 189314 - DNA, 201 bp, Homo sapiens
tgtcctcgacatttttgtggaatgccccttaatttgaatttgcctgatgatttatctggttagattgaggcaccgtcggccctctgtatacacagattcarccaaccacagatggaaaatgtggttaggtccacagtgtttgtgtctgtactgaacatatacaaactggttttttttggtcattattccctaaaaaacaca

SEQ ID NO: 189315 - DNA, 201 bp, Homo sapiens
tctcctgcctcagcctcccgagtagctgggactacaggcgcccaccaccgctcctggctaattttttgtatttttagtagagacagggtttcaccgtgttagccaggatggtctcgatctcctgacctcgtgatccgcccacctcggcctcccaaagtgctgggattacaggcgtgagccaccgcacccggccatctaggc

SEQ ID NO: 189316 - DNA, 201 bp, Homo sapiens
agagctagactccatcttaaaaaataaaaataaataaataaatccaacatctagttcatctagttgtactcacaggcagtttctgttacctgcttggtttyttttccccgtttggtgtattggttgtatttttctgtttctttgcacatctcataatttttttattggaaactggacattttagagaaatgtattttagca

SEQ ID NO: 189317 - DNA, 201 bp, Homo sapiens
tctactaaaaatagaaaaattagccgggcatggtggcgggcgcctgtagtcccagctactcgggaggctgaggcaggagaatggtgtgaacccgggaggcrgagcttgcagtgagctgagatcgcgccactgcactccagcctgggtgacagagcgagactccgtctcaaaaaaagaacaacaacaacaacaaaaaaggat

SEQ ID NO: 189318 - DNA, 201 bp, Homo sapiens
caaaattattttaataccataaaaaattttgcacttcaactttcttctgaggaatggatgattctagagttttcccagctgggcttcattggtaagaaaaktgtcacacttacctacttttcataaataactgtgactctcagaatctaaaaccaagtagctacttgtcctaaagatgtctttttttcctatggaaatggg

SEQ ID NO: 189319 - DNA, 201 bp, Homo sapiens
ttgggccaggtgcggtggctcacgtctgtaatcccagcactttgggaggctgaggcgggcggatcacaaggtcaggagatagagaccatcctggctaacayggtgaaacaccatctctactaaaaatagaaaaattagccgggcatggtggcgggcgcctgtagtcccagctactcgggaggctgaggcaggagaatggtg

SEQ ID NO: 189320 - DNA, 201 bp, Homo sapiens
gatccggggggtgcggagggggagggacagctgcctgtgggacccgggggctgcgcgggagtcggcgctttcgcgggggccgcggggcaggtgggcggggycggacggtccgaggcgcaggggcaggggctgctcccgaggggaccggccgtgcagccttcgcagggaattttcacacaaagtgaagggctgcggggcccg

SEQ ID NO: 189321 - DNA, 201 bp, Homo sapiens
cagaatggtctcaatctcgtgacctcatgatcccccaacctcagcctcccaaagtgctaggattacagacgtgagccaccaagccggctgctaatttttgkatttttttttcttttttttcttttgtgagacggagtctcgctccgtggcctaggctggagtgcagtggcgcgatctcggctcactgcaagctccgcctcc

SEQ ID NO: 189322 - DNA, 201 bp, Homo sapiens
tggctttgaaagtgtccttttcatcttaaatggagatctcattcaccagagtgtgaaactaggaaagaaaattctttagttctagttcttattaatttttrctgctggttttataaaatcagcaacttctgtaaggtaattcttgtatattaattatacttctgtgtttcagataataccctaaagctgttaaaggagtta

SEQ ID NO: 189323 - DNA, 201 bp, Homo sapiens
tgtgtggcctctaattcttcagttgcttcccctagaatctcgagggtgctgtcgccacatccttgacagtggcctgggaaacccttcgaatcatttatacrttgtcccaaagggttatcagcgtgcttgggcccttcggccagagtccttccattgccactggagtgacaggctgagttccagacactgcctcggtggttt

SEQ ID NO: 189324 - DNA, 201 bp, Homo sapiens
aataagcattagtttgacttcatgaccttctactccctagaatagttggatcctcatacctgctaggttttaggatactaccttctggtgtctgtaggctmtcattgcattctgtttaaaaaaaaccacaaaaattttaaaaaaccccaacacattcttagttagaggaaatcatggaatctagcaatggcagagtatctg

SEQ ID NO: 189325 - DNA, 201 bp, Homo sapiens
tgaacccgggaggtggagcttgcagtgagccgagatagcgccactgcactccagcctgggcgacacagtgagactctgtctcaaaaaaaaaaaaaaaaaaattgttgagatattatggggcctaacatgtggtctgtcttggagaatgttccatatgctcttgagaagaatgtgtattctgctgttgttgggatcagtgtt

SEQ ID NO: 189326 - DNA, 201 bp, Homo sapiens
ttcttaaagaaaggctggagtaaatgcttgatttcatgctcttactaatttttaaagttggtgccttagcaatctacagttgtggctgtttttaaagtatsattatgttacctattgggtactatgttcaccatttggatggtgggctcaatagaagcccaaaccccagcattatgcaatctatccatgtaacagacctgc

SEQ ID NO: 189327 - DNA, 201 bp, Homo sapiens
tagattaccttgaaaaacagttcttaaagaaaggctggagtaaatgcttgatttcatgctcttactaatttttaaagttggtgccttagcaatctacagtkgtggctgtttttaaagtatcattatgttacctattgggtactatgttcaccatttggatggtgggctcaatagaagcccaaaccccagcattatgcaatc

SEQ ID NO: 189328 - DNA, 201 bp, Homo sapiens
gaggcagaggttacagtgagccgagattgtaccactgcactccagtgtgggcgacagagggaaactccatctcaaaaataaaaaataaaaataaaaaaagagcacattacatcaggcagtcccacctccagcgaggctgagagtaatcagtgggttccatatgcctgcctcattgctgcattataaatttagctctccagc

SEQ ID NO: 189329 - DNA, 201 bp, Homo sapiens
ctgtgtcagggacttctagtattatgttgaatagaagttgtgagagtgtgcttccctgtcttgttccagatattcaaggaaaagctttaatttttcaccaygcagtgtaacattagctgttggtctctcatatatatggctttcttgtgttgaggtgcattccttctgtacctgagttagtgagaactttttcaccatgaa

SEQ ID NO: 189330 - DNA, 201 bp, Homo sapiens
cagtagagtcaggggttactttgtgattgtcatagacatacccctcaggggaaagggagatgctgtggcttggaatggagtttccactgacagcatcatayggtttcataaagtgctttattgcaaaaaactctgagttgaacacggtgccttctggaaaactgatagatgatgcaggcacttcacaggtggtgcttgagt

SEQ ID NO: 189331 - DNA, 201 bp, Homo sapiens
ccttacctatgttatttaccattgtatgcttaacacctagaatagtgccttgcagtaaatatgtgcaaaacaaatagagcaaatatctttttttggggggrcggagtctcatagagcaaatatctttttgagtgcttgagaactcttcttgcctaaaatggaagagagggttgtgtcacgagaccttggggcagtccctta

SEQ ID NO: 189332 - DNA, 201 bp, Homo sapiens
cccggcctcaaatgatcctgctgcctctgcctttcaaagagcaggggttacaggtttgagccactggtccactggtgtcagtgagcttttttttttttttkggagacagggtcttcctctcttgccaaggctggagtgcagtggtgcaaacacagttcacagctcgctgcatccttgacctgggtcatatgatcctcccac

SEQ ID NO: 189333 - DNA, 201 bp, Homo sapiens
tttgtctttttgacagttagccatcctgacagatgtgatgatatctgattgtggttttaatttgcatttccctaatgattagcagtgttgaggatttttcrtatatctgttggccatttgtatgtcatcttttgggaaatgtctgttcaggtcctttgcctattttttcagtgttttttcttactcttgagctgtttgagt

SEQ ID NO: 189334 - DNA, 201 bp, Homo sapiens
ccctttctatttccttttgtgtatattcaatagatactcattttgtagttaccattgcaattacatatcttaaagttataacagtctatttattacttcartgacaaataaaatctctactcttttacatctctgtctcccctgcactctattttaccaatgacaccagtgaccgctttttatattgcatatacattaact

SEQ ID NO: 189335 - DNA, 201 bp, Homo sapiens
tcttactatcccaatatagttgcttatgctcaatcccagtatatatgtacagtagtttcagaattctaacccatacacaaatgaaaagtaaatttactagrgttcaatatttgtgcacagttctttttgtatttagtcttgtaatatacagatgctattttctaaagttacttaggttacattttagtcacttcctcttcc

SEQ ID NO: 189336 - DNA, 201 bp, Homo sapiens
atttacaaaagaaagaggtttaattggacttacagttccatgtggctagggaggcctcacaatcatggcagaaggcaaggaggagcaagtcacatcttaaygtggatggcagcaggcagagagcaagcttgtgcaggggaactcctctttttaaaaccatcagatcttgtaagacttattcactatcacgagaacagcaca

SEQ ID NO: 189337 - DNA, 201 bp, Homo sapiens
ttctaatttcataattattgctgctttttgtgtggatttgaaccaccatctggggtaacttcctttcagcctgaagaatttcccttagtgtttcttataargcatgtctgctaacaatgaattccctcagtttttgtttatttaggtatgtctttatttcacctttatttttgaaagatagcttttctggacataggattc

SEQ ID NO: 189338 - DNA, 201 bp, Homo sapiens
ttcactacttttgagtatttttagtagtctctcaacagaatcagctttagatttatactagcttaattttagtaatatataggagtgttgctcctatgtargtctgttcctttttacccttttggggggtattgttgtacttattacatctgttaatgttgcaaaccaaacaatatattgttataattattatttttatgt

SEQ ID NO: 189339 - DNA, 201 bp, Homo sapiens
cctatgtgaccagcccgcagtaatagcctttgacattgagtctccaatgagctttcgtggtagacaacacaacacattgcacgtgttgtcagcactcgctrctgtgggaaggaagtgtgtcctgagtcactgcatacctggtttcttccaaacttctctccgtgtgtcttttccctgtgctgcaactcaatggtgagtcct

SEQ ID NO: 189340 - DNA, 201 bp, Homo sapiens
catgattgattccttcagcaaaaatgtatttaaacagttttaaacagcttgagatataatttacatactatacaattcatccatttaaagtgtacaatcartcggtttttggtatattcacagatatgtatccatcaccacagtcaattttagagcatttttatcacctcaaaaagaaatcctataccctttagctattac

SEQ ID NO: 189341 - DNA, 201 bp, Homo sapiens
gggtcacgtatcctataagaaacatcgtgactcaggcaagagatgtggtgggccatgtgctctaccctattttgtcttcaaaacattcttccagggagcawtttgtcacatactcggggttcaagcggaaatggcaaacatggcttcctatgtttgctaatttgtctcacagtactacatatgtgtctccctcaaaaaatg

SEQ ID NO: 189342 - DNA, 201 bp, Homo sapiens
gggattacaggtgcccgccaccacggctggctaatttttgtacttttagtagagatggggttttgccatgttagccaggctggtctcaaactgctgacctyaggtaatccacctcccttggccttccaaagtgctgggattacacgcatgagccaccgcgcccagccaacatgtaatagacttttaaatgaattttaaata

SEQ ID NO: 189343 - DNA, 201 bp, Homo sapiens; identical to SEQ ID NO: 32886

SEQ ID NO: 189344 - DNA, 201 bp, Homo sapiens
cgagtgtcaaattcaggaaatttaacattggcacaatcatacccattctgtagtctgtgttctgttatttttccagtaatgttcttgacagcatttatttmttctggtccaggatccagtccaggacagcgctttgcatttagtttctcttactcctggtcgtttcctcagcctttgtctttgatgaccttgacacgtctt

SEQ ID NO: 189345 - DNA, 201 bp, Homo sapiens
gcaagtcattgtgtctgcctgcactcaaggggcagaggttgtggaagtctgtgaataccagaaggacgagggtcactggggtcactgcagagtccgcttgygacagtgtcttagatttataaaacagtctgagggactcatatggtaattgctagacagaatgagttatattctttttttttgttttaaaaaaagcccaga

SEQ ID NO: 189346 - DNA, 201 bp, Homo sapiens
atgctggtgggaatgggatgaaagtccaaagcatccatcagtacccagcagggagggattcctccttccagctgtgcagggttgggaggtcagtttcccgwaagtcctgtgctgatgccacacttgctaagaggggagaagggaccctgctactgcttctcctgtggcctccactcacacctcaccaggaggctcattact

SEQ ID NO: 189347 - DNA, 201 bp, Homo sapiens
ggtaatactgaagcaagaaagatcctgggcaacgtgaggagatcatgttggagagttaagtaggtagtcattgaagggtttccatttagaaatgtaaggtrcagaggataatgaaggggaaaatgaaaaggcatgggtaacagtttcgtgttcctggtcaggagatgaataaaaggagcgttgatactgggatctgtgtaa

SEQ ID NO: 189348 - DNA, 201 bp, Homo sapiens
ttttctaatgatgtatgctcaagaaaagggcatatattacattcaggtaagtgtagtttttcctttgtttttcatgcttgtaaagaaaaagtgttatcaarggtatgttttcattaaaacaggaagttttgaaagtgcaaaccctctgagatctgacaaatcataactatctcagagcagaggggtctccatggtaactga

SEQ ID NO: 189349 - DNA, 201 bp, Homo sapiens
ctcagcctcctgagtagctgggattacaggtgcccgccaccacggctggctaatttttgtacttttagtagagatggggttttgccatgttagccaggctkgtctcaaactgctgacctcaggtaatccacctcccttggccttccaaagtgctgggattacacgcatgagccaccgcgcccagccaacatgtaatagact

SEQ ID NO: 189350 - DNA, 201 bp, Homo sapiens
tccgcctcccgggttcaagcgattctcctgcctcagcctcctgagtagctgggattacaggtgcccgccaccacggctggctaatttttgtacttttagtrgagatggggttttgccatgttagccaggctggtctcaaactgctgacctcaggtaatccacctcccttggccttccaaagtgctgggattacacgcatga

SEQ ID NO: 189351 - DNA, 201 bp, Homo sapiens
ttgcactggactctgaaaccagtagtggacaagaatagcataaaaaagagactaatagatcagccttacctaataggatgaaatcttaaataaaataccartgaactaaatctttagagcagtgttaaacatttttggtatattttctttcattttttctggattagtggttctgagcatgtgatccaaggacctgtgggg

SEQ ID NO: 189352 - DNA, 201 bp, Homo sapiens
ttgcttgctttccagagcaccaactaggttgtttttgactcttgaccagctttatagttgctttgtgggaagaggatttgtgagccttctcactctgttaygctagaagttagacatcccctgggaagttctcgaacgtgcccctaggtaattctgattggcagccagggttaggcaccagcacacctgggactctttgag

SEQ ID NO: 189353 - DNA, 201 bp, Homo sapiens
tttttatgtatgtatatatgtacatatataattttatgtatctaaaaaatttacacagatagcagtatgccatgtatattctacagcttttttttttttttaaattcacatcaggccgggcacagtggctcaatgcctataatcccagcactttgggaggccgacgcgggtggatcatgaggtcaggagatcgagaccatc

SEQ ID NO: 189354 - DNA, 201 bp, Homo sapiens
aaactttgttatataacaagtcagaaccctttttttttcagttctgtatcaatgaatattttcttctgaaaaactcaactttaaactttgtaattttacakttccattgagattatattgtttatttgttttaagacatatactataactgttttggttttgcttctagaaaaactgattgcttatcaacgagaattcctt

SEQ ID NO: 189355 - DNA, 201 bp, Homo sapiens
tatttttctgaccccaggaggactcctttccacctcttttgcaggttctctcctgcaagctagctcccacactctaggccgtatcttcactagatccacamttctccccattctctcaccacaagcccaaaattctccaggcgctgttgcaaatgaagccccttctttgggaagagatcaggaactgttttatggtaccag

SEQ ID NO: 189356 - DNA, 201 bp, Homo sapiens
aaacgctttttaaaaaatgtgatgagtaaagcttaggtaatatattctatctggtagtttaatgtaaatcgaactcacttctgtcctgcaattacaaaccrggaatagtaatatttgttgtcaataggatgttacacccgtagatctttaagaacgtgtgcctatttctagctctaagacttaaatttggagatttgcact

SEQ ID NO: 189357 - DNA, 201 bp, Homo sapiens
aactgcttgaacctgggaggcagaggttgcagtgagccgagatcatgccattgcattccagcttgggcaacaagagcaaaactctgtcttaaaaataaatwaattaattaaattaaattaataaataaaaaagtaattacaagagcaatgaaaaatacaacccaggtccagcctggaccagcatggtcaaggtctggcatg

SEQ ID NO: 189358 - DNA, 201 bp, Homo sapiens
ttttttctaagtcattaataaaatgttaaaaagtctcagtactaactcttgtgcagctcctctctaattgcacttctgtaactgatttttttaagccacttatctatctatttatttatttagagacagggtctagctctgttgtccaggctggaatgcagtggaacagtcatgacccactgcagcctcagcctcccaggc

SEQ ID NO: 189359 - DNA, 201 bp, Homo sapiens
tttttctaagtcattaataaaatgttaaaaagtctcagtactaactcttgtgcagctcctctctaattgcacttctgtaactgatttttttaagccacttatctatctatttatttatttagagacagggtctagctctgttgtccaggctggaatgcagtggaacagtcatgacccactgcagcctcagcctcccaggct

SEQ ID NO: 189360 - DNA, 201 bp, Homo sapiens
ttttctaagtcattaataaaatgttaaaaagtctcagtactaactcttgtgcagctcctctctaattgcacttctgtaactgatttttttaagccacttatctatctatttatttatttagagacagggtctagctctgttgtccaggctggaatgcagtggaacagtcatgacccactgcagcctcagcctcccaggctc

SEQ ID NO: 189361 - DNA, 201 bp, Homo sapiens
tttctaagtcattaataaaatgttaaaaagtctcagtactaactcttgtgcagctcctctctaattgcacttctgtaactgatttttttaagccacttatctatctatttatttatttagagacagggtctagctctgttgtccaggctggaatgcagtggaacagtcatgacccactgcagcctcagcctcccaggctca

SEQ ID NO: 189362 - DNA, 201 bp, Homo sapiens
tatcatcagcgaggtctttatgacctgtattttgtgctgacctcctatctcatcctgtgacttagaatgcgttaacagtctgggaatgcagtccggtaggwttcagcctcattttacccagctcctattcaagatggagttgttctgtttcacatgcctcttgacatttcccccttcccttttataagagaactcttaatc

SEQ ID NO: 189363 - DNA, 201 bp, Homo sapiens
taattctagtttctagacctttaaacataaagactcaaagtttgtgctctggagttgaatgaagctgtgtttgtgtgacttgcttgcaacatgaacatggwttagttttttaacttatctgaagttcagtttctttatctgtaacatggagaaaacaattggactttatagggctgagacgaataaagaaaataatgctct

SEQ ID NO: 189364 - DNA, 201 bp, Homo sapiens
actgactacttcaggttattctactgtaaagaaggctaagccttcttttccatttgaaaaggaaatagatttaatgggaaagaatatatagtagtgactcrgatttaagatgcttaatcttatttaacatgaacatgactatacatgataacttaaaagtatttctaaagagggtattctacaaatgcacttaatattaat

SEQ ID NO: 189365 - DNA, 201 bp, Homo sapiens
gaatgcagtccggtaggtttcagcctcattttacccagctcctattcaagatggagttgttctgtttcacatgcctcttgacatttcccccttcccttttrtaagagaactcttaatcctaagagttgcagacggatgaaaatccatcttttgtaacttcttcaggctgaatggggccatgatattcctgcctaactgtta

SEQ ID NO: 189366 - DNA, 201 bp, Homo sapiens
ggctggagtgcagtggtgcgatctcagctcgctgcaaactctgcctcccgggttcatgccattctcctgcctcagcctcctgagtagctgggactacaggygcccgccaccacacccggctaattttttgtatttttagtagagacgggatttcaccatgttagccaggatggtcttgatctcctgacctcgtgatccacc

SEQ ID NO: 189367 - DNA, 201 bp, Homo sapiens
ggactacaggtgcccgccaccacacccggctaattttttgtatttttagtagagacgggatttcaccatgttagccaggatggtcttgatctcctgacctygtgatccacccgcctcggccccccaaagtgctgggattacaggcatgagccaccgtgcctagccgactcttgagttttgacaagaggtgatatctgggag

SEQ ID NO: 189368 - DNA, 201 bp, Homo sapiens
caccacacccggctaattttttgtatttttagtagagacgggatttcaccatgttagccaggatggtcttgatctcctgacctcgtgatccacccgcctcrgccccccaaagtgctgggattacaggcatgagccaccgtgcctagccgactcttgagttttgacaagaggtgatatctgggagattaataagtatttagt

SEQ ID NO: 189369 - DNA, 201 bp, Homo sapiens
gccttcttttccatttgaaaaggaaatagatttaatgggaaagaatatatagtagtgactcagatttaagatgcttaatcttatttaacatgaacatgackatacatgataacttaaaagtatttctaaagagggtattctacaaatgcacttaatattaattttctaattatttgcatatatctttcttttaggatcctt

SEQ ID NO: 189370 - DNA, 201 bp, Homo sapiens
gaagggcctaaagattggtcctgacatatgaacctctttgaggctaagctggtactaaagtagaccccaaagatgaagttggttttaatatagaaacttaytacttctaattagaagagagaacgtgttcctcgttaaatacctgtttacatttcagacaccaaataaaatgtcattttcttaaacctcacaacaatactt

SEQ ID NO: 189371 - DNA, 201 bp, Homo sapiens
catatgaacctctttgaggctaagctggtactaaagtagaccccaaagatgaagttggttttaatatagaaacttattacttctaattagaagagagaacrtgttcctcgttaaatacctgtttacatttcagacaccaaataaaatgtcattttcttaaacctcacaacaatacttttggggagatgttattagtccctc

SEQ ID NO: 189372 - DNA, 201 bp, Homo sapiens
cacagatttaccagggcaaagtttttccccaccctaataagcctgatagtactgcaggagaccagggcgtatctcagtccttacctcaaccacataggacrgacattcccagagcagccatttatagacctccccgtaggaatgcattcctttcccaaggtattaatgttaatattccttgctaggaaaagaatttagcaa

SEQ ID NO: 189373 - DNA, 201 bp, Homo sapiens
caagcactgcagcccgagccaattgcgaaagaccaacaaagcccagcccagcggaaggaacggtttcggagttgtttttctttgatacgggagttcctccwtgctctcgcccctactctttctggtgttagatcgagcaaccctctaaaagcagtttagagtggtaaaaaaaaaaaaaaacacaccaaacgctcgcagcca

SEQ ID NO: 189374 - DNA, 201 bp, Homo sapiens
tccattttgattatataaatcagactgcattacacaaatgcttataaaacaggttgaagaaatgcccttctgttcctagtttgttgagtgtttttatcackaaggaacgttgtatcatgtcaaatgcgtttttgatacctactgagatgatggtgtaggttttttcccttcattttattaaaatggtatatttcactgttt

SEQ ID NO: 189375 - DNA, 201 bp, Homo sapiens
taaagtgcagcgagaataattatttttcacacaggctttttaattggctttgatggaactctgttttataaggaatctcaggtaagacttttttaaagctragccctgccatgggtttgtacccttaaatacctatgagttgggtaaaacacttttcttttgaggtcccaagttaacttgggcctcctggacctgtaagaa

SEQ ID NO: 189376 - DNA, 201 bp, Homo sapiens
agttaaaaaaaattacttcagttttctattggttcagttaattcagttaactcctgttctacttgttattcatgaacattccagctttttatgagagtttygaaagttgttttctttattttaatgttacaatttctaaagttattagcaacctgcatttaagaacatctgctagaattctatagttgattataaaccacc

SEQ ID NO: 189377 - DNA, 201 bp, Homo sapiens
catataccaataacatatttatacaaatatagtccaaagaaagcaaaacactgtttcacatttgagaatgcttcctggatgatttttataccaaataagcraaatttcacctttacattaatgtattattaatgttaaacccaatttttaataaaaccttagagacatatttacccaattttaatgtttaatcctaaggta

SEQ ID NO: 189378 - DNA, 201 bp, Homo sapiens
gcaaacatatagttatgcattgaaaaaatatataattttggctcttaatttaaaataatatatgttaataaatattatgtgcaacatcgttttctatttckgcgtgggataccactgcacatacgtgccactagttattcaatttactcattatcattggtattttgtcactctttcagttgcaaggaacaaaaaacttaa

SEQ ID NO: 189379 - DNA, 201 bp, Homo sapiens
gttcctaggttgaagtgagctatgattgcatcactgcactccagcctaagtgacagataaagactccccaaaaaactccaaaatgcatcagaataactgarggcaatgtctagcacttagtaatctattttagatctgatttttatttatgttgtttttcagtatacagaagcttttaatctcatataatttaatctaaca

SEQ ID NO: 189380 - DNA, 201 bp, Homo sapiens
agtaagagcaagagacgaactgccaaacacctaaaaaaccatcagatcttgtgagaactcccccactatcacgagaacagcatggggaaaactgcccccaygatccagtcacctcccaccagtgccctccctcaacatgtggggattacaattcggattacaattgttgatgagatttgggtggggacacagccaaaccat

SEQ ID NO: 189381 - DNA, 201 bp, Homo sapiens
gagtgccagttggtgcagtcataactcactgcagcctctacctccctgggctcaagtgatcctcctgcctcagcctcctgagtatctaggactacaggtgygtgccaccacactcagctaatttttaaaaattgtttgtagagacagggtctcactctgttgtccaggctgatctcaaactcctgggctcaagcaatcttc

SEQ ID NO: 189382 - DNA, 201 bp, Homo sapiens
gtgatctcttctatttctctccagaaatttttcatcttcccaagatgaaaatctgtacccattaaaacaatatatctccccagccctctctctccccaggkcctggcaacaaccattctattttctgtctctatgaatatgatactctgggtactgcatataagtacattcatatggtatttgttttttgtgtctggctta

SEQ ID NO: 189383 - DNA, 201 bp, Homo sapiens
tcatgtaaggaaatatatttgttcaaaaaagagaagacccaatcaatacaatatactttttttttttttttttgagatagagtctcgcactgttgcccggrctggtgtgcggtggcaaaatcttggcttgctgcaacctctgcctcccggattcaagtgattctcctgcctcagcctcccaagtagctaggattacaggtg

SEQ ID NO: 189384 - DNA, 201 bp, Homo sapiens
ggtgattatcataggtgattctgatagagataacccaagaccacatgtgaaaaacacttcccttggaggtaatctagagattagcctccgaaaggagtacyagatcatactctttacttggttaaaaaataaaattataaaggattaatttgaagataatttttaatgttttctctctttagaaatagctttaatgtcttt

SEQ ID NO: 189385 - DNA, 201 bp, Homo sapiens
ttttcatggcatcagctcactttttgctattgagctctagagttgtttttgtttgtttctttgtttgttttttgttttttttgagacagggtttcactctgttgcccaggctggagtgcagtggcgcaatctcggctcactgcaacctccacctcccaggttcaagcgactcttgtgcctcagcctcccgagtatctgaga

SEQ ID NO: 189386 - DNA, 201 bp, Homo sapiens
ttattatcaatggtaaagtagctaccatttctgagcacctatactaggctagacactacaaatcagttatgttatggtgtctgtaccatactaaagctgtkggttagcaccaaactaaagctgaagcctcggtgaagtattttgtttctgaagactgactctgatttcagtttgggacccactctggaacctgaggaagtg

SEQ ID NO: 189387 - DNA, 201 bp, Homo sapiens
ggtaaatgaaccgagtaatttccacacatttttactttttgtaaagaaagaaatttgtatatttctgcaagtcttgtcttataaatgaatgactctgaagraggatagtttttaagcatctttacataatggaatcatagaacaatgatattaaaggagaccagagttaggttttaggtatttatttaaagatacaacaga

SEQ ID NO: 189388 - DNA, 201 bp, Homo sapiens
atactgaagtatatgaattgctaaatttttttttataattttagaaatccttgagtcttgcttcttccaatgtggttcttggactacacacattacctggragtttgttagaaatacagactctcctgatctcttgagtcagaatttgcatttcaataagttctcctagatgatttgtacgcatattaaaatttgagaagc

SEQ ID NO: 189389 - DNA, 201 bp, Homo sapiens
cagtgtcccaagtagctgggctataggcgtgagctgccacacccagcttagcacacttttaatctttgccagtatgataggaaaaaaacagtacttccatsttatattaatatgatatttttatcattaaattggccaacaataatattttcattcatttaattatttatgtttgagacagggtctcgctctgtcgcccag

SEQ ID NO: 189390 - DNA, 201 bp, Homo sapiens
ggtggggtcgggggagtggggagggatagcattgggagatatacctaatgctagatgacacattagtgggtgcagcgcaccagcatggcacatgtatacakatgtaactaacctgcacaatgtgcacatgtaccctaaaacttagagtataataaaaaaaaaaaaaaaaaaaagaaaaaaaaaaaaatccagaatactaaa

SEQ ID NO: 189391 - DNA, 201 bp, Homo sapiens
aacagcatggtactggtaccaaaacagagatatagatcaatggaacagaacagagccctcagaaataatgccgcatatctacaactatctgatctttgacmaacctgagaaaaacaagcaatggggaaaggattccctatttaataaatggtgctgggaaaactggctagccatatgtagaaagctgaaactggatccctt

SEQ ID NO: 189392 - DNA, 201 bp, Homo sapiens
aactatactacaaggctacagtaaccaaaacagcatggtactggtaccaaaacagagatatagatcaatggaacagaacagagccctcagaaataatgccrcatatctacaactatctgatctttgaccaacctgagaaaaacaagcaatggggaaaggattccctatttaataaatggtgctgggaaaactggctagcca

SEQ ID NO: 189393 - DNA, 201 bp, Homo sapiens
aaaccccatcgtctcagcccaaaatctccttaagctgataagcaacttcagcaaagtctcaggatacaaaatcaatgtacaaaaatcacaagcattcttayacaccaacaacagacaaacagagagccaaatcatgggtgaactcccattcacaattgcttcaaagagaataaaatacctaggaatccaacttacaagggt

SEQ ID NO: 189394 - DNA, 201 bp, Homo sapiens
atatttgagtcaagttttaaagtcatactgtctttcagtagttaaaaacagacatcctattttcaaaagttataattgaattttttaaccttgcccccccctacaaggccgcacagagctgaccttaacgtgggctccagcgccctctcctgacaaaacttactagtgccattaattcctacatattgccaaactcctctc

SEQ ID NO: 189395 - DNA, 201 bp, Homo sapiens
gtacctgagaaatgttgttatttgaccaaggttatagaactagctcatagcaaacccaaaactagaaccgagaactgaacctctcaaatattagtatgttstggaattttccagggagttgttaaaaatgtatatatatactcttgggctccacttccagagattttctttcagtaggttgaaggcagggcctcaaatgca

SEQ ID NO: 189396 - DNA, 201 bp, Homo sapiens
ggagtatattttacttaattgctgcaagctgtaaatagcttaaaagaagtttcctttgaaaaataaaagatcagcaatattttaagcaaagttaaaaaaaattacttcagttttctattggttcagttaattcagttaactcctgttctacttgttattcatgaacattccagctttttatgagagtttcgaaagttgttt

SEQ ID NO: 189397 - DNA, 201 bp, Homo sapiens; identical to SEQ ID NO: 32897

SEQ ID NO: 189398 - DNA, 201 bp, Homo sapiens
gtatttaaaattaatgaaaaatattcagtgtggccacttgaagggttaatttgaaggtaaaattgaagattctaatttttttcctttttttattttttttwttttttttgagacaaggattcgctctgtcacccaggctggatgcagtggcacaatcacagctcgctgcagccttgacctcctgggctcaacctattctcc

SEQ ID NO: 189399 - DNA, 201 bp, Homo sapiens
gagaatcagatattttgaagtagctgttttgaggtggccattttagtatcattttagtatcagaacgttttttttttttgagacagagtcttgctctgttwcccaggctggagtgtagtggcgtgatcttggctcactgcaacctccgcctcctgggttcaagcaatcttcctgcctcagcctctcgagtagctgggatta

SEQ ID NO: 189400 - DNA, 201 bp, Homo sapiens
ttcatggcatcagctcactttttgctattgagctctagagttgtttttgtttgtttctttgtttgttttttgttttttttgagacagggtttcactctgttgcccaggctggagtgcagtggcgcaatctcggctcactgcaacctccacctcccaggttcaagcgactcttgtgcctcagcctcccgagtatctgagatt

SEQ ID NO: 189401 - DNA, 201 bp, Homo sapiens
ttgttgatgagatttgggtggggacacagccaaaccatatcagcttcaataagtgcctaaactttttttaaaaaggtaagaaattttttttaaaattttttaaaaaatttccacagctttctgtcttccaaagcatagattaactggccagaatgtatagctactttgtgtaattgctaattcatacagatttaacagaat

SEQ ID NO: 189402 - DNA, 201 bp, Homo sapiens
ctatctcatcctgtgacttagaatgcgttaacagtctgggaatgcagtccggtaggtttcagcctcattttacccagctcctattcaagatggagttgttytgtttcacatgcctcttgacatttcccccttcccttttataagagaactcttaatcctaagagttgcagacggatgaaaatccatcttttgtaacttctt

SEQ ID NO: 189403 - DNA, 201 bp, Homo sapiens
tagtttgtagccaggcatggtggcatgcttcagtagccccagctactcaggaggctgaagcagcaagattgcttgaggccgggagttctggactgtggtgygctctgcatgtctgcataagttcagaatcaatatggtaccttctggcggtgggcatgaaggagaccaagttgtctaaggaggggtgaaccagccaggttg

SEQ ID NO: 189404 - DNA, 201 bp, Homo sapiens
tgaagagttatgagcaattgtactgtgctgcaaaacattttaaaggaagaattcattttttttttgaagatctgcttattttttatttcttaccaactatmtacagggcactgtccggaattttttctggaggaatttagaacttaaatttgttgcaccggccgggtgcagtggctcacccctgtaatcccagcactttgg

SEQ ID NO: 189405 - DNA, 201 bp, Homo sapiens
ctgggctcaagggctccttgaactcaattgaactcctgggctcaagtcattctcccaacttcagcctctcaaagtgctgggattacaggcatgagtcaccrtgcctggcctaacagttctattttattattattattatttttttagtggagacggagtttcatcatattggtcaggctggtctcgaactcttgacagctg

SEQ ID NO: 189406 - DNA, 201 bp, Homo sapiens
tattatttttttagtggagacggagtttcatcatattggtcaggctggtctcgaactcttgacagctgatccacggccgccaggttctattttaaacacayttaatttaagtcatcccacagggaagcagaacagaaagccaacgttagacagaaatttgggagctgtccaaagatctcaagcccccaagaatctatcaaa

SEQ ID NO: 189407 - DNA, 201 bp, Homo sapiens
aatttaagtcatcccacagggaagcagaacagaaagccaacgttagacagaaatttgggagctgtccaaagatctcaagcccccaagaatctatcaaacaktctttaaaatctatttttaatacacaatttttgttagaaaacaaaagtaagagtgtatattttagaggtcaatgtttaaatttatcagtattaaacaaga

SEQ ID NO: 189408 - DNA, 201 bp, Homo sapiens
acacaatttttgttagaaaacaaaagtaagagtgtatattttagaggtcaatgtttaaatttatcagtattaaacaagagaaccctaattggagtctgaaragagaagagaagggacagatatgtttttcaggttgggaaatggatctgaggaatgaaagtagtgaggataagcttcactaaaactgaaagcagatgttga

SEQ ID NO: 189409 - DNA, 201 bp, Homo sapiens
gtggaggctcacgcctgtaatcccagcactttgggaggccgaggcaagcggatcacgaggtcaagagattgagaccatcctggccaacatggtgaaacccygtctctactaaaaaatacaaaaaaaattagctgggtgtgtggtacgtgcctgtagtcccagctagtcgggaggctgaggcaggggaatcgcttgaacctg

SEQ ID NO: 189410 - DNA, 201 bp, Homo sapiens
ctctcctgacaaaacttactagtgccattaattcctacatattgccaaactcctctccagaaatgctgcactgatttgcactctggaggaaaagtgtgaamagaggctaagatgattctaggctgaatataaacctggctaaggaagggcctaaagattggtcctgacatatgaacctctttgaggctaagctggtactaa

SEQ ID NO: 189411 - DNA, 201 bp, Homo sapiens
ttctggaattttccagggagttgttaaaaatgtatatatatactcttgggctccacttccagagattttctttcagtaggttgaaggcagggcctcaaatrcatccaccctgcctcccatgcgccttcatctcacccatgatgctcatataggtaactatgcctggatgacacttgcagaattgctgacagggtcttctga

SEQ ID NO: 189412 - DNA, 201 bp, Homo sapiens
attgctaaatttttttttataattttagaaatccttgagtcttgcttcttccaatgtggttcttggactacacacattacctgggagtttgttagaaatayagactctcctgatctcttgagtcagaatttgcatttcaataagttctcctagatgatttgtacgcatattaaaatttgagaagcatttctttggagcagt

SEQ ID NO: 189413 - DNA, 201 bp, Homo sapiens
cggattacaattgttgatgagatttgggtggggacacagccaaaccatatcagcttcaataagtgcctaaactttttttaaaaaggtaagaaattttttttaaaattttttaaaaaatttccacagctttctgtcttccaaagcatagattaactggccagaatgtatagctactttgtgtaattgctaattcatacagat

SEQ ID NO: 189414 - DNA, 201 bp, Homo sapiens
caggcaagtttgataacccatctttacctcagtttcctctttggtaaatgaggatcttaatatattttataggggtattatgaagattaaacaaaataatyatttagaataggccaggtactgtggctcacacttataatcccagcgccgtgagagactgaggcaaaagtatgacttaaccccaggagtttgaaaccagcc

SEQ ID NO: 189415 - DNA, 201 bp, Homo sapiens
aaatttctgtccttataattactgctaggcaagaattccgtcttgttttactttgcttttatatgaattattcctaaagtaaatcatttttatatgcctayatctactggcatttttatattatgatttttccatgaatgccctttagccatttatctattagagtattgtcttattcctttataaaagttgccatatatt

SEQ ID NO: 189416 - DNA, 201 bp, Homo sapiens
gtagctgggactacaggtgcccgccaccatgcccagctaattttttgtatttttagtagagacggggtttcactgtgttagccaggatggtctcgatctcytgacctcgtgatccgcccgccttggcctcccagagtgccaggattacaggcatgagccaccatgcccggccgaaagcaagtttattaagaaagtagagga

SEQ ID NO: 189417 - DNA, 201 bp, Homo sapiens
acgatcctgtgcatgcctaaccctgtcacccatagccatcagcaaagagtacaaaggcagattaatccaaagagaacagcagttaacatcccatagtgccraacctgttcttagctgaaagggactttactgagagggtcctctaaccccctaaatcttattcattttatttattattttattatattttatttttgagat

SEQ ID NO: 189418 - DNA, 201 bp, Homo sapiens
gtagagatgggggttttgccatgtgggccaggctgatctcaaactcctgacctcaagcgatccgcctgcctcggcctcccaaagtgttgggattacagtcrtgagccaccgcacccggcccatccttttatatttaataaatcctactatctttgctactccattttgattatataaatcagactgcattacacaaatgct

SEQ ID NO: 189419 - DNA, 201 bp, Homo sapiens
ccatgcccagctaatttttctatttttagtagagatgggggttttgccatgtgggccaggctgatctcaaactcctgacctcaagcgatccgcctgcctckgcctcccaaagtgttgggattacagtcgtgagccaccgcacccggcccatccttttatatttaataaatcctactatctttgctactccattttgattat

SEQ ID NO: 189420 - DNA, 201 bp, Homo sapiens
caagtattttgatttttaaaagaaaacaattagctagctaatatattctgtcaacccaaatagccaatttataagcatgaaaagttgccagtatgggaacrctcagtaaaactgagttctgaacattagcttgtaacaaaatgttatttaaaagaaaaatctggggccaggcatggtggctgacacctgtaatcccccagg

SEQ ID NO: 189421 - DNA, 201 bp, Homo sapiens
aagtgctgggattacaggtgtgagccactgtgcccggcctacaaatagtctttttttaaaaatatttttctttctttttgagacagagtcttgctctgtcrcccaggcgggcgtgcaatggtgcaatctcagctcactgcaacctccacctcccaggtgcaagcaatcctcccagttcaaccttccgagtagctgggacta

SEQ ID NO: 189422 - DNA, 201 bp, Homo sapiens
tgggatgaaatgagaggaaaaataagagtattgatccttttccctgtaattcagccctcatctatcattgtcctgagttactacagccacagaaaataatytattctagctctagtagcctatcttaggaaaaaaattttaatttcttttcagagttttagttcaacagttttaatgattaatatgaagaatgcaagataa
